(19) United States
(12) Patent Application Publication
(10) Pub. No.: US 2007/0277269 A1
(43) Pub. Date: Nov. 29, 2007

(54) Nucleotide sequences and polypeptides encoded thereby useful for modifying plant characteristics

(75) Inventors: Nickolai Alexandrov, Thousand Oaks, CA (US); Vyacheslav Brover, Simi Valley, CA (US); Kenneth A. Feldmann, Newbury Park, CA (US); Timothy J. Swaller, Thousand Oaks, CA (US)

Correspondence Address: BIRCH STEWART KOLASCH & BIRCH, PO BOX 747, FALLS CHURCH, VA, 22040-0747, US

(73) Assignee: CERES, INC., Thousnad Oaks, CA (US)

(21) Appl. No.: 11/787,902

(22) Filed: Apr. 17, 2007

Related U.S. Application Data
(60) Provisional application No. 60/792,722, filed on Apr. 17, 2006.

(51) Int. Cl. A01H 1/00; C07H 21/04; C07K 14/415; C12N 15/00; C12N 5/04; C12Q 1/68

(52) U.S. Cl. 800/290; 435/320.1; 435/419; 435/468; 435/6; 530/370; 536/23.6; 800/288

(57) ABSTRACT

Isolated polynucleotides and polypeptides encoded thereby are described, together with the use of those products for making transgenic plants.

[0001] This non-provisional application claims priority under 35 U.S.C. § 119(e) on U.S. Provisional application No. 60/792,722 filed on Apr. 17, 2006, the entire contents of which are hereby incorporated by reference.

### FIELD OF THE INVENTION

[0002] The present invention relates to isolated polynucleotides, polypeptides encoded thereby, and the use of those products for making transgenic plants.

### BACKGROUND OF THE INVENTION

[0003] There are more than 300,000 species of plants. They show a wide diversity of forms, ranging from delicate liverworts, adapted for life in a damp habitat, to cacti, capable of surviving in the desert. The plant kingdom includes herbaceous plants, such as corn, whose life cycle is measured in months, to the giant redwood tree, which can live for thousands of years. This diversity reflects the adaptations of plants to survive in a wide range of habitats. This is seen most clearly in the flowering plants (phylum Angiospermophyta), which are the most numerous, with over 250,000 species. They are also the most widespread, being found from the tropics to the arctic.

[0004] The process of plant breeding involving man's intervention in natural breeding and selection is some 20,000 years old. It has produced remarkable advances in adapting existing species to serve new purposes. The world's economics was largely based on the successes of agriculture for most of these 20,000 years.

[0005] Plant breeding involves choosing parents, making crosses to allow recombination of gene (alleles) and searching for and selecting improved forms. Success depends on the genes/alleles available, the combinations required and the ability to create and find the correct combinations necessary to give the desired properties to the plant. Molecular genetics technologies are now capable of providing new genes, new alleles and the means of creating and selecting plants with the new, desired characteristics.

[0006] To summarize, molecular genetic technologies provide the ability to modulate and manipulate growth, development and biochemistry of the entire plant as well as at the cell, tissue and organ levels. Thus, plant morphology, development and biochemistry are altered to maximize or minimize the desired plant trait.

### SUMMARY OF THE INVENTION

[0007] The present invention, therefore, relates to isolated polynucleotides, polypeptides encoded thereby, and the use of those products for making transgenic organisms, such as plants, bacteria, yeast, fungi and mammals, depending upon the desired characteristics.

[0008] In the field of agriculture and forestry efforts are constantly being made to produce plants with improved characteristics, such as increased overall yield or increased yield of biomass or chemical components, in particular in order to guarantee the supply of the constantly increasing world population with food and to guarantee the supply of reproducible raw materials. Conventionally, people try to obtain plants with an increased yield by breeding, but this is time-consuming and labor-intensive. Furthermore, appropriate breeding programs must be performed for each relevant plant species.

[0009] Over the last two decades, progress has been made by the genetic manipulation of plants. That is, by introducing into plants recombinant nucleic acid molecules and expressing them as exogenous genes or using them to silence endogenous genes within these plants. Such approaches have the advantage of not usually being limited to one plant species, but being transferable to other plant species and other organisms as well. EP-A 0 511 979, for example, discloses that the expression of a prokaryotic asparagine synthetase in plant cells inter alia leads to an increase in biomass production. Similarly, WO 96/21737 describes the production of plants with increased yield from the expression of deregulated or unregulated fructose-1,6-bisphosphatase due to an increased rate of the photosynthesis. Nevertheless, there is still a need for generally applicable processes that lead to improved characteristics (such as yield) in relevant plants associated with a wide array of industrial purposes.

### DETAILED DESCRIPTION OF THE INVENTION

1. Definitions

[0010] The following terms are utilized throughout this application:

[0011] Domain: Domains are fingerprints or signatures that can be used to characterize protein families and/or parts of proteins. Such fingerprints or signatures can comprise conserved (1) primary sequence, (2) secondary structure, and/or (3) three-dimensional conformation. Generally, each domain has been associated with either a family of proteins or motifs. Typically, these families and/or motifs have been correlated with specific in-vitro and/or in-vivo activities. A domain can be any length, including the entirety of the sequence of a protein. Detailed descriptions of the domains, associated families and motifs, and correlated activities of the polypeptides of the instant invention are described below. Usually, the polypeptides with designated domain(s) can exhibit at least one activity that is exhibited by any polypeptide that comprises the same domain(s). Domains also define areas of non-coding sequences such as promoters and miRNAs.

Endogenous: The term “endogenous,” within the context of the current invention refers to any polynucleotide, polypeptide or protein sequence which is a natural part of a cell or organism regenerated from said cell.

[0012] Exogenous: “Exogenous,” as referred to within, is any polynucleotide, polypeptide or protein sequence, whether chimeric or not, that is initially or subsequently introduced into the genome of an individual host cell or the organism regenerated from said host cell by any means other than by a sexual cross. Examples of means by which this can be accomplished are described below, and include Agrobacterium-mediated transformation (of dicots—e.g. Salomon et al. (1984) EMBO J. 3:141; Herrera-Estrella et al. (1983) EMBO J. 2:987; of monocots, representative papers are those by Escudero et al. (1996) Plant J 10:355; Ishida et al. (1996) Nature Biotechnology 14:745; May et al. (1995) Bio/Technology 13:486), biolistic methods (Armaleo et al. (1990) Current Genetics 17:97), electroporation, in planta techniques, and the like. The term “exogenous” as used herein is also intended to encompass inserting a naturally found element into a non-naturally found location.

[0013] Functionally Comparable Proteins or Functional Homologs: This phrase describes a set of proteins that perform similar functions within an organism. By definition, perturbation of an individual protein within that set (through misexpression or mutation, for example) is expected to confer a similar phenotype as compared to perturbation of any other individual protein. Such proteins typically share sequence similarity resulting in similar biochemical activity. Within this definition, homologs, orthologs and paralogs are considered to be functionally comparable.

[0014] Functionally comparable proteins will give rise to the same characteristic to a similar, but not necessarily the same, degree. Typically, comparable proteins give the same characteristics where the quantitative measurement due to one of the comparables is at least 20% of the other; more typically, between 30 to 40%; even more typically, between 50-60%; even more typically between 70 to 80%; even more typically between 90 to 100% of the other.

[0015] Gene: The term “gene,” as used in the context of the current invention, encompasses all regulatory and coding sequence contiguously associated with a single hereditary unit with a genetic function. Genes can include non-coding sequences that modulate the genetic function that include, but are not limited to, those that specify polyadenylation, transcriptional regulation, DNA conformation, chromatin conformation, extent and position of base methylation and binding sites of proteins that control all of these. Genes comprised of “exons” (coding sequences), which may be interrupted by “introns” (non-coding sequences), encode proteins. A gene's genetic function may require only RNA expression or protein production, or may only require binding of proteins and/or nucleic acids without associated expression. In certain cases, genes adjacent to one another may share sequence in such a way that one gene will overlap the other. A gene can be found within the genome of an organism, artificial chromosome, plasmid, vector, etc., or as a separate isolated entity.

[0016] Heterologous sequences: “Heterologous sequences” are those that are not operatively linked or are not contiguous to each other in nature. For example, a promoter from corn is considered heterologous to an Arabidopsis coding region sequence. Also, a promoter from a gene encoding a growth factor from corn is considered heterologous to a sequence encoding the corn receptor for the growth factor. Regulatory element sequences, such as UTRs or 3′ end termination sequences that do not originate in nature from the same gene as the coding sequence, are considered heterologous to said coding sequence. Elements operatively linked in nature and contiguous to each other are not heterologous to each other. On the other hand, these same elements remain operatively linked but become heterologous if other filler sequence is placed between them. Thus, the promoter and coding sequences of a corn gene expressing an amino acid transporter are not heterologous to each other, but the promoter and coding sequence of a corn gene operatively linked in a novel manner are heterologous.

[0017] Homologous gene: In the current invention, “homologous gene” refers to a gene that shares sequence similarity with the gene of interest. This similarity may be in only a fragment of the sequence and often represents a functional domain such as, examples including without limitation a DNA binding domain, a domain with tyrosine kinase activity, or the like. The functional activities of homologous genes are not necessarily the same.

[0018] Misexpression: The term “misexpression” refers to an increase or a decrease in the transcription of a coding region into a complementary RNA sequence as compared to the parental wild-type. This term also encompasses expression of a gene or coding region for a different time period as compared to the wild-type and/or from a non-natural location within the plant genome.

Native: As used herein, the term “native” refers to those sequences that are contiguous and/or operably linked in a wildtype plant.

[0019] Percentage of sequence identity: As used herein, the term “percent sequence identity” refers to the degree of identity between any given query sequence and a subject sequence. A subject sequence typically has a length that is from about 80 percent to 250 percent of the length of the query sequence, e.g., 82, 85, 87, 89, 90, 93, 95, 97, 99, 100, 105, 110, 115, or 120, 130, 140, 150, 160, 170, 180, 190, 200, 210, 220, 230, 240, or 250 percent of the length of the query sequence. A query nucleic acid or amino acid sequence is aligned to one or more subject nucleic acid or amino acid sequences using the computer program ClustalW (version 1.83, default parameters), which allows alignments of nucleic acid or protein sequences to be carried out across their entire length (global alignment). Chenna et al. (2003) Nucleic Acids Res. 31(13):3497-500.

[0020] ClustalW calculates the best match between a query and one or more subject sequences, and aligns them so that identities, similarities and differences can be determined. Gaps of one or more residues can be inserted into a query sequence, a subject sequence, or both, to maximize sequence alignments. For fast pairwise alignment of nucleic acid sequences, the following default parameters are used: word size: 2; window size: 4; scoring method: percentage; number of top diagonals: 4; and gap penalty: 5. For an alignment of multiple nucleic acid sequences, the following parameters are used: gap opening penalty: 10.0; gap extension penalty: 5.0; and weight transitions: yes. For fast pairwise alignment of protein sequences, the following parameters are used: word size: 1; window size: 5; scoring method: percentage; number of top diagonals: 5; gap penalty: 3. For multiple alignment of protein sequences, the following parameters are used: weight matrix: blosum; gap opening penalty: 10.0; gap extension penalty: 0.05; hydrophilic gaps: on; hydrophilic residues: Gly, Pro, Ser, Asn, Asp, Gln, Glu, Arg, and Lys; residue-specific gap penalties: on. The output is a sequence alignment that reflects the relationship between sequences. ClustalW can be run, for example, at the Baylor College of Medicine Search Launcher website and at the European Bioinformatics Institute website on the World Wide Web.

[0021] To determine a percent identity for polypeptide or nucleic acid sequences between a query and a subject sequence, the sequences are aligned using Clustal W and the number of identical matches in the alignment is divided by the query length, and the result is multiplied by 100. The output is the percent identity of the subject sequence with respect to the query sequence. It is noted that the percent identity value can be rounded to the nearest tenth. For example, 78.11, 78.12, 78.13, and 78.14 are rounded down to 78.1, while 78.15, 78.16, 78.17, 78.18, and 78.19 are rounded up to 78.2.

[0022] Regulatory Sequence The term “regulatory sequence,” as used in the current invention, refers to any nucleotide sequence that influences transcription or translation initiation and rate, and stability and/or mobility of the transcript or polypeptide product. Regulatory sequences include, but are not limited to, promoters, promoter control elements, protein binding sequences, 5′ and 3′ UTRs, transcriptional start site, termination sequence, polyadenylation sequence, introns, certain sequences within a coding sequence, etc.

[0023] Stringency: “Stringency,” as used herein is a function of nucleic acid molecule probe length, nucleic acid molecule probe composition (G+C content), salt concentration, organic solvent concentration and temperature of hybridization and/or wash conditions. Stringency is typically measured by the parameter Tₘ, which is the temperature at which 50% of the complementary nucleic acid molecules in the hybridization assay are hybridized, in terms of a temperature differential from Tₘ. High stringency conditions are those providing a condition of Tₘ−5° C. to Tₘ−10° C. Medium or moderate stringency conditions are those providing Tₘ−20° C. to Tₘ−29° C. Low stringency conditions are those providing a condition of Tₘ−40° C. to Tₘ−48° C. The relationship between hybridization conditions and Tₘ (in ° C.) is expressed in the mathematical equation:
Tₘ=81.5−16.6(log₁₀[Na⁺])+0.41(% G+C)−(600/N) (I)
where N is the number of nucleotides of the nucleic acid molecule probe. This equation works well for probes 14 to 70 nucleotides in length that are identical to the target sequence. The equation below, for Tₘ of DNA-DNA hybrids, is useful for probes having lengths in the range of 50 to greater than 500 nucleotides, and for conditions that include an organic solvent (formamide):
Tₘ=81.5+16.6 log {[Na⁺]/(1+0.7[Na⁺])}+0.41(% G+C)−500/L0.63(% formamide) (II)
where L represents the number of nucleotides in the probe in the hybrid (Bonner et al. (1973) J. Mol. Biol. 81:123). The Tₘ of Equation II is affected by the nature of the hybrid: for DNA-RNA hybrids, Tₘ is 10-15° C. higher than calculated; for RNA-RNA hybrids, Tₘ is 20-25° C. higher. Because the Tₘ decreases about 1° C. for each 1% decrease in homology when a long probe is used (Frischauf et al. (1983) J. Mol Biol, 170: 827-842), stringency conditions can be adjusted to favor detection of identical genes or related family members.

[0024] Equation II is derived assuming the reaction is at equilibrium. Therefore, hybridizations according to the present invention are most preferably performed under conditions of probe excess and allowing sufficient time to achieve equilibrium. The time required to reach equilibrium can be shortened by using a hybridization buffer that includes a hybridization accelerator such as dextran sulfate or another high volume polymer.

[0025] Stringency can be controlled during the hybridization reaction, or after hybridization has occurred, by altering the salt and temperature conditions of the wash solutions. The formulas shown above are equally valid when used to compute the stringency of a wash solution. Preferred wash solution stringencies lie within the ranges stated above; high stringency is 5-8° C. below Tₘ, medium or moderate stringency is 26-29° C. below Tₘ and low stringency is 45-48° C. below Tₘ.

[0026] Substantially free of: A composition containing A is “substantially free of” B when at least 85% by weight of the total A+B in the composition is A. Preferably, A comprises at least about 90% by weight of the total of A+B in the composition, more preferably at least about 95% or even 99% by weight. For example, a plant gene or DNA sequence can be considered substantially free of other plant genes or DNA sequences.

Translational start site: In the context of the current invention, a “translational start site” is usually an ATG in the cDNA transcript, more usually the first ATG. A single cDNA, however, may have multiple translational start sites.

[0027] Transcription start site: “Transcription start site” is used in the current invention to describe the point at which transcription is initiated. This point is typically located about 25 nucleotides downstream from a TFIID binding site, such as a TATA box. Transcription can initiate at one or more sites within the gene, and a single gene may have multiple transcriptional start sites, some of which may be specific for transcription in a particular cell-type or tissue.

[0028] Untranslated region (UTR): A “UTR” is any contiguous series of nucleotide bases that is transcribed, but is not translated. These untranslated regions may be associated with particular functions such as increasing mRNA message stability. Examples of UTRs include, but are not limited to polyadenylation signals, terminations sequences, sequences located between the transcriptional start site and the first exon (5′ UTR) and sequences located between the last exon and the end of the mRNA (3′ UTR).

[0029] Variant: The term “variant” is used herein to denote a polypeptide or protein or polynucleotide molecule that differs from others of its kind in some way. For example, polypeptide and protein variants can consist of changes in amino acid sequence and/or charge and/or post-translational modifications (such as glycosylation, etc).

2. Important Characteristics of the Polynucleotides of The Invention

[0030] The genes and polynucleotides of the present invention are of interest because when they are misexpressed (i.e. when over expressed at a non-natural location or in an increased amount) or when they allow silencing of endogenous genes, they produce plants with important modified characteristics as discussed below. These traits can be used to exploit or maximize plant products or to minimize undesirable characteristics. For example, an increase in plant height is beneficial in species grown or harvested for their main stem or trunk, such as ornamental cut flowers, fiber crops (e.g. flax, kenaf, hesperaloe, hemp) and wood producing trees. Increase in inflorescence thickness is also desirable for some ornamentals, while increases in the number, shape and size of leaves can lead to increased production/harvest from leaf crops such as lettuce, spinach, cabbage, swich grass and tobacco. Likewise, a decrease in plant height is beneficial in species that are particularly susceptible to lodging or uprooting due to wind stress.

[0031] The polynucleotides and polypeptides of the invention were isolated from different plant species as noted in the Sequence Listing. The polynucleotides and polypeptides are useful to confer on transgenic plants the properties identified for each sequence in the relevant portion (miscellaneous feature section) of the Sequence Listing. The miscellaneous feature section of the sequence listing contains, for each sequence, a description of the domain or other characteristic from which the sequence has the function known in the art for other sequences. Some identified domains are indicated with “PFam Name”, signifying that the pfam name and description can be found in the pfam database available via the internet. Other domains are indicated by reference to a “GI Number” from the public sequence database maintained by GenBank under the NCBI, including the non-redundant (NR) database.

[0032] The sequences of the invention can be applied to substrates for use in microarray applications such as, but not limited to, assays of global gene expression under varying development and growth conditions. The microarrays are also used for diagnostic or forensic purposes. Arrays can be produced using different procedures such as those from Affymetrix or Agilent. Protocols for these procedures can be obtained from these companies or found via the internet.

[0033] The polynucleotides, or fragments thereof, can also be used as probes and primers. Probe length varies depending on the application. For use as primers, probes are 12-40 nucleotides, preferably 18-30 nucleotides long. For use in mapping, probes are preferably 50 to 500 nucleotides, preferably 100-250 nucleotides long. For Southern hybridizations, probes as long as several kilobases are used.

[0034] The probes and/or primers are produced by synthetic procedures such as the triester method of Matteucci et al. (1981) J. Am. Chem. Soc. 103:3185 or according to Urdea et al. (1981) Proc. Natl. Acad. 80:7461 or using commercially available automated oligonucleotide synthesizers.

[0035] The polynucleotides of the invention can be utilized in a number of methods known to those skilled in the art as probes and/or primers to isolate and detect polynucleotides including, without limitation: Southerns, Northerns, Branched DNA hybridization assays, polymerase chain reaction microarray assays and variations thereof. Specific methods given by way of examples, and discussed below include:

[0036] Hybridization

[0037] Methods of Mapping

[0038] Southern Blotting

[0039] Isolating cDNA from Related Organisms

[0040] Isolating and/or Identifying Homologous and Orthologous Genes.

Also, the nucleic acid molecules of the invention can be used in other methods, such as high density oligonucleotide hybridizing assays, described, for example, in U.S. Pat. Nos. 6,004,753 and 5,945,306.

[0041] The polynucleotides or fragments thereof of the present invention can be used as probes and/or primers for detection and/or isolation of related polynucleotide sequences through hybridization. Hybridization of one nucleic acid to another constitutes a physical property that defines the polynucleotide of the invention and the identified related sequences. Also, such hybridization imposes structural limitations on the pair. A good general discussion of the factors for determining hybridization conditions is provided by Sambrook et al. (“Molecular Cloning, a Laboratory Manual, 2nd ed., c. 1989 by Cold Spring Harbor Laboratory Press, Cold Spring Harbor, N.Y.; see esp., chapters 11 and 12). Additional considerations and details of the physical chemistry of hybridization are provided by G. H. Keller and M. M. Manak “DNA Probes”, 2^{nd} Ed. pp. 1-25, c. 1993 by Stockton Press, New York, N.Y.

[0042] When using the polynucleotides to identify homologous genes in other species, the practitioner will preferably adjust the amount of target DNA of each species so that, as nearly as is practical, the same number of genome equivalents are present for each species examined. This prevents faint signals from species having large genomes, and thus small numbers of genome equivalents per mass of DNA, from erroneously being interpreted as absence of the corresponding gene in the genome.

[0043] The probes and/or primers of the instant invention can also be used to detect or isolate nucleotides that are “identical” to the probes or primers. Two nucleic acid sequences or polypeptides are said to be “identical” if the sequence of nucleotides or amino acid residues, respectively, in the two sequences is the same when aligned for maximum correspondence as described below.

[0044] Isolated polynucleotides within the scope of the invention also include allelic variants of the specific sequences presented in the Sequence Listing. The probes and/or primers of the invention are also used to detect and/or isolate polynucleotides exhibiting at least 80% sequence identity with the sequences of the Sequence Listing or fragments thereof. Related polynucleotide sequences can also be identified according to the methods described in U.S. Patent Publication 20040137466A1, dated Jul. 15, 2004 to Jofuku et al.

[0045] With respect to nucleotide sequences, degeneracy of the genetic code provides the possibility to substitute at least one nucleotide of the nucleotide sequence of a gene with a different nucleotide without changing the amino acid sequence of the polypeptide. Hence, the DNA of the present invention also has any base sequence that has been changed from a sequence in the Sequence Listing by substitution in accordance with degeneracy of genetic code. References describing codon usage include: Carels et al. (1998) J. Mol. Evol. 46: 45 and Fennoy et al. (1993) Nucl. Acids Res. 21(23): 5294.

[0046] The polynucleotides of the invention are also used to create various types of genetic and physical maps of the genome of the plant species listed in the Sequence Listing. Some are absolutely associated with particular phenotypic traits, allowing construction of gross genetic maps. Creation of such maps is based on differences or variants, generally referred to as polymorphisms, between different parents used in crosses. Common methods of detecting polymorphisms that can be used are restriction fragment length polymorphisms (RFLPs, single nucleotide polymorphisms (SNPs) or simple sequence repeats (SSRs).

[0047] The use of RFLPs and of recombinant inbred lines for such genetic mapping is described for Arabidopsis by Alonso-Blanco et al. (Methods in Molecular Biology, vol. 82, “Arabidopsis Protocols”, pp. 137-146, J. M. Martinez-Zapater and J. Salinas, eds., c. 1998 by Humana Press, Totowa, N.J.) and for corn by Burr (“Mapping Genes with Recombinant Inbreds”, pp. 249-254. In Freeling, M. and V. Walbot (Ed.), The Maize Handbook, c. 1994 by Springer-Verlag New York, Inc.: New York, N.Y., USA; Berlin Germany; Burr et al. Genetics (1998) 118: 519; Gardiner, J. et al. (1993) Genetics 134: 917). This procedure, however, is not limited to plants and is used for other organisms (such as yeast) or for individual cells.

[0048] The polynucleotides of the present invention are also used for simple sequence repeat (SSR) mapping. Rice SSR mapping is described by Morgante et al. (The Plant Journal (1993) 3: 165), Panaud et al. (Genome (1995) 38: 1170); Senior et al. (Crop Science (1996) 36: 1676), Taramino et al. (Genome (1996) 39: 277) and Ahn et al. (Molecular and General Genetics (1993) 241: 483-90). SSR mapping is achieved using various methods. In one instance, polymorphisms are identified when sequence specific probes contained within a polynucleotide flanking an SSR are made and used in polymerase chain reaction (PCR) assays with template DNA from two or more individuals of interest. Here, a change in the number of tandem repeats between the SSR-flanking sequences produces differently sized fragments (U.S. Pat. No. 5,766,847). Alternatively, polymorphisms are identified by using the PCR fragment produced from the SSR-flanking sequence specific primer reaction as a probe against Southern blots representing different individuals (U. H. Refseth et al. (1997) Electrophoresis 18: 1519).

[0049] The polynucleotides of the invention can further be used to identify certain genes or genetic traits using, for example, known AFLP technologies, such as in EP0534858 and U.S. Pat. No. 5,878,215.

[0050] The polynucleotides of the present invention are also used for single nucleotide polymorphism (SNP) mapping.

[0051] Genetic and physical maps of crop species have many uses. For example, these maps are used to devise positional cloning strategies for isolating novel genes from the mapped crop species. In addition, because the genomes of closely related species are largely syntenic (i.e. they display the same ordering of genes within the genome), these maps are used to isolate novel alleles from relatives of crop species by positional cloning strategies.

[0052] The various types of maps discussed above are used with the polynucleotides of the invention to identify Quantitative Trait Loci (QTLs). Many important crop traits, such as the solids content of tomatoes, are quantitative traits and result from the combined interactions of several genes. These genes reside at different loci in the genome, often times on different chromosomes, and generally exhibit multiple alleles at each locus. The polynucleotides of the invention are used to identify QTLs and isolate specific alleles as described by de Vicente and Tanksley (Genetics (1993) 134:585). Once a desired allele combination is identified, crop improvement is accomplished either through biotechnological means or by directed conventional breeding programs (for review see Tanksley and McCouch (1997) Science 277:1063). In addition to isolating QTL alleles in present crop species, the polynucleotides of the invention are also used to isolate alleles from the corresponding QTL of wild relatives.

[0053] In another embodiment, the polynucleotides are used to help create physical maps of the genome of the plant species mentioned in the Sequence Listing and related species thereto. Where polynucleotides are ordered on a genetic map, as described above, they are used as probes to discover which clones in large libraries of plant DNA fragments in YACs, BACs, etc. contain the same polynucleotide or similar sequences, thereby facilitating the assignment of the large DNA fragments to chromosomal positions. Subsequently, the large BACs, YACs, etc. are ordered unambiguously by more detailed studies of their sequence composition (e.g. Marra et al. (1997) Genomic Research 7:1072-1084) and by using their end or other sequences to find the identical sequences in other cloned DNA fragments. The overlapping of DNA sequences in this way allows building large contigs of plant sequences to be built that, when sufficiently extended, provide a complete physical map of a chromosome. Sometimes the polynucleotides themselves provide the means of joining cloned sequences into a contig. All scientific and patent publications cited in this paragraph are hereby incorporated by reference.

[0054] U.S. Pat. Nos. 6,287,778 and 6,500,614, both hereby incorporated by reference, describe scanning multiple alleles of a plurality of loci using hybridization to arrays of oligonucleotides. These techniques are useful for each of the types of mapping discussed above.

[0055] Following the procedures described above and using a plurality of the polynucleotides of the present invention, any individual is genotyped. These individual genotypes are used for the identification of particular cultivars, varieties, lines, ecotypes and genetically modified plants or can serve as tools for subsequent genetic studies involving multiple phenotypic traits.

[0056] Identification and isolation of orthologous genes from closely related species and alleles within a species is particularly desirable because of their potential for crop improvement. Many important crop traits result from the combined interactions of the products of several genes residing at different loci in the genome. Generally, alleles at each of these loci make quantitative differences to the trait. Once a more favorable allele combination is identified, crop improvement is accomplished either through biotechnological means or by directed conventional breeding programs (Tanksley et al. (1997) Science 277:1063).

4. Use of the Genes to Make Transgenic Plants

[0057] To use the sequences of the present invention or a combination of them or parts and/or mutants and/or fusions and/or variants of them, recombinant DNA constructs are prepared which comprise the polynucleotide sequences of the invention inserted into a vector, and which are suitable for transformation of plant cells. The construct is made using standard recombinant DNA techniques (Sambrook et al. 1989) and is introduced to the species of interest by Agrobacterium-mediated transformation or by other means of transformation as referenced below.

[0058] The sequences of the present invention can be in sense orientation or in anti-sense orientation.

[0059] If a decrease in the transcription or translation product of an endogenous gene (gene silencing) is desired, the sequence of interest is transcribed as an antisense nucleic acid or an interfering RNA similar or identical to part of the endogenous gene. Antisense nucleic acids or interfering RNAs are about 10 nucleotides to about 2,500 nucleotides in length. For example, the nucleic acid of the present invention can be used as an antisense nucleic acid to its corresponding endogenous gene. Alternatively, the transcription product of a nucleic acid of the invention can be similar or identical to the sense coding sequence of its corresponding endogenous gene, but is an RNA that is unpolyadenylated, lacks a 5′ cap structure, or contains an unsplicable intron. The nucleic acid of the present invention in sense orientation can also be used as a partial or full-length coding sequence that results in inhibition of the expression of an endogenous polypeptide by co-suppression. Methods of co-suppression using a full-length cDNA sequence as well as a partial cDNA sequence are known in the art (see, for example, U.S. Pat. No. 5,231,020).

[0060] Alternatively, a nucleic acid can be transcribed into a ribozyme that affects expression of an mRNA (see U.S. Pat. No. 6,423,885). Heterologous nucleic acids can encode ribozymes designed to cleave particular mRNA transcripts, thus preventing expression of a polypeptide. Hammerhead ribozymes are useful for destroying particular mRNAs, although various ribozymes that cleave mRNA at site-specific recognition sequences can be used. Hammerhead ribozymes cleave mRNAs at locations dictated by flanking regions that form complementary base pairs with the target mRNA. The sole requirement is that the target RNA contains a 5′-UG-3′ nucleotide sequence. The construction and production of hammerhead ribozymes is known in the art (see, for example, U.S. Pat. No. 5,254,678). Hammerhead ribozyme sequences can be embedded in a stable RNA such as a transfer RNA (tRNA) to increase cleavage efficiency in vivo (Perriman et al. (1995) Proc. Natl. Acad. Sci. USA, 92(13):6175-6179; de Feyter and Gaudron Methods in Molecular Biology, Vol. 74, Chapter 43, “Expressing Ribozymes in Plants”, Edited by Turner, P. C, Humana Press Inc., Totowa, N.J.). RNA endoribonucleases such as the one that occurs naturally in Tetrahymena thermophila and which have been described extensively by Cech and collaborators can also be useful (see, for example, U.S. Pat. No. 4,987,071).

[0061] A nucleic acid of the present invention can also be used for its transcription into an interfering RNA. Such an RNA can be one that can anneal to itself, for example a double stranded RNA having a stem-loop structure. One strand of the stem portion of a double stranded RNA can comprise a sequence that is similar or identical to the sense coding sequence of an endogenous polypeptide and that is about 10 nucleotides to about 2,500 nucleotides in length. Generally, the length of the nucleic acid sequence that is similar or identical to the sense coding sequence can be from 10 nucleotides to 500 nucleotides, from 15 nucleotides to 300 nucleotides, from 20 nucleotides to 100 nucleotides, or from 25 nucleotides to 100 nucleotides. The other strand of the stem portion of a double stranded RNA can comprise an antisense sequence of an endogenous polypeptide and can have a length that is shorter, the same as, or longer than the length of the corresponding sense sequence. The loop portion of a double stranded RNA can be from 10 nucleotides to 500 nucleotides in length, for example from 15 nucleotides to 100 nucleotides, from 20 nucleotides to 300 nucleotides or from 25 nucleotides to 400 nucleotides in length. The loop portion of the RNA can include an intron (see, for example the following publications: WO 98/53083; WO 99/32619; WO 98/36083; WO 99/53050; US 20040214330; US 20030180945; U.S. Pat. No. 5,034,323; U.S. Pat. No. 6,452,067; U.S. Pat. No. 6,777,588; U.S. Pat. No. 6,573,099 and U.S. Pat. No. 6,326,527). Interfering RNA also can be constructed as described in Brummell, et al. (2003) Plant J. 33:793-800.

[0062] The vector backbone for the recombinant constructs is any of those typical in the art such as plasmids (such as Ti plasmids), viruses, artificial chromosomes, BACs, YACs and PACs and vectors of the sort described by
[0063] (a) BAC: Shizuya et al. (1992) Proc. Natl. Acad. Sci. USA 89: 8794-8797; Hamilton et al. (1996) Proc. Natl. Acad. Sci. USA 93: 9975-9979;
[0064] (b) YAC: Burke et al. (1987) Science 236:806-812;
[0065] (c) PAC: Sternberg N. et al. (1990) Proc Natl Acad Sci USA. January; 87 (1):103-7;
[0066] (d) Bacteria-Yeast Shuttle Vectors: Bradshaw et al. (1995) Nucl Acids Res 23: 4850-4856;
[0067] (e) Lambda Phage Vectors: Replacement Vector, e.g., Frischauf et al. (1983) J. Mol. Biol 170: 827-842; or Insertion vector, e.g., Huynh et al., In: Glover N M (ed) DNA Cloning: A practical Approach, Vol. 1 Oxford: IRL Press (1985); T-DNA gene fusion vectors:Walden et al. (1990) Mol Cell Biol 1: 175-194; and
[0068] (g) Plasmid vectors: Sambrook et al., infra.

[0069] Typically, the construct comprises a vector containing a sequence of the present invention with any desired transcriptional and/or translational regulatory sequences, such as promoters, UTRs, and 3′ end termination sequences. Vectors can also include origins of replication, scaffold attachment regions (SARs), markers, homologous sequences, introns, etc. The vector may also comprise a marker gene that confers a selectable phenotype on plant cells. The marker may encode biocide resistance, particularly antibiotic resistance, such as resistance to kanamycin, G418, bleomycin, hygromycin, or herbicide resistance, such as resistance to chlorosulfuron, glyphosate or phosphinotricin.

[0070] A plant promoter fragment is used that directs transcription of the gene in all tissues of a regenerated plant and/or is a constitutive promoter. Alternatively, the plant promoter directs transcription of a sequence of the invention in a specific tissue (tissue-specific promoter) or is otherwise under more precise environmental control, such as chemicals, cold, heat, drought, salt and many others (inducible promoter).

[0071] If proper polypeptide production is desired, a polyadenylation region at the 3′-end of the coding region is typically included. The polyadenylation region is derived from the natural gene, from a variety of other plant genes, or from T-DNA, synthesized in the laboratory.

Transformation

[0072] Techniques for transforming a wide variety of higher plant species are well known and described in the technical and scientific literature. See, e.g. Weising et al. (1988) Ann. Rev. Genet. 22:421 and Christou (1995) Euphytica, v. 85, n. 1-3:13-27.

[0073] The person skilled in the art knows processes for the transformation of monocotyledonous and dicotyledonous plants. A variety of techniques are available for introducing DNA into a plant host cell. These techniques comprise transformation of plant cells by DNA injection, DNA electroporation, use of bolistics methods, protoplast fusion and via T-DNA using Agrobacterium tumefaciens or Agrobacterium rhizogenes, as well as further possibilities, or other bacterial hosts for Ti plasmid vectors. See for example, Broothaerts et al. (2005) Gene Transfer to Plants by Diverse Species of Bacteria, Nature, Vol. 433, pp. 629-633.

[0074] DNA constructs of the invention are introduced into the cell or the genome of the desired plant host by a variety of conventional techniques. For example, the DNA construct is introduced using techniques such as electroporation, microinjection and polyethylene glycol precipitation of plant cell protoplasts or protoplast fusion. Electroporation techniques are described in Fromm et al. (1985) Proc. Natl. Acad. Sci. USA 82:5824. Microinjection techniques are known in the art and well described in the scientific and patent literature. The plasmids do not have to fulfill specific requirements for use in DNA electroporation or DNA injection into plant cells. Simple plasmids such as pUC derivatives can be used.

[0075] The introduction of DNA constructs using polyethylene glycol precipitation is described in Paszkowski et al. (1984) EMBO J. 3:2717. Introduction of foreign DNA using protoplast fusion is described by Willmitzer (Willmitzer, L. (1993) Transgenic plants. In: Biotechnology, A Multi-Volume Comprehensive Treatise (H. J. Rehm, G. Reed, A. Pühler, P. Stadler, eds.), Vol. 2, 627-659, VCH Weinheim-New York-Basel-Cambridge).

[0076] Alternatively, the DNA constructs of the invention are introduced directly into plant tissue using ballistic methods, such as DNA particle bombardment. Ballistic transformation techniques are described in Klein et al. (1987) Nature 327:773. Introduction of foreign DNA using ballistics is described by Willmitzer (Willmitzer, L., 1993 Transgenic plants. In: Biotechnology, A Multi-Volume Comprehensive Treatise (H. J. Rehm, G. Reed, A. Pühler, P. Stadler, eds.), Vol. 2, 627-659, VCH Weinheim-New York-Basel-Cambridge).

[0077] DNA constructs are also introduced with the help of Agrobacteria. The use of Agrobacteria for plant cell transformation is extensively examined and sufficiently disclosed in the specification of EP-A 120 516, and in Hoekema (In: The Binary Plant Vector System Offsetdrukkerij Kanters B. V., Alblasserdam (1985), Chapter V), Fraley et al. (Crit. Rev. Plant. Sci. 4, 1-46) and DePicker et al. (EMBO J. 4 (1985), 277-287). Using this technique, the DNA constructs of the invention are combined with suitable T-DNA flanking regions and introduced into a conventional Agrobacterium tumefaciens host vector. The virulence functions of the Agrobacterium tumefaciens host direct the insertion of the construct and adjacent marker(s) into the plant cell DNA when the cell is infected by the bacteria (McCormac et al. (1997) Mol. Biotechnol. 8:199; Hamilton (1997) Gene 200:107; Salomon et al. (1984) EMBO J. 3:141; Herrera-Estrella et al. (1983) EMBO J. 2:987). Agrobacterium tumefaciens-mediated transformation techniques, including disarming and use of binary or co-integrate vectors, are well described in the scientific literature. See, for example Hamilton (1997) Gene 200:107; Müller et al. (1987) Mol. Gen. Genet. 207:171; Komari et al. (1996) Plant J. 10:165; Venkateswarlu et al. (1991) Biotechnology 9:1103 and Gleave (1992) Plant Mol. Biol. 20:1203; Graves and Goldman (1986) Plant Mol. Biol. 7:34 and Gould et al. (1991) Plant Physiology 95:426.

[0078] For plant cell T-DNA transfer of DNA, plant organs, e.g. infloresences, plant explants, plant cells that have been cultured in suspension or protoplasts are co-cultivated with Agrobacterium tumefaciens or Agrobacterium rhizogenes or other suitable T-DNA hosts. Whole plants are regenerated from the infected plant material or seeds generated from infected plant material using a suitable medium that contains antibiotics or biocides for the selection of transformed cells or by spraying the biocide on plants to select the transformed plants. Plants obtained in this way are then examined for the presence of the DNA introduced. The transformation of dicotyledonous plants via Ti-plasmid-vector systems and Agrobacterium tumefaciens is well established.

[0079] Monocotyledonous plants are also transformed by means of Agrobacterium based vectors (See Chan et al. (1993) Plant Mol. Biol. 22: 491-506; Hiei et al. (1994) Plant J. 6:271-282; Deng et al. (1990) Science in China 33:28-34; Wilmink et al. Plant (1992) Cell Reports 11:76-80; May et al. (1995) Bio/Technology 13:486-492; Conner and Domisse (1992) Int. J. Plant Sci. 153:550-555; Ritchie et al. (1993) Transgenic Res. 2:252-265). Maize transformation in particular is described in the literature (see, for example, WO 95/06128, EP 0 513 849; EP 0 465 875; Fromm et al., (1990) Biotechnology 8:833-844; Gordon-Kamm et al. (1990) Plant Cell 2:603-618; Koziel et al. (1993) Biotechnology 11:194-200). In EP 292 435 and in Shillito et al. (Bio/Technology (1989) 7:581) fertile plants are obtained from a mucus-free, soft (friable) maize callus. Prioli and Söndahl (Bio/Technology (1989) 7, 589) also report regenerating fertile plants from maize protoplasts of the maize Cateto inbred line, Cat 100-1.

[0080] Other cereal species have also been successfully transformed, such as barley (Wan and Lemaux, see above; Ritala et al., see above) and wheat (Nehra et al. (1994) Plant J. 5, 285-297).

[0081] Alternatives to Agrobacterium transformation for plants are ballistics, protoplast fusion, electroporation of partially permeabilized cells and use of glass fibers (See Wan and Lemaux (1994) Plant Physiol. 104:37-48; Vasil et al. (1993) Bio/Technology 11:1553-1558; Ritala et al. (1994) Plant Mol. Biol. 24:317-325; Spencer et al. (1990) Theor. Appl. Genet. 79:625-631).

[0082] Introduced DNA is usually stable after integration into the plant genome and is transmitted to the progeny of the transformed cell or plant. Generally the transformed plant cell contains a selectable marker that makes the transformed cells resistant to a biocide or an antibiotic such as kanamycin, G 418, bleomycin, hygromycin, phosphinotricin or others. Therefore, the individually chosen marker should allow the selection of transformed cells from cells lacking the introduced DNA.

[0083] The transformed cells grow within the plant in the usual way (McCormick et al. (1986) Plant Cell Reports 5, 81-84) and the resulting plants are cultured normally. Transformed plant cells obtained by any of the above transformation techniques are cultured to regenerate a whole plant that possesses the transformed genotype and thus the desired phenotype. Such regeneration techniques rely on manipulation of certain phytohormones in a tissue culture growth medium, typically relying on a biocide and/or herbicide marker that has been introduced together with the desired nucleotide sequences.

[0084] Plant regeneration from cultured protoplasts is described in Evans et al., Protoplasts Isolation and Culture in “Handbook of Plant Cell Culture,” pp. 124-176, MacMillan Publishing Company, New York, 1983; and Binding, Regeneration of Plants, Plant Protoplasts, pp. 21-73, CRC Press, Boca Raton, 1988. Regeneration also occurs from plant callus, explants, organs, or parts thereof. Such regeneration techniques are described generally in Klee et al. (1987) Ann. Rev. of Plant Phys. 38:467. Regeneration of monocots (rice) is described by Hosoyama et al. (Biosci. Biotechnol. Biochem. (1994) 58:1500) and by Ghosh et al. (J. Biotechnol. (1994) 32:1). Useful and relevant procedures for transient expression are also described in U.S. Application No. 60/537,070 filed on Jan. 16, 2004 and PCT Application No. PCT/US2005/001153 filed on Jan. 14, 2005.

[0085] After transformation, seeds are obtained from the plants and used for testing stability and inheritance. Generally, two or more generations are cultivated to ensure that the phenotypic feature is stably maintained and transmitted.

[0086] One of skill will recognize that after the expression cassette is stably incorporated in transgenic plants and confirmed to be operable, it can be introduced into other plants by sexual crossing. Any of a number of standard breeding techniques can be used, depending upon the species to be crossed.

[0087] The nucleotide sequences according to the invention generally encode an appropriate protein from any organism, in particular from plants, fungi, bacteria or animals. The sequences preferably encode proteins from plants or fungi. Preferably, the plants are higher plants, in particular starch or oil storing useful plants, such as potato or cereals such as rice, maize, wheat, barley, rye, triticale, oat, millet, etc., as well as spinach, tobacco, sugar beet, soya, cotton etc.

[0088] In principle, the process according to the invention can be applied to any plant. Therefore, monocotyledonous as well as dicotyledonous plant species are particularly suitable. The process is preferably used with plants that are interesting for agriculture, horticulture, biomass for conversion, textile, plants as chemical factories and/or forestry.

[0089] Thus, the invention has use over a broad range of plants, preferably higher plants, pertaining to the classes of Angiospermae and Gymnospermae. Plants of the subclasses of the Dicotylodenae and the Monocotyledonae are particularly suitable. Dicotyledonous plants belong to the orders of the Magniolales, Illiciales, Laurales, Piperales Aristochiales, Nymphaeales, Ranunculales, Papeverales, Sarraceniaceae, Trochodendrales, Hamamelidales, Eucomiales, Leitneriales, Myricales, Fagales, Casuarinales, Caryophyllales, Batales, Polygonales, Plumbaginales, Dilleniales, Theales, Malvales, Urticales, Lecythidales, Violales, Salicales, Capparales, Ericales, Diapensales, Ebenales, Primulales, Rosales, Fabales, Podostemales, Haloragales, Myrtales, Cornales, Proteales, Santales, Rafflesiales, Celastrales, Euphorbiales, Rhamnales, Sapindales, Juglandales, Geraniales, Polygalales, Umbellales, Gentianales, Polemoniales, Lamiales, Plantaginales, Scrophulariales, Campanulales, Rubiales, Dipsacales, and Asterales. Monocotyledonous plants belong to the orders of the Alismatales, Hydrocharitales, Najadales, Triuridales, Commelinales, Eriocaulales, Restionales, Poales, Juncales, Cyperales, Typhales, Bromeliales, Zingiberales, Arecales, Cyclanthales, Pandanales, Arales, Lilliales, and Orchidales. Plants belonging to the class of the Gymnospermae are Pinales, Ginkgoales, Cycadales and Gnetales.

[0090] Examples of species represented in these orders are tobacco, oilseed rape, sugar beet, potato, tomato, lettuce, cucumber, pepper, bean, pea, citrus fruit, apple, pear, berries, plum, melon, eggplant, cotton, soybean, sunflower, rose, poinsettia, petunia, guayule, cabbage, spinach, alfalfa, artichoke, corn, wheat, rye, barley, grasses such as switch grass or turf grass, millet, hemp, banana, poplar, eucalyptus trees, conifers.

Characteristics of the Sequences, as Noted in the Sequence Listing

[0091] The modulated growth and phenotype characteristics for each of the sequences of the invention are noted by an entry in a “miscellaneous feature” section for each respective nucleic acid and/or polypeptide sequence in the Sequence Listing.

[0092] For some of the polynucleotides/polypeptides of the invention, the sequence listing further includes (in a “miscellaneous feature” section) an indication of any important identified domain(s) and the corresponding function of the domain(s) identified by comparison to the publicly available pfam database.

[0093] For some of the polynucleotides/polypeptides of the invention, the sequence listing further includes (in a “miscellaneous feature” section) an indication of important identified “phenotype” characteristic(s) of a polypeptide sequence and the corresponding function of the polypeptide sequence identified by comparison to the publicly available Swiss-Prot database.

[0094] Table 1 correlates the “Hit” sequence with the experimental observation noted for it in the “Observation” column and the “phenotype” which is present in the “Phenotype” column and the miscellaneous feature section of the Sequence Listing.

[0095] The “Phenotypes” listed in Table 1 and the Sequence Listing are listed and described below providing further explanation of how the sequences are used to effect phenotypic results in transgenic plants. Additional description and specific annotation of the “phenotypes” associated with some particular sequences in the Sequence Listing can be found in application Ser. Nos. 10/225,066 (US 2005/0160493), 11/479,226 (US 2007/0022495) and 10/374,780 (US 2006/0162006), all of which are hereby incorporated by reference in their entirety.

TABLE 1

| HIT_ID | OBSERVATION | PHENOTYPE |
|---|---|---|
| SEQ_ID_NO_10026 | | Useful for making plants with |
| | | modulated nitrogen use efficiency |
| SEQ_ID_NO_10048 | | Useful for making plants with |
| | | modulated cold sensitivity |
| SEQ_ID_NO_1016 | The plant flowers significantly late | Useful for making plants with |
| | compared to wild-type. | modulated flowering time |
| SEQ_ID_NO_10172 | | Useful for making plants with |
| | | modulated cold sensitivity |
| SEQ_ID_NO_10176 | The plant is abnormally small. | Useful for making plants with |
| | | modulated biomass |
| SEQ_ID_NO_10176 | Useful for making plants with | The sequence is a functional homolog |
| | modulated growth and phenotype | of SEQ ID NO 960 in the 10/225,066 |
| | characteristics | US patent application |
| SEQ_ID_NO_10176 | Useful for making plants with | The sequence is a functional homolog |
| | modulated growth and phenotype | of SEQ ID NO 874 in the 10/412,699 |
| | characteristics | US patent application |
| SEQ_ID_NO_10176 | Useful for making plants with | The sequence is a functional homolog |
| | modulated growth and phenotype | of SEQ ID NO 2604 in the 10/374,780 |
| | characteristics | US patent application |
| SEQ_ID_NO_10176 | Useful for making plants with | The sequence is a functional homolog |
| | modulated growth and phenotype | of SEQ ID NO 1769 in the 11/479,226 |
| | characteristics | US patent application |
| SEQ_ID_NO_10176 | Useful for making plants with | The sequence is a functional homolog |
| | modulated growth and phenotype | of SEQ ID NO 1765 in the 11/479,226 |
| | characteristics | US patent application |
| SEQ_ID_NO_10176 | Useful for making plants with | The sequence is a functional homolog |
| | modulated growth and phenotype | of SEQ ID NO 1761 in the 11/479,226 |
| | characteristics | US patent application |
| SEQ_ID_NO_10184 | | Useful for making plants with altered |
| | | terpenoid content |
| SEQ_ID_NO_10184 | | Useful for making plants with altered |
| | | Lignin content |
| SEQ_ID_NO_10192 | | Useful for making plants with altered |
| | | cell wall content and/or composition |
| SEQ_ID_NO_10198 | | Useful for making plants with altered |
| | | Lignin content |
| SEQ_ID_NO_10242 | | Useful for making plants with |
| | | modulated nitrogen use efficiency |
| SEQ_ID_NO_10242 | The plant flowers significantly late | Useful for making plants with |
| | compared to wild-type. | modulated flowering time |
| SEQ_ID_NO_10242 | | Useful for making plants with altered |
| | | Lignin content |
| SEQ_ID_NO_10258 | | Useful for making plants with altered |
| | | Lignin content |
| SEQ_ID_NO_10258 | | Useful for making plants with altered |
| | | alkaloid content |
| SEQ_ID_NO_10270 | The plant is abnormally large. | Useful for making plants with |
| | | modulated biomass |
| SEQ_ID_NO_10278 | The plant flowers significantly late | Useful for making plants with |
| | compared to wild-type. | modulated flowering time |
| SEQ_ID_NO_10278 | No seed is being produced by the plant | Useful for biocontainment applications |
| SEQ_ID_NO_10304 | The plant is abnormally small. | Useful for making plants with |
| | | modulated biomass |
| SEQ_ID_NO_10326 | Useful for making plants with | The sequence is a functional homolog |
| | modulated growth and phenotype | of SEQ ID NO 382 in the 10/714,887 |
| | characteristics | US patent application |
| SEQ_ID_NO_10326 | Useful for making plants with | The sequence is a functional homolog |
| | modulated growth and phenotype | of SEQ ID NO 380 in the 11/435,388 |
| | characteristics | US patent application |
| SEQ_ID_NO_10326 | Useful for making plants with | The sequence is a functional homolog |
| | modulated growth and phenotype | of SEQ ID NO 380 in the 10/714,887 |
| | characteristics | US patent application |
| SEQ_ID_NO_10326 | Useful for making plants with | The sequence is a functional homolog |
| | modulated growth and phenotype | of SEQ ID NO 378 in the 11/435,388 |
| | characteristics | US patent application |
| SEQ_ID_NO_10326 | Useful for making plants with | The sequence is a functional homolog |
| | modulated growth and phenotype | of SEQ ID NO 378 in the 10/714,887 |
| | characteristics | US patent application |
| SEQ_ID_NO_10326 | Useful for making plants with | The sequence is a functional homolog |
| | modulated growth and phenotype | of SEQ ID NO 376 in the 11/435,388 |
| | characteristics | US patent application |
| SEQ_ID_NO_10326 | Useful for making plants with | The sequence is a functional homolog |
| | modulated growth and phenotype | of SEQ ID NO 376 in the 10/714,887 |
| | characteristics | US patent application |
| SEQ_ID_NO_10326 | Useful for making plants with | The sequence is a functional homolog |
| | modulated growth and phenotype | of SEQ ID NO 374 in the 11/435,388 |
| | characteristics | US patent application |
| SEQ_ID_NO_10326 | Useful for making plants with | The sequence is a functional homolog |
| | modulated growth and phenotype | of SEQ ID NO 2167 in the 10/666,642 |
| | characteristics | US patent application |
| SEQ_ID_NO_10326 | Useful for making plants with | The sequence is a functional homolog |
| | modulated growth and phenotype | of SEQ ID NO 2165 in the 10/666,642 |
| | characteristics | US patent application |
| SEQ_ID_NO_10326 | Useful for making plants with | The sequence is a functional homolog |
| | modulated growth and phenotype | of SEQ ID NO 2163 in the 10/666,642 |
| | characteristics | US patent application |
| SEQ_ID_NO_10326 | Useful for making plants with | The sequence is a functional homolog |
| | modulated growth and phenotype | of SEQ ID NO 2161 in the 10/666,642 |
| | characteristics | US patent application |
| SEQ_ID_NO_10326 | Useful for making plants with | The sequence is a functional homolog |
| | modulated growth and phenotype | of SEQ ID NO 1088 in the 10/374,780 |
| | characteristics | US patent application |
| SEQ_ID_NO_10326 | Useful for making plants with | The sequence is a functional homolog |
| | modulated growth and phenotype | of SEQ ID NO 1087 in the 10/374,780 |
| | characteristics | US patent application |
| SEQ_ID_NO_10326 | Useful for making plants with | The sequence is a functional homolog |
| | modulated growth and phenotype | of SEQ ID NO 1086 in the 10/374,780 |
| | characteristics | US patent application |
| SEQ_ID_NO_10372 | | Useful for making plants with |
| | | modulated nitrogen use efficiency |
| SEQ_ID_NO_10380 | The plant is abnormally small. | Useful for making plants with |
| | | modulated biomass |
| SEQ_ID_NO_10388 | The plant is abnormally large. | Useful for making plants with |
| | | modulated biomass |
| SEQ_ID_NO_10408 | | Useful for making plants with |
| | | modulated drought sensitivity |
| SEQ_ID_NO_10416 | | Useful for making plants with |
| | | modulated phosphate use efficiency |
| SEQ_ID_NO_10416 | | Useful for making plants with |
| | | modulated nitrogen use efficiency |
| SEQ_ID_NO_10420 | The plant flowers significantly earllier | Useful for making plants with |
| | than wild-type. | modulated flowering time |
| SEQ_ID_NO_10420 | | Useful for making plants with |
| | | modulated flowering time |
| SEQ_ID_NO_10420 | The plant is abnormally small. | Useful for making plants with |
| | | modulated biomass |
| SEQ_ID_NO_10420 | | Useful for making plants with |
| | | modulated biomass |
| SEQ_ID_NO_10440 | Useful for making plants with | The sequence is a functional homolog |
| | modulated growth and phenotype | of SEQ ID NO 960 in the 10/225,066 |
| | characteristics | US patent application |
| SEQ_ID_NO_10440 | Useful for making plants with | The sequence is a functional homolog |
| | modulated growth and phenotype | of SEQ ID NO 2604 in the 10/374,780 |
| | characteristics | US patent application |
| SEQ_ID_NO_10440 | Useful for making plants with | The sequence is a functional homolog |
| | modulated growth and phenotype | of SEQ ID NO 1769 in the 11/479,226 |
| | characteristics | US patent application |
| SEQ_ID_NO_10514 | | Useful for making plants with altered |
| | | cell wall content and/or composition |
| SEQ_ID_NO_10524 | The plant is abnormally small. | Useful for making plants with |
| | | modulated biomass |
| SEQ_ID_NO_10526 | The plant flowers significantly late | Useful for making plants with |
| | compared to wild-type. | modulated flowering time |
| SEQ_ID_NO_10526 | No seed is being produced by the plant | Useful for biocontainment applications |
| SEQ_ID_NO_10532 | | Useful for making plants with altered |
| | | Lignin content |
| SEQ_ID_NO_10532 | | Useful for making plants with altered |
| | | alkaloid content |
| SEQ_ID_NO_10550 | The plant is abnormally large. | Useful for making plants with |
| | | modulated biomass |
| SEQ_ID_NO_10588 | The plant flowers significantly earllier | Useful for making plants with |
| | than wild-type. | modulated flowering time |
| SEQ_ID_NO_10588 | | Useful for making plants with |
| | | modulated flowering time |
| SEQ_ID_NO_10588 | The plant is abnormally small. | Useful for making plants with |
| | | modulated biomass |
| SEQ_ID_NO_10588 | | Useful for making plants with |
| | | modulated biomass |
| SEQ_ID_NO_10604 | The plant flowers significantly earllier | Useful for making plants with |
| | than wild-type. | modulated flowering time |
| SEQ_ID_NO_10604 | | Useful for making plants with |
| | | modulated flowering time |
| SEQ_ID_NO_10604 | The plant is abnormally small. | Useful for making plants with |
| | | modulated biomass |
| SEQ_ID_NO_10604 | | Useful for making plants with |
| | | modulated biomass |
| SEQ_ID_NO_10616 | | Useful for making plants with |
| | | modulated nitrogen use efficiency |
| SEQ_ID_NO_10630 | The plant senesces significantly late | Useful for making plants with |
| | copared to wild-type. | modulated time to senescence |
| SEQ_ID_NO_10630 | The plant flowers significantly late | Useful for making plants with |
| | compared to wild-type. | modulated flowering time |
| SEQ_ID_NO_10632 | The plant is abnormally small. | Useful for making plants with |
| | | modulated biomass |
| SEQ_ID_NO_10632 | The plant produces a reduced number | Useful for biocontainment applications |
| | of seeds. | |
| SEQ_ID_NO_10686 | Useful for making plants with | The sequence is a functional homolog |
| | modulated growth and phenotype | of SEQ ID NO 654 in the 11/435,388 |
| | characteristics | US patent application |
| SEQ_ID_NO_10686 | Useful for making plants with | The sequence is a functional homolog |
| | modulated growth and phenotype | of SEQ ID NO 292 in the 10/225,066 |
| | characteristics | US patent application |
| SEQ_ID_NO_10686 | Useful for making plants with | The sequence is a functional homolog |
| | modulated growth and phenotype | of SEQ ID NO 2104 in the 10/374,780 |
| | characteristics | US patent application |
| SEQ_ID_NO_10686 | Useful for making plants with | The sequence is a functional homolog |
| | modulated growth and phenotype | of SEQ ID NO 206 in the 11/375,241 |
| | characteristics | US patent application |
| SEQ_ID_NO_10686 | Useful for making plants with | The sequence is a functional homolog |
| | modulated growth and phenotype | of SEQ ID NO 1858 in the 10/412,699 |
| | characteristics | US patent application |
| SEQ_ID_NO_10686 | Useful for making plants with | The sequence is a functional homolog |
| | modulated growth and phenotype | of SEQ ID NO 16 in the 10/412,699 |
| | characteristics | US patent application |
| SEQ_ID_NO_10686 | Useful for making plants with | The sequence is a functional homolog |
| | modulated growth and phenotype | of SEQ ID NO 1442 in the 10/666,642 |
| | characteristics | US patent application |
| SEQ_ID_NO_10700 | | Useful for making plants with altered |
| | | Lignin content |
| SEQ_ID_NO_10700 | | Useful for making plants with altered |
| | | alkaloid content |
| SEQ_ID_NO_10708 | | Useful for making plants with |
| | | modulated nitrogen use efficiency |
| SEQ_ID_NO_10728 | The plant flowers significantly late | Useful for making plants with |
| | compared to wild-type. | modulated flowering time |
| SEQ_ID_NO_10728 | The plant is abnormally small. | Useful for making plants with |
| | | modulated biomass |
| SEQ_ID_NO_10806 | Useful for making plants with | The sequence is a functional homolog |
| | modulated growth and phenotype | of SEQ ID NO 1248 in the 10/374,780 |
| | characteristics | US patent application |
| SEQ_ID_NO_10824 | Useful for making plants with | The sequence is a functional homolog |
| | modulated growth and phenotype | of SEQ ID NO 793 in the 11/479,226 |
| | characteristics | US patent application |
| SEQ_ID_NO_1094 | | Useful for making plants with |
| | | modulated heat sensitivity |
| SEQ_ID_NO_1094 | | Useful for making plants with altered |
| | | Lignin content |
| SEQ_ID_NO_10988 | The plant produces a reduced number | Useful for biocontainment applications |
| | of seeds. | |
| SEQ_ID_NO_11020 | Useful for making plants with | The sequence is a functional homolog |
| | modulated growth and phenotype | of SEQ ID NO 1701 in the 10/412,699 |
| | characteristics | US patent application |
| SEQ_ID_NO_11046 | | Useful for making plants with altered |
| | | cell wall content and/or composition |
| SEQ_ID_NO_1120 | Useful for making plants with | The sequence is a functional homolog |
| | modulated growth and phenotype | of SEQ ID NO 851 in the 10/666,642 |
| | characteristics | US patent application |
| SEQ_ID_NO_1120 | Useful for making plants with | The sequence is a functional homolog |
| | modulated growth and phenotype | of SEQ ID NO 1041 in the 10/374,780 |
| | characteristics | US patent application |
| SEQ_ID_NO_1136 | | Useful for making plants with |
| | | modulated nitrogen use efficiency |
| SEQ_ID_NO_1192 | | Useful for making plants with altered |
| | | alkaloid content |
| SEQ_ID_NO_1228 | The plant flowers significantly earllier | Useful for making plants with |
| | than wild-type. | modulated flowering time |
| SEQ_ID_NO_1228 | The plant is abnormally small. | Useful for making plants with |
| | | modulated biomass |
| SEQ_ID_NO_1228 | The plant produces a reduced number | Useful for biocontainment applications |
| | of seeds. | |
| SEQ_ID_NO_1350 | | Useful for making plants with |
| | | modulated drought sensitivity |
| SEQ_ID_NO_1356 | | Useful for making plants with altered |
| | | Lignin content |
| SEQ_ID_NO_1356 | | Useful for making plants with altered |
| | | cell wall content and/or composition |
| SEQ_ID_NO_1356 | | Useful for making plants with altered |
| | | cell wall composition |
| SEQ_ID_NO_1370 | | Useful for making plants with altered |
| | | terpenoid content |
| SEQ_ID_NO_1386 | | Useful for making plants with |
| | | modulated low light sensitivity |
| SEQ_ID_NO_1386 | The plant flowers significantly late | Useful for making plants with |
| | compared to wild-type. | modulated flowering time |
| SEQ_ID_NO_1432 | | Useful for making plants with altered |
| | | cell wall content and/or composition |
| SEQ_ID_NO_1440 | | Useful for making plants with altered |
| | | cell wall content and/or composition |
| SEQ_ID_NO_1442 | | Useful for making plants with altered |
| | | Lignin content |
| SEQ_ID_NO_1564 | Useful for making plants with | The sequence is a functional homolog |
| | modulated growth and phenotype | of SEQ ID NO 738 in the 10/374,780 |
| | characteristics | US patent application |
| SEQ_ID_NO_1592 | | Useful for making plants with altered |
| | | cell wall content and/or composition |
| SEQ_ID_NO_1640 | The plant flowers significantly earllier | Useful for making plants with |
| | than wild-type. | modulated flowering time |
| SEQ_ID_NO_1640 | The plant is abnormally small. | Useful for making plants with |
| | | modulated biomass |
| SEQ_ID_NO_1640 | | Useful for making plants with |
| | | modulated biomass |
| SEQ_ID_NO_1640 | Useful for making plants with | The sequence is a functional homolog |
| | modulated growth and phenotype | of SEQ ID NO 30 in the 10/666,642 |
| | characteristics | US patent application |
| SEQ_ID_NO_1640 | Useful for making plants with | The sequence is a functional homolog |
| | modulated growth and phenotype | of SEQ ID NO 26 in the 10/666,642 |
| | characteristics | US patent application |
| SEQ_ID_NO_1642 | | Useful for making plants with |
| | | modulated flowering time |
| SEQ_ID_NO_1654 | Useful for making plants with | The sequence is a functional homolog |
| | modulated growth and phenotype | of SEQ ID NO 420 in the 10/666,642 |
| | characteristics | US patent application |
| SEQ_ID_NO_1654 | Useful for making plants with | The sequence is a functional homolog |
| | modulated growth and phenotype | of SEQ ID NO 1506 in the 10/666,642 |
| | characteristics | US patent application |
| SEQ_ID_NO_1670 | The plant flowers significantly late | Useful for making plants with |
| | compared to wild-type. | modulated flowering time |
| SEQ_ID_NO_1670 | The plant produces a reduced number | Useful for biocontainment applications |
| | of seeds. | |
| SEQ_ID_NO_1682 | Useful for making plants with | The sequence is a functional homolog |
| | modulated growth and phenotype | of SEQ ID NO 876 in the 10/412,699 |
| | characteristics | US patent application |
| SEQ_ID_NO_1682 | Useful for making plants with | The sequence is a functional homolog |
| | modulated growth and phenotype | of SEQ ID NO 716 in the 10/412,699 |
| | characteristics | US patent application |
| SEQ_ID_NO_1682 | Useful for making plants with | The sequence is a functional homolog |
| | modulated growth and phenotype | of SEQ ID NO 644 in the 11/435,388 |
| | characteristics | US patent application |
| SEQ_ID_NO_1682 | Useful for making plants with | The sequence is a functional homolog |
| | modulated growth and phenotype | of SEQ ID NO 438 in the 10/666,642 |
| | characteristics | US patent application |
| SEQ_ID_NO_1682 | Useful for making plants with | The sequence is a functional homolog |
| | modulated growth and phenotype | of SEQ ID NO 20 in the 10/286,264 |
| | characteristics | US patent application |
| SEQ_ID_NO_1682 | Useful for making plants with | The sequence is a functional homolog |
| | modulated growth and phenotype | of SEQ ID NO 1773 in the 11/479,226 |
| | characteristics | US patent application |
| SEQ_ID_NO_1682 | Useful for making plants with | The sequence is a functional homolog |
| | modulated growth and phenotype | of SEQ ID NO 1492 in the 11/479,226 |
| | characteristics | US patent application |
| SEQ_ID_NO_1702 | | Useful for making plants with |
| | | modulated biomass |
| SEQ_ID_NO_1704 | | Useful for making plants with altered |
| | | cell wall content and/or composition |
| SEQ_ID_NO_172 | The plant flowers significantly late | Useful for making plants with |
| | compared to wild-type. | modulated flowering time |
| SEQ_ID_NO_172 | The plant is abnormally small. | Useful for making plants with |
| | | modulated biomass |
| SEQ_ID_NO_1720 | The plant flowers significantly earllier | Useful for making plants with |
| | than wild-type. | modulated flowering time |
| SEQ_ID_NO_1720 | The plant is abnormally small. | Useful for making plants with |
| | | modulated biomass |
| SEQ_ID_NO_1720 | | Useful for making plants with |
| | | modulated biomass |
| SEQ_ID_NO_1720 | Useful for making plants with | The sequence is a functional homolog |
| | modulated growth and phenotype | of SEQ ID NO 30 in the 10/666,642 |
| | characteristics | US patent application |
| SEQ_ID_NO_1720 | Useful for making plants with | The sequence is a functional homolog |
| | modulated growth and phenotype | of SEQ ID NO 26 in the 10/666,642 |
| | characteristics | US patent application |
| SEQ_ID_NO_1722 | The plant flowers significantly late | Useful for making plants with |
| | compared to wild-type. | modulated flowering time |
| SEQ_ID_NO_1722 | | Useful for making plants with |
| | | modulated cold sensitivity |
| SEQ_ID_NO_1742 | The plant flowers significantly late | Useful for making plants with |
| | compared to wild-type. | modulated flowering time |
| SEQ_ID_NO_1760 | The plant flowers significantly late | Useful for making plants with |
| | compared to wild-type. | modulated flowering time |
| SEQ_ID_NO_1760 | No seed is being produced by the plant | Useful for biocontainment applications |
| SEQ_ID_NO_1764 | Useful for making plants with | The sequence is a functional homolog |
| | modulated growth and phenotype | of SEQ ID NO 1839 in the 10/374,780 |
| | characteristics | US patent application |
| SEQ_ID_NO_1816 | | Useful for making plants with |
| | | modulated nitrogen use efficiency |
| SEQ_ID_NO_1820 | | Useful for making plants with altered |
| | | Lignin content |
| SEQ_ID_NO_1820 | | Useful for making plants with altered |
| | | cell wall content and/or composition |
| SEQ_ID_NO_1820 | | Useful for making plants with altered |
| | | cell wall composition |
| SEQ_ID_NO_1822 | Useful for making plants with | The sequence is a functional homolog |
| | modulated growth and phenotype | of SEQ ID NO 210 in the 10/666,642 |
| | characteristics | US patent application |
| SEQ_ID_NO_1826 | | Useful for making plants with altered |
| | | Lignin content |
| SEQ_ID_NO_1826 | | Useful for making plants with altered |
| | | alkaloid content |
| SEQ_ID_NO_1832 | | Useful for making plants with altered |
| | | Lignin content |
| SEQ_ID_NO_1832 | | Useful for making plants with altered |
| | | alkaloid content |
| SEQ_ID_NO_1860 | The plant flowers significantly earllier | Useful for making plants with |
| | than wild-type. | modulated flowering time |
| SEQ_ID_NO_1860 | | Useful for making plants with |
| | | modulated flowering time |
| SEQ_ID_NO_1860 | The plant is abnormally small. | Useful for making plants with |
| | | modulated biomass |
| SEQ_ID_NO_1860 | | Useful for making plants with |
| | | modulated biomass |
| SEQ_ID_NO_1862 | | Useful for making plants with |
| | | modulated cold sensitivity |
| SEQ_ID_NO_1920 | The plant flowers significantly late | Useful for making plants with |
| | compared to wild-type. | modulated flowering time |
| SEQ_ID_NO_1920 | No seed is being produced by the plant | Useful for biocontainment applications |
| SEQ_ID_NO_1922 | | Useful for making plants with altered |
| | | cell wall content and/or composition |
| SEQ_ID_NO_1926 | The plant flowers significantly late | Useful for making plants with |
| | compared to wild-type. | modulated flowering time |
| SEQ_ID_NO_1926 | No seed is being produced by the plant | Useful for biocontainment applications |
| SEQ_ID_NO_1934 | Useful for making plants with | The sequence is a functional homolog |
| | modulated growth and phenotype | of SEQ ID NO 501 in the 10/374,780 |
| | characteristics | US patent application |
| SEQ_ID_NO_1934 | Useful for making plants with | The sequence is a functional homolog |
| | modulated growth and phenotype | of SEQ ID NO 1000 in the 10/412,699 |
| | characteristics | US patent application |
| SEQ_ID_NO_1948 | | Useful for making plants with |
| | | modulated flowering time |
| SEQ_ID_NO_1950 | | Useful for making plants with altered |
| | | terpenoid content |
| SEQ_ID_NO_1950 | | Useful for making plants with altered |
| | | alkaloid content |
| SEQ_ID_NO_1954 | Useful for making plants with | The sequence is a functional homolog |
| | modulated growth and phenotype | of SEQ ID NO 712 in the 11/479,226 |
| | characteristics | US patent application |
| SEQ_ID_NO_1956 | The plant flowers significantly late | Useful for making plants with |
| | compared to wild-type. | modulated flowering time |
| SEQ_ID_NO_1958 | | Useful for making plants with altered |
| | | terpenoid content |
| SEQ_ID_NO_1958 | | Useful for making plants with altered |
| | | Lignin content |
| SEQ_ID_NO_1958 | Useful for making plants with | The sequence is a functional homolog |
| | modulated growth and phenotype | of SEQ ID NO 712 in the 10/374,780 |
| | characteristics | US patent application |
| SEQ_ID_NO_1958 | Useful for making plants with | The sequence is a functional homolog |
| | modulated growth and phenotype | of SEQ ID NO 709 in the 10/374,780 |
| | characteristics | US patent application |
| SEQ_ID_NO_1958 | Useful for making plants with | The sequence is a functional homolog |
| | modulated growth and phenotype | of SEQ ID NO 708 in the 10/374,780 |
| | characteristics | US patent application |
| SEQ_ID_NO_1958 | Useful for making plants with | The sequence is a functional homolog |
| | modulated growth and phenotype | of SEQ ID NO 686 in the 11/435,388 |
| | characteristics | US patent application |
| SEQ_ID_NO_1958 | Useful for making plants with | The sequence is a functional homolog |
| | modulated growth and phenotype | of SEQ ID NO 2188 in the 10/374,780 |
| | characteristics | US patent application |
| SEQ_ID_NO_196 | The plant is abnormally small. | Useful for making plants with |
| | | modulated biomass |
| SEQ_ID_NO_196 | The plant produces a reduced number | Useful for biocontainment applications |
| | of seeds. | |
| SEQ_ID_NO_1970 | | Useful for making plants with altered |
| | | cell wall content and/or composition |
| SEQ_ID_NO_1974 | | Useful for making plants with |
| | | modulated drought sensitivity |
| SEQ_ID_NO_1974 | Useful for making plants with | The sequence is a functional homolog |
| | modulated growth and phenotype | of SEQ ID NO 805 in the 11/479,226 |
| | characteristics | US patent application |
| SEQ_ID_NO_1974 | Useful for making plants with | The sequence is a functional homolog |
| | modulated growth and phenotype | of SEQ ID NO 801 in the 11/479,226 |
| | characteristics | US patent application |
| SEQ_ID_NO_1974 | Useful for making plants with | The sequence is a functional homolog |
| | modulated growth and phenotype | of SEQ ID NO 797 in the 11/479,226 |
| | characteristics | US patent application |
| SEQ_ID_NO_1974 | Useful for making plants with | The sequence is a functional homolog |
| | modulated growth and phenotype | of SEQ ID NO 790 in the 10/225,066 |
| | characteristics | US patent application |
| SEQ_ID_NO_1974 | Useful for making plants with | The sequence is a functional homolog |
| | modulated growth and phenotype | of SEQ ID NO 789 in the 11/479,226 |
| | characteristics | US patent application |
| SEQ_ID_NO_1974 | Useful for making plants with | The sequence is a functional homolog |
| | modulated growth and phenotype | of SEQ ID NO 786 in the 11/479,226 |
| | characteristics | US patent application |
| SEQ_ID_NO_1974 | Useful for making plants with | The sequence is a functional homolog |
| | modulated growth and phenotype | of SEQ ID NO 782 in the 11/479,226 |
| | characteristics | US patent application |
| SEQ_ID_NO_1974 | Useful for making plants with | The sequence is a functional homolog |
| | modulated growth and phenotype | of SEQ ID NO 344 in the 10/412,699 |
| | characteristics | US patent application |
| SEQ_ID_NO_1974 | Useful for making plants with | The sequence is a functional homolog |
| | modulated growth and phenotype | of SEQ ID NO 342 in the 10/412,699 |
| | characteristics | US patent application |
| SEQ_ID_NO_1974 | Useful for making plants with | The sequence is a functional homolog |
| | modulated growth and phenotype | of SEQ ID NO 2350 in the 10/374,780 |
| | characteristics | US patent application |
| SEQ_ID_NO_1974 | Useful for making plants with | The sequence is a functional homolog |
| | modulated growth and phenotype | of SEQ ID NO 1777 in the 11/479,226 |
| | characteristics | US patent application |
| SEQ_ID_NO_1994 | | Useful for making plants with |
| | | modulated nitrogen use efficiency |
| SEQ_ID_NO_1994 | The plant flowers significantly late | Useful for making plants with |
| | compared to wild-type. | modulated flowering time |
| SEQ_ID_NO_1994 | | Useful for making plants with altered |
| | | Lignin content |
| SEQ_ID_NO_2012 | The plant flowers significantly late | Useful for making plants with |
| | compared to wild-type. | modulated flowering time |
| SEQ_ID_NO_2012 | No seed is being produced by the plant | Useful for biocontainment applications |
| SEQ_ID_NO_202 | Useful for making plants with | The sequence is a functional homolog |
| | modulated growth and phenotype | of SEQ ID NO 186 in the 11/435,388 |
| | characteristics | US patent application |
| SEQ_ID_NO_202 | Useful for making plants with | The sequence is a functional homolog |
| | modulated growth and phenotype | of SEQ ID NO 186 in the 10/714,887 |
| | characteristics | US patent application |
| SEQ_ID_NO_202 | Useful for making plants with | The sequence is a functional homolog |
| | modulated growth and phenotype | of SEQ ID NO 178 in the 11/435,388 |
| | characteristics | US patent application |
| SEQ_ID_NO_202 | Useful for making plants with | The sequence is a functional homolog |
| | modulated growth and phenotype | of SEQ ID NO 178 in the 10/714,887 |
| | characteristics | US patent application |
| SEQ_ID_NO_202 | Useful for making plants with | The sequence is a functional homolog |
| | modulated growth and phenotype | of SEQ ID NO 174 in the 11/435,388 |
| | characteristics | US patent application |
| SEQ_ID_NO_202 | Useful for making plants with | The sequence is a functional homolog |
| | modulated growth and phenotype | of SEQ ID NO 174 in the 10/714,887 |
| | characteristics | US patent application |
| SEQ_ID_NO_2030 | The plant is abnormally small. | Useful for making plants with |
| | | modulated biomass |
| SEQ_ID_NO_2056 | The plant flowers significantly late | Useful for making plants with |
| | compared to wild-type. | modulated flowering time |
| SEQ_ID_NO_2056 | No seed is being produced by the plant | Useful for biocontainment applications |
| SEQ_ID_NO_2086 | The plant flowers significantly late | Useful for making plants with |
| | compared to wild-type. | modulated flowering time |
| SEQ_ID_NO_2090 | | Useful for making plants with |
| | | modulated oxidative stress sensitivity |
| SEQ_ID_NO_2094 | Useful for making plants with | The sequence is a functional homolog |
| | modulated growth and phenotype | of SEQ ID NO 462 in the 10/412,699 |
| | characteristics | US patent application |
| SEQ_ID_NO_2094 | Useful for making plants with | The sequence is a functional homolog |
| | modulated growth and phenotype | of SEQ ID NO 1064 in the 11/479,226 |
| | characteristics | US patent application |
| SEQ_ID_NO_2102 | Useful for making plants with | The sequence is a functional homolog |
| | modulated growth and phenotype | of SEQ ID NO 712 in the 11/479,226 |
| | characteristics | US patent application |
| SEQ_ID_NO_2102 | Useful for making plants with | The sequence is a functional homolog |
| | modulated growth and phenotype | of SEQ ID NO 1109 in the 10/374,780 |
| | characteristics | US patent application |
| SEQ_ID_NO_2108 | | Useful for making plants with altered |
| | | cell wall content and/or composition |
| SEQ_ID_NO_2112 | | Useful for making plants with altered |
| | | cell wall content and/or composition |
| SEQ_ID_NO_2132 | The plant senesces significantly late | Useful for making plants with |
| | copared to wild-type. | modulated time to senescence |
| SEQ_ID_NO_2132 | The plant is abnormally small. | Useful for making plants with |
| | | modulated biomass |
| SEQ_ID_NO_2132 | No seed is being produced by the plant | Useful for biocontainment applications |
| SEQ_ID_NO_2180 | | Useful for making plants with |
| | | modulated nitrogen use efficiency |
| SEQ_ID_NO_2180 | | Useful for making plants with altered |
| | | cell wall content and/or composition |
| SEQ_ID_NO_2180 | Useful for making plants with | The sequence is a functional homolog |
| | modulated growth and phenotype | of SEQ ID NO 460 in the 10/412,699 |
| | characteristics | US patent application |
| SEQ_ID_NO_2180 | Useful for making plants with | The sequence is a functional homolog |
| | modulated growth and phenotype | of SEQ ID NO 386 in the 10/374,780 |
| | characteristics | US patent application |
| SEQ_ID_NO_2180 | Useful for making plants with | The sequence is a functional homolog |
| | modulated growth and phenotype | of SEQ ID NO 1094 in the 10/225,066 |
| | characteristics | US patent application |
| SEQ_ID_NO_2180 | Useful for making plants with | The sequence is a functional homolog |
| | modulated growth and phenotype | of SEQ ID NO 1060 in the 11/479,226 |
| | characteristics | US patent application |
| SEQ_ID_NO_2186 | | Useful for making plants with altered |
| | | Lignin content |
| SEQ_ID_NO_22 | The plant flowers significantly late | Useful for making plants with |
| | compared to wild-type. | modulated flowering time |
| SEQ_ID_NO_22 | No seed is being produced by the plant | Useful for biocontainment applications |
| SEQ_ID_NO_2228 | | Useful for making plants with altered |
| | | cell wall content and/or composition |
| SEQ_ID_NO_2238 | The plant senesces significantly late | Useful for making plants with |
| | copared to wild-type. | modulated time to senescence |
| SEQ_ID_NO_2252 | The plant flowers significantly late | Useful for making plants with |
| | compared to wild-type. | modulated flowering time |
| SEQ_ID_NO_2252 | No seed is being produced by the plant | Useful for biocontainment applications |
| SEQ_ID_NO_2260 | | Useful for making plants with altered |
| | | terpenoid content |
| SEQ_ID_NO_2260 | | Useful for making plants with altered |
| | | Lignin content |
| SEQ_ID_NO_2260 | | Useful for making plants with altered |
| | | alkaloid content |
| SEQ_ID_NO_2282 | The plant flowers significantly late | Useful for making plants with |
| | compared to wild-type. | modulated flowering time |
| SEQ_ID_NO_2282 | No seed is being produced by the plant | Useful for biocontainment applications |
| SEQ_ID_NO_2294 | The plant flowers significantly late | Useful for making plants with |
| | compared to wild-type. | modulated flowering time |
| SEQ_ID_NO_2294 | No seed is being produced by the plant | Useful for biocontainment applications |
| SEQ_ID_NO_2298 | The plant produces a reduced number | Useful for biocontainment applications |
| | of seeds. | |
| SEQ_ID_NO_2308 | The plant flowers significantly late | Useful for making plants with |
| | compared to wild-type. | modulated flowering time |
| SEQ_ID_NO_2308 | No seed is being produced by the plant | Useful for biocontainment applications |
| SEQ_ID_NO_2330 | | Useful for making plants with |
| | | modulated phosphate use efficiency |
| SEQ_ID_NO_2330 | | Useful for making plants with |
| | | modulated nitrogen use efficiency |
| SEQ_ID_NO_2354 | The plant flowers significantly late | Useful for making plants with |
| | compared to wild-type. | modulated flowering time |
| SEQ_ID_NO_2354 | No seed is being produced by the plant | Useful for biocontainment applications |
| SEQ_ID_NO_2362 | | Useful for making plants with |
| | | modulated nitrogen use efficiency |
| SEQ_ID_NO_2362 | The plant flowers significantly late | Useful for making plants with |
| | compared to wild-type. | modulated flowering time |
| SEQ_ID_NO_2362 | | Useful for making plants with altered |
| | | Lignin content |
| SEQ_ID_NO_2362 | Useful for making plants with | The sequence is a functional homolog |
| | modulated growth and phenotype | of SEQ ID NO 1016 in the 11/435,388 |
| | characteristics | US patent application |
| SEQ_ID_NO_2382 | | Useful for making plants with altered |
| | | alkaloid content |
| SEQ_ID_NO_2392 | | Useful for making plants with |
| | | modulated low light sensitivity |
| SEQ_ID_NO_2392 | The plant flowers significantly late | Useful for making plants with |
| | compared to wild-type. | modulated flowering time |
| SEQ_ID_NO_2424 | | Useful for making plants with |
| | | modulated phosphate use efficiency |
| SEQ_ID_NO_2424 | The plant flowers significantly late | Useful for making plants with |
| | compared to wild-type. | modulated flowering time |
| SEQ_ID_NO_2424 | The plant is abnormally large. | Useful for making plants with |
| | | modulated biomass |
| SEQ_ID_NO_244 | The plant flowers significantly late | Useful for making plants with |
| | compared to wild-type. | modulated flowering time |
| SEQ_ID_NO_244 | No seed is being produced by the plant | Useful for biocontainment applications |
| SEQ_ID_NO_2440 | | Useful for making plants with altered |
| | | Lignin content |
| SEQ_ID_NO_2440 | | Useful for making plants with altered |
| | | alkaloid content |
| SEQ_ID_NO_2488 | | Useful for making plants with |
| | | modulated cold sensitivity |
| SEQ_ID_NO_2540 | Useful for making plants with | The sequence is a functional homolog |
| | modulated growth and phenotype | of SEQ ID NO 92 in the 10/669,824 |
| | characteristics | US patent application |
| SEQ_ID_NO_2540 | Useful for making plants with | The sequence is a functional homolog |
| | modulated growth and phenotype | of SEQ ID NO 88 in the 10/669,824 |
| | characteristics | US patent application |
| SEQ_ID_NO_2540 | Useful for making plants with | The sequence is a functional homolog |
| | modulated growth and phenotype | of SEQ ID NO 48 in the 10/870,198 |
| | characteristics | US patent application |
| SEQ_ID_NO_2540 | Useful for making plants with | The sequence is a functional homolog |
| | modulated growth and phenotype | of SEQ ID NO 48 in the 10/669,824 |
| | characteristics | US patent application |
| SEQ_ID_NO_2540 | Useful for making plants with | The sequence is a functional homolog |
| | modulated growth and phenotype | of SEQ ID NO 392 in the 10/714,887 |
| | characteristics | US patent application |
| SEQ_ID_NO_2540 | Useful for making plants with | The sequence is a functional homolog |
| | modulated growth and phenotype | of SEQ ID NO 390 in the 11/435,388 |
| | characteristics | US patent application |
| SEQ_ID_NO_2540 | Useful for making plants with | The sequence is a functional homolog |
| | modulated growth and phenotype | of SEQ ID NO 390 in the 10/714,887 |
| | characteristics | US patent application |
| SEQ_ID_NO_2540 | Useful for making plants with | The sequence is a functional homolog |
| | modulated growth and phenotype | of SEQ ID NO 388 in the 11/435,388 |
| | characteristics | US patent application |
| SEQ_ID_NO_2540 | Useful for making plants with | The sequence is a functional homolog |
| | modulated growth and phenotype | of SEQ ID NO 388 in the 10/714,887 |
| | characteristics | US patent application |
| SEQ_ID_NO_2540 | Useful for making plants with | The sequence is a functional homolog |
| | modulated growth and phenotype | of SEQ ID NO 386 in the 11/435,388 |
| | characteristics | US patent application |
| SEQ_ID_NO_2540 | Useful for making plants with | The sequence is a functional homolog |
| | modulated growth and phenotype | of SEQ ID NO 300 in the 10/714,887 |
| | characteristics | US patent application |
| SEQ_ID_NO_2540 | Useful for making plants with | The sequence is a functional homolog |
| | modulated growth and phenotype | of SEQ ID NO 298 in the 11/435,388 |
| | characteristics | US patent application |
| SEQ_ID_NO_2540 | Useful for making plants with | The sequence is a functional homolog |
| | modulated growth and phenotype | of SEQ ID NO 256 in the 10/225,066 |
| | characteristics | US patent application |
| SEQ_ID_NO_2540 | Useful for making plants with | The sequence is a functional homolog |
| | modulated growth and phenotype | of SEQ ID NO 2528 in the 10/374,780 |
| | characteristics | US patent application |
| SEQ_ID_NO_2540 | Useful for making plants with | The sequence is a functional homolog |
| | modulated growth and phenotype | of SEQ ID NO 24 in the 10/870,198 |
| | characteristics | US patent application |
| SEQ_ID_NO_2540 | Useful for making plants with | The sequence is a functional homolog |
| | modulated growth and phenotype | of SEQ ID NO 24 in the 10/669,824 |
| | characteristics | US patent application |
| SEQ_ID_NO_2540 | Useful for making plants with | The sequence is a functional homolog |
| | modulated growth and phenotype | of SEQ ID NO 18 in the 10/870,198 |
| | characteristics | US patent application |
| SEQ_ID_NO_2540 | Useful for making plants with | The sequence is a functional homolog |
| | modulated growth and phenotype | of SEQ ID NO 18 in the 10/669,824 |
| | characteristics | US patent application |
| SEQ_ID_NO_2540 | Useful for making plants with | The sequence is a functional homolog |
| | modulated growth and phenotype | of SEQ ID NO 16 in the 10/870,198 |
| | characteristics | US patent application |
| SEQ_ID_NO_2540 | Useful for making plants with | The sequence is a functional homolog |
| | modulated growth and phenotype | of SEQ ID NO 16 in the 10/669,824 |
| | characteristics | US patent application |
| SEQ_ID_NO_2540 | Useful for making plants with | The sequence is a functional homolog |
| | modulated growth and phenotype | of SEQ ID NO 1417 in the 10/374,780 |
| | characteristics | US patent application |
| SEQ_ID_NO_2540 | Useful for making plants with | The sequence is a functional homolog |
| | modulated growth and phenotype | of SEQ ID NO 1416 in the 10/374,780 |
| | characteristics | US patent application |
| SEQ_ID_NO_2540 | Useful for making plants with | The sequence is a functional homolog |
| | modulated growth and phenotype | of SEQ ID NO 1415 in the 10/374,780 |
| | characteristics | US patent application |
| SEQ_ID_NO_2540 | Useful for making plants with | The sequence is a functional homolog |
| | modulated growth and phenotype | of SEQ ID NO 1414 in the 10/374,780 |
| | characteristics | US patent application |
| SEQ_ID_NO_2578 | The plant flowers significantly late | Useful for making plants with |
| | compared to wild-type. | modulated flowering time |
| SEQ_ID_NO_2578 | No seed is being produced by the plant | Useful for biocontainment applications |
| SEQ_ID_NO_2588 | | Useful for making plants with altered |
| | | terpenoid content |
| SEQ_ID_NO_2588 | | Useful for making plants with altered |
| | | alkaloid content |
| SEQ_ID_NO_2598 | | Useful for making plants with altered |
| | | cell wall content and/or composition |
| SEQ_ID_NO_2666 | The plant flowers significantly earllier | Useful for making plants with |
| | than wild-type. | modulated flowering time |
| SEQ_ID_NO_2666 | | Useful for making plants with |
| | | modulated flowering time |
| SEQ_ID_NO_2666 | The plant is abnormally small. | Useful for making plants with |
| | | modulated biomass |
| SEQ_ID_NO_2666 | | Useful for making plants with |
| | | modulated biomass |
| SEQ_ID_NO_2718 | Useful for making plants with | The sequence is a functional homolog |
| | modulated growth and phenotype | of SEQ ID NO 805 in the 11/479,226 |
| | characteristics | US patent application |
| SEQ_ID_NO_2718 | Useful for making plants with | The sequence is a functional homolog |
| | modulated growth and phenotype | of SEQ ID NO 793 in the 11/479,226 |
| | characteristics | US patent application |
| SEQ_ID_NO_2718 | Useful for making plants with | The sequence is a functional homolog |
| | modulated growth and phenotype | of SEQ ID NO 790 in the 10/225,066 |
| | characteristics | US patent application |
| SEQ_ID_NO_2718 | Useful for making plants with | The sequence is a functional homolog |
| | modulated growth and phenotype | of SEQ ID NO 344 in the 10/412,699 |
| | characteristics | US patent application |
| SEQ_ID_NO_2718 | Useful for making plants with | The sequence is a functional homolog |
| | modulated growth and phenotype | of SEQ ID NO 2350 in the 10/374,780 |
| | characteristics | US patent application |
| SEQ_ID_NO_2722 | The plant produces a reduced number | Useful for biocontainment applications |
| | of seeds. | |
| SEQ_ID_NO_2752 | | Useful for making plants with |
| | | modulated salt sensitivity |
| SEQ_ID_NO_278 | The plant flowers significantly late | Useful for making plants with |
| | compared to wild-type. | modulated flowering time |
| SEQ_ID_NO_278 | No seed is being produced by the plant | Useful for biocontainment applications |
| SEQ_ID_NO_288 | The plant is abnormally small. | Useful for making plants with |
| | | modulated biomass |
| SEQ_ID_NO_2880 | | Useful for making plants with altered |
| | | Lignin content |
| SEQ_ID_NO_2898 | | Useful for making plants with |
| | | modulated phosphate use efficiency |
| SEQ_ID_NO_2898 | The plant flowers significantly late | Useful for making plants with |
| | compared to wild-type. | modulated flowering time |
| SEQ_ID_NO_2898 | The plant is abnormally large. | Useful for making plants with |
| | | modulated biomass |
| SEQ_ID_NO_2916 | | Useful for making plants with |
| | | modulated salt sensitivity |
| SEQ_ID_NO_2920 | The plant flowers significantly late | Useful for making plants with |
| | compared to wild-type. | modulated flowering time |
| SEQ_ID_NO_2920 | No seed is being produced by the plant | Useful for biocontainment applications |
| SEQ_ID_NO_294 | | Useful for making plants with |
| | | modulated cold sensitivity |
| SEQ_ID_NO_2940 | | Useful for making plants with |
| | | modulated phosphate use efficiency |
| SEQ_ID_NO_2940 | | Useful for making plants with |
| | | modulated nitrogen use efficiency |
| SEQ_ID_NO_2944 | The plant produces a reduced number | Useful for biocontainment applications |
| | of seeds. | |
| SEQ_ID_NO_2976 | The plant flowers significantly late | Useful for making plants with |
| | compared to wild-type. | modulated flowering time |
| SEQ_ID_NO_2976 | No seed is being produced by the plant | Useful for biocontainment applications |
| SEQ_ID_NO_2980 | | Useful, for making plants with altered |
| | | Lignin content |
| SEQ_ID_NO_2980 | | Useful, for making plants with altered |
| | | cell wall content and/or composition |
| SEQ_ID_NO_2980 | | Useful, for making plants with altered |
| | | cell wall composition |
| SEQ_ID_NO_2988 | | Useful for making plants with |
| | | modulated flowering time |
| SEQ_ID_NO_2996 | | Useful for making plants with |
| | | modulated oxidative stress sensitivity |
| SEQ_ID_NO_300 | The plant is abnormally large. | Useful for making plants with |
| | | modulated biomass |
| SEQ_ID_NO_300 | The plant is abnormally small. | Useful for making plants with |
| | | modulated biomass |
| SEQ_ID_NO_3006 | | Useful for making plants with altered |
| | | Lignin content |
| SEQ_ID_NO_3006 | | Useful for making plants with altered |
| | | alkaloid content |
| SEQ_ID_NO_3012 | | Useful for making plants with |
| | | modulated flowering time |
| SEQ_ID_NO_3024 | | Useful for making plants with altered |
| | | cell wall content and/or composition |
| SEQ_ID_NO_3070 | | Useful for making plants with |
| | | modulated nitrogen use efficiency |
| SEQ_ID_NO_3080 | The plant flowers significantly late | Useful for making plants with |
| | compared to wild-type. | modulated flowering time |
| SEQ_ID_NO_3080 | The plant is abnormally small. | Useful for making plants with |
| | | modulated biomass |
| SEQ_ID_NO_3102 | | Useful for making plants with altered |
| | | terpenoid content |
| SEQ_ID_NO_3152 | The plant is abnormally small. | Useful for making plants with |
| | | modulated biomass |
| SEQ_ID_NO_3152 | The plant produces a reduced number | Useful for biocontainment applications |
| | of seeds. | |
| SEQ_ID_NO_3170 | The plant is abnormally large. | Useful for making plants with |
| | | modulated biomass |
| SEQ_ID_NO_3170 | Useful for making plants with | The sequence is a functional homolog |
| | modulated growth and phenotype | of SEQ ID NO 786 in the 10/412,699 |
| | characteristics | US patent application |
| SEQ_ID_NO_3170 | Useful for making plants with | The sequence is a functional homolog |
| | modulated growth and phenotype | of SEQ ID NO 784 in the 10/412,699 |
| | characteristics | US patent application |
| SEQ_ID_NO_3170 | Useful for making plants with | The sequence is a functional homolog |
| | modulated growth and phenotype | of SEQ ID NO 1617 in the 11/479,226 |
| | characteristics | US patent application |
| SEQ_ID_NO_3170 | Useful for making plants with | The sequence is a functional homolog |
| | modulated growth and phenotype | of SEQ ID NO 1614 in the 11/479,226 |
| | characteristics | US patent application |
| SEQ_ID_NO_3218 | | Useful for making plants with |
| | | modulated nitrogen use efficiency |
| SEQ_ID_NO_3282 | The plant flowers significantly late | Useful for making plants with |
| | compared to wild-type. | modulated flowering time |
| SEQ_ID_NO_3282 | No seed is being produced by the plant | Useful for biocontainment applications |
| SEQ_ID_NO_3306 | The plant flowers significantly late | Useful for making plants with |
| | compared to wild-type. | modulated flowering time |
| SEQ_ID_NO_3306 | No seed is being produced by the plant | Useful for biocontainment applications |
| SEQ_ID_NO_3316 | The plant is abnormally large. | Useful for making plants with |
| | | modulated biomass |
| SEQ_ID_NO_3316 | Useful for making plants with | The sequence is a functional homolog |
| | modulated growth and phenotype | of SEQ ID NO 786 in the 10/412,699 |
| | characteristics | US patent application |
| SEQ_ID_NO_3316 | Useful for making plants with | The sequence is a functional homolog |
| | modulated growth and phenotype | of SEQ ID NO 784 in the 10/412,699 |
| | characteristics | US patent application |
| SEQ_ID_NO_3316 | Useful for making plants with | The sequence is a functional homolog |
| | modulated growth and phenotype | of SEQ ID NO 1617 in the 11/479,226 |
| | characteristics | US patent application |
| SEQ_ID_NO_3316 | Useful for making plants with | The sequence is a functional homolog |
| | modulated growth and phenotype | of SEQ ID NO 1614 in the 11/479,226 |
| | characteristics | US patent application |
| SEQ_ID_NO_3352 | The plant produces a reduced number | Useful for biocontainment applications |
| | of seeds. | |
| SEQ_ID_NO_3364 | Useful for making plants with | The sequence is a functional homolog |
| | modulated growth and phenotype | of SEQ ID NO 739 in the 10/374,780 |
| | characteristics | US patent application |
| SEQ_ID_NO_3372 | The plant is abnormally large. | Useful for making plants with |
| | | modulated biomass |
| SEQ_ID_NO_3372 | Useful for making plants with | The sequence is a functional homolog |
| | modulated growth and phenotype | of SEQ ID NO 786 in the 10/412,699 |
| | characteristics | US patent application |
| SEQ_ID_NO_3372 | Useful for making plants with | The sequence is a functional homolog |
| | modulated growth and phenotype | of SEQ ID NO 784 in the 10/412,699 |
| | characteristics | US patent application |
| SEQ_ID_NO_3372 | Useful for making plants with | The sequence is a functional homolog |
| | modulated growth and phenotype | of SEQ ID NO 1617 in the 11/479,226 |
| | characteristics | US patent application |
| SEQ_ID_NO_3372 | Useful for making plants with | The sequence is a functional homolog |
| | modulated growth and phenotype | of SEQ ID NO 1614 in the 11/479,226 |
| | characteristics | US patent application |
| SEQ_ID_NO_3392 | | Useful for making plants with |
| | | modulated cold sensitivity |
| SEQ_ID_NO_3400 | | Useful for making plants with altered |
| | | cell wall content and/or composition |
| SEQ_ID_NO_3412 | | Useful for making plants with |
| | | modulated cold sensitivity |
| SEQ_ID_NO_3456 | The plant flowers significantly late | Useful for making plants with |
| | compared to wild-type. | modulated flowering time |
| SEQ_ID_NO_3456 | No seed is being produced by the plant | Useful for biocontainment applications |
| SEQ_ID_NO_3462 | | Useful for making plants with |
| | | modulated phosphate use efficiency |
| SEQ_ID_NO_3484 | | Useful for making plants with |
| | | modulated phosphate use efficiency |
| SEQ_ID_NO_3484 | The plant flowers significantly late | Useful for making plants with |
| | compared to wild-type. | modulated flowering time |
| SEQ_ID_NO_3484 | The plant is abnormally large. | Useful for making plants with |
| | | modulated biomass |
| SEQ_ID_NO_3518 | | Useful for making plants with altered |
| | | Lignin content |
| SEQ_ID_NO_3522 | The plant produces a reduced number | Useful for biocontainment applications |
| | of seeds. | |
| SEQ_ID_NO_3590 | | Useful for making plants with |
| | | modulated cold sensitivity |
| SEQ_ID_NO_3596 | The plant flowers significantly late | Useful for making plants with |
| | compared to wild-type. | modulated flowering time |
| SEQ_ID_NO_3596 | No seed is being produced by the plant | Useful for biocontainment applications |
| SEQ_ID_NO_3602 | | Useful for making plants with altered |
| | | terpenoid content |
| SEQ_ID_NO_3650 | | Useful for making plants with |
| | | modulated phosphate use efficiency |
| SEQ_ID_NO_3670 | | Useful for making plants with |
| | | modulated cold sensitivity |
| SEQ_ID_NO_3698 | Useful for making plants with | The sequence is a functional homolog |
| | modulated growth and phenotype | of SEQ ID NO 1503 in the 10/374,780 |
| | characteristics | US patent application |
| SEQ_ID_NO_3730 | The plant senesces significantly late | Useful for making plants with |
| | copared to wild-type. | modulated time to senescence |
| SEQ_ID_NO_3732 | | Useful for making plants with altered |
| | | Lignin content |
| SEQ_ID_NO_3746 | The plant flowers significantly late | Useful for making plants with |
| | compared to wild-type. | modulated flowering time |
| SEQ_ID_NO_3746 | No seed is being produced by the plant | Useful for biocontainment applications |
| SEQ_ID_NO_3752 | The plant flowers significantly late | Useful for making plants with |
| | compared to wild-type. | modulated flowering time |
| SEQ_ID_NO_3752 | No seed is being produced by the plant | Useful for biocontainment applications |
| SEQ_ID_NO_3820 | The plant flowers significantly late | Useful for making plants with |
| | compared to wild-type. | modulated flowering time |
| SEQ_ID_NO_3820 | No seed is being produced by the plant | Useful for biocontainment applications |
| SEQ_ID_NO_3852 | | Useful for making plants with altered |
| | | Lignin content |
| SEQ_ID_NO_386 | The plant is abnormally large. | Useful for making plants with |
| | | modulated biomass |
| SEQ_ID_NO_386 | Useful for making plants with | The sequence is a functional homolog |
| | modulated growth and phenotype | of SEQ ID NO 786 in the 10/412,699 |
| | characteristics | US patent application |
| SEQ_ID_NO_386 | Useful for making plants with | The sequence is a functional homolog |
| | modulated growth and phenotype | of SEQ ID NO 784 in the 10/412,699 |
| | characteristics | US patent application |
| SEQ_ID_NO_386 | Useful for making plants with | The sequence is a functional homolog |
| | modulated growth and phenotype | of SEQ ID NO 1617 in the 11/479,226 |
| | characteristics | US patent application |
| SEQ_ID_NO_386 | Useful for making plants with | The sequence is a functional homolog |
| | modulated growth and phenotype | of SEQ ID NO 1614 in the 11/479,226 |
| | characteristics | US patent application |
| SEQ_ID_NO_3860 | The plant is abnormally small. | Useful for making plants with |
| | | modulated biomass |
| SEQ_ID_NO_3872 | The plant flowers significantly late | Useful for making plants with |
| | compared to wild-type. | modulated flowering time |
| SEQ_ID_NO_3872 | No seed is being produced by the plant | Useful for biocontainment applications |
| SEQ_ID_NO_3876 | The plant is abnormally small. | Useful for making plants with |
| | | modulated biomass |
| SEQ_ID_NO_3878 | The plant flowers significantly late | Useful for making plants with |
| | compared to wild-type. | modulated flowering time |
| SEQ_ID_NO_3878 | No seed is being produced by the plant | Useful for biocontainment applications |
| SEQ_ID_NO_3982 | Useful for making plants with | The sequence is a functional homolog |
| | modulated growth and phenotype | of SEQ ID NO 126 in the 11/435,388 |
| | characteristics | US patent application |
| SEQ_ID_NO_3982 | Useful for making plants with | The sequence is a functional homolog |
| | modulated growth and phenotype | of SEQ ID NO 126 in the 10/714,887 |
| | characteristics | US patent application |
| SEQ_ID_NO_3986 | The plant flowers significantly late | Useful for making plants with |
| | compared to wild-type. | modulated flowering time |
| SEQ_ID_NO_3986 | The plant is abnormally small. | Useful for making plants with |
| | | modulated biomass |
| SEQ_ID_NO_4 | | Useful for making plants with |
| | | modulated nitrogen use efficiency |
| SEQ_ID_NO_4056 | The plant flowers significantly late | Useful for making plants with |
| | compared to wild-type. | modulated flowering time |
| SEQ_ID_NO_4056 | The plant is abnormally small. | Useful for making plants with |
| | | modulated biomass |
| SEQ_ID_NO_4126 | | Useful for making plants with altered |
| | | cell wall content and/or composition |
| SEQ_ID_NO_4142 | The plant flowers significantly late | Useful for making plants with |
| | compared to wild-type. | modulated flowering time |
| SEQ_ID_NO_4142 | No seed is being produced by the plant | Useful for biocontainment applications |
| SEQ_ID_NO_4164 | | Useful for making plants with |
| | | modulated phosphate use efficiency |
| SEQ_ID_NO_4164 | The plant flowers significantly late | Useful for making plants with |
| | compared to wild-type. | modulated flowering time |
| SEQ_ID_NO_4164 | The plant is abnormally large. | Useful for making plants with |
| | | modulated biomass |
| SEQ_ID_NO_4188 | The plant flowers significantly late | Useful for making plants with |
| | compared to wild-type. | modulated flowering time |
| SEQ_ID_NO_4188 | The plant is abnormally small. | Useful for making plants with |
| | | modulated biomass |
| SEQ_ID_NO_422 | | Useful for making plants with altered |
| | | Lignin content |
| SEQ_ID_NO_422 | | Useful for making plants with altered |
| | | alkaloid content |
| SEQ_ID_NO_4228 | The plant senesces significantly late | Useful for making plants with |
| | copared to wild-type. | modulated time to senescence |
| SEQ_ID_NO_4228 | The plant flowers significantly late | Useful for making plants with |
| | compared to wild-type. | modulated flowering time |
| SEQ_ID_NO_4238 | The plant flowers significantly late | Useful for making plants with |
| | compared to wild-type. | modulated flowering time |
| SEQ_ID_NO_4238 | No seed is being produced by the plant | Useful for biocontainment applications |
| SEQ_ID_NO_4292 | The plant produces a reduced number | Useful for biocontainment applications |
| | of seeds. | |
| SEQ_ID_NO_4314 | | Useful for making plants with altered |
| | | Lignin content |
| SEQ_ID_NO_4314 | | Useful for making plants with altered |
| | | alkaloid content |
| SEQ_ID_NO_4342 | The plant flowers significantly late | Useful for making plants with |
| | compared to wild-type. | modulated flowering time |
| SEQ_ID_NO_4342 | The plant is abnormally small. | Useful for making plants with |
| | | modulated biomass |
| SEQ_ID_NO_4364 | The plant flowers significantly late | Useful for making plants with |
| | compared to wild-type. | modulated flowering time |
| SEQ_ID_NO_4364 | No seed is being produced by the plant | Useful for biocontainment applications |
| SEQ_ID_NO_438 | | Useful for making plants with |
| | | modulated cold sensitivity |
| SEQ_ID_NO_4386 | The plant flowers significantly late | Useful for making plants with |
| | compared to wild-type. | modulated flowering time |
| SEQ_ID_NO_4386 | No seed is being produced by the plant | Useful for biocontainment applications |
| SEQ_ID_NO_4392 | | Useful for making plants with altered oil |
| | | content |
| SEQ_ID_NO_4410 | The plant is abnormally small. | Useful for making plants with |
| | | modulated biomass |
| SEQ_ID_NO_4418 | | Useful for making plants with |
| | | modulated heat sensitivity |
| SEQ_ID_NO_4418 | | Useful for making plants with altered |
| | | Lignin content |
| SEQ_ID_NO_4436 | The plant is abnormally small. | Useful for making plants with |
| | | modulated biomass |
| SEQ_ID_NO_4436 | The plant produces a reduced number | Useful for biocontainment applications |
| | of seeds. | |
| SEQ_ID_NO_4476 | | Useful for making plants with altered |
| | | cell wall content and/or composition |
| SEQ_ID_NO_4494 | | Useful for making plants with |
| | | modulated drought sensitivity |
| SEQ_ID_NO_4524 | | Useful for making plants with |
| | | modulated low light sensitivity |
| SEQ_ID_NO_4524 | The plant flowers significantly late | Useful for making plants with |
| | compared to wild-type. | modulated flowering time |
| SEQ_ID_NO_4592 | The plant is abnormally small. | Useful for making plants with |
| | | modulated biomass |
| SEQ_ID_NO_4592 | Useful for making plants with | The sequence is a functional homolog |
| | modulated growth and phenotype | of SEQ ID NO 960 in the 10/225,066 |
| | characteristics | US patent application |
| SEQ_ID_NO_4592 | Useful for making plants with | The sequence is a functional homolog |
| | modulated growth and phenotype | of SEQ ID NO 874 in the 10/412,699 |
| | characteristics | US patent application |
| SEQ_ID_NO_4592 | Useful for making plants with | The sequence is a functional homolog |
| | modulated growth and phenotype | of SEQ ID NO 2604 in the 10/374,780 |
| | characteristics | US patent application |
| SEQ_ID_NO_4592 | Useful for making plants with | The sequence is a functional homolog |
| | modulated growth and phenotype | of SEQ ID NO 1769 in the 11/479,226 |
| | characteristics | US patent application |
| SEQ_ID_NO_4592 | Useful for making plants with | The sequence is a functional homolog |
| | modulated growth and phenotype | of SEQ ID NO 1765 in the 11/479,226 |
| | characteristics | US patent application |
| SEQ_ID_NO_4592 | Useful for making plants with | The sequence is a functional homolog |
| | modulated growth and phenotype | of SEQ ID NO 1761 in the 11/479,226 |
| | characteristics. | US patent application |
| SEQ_ID_NO_4604 | The plants are small. | Useful for making plants with |
| | | modulated biomass |
| SEQ_ID_NO_4604 | | Useful for making plants with |
| | | modulated biomass |
| SEQ_ID_NO_4610 | The plant is abnormally large. | Useful for making plants with |
| | | modulated biomass |
| SEQ_ID_NO_4610 | Useful for making plants with | The sequence is a functional homolog |
| | modulated growth and phenotype | of SEQ ID NO 786 in the 10/412,699 |
| | characteristics | US patent application |
| SEQ_ID_NO_4610 | Useful for making plants with | The sequence is a functional homolog |
| | modulated growth and phenotype | of SEQ ID NO 784 in the 10/412,699 |
| | characteristics | US patent application |
| SEQ_ID_NO_4610 | Useful for making plants with | The sequence is a functional homolog |
| | modulated growth and phenotype | of SEQ ID NO 1617 in the 11/479,226 |
| | characteristics | US patent application |
| SEQ_ID_NO_4610 | Useful for making plants with | The sequence is a functional homolog |
| | modulated growth and phenotype | of SEQ ID NO 1614 in the 11/479,226 |
| | characteristics | US patent application |
| SEQ_ID_NO_4666 | | Useful for making plants with altered |
| | | cell wall content and/or composition |
| SEQ_ID_NO_4720 | The plant is abnormally large. | Useful for making plants with |
| | | modulated biomass |
| SEQ_ID_NO_4748 | The plant flowers significantly late | Useful for making plants with |
| | compared to wild-type. | modulated flowering time |
| SEQ_ID_NO_4748 | No seed is being produced by the plant | Useful for biocontainment applications |
| SEQ_ID_NO_476 | | Useful for biocontainment applications |
| SEQ_ID_NO_4770 | The plant flowers significantly earllier | Useful for making plants with |
| | than wild-type. | modulated flowering time |
| SEQ_ID_NO_4770 | | Useful for making plants with |
| | | modulated flowering time |
| SEQ_ID_NO_4770 | The plant is abnormally small. | Useful for making plants with |
| | | modulated biomass |
| SEQ_ID_NO_4770 | | Useful for making plants with |
| | | modulated biomass |
| SEQ_ID_NO_48 | The plant flowers significantly late | Useful for making plants with |
| | compared to wild-type. | modulated flowering time |
| SEQ_ID_NO_48 | No seed is being produced by the plant | Useful for biocontainment applications |
| SEQ_ID_NO_4820 | Useful for making plants with | The sequence is a functional homolog |
| | modulated growth and phenotype | of SEQ ID NO 793 in the 11/479,226 |
| | characteristics | US patent application |
| SEQ_ID_NO_4878 | | Useful for making plants with |
| | | modulated phosphate use efficiency |
| SEQ_ID_NO_4878 | | Useful for making plants with |
| | | modulated nitrogen use efficiency |
| SEQ_ID_NO_4888 | | Useful for making plants with altered |
| | | cell wall content and/or composition |
| SEQ_ID_NO_4888 | | Useful for biocontainment applications |
| SEQ_ID_NO_4888 | The plant produces a reduced number | Useful for biocontainment applications |
| | of seeds. | |
| SEQ_ID_NO_4888 | Useful for making plants with | The sequence is a functional homolog |
| | modulated growth and phenotype | of SEQ ID NO 970 in the 11/435,388 |
| | characteristics | US patent application |
| SEQ_ID_NO_4888 | Useful for making plants with | The sequence is a functional homolog |
| | modulated growth and phenotype | of SEQ ID NO 72 in the 10/225,066 |
| | characteristics | US patent application |
| SEQ_ID_NO_4888 | Useful for making plants with | The sequence is a functional homolog |
| | modulated growth and phenotype | of SEQ ID NO 2624 in the 10/374,780 |
| | characteristics | US patent application |
| SEQ_ID_NO_4888 | Useful for making plants with | The sequence is a functional homolog |
| | modulated growth and phenotype | of SEQ ID NO 1520 in the 10/666,642 |
| | characteristics | US patent application |
| SEQ_ID_NO_4930 | Useful for making plants with | The sequence is a functional homolog |
| | modulated growth and phenotype | of SEQ ID NO 614 in the 10/666,642 |
| | characteristics | US patent application |
| SEQ_ID_NO_4940 | The plant flowers significantly earllier | Useful for making plants with |
| | than wild-type. | modulated flowering time |
| SEQ_ID_NO_4940 | | Useful for making plants with |
| | | modulated flowering time |
| SEQ_ID_NO_4940 | The plant is abnormally small. | Useful for making plants with |
| | | modulated biomass |
| SEQ_ID_NO_4940 | | Useful for making plants with |
| | | modulated biomass |
| SEQ_ID_NO_4942 | The plant is abnormally large. | Useful for making plants with |
| | | modulated biomass |
| SEQ_ID_NO_4950 | | Useful for making plants with altered oil |
| | | content |
| SEQ_ID_NO_4978 | | Useful for making plants with |
| | | modulated nitrogen use efficiency |
| SEQ_ID_NO_4978 | The plant is abnormally small. | Useful for making plants with |
| | | modulated biomass |
| SEQ_ID_NO_4978 | | Useful for making plants with altered |
| | | Lignin content |
| SEQ_ID_NO_4978 | | Useful for making plants with altered |
| | | alkaloid content |
| SEQ_ID_NO_4978 | Useful for making plants with | The sequence is a functional homolog |
| | modulated growth and phenotype | of SEQ ID NO 1016 in the 11/435,388 |
| | characteristics | US patent application |
| SEQ_ID_NO_4982 | | Useful for making plants with altered |
| | | Lignin content |
| SEQ_ID_NO_5014 | The plant is abnormally small. | Useful for making plants with |
| | | modulated biomass |
| SEQ_ID_NO_5020 | | Useful for making plants with altered |
| | | Lignin content |
| SEQ_ID_NO_5024 | | Useful for making plants with altered |
| | | Lignin content |
| SEQ_ID_NO_5024 | | Useful for making plants with altered |
| | | alkaloid content |
| SEQ_ID_NO_5036 | | Useful for making plants with |
| | | modulated heat sensitivity |
| SEQ_ID_NO_5036 | | Useful for making plants with altered |
| | | Lignin content |
| SEQ_ID_NO_5038 | | Useful for making plants with altered |
| | | cell wall content and/or composition |
| SEQ_ID_NO_5056 | The plant produces a reduced number | Useful for biocontainment applications |
| | of seeds. | |
| SEQ_ID_NO_5068 | The plant flowers significantly late | Useful for making plants with |
| | compared to wild-type. | modulated flowering time |
| SEQ_ID_NO_5068 | No seed is being produced by the plant | Useful for biocontainment applications |
| SEQ_ID_NO_5100 | The plant flowers significantly late | Useful for making plants with |
| | compared to wild-type. | modulated flowering time |
| SEQ_ID_NO_5100 | | Useful for making plants with |
| | | modulated cold sensitivity |
| SEQ_ID_NO_5114 | The plant is abnormally large. | Useful for making plants with |
| | | modulated biomass |
| SEQ_ID_NO_5114 | The plant is abnormally small. | Useful for making plants with |
| | | modulated biomass |
| SEQ_ID_NO_5118 | The plant flowers significantly late | Useful for making plants with |
| | compared to wild-type. | modulated flowering time |
| SEQ_ID_NO_5118 | The plant is abnormally small. | Useful for making plants with |
| | | modulated biomass |
| SEQ_ID_NO_5136 | The plant is abnormally large. | Useful for making plants with |
| | | modulated biomass |
| SEQ_ID_NO_5136 | The plant is abnormally small. | Useful for making plants with |
| | | modulated biomass |
| SEQ_ID_NO_5184 | The plant flowers significantly late | Useful for making plants with |
| | compared to wild-type. | modulated flowering time |
| SEQ_ID_NO_5184 | | Useful for making plants with |
| | | modulated cold sensitivity |
| SEQ_ID_NO_5188 | | Useful for making plants with altered |
| | | cell wall content and/or composition |
| SEQ_ID_NO_5196 | The plant is abnormally small. | Useful for making plants with |
| | | modulated biomass |
| SEQ_ID_NO_5240 | | Useful for making plants with |
| | | modulated drought sensitivity |
| SEQ_ID_NO_5248 | | Useful for making plants with altered |
| | | Lignin content |
| SEQ_ID_NO_5248 | | Useful for making plants with altered |
| | | alkaloid content |
| SEQ_ID_NO_5262 | The plant flowers significantly late | Useful for making plants with |
| | compared to wild-type. | modulated flowering time |
| SEQ_ID_NO_5274 | | Useful for making plants with |
| | | modulated flowering time |
| SEQ_ID_NO_5304 | | Useful for making plants with |
| | | modulated phosphate use efficiency |
| SEQ_ID_NO_5304 | | Useful for making plants with |
| | | modulated drought sensitivity |
| SEQ_ID_NO_5304 | | Useful for making plants with |
| | | modulated biomass |
| SEQ_ID_NO_5316 | The plant flowers significantly late | Useful for making plants with |
| | compared to wild-type. | modulated flowering time |
| SEQ_ID_NO_5316 | No seed is being produced by the plant | Useful for biocontainment applications |
| SEQ_ID_NO_5366 | The plant is abnormally small. | Useful for making plants with |
| | | modulated biomass |
| SEQ_ID_NO_5370 | | Useful for making plants with altered |
| | | terpenoid content |
| SEQ_ID_NO_5370 | | Useful for making plants with altered |
| | | Lignin content |
| SEQ_ID_NO_5372 | The plant flowers significantly late | Useful for making plants with |
| | compared to wild-type. | modulated flowering time |
| SEQ_ID_NO_5372 | No seed is being produced by the plant | Useful for biocontainment applications |
| SEQ_ID_NO_5380 | The plant flowers significantly late | Useful for making plants with |
| | compared to wild-type. | modulated flowering time |
| SEQ_ID_NO_5380 | No seed is being produced by the plant | Useful for biocontainment applications |
| SEQ_ID_NO_5398 | The plant senesces significantly late | Useful for making plants with |
| | copared to wild-type. | modulated time to senescence |
| SEQ_ID_NO_5422 | | Useful for making plants with |
| | | modulated nitrogen use efficiency |
| SEQ_ID_NO_5432 | The plant is abnormally small. | Useful for making plants with |
| | | modulated biomass |
| SEQ_ID_NO_5460 | | Useful for making plants with |
| | | modulated drought sensitivity |
| SEQ_ID_NO_5460 | Useful for making plants with | The sequence is a functional homolog |
| | modulated growth and phenotype | of SEQ ID NO 805 in the 11/479,226 |
| | characteristics | US patent application |
| SEQ_ID_NO_5460 | Useful for making plants with | The sequence is a functional homolog |
| | modulated growth and phenotype | of SEQ ID NO 801 in the 11/479,226 |
| | characteristics | US patent application |
| SEQ_ID_NO_5460 | Useful for making plants with | The sequence is a functional homolog |
| | modulated growth and phenotype | of SEQ ID NO 797 in the 11/479,226 |
| | characteristics | US patent application |
| SEQ_ID_NO_5460 | Useful for making plants with | The sequence is a functional homolog |
| | modulated growth and phenotype | of SEQ ID NO 790 in the 10/225,066 |
| | characteristics | US patent application |
| SEQ_ID_NO_5460 | Useful for making plants with | The sequence is a functional homolog |
| | modulated growth and phenotype | of SEQ ID NO 789 in the 11/479,226 |
| | characteristics | US patent application |
| SEQ_ID_NO_5460 | Useful for making plants with | The sequence is a functional homolog |
| | modulated growth and phenotype | of SEQ ID NO 786 in the 11/479,226 |
| | characteristics | US patent application |
| SEQ_ID_NO_5460 | Useful for making plants with | The sequence is a functional homolog |
| | modulated growth and phenotype | of SEQ ID NO 782 in the 11/479,226 |
| | characteristics | US patent application |
| SEQ_ID_NO_5460 | Useful for making plants with | The sequence is a functional homolog |
| | modulated growth and phenotype | of SEQ ID NO 344 in the 10/412,699 |
| | characteristics | US patent application |
| SEQ_ID_NO_5460 | Useful for making plants with | The sequence is a functional homolog |
| | modulated growth and phenotype | of SEQ ID NO 342 in the 10/412,699 |
| | characteristics | US patent application |
| SEQ_ID_NO_5460 | Useful for making plants with | The sequence is a functional homolog |
| | modulated growth and phenotype | of SEQ ID NO 2350 in the 10/374,780 |
| | characteristics | US patent application |
| SEQ_ID_NO_5462 | | Useful for making plants with altered |
| | | terpenoid content |
| SEQ_ID_NO_5588 | The plant produces a reduced number | Useful for biocontainment applications |
| | of seeds. | |
| SEQ_ID_NO_5600 | The plant is abnormally small. | Useful for making plants with |
| | | modulated biomass |
| SEQ_ID_NO_5600 | | Useful for making plants with altered |
| | | cell wall content and/or composition |
| SEQ_ID_NO_5664 | The plant is abnormally small. | Useful for making plants with |
| | | modulated biomass |
| SEQ_ID_NO_5708 | | Useful for making plants with |
| | | modulated phosphate use efficiency |
| SEQ_ID_NO_5708 | The plant flowers significantly late | Useful for making plants with |
| | compared to wild-type. | modulated flowering time |
| SEQ_ID_NO_5708 | The plant is abnormally large. | Useful for making plants with |
| | | modulated biomass |
| SEQ_ID_NO_5710 | The plant is abnormally small. | Useful for making plants with |
| | | modulated biomass |
| SEQ_ID_NO_5710 | The leaves start out wild-type green | Useful for biocontainment applications |
| | and gradually turn yellow-green in | |
| | color, while the cotyledons stay wild- | |
| | type green. | |
| SEQ_ID_NO_5746 | | Useful for making plants with altered |
| | | terpenoid content |
| SEQ_ID_NO_5748 | | Useful for making plants with |
| | | modulated phosphate use efficiency |
| SEQ_ID_NO_5748 | The plant flowers significantly late | Useful for making plants with |
| | compared to wild-type. | modulated flowering time |
| SEQ_ID_NO_5748 | The plant is abnormally large. | Useful for making plants with |
| | | modulated biomass |
| SEQ_ID_NO_5808 | There is no branching. | Useful for making plants with |
| | | modulated biomass |
| SEQ_ID_NO_5840 | Useful for making plants with | The sequence is a functional homolog |
| | modulated growth and phenotype | of SEQ ID NO 92 in the 10/374,780 |
| | characteristics | US patent application |
| SEQ_ID_NO_5840 | Useful for making plants with | The sequence is a functional homolog |
| | modulated growth and phenotype | of SEQ ID NO 824 in the 10/374,780 |
| | characteristics | US patent application |
| SEQ_ID_NO_5840 | Useful for making plants with | The sequence is a functional homolog |
| | modulated growth and phenotype | of SEQ ID NO 715 in the 11/479,226 |
| | characteristics | US patent application |
| SEQ_ID_NO_5840 | Useful for making plants with | The sequence is a functional homolog |
| | modulated growth and phenotype | of SEQ ID NO 24 in the 11/375,241 |
| | characteristics | US patent application |
| SEQ_ID_NO_5840 | Useful for making plants with | The sequence is a functional homolog |
| | modulated growth and phenotype | of SEQ ID NO 2190 in the 10/374,780 |
| | characteristics | US patent application |
| SEQ_ID_NO_5850 | The plant flowers significantly earllier | Useful for making plants with |
| | than wild-type. | modulated flowering time |
| SEQ_ID_NO_5850 | | Useful for making plants with |
| | | modulated flowering time |
| SEQ_ID_NO_5850 | The plant is abnormally small. | Useful for making plants with |
| | | modulated biomass |
| SEQ_ID_NO_5850 | | Useful for making plants with |
| | | modulated biomass |
| SEQ_ID_NO_5872 | | Useful for making plants with |
| | | modulated drought sensitivity |
| SEQ_ID_NO_5872 | Useful for making plants with | The sequence is a functional homolog |
| | modulated growth and phenotype | of SEQ ID NO 805 in the 11/479,226 |
| | characteristics | US patent application |
| SEQ_ID_NO_5872 | Useful for making plants with | The sequence is a functional homolog |
| | modulated growth and phenotype | of SEQ ID NO 801 in the 11/479,226 |
| | characteristics | US patent application |
| SEQ_ID_NO_5872 | Useful for making plants with | The sequence is a functional homolog |
| | modulated growth and phenotype | of SEQ ID NO 797 in the 11/479,226 |
| | characteristics | US patent application |
| SEQ_ID_NO_5872 | Useful for making plants with | The sequence is a functional homolog |
| | modulated growth and phenotype | of SEQ ID NO 790 in the 10/225,066 |
| | characteristics | US patent application |
| SEQ_ID_NO_5872 | Useful for making plants with | The sequence is a functional homolog |
| | modulated growth and phenotype | of SEQ ID NO 789 in the 11/479,226 |
| | characteristics | US patent application |
| SEQ_ID_NO_5872 | Useful for making plants with | The sequence is a functional homolog |
| | modulated growth and phenotype | of SEQ ID NO 786 in the 11/479,226 |
| | characteristics | US patent application |
| SEQ_ID_NO_5872 | Useful for making plants with | The sequence is a functional homolog |
| | modulated growth and phenotype | of SEQ ID NO 782 in the 11/479,226 |
| | characteristics | US patent application |
| SEQ_ID_NO_5872 | Useful for making plants with | The sequence is a functional homolog |
| | modulated growth and phenotype | of SEQ ID NO 344 in the 10/412,699 |
| | characteristics | US patent application |
| SEQ_ID_NO_5872 | Useful for making plants with | The sequence is a functional homolog |
| | modulated growth and phenotype | of SEQ ID NO 342 in the 10/412,699 |
| | characteristics | US patent application |
| SEQ_ID_NO_5872 | Useful for making plants with | The sequence is a functional homolog |
| | modulated growth and phenotype | of SEQ ID NO 2350 in the 10/374,780 |
| | characteristics | US patent application |
| SEQ_ID_NO_5872 | Useful for making plants with | The sequence is a functional homolog |
| | modulated growth and phenotype | of SEQ ID NO 1777 in the 11/479,226 |
| | characteristics | US patent application |
| SEQ_ID_NO_5876 | The plant flowers significantly earllier | Useful for making plants with |
| | than wild-type. | modulated flowering time |
| SEQ_ID_NO_5876 | | Useful for making plants with |
| | | modulated flowering time |
| SEQ_ID_NO_5876 | The plant is abnormally small. | Useful for making plants with |
| | | modulated biomass |
| SEQ_ID_NO_5876 | | Useful for making plants with |
| | | modulated biomass |
| SEQ_ID_NO_5882 | The plant is abnormally large. | Useful for making plants with |
| | | modulated biomass |
| SEQ_ID_NO_5882 | The plant is abnormally small. | Useful for making plants with |
| | | modulated biomass |
| SEQ_ID_NO_5886 | The plant is abnormally large. | Useful for making plants with |
| | | modulated biomass |
| SEQ_ID_NO_5886 | Useful for making plants with | The sequence is a functional homolog |
| | modulated growth and phenotype | of SEQ ID NO 786 in the 10/412,699 |
| | characteristics | US patent application |
| SEQ_ID_NO_5886 | Useful for making plants with | The sequence is a functional homolog |
| | modulated growth and phenotype | of SEQ ID NO 784 in the 10/412,699 |
| | characteristics | US patent application |
| SEQ_ID_NO_5886 | Useful for making plants with | The sequence is a functional homolog |
| | modulated growth and phenotype | of SEQ ID NO 1617 in the 11/479,226 |
| | characteristics | US patent application |
| SEQ_ID_NO_5886 | Useful for making plants with | The sequence is a functional homolog |
| | modulated growth and phenotype | of SEQ ID NO 1614 in the 11/479,226 |
| | characteristics | US patent application |
| SEQ_ID_NO_5894 | The plant flowers significantly late | Useful for making plants with |
| | compared to wild-type. | modulated flowering time |
| SEQ_ID_NO_5900 | | Useful for making plants with |
| | | modulated flowering time |
| SEQ_ID_NO_5910 | The plant flowers significantly late | Useful for making plants with |
| | compared to wild-type. | modulated flowering time |
| SEQ_ID_NO_5910 | No seed is being produced by the plant | Useful for biocontainment applications |
| SEQ_ID_NO_5926 | | Useful for making plants with |
| | | modulated heat sensitivity |
| SEQ_ID_NO_5926 | | Useful for making plants with altered |
| | | Lignin content |
| SEQ_ID_NO_5932 | The plant produces a reduced number | Useful for biocontainment applications |
| | of seeds. | |
| SEQ_ID_NO_5970 | There is no branching. | Useful for making plants with |
| | | modulated biomass |
| SEQ_ID_NO_5972 | | Useful for making plants with altered |
| | | Lignin content |
| SEQ_ID_NO_5978 | The plant senesces significantly late | Useful for making plants with |
| | copared to wild-type. | modulated time to senescence |
| SEQ_ID_NO_5978 | The plant flowers significantly late | Useful for making plants with |
| | compared to wild-type. | modulated flowering time |
| SEQ_ID_NO_5990 | The plant is abnormally large. | Useful for making plants with |
| | | modulated biomass |
| SEQ_ID_NO_6002 | The plant is abnormally small. | Useful for making plants with |
| | | modulated biomass |
| SEQ_ID_NO_6002 | The plant produces a reduced number | Useful for biocontainment applications |
| | of seeds. | |
| SEQ_ID_NO_6008 | | Useful for making plants with |
| | | modulated drought sensitivity |
| SEQ_ID_NO_6008 | Useful for making plants with | The sequence is a functional homolog |
| | modulated growth and phenotype | of SEQ ID NO 805 in the 11/479,226 |
| | characteristics | US patent application |
| SEQ_ID_NO_6008 | Useful for making plants with | The sequence is a functional homolog |
| | modulated growth and phenotype | of SEQ ID NO 801 in the 11/479,226 |
| | characteristics | US patent application |
| SEQ_ID_NO_6008 | Useful for making plants with | The sequence is a functional homolog |
| | modulated growth and phenotype | of SEQ ID NO 797 in the 11/479,226 |
| | characteristics | US patent application |
| SEQ_ID_NO_6008 | Useful for making plants with | The sequence is a functional homolog |
| | modulated growth and phenotype | of SEQ ID NO 790 in the 10/225,066 |
| | characteristics | US patent application |
| SEQ_ID_NO_6008 | Useful for making plants with | The sequence is a functional homolog |
| | modulated growth and phenotype | of SEQ ID NO 789 in the 11/479,226 |
| | characteristics | US patent application |
| SEQ_ID_NO_6008 | Useful for making plants with | The sequence is a functional homolog |
| | modulated growth and phenotype | of SEQ ID NO 786 in the 11/479,226 |
| | characteristics | US patent application |
| SEQ_ID_NO_6008 | Useful for making plants with | The sequence is a functional homolog |
| | modulated growth and phenotype | of SEQ ID NO 782 in the 11/479,226 |
| | characteristics | US patent application |
| SEQ_ID_NO_6008 | Useful for making plants with | The sequence is a functional homolog |
| | modulated growth and phenotype | of SEQ ID NO 344 in the 10/412,699 |
| | characteristics | US patent application |
| SEQ_ID_NO_6008 | Useful for making plants with | The sequence is a functional homolog |
| | modulated growth and phenotype | of SEQ ID NO 342 in the 10/412,699 |
| | characteristics | US patent application |
| SEQ_ID_NO_6008 | Useful for making plants with | The sequence is a functional homolog |
| | modulated growth and phenotype | of SEQ ID NO 2350 in the 10/374,780 |
| | characteristics | US patent application |
| SEQ_ID_NO_602 | The plant flowers significantly late | Useful for making plants with |
| | compared to wild-type. | modulated flowering time |
| SEQ_ID_NO_602 | No seed is being produced by the plant | Useful for biocontainment applications |
| SEQ_ID_NO_6032 | | Useful for making plants with altered |
| | | terpenoid content |
| SEQ_ID_NO_6032 | | Useful for making plants with altered |
| | | Lignin content |
| SEQ_ID_NO_6044 | | Useful for making plants with altered |
| | | Lignin content |
| SEQ_ID_NO_6058 | | Useful for making plants with |
| | | modulated flowering time |
| SEQ_ID_NO_6132 | There is no branching. | Useful for making plants with |
| | | modulated biomass |
| SEQ_ID_NO_6134 | The plant is abnormally large. | Useful for making plants with |
| | | modulated biomass |
| SEQ_ID_NO_6134 | The plant is abnormally small. | Useful for making plants with |
| | | modulated biomass |
| SEQ_ID_NO_6156 | | Useful for making plants with |
| | | modulated cold sensitivity |
| SEQ_ID_NO_6166 | | Useful for making plants with altered |
| | | Lignin content |
| SEQ_ID_NO_6194 | | Useful for making plants with |
| | | modulated drought sensitivity |
| SEQ_ID_NO_6194 | Useful for making plants with | The sequence is a functional homolog |
| | modulated growth and phenotype | of SEQ ID NO 805 in the 11/479,226 |
| | characteristics | US patent application |
| SEQ_ID_NO_6194 | Useful for making plants with | The sequence is a functional homolog |
| | modulated growth and phenotype | of SEQ ID NO 801 in the 11/479,226 |
| | characteristics | US patent application |
| SEQ_ID_NO_6194 | Useful for making plants with | The sequence is a functional homolog |
| | modulated growth and phenotype | of SEQ ID NO 797 in the 11/479,226 |
| | characteristics | US patent application |
| SEQ_ID_NO_6194 | Useful for making plants with | The sequence is a functional homolog |
| | modulated growth and phenotype | of SEQ ID NO 790 in the 10/225,066 |
| | characteristics | US patent application |
| SEQ_ID_NO_6194 | Useful for making plants with | The sequence is a functional homolog |
| | modulated growth and phenotype | of SEQ ID NO 789 in the 11/479,226 |
| | characteristics | US patent application |
| SEQ_ID_NO_6194 | Useful for making plants with | The sequence is a functional homolog |
| | modulated growth and phenotype | of SEQ ID NO 786 in the 11/479,226 |
| | characteristics | US patent application |
| SEQ_ID_NO_6194 | Useful for making plants with | The sequence is a functional homolog |
| | modulated growth and phenotype | of SEQ ID NO 782 in the 11/479,226 |
| | characteristics | US patent application |
| SEQ_ID_NO_6194 | Useful for making plants with | The sequence is a functional homolog |
| | modulated growth and phenotype | of SEQ ID NO 344 in the 10/412,699 |
| | characteristics | US patent application |
| SEQ_ID_NO_6194 | Useful for making plants with | The sequence is a functional homolog |
| | modulated growth and phenotype | of SEQ ID NO 342 in the 10/412,699 |
| | characteristics | US patent application |
| SEQ_ID_NO_6194 | Useful for making plants with | The sequence is a functional homolog |
| | modulated growth and phenotype | of SEQ ID NO 2350 in the 10/374,780 |
| | characteristics | US patent application |
| SEQ_ID_NO_6194 | Useful for making plants with | The sequence is a functional homolog |
| | modulated growth and phenotype | of SEQ ID NO 1777 in the 11/479,226 |
| | characteristics | US patent application |
| SEQ_ID_NO_6200 | | Useful for making plants with |
| | | modulated phosphate use efficiency |
| SEQ_ID_NO_6200 | | Useful for making plants with |
| | | modulated nitrogen use efficiency |
| SEQ_ID_NO_6220 | The plant is abnormally large. | Useful for making plants with |
| | | modulated biomass |
| SEQ_ID_NO_6236 | The plant senesces significantly late | Useful for making plants with |
| | copared to wild-type. | modulated time to senescence |
| SEQ_ID_NO_6256 | | Useful for making plants with |
| | | modulated drought sensitivity |
| SEQ_ID_NO_6256 | Useful for making plants with | The sequence is a functional homolog |
| | modulated growth and phenotype | of SEQ ID NO 805 in the 11/479,226 |
| | characteristics | US patent application |
| SEQ_ID_NO_6256 | Useful for making plants with | The sequence is a functional homolog |
| | modulated growth and phenotype | of SEQ ID NO 801 in the 11/479,226 |
| | characteristics | US patent application |
| SEQ_ID_NO_6256 | Useful for making plants with | The sequence is a functional homolog |
| | modulated growth and phenotype | of SEQ ID NO 797 in the 11/479,226 |
| | characteristics | US patent application |
| SEQ_ID_NO_6256 | Useful for making plants with | The sequence is a functional homolog |
| | modulated growth and phenotype | of SEQ ID NO 790 in the 10/225,066 |
| | characteristics | US patent application |
| SEQ_ID_NO_6256 | Useful for making plants with | The sequence is a functional homolog |
| | modulated growth and phenotype | of SEQ ID NO 789 in the 11/479,226 |
| | characteristics | US patent application |
| SEQ_ID_NO_6256 | Useful for making plants with | The sequence is a functional homolog |
| | modulated growth and phenotype | of SEQ ID NO 786 in the 11/479,226 |
| | characteristics | US patent application |
| SEQ_ID_NO_6256 | Useful for making plants with | The sequence is a functional homolog |
| | modulated growth and phenotype | of SEQ ID NO 782 in the 11/479,226 |
| | characteristics | US patent application |
| SEQ_ID_NO_6256 | Useful for making plants with | The sequence is a functional homolog |
| | modulated growth and phenotype | of SEQ ID NO 344 in the 10/412,699 |
| | characteristics | US patent application |
| SEQ_ID_NO_6256 | Useful for making plants with | The sequence is a functional homolog |
| | modulated growth and phenotype | of SEQ ID NO 342 in the 10/412,699 |
| | characteristics | US patent application |
| SEQ_ID_NO_6256 | Useful for making plants with | The sequence is a functional homolog |
| | modulated growth and phenotype | of SEQ ID NO 2350 in the 10/374,780 |
| | characteristics | US patent application |
| SEQ_ID_NO_6304 | | Useful for making plants with altered |
| | | terpenoid content |
| SEQ_ID_NO_632 | | Useful for making plants with |
| | | modulated nitrogen use efficiency |
| SEQ_ID_NO_632 | | Useful for making plants with altered |
| | | Lignin content |
| SEQ_ID_NO_6320 | | Useful for making plants with altered |
| | | cell wall content and/or composition |
| SEQ_ID_NO_6326 | The plant flowers significantly late | Useful for making plants with |
| | compared to wild-type. | modulated flowering time |
| SEQ_ID_NO_6326 | The plant produces a reduced number | Useful for biocontainment applications |
| | of seeds. | |
| SEQ_ID_NO_636 | Useful for making plants with | The sequence is a functional homolog |
| | modulated growth and phenotype | of SEQ ID NO 186 in the 11/435,388 |
| | characteristics | US patent application |
| SEQ_ID_NO_636 | Useful for making plants with | The sequence is a functional homolog |
| | modulated growth and phenotype | of SEQ ID NO 186 in the 10/714,887 |
| | characteristics | US patent application |
| SEQ_ID_NO_636 | Useful for making plants with | The sequence is a functional homolog |
| | modulated growth and phenotype | of SEQ ID NO 174 in the 11/435,388 |
| | characteristics | US patent application |
| SEQ_ID_NO_636 | Useful for making plants with | The sequence is a functional homolog |
| | modulated growth and phenotype | of SEQ ID NO 174 in the 10/714,887 |
| | characteristics | US patent application |
| SEQ_ID_NO_636 | Useful for making plants with | The sequence is a functional homolog |
| | modulated growth and phenotype | of SEQ ID NO 172 in the 11/435,388 |
| | characteristics | US patent application |
| SEQ_ID_NO_636 | Useful for making plants with | The sequence is a functional homolog |
| | modulated growth and phenotype | of SEQ ID NO 172 in the 10/714,887 |
| | characteristics | US patent application |
| SEQ_ID_NO_6372 | | Useful for making plants with |
| | | modulated flowering time |
| SEQ_ID_NO_6372 | | Useful for making plants with altered |
| | | Lignin content |
| SEQ_ID_NO_6372 | Useful for making plants with | The sequence is a functional homolog |
| | modulated growth and phenotype | of SEQ ID NO 780 in the 10/412,699 |
| | characteristics | US patent application |
| SEQ_ID_NO_6372 | Useful for making plants with | The sequence is a functional homolog |
| | modulated growth and phenotype | of SEQ ID NO 1611 in the 11/479,226 |
| | characteristics | US patent application |
| SEQ_ID_NO_638 | Useful for making plants with | The sequence is a functional homolog |
| | modulated growth and phenotype | of SEQ ID NO 92 in the 10/669,824 |
| | characteristics | US patent application |
| SEQ_ID_NO_638 | Useful for making plants with | The sequence is a functional homolog |
| | modulated growth and phenotype | of SEQ ID NO 90 in the 10/669,824 |
| | characteristics | US patent application |
| SEQ_ID_NO_638 | Useful for making plants with | The sequence is a functional homolog |
| | modulated growth and phenotype | of SEQ ID NO 88 in the 10/669,824 |
| | characteristics | US patent application |
| SEQ_ID_NO_638 | Useful for making plants with | The sequence is a functional homolog |
| | modulated growth and phenotype | of SEQ ID NO 66 in the 10/870,198 |
| | characteristics | US patent application |
| SEQ_ID_NO_638 | Useful for making plants with | The sequence is a functional homolog |
| | modulated growth and phenotype | of SEQ ID NO 66 in the 10/669,824 |
| | characteristics | US patent application |
| SEQ_ID_NO_638 | Useful for making plants with | The sequence is a functional homolog |
| | modulated growth and phenotype | of SEQ ID NO 38 in the 10/870,198 |
| | characteristics | US patent application |
| SEQ_ID_NO_638 | Useful for making plants with | The sequence is a functional homolog |
| | modulated growth and phenotype | of SEQ ID NO 38 in the 10/669,824 |
| | characteristics | US patent application |
| SEQ_ID_NO_638 | Useful for making plants with | The sequence is a functional homolog |
| | modulated growth and phenotype | of SEQ ID NO 348 in the 10/714,887 |
| | characteristics | US patent application |
| SEQ_ID_NO_638 | Useful for making plants with | The sequence is a functional homolog |
| | modulated growth and phenotype | of SEQ ID NO 346 in the 11/435,388 |
| | characteristics | US patent application |
| SEQ_ID_NO_638 | Useful for making plants with | The sequence is a functional homolog |
| | modulated growth and phenotype | of SEQ ID NO 346 in the 10/714,887 |
| | characteristics | US patent application |
| SEQ_ID_NO_638 | Useful for making plants with | The sequence is a functional homolog |
| | modulated growth and phenotype | of SEQ ID NO 344 in the 11/435,388 |
| | characteristics | US patent application |
| SEQ_ID_NO_638 | Useful for making plants with | The sequence is a functional homolog |
| | modulated growth and phenotype | of SEQ ID NO 22 in the 10/870,198 |
| | characteristics | US patent application |
| SEQ_ID_NO_638 | Useful for making plants with | The sequence is a functional homolog |
| | modulated growth and phenotype | of SEQ ID NO 22 in the 10/669,824 |
| | characteristics | US patent application |
| SEQ_ID_NO_638 | Useful for making plants with | The sequence is a functional homolog |
| | modulated growth and phenotype | of SEQ ID NO 1507 in the 10/412,699 |
| | characteristics | US patent application |
| SEQ_ID_NO_638 | Useful for making plants with | The sequence is a functional homolog |
| | modulated growth and phenotype | of SEQ ID NO 1413 in the 10/374,780 |
| | characteristics | US patent application |
| SEQ_ID_NO_638 | Useful for making plants with | The sequence is a functional homolog |
| | modulated growth and phenotype | of SEQ ID NO 1410 in the 10/374,780 |
| | characteristics | US patent application |
| SEQ_ID_NO_638 | Useful for making plants with | The sequence is a functional homolog |
| | modulated growth and phenotype | of SEQ ID NO 1402 in the 10/374,780 |
| | characteristics | US patent application |
| SEQ_ID_NO_638 | Useful for making plants with | The sequence is a functional homolog |
| | modulated growth and phenotype | of SEQ ID NO 1395 in the 10/374,780 |
| | characteristics | US patent application |
| SEQ_ID_NO_6412 | The plant is abnormally small. | Useful for making plants with |
| | | modulated biomass |
| SEQ_ID_NO_6412 | | Useful for making plants with altered |
| | | alkaloid content |
| SEQ_ID_NO_6414 | | Useful for making plants with |
| | | modulated drought sensitivity |
| SEQ_ID_NO_6414 | Useful for making plants with | The sequence is a functional homolog |
| | modulated growth and phenotype | of SEQ ID NO 805 in the 11/479,226 |
| | characteristics | US patent application |
| SEQ_ID_NO_6414 | Useful for making plants with | The sequence is a functional homolog |
| | modulated growth and phenotype | of SEQ ID NO 801 in the 11/479,226 |
| | characteristics | US patent application |
| SEQ_ID_NO_6414 | Useful for making plants with | The sequence is a functional homolog |
| | modulated growth and phenotype | of SEQ ID NO 797 in the 11/479,226 |
| | characteristics | US patent application |
| SEQ_ID_NO_6414 | Useful for making plants with | The sequence is a functional homolog |
| | modulated growth and phenotype | of SEQ ID NO 790 in the 10/225,066 |
| | characteristics | US patent application |
| SEQ_ID_NO_6414 | Useful for making plants with | The sequence is a functional homolog |
| | modulated growth and phenotype | of SEQ ID NO 789 in the 11/479,226 |
| | characteristics | US patent application |
| SEQ_ID_NO_6414 | Useful for making plants with | The sequence is a functional homolog |
| | modulated growth and phenotype | of SEQ ID NO 786 in the 11/479,226 |
| | characteristics | US patent application |
| SEQ_ID_NO_6414 | Useful for making plants with | The sequence is a functional homolog |
| | modulated growth and phenotype | of SEQ ID NO 782 in the 11/479,226 |
| | characteristics | US patent application |
| SEQ_ID_NO_6414 | Useful for making plants with | The sequence is a functional homolog |
| | modulated growth and phenotype | of SEQ ID NO 344 in the 10/412,699 |
| | characteristics | US patent application |
| SEQ_ID_NO_6414 | Useful for making plants with | The sequence is a functional homolog |
| | modulated growth and phenotype | of SEQ ID NO 342 in the 10/412,699 |
| | characteristics | US patent application |
| SEQ_ID_NO_6414 | Useful for making plants with | The sequence is a functional homolog |
| | modulated growth and phenotype | of SEQ ID NO 2350 in the 10/374,780 |
| | characteristics | US patent application |
| SEQ_ID_NO_6424 | | Useful for making plants with |
| | | modulated drought sensitivity |
| SEQ_ID_NO_6424 | Useful for making plants with | The sequence is a functional homolog |
| | modulated growth and phenotype | of SEQ ID NO 805 in the 11/479,226 |
| | characteristics | US patent application |
| SEQ_ID_NO_6424 | Useful for making plants with | The sequence is a functional homolog |
| | modulated growth and phenotype | of SEQ ID NO 801 in the 11/479,226 |
| | characteristics | US patent application |
| SEQ_ID_NO_6424 | Useful for making plants with | The sequence is a functional homolog |
| | modulated growth and phenotype | of SEQ ID NO 797 in the 11/479,226 |
| | characteristics | US patent application |
| SEQ_ID_NO_6424 | Useful for making plants with | The sequence is a functional homolog |
| | modulated growth and phenotype | of SEQ ID NO 790 in the 10/225,066 |
| | characteristics | US patent application |
| SEQ_ID_NO_6424 | Useful for making plants with | The sequence is a functional homolog |
| | modulated growth and phenotype | of SEQ ID NO 789 in the 11/479,226 |
| | characteristics | US patent application |
| SEQ_ID_NO_6424 | Useful for making plants with | The sequence is a functional homolog |
| | modulated growth and phenotype | of SEQ ID NO 786 in the 11/479,226 |
| | characteristics | US patent application |
| SEQ_ID_NO_6424 | Useful for making plants with | The sequence is a functional homolog |
| | modulated growth and phenotype | of SEQ ID NO 782 in the 11/479,226 |
| | characteristics | US patent application |
| SEQ_ID_NO_6424 | Useful for making plants with | The sequence is a functional homolog |
| | modulated growth and phenotype | of SEQ ID NO 344 in the 10/412,699 |
| | characteristics | US patent application |
| SEQ_ID_NO_6424 | Useful for making plants with | The sequence is a functional homolog |
| | modulated growth and phenotype | of SEQ ID NO 342 in the 10/412,699 |
| | characteristics | US patent application |
| SEQ_ID_NO_6424 | Useful for making plants with | The sequence is a functional homolog |
| | modulated growth and phenotype | of SEQ ID NO 2350 in the 10/374,780 |
| | characteristics | US patent application |
| SEQ_ID_NO_6430 | | Useful for making plants with |
| | | modulated oxidative stress sensitivity |
| SEQ_ID_NO_646 | The plant flowers significantly earllier | Useful for making plants with |
| | than wild-type. | modulated flowering time |
| SEQ_ID_NO_646 | The plant is abnormally small. | Useful for making plants with |
| | | modulated biomass |
| SEQ_ID_NO_646 | The plant produces a reduced number | Useful for biocontainment applications |
| | of seeds. | |
| SEQ_ID_NO_6496 | Useful for making plants with | The sequence is a functional homolog |
| | modulated growth and phenotype | of SEQ ID NO 32 in the 10/412,699 |
| | characteristics | US patent application |
| SEQ_ID_NO_6496 | Useful for making plants with | The sequence is a functional homolog |
| | modulated growth and phenotype | of SEQ ID NO 151 in the 11/479,226 |
| | characteristics | US patent application |
| SEQ_ID_NO_6518 | | Useful for making plants with |
| | | modulated oxidative stress sensitivity |
| SEQ_ID_NO_6524 | | Useful for making plants with altered |
| | | sterol content |
| SEQ_ID_NO_6538 | Useful for making plants with | The sequence is a functional homolog |
| | modulated growth and phenotype | of SEQ ID NO 542 in the 11/479,226 |
| | characteristics | US patent application |
| SEQ_ID_NO_6540 | | Useful for making plants with |
| | | modulated phosphate use efficiency |
| SEQ_ID_NO_6596 | The plant is abnormally small. | Useful for making plants with |
| | | modulated biomass |
| SEQ_ID_NO_6598 | | Useful for making plants with altered |
| | | Lignin content |
| SEQ_ID_NO_6598 | | Useful for making plants with altered |
| | | alkaloid content |
| SEQ_ID_NO_6604 | The plant flowers significantly late | Useful for making plants with |
| | compared to wild-type. | modulated flowering time |
| SEQ_ID_NO_6620 | The plant is abnormally large. | Useful for making plants with |
| | | modulated biomass |
| SEQ_ID_NO_6620 | The plant is abnormally small. | Useful for making plants with |
| | | modulated biomass |
| SEQ_ID_NO_6638 | The plant is abnormally small. | Useful for making plants with |
| | | modulated biomass |
| SEQ_ID_NO_6638 | The plant produces a reduced number | Useful for biocontainment applications |
| | of seeds. | |
| SEQ_ID_NO_6640 | The plant flowers significantly late | Useful for making plants with |
| | compared to wild-type. | modulated flowering time |
| SEQ_ID_NO_6640 | No seed is being produced by the plant | Useful for biocontainment applications |
| SEQ_ID_NO_6656 | The plant flowers significantly late | Useful for making plants with |
| | compared to wild-type. | modulated flowering time |
| SEQ_ID_NO_6656 | No seed is being produced by the plant | Useful for biocontainment applications |
| SEQ_ID_NO_6668 | | Useful for making plants with |
| | | modulated nitrogen use efficiency |
| SEQ_ID_NO_6696 | The plant flowers significantly late | Useful for making plants with |
| | compared to wild-type. | modulated flowering time |
| SEQ_ID_NO_6696 | The plant is abnormally small. | Useful for making plants with |
| | | modulated biomass |
| SEQ_ID_NO_6704 | The plant flowers significantly late | Useful for making plants with |
| | compared to wild-type. | modulated flowering time |
| SEQ_ID_NO_6704 | The plant is abnormally small. | Useful for making plants with |
| | | modulated biomass |
| SEQ_ID_NO_6712 | | Useful for making plants with |
| | | modulated nitrogen use efficiency |
| SEQ_ID_NO_6756 | | Useful for making plants with altered |
| | | Lignin content |
| SEQ_ID_NO_6758 | | Useful for making plants with |
| | | modulated nitrogen use efficiency |
| SEQ_ID_NO_6780 | The plant is abnormally small. | Useful for making plants with |
| | | modulated biomass |
| SEQ_ID_NO_6802 | | Useful for making plants with altered |
| | | terpenoid content |
| SEQ_ID_NO_6804 | | Useful for making plants with altered |
| | | Lignin content |
| SEQ_ID_NO_6820 | The plant flowers significantly late | Useful for making plants with |
| | compared to wild-type. | modulated flowering time |
| SEQ_ID_NO_6820 | No seed is being produced by the plant | Useful for biocontainment applications |
| SEQ_ID_NO_6836 | Useful for making plants with | The sequence is a functional homolog |
| | modulated growth and phenotype | of SEQ ID NO 1109 in the 10/374,780 |
| | characteristics | US patent application |
| SEQ_ID_NO_6836 | Useful for making plants with | The sequence is a functional homolog |
| | modulated growth and phenotype | of SEQ ID NO 1108 in the 10/374,780 |
| | characteristics | US patent application |
| SEQ_ID_NO_6894 | | Useful for biocontainment applications |
| SEQ_ID_NO_690 | | Useful for making plants with altered |
| | | terpenoid content |
| SEQ_ID_NO_690 | | Useful for making plants with altered |
| | | Lignin content |
| SEQ_ID_NO_6908 | | Useful for making plants with altered |
| | | terpenoid content |
| SEQ_ID_NO_6910 | The plant produces a reduced number | Useful for biocontainment applications |
| | of seeds. | |
| SEQ_ID_NO_6940 | The plant flowers significantly earllier | Useful for making plants with |
| | than wild-type. | modulated flowering time |
| SEQ_ID_NO_6940 | | Useful for making plants with |
| | | modulated flowering time |
| SEQ_ID_NO_6940 | The plant is abnormally small. | Useful for making plants with |
| | | modulated biomass |
| SEQ_ID_NO_6940 | | Useful for making plants with |
| | | modulated biomass |
| SEQ_ID_NO_6946 | The plant flowers significantly late | Useful for making plants with |
| | compared to wild-type. | modulated flowering time |
| SEQ_ID_NO_6946 | No seed is being produced by the plant | Useful for biocontainment applications |
| SEQ_ID_NO_6978 | | Useful for making plants with |
| | | modulated nitrogen use efficiency |
| SEQ_ID_NO_6986 | | Useful for making plants with |
| | | modulated nitrogen use efficiency |
| SEQ_ID_NO_7004 | | Useful for making plants with altered |
| | | terpenoid content |
| SEQ_ID_NO_7020 | | Useful for making plants with altered |
| | | terpenoid content |
| SEQ_ID_NO_7020 | | Useful for making plants with altered |
| | | alkaloid content |
| SEQ_ID_NO_7020 | Useful for making plants with | The sequence is a functional homolog |
| | modulated growth and phenotype | of SEQ ID NO 768 in the 10/412,699 |
| | characteristics | US patent application |
| SEQ_ID_NO_7032 | | Useful for making plants with altered |
| | | Lignin content |
| SEQ_ID_NO_7088 | The plant flowers significantly late | Useful for making plants with |
| | compared to wild-type. | modulated flowering time |
| SEQ_ID_NO_7088 | No seed is being produced by the plant | Useful for biocontainment applications |
| SEQ_ID_NO_7100 | | Useful for making plants with altered |
| | | Lignin content |
| SEQ_ID_NO_712 | | Useful for making plants with altered oil |
| | | content |
| SEQ_ID_NO_7126 | The plant flowers significantly late | Useful for making plants with |
| | compared to wild-type. | modulated flowering time |
| SEQ_ID_NO_7126 | No seed is being produced by the plant | Useful for biocontainment applications |
| SEQ_ID_NO_7142 | There is no branching. | Useful for making plants with |
| | | modulated biomass |
| SEQ_ID_NO_7156 | | Useful for making plants with |
| | | modulated nitrogen use efficiency |
| SEQ_ID_NO_7162 | The plant flowers significantly late | Useful for making plants with |
| | compared to wild-type. | modulated flowering time |
| SEQ_ID_NO_7162 | No seed is being produced by the plant | Useful for biocontainment applications |
| SEQ_ID_NO_7166 | The plant flowers significantly late | Useful for making plants with |
| | compared to wild-type. | modulated flowering time |
| SEQ_ID_NO_7166 | No seed is being produced by the plant | Useful for biocontainment applications |
| SEQ_ID_NO_7174 | The plant flowers significantly late | Useful for making plants with |
| | compared to wild-type. | modulated flowering time |
| SEQ_ID_NO_7174 | No seed is being produced by the plant | Useful for biocontainment applications |
| SEQ_ID_NO_7176 | | Useful for making plants with altered |
| | | cell wall content and/or composition |
| SEQ_ID_NO_72 | | Useful for making plants with altered |
| | | Lignin content |
| SEQ_ID_NO_72 | | Useful for making plants with altered |
| | | alkaloid content |
| SEQ_ID_NO_7216 | | Useful for making plants with |
| | | modulated phosphate use efficiency |
| SEQ_ID_NO_7218 | Useful for making plants with | The sequence is a functional homolog |
| | modulated growth and phenotype | of SEQ ID NO 837 in the 10/374,780 |
| | characteristics | US patent application |
| SEQ_ID_NO_7218 | Useful for making plants with | The sequence is a functional homolog |
| | modulated growth and phenotype | of SEQ ID NO 835 in the 10/374,780 |
| | characteristics | US patent application |
| SEQ_ID_NO_7218 | Useful for making plants with | The sequence is a functional homolog |
| | modulated growth and phenotype | of SEQ ID NO 712 in the 11/479,226 |
| | characteristics | US patent application |
| SEQ_ID_NO_7218 | Useful for making plants with | The sequence is a functional homolog |
| | modulated growth and phenotype | of SEQ ID NO 1190 in the 10/412,699 |
| | characteristics | US patent application |
| SEQ_ID_NO_7218 | Useful for making plants with | The sequence is a functional homolog |
| | modulated growth and phenotype | of SEQ ID NO 1188 in the 10/412,699 |
| | characteristics | US patent application |
| SEQ_ID_NO_7226 | The plant flowers significantly late | Useful for making plants with |
| | compared to wild-type. | modulated flowering time |
| SEQ_ID_NO_7226 | No seed is being produced by the plant | Useful for biocontainment applications |
| SEQ_ID_NO_7240 | | Useful for making plants with |
| | | modulated drought sensitivity |
| SEQ_ID_NO_7240 | Useful for making plants with | The sequence is a functional homolog |
| | modulated growth and phenotype | of SEQ ID NO 805 in the 11/479,226 |
| | characteristics | US patent application |
| SEQ_ID_NO_7240 | Useful for making plants with | The sequence is a functional homolog |
| | modulated growth and phenotype | of SEQ ID NO 801 in the 11/479,226 |
| | characteristics | US patent application |
| SEQ_ID_NO_7240 | Useful for making plants with | The sequence is a functional homolog |
| | modulated growth and phenotype | of SEQ ID NO 797 in the 11/479,226 |
| | characteristics | US patent application |
| SEQ_ID_NO_7240 | Useful for making plants with | The sequence is a functional homolog |
| | modulated growth and phenotype | of SEQ ID NO 790 in the 10/225,066 |
| | characteristics | US patent application |
| SEQ_ID_NO_7240 | Useful for making plants with | The sequence is a functional homolog |
| | modulated growth and phenotype | of SEQ ID NO 789 in the 11/479,226 |
| | characteristics | US patent application |
| SEQ_ID_NO_7240 | Useful for making plants with | The sequence is a functional homolog |
| | modulated growth and phenotype | of SEQ ID NO 786 in the 11/479,226 |
| | characteristics | US patent application |
| SEQ_ID_NO_7240 | Useful for making plants with | The sequence is a functional homolog |
| | modulated growth and phenotype | of SEQ ID NO 782 in the 11/479,226 |
| | characteristics | US patent application |
| SEQ_ID_NO_7240 | Useful for making plants with | The sequence is a functional homolog |
| | modulated growth and phenotype | of SEQ ID NO 344 in the 10/412,699 |
| | characteristics | US patent application |
| SEQ_ID_NO_7240 | Useful for making plants with | The sequence is a functional homolog |
| | modulated growth and phenotype | of SEQ ID NO 342 in the 10/412,699 |
| | characteristics | US patent application |
| SEQ_ID_NO_7240 | Useful for making plants with | The sequence is a functional homolog |
| | modulated growth and phenotype | of SEQ ID NO 2350 in the 10/374,780 |
| | characteristics | US patent application |
| SEQ_ID_NO_7250 | The plant produces a reduced number | Useful for biocontainment applications |
| | of seeds. | |
| SEQ_ID_NO_7252 | The plant flowers significantly earllier | Useful for making plants with |
| | than wild-type. | modulated flowering time |
| SEQ_ID_NO_7252 | | Useful for making plants with |
| | | modulated flowering time |
| SEQ_ID_NO_7252 | The plant is abnormally small. | Useful for making plants with |
| | | modulated biomass |
| SEQ_ID_NO_7252 | | Useful for making plants with |
| | | modulated biomass |
| SEQ_ID_NO_7258 | The plant flowers significantly late | Useful for making plants with |
| | compared to wild-type. | modulated flowering time |
| SEQ_ID_NO_7258 | No seed is being produced by the plant | Useful for biocontainment applications |
| SEQ_ID_NO_7276 | The plant is abnormally large. | Useful for making plants with |
| | | modulated biomass |
| SEQ_ID_NO_7276 | The plant is abnormally small. | Useful for making plants with |
| | | modulated biomass |
| SEQ_ID_NO_7286 | The plant is abnormally large. | Useful for making plants with |
| | | modulated biomass |
| SEQ_ID_NO_7300 | | Useful for making plants with altered |
| | | Lignin content |
| SEQ_ID_NO_7300 | | Useful for making plants with altered |
| | | cell wall content and/or composition |
| SEQ_ID_NO_7300 | | Useful for making plants with altered |
| | | cell wall composition |
| SEQ_ID_NO_7306 | | Useful for making plants with |
| | | modulated nitrogen use efficiency |
| SEQ_ID_NO_7308 | The plant is abnormally small. | Useful for making plants with |
| | | modulated biomass |
| SEQ_ID_NO_7308 | Useful for making plants with | The sequence is a functional homolog |
| | modulated growth and phenotype | of SEQ ID NO 960 in the 10/225,066 |
| | characteristics | US patent application |
| SEQ_ID_NO_7308 | Useful for making plants with | The sequence is a functional homolog |
| | modulated growth and phenotype | of SEQ ID NO 874 in the 10/412,699 |
| | characteristics | US patent application |
| SEQ_ID_NO_7308 | Useful for making plants with | The sequence is a functional homolog |
| | modulated growth and phenotype | of SEQ ID NO 2604 in the 10/374,780 |
| | characteristics | US patent application |
| SEQ_ID_NO_7308 | Useful for making plants with | The sequence is a functional homolog |
| | modulated growth and phenotype | of SEQ ID NO 1769 in the 11/479,226 |
| | characteristics | US patent application |
| SEQ_ID_NO_7308 | Useful for making plants with | The sequence is a functional homolog |
| | modulated growth and phenotype | of SEQ ID NO 1765 in the 11/479,226 |
| | characteristics | US patent application |
| SEQ_ID_NO_7316 | The plant is abnormally large. | Useful for making plants with |
| | | modulated biomass |
| SEQ_ID_NO_7316 | The plant is abnormally small. | Useful for making plants with |
| | | modulated biomass |
| SEQ_ID_NO_7350 | The plant flowers significantly late | Useful for making plants with |
| | compared to wild-type. | modulated flowering time |
| SEQ_ID_NO_7350 | No seed is being produced by the plant | Useful for biocontainment applications |
| SEQ_ID_NO_7352 | | Useful for making plants with |
| | | modulated heat sensitivity |
| SEQ_ID_NO_7352 | | Useful for making plants with altered |
| | | Lignin content |
| SEQ_ID_NO_7374 | | Useful for making plants with |
| | | modulated nitrogen use efficiency |
| SEQ_ID_NO_7462 | The plant flowers significantly late | Useful for making plants with |
| | compared to wild-type. | modulated flowering time |
| SEQ_ID_NO_7462 | No seed is being produced by the plant | Useful for biocontainment applications |
| SEQ_ID_NO_7466 | The plant produces a reduced number | Useful for biocontainment applications |
| | of seeds. | |
| SEQ_ID_NO_7480 | | Useful for making plants with |
| | | modulated oxidative stress sensitivity |
| SEQ_ID_NO_7480 | Useful for making plants with | The sequence is a functional homolog |
| | modulated growth and phenotype | of SEQ ID NO 464 in the 10/666,642 |
| | characteristics | US patent application |
| SEQ_ID_NO_7508 | | Useful for making plants with |
| | | modulated drought sensitivity |
| SEQ_ID_NO_7508 | Useful for making plants with | The sequence is a functional homolog |
| | modulated growth and phenotype | of SEQ ID NO 805 in the 11/479,226 |
| | characteristics | US patent application |
| SEQ_ID_NO_7508 | Useful for making plants with | The sequence is a functional homolog |
| | modulated growth and phenotype | of SEQ ID NO 801 in the 11/479,226 |
| | characteristics | US patent application |
| SEQ_ID_NO_7508 | Useful for making plants with | The sequence is a functional homolog |
| | modulated growth and phenotype | of SEQ ID NO 797 in the 11/479,226 |
| | characteristics | US patent application |
| SEQ_ID_NO_7508 | Useful for making plants with | The sequence is a functional homolog |
| | modulated growth and phenotype | of SEQ ID NO 790 in the 10/225,066 |
| | characteristics | US patent application |
| SEQ_ID_NO_7508 | Useful for making plants with | The sequence is a functional homolog |
| | modulated growth and phenotype | of SEQ ID NO 789 in the 11/479,226 |
| | characteristics | US patent application |
| SEQ_ID_NO_7508 | Useful for making plants with | The sequence is a functional homolog |
| | modulated growth and phenotype | of SEQ ID NO 786 in the 11/479,226 |
| | characteristics | US patent application |
| SEQ_ID_NO_7508 | Useful for making plants with | The sequence is a functional homolog |
| | modulated growth and phenotype | of SEQ ID NO 782 in the 11/479,226 |
| | characteristics | US patent application |
| SEQ_ID_NO_7508 | Useful for making plants with | The sequence is a functional homolog |
| | modulated growth and phenotype | of SEQ ID NO 344 in the 10/412,699 |
| | characteristics | US patent application |
| SEQ_ID_NO_7508 | Useful for making plants with | The sequence is a functional homolog |
| | modulated growth and phenotype | of SEQ ID NO 342 in the 10/412,699 |
| | characteristics | US patent application |
| SEQ_ID_NO_7508 | Useful for making plants with | The sequence is a functional homolog |
| | modulated growth and phenotype | of SEQ ID NO 2350 in the 10/374,780 |
| | characteristics | US patent application |
| SEQ_ID_NO_7516 | The plant produces a reduced number | Useful for biocontainment applications |
| | of seeds. | |
| SEQ_ID_NO_7520 | There is no branching. | Useful for making plants with |
| | | modulated biomass |
| SEQ_ID_NO_7532 | | Useful for making plants with |
| | | modulated phosphate use efficiency |
| SEQ_ID_NO_7532 | The plant flowers significantly late | Useful for making plants with |
| | compared to wild-type. | modulated flowering time |
| SEQ_ID_NO_7532 | The plant is abnormally large. | Useful for making plants with |
| | | modulated biomass |
| SEQ_ID_NO_7554 | The plant senesces significantly late | Useful for making plants with |
| | copared to wild-type. | modulated time to senescence |
| SEQ_ID_NO_7566 | The plant flowers significantly late | Useful for making plants with |
| | compared to wild-type. | modulated flowering time |
| SEQ_ID_NO_7566 | No seed is being produced by the plant | Useful for biocontainment applications |
| SEQ_ID_NO_7568 | The plant flowers significantly late | Useful for making plants with |
| | compared to wild-type. | modulated flowering time |
| SEQ_ID_NO_7568 | No seed is being produced by the plant | Useful for biocontainment applications |
| SEQ_ID_NO_7580 | The plant flowers significantly late | Useful for making plants with |
| | compared to wild-type. | modulated flowering time |
| SEQ_ID_NO_7580 | The plant is abnormally small. | Useful for making plants with |
| | | modulated biomass |
| SEQ_ID_NO_7596 | | Useful for making plants with |
| | | modulated phosphate use efficiency |
| SEQ_ID_NO_7596 | The plant flowers significantly late | Useful for making plants with |
| | compared to wild-type. | modulated flowering time |
| SEQ_ID_NO_7596 | The plant is abnormally large. | Useful for making plants with |
| | | modulated biomass |
| SEQ_ID_NO_7610 | | Useful for making plants with altered |
| | | Lignin content |
| SEQ_ID_NO_7610 | | Useful for making plants with altered |
| | | alkaloid content |
| SEQ_ID_NO_7616 | | Useful for making plants with altered |
| | | Lignin content |
| SEQ_ID_NO_7616 | | Useful for making plants with altered |
| | | alkaloid content |
| SEQ_ID_NO_7616 | Useful for making plants with | The sequence is a functional homolog |
| | modulated growth and phenotype | of SEQ ID NO 926 in the 10/225,066 |
| | characteristics | US patent application |
| SEQ_ID_NO_7616 | Useful for making plants with | The sequence is a functional homolog |
| | modulated growth and phenotype | of SEQ ID NO 846 in the 10/225,066 |
| | characteristics | US patent application |
| SEQ_ID_NO_7616 | Useful for making plants with | The sequence is a functional homolog |
| | modulated growth and phenotype | of SEQ ID NO 712 in the 11/479,226 |
| | characteristics | US patent application |
| SEQ_ID_NO_7616 | Useful for making plants with | The sequence is a functional homolog |
| | modulated growth and phenotype | of SEQ ID NO 314 in the 10/374,780 |
| | characteristics | US patent application |
| SEQ_ID_NO_7616 | Useful for making plants with | The sequence is a functional homolog |
| | modulated growth and phenotype | of SEQ ID NO 2126 in the 10/374,780 |
| | characteristics | US patent application |
| SEQ_ID_NO_7616 | Useful for making plants with | The sequence is a functional homolog |
| | modulated growth and phenotype | of SEQ ID NO 1908 in the 11/479,226 |
| | characteristics | US patent application |
| SEQ_ID_NO_7616 | Useful for making plants with | The sequence is a functional homolog |
| | modulated growth and phenotype | of SEQ ID NO 150 in the 10/374,780 |
| | characteristics | US patent application |
| SEQ_ID_NO_762 | The plant flowers significantly late | Useful for making plants with |
| | compared to wild-type. | modulated flowering time |
| SEQ_ID_NO_7628 | The plant senesces significantly late | Useful for making plants with |
| | copared to wild-type. | modulated time to senescence |
| SEQ_ID_NO_764 | | Useful for making plants with altered |
| | | terpenoid content |
| SEQ_ID_NO_7640 | | Useful for making plants with |
| | | modulated cold sensitivity |
| SEQ_ID_NO_7660 | | Useful for making plants with |
| | | modulated nitrogen use efficiency |
| SEQ_ID_NO_7668 | The plant produces a reduced number | Useful for biocontainment applications |
| | of seeds. | |
| SEQ_ID_NO_7692 | The plant is abnormally small. | Useful for making plants with |
| | | modulated biomass |
| SEQ_ID_NO_7700 | The plant flowers significantly late | Useful for making plants with |
| | compared to wild-type. | modulated flowering time |
| SEQ_ID_NO_7700 | No seed is being produced by the plant | Useful for biocontainment applications |
| SEQ_ID_NO_7706 | The plant is abnormally small. | Useful for making plants with |
| | | modulated biomass |
| SEQ_ID_NO_7728 | The plant produces a reduced number | Useful for biocontainment applications |
| | of seeds. | |
| SEQ_ID_NO_7730 | | Useful for making plants with |
| | | modulated drought sensitivity |
| SEQ_ID_NO_7730 | Useful for making plants with | The sequence is a functional homolog |
| | modulated growth and phenotype | of SEQ ID NO 805 in the 11/479,226 |
| | characteristics | US patent application |
| SEQ_ID_NO_7730 | Useful for making plants with | The sequence is a functional homolog |
| | modulated growth and phenotype | of SEQ ID NO 801 in the 11/479,226 |
| | characteristics | US patent application |
| SEQ_ID_NO_7730 | Useful for making plants with | The sequence is a functional homolog |
| | modulated growth and phenotype | of SEQ ID NO 797 in the 11/479,226 |
| | characteristics | US patent application |
| SEQ_ID_NO_7730 | Useful for making plants with | The sequence is a functional homolog |
| | modulated growth and phenotype | of SEQ ID NO 790 in the 10/225,066 |
| | characteristics | US patent application |
| SEQ_ID_NO_7730 | Useful for making plants with | The sequence is a functional homolog |
| | modulated growth and phenotype | of SEQ ID NO 789 in the 11/479,226 |
| | characteristics | US patent application |
| SEQ_ID_NO_7730 | Useful for making plants with | The sequence is a functional homolog |
| | modulated growth and phenotype | of SEQ ID NO 786 in the 11/479,226 |
| | characteristics | US patent application |
| SEQ_ID_NO_7730 | Useful for making plants with | The sequence is a functional homolog |
| | modulated growth and phenotype | of SEQ ID NO 782 in the 11/479,226 |
| | characteristics | US patent application |
| SEQ_ID_NO_7730 | Useful for making plants with | The sequence is a functional homolog |
| | modulated growth and phenotype | of SEQ ID NO 344 in the 10/412,699 |
| | characteristics | US patent application |
| SEQ_ID_NO_7730 | Useful for making plants with | The sequence is a functional homolog |
| | modulated growth and phenotype | of SEQ ID NO 342 in the 10/412,699 |
| | characteristics | US patent application |
| SEQ_ID_NO_7730 | Useful for making plants with | The sequence is a functional homolog |
| | modulated growth and phenotype | of SEQ ID NO 2350 in the 10/374,780 |
| | characteristics | US patent application |
| SEQ_ID_NO_7730 | Useful for making plants with | The sequence is a functional homolog |
| | modulated growth and phenotype | of SEQ ID NO 1777 in the 11/479,226 |
| | characteristics | US patent application |
| SEQ_ID_NO_7740 | | Useful for making plants with altered |
| | | Lignin content |
| SEQ_ID_NO_7740 | | Useful for making plants with altered |
| | | alkaloid content |
| SEQ_ID_NO_7746 | The plant senesces significantly late | Useful for making plants with |
| | copared to wild-type. | modulated time to senescence |
| SEQ_ID_NO_7764 | The plant flowers significantly late | Useful for making plants with |
| | compared to wild-type. | modulated flowering time |
| SEQ_ID_NO_7764 | The plant is abnormally small. | Useful for making plants with |
| | | modulated biomass |
| SEQ_ID_NO_7766 | | Useful for making plants with altered oil |
| | | content |
| SEQ_ID_NO_7772 | The plant flowers significantly late | Useful for making plants with |
| | compared to wild-type. | modulated flowering time |
| SEQ_ID_NO_7772 | No seed is being produced by the plant | Useful for biocontainment applications |
| SEQ_ID_NO_778 | | Useful for making plants with altered |
| | | Lignin content |
| SEQ_ID_NO_778 | | Useful for making plants with altered |
| | | alkaloid content |
| SEQ_ID_NO_7780 | The plant flowers significantly late | Useful for making plants with |
| | compared to wild-type. | modulated flowering time |
| SEQ_ID_NO_7780 | No seed is being produced by the plant | Useful for biocontainment applications |
| SEQ_ID_NO_782 | The plant is abnormally small. | Useful for making plants with |
| | | modulated biomass |
| SEQ_ID_NO_7834 | | Useful for making plants with |
| | | modulated nitrogen use efficiency |
| SEQ_ID_NO_7846 | The plant flowers significantly late | Useful for making plants with |
| | compared to wild-type. | modulated flowering time |
| SEQ_ID_NO_7846 | No seed is being produced by the plant | Useful for biocontainment applications |
| SEQ_ID_NO_7854 | The plant is abnormally large. | Useful for making plants with |
| | | modulated biomass |
| SEQ_ID_NO_7854 | The plant is abnormally small. | Useful for making plants with |
| | | modulated biomass |
| SEQ_ID_NO_7866 | | Useful for making plants with altered |
| | | Lignin content |
| SEQ_ID_NO_7866 | | Useful for making plants with altered |
| | | alkaloid content |
| SEQ_ID_NO_7874 | The plant is abnormally small. | Useful for making plants with |
| | | modulated biomass |
| SEQ_ID_NO_7876 | The plant flowers significantly late | Useful for making plants with |
| | compared to wild-type. | modulated flowering time |
| SEQ_ID_NO_7876 | No seed is being produced by the plant | Useful for biocontainment applications |
| SEQ_ID_NO_7878 | | Useful for making plants with |
| | | modulated nitrogen use efficiency |
| SEQ_ID_NO_7878 | The plant flowers significantly late | Useful for making plants with |
| | compared to wild-type. | modulated flowering time |
| SEQ_ID_NO_7878 | The plant is abnormally small. | Useful for making plants with |
| | | modulated biomass |
| SEQ_ID_NO_7878 | | Useful for making plants with altered |
| | | Lignin content |
| SEQ_ID_NO_7878 | | Useful for making plants with altered |
| | | alkaloid content |
| SEQ_ID_NO_7878 | Useful for making plants with | The sequence is a functional homolog |
| | modulated growth and phenotype | of SEQ ID NO 1016 in the 11/435,388 |
| | characteristics | US patent application |
| SEQ_ID_NO_7884 | The plant flowers significantly late | Useful for making plants with |
| | compared to wild-type. | modulated flowering time |
| SEQ_ID_NO_7884 | No seed is being produced by the plant | Useful for biocontainment applications |
| SEQ_ID_NO_7886 | Useful for making plants with | The sequence is a functional homolog |
| | modulated growth and phenotype | of SEQ ID NO 992 in the 11/479,226 |
| | characteristics | US patent application |
| SEQ_ID_NO_7886 | Useful for making plants with | The sequence is a functional homolog |
| | modulated growth and phenotype | of SEQ ID NO 988 in the 11/479,226 |
| | characteristics | US patent application |
| SEQ_ID_NO_7886 | Useful for making plants with | The sequence is a functional homolog |
| | modulated growth and phenotype | of SEQ ID NO 616 in the 11/435,388 |
| | characteristics | US patent application |
| SEQ_ID_NO_7886 | Useful for making plants with | The sequence is a functional homolog |
| | modulated growth and phenotype | of SEQ ID NO 504 in the 11/435,388 |
| | characteristics | US patent application |
| SEQ_ID_NO_7886 | Useful for making plants with | The sequence is a functional homolog |
| | modulated growth and phenotype | of SEQ ID NO 428 in the 10/412,699 |
| | characteristics | US patent application |
| SEQ_ID_NO_7908 | | Useful for making plants with |
| | | modulated cold sensitivity |
| SEQ_ID_NO_7936 | | Useful for making plants with |
| | | modulated nitrogen use efficiency |
| SEQ_ID_NO_7960 | | Useful for making plants with |
| | | modulated phosphate use efficiency |
| SEQ_ID_NO_7974 | The plant flowers significantly late | Useful for making plants with |
| | compared to wild-type. | modulated flowering time |
| SEQ_ID_NO_7974 | No seed is being produced by the plant | Useful for biocontainment applications |
| SEQ_ID_NO_8006 | | Useful for making plants with |
| | | modulated drought sensitivity |
| SEQ_ID_NO_8008 | The plant flowers significantly earllier | Useful for making plants with |
| | than wild-type. | modulated flowering time |
| SEQ_ID_NO_8008 | The plant is abnormally small. | Useful for making plants with |
| | | modulated biomass |
| SEQ_ID_NO_8008 | The plant produces a reduced number | Useful for biocontainment applications |
| | of seeds. | |
| SEQ_ID_NO_8056 | | Useful for making plants with |
| | | modulated phosphate use efficiency |
| SEQ_ID_NO_8056 | The plant flowers significantly late | Useful for making plants with |
| | compared to wild-type. | modulated flowering time |
| SEQ_ID_NO_8056 | The plant is abnormally large. | Useful for making plants with |
| | | modulated biomass |
| SEQ_ID_NO_806 | | Useful for making plants with |
| | | modulated cold sensitivity |
| SEQ_ID_NO_8060 | | Useful for making plants with |
| | | modulated drought sensitivity |
| SEQ_ID_NO_8060 | Useful for making plants with | The sequence is a functional homolog |
| | modulated growth and phenotype | of SEQ ID NO 805 in the 11/479,226 |
| | characteristics | US patent application |
| SEQ_ID_NO_8060 | Useful for making plants with | The sequence is a functional homolog |
| | modulated growth and phenotype | of SEQ ID NO 801 in the 11/479,226 |
| | characteristics | US patent application |
| SEQ_ID_NO_8060 | Useful for making plants with | The sequence is a functional homolog |
| | modulated growth and phenotype | of SEQ ID NO 797 in the 11/479,226 |
| | characteristics | US patent application |
| SEQ_ID_NO_8060 | Useful for making plants with | The sequence is a functional homolog |
| | modulated growth and phenotype | of SEQ ID NO 790 in the 10/225,066 |
| | characteristics | US patent application |
| SEQ_ID_NO_8060 | Useful for making plants with | The sequence is a functional homolog |
| | modulated growth and phenotype | of SEQ ID NO 789 in the 11/479,226 |
| | characteristics | US patent application |
| SEQ_ID_NO_8060 | Useful for making plants with | The sequence is a functional homolog |
| | modulated growth and phenotype | of SEQ ID NO 786 in the 11/479,226 |
| | characteristics | US patent application |
| SEQ_ID_NO_8060 | Useful for making plants with | The sequence is a functional homolog |
| | modulated growth and phenotype | of SEQ ID NO 782 in the 11/479,226 |
| | characteristics | US patent application |
| SEQ_ID_NO_8060 | Useful for making plants with | The sequence is a functional homolog |
| | modulated growth and phenotype | of SEQ ID NO 344 in the 10/412,699 |
| | characteristics | US patent application |
| SEQ_ID_NO_8060 | Useful for making plants with | The sequence is a functional homolog |
| | modulated growth and phenotype | of SEQ ID NO 342 in the 10/412,699 |
| | characteristics | US patent application |
| SEQ_ID_NO_8060 | Useful for making plants with | The sequence is a functional homolog |
| | modulated growth and phenotype | of SEQ ID NO 2350 in the 10/374,780 |
| | characteristics | US patent application |
| SEQ_ID_NO_8060 | Useful for making plants with | The sequence is a functional homolog |
| | modulated growth and phenotype | of SEQ ID NO 1777 in the 11/479,226 |
| | characteristics | US patent application |
| SEQ_ID_NO_8062 | The plant flowers significantly late | Useful for making plants with |
| | compared to wild-type. | modulated flowering time |
| SEQ_ID_NO_8086 | Useful for making plants with | The sequence is a functional homolog |
| | modulated growth and phenotype | of SEQ ID NO 960 in the 10/225,066 |
| | characteristics | US patent application |
| SEQ_ID_NO_8086 | Useful for making plants with | The sequence is a functional homolog |
| | modulated growth and phenotype | of SEQ ID NO 2604 in the 10/374,780 |
| | characteristics | US patent application |
| SEQ_ID_NO_8086 | Useful for making plants with | The sequence is a functional homolog |
| | modulated growth and phenotype | of SEQ ID NO 1769 in the 11/479,226 |
| | characteristics | US patent application |
| SEQ_ID_NO_8120 | | Useful for making plants with |
| | | modulated cold sensitivity |
| SEQ_ID_NO_8202 | | Useful for making plants with altered |
| | | cell wall content and/or composition |
| SEQ_ID_NO_8224 | | Useful for making plants with |
| | | modulated nitrogen use efficiency |
| SEQ_ID_NO_8240 | | Useful for making plants with |
| | | modulated nitrogen use efficiency |
| SEQ_ID_NO_8240 | The plant is abnormally small. | Useful for making plants with |
| | | modulated biomass |
| SEQ_ID_NO_8240 | | Useful for making plants with altered |
| | | Lignin content |
| SEQ_ID_NO_8240 | | Useful for making plants with altered |
| | | alkaloid content |
| SEQ_ID_NO_8240 | Useful for making plants with | The sequence is a functional homolog |
| | modulated growth and phenotype | of SEQ ID NO 1016 in the 11/435,388 |
| | characteristics | US patent application |
| SEQ_ID_NO_8256 | | Useful for making plants with |
| | | modulated salt sensitivity |
| SEQ_ID_NO_8258 | | Useful for making plants with |
| | | modulated phosphate use efficiency |
| SEQ_ID_NO_8258 | The plant flowers significantly late | Useful for making plants with |
| | compared to wild-type. | modulated flowering time |
| SEQ_ID_NO_8258 | The plant is abnormally large. | Useful for making plants with |
| | | modulated biomass |
| SEQ_ID_NO_8316 | | Useful for making plants with |
| | | modulated phosphate use efficiency |
| SEQ_ID_NO_8366 | The plant is abnormally small. | Useful for making plants with |
| | | modulated biomass |
| SEQ_ID_NO_8370 | The plant senesces significantly late | Useful for making plants with |
| | copared to wild-type. | modulated time to senescence |
| SEQ_ID_NO_8374 | The plant flowers significantly late | Useful for making plants with |
| | compared to wild-type. | modulated flowering time |
| SEQ_ID_NO_8374 | No seed is being produced by the plant | Useful for biocontainment applications |
| SEQ_ID_NO_8410 | The plant senesces significantly late | Useful for making plants with |
| | copared to wild-type. | modulated time to senescence |
| SEQ_ID_NO_8432 | The plant flowers significantly late | Useful for making plants with |
| | compared to wild-type. | modulated flowering time |
| SEQ_ID_NO_8432 | No seed is being produced by the plant | Useful for biocontainment applications |
| SEQ_ID_NO_8550 | | Useful for making plants with altered oil |
| | | content |
| SEQ_ID_NO_8552 | | Useful for making plants with |
| | | modulated drought sensitivity |
| SEQ_ID_NO_8552 | Useful for making plants with | The sequence is a functional homolog |
| | modulated growth and phenotype | of SEQ ID NO 805 in the 11/479,226 |
| | characteristics | US patent application |
| SEQ_ID_NO_8552 | Useful for making plants with | The sequence is a functional homolog |
| | modulated growth and phenotype | of SEQ ID NO 801 in the 11/479,226 |
| | characteristics | US patent application |
| SEQ_ID_NO_8552 | Useful for making plants with | The sequence is a functional homolog |
| | modulated growth and phenotype | of SEQ ID NO 797 in the 11/479,226 |
| | characteristics | US patent application |
| SEQ_ID_NO_8552 | Useful for making plants with | The sequence is a functional homolog |
| | modulated growth and phenotype | of SEQ ID NO 790 in the 10/225,066 |
| | characteristics | US patent application |
| SEQ_ID_NO_8552 | Useful for making plants with | The sequence is a functional homolog |
| | modulated growth and phenotype | of SEQ ID NO 789 in the 11/479,226 |
| | characteristics | US patent application |
| SEQ_ID_NO_8552 | Useful for making plants with | The sequence is a functional homolog |
| | modulated growth and phenotype | of SEQ ID NO 786 in the 11/479,226 |
| | characteristics | US patent application |
| SEQ_ID_NO_8552 | Useful for making plants with | The sequence is a functional homolog |
| | modulated growth and phenotype | of SEQ ID NO 782 in the 11/479,226 |
| | characteristics | US patent application |
| SEQ_ID_NO_8552 | Useful for making plants with | The sequence is a functional homolog |
| | modulated growth and phenotype | of SEQ ID NO 344 in the 10/412,699 |
| | characteristics | US patent application |
| SEQ_ID_NO_8552 | Useful for making plants with | The sequence is a functional homolog |
| | modulated growth and phenotype | of SEQ ID NO 342 in the 10/412,699 |
| | characteristics | US patent application |
| SEQ_ID_NO_8552 | Useful for making plants with | The sequence is a functional homolog |
| | modulated growth and phenotype | of SEQ ID NO 2350 in the 10/374,780 |
| | characteristics | US patent application |
| SEQ_ID_NO_8552 | Useful for making plants with | The sequence is a functional homolog |
| | modulated growth and phenotype | of SEQ ID NO 1777 in the 11/479,226 |
| | characteristics | US patent application |
| SEQ_ID_NO_8638 | | Useful for making plants with altered |
| | | Lignin content |
| SEQ_ID_NO_8638 | | Useful for making plants with altered |
| | | cell wall content and/or composition |
| SEQ_ID_NO_8654 | The plant is abnormally large. | Useful for making plants with |
| | | modulated biomass |
| SEQ_ID_NO_8658 | | Useful for making plants with |
| | | modulated nitrogen use efficiency |
| SEQ_ID_NO_866 | | Useful for making plants with |
| | | modulated phosphate use efficiency |
| SEQ_ID_NO_866 | The plant flowers significantly late | Useful for making plants with |
| | compared to wild-type. | modulated flowering time |
| SEQ_ID_NO_866 | The plant is abnormally large. | Useful for making plants with |
| | | modulated biomass |
| SEQ_ID_NO_8680 | | Useful for making plants with altered |
| | | Lignin content |
| SEQ_ID_NO_8700 | The plant flowers significantly late | Useful for making plants with |
| | compared to wild-type. | modulated flowering time |
| SEQ_ID_NO_8700 | No seed is being produced by the plant | Useful for biocontainment applications |
| SEQ_ID_NO_872 | The plant is abnormally large. | Useful for making plants with |
| | | modulated biomass |
| SEQ_ID_NO_872 | Useful for making plants with | The sequence is a functional homolog |
| | modulated growth and phenotype | of SEQ ID NO 786 in the 10/412,699 |
| | characteristics | US patent application |
| SEQ_ID_NO_872 | Useful for making plants with | The sequence is a functional homolog |
| | modulated growth and phenotype | of SEQ ID NO 784 in the 10/412,699 |
| | characteristics | US patent application |
| SEQ_ID_NO_872 | Useful for making plants with | The sequence is a functional homolog |
| | modulated growth and phenotype | of SEQ ID NO 1617 in the 11/479,226 |
| | characteristics | US patent application |
| SEQ_ID_NO_872 | Useful for making plants with | The sequence is a functional homolog |
| | modulated growth and phenotype | of SEQ ID NO 1614 in the 11/479,226 |
| | characteristics | US patent application |
| SEQ_ID_NO_8726 | | Useful for making plants with altered |
| | | alkaloid content |
| SEQ_ID_NO_8736 | The plant is abnormally large. | Useful for making plants with |
| | | modulated biomass |
| SEQ_ID_NO_8736 | Useful for making plants with | The sequence is a functional homolog |
| | modulated growth and phenotype | of SEQ ID NO 786 in the 10/412,699 |
| | characteristics | US patent application |
| SEQ_ID_NO_8736 | Useful for making plants with | The sequence is a functional homolog |
| | modulated growth and phenotype | of SEQ ID NO 784 in the 10/412,699 |
| | characteristics | US patent application |
| SEQ_ID_NO_8736 | Useful for making plants with | The sequence is a functional homolog |
| | modulated growth and phenotype | of SEQ ID NO 1617 in the 11/479,226 |
| | characteristics | US patent application |
| SEQ_ID_NO_8736 | Useful for making plants with | The sequence is a functional homolog |
| | modulated growth and phenotype | of SEQ ID NO 1614 in the 11/479,226 |
| | characteristics | US patent application |
| SEQ_ID_NO_8746 | The plant flowers significantly earllier | Useful for making plants with |
| | than wild-type. | modulated flowering time |
| SEQ_ID_NO_8746 | | Useful for making plants with |
| | | modulated flowering time |
| SEQ_ID_NO_8746 | The plant is abnormally small. | Useful for making plants with |
| | | modulated biomass |
| SEQ_ID_NO_8746 | | Useful for making plants with |
| | | modulated biomass |
| SEQ_ID_NO_8758 | The plant flowers significantly late | Useful for making plants with |
| | compared to wild-type. | modulated flowering time |
| SEQ_ID_NO_8758 | No seed is being produced by the plant | Useful for biocontainment applications |
| SEQ_ID_NO_8780 | | Useful for making plants with altered |
| | | cell wall content and/or composition |
| SEQ_ID_NO_8800 | | Useful for making plants with altered oil |
| | | content |
| SEQ_ID_NO_8802 | | Useful for making plants with altered |
| | | alkaloid content |
| SEQ_ID_NO_8828 | | Useful for making plants with altered |
| | | terpenoid content |
| SEQ_ID_NO_8828 | | Useful for making plants with altered |
| | | Lignin content |
| SEQ_ID_NO_8912 | | Useful for making plants with |
| | | modulated nitrogen use efficiency |
| SEQ_ID_NO_8912 | The plant flowers significantly late | Useful for making plants with |
| | compared to wild-type. | modulated flowering time |
| SEQ_ID_NO_8912 | | Useful for making plants with altered |
| | | Lignin content |
| SEQ_ID_NO_8912 | | Useful for making plants with altered |
| | | alkaloid content |
| SEQ_ID_NO_8912 | Useful for making plants with | The sequence is a functional homolog |
| | modulated growth and phenotype | of SEQ ID NO 1016 in the 11/435,388 |
| | characteristics | US patent application |
| SEQ_ID_NO_8934 | | Useful for making plants with altered |
| | | Lignin content |
| SEQ_ID_NO_8934 | | Useful for making plants with altered |
| | | alkaloid content |
| SEQ_ID_NO_8942 | | Useful for making plants with |
| | | modulated phosphate use efficiency |
| SEQ_ID_NO_8968 | Useful for making plants with | The sequence is a functional homolog |
| | modulated growth and phenotype | of SEQ ID NO 898 in the 10/666,642 |
| | characteristics | US patent application |
| SEQ_ID_NO_8968 | Useful for making plants with | The sequence is a functional homolog |
| | modulated growth and phenotype | of SEQ ID NO 1423 in the 10/412,699 |
| | characteristics | US patent application |
| SEQ_ID_NO_8968 | Useful for making plants with | The sequence is a functional homolog |
| | modulated growth and phenotype | of SEQ ID NO 1270 in the 10/374,780 |
| | characteristics | US patent application |
| SEQ_ID_NO_8996 | Useful for making plants with | The sequence is a functional homolog |
| | modulated growth and phenotype | of SEQ ID NO 990 in the 10/412,699 |
| | characteristics | US patent application |
| SEQ_ID_NO_8996 | Useful for making plants with | The sequence is a functional homolog |
| | modulated growth and phenotype | of SEQ ID NO 988 in the 10/412,699 |
| | characteristics | US patent application |
| SEQ_ID_NO_8996 | Useful for making plants with | The sequence is a functional homolog |
| | modulated growth and phenotype | of SEQ ID NO 806 in the 11/435,388 |
| | characteristics | US patent application |
| SEQ_ID_NO_8996 | Useful for making plants with | The sequence is a functional homolog |
| | modulated growth and phenotype | of SEQ ID NO 683 in the 10/666,642 |
| | characteristics | US patent application |
| SEQ_ID_NO_8996 | Useful for making plants with | The sequence is a functional homolog |
| | modulated growth and phenotype | of SEQ ID NO 681 in the 10/666,642 |
| | characteristics | US patent application |
| SEQ_ID_NO_8996 | Useful for making plants with | The sequence is a functional homolog |
| | modulated growth and phenotype | of SEQ ID NO 490 in the 10/374,780 |
| | characteristics | US patent application |
| SEQ_ID_NO_8996 | Useful for making plants with | The sequence is a functional homolog |
| | modulated growth and phenotype | of SEQ ID NO 488 in the 10/374,780 |
| | characteristics | US patent application |
| SEQ_ID_NO_8996 | Useful for making plants with | The sequence is a functional homolog |
| | modulated growth and phenotype | of SEQ ID NO 198 in the 11/375,241 |
| | characteristics | US patent application |
| SEQ_ID_NO_9042 | | Useful for making plants with altered oil |
| | | content |
| SEQ_ID_NO_9060 | The plant flowers significantly late | Useful for making plants with |
| | compared to wild-type. | modulated flowering time |
| SEQ_ID_NO_9060 | No seed is being produced by the plant | Useful for biocontainment applications |
| SEQ_ID_NO_9062 | The plant flowers significantly late | Useful for making plants with |
| | compared to wild-type. | modulated flowering time |
| SEQ_ID_NO_9062 | | Useful for making plants with |
| | | modulated cold sensitivity |
| SEQ_ID_NO_9070 | | Useful for making plants with altered |
| | | cell wall content and/or composition |
| SEQ_ID_NO_9090 | | Useful for making plants with |
| | | modulated nitrogen use efficiency |
| SEQ_ID_NO_9098 | | Useful for making plants with |
| | | modulated flowering time |
| SEQ_ID_NO_9106 | The plant is abnormally large. | Useful for making plants with |
| | | modulated biomass |
| SEQ_ID_NO_9106 | The plant is abnormally small. | Useful for making plants with |
| | | modulated biomass |
| SEQ_ID_NO_9132 | The plant flowers significantly earllier | Useful for making plants with |
| | than wild-type. | modulated flowering time |
| SEQ_ID_NO_9132 | | Useful for making plants with |
| | | modulated flowering time |
| SEQ_ID_NO_9132 | The plant is abnormally small. | Useful for making plants with |
| | | modulated biomass |
| SEQ_ID_NO_9132 | | Useful for making plants with |
| | | modulated biomass |
| SEQ_ID_NO_9156 | | Useful for making plants with |
| | | modulated flowering time |
| SEQ_ID_NO_9174 | | Useful for making plants with altered oil |
| | | content |
| SEQ_ID_NO_9262 | The plant senesces significantly late | Useful for making plants with |
| | copared to wild-type. | modulated time to senescence |
| SEQ_ID_NO_9262 | The plant flowers significantly late | Useful for making plants with |
| | compared to wild-type. | modulated flowering time |
| SEQ_ID_NO_9322 | | Useful for making plants with altered |
| | | terpenoid content |
| SEQ_ID_NO_9322 | | Useful for making plants with altered |
| | | alkaloid content |
| SEQ_ID_NO_9374 | | Useful for making plants with |
| | | modulated phosphate use efficiency |
| SEQ_ID_NO_9374 | The plant flowers significantly late | Useful for making plants with |
| | compared to wild-type. | modulated flowering time |
| SEQ_ID_NO_9374 | The plant is abnormally large. | Useful for making plants with |
| | | modulated biomass |
| SEQ_ID_NO_9382 | | Useful for making plants with |
| | | modulated cold sensitivity |
| SEQ_ID_NO_9442 | Useful for making plants with | The sequence is a functional homolog |
| | modulated growth and phenotype | of SEQ ID NO 992 in the 11/479,226 |
| | characteristics | US patent application |
| SEQ_ID_NO_9442 | Useful for making plants with | The sequence is a functional homolog |
| | modulated growth and phenotype | of SEQ ID NO 988 in the 11/479,226 |
| | characteristics | US patent application |
| SEQ_ID_NO_9442 | Useful for making plants with | The sequence is a functional homolog |
| | modulated growth and phenotype | of SEQ ID NO 616 in the 11/435,388 |
| | characteristics | US patent application |
| SEQ_ID_NO_9442 | Useful for making plants with | The sequence is a functional homolog |
| | modulated growth and phenotype | of SEQ ID NO 504 in the 11/435,388 |
| | characteristics | US patent application |
| SEQ_ID_NO_9442 | Useful for making plants with | The sequence is a functional homolog |
| | modulated growth and phenotype | of SEQ ID NO 428 in the 10/412,699 |
| | characteristics | US patent application |
| SEQ_ID_NO_9502 | | Useful for making plants with |
| | | modulated drought sensitivity |
| SEQ_ID_NO_9502 | Useful for making plants with | The sequence is a functional homolog |
| | modulated growth and phenotype | of SEQ ID NO 805 in the 11/479,226 |
| | characteristics | US patent application |
| SEQ_ID_NO_9502 | Useful for making plants with | The sequence is a functional homolog |
| | modulated growth and phenotype | of SEQ ID NO 801 in the 11/479,226 |
| | characteristics | US patent application |
| SEQ_ID_NO_9502 | Useful for making plants with | The sequence is a functional homolog |
| | modulated growth and phenotype | of SEQ ID NO 797 in the 11/479,226 |
| | characteristics | US patent application |
| SEQ_ID_NO_9502 | Useful for making plants with | The sequence is a functional homolog |
| | modulated growth and phenotype | of SEQ ID NO 790 in the 10/225,066 |
| | characteristics | US patent application |
| SEQ_ID_NO_9502 | Useful for making plants with | The sequence is a functional homolog |
| | modulated growth and phenotype | of SEQ ID NO 789 in the 11/479,226 |
| | characteristics | US patent application |
| SEQ_ID_NO_9502 | Useful for making plants with | The sequence is a functional homolog |
| | modulated growth and phenotype | of SEQ ID NO 786 in the 11/479,226 |
| | characteristics | US patent application |
| SEQ_ID_NO_9502 | Useful for making plants with | The sequence is a functional homolog |
| | modulated growth and phenotype | of SEQ ID NO 782 in the 11/479,226 |
| | characteristics | US patent application |
| SEQ_ID_NO_9502 | Useful for making plants with | The sequence is a functional homolog |
| | modulated growth and phenotype | of SEQ ID NO 344 in the 10/412,699 |
| | characteristics | US patent application |
| SEQ_ID_NO_9502 | Useful for making plants with | The sequence is a functional homolog |
| | modulated growth and phenotype | of SEQ ID NO 342 in the 10/412,699 |
| | characteristics | US patent application |
| SEQ_ID_NO_9502 | Useful for making plants with | The sequence is a functional homolog |
| | modulated growth and phenotype | of SEQ ID NO 2350 in the 10/374,780 |
| | characteristics | US patent application |
| SEQ_ID_NO_9624 | | Useful for making plants with |
| | | modulated nitrogen use efficiency |
| SEQ_ID_NO_9624 | The plant flowers significantly late | Useful for making plants with |
| | compared to wild-type. | modulated flowering time |
| SEQ_ID_NO_9624 | | Useful for making plants with altered |
| | | Lignin content |
| SEQ_ID_NO_9624 | | Useful for making plants with altered |
| | | alkaloid content |
| SEQ_ID_NO_9624 | Useful for making plants with | The sequence is a functional homolog |
| | modulated growth and phenotype | of SEQ ID NO 1016 in the 11/435,388 |
| | characteristics | US patent application |
| SEQ_ID_NO_9636 | | Useful for making plants with altered |
| | | Lignin content |
| SEQ_ID_NO_9636 | | Useful for making plants with altered |
| | | cell wall content and/or composition |
| SEQ_ID_NO_9636 | | Useful for making plants with altered |
| | | cell wall composition |
| SEQ_ID_NO_9670 | Useful for making plants with | The sequence is a functional homolog |
| | modulated growth and phenotype | of SEQ ID NO 872 in the 10/666,642 |
| | characteristics | US patent application |
| SEQ_ID_NO_9670 | Useful for making plants with | The sequence is a functional homolog |
| | modulated growth and phenotype | of SEQ ID NO 1466 in the 10/374,780 |
| | characteristics | US patent application |
| SEQ_ID_NO_9704 | | Useful for making plants with |
| | | modulated nitrogen use efficiency |
| SEQ_ID_NO_9704 | The plant flowers significantly late | Useful for making plants with |
| | compared to wild-type. | modulated flowering time |
| SEQ_ID_NO_9704 | | Useful for making plants with altered |
| | | Lignin content |
| SEQ_ID_NO_9704 | | Useful for making plants with altered |
| | | alkaloid content |
| SEQ_ID_NO_9704 | Useful for making plants with | The sequence is a functional homolog |
| | modulated growth and phenotype | of SEQ ID NO 1016 in the 11/435,388 |
| | characteristics | US patent application |
| SEQ_ID_NO_9718 | The plant flowers significantly earllier | Useful for making plants with |
| | than wild-type. | modulated flowering time |
| SEQ_ID_NO_9718 | | Useful for making plants with |
| | | modulated flowering time |
| SEQ_ID_NO_9718 | The plant is abnormally small. | Useful for making plants with |
| | | modulated biomass |
| SEQ_ID_NO_9718 | | Useful for making plants with |
| | | modulated biomass |
| SEQ_ID_NO_9724 | | Useful for making plants with |
| | | modulated nitrogen use efficiency |
| SEQ_ID_NO_9724 | The plant flowers significantly late | Useful for making plants with |
| | compared to wild-type. | modulated flowering time |
| SEQ_ID_NO_9724 | | Useful for making plants with altered |
| | | Lignin content |
| SEQ_ID_NO_9724 | | Useful for making plants with altered |
| | | alkaloid content |
| SEQ_ID_NO_9724 | Useful for making plants with | The sequence is a functional homolog |
| | modulated growth and phenotype | of SEQ ID NO 1016 in the 11/435,388 |
| | characteristics | US patent application |
| SEQ_ID_NO_9752 | | Useful for making plants with |
| | | modulated oxidative stress sensitivity |
| SEQ_ID_NO_9764 | | Useful for making plants with altered |
| | | terpenoid content |
| SEQ_ID_NO_9788 | | Useful for making plants with altered |
| | | alkaloid content |
| SEQ_ID_NO_9798 | | Useful for making plants with altered |
| | | cell wall content and/or composition |
| SEQ_ID_NO_9808 | Useful for making plants with | The sequence is a functional homolog |
| | modulated growth and phenotype | of SEQ ID NO 891 in the 10/374,780 |
| | characteristics | US patent application |
| SEQ_ID_NO_9808 | Useful for making plants with | The sequence is a functional homolog |
| | modulated growth and phenotype | of SEQ ID NO 890 in the 10/374,780 |
| | characteristics | US patent application |
| SEQ_ID_NO_9808 | Useful for making plants with | The sequence is a functional homolog |
| | modulated growth and phenotype | of SEQ ID NO 886 in the 10/225,066 |
| | characteristics | US patent application |
| SEQ_ID_NO_9808 | Useful for making plants with | The sequence is a functional homolog |
| | modulated growth and phenotype | of SEQ ID NO 853 in the 10/374,780 |
| | characteristics | US patent application |
| SEQ_ID_NO_9808 | Useful for making plants with | The sequence is a functional homolog |
| | modulated growth and phenotype | of SEQ ID NO 731 in the 11/479,226 |
| | characteristics | US patent application |
| SEQ_ID_NO_9808 | Useful for making plants with | The sequence is a functional homolog |
| | modulated growth and phenotype | of SEQ ID NO 312 in the 10/412,699 |
| | characteristics | US patent application |
| SEQ_ID_NO_9808 | Useful for making plants with | The sequence is a functional homolog |
| | modulated growth and phenotype | of SEQ ID NO 2012 in the 10/374,780 |
| | characteristics | US patent application |
| SEQ_ID_NO_9808 | Useful for making plants with | The sequence is a functional homolog |
| | modulated growth and phenotype | of SEQ ID NO 102 in the 10/374,780 |
| | characteristics | US patent application |
| SEQ_ID_NO_982 | The plant senesces significantly late | Useful for making plants with |
| | copared to wild-type. | modulated time to senescence |
| SEQ_ID_NO_982 | The plant flowers significantly late | Useful for making plants with |
| | compared to wild-type. | modulated flowering time |
| SEQ_ID_NO_9840 | | Useful for making plants with altered |
| | | cell wall content and/or composition |
| SEQ_ID_NO_9904 | | Useful for making plants with altered |
| | | cell wall content and/or composition |
| SEQ_ID_NO_9906 | | Useful for making plants with altered |
| | | terpenoid content |
| SEQ_ID_NO_992 | | Useful for making plants with altered |
| | | cell wall content and/or composition |
| SEQ_ID_NO_994 | Useful for making plants with | The sequence is a functional homolog |
| | modulated growth and phenotype | of SEQ ID NO 960 in the 10/225,066 |
| | characteristics | US patent application |
| SEQ_ID_NO_994 | Useful for making plants with | The sequence is a functional homolog |
| | modulated growth and phenotype | of SEQ ID NO 2604 in the 10/374,780 |
| | characteristics | US patent application |
| SEQ_ID_NO_994 | Useful for making plants with | The sequence is a functional homolog |
| | modulated growth and phenotype | of SEQ ID NO 1769 in the 11/479,226 |
| | characteristics | US patent application |

Biocontainment

[0096] While growing transgenic plants for agronomic purposes is becoming more common, concerns about preventing cross-pollination with naturally occurring plants remain. One approach to containing the germplasm of transgenic plants is patterned after that used for hybrid seed production. To produce hybrid seed that is not contaminated with selfed seed pollination, cross-pollination and not self-pollination is ensured, for example, by using a genetic method of pollination control. Here, plants that are used as females (i) fail to make pollen, (ii) fail to shed pollen, or (iii) produce pollen biochemically unable to provide self-fertilization. Alternatively, pollen control is based on plants that are male sterile due to (i) nuclear or genic male sterility—the failure of pollen formation because of, typically, mutations in one or more nuclear genes; or (ii) cytoplasmic male sterility (CMS)—pollen formation is blocked or aborted as the result of a defect in a cytoplasmic organelle, typically, the mitochondria. For biocontainment purposes, use of these types of semi-sterile plants allow germplasm containment in all types of plants, except that female plants of type (iii) above are only useful for germplasm containment in obligatory self-pollinating species.

[0097] Another genetic approach to biocontainment is to link the recombinant traits of interest to repressible lethal genes (for example see WO 00/37660). The lethal genes are blocked by the action of repressor molecules produced by repressor genes located at a different genetic locus. The lethal phenotype is expressed only if the repressible lethal gene construct and the repressor gene segregate after meiosis. This approach reportedly can be used to maintain genetic purity by blocking introgression of genes from plants that lack the repressor gene.

Altered Oil Content

[0098] Increasing the oil content, or optimizing the oil composition, of plants has long been a goal in plant breeding programs. As plant oil production becomes better understood, the potential of using transgenic means to accomplish this has increased. One way to achieve increased oil content/composition is to manipulate the genes involved in oil production pathways. For example, acetyl CoA carboxylase (ACCase) is an enzyme that is especially important in fatty acid synthesis in plants and is sensitive to inhibition by some types of herbicides. Using acetyl-CoA and bicarbonate, Acetyl CoA Carboxylase (ACCase) catalyzes the formation of malonyl-CoA, an essential substrate for (i) de novo fatty acid (FA) synthesis, (ii) fatty acid elongation, (iii) synthesis of secondary metabolites such as flavonoids and anthocyanins, and (iv) malonylation of some amino acids and secondary metabolites.

[0099] In plants, most ACCase activity is located in plastids of green and non-green plant tissues including leaves and oil seeds. Condensation of malonyl-CoA with phenylpropionyl-CoAs or acetyl-CoA leads to synthesis of flavonoids, anthocyanins, or to polyacetates. In addition to the secondary metabolites derived by de novo synthesis, malonyl conjugates of flavonoid glycosides, formed by malonyl-CoA:flavonoid glycoside malonyltransferase, D-amino acids and 1-amino-carboxyl-cyclopropane (ethylene precursor) are found in plants. Malonylated compounds accumulate in vacuoles, probably after synthesis in the cytoplasm. Thus, manipulating any of the genes involved in this pathway can produce improvements in plant oil content as well as secondary metabolites such as anthocyanins.

Herbicide Tolerance

[0100] There are three general mechanisms by which plants may be resistant to, or tolerant of, herbicides. These mechanisms include insensitivity at the site of action of the herbicide (usually an enzyme), rapid metabolism (conjugation or degradation) of the herbicide, or poor uptake and translocation of the herbicide. Altering the herbicide site of action from a sensitive to an insensitive form is the preferred method of conferring tolerance on a sensitive plant species. This is because tolerance of this nature is likely to be a dominant trait encoded by a single gene, and is likely to encompass whole families of compounds that share a single site of action, not just individual chemicals. Two examples of families of herbicides are the cyclohexanedione family and herbicidal aryloxyphenoxypropanoic acids. Therefore, detailed information concerning the biochemical site and mechanism of herbicide action is of great importance and can be applied in two ways. First, the genes involved in the production of the biochemical site and/or mechanism of action can be manipulated to produce resistance or enhance susceptibility. Second, the information can be used to develop cell selection strategies for the efficient identification and isolation of appropriate herbicide-tolerant/susceptible variants. Third, it can be used to characterize the variant cell lines and regenerated plants that result from the selections.

Modulated Sterol Content

[0101] Sterols are known to play at least two critical roles in plants: as bulk components of membranes regulating stability and permeability (Bach et al. (1997) Prog. Lipid Res. 36:197 226) and as precursors of growth-promoting brassinosteroids (BRs; Fujioka and Sakurai (1997) Nat. Prod. Rep. 14:1 10). Sterol biosynthesis in plants has been studied extensively through enzyme purification or gene cloning (Grunwald (1975) Annu. Rev. Plant Physiol. 26:209 236; Goodwin (1979) Annu. Rev. Plant Physiol. 30:369 404; Benveniste (1986) Annu. Rev. Plant Physiol. 37:275 308; Bach and Benveniste (1997) Prog. Lipid Res. 36:197 226; all of which are incorporated by reference by in their entirety). A major difference between photosynthetic and nonphotosynthetic organisms is that cyclization of squalene 2,3-oxide is bifurcated to a different route for each system (Benveniste (1986) Annu. Rev. Plant Physiol. 37:275 308). Photosynthetic organisms require biosynthetic enzymes such as cycloartenol synthase (Corey et al. (1993) Proc. Natl. Acad. Sci. USA 90:11628 11632) and cycloeucalenol-obtusifoliol isomerase, which are required to open the cyclopropane ring in cycloartenol. Thus, manipulating the expression of genes in the sterol pathway can result in plants having altered sterol content and composition.

Altered Alkaloid Content

[0102] Plant families that produce alkaloids include the Papaveraceae, Berberidaceae, Leguminosae, Boraginaceae, Apocynaceae, Asclepiadaceae, Liliaceae, Gnetaceae, Erythroxylaceae, Convolvulaceae, Ranunculaeceae, Rubiaceae, Solanaceae, and Rutaceae families. Many alkaloids isolated from such plants are known for their pharmacologic (e.g., narcotic), insecticidal, and physiologic effects. For example, the poppy (Papaveraceae) family contains about 250 species found mainly in the northern temperate regions of the world. The principal morphinan alkaloids in opium poppy (Papaver somniferum) are morphine, codeine, and thebaine, which are used directly or modified using synthetic methods to produce pharmaceutical compounds used for pain management, cough suppression, and addiction. Manipulation of the genes participating in the alkaloid biosynthetic pathways not only allow production of plants with altered alkaloid content and/or composition, but also enable the production of new types of alkaloids for use in medicine and agriculture.

Altered Carbon Content

[0103] The ability of a plant to grow and develop under diverse and changing environmental conditions depends on the ability of the plant to utilize carbon and/or nitrogen. Specifically, the accumulation of one or both of these elements suggests that the plant is storing, synthesizing, or utilizing components such as nitrate, amino acids, proteins, sugars and/or carbohydrates to compensate for the changing environment. The balance of carbon and nitrogen in plants is an important aspect of how plants utilize nitrogen efficiently. Carbon skeletons and energy are required in ample supply for nitrogen assimilation and re-assimilation (photorespiratory NH₄). Conversely, primary carbon assimilation is highly dependent on nitrogen assimilation because much of the nitrogen in a plant is invested in the proteins and chlorophyll of the photosynthetic machinery. Therefore, fixed carbon must be partitioned between amino acids and carbohydrate synthesis in a flexible manner that is responsive to the external and internal availability of nitrogen. Thus plant genes that increase fixed carbon content under varying nitrogen conditions are useful for optimizing carbon partitioning in plants.

Altered Nitrogen Content

[0104] The photoautotrophic production of organic nitrogenous compounds is crucial to plant metabolism, growth, and development. Protein and amino acid contents of harvested plant materials are of great agronomic importance in many crop species. Light-driven nitrogen (N) assimilation in leaves has evolved to operate alongside and integrate with photosynthesis and respiration. The production of reduced carbon (C) in photosynthesis and its reoxidation in respiration are necessary to produce both the energy and C skeletons required for the incorporation of inorganic N into amino acids. Conversely, N assimilation is required to sustain the output of organic C and N. This network is further complicated by the concomitant operation of photorespiratory metabolism. Both the rate of N assimilation and the coordination of C and N assimilation are under multifactorial control by a repertoire of signals, which provide information on C and N status. Consequently, genes that increase nitrogen content in plants under varying nitrogen conditions are useful in optimizing the nitrogen available for protein and amino acid synthesis.

Altered Sugar Content

[0105] A sugar is a carbohydrate that is sweet to taste. Sugars are used in food and drink as a source of sweetness and energy and are important in biochemistry. Sucrose, also called “table sugar,” is a white crystalline solid. Sucrose is a disaccharide composed of two monosaccharides, glucose and fructose, joined together by a 1→2, α, β-glycosidic bond. Sucrose is commercially extracted from either sugar cane or sugar beet and then purified and crystallized. Other commercial sources are sorghum, date palm, and sugar maples. The monosaccharides, such as glucose (which is produced from sucrose by enzymes or acid hydrolysis), are a store of energy that is used by biological cells. Oxidation of glucose is known as glycolysis. It occurs in virtually all cells. Glucose is oxidized to either lactate or pyruvate. Under aerobic conditions, the dominant product in most tissues is pyruvate and the pathway is known as aerobic glycolysis. When oxygen is depleted, as for instance during prolonged vigorous exercise, the dominant glycolytic product in many tissues is lactate and the process is known as anaerobic glycolysis. Other sugars besides glucose, such as fructose, can enter glycolysis after being converted to appropriate intermediates that can enter the pathway. Glycolysis results in production of NADH and ATP. The NADH generated during glycolysis is used to fuel mitochondrial ATP synthesis via oxidative phosphorylation. ATP powers virtually every activity of the cell and organism. Organisms from the simplest bacteria to humans use ATP as their primary energy currency. Thus, manipulation of the genes used in these biochemical pathways and for these enzymes allow production of plants with modulated (i.e. increased or decreased) sugar content.

Altered Amino Acid Content

[0106] An essential amino acid for an organism is an amino acid that cannot be synthesized by the organism from other available resources, and therefore must be supplied as part of its diet. Nine amino acids, including lysine and leucine, are generally regarded as essential for humans. Deficiencies of particular essential amino acids in certain major food crops have spurred efforts to improve the nutritional value of plants. One strategy to improve the nutritional value of plants relies upon traditional plant breeding methods. Another approach involves genetic manipulation of plant characteristics through the introduction of exogenous nucleic acids conferring a desirable trait. Thus manipulation of the genes involved in amino acid synthesis and storage is useful for producing plants with increased or optimized amino acid content.

Altered Carotene Content

[0107] Carotenoids are pigments with a variety of applications. They are yellow-orange-red lipids which are present in green plants, some molds, yeast and bacteria. Carotenoid hydrocarbons are referred to as carotenes, whereas oxygenated derivatives are referred to as xanthophylls. The carotenoids are part of the larger isoprenoid biosynthesis pathway which, in addition to carotenoids, produces such compounds as chlorophyll and tocopherols, which are Vitamin E active agents. The carotenoid pathway in plants produces carotenes, such as α- and β-carotene, and lycopene, and xanthophylls, such as lutein.

[0108] The biosynthesis of carotenoids involves the condensation of two molecules of the C₂₀ precursor geranyl PPᵢ to yield the first C₄₀ hydrocarbon phytoene. In a series of sequential desaturations, phytoene yields lycopene. Lycopene is the precursor of the cyclic carotenes, β-carotene and α-carotene. The xanthophylls, zeaxanthin and lutein are formed by hydroxylation of .beta.-carotene and .alpha.-carotene, respectively.

[0109] β-carotene, a carotene whose color is in the spectrum ranging from yellow to orange, is present in a large amount in the roots of carrots and in green leaves of plants. β-carotene is useful as a coloring material and also as a precursor of vitamin A in mammals. Current methods for commercial production of β-carotene include isolation from carrots, chemical synthesis, and microbial production.

[0110] A number of crop plants and a single oilseed crop are known to have substantial levels of carotenoids, and consumption of such natural sources of carotenoids has been indicated as providing various beneficial health effects. Thus, manipulation of the genes involved in carotenoid biosynthesis and storage would allow production of plants with increased carotenoid content and/or composition, for example increases in lutein, lycopene and carotene.

Altered Tocopherol Content

[0111] Tocopherols and tocotrienols (unsaturated tocopherol derivatives) are well known antioxidants, and play an important role in protecting cells from free radical damage, and in the prevention of many diseases, including cardiac disease, cancer, cataracts, retinopathy, Alzheimer's disease, and neurodegeneration, and have been shown to have beneficial effects on symptoms of arthritis, and in anti-aging. Vitamin E (α-tocopherol) is used in chicken feed for improving the shelf life, appearance, flavor, and oxidative stability of meat, and to transfer tocols from feed to eggs. Vitamin E has been shown to be essential for normal reproduction, improves overall performance, and enhances immunocompetence in livestock animals. Vitamin E supplement in animal feed also imparts oxidative stability to milk products.

[0112] The demand for natural tocopherols as supplements has been steadily growing at a rate of 10-20% for the past three years. At present, the demand exceeds the supply for natural tocopherols, which are known to be more biopotent than racemic mixtures of synthetically produced tocopherols. Naturally occurring tocopherols are all d-stereomers, whereas synthetic α-tocopherol is a mixture of eight d,1-α-tocopherol isomers, only one of which (12.5%) is identical to the natural d-α-tocopherol. Natural d-α-tocopherol has the highest vitamin E activity (1.49 IU/mg) when compared to other natural tocopherols or tocotrienols. The synthetic α-tocopherol has a vitamin E activity of 1.1 IU/mg. In 1995, the worldwide market for raw refined tocopherols was $1020 million; synthetic materials comprised 85-88% of the market, the remaining 12-15% being natural materials. The best sources of natural tocopherols and tocotrienols are vegetable oils and grain products. Currently, most of the natural Vitamin E is produced from γ-tocopherol derived from soy oil processing, which is subsequently converted to α-tocopherol by chemical modification (α-tocopherol exhibits the greatest biological activity). Thus, methods of enhancing the levels of tocopherols and tocotrienols in plants, especially levels of the more desirable compounds that can be used directly, without chemical modification, would be useful to the art as such molecules exhibit better functionality and bioavailability. This can be accomplished by manipulation of the genes involved in tocopherols and tocotrienols biosynthesis and storage.

Altered Terpenoid Content

[0113] Terpenoids or terpenes represent a family of natural products found in most organisms (bacteria, fungi, animal, plants). Terpenoids are made up of five carbon units called isoprene units. They can be classified by the number of isoprene units present in their structure: monoterpenes (C10), sesquiterpenes (C15), diterpenes (C20), triterpenes (C30), tetraterpenes (C40) and polyterpenes (Cn). The plant kingdom contains the highest diversity of monoterpenes and sesquiterpenes, which are the most structurally diverse isoprenoids. They are usually volatile compounds and are mostly found in plants were they play a role in defense against pathogens and herbivores attacks, in pollinator attraction and in plant-plant communication.

[0114] Monoterpene and sesquiterpene accumulating plants have been of interest for thousands of years because of their flavor and fragrance properties and their cosmetic, medicinal and anti-microbial effects. The terpenes accumulated in the plants can be extracted by different means such as steam distillation that produces the so-called essential oil containing the concentrated terpenes. Such natural plant extracts are important components for the flavor and perfumery industry.

[0115] Some plants, known as aromatic plants or essential-oil-plants, accumulate large amounts of monoterpenes and sesquiterpenes in their leaves. In these plants, the terpenes are often synthesized and accumulated in specialized anatomical structures, glandular trichomes or secretory cavities, localized on the leaves and stems surface. Classical examples of such plants are members from the Lamiaceae family such as lavender, mint, sage, basil and patchouli.

[0116] The biosynthesis of terpenes in plants has been extensively studied. The common five-carbon precursor to all terpenes is isopentenyl pyrophosphate (IPP). Most of the enzymes catalyzing the steps leading to IPP have been cloned and characterized. Two distinct pathways for IPP biosynthesis coexist in the plants. The mevalonate pathway is found in the cytosol and endoplasmic reticulum and the non-mevalonate pathway (or deoxyxylulose (DXP) pathway) is found in the plastids. In the next step IPP is repetitively condensed by prenyl transferases to form the acyclic prenyl pyrophosphate terpene precursors for each class of terpenes, e.g. geranyl-pyrophosphate (GPP) for the monoterpenes, farnesyl-pyrophosphate (FPP) for the sesquiterpenes, geranylgeranyl-pyrophosphate (GGPP) for the diterpenes. These precursors serve as substrate for the terpene synthases or cyclases, which are specific for each class of terpene, e.g. monoterpene, sesquiterpene or diterpene synthases. Terpene synthases catalyze complex multiple step cyclizations to form the large diversity of carbon skeleton of the terpene compounds. Finally, in the last stage of terpenoid biosynthesis, the terpene molecules may undergo several steps of secondary enzymatic transformations such as hydroxylations, isomerisations, oxido-reductions or acylations, leading to the tens of thousand of different terpene molecules. Consequently, manipulation of the genes involved in terpene biosynthesis allows producing plants with modulated (i.e. increased or decreased) in terpene production and/or storage.

Altered Carbohydrate Content

[0117] Sucrose is the carbon storage unit which is transported from the source tissues of most plants to the sink tissues. In sink tissues it is hydrolyzed and the components used to build other, more complex storage units, primarily starch, protein, and oil. The hydrolysis is primarily accomplished by sucrose synthase which produces UDPglucose and fructose. UDPglucose is converted to glucose 1-phosphate by UDPglucose pyrophosphorylase.

[0118] Altering the starch content of the sink tissues of various crop plants is desirable. Certainly, one such advantageous trait is enhanced starch and/or solids content and quality in various crop plants. For example, a more uniform distribution of starch and solids within the potato tuber or higher solids in the form of soluble (usually sugars and acids) and insoluble solids in tomatoes contribute to processing efficiency. Another advantageous trait is enhanced oil and protein content of seeds of various crop plants. Yet in some cases it is desirable to decrease the sucrose content of seeds in oilseed crops resulting in a decrease in the level of undesirable carbohydrates such as stachyose and raffinose, while increasing the carbon available for oil and protein production. Thus, manipulating the genes involved in starch and sugar biosynthesis allows producing plants with modulated (i.e. increased or decreased) in starch/sugar production and/or storage.

Altered Lignin Content

[0119] Lignin is the major structural component of secondarily thickened plant cell walls. It is a complex polymer of hydroxylated and methoxylated phenylpropane units, linked via oxidative coupling that is probably catalyzed by both peroxidases and laccases (Boudet, et al., 1995. “Tansley review No. 80: Biochemistry and molecular biology of lignification,” New Phytologist 129:203-236). Lignin imparts mechanical strength to stems and trunks, and hydrophobicity to water-conducting vascular elements. Although the basic enzymology of lignin biosynthesis is reasonably well understood, the regulatory steps in lignin biosynthesis and deposition remain to be defined (Davin, L. B. and Lewis, N. G. 1992. “Phenylpropanoid metabolism: biosynthesis of monolignols, lignans and neolignans, lignins and suberins,” Rec Adv Phytochem 26:325-375; incorporated herein in its entirety).

[0120] There is considerable interest in the potential for genetic manipulation of lignin levels and/or composition to help improve digestibility of forages and pulping properties of trees. Small decreases in lignin content have been reported to positively impact the digestibility of forages. By improving the digestibility of forages, higher profitability can be achieved in cattle and related industries. In forestry, chemical treatments necessary for the removal of lignin from trees are costly and potentially polluting. Consequently, manipulating the genes involved in lignin biosynthesis allows producing plants with modulated (i.e. increased or decreased) lignin production and/or storage.

[0121] Altered Cell Wall Content The regulation of plant cell wall biosynthesis has various important significances in the fields of industry and agriculture. For example, by elevating cellulose/hemicellulose contents, the modification of plant cell wall components can lead to the production of plants that can supply fiber raw materials such as pulp and the improvement of the digestion/absorption efficiency of useful farm and feed crops. Thus, such modifications are significant from the aspects economical efficiency and profitability. Furthermore, structural modification of polysaccharides, which are cell wall components, can lead to the production of raw material plants having novel industrial values.

[0122] Mechanisms of cell wall synthesis have not been extensively and actively analyzed on the molecular level in spite of their industrial importance. Recently, molecular-level studies on plant cell wall synthesis are starting to be conducted using analytical techniques of molecular genetics. For example, it is though that the cell wall forms from Golgi body-derived vesicles which first fuse together near the cell division surface to form a phragmoplast. Callose then accumulates at that site forming a cell plate. Several proteins present in phragmoplasts and cell plates have been reported (M. Heese et al., Current Opinion in Plant Biology 1: 486-491 (1998); X. Gu and D. P. S. Verma, EMBO J. 15: 695-704 (1996)). Phragmoplastin is one of these proteins, termed the “dynamin-like protein” in general, and known to be broadly present in the whole plant and animal world (X. Gu and D. P. S. Verma, Plant Cell 9: 157-169 (1997); D. Otsuga, et al., J. Cell Biol. 143, 333-349 (1998); S. G. Kang et al., Plant Mol. Biol. 38: 437-447 (1998); D. C. Wienke et al., Molecular Biology of the Cell 10: 225-243 (1999)). However, the function of this protein has not been elucidated yet.

[0123] Other proteins reported as involved in cell wall synthesis include cellulose synthase and such (T. Arioli et al., “Molecular analysis of cellulose biosynthesis in Arabidopsis”, Science 279: 717-720 (1998)). However, many genes involved in cell wall synthesis are just now being isolated, and there are still many unknown mechanisms relating to cell wall synthesis (references: Y. Kawagoe and D. P. Delmer, “Pathways and genes involved in cellulose biosynthesis”, Genetic engineering 19, Plenum Press, New York (1997); K. Nishitani, “Construction and Restructuring of the cellulose-xyloglucan framework in the apoplast as mediated by the xyloglucan-related protein family-A hypothetical scheme”, J. Plant Res. 111: 159-166 (1998)). Consequently, manipulating the genes involved in cell wall biosynthesis allows producing plants with modulated cell wall structure and cell wall protein content.

Altered Senescence Time

[0124] Senescence is the terminal phase of biological development in the life of a plant. It presages death and occurs at various levels of biological organization including the whole plant, organs, flowers and fruit, tissues and individual cells.

[0125] Cell membrane deterioration is an early and characteristic feature of senescence engendering increased permeability, loss of ionic gradients and decreased function of key membrane proteins such as ion pumps (Brown, et al., Plant Physiol.: A Treatise, Vol. X. Academic Press, 1991, pp. 227-275). Much of this decline in membrane structural and functional integrity can be attributed to lipase-mediated phospholipid metabolism. Loss of lipid phosphate has been demonstrated for senescing flower petals, leaves, cotyledons and ripening fruit (Thompson, J. E., Senescence and Aging in Plants, Academic Press, San Diego, 1988, pp. 51-83), and this appears to give rise to major alterations in the molecular organization of the membrane bilayer with advancing senescence that lead to impairment of cell function. There is growing evidence that much of the metabolism of lipids in senescing tissue is achieved through senescence-specific changes in gene expression (Buchanan-Wollaston, V., J. Exp. Bot., 1997, 307:181-199).

[0126] The onset of senescence can be induced by different factors both internal and external. For example, ethylene has been implicated as an internal regulator of leaf senescence in many plants. But evidence obtained from transgenic plants and ethylene response mutants indicates that although ethylene has an effect on senescence, it is not an essential regulator of the process.

[0127] External factors that induce premature initiation of senescence include environmental stresses such as temperature, drought, poor light or nutrient supply, as well as pathogen attack. As in the case of natural (age-related) senescence, environmental stress-induced senescence is characterized by a loss of cellular membrane integrity. Specifically, exposure to environmental stress induces electrolyte leakage reflecting membrane damage (Sharom, et al., 1994, Plant Physiol., 105:305-308; Wright and Simon, 1973, J. Exp. Botany, 24:400-411; Wright, M., 1974, Planta, 120:63-69; and Eze et al., 1986, Physiologia Plantarum, 68:323-328), a decline in membrane phospholipid levels (Wright, M., 1974, Planta, 120:63-69) and lipid phase transitions (Sharom, et al., 1994, Plant Physiol., 105:305-308), all of which can be attributed to the action of lipase.

[0128] Presently, there is no widely applicable method for controlling onset of senescence caused by either internal or external factors. At present, the technology for controlling senescence and increasing the shelf-life of fresh, perishable plant produce, such as fruits, flowers and vegetables relies primarily upon reducing ethylene biosynthesis. Consequently, manipulating the genes involved in senescence allows production of plants having improved shelf life.

Altered UV Sensitivity

[0129] Flavonoids constitute a relatively diverse family of aromatic molecules that are derived from phenylalanine and malonyl-coenzyme A (CoA, via the fatty acid pathway). These compounds include six major subgroups that are found in most higher plants: the chalcones, flavones, flavonols, flavandiols, anthocyanins and condensed tannins (or proanthocyanidins). A seventh group, the aurones, is widespread, but not ubiquitous.

[0130] Some plant species also synthesize specialized forms of flavonoids, such as the isoflavonoids that are found in legumes and a small number of non-legume plants. Similarly, sorghum, maize and gloxinia are among the few species known to synthesize 3-deoxyanthocyanins (or phlobaphenes in the polymerised form). The stilbenes which are closely related to flavonoids, are synthesised by another group of unrelated species that includes grape, peanut and pine.

[0131] The major branch pathways of flavonoid biosynthesis start with general phenylpropanoid metabolism and lead to the nine major subgroups: the colorless chalcones, aurones, isoflavonoids, flavones, flavonols, flavandiols, anthocyanins, condensed tannins, and phlobaphene pigments. The enzyme phenylalanine ammonia-lyase (PAL) of the general phenylpropanoid pathway will lead to the production of cinnamic acid. Cinnamate-4-hydroxylase (C4H) will produce p-coumaric acid which will be converted through the action of 4-coumaroyl:CoA-ligase (4CL) to the production of 4-coumaroyl-CoA and malonyl-CoA. The first committed step in flavonoid biosynthesis is catalyzed by chalcone synthase (CHS), which uses malonyl CoA and 4-coumaryl CoA as substrates. Chalcone reductase (CHR) balances the production of 5-hydroxy- or 5-deoxyflavonoids. The next enzyme, chalcone isomerase (CHI) catalyses ring closure to form a flavanone, but the reaction can also occur spontaneously. Other enzymes in the pathway are: flavanone 3-hydroxylase (F3H), dihydroflavonol 4-reductase (DFR), flavonoid 3′-hydroxylase (F3′H) and flavonoid 3′, 5′ hydroxylase (F3′5′H).

[0132] Besides providing pigmentation to flowers, fruits, seeds, and leaves, flavonoids also have key roles in signaling between plants and microbes, in male fertility of some species, in defense as antimicrobial agents and feeding deterrents, and in UV protection. While nucleic acid sequences encoding some flavonoid biosynthetic enzymes have been isolated for certain species of plants, there remains a need for materials useful in modifying flavonoid biosynthesis and UV-light absorption. Consequently, manipulating the genes involved in modifying flavonoid biosynthesis and UV-light absorption allows production of plants with improved responses to UV-light.

Altered Protein Content

[0133] Proteins are important nutrients necessary for the building, maintenance and repair of animal tissues. Nine of the twenty amino acids constituting proteins cannot be produced by most animals and must be obtained from the diet. A variety of grains, seeds, legumes and vegetables can provide all the essential amino acids needed. Plant leaf proteins can supply large quantities of protein for animal feeds, and can offer a useful potential source of protein for human consumption.

[0134] Proteins are continuously synthesized and degraded in all living organisms, with half-lives ranging from as short as a few minutes to, weeks or more. The concentration of any individual protein is determined by the balance between its rates of synthesis and degradation, which in turn are controlled by a series of tightly-regulated biochemical mechanisms. Proteolysis in plant cells serves a variety of roles, including the control of cell cycle, the recycling of amino acids (e.g. seed germination), the degradation of polypeptides not folded properly, the elimination of foreign proteins, and many other cellular processes (Callis 1995; Estelle 2001). While proteolytic enzymes play vital roles in vivo, however, proteolysis by plant proteases is a severe problem affecting the nutritional quality of crops, notably during the ensiling process (McDonald 1981), or during the preparation of leaf protein concentrates (Jones et al. 1995).

[0135] At present, the most common strategy to avoid unwanted proteolysis in planta is to accumulate recombinant polypeptides in alternative cellular locations using appropriate targeting signals (Michaud et al. 1998). Alternatively, protein stability can be engineered by removing short amino acid domains involved in the control of protein turnover.

[0136] Another genetic engineering approach is to introduce into a DNA sequence encoding the small subunit of a ADP-glucose pyrophosphorylase (AGP). The expression of the AGP-encoding cDNA sequence in the antisense orientation, under the control of the seed-specific legumin B4 promoter, was shown to result in increased content of total nitrogen and protein (Weber et al. 2000). Consequently, manipulating the genes involved in protein biosynthesis and stability allows production of plants with improved protein content.

Altered Nutritional Value

[0137] Grain is widely used as animal feed and human food and is a source of protein, starch and oil for many lower animals including swine, beef and dairy cattle, fish and poultry. In some countries, such as Mexico, over 70% of the harvested corn is used for human consumption, and corn and corn-derived products such as hominy and tortillas are dietary staples. In grain such as corn, as an example, the bulk of the amino acid composition is determined by the amount and type of amino acids contained in polypeptides. Only a relatively small portion, up to 10%, of the available amino acids in the kernel exists as free amino acid pools; the rest are contained in various proteins such as seed storage proteins. These seed storage proteins are synthesized as the grain kernal develops and are used as a source of energy as the kernel germinates and begins to grow. A similar situation exists in other crops.

[0138] Seed storage proteins, however, contain little to no lysine. Of the ten amino acids deemed essential in a mixed grain feed (arginine, histidine, isoleucine, leucine, lysine, methionine or cysteine, phenylalanine or tyrosine, threonine, tryptophan, and valine), corn is particularly lacking not only in lysine, but also in threonine and methionine. The lack of these essential amino acids, especially lysine, requires that feed corn be supplemented with these nutrients, often provided by the addition of soybean meal or synthetic lysine.

[0139] In human nutrition, the poor tend to consume diets that are relatively high in inexpensive starchy foods and relatively low in high quality protein. Kwashiorkor is a form of malnutrition caused by inadequate quality protein intake in the presence of fair to good energy (total calories) intake. Early symptoms are very general and include fatigue, irritability, and lethargy. As protein deficiency continues, growth failure, loss of muscle mass, generalized swelling (edema), and decreased immunity occur. A large, protuberant belly is common. Skin conditions (such as dermatitis, changes in pigmentation, thinning of hair, and vitiligo) are seen frequently. Shock and coma precede death. One government estimate suggests that as many as 50% of elderly persons in nursing homes in the U.S. suffer from protein-calorie malnutrition. Thus, grain products with improved protein quality due to higher levels of lysine, for example, would significantly improve not only the nutritional quality of the diet but the overall general level of health. Thus, manipulating the genes involved in amino acid biosynthesis and stability allows production of plants with improved nutritional value.

Improved Abiotic Stress

[0140] Plants are constantly exposed to a variety of biotic (i.e., pathogen infection and insect herbivory) and abiotic (i.e., high or low temperature, drought, and salinity) stresses. To survive these challenges, plants have developed elaborate mechanisms to perceive external signals and to manifest adaptive responses with proper physiological and morphological changes (Bohnert et al., 1995). It would, therefore, be of great interest and importance to be able to manipulate the genes that confer abiotic stress tolerance to thereby create transformed plants (such as crop plants) with improved characteristics.

Altered Morphology And Architecture

[0141] Plant architecture plays a very important role in overall crop performance. The characteristics of the inflorescence, flower, silique/fruit, and stem internodes have broad agronomic implications in the overall productivity of any crop plant. Compact architecture can contribute to productivity. For example, flowering stalks or inflorescences that are compact in nature and do not shade lower photosynthetic tissue can allow for greater productivity while a compact vegetative structure can allow a higher number of plants per square foot. Similarly, a vegetative structure, flowering stalk or inflorescence that is spread out may allow for more photosynthesis to take place during growth and/or seed development. Thus, different architectures may be desired for different crops.

[0142] Since most crop varieties have been derived directly or indirectly through breeding from wild species, productivity of crops may be affected by characteristics that are evolutionarily beneficial to wild species but impair performance in an agricultural setting. For example, well spread-out flowers and siliques with long pedicels on the inflorescence (along with genes controlling seed dispersal mechanisms such as shattering) may be evolutionarily beneficial to wild species, while in a crop setting this confers significant disadvantages in terms of overall productivity as measured by harvested seed.

[0143] Plant architecture or morphology is a major determining factor in plant productivity under agricultural settings. Plant varieties that have well-defined morphology of a uniform nature and pattern are preferred since they are amenable to mechanical cultivation. In particular, plant species that produce seed are selected for the uniformity of the placement of seed forming structures (typically seed pods or cobs) to allow efficient mechanical harvesting of seed. Plant varieties are also selected on the basis of other seed forming characteristics, such as strong pods to ensure no seed is lost or dispersed prior to harvesting, or compact nature of the raceme of the plant that contains the seedpods. Not all plants have these ideal characteristics. Thus, there is a strong interest in modifying plant architecture. For example, compact plants, with clustered seed pods can provide many benefits for mechanical production of the crop, as well as lead to increased productivity. Accordingly, control of plant form and plant architecture is a desirable goal for the industry and manipulation of the genes involved in plant architecture allow production of improved plant characteristics.

Modified Seed Yield

[0144] Cytokinins have been demonstrated to play a fundamental role in establishing seed size, decreasing tip kernel abortion and increasing seed set during unfavorable environmental conditions. The first naturally occurring cytokinin was identified as 6-(4-hydroxy-3-methylbut-trans-2-enylamino) purine, more commonly known today as zeatin. In the main all naturally occurring cytokinins appear to be purine derivatives with a branched 5-carbon N⁶ substitutent. (See: McGaw, B. A., In: Plant Hormones and their Role in Plant Growth and Development, ed. P. J. Davies, Martinus Nijhoff Publ., Boston, 1987, Chap B3, Pgs. 76-93, the contents of which are incorporated by reference for purposes of background.) While some 25 different naturally occurring cytokinins have been identified, those regarded as particularly active are N⁶ (Δ²-isopentenyl) adenosine (iP), zeatin (Z), diHZ, benzyladenine (BAP) and their 9-ribosyl (and in the case of Z and diHZ, their 0-glucosyl) derivatives. However, such activity is markedly reduced in the 7- and 9-glucosyl and 9-alanyl conjugates. These latter compounds may be reflective of deactivation or control mechanisms.

[0145] The metabolism of cytokinins in plants is complex. Multi-step biochemical pathways are known for the biosynthesis and degradation of cytokinins. At least two major routes of cytokinin biosynthesis are recognized. The first involves transfer RNA (tRNA) as an intermediate. The second involves de novo (direct) biosynthesis. In the first case, tRNAs are known to contain a variety of hypermodified bases (among them are certain cytokinins). These modifications are known to occur at the tRNA polymer level as a post-transcriptional modification. The branched 5-carbon N⁶ substituent is derived from mevalonic acid pyrophosphate, which undergoes decarboxylation, dehydration, and isomerization to yield A²-isopentenyl pyrophosphate (iPP). The latter condenses with the relevant adenosine residue in the tRNA. Further modifications are then possible. Ultimately the tRNAs are hydrolyzed to their component bases, thereby forming a pool of available free cytokinins.

[0146] Alternately, enzymes have been discovered that catalyze the formation of cytokinins de novo, i.e., without a tRNA intermediate. The ipt gene utilized in the practice of this invention is one such gene. The formation of free cytokinins is presumed to begin with [9R5′P] iP. This compound is rapidly and stereospecifically hydroxylated to give the zeatin derivatives from which any number of further metabolic events may ensue. Such events include but are not limited to (1) conjugation, incorporating ribosides, ribotides, glucosides, and amino acids; (2) hydrolysis; (3) reduction; and (4) oxidation. While each enzyme in these pathways is a candidate as an effector of cytokinin levels, enzymes associated with rate-limiting steps have particular utility. Thus, manipulating the genes involved in cytokinin production and signaling allows production of plants with altered (i.e. increased or decreased) seed yield.

Modified Seed Content

[0147] Plant seeds contain a number of different tissues including the embryo and cotyledons that are usually encased in a layer of thickened and lignified tissue referred to as a seed coat. In general, seed coats contain a significant portion of the total undigestible fiber content of plant seeds.

[0148] The seed coat provides a mechanical barrier that protects the seed prior to germination and allows the seed to remain dormant or withstand mechanical challenges. Some plant species have extremely strong seed coats that can withstand significant mechanical and environmental insult. Other plant species have thinner seed coats that offer a limited degree of protection from mechanical damage. The nature of the seed coat is determined genetically and is typically correlated with the biology and ecology of the plant species.

[0149] In many crop species of commercial interest, a thick seed coat is generally undesirable since the seed coat tends to contain a high level of undigestible fiber and is often a waste product upon processing of the seed for oil, meal or other products. The seed coat contributes a significant portion of the fiber content to plant seed meals. Thus, reduction of the seed coat is an important goal for crop improvement in many crop species. However, the importance of the seed coat for the protection of the seed itself dictates that any reduction in seed coat still allow for the protection of the seed from injury or damage during seed harvesting, processing, or planting of seed. Plant seeds with reduced fiber content provide many advantages for use as feed products. Thus, alteration of the seed coat composition, as well as alteration of the composition of the other tissues of the seed for reduced fiber content, can provide an improvement for plant seeds currently used for feed.

Enhanced Heat Tolerance

[0150] Exposure to heat stress often causes the perturbation of diverse biological processes and thus results in reduced plant yield and overall decreased quality. (Maestri et al. (2002) Plant Molecular Biology 48: 667-681). Under heat stress, plants succumb to a variety of physiological and developmental damages, including dehydration due to high transpiration, impairment of photosynthetic carbon assimilation, inhibition of translocation of assimilates, increased respiration, decrease in the duration of developmental phases leading to smaller organs, disruption of seed development and reduction of fertility (Berry and Björkman (1980) Annu Rev Plant Physiol 31: 491-543; Cheikh and Jones (1994) Plant Physiol 106: 45-51). Heat stress can cause profound and complex cellular effects in plants, such as increasing membrane fluidity and permeability, protein aggregation and denaturing enzymes. These cellular damages eventually lead to defects of plant development and growth and even death under high temperature. Although it is unclear how plants sense heat, an increasing amount of evidence has indicated that thermotolerance, including basal thermotolerance and acquired thermotolerance, involves multiple signaling pathways and cellular components (Larkindale et al. (2005) Plant Physiol 138: 882-897). A crosstalk has been reported between heat shock stress and dehydration/drought, cold/chilling/freezing, heavy metal stress, hormonal regulation and oxidative stress in plants.

[0151] The best-known mechanism in plants and other organisms to cope with heat stress is the rapid synthesis of heat shock proteins (HSPs). In plants, there are a large number of heat shock proteins that can be classified into multiple protein families based on molecular mass. Heat shock proteins have been implicated in serving as molecular chaperons to protect organelles and enzymes and renature proteins under high temperature to restore cellular homeostasis. The heat shock response is primarily regulated at the transcriptional level. The expression of some heat shock genes are rapidly induced in heat response that is mediated by heat transcription factors (HSFs), while others present in various tissues and organs in plants under normal non-heat stress conditions, indicating these proteins perform other fundamental roles in plant growth and development as well. HSFs bind to conserved cis-regulatory promoter elements (HSEs), which result in an increase of heat shock protein synthesis. (Wang et al. (2003) Planta 218:1-14). Although overexpression of HSFs can induce constitutive expression of downstream heat stress-associated HSPs, HSFs may also activate non-heat stress genes that adversely affect the normal agronomic characteristics of a plant. Thus, manipulation of the genes involved in the thermotolerance pathway allows for production of plants with improved growth and development under heat stress conditions.

Improved Oxidative Stress

[0152] Stress conditions, such as extremes in temperature, drought and desiccation, salinity, soil nutrient content, heavy metals, UV radiation, pollutants such as ozone and SO₂, mechanical stress, high light and pathogen attack, induce generation of toxic oxygen species which are first found in the stressed cells and which then spread to the whole organism. Toxic oxygen species are partially reduced or activated derivatives of oxygen (e.g. reactive oxygen species (ROS), reactive oxygen intermediates (ROI) or activated oxygen species (AOS)) At high levels these cause severe damage to the cell membrane, protein and DNA, and may result in cell death. Several recently published reports have characterized toxic oxygen species generation and the subsequent oxidative damage caused by abiotic stresses (see Larkindale and Knight (2002); Borsani et al. (2001); Lee et al (2004); Aroca et al (2005); Luna et al (2005); and Noctor et al (2002)).

[0153] Although capable of producing damage, ROS/ROI/AOS are also key regulators of metabolic and defense pathways, playing roles as signaling or secondary messenger molecules. In the signal cascades leading to oxidative stress, salicylic acid (SA) has been identified as an important signaling molecule to mediate ROS/ROI/AOS accumulation in various stress conditions, such as salt and osmotic stress (Borsani et al. (2001)), drought (Senaratna et al. (2000)), heat (Dat et al. (1998)), cold (Scott et al. (2004)), UV-light (Surplus et al. (1998)), paraquat (Kim et al. (2003)) and disease resistance against different pathogens (Zhou et al. (2004)). High levels of SA induce H₂O₂ production as well as cell death.

[0154] Similarly, NO is capable of generating ROS/ROI/AOS and is a plant signaling molecule involved in the regulation of seed germination, stomatal closure (Mata and Lamattina (2001); Desikan et al (2002)), flowering time (He et al. (2004)), antioxidant reactions to suppress cell death (Beligni et al. (2002)) and tolerance to biotic and abiotic stress conditions (Mata and Lamattina (2001)). While the effects of NO can be mimicked through the application of sodium nitroprusside (SNP), endogenous NO production in plants results from the activity of a nitric oxide synthase that uses L-arginine (Guo et al. (2003)) as well as nitrate reductase-mediated reactions (Desikan et al (2002)). NO can react with redox centers in proteins and membranes, thereby causing cell damage and inducing cell death.

[0155] In order to control the two-fold nature of ROS/ROI/AOS molecules, plants have developed a sophisticated regulatory system which involves both production and scavenging of ROS/ROI/AOS in cells. Plant development and yield depend on the ability of the plant to manage oxidative stress, whether it is via the signaling or the scavenging pathways. Consequently, improvements in a plant's ability to withstand oxidative stress, or to obtain a higher degree of cross-tolerance once oxidative stress has been experienced, has significant value in agriculture.

Altered Flowering Times

[0156] The life cycle of flowering plants in general can be divided into three growth phases: vegetative, reproductive and seed development. If the appropriate environmental and developmental signals that induce the plant to switch to floral or reproductive growth are disrupted, the plant will not be able to enter reproductive growth and will maintain vegetative growth.

[0157] Temporal coordination of life cycle stages depends on factors such as energy requirements, environmental variables and reproductive strategy. Maximization of any one life cycle period or stage is usually at the cost of one of the other periods or stages in the life cycle. For instance, trade-offs exist between the initiation of the reproductive growth stage and the length of the vegetative growth stage, the early flowering and the later growth and reproduction stages. Thus, early flowering in plants can provide discernable advantages over other later flowering plants. For instance, early flowering usually results in early maturity and eventually shortens growth duration from sowing to harvest in plants. This allows farmers to avoid environmental adversity, such as freezing temperatures, in the early or later growing seasons at high latitude or altitude. This competitive advantage can also help crop rotation schedules. Alternatively, if cold weather or crop rotation is not a problem, later flowering has other advantages, such as a robust vegetative state, yielding higher amounts of plant material.

[0158] These advantages to the plant also translate into economic and production advantages providing more efficient human use of plants and especially plant crops critical to human survival. Generally, early flowering plants have smaller plant stature due to shortened vegetative growth compared to wild-type plants. Small plant stature is desirable in some cases. However, technologies enabling alteration of the moment within the life cycle at which a plant flowers are more advantageous if this alteration is accomplished without other disadvantageous trade-offs, such as a reduction in plant mass or other changes in phenotypically discernable traits. Consequently, manipulating the genes involved in flower development allows production of altered (i.e. earlier or later) flowering time.

Improved Nitrogen Use Efficiency

[0159] Nitrogen is most frequently the rate limiting mineral nutrient for crop production and all field crops have a fundamental dependence on exogenous nitrogen sources. Nitrogenous fertilizer, which is usually supplied as ammonium nitrate, potassium nitrate or urea, typically accounts for 40% of the costs associated with crops in intensive agriculture, such as corn and wheat. Increased efficiency of nitrogen use by plants enables the production of higher yields with existing fertilizer inputs, enables existing crop yields to be obtained with lower fertilizer input or enables better yields from soils of poorer quality (Good et al. (2004) Trends Plant Sci. 9:57-605). Higher amounts of proteins in the crops can also be produced more cost-effectively.

[0160] Plants have a number of means to cope with nitrogen nutrient deficiencies, such as poor nitrogen availability. One important mechanism senses nitrogen availability in the soil and responds accordingly by modulating gene expression while a second mechanism is to sequester or store nitrogen in times of abundance to be used later. The nitrogen sensing mechanism relies on regulated gene expression and enables rapid physiological and metabolic responses to changes in the supply of inorganic nitrogen in the soil by adjusting nitrogen uptake, reduction, partitioning, remobilization and transport in response to changing environmental conditions. Nitrate acts as a signal to initiate a number of responses that serve to reprogram plant metabolism, physiology and development (Redinbaugh et al. (1991) Physiol. Plant. 82, 640-650.; Forde (2002) Annual Review of Plant Biology 53, 203-224). Nitrogen-inducible gene expression has been characterized for a number of genes in some detail. These include nitrate reductase, nitrite reductase, 6-phosphoglucante dehydrogenase, and nitrate and ammonium transporters (Redinbaugh et al. (1991) Physiol. Plant. 82, 640-650; Huber et al. (1994) Plant Physiol 106, 1667-1674; Hwang et al. (1997) Plant Physiol. 113, 853-862; Redinbaugh et al. (1998) Plant Science 134, 129-140; Gazzarrini et al. (1999) Plant Cell 11, 937-948; Glass et al. (2002) J. Exp. Bot. 53, 855-864; Okamoto et al. (2003) Plant Cell Physiol. 44, 304-317).

[0161] Inefficiencies in nitrogen use efficiency (NUE) may be overcome through the use of nitrogen regulated gene expression to modify the response of rate limiting enzymes and metabolic pathways that occur in response to changes in nitrogen availability. General reviews of these pathways and processes can be found in: Derlot et al. (2001) Amino Acid Transport. In Plant Nitrogen (eds. Lea and Morot-Gaudry), pp. 167-212. Springer-Verlag, Berlin, Heidelberg; Glass et al. (2002) J. Exp. Bot. 53: 855-864; Krapp et al. (2002) Nitrogen and Signaling. In Photosynthetic Nitrogen Assimilation and Associated Carbon Respiratory Metabolism (eds. Foyer and Noctor), pp. 205-225. Kluwer Academic Publisher, Dordrecht, The Netherlands; and Touraine et al. (2001) Nitrate uptake and its regulation. In Plant Nitrogen (eds. Lea and Morot-Gaudry), pp. 1-36. Springer-Verlag, Berlin, Heidelberg. Overcoming the rate limiting steps in nitrogen assimilation, transport and metabolism has the effect of increasing the yield, reducing the nitrogen content and reducing the protein content of plants grown under nitrogen limiting conditions.

Modulated Chilling (Cold) Sensitivity

[0162] Plants exposed to cold or chilling conditions typically have low yields of biomass, seeds, fruit and other edible products. The term “chilling sensitivity” is used for the description of physiological and developmental damages in the plant caused by low, but above freezing, temperatures. In some countries or agricultural regions of the world chilling temperatures are a significant cause of crop losses and a primary factor limiting the geographical range and growing season of many crop species. In addition, poor germination and reduced growth of chilling sensitive crops in the spring results in less ground coverage, more erosion and increased occurrence of weeds leading to less nutrient supply for the crop.

[0163] Typically, chilling damage includes wilting, necrosis or ion leakage from cell membranes, especially calcium leakage, and decreased membrane fluidity, which consequently impacts membrane dependent processes such as: photosynthesis, protein synthesis, ATPase activity, uptake of nitrogen, etc. (see Levitt J (1980) Chilling injury and resistance. In Chilling, Freezing, and High Temperature Stresses: Responses of Plant to Environmental Stresses, Vol 1., T T Kozlowsky, ed, Academic Press, New York, pp 23-64; Graham and Patterson (1982) Annu Rev Plant Physiol 33: 347-372; Guy (1990) Annu Rev Plant Physiol Plant Mol Biol 41: 187-223; and Nishida and Murata (1996) Annu Rev Plant Physiol Plant Mol Biol 47: 541-568). In addition, cold temperatures are often associated with wet conditions. The combination of cold and wet can result in hypoxic stress on the roots, causing an even more severe reduction of growth rate but, more critically, can be lethal to the plants, especially sensitive plant species such as corn and cotton.

[0164] Yet it has been observed that environmental factors, such as low temperature, can serve as triggers to induce cold acclimation processes allowing plants responding thereto to survive and thrive in low temperature environments. It would, therefore, be of great interest and importance to produce plants with improved cold tolerance characteristics such as faster germination and/or growth and/or improved nitrogen uptake under cold conditions to improve survival or performance under low or chilling temperatures.

Modulated Drought Sensitivity

[0165] Plants cannot grow without sufficient water. While nutrient availability plays a critical role in plant growth and development, these nutrients must be in aqueous form. In addition, many marginal growing regions may have an adequate nutrient supply, but without enough water to allow maintenance of plant turgor and membrane integrity, such lands cannot be maximally cultivated. Increased plant drought tolerance enables the production of higher yields from such lands and/or enables existing yields of crops to be obtained with lower water input. As a consequence, crops are produced more cost-effectively.

[0166] One of the major consequences of drought is the loss of water from the protoplasm, which leads to increased ion concentrations within the cell. At high concentrations ions such as chlorine and nitrate inhibit metabolic functions (Hartung et al (1998) Prog Bot 59:299-327). Eventually a “glassy state” results from cell water loss and the concentration of protoplasmic constituents. Here, the remaining cell liquid is highly viscous, which increases the chances of protein denaturation and membrane fusion due to abnormal molecular interactions (see: Hartung et al. (1998) Prog Bot 59:299-327 and Hoekstra et al. (2001) Trends Plant Sci 6:431-438). This indicates that the ability to maintain cell turgor and metabolism is genetically encoded.

Modulated Phosphate Use Efficiency

[0167] Severe loss in economically valuable agricultural and ornamental plants is caused by phosphate starvation. As an essential nutrient, phosphate is required for many key processes in plants such as carbohydrate metabolism, photosynthesis, respiration and signal transduction. Phosphate is also required for the biosynthesis of essential molecules such as adenylates, RNA, DNA, membrane lipids and others. For optimal plant growth, development, production and output, phosphate must be efficiently mobilized from the soil, taken up by roots, transported, distributed and re-distributed in the plant. The effect of low-phosphate conditions, therefore, is significantly deleterious to many aspects of plant growth, development, production, biomass and/or output.

[0168] Severe loss in economically valuable agricultural and ornamental plants is also caused by alkaline soil. Soil pH has a significant effect on the solubility of essential plant minerals and nutrients. Fourteen of seventeen essential plant nutrients are found in soil, but these nutrients are only available to the plant when in soluble form. As soil alkalinity increases, many essential nutrients become more insoluble and unavailable to the plant, thereby limiting plant growth, development, production and output. By way of example, the availability of nitrogen, phosphorus, copper, boron, manganese and zinc are known to decrease at high pH levels.

[0169] Human activities and natural geological processes have created vast tracts of phosphate depleted and/or alkaline soils that would otherwise be agriculturally productive. For these and other reasons, plants with improved phosphate use efficiency would be economically important.

Modulated Salt Sensitivity

[0170] A wide variety agriculturally important plant species demonstrate significant sensitivity to saline water and/or soil. Upon salt concentration exceeding a relatively low threshold, many plants suffer from stunted growth, necrosis and/or death that results in an overall stunted appearance and reduced yields of plant material, seeds, fruit and other valuable products. Physiologically, plants challenged with salinity experience disruption in ion and water homeostasis, inhibition of metabolism and damage to cellular membranes that result in developmental arrest and cell death (Huh et al. (2002) Plant J, 29(5):649-59).

[0171] In many of the world's most productive agricultural regions, agricultural activities themselves lead to increased water and soil salinity, which threatens their sustained productivity. One example is crop irrigation in arid regions that have abundant sunlight. After irrigation water is applied to cropland, it is removed by the processes of evaporation and evapotranspiration. While these processes remove water from the soil, they leave behind dissolved salts carried in irrigation water. Consequently, soil and groundwater salt concentrations build over time, rendering the land and shallow groundwater saline and thus damaging to crops.

[0172] In addition to human activities, natural geological processes have created vast tracts of saline land that would be highly productive if not saline. In total, approximately 20% of the irrigated lands in the world are negatively affected by salinity. (Yamaguchi and Blumwald, 2005, Trends in Plant Science, 10: 615-620). For these and other reasons, plants (such as crop plants) with enhanced growth and/or productivity characteristics in saline conditions are desirable.

Modulated Low Light and Light Quality Response

[0173] When plants are too close together the crowding elicits a number of developmental responses, such as stem and petiole elongation, branch suppression and accelerated flowering (Smith, H. 1982, Light quality, photoreception and plant strategy. Annu. Rev. PI. Physiol. 33: 481-518 and Schmitt, J. and R. D., Wulff 1993, Light spectral quality, phytochrome and plant competition. Trends Ecol. Evol. 8:47-50). This shade avoidance response is triggered by the reduced ratio of red to far red wavelengths (R:FR) transmitted through or reflected from green vegetation due to selective absorption of visible wavelengths by chlorophyll (see Smith 1982, above).

[0174] It is the phytochrome family of photoreceptors that senses these environmental variations in the R:FR ratio. Phytochromes reversibly switch between R and FR-absorbing forms and interacts with multiple signaling pathways, such as the auxin pathway, to provide a dynamic response to shade (see Smith 1982 and Smith, H. 1995, Physiological and ecological function within the phytochrome family. Annu. Rev. Plant Physiol. Plant Mol. Biol. 46:289-315).

[0175] Shade tolerance, or the ability to tolerate extended periods of low light, varies from species to species. Photosynthesis is decreased in shade. As a consequence, in species such as turfgrasses this results in decreased carbohydrate reserves and reduced root, rhizome and tiller growth. In the turfgrass industry this is problematic because about 20-25% of turfgrasses are grown under low light conditions and a considerable amount of time and money is spent by golf courses in an effort to maintain quality turf under shade conditions.

[0176] Shade intolerance (shade avoidance) is detrimental to crop plants because the growth and performance of crop plants depends largely on crop architecture, and plant architecture is affected by reduced light. That is, densely planted crops that shade one another tend to place energy into stem and petiole elongation to lift the leaves into the sunlight rather than putting energy into storage or reproductive structures. This negatively affects yields by reducing the amount of harevestable products such as seeds, fruits and tubers. In addition, tall spindly plants tend to be less wind resistant and fall over easily, further reducing crop yield.

[0177] Likewise, shade intolerance negatively affects forestry plantings. Here, seedlings of shade tolerate species will self-prune at a slower rate and survive for longer periods under a dense forest canopy than shade intolerant trees. Since most commercially important tree species are shade intolerant to only moderately tolerant of shade, tree plantings must be less dense and require increased acreage. Thus, manipulation of the genes involved in shade tolerance and/or shade avoidance allows production of plants with improved growth under varying light conditions.

Modulated Endosverm Cell Size

[0178] The endosperm, a characteristic formation of Angiosperm seeds, is a nutritive tissue for the embryo. In maize, the endosperm originates with series of free-nuclear divisions, followed by cellularization and the subsequent formation of a range of functional cellular domains. This tissue is complex in its structure and development, in particular in cereals.

[0179] The endosperm is the main storage organ in maize seeds, for example, nourishing the embryo while the seed develops, and providing nutrients to the seedling upon germination. Thus, the uptake of assimilates by the growing endosperm is a critical process in seed development.

[0180] The central area of the endosperm consists of large cells with vacuoles, which store the reserves of starch and proteins, whilst the region surrounding the embryo is distinguished by rather small cells, occupied for the major part by cytoplasm. The Basal Endosperm Transfer Layer (BETL) area is highly specialized to facilitate uptake of solutes during grain development. These transfer cells of the basal endosperm have specialized internal structures adapted to absorb solutes from the maternal pedicel tissue, and translocate these products to the developing endosperm and embryo. Thus, manipulation of genes involved in the pathway leading to endosperm cell generation and growth would allow production of plants with modulated endosperm cell size.

Modulated Photosynthesis

[0181] Growth and productivity of crop plants are the main parameters of concern to a commercial grower. Such parameters are affected by numerous factors including the nature of the specific plant and allocation of resources within it, availability of resources in the growth environment and interactions with other organisms including pathogens.

[0182] Growth and productivity of most crop plants are limited by the availability of CO₂ to the carboxylating enzyme ribulose 1,5-bisphosphate carboxylase/oxygenase (Rubisco). Such availability is determined by the ambient concentration of CO₂ and stomatal conductance, and the rate of CO₂ fixation by Rubisco as determined by the Km(CO₂) and Vmax of this enzyme.

[0183] In C3 plants, the concentration of CO₂ at the site of Rubisco is lower than the Km(CO₂) of the enzyme, particularly under water stress conditions. As such, these crop plants exhibit a substantial decrease in growth and productivity when exposed to low CO₂ conditions induced by, for example, stomatal closure which can be caused by water stress. Many photosynthetic microorganisms are capable of concentrating CO₂ at the site of Rubisco to thereby overcome the limitation imposed by the low affinity of Rubisco for CO₂.

[0184] Higher plants of the C4 and the crassulacean acid metabolism (CAM) physiological groups can also raise the concentration of CO₂ at the site of Rubisco by means of dual carboxylations which are spatially (in C4) or temporally (in CAM) separated.

[0185] Since plant growth and productivity especially in C3 crop plants are highly dependent on CO₂ availability to Rubisco and fixation rates, numerous attempts have been made to genetically modify plants in order to enhance CO₂ fixation therein in hopes that such modification would lead to an increase in growth or yield. As such, numerous studies attempted to introduce the CO₂ concentrating mechanisms of photosynthetic bacteria or C4 plants into C3 plants, so far with little or no success.

[0186] Although theoretically such approaches can lead to enhanced CO₂ fixation in C3 plants, results obtained from such studies have been disappointing. Thus there is a widely recognized need for, and it would be highly advantageous to have, a method of generating plants and crops exhibiting enhanced photosynthesis, growth and/or increased commercial yields.

Modulated Light Quality Response

[0187] Flowering plants are subject to photoperiodism which is generally defined as the response of plants and animals to relative lengths of day and night. Plants are also sensitively attuned to differences in light quality. Red light, Far red light and blue light receptors are well characterized across plant species. One aspect of plant physiology that is particularly affected by photoperiodism and light quality is flowering.

[0188] The transition to flowering in plants is regulated by environmental factors such as temperature and light. In Arabidopsis thaliana, much is known about the photoperiod pathway that induces flowering in response to an increase in daylength. In contrast, the mechanisms that regulate flowering in response to changes in light quality are largely unknown. In crowded or shaded environments, the red/far-red ratio of incoming light reaching plants decreases, and a series of responses known collectively as the “shade avoidance syndrome” are triggered, including the promotion of stem elongation and acceleration of flowering (Ballare, C. L. Trends Plant Sci 4, 201, 1999; and Halliday, K. J., et al. Plant Physiol 104, 1311-1315, 1994). Phytochromes are a family of red/far-red-light photoreceptors essential for the perception of changes in light quality and shade avoidance responses; among the 5 phytochromes in Arabidopsis, a phytochrome B (phyB) plays the most significant role in the shade avoidance syndrome. The mechanisms by which phyB regulates flowering are largely unknown.

[0189] The phytochromes and the blue/UV-A photoreceptors called cryptochromes (cry1 and cry2 in Arabidopsis) are the most critical photoreceptors that regulate floral induction (Lin, C. Plant Physiol 123, 39-50, 2000). Several components involved in phytochrome signaling in seedlings have been isolated and characterized in recent years (Quail, P. H. Nat Rev Mol Cell Biol 3, 85-93, 2002). Seedlings defective in phytochrome A (phyA) signaling are tall under far-red light (FR) while plants defective in phyB signaling are tall under red-light (R). Despite the large number of components identified, it remains unclear how they are assembled into a signaling network. ELF3 and GI have been reported to have a role in flowering (Liu, X. L., et al. Plant Cell 13, 1293-304, 2001), mainly through mis-regulation of the circadian clock (Suarez-Lopez, P., et al. Nature 410, 116-20, 2001), but the mechanisms by which phytochromes regulate flowering directly are largely unknown. Thus, manipulating the genes involved in the light quality pathway allows production of plants with altered responses to light quality and able to grow better under sub-optimal conditions.

Modulated Biomass

[0190] Many plants are specifically improved for agriculture, horticulture, biomass conversion, and other industries (e.g. paper industry, plants as production factories for proteins or other compounds). Modulation of the size and stature of an entire plant, or a particular portion of a plant, allows production of plants better suited for a particular industry. For example, reductions in the height of specific crops and tree species can be beneficial by allowing easier harvesting. Alternatively, increasing height, thickness or organ number may be beneficial by providing more biomass useful for processing into food, feed, fuels and/or chemicals. Other examples of commercially desirable traits include increasing the length of the floral stems of cut flowers, increasing or altering leaf size and shape or enhancing the size of seeds and/or fruits. Changes in organ size, organ number and biomass also result in changes in the mass of constituent molecules such as secondary products and convert the plants into factories for these compounds. Thus, manipulating the genes involved in morphology and the growth and development pathways allows production of plants with increased biomass.

Modulated Seed Size

[0191] Seeds are the reproduction unit of higher plants. Plant seeds contain reserve compounds to ensure nutrition of the embryo after germination. These storage organs contribute significantly to human nutrition as well as cattle feeding. Seeds consist of three major parts, namely the embryo, the endosperm and the seed coat. Reserve compounds are deposited in the storage organ which is either the endosperm (resulting form double fertilization; e.g. in all cereals), the so-called perisperm (derived from the nucellus tissue) or the cotyledons (e.g. bean varieties). Storage compounds are lipids (oil seed rape), proteins (e.g. in the aleuron of cereals) or carbohydrates (starch, oligosaccharides like raffinose).

[0192] Starch is the storage compound in the seeds of cereals. The most important species are maize (yearly production ca. 570 mio t; according to FAO 1995), rice (540 mio t p.a.) and wheat (530 mio t p.a.). Protein rich seeds are found in different kinds of beans (Phaseolus spec., Vicia faba, Vigna spec.; ca. 20 mio t p.a.), pea (Pisum sativum; 14 mio t p.a.) and soybean (Glycine max. 136 mio t p.a.). Soybean seeds are also an important source of lipids. Lipid rich seeds are as well those of different Brassica species (app. 30 mio t p.a.), cotton, oriental sesame, flax, poppy, castor bean, sunflower, peanut, coconut, oilpalm and some other plants of less economic importance.

[0193] After fertilization, the developing seed becomes a sink organ that attracts nutritional compounds from source organs of the plant and uses them to produce the reserve compounds in the storage organ. Increases in seed size and weight, are desirable for many different crop species. In addition to increased starch, protein and lipid reserves and hence enhanced nutrition upon ingestion, increases in seed size and/or weight and cotyledon size and/or weight are correlated with faster growth upon germination (early vigor) and enhanced stress tolerance. Cytokinins are an important factor in determining sink strength. The common concept predicts that cytokinins are a positive regulator of sink strength. Consequently, manipulating the genes involved in seed development, including seed storage proteins and lipid production, as well as genes involved in cytokinin production and signaling allow production of plants with altered seed size.

Modulated Seedling Growth

[0194] Plant hormone abscisic acid (ABA) controls various aspects of plant growth and development. It inhibits germination and postgermination growth at high concentrations, although it is necessary for normal seedling growth. It regulates seed maturation process and prevents embryos from precocious germination. During vegetative growth, ABA plays an essential role in adaptation to various abiotic stresses such as drought, high salinity and cold. Extensive genetic and biochemical studies have been done to identify the regulatory components of various aspects of ABA response. As a consequence, a large number of ABA signaling components have been reported that include transcription factors, kinases/phosphatases, RNA-binding proteins, G-proteins, and secondary messengers (Finkelstein et al., 2002; Xiong et al., 2002, both of which are hereby incorporated by reference in their entirety).

[0195] During vegetative growth, ABA controls the expression of numerous genes associated with adaptive responses to drought and other abiotic stresses (Ramanulu and Bartels, 2002; Shinozaki et al., 2003). The ABA-regulation of stress-responsive genes is largely mediated by cis-regulatory elements sharing the CACGTGGC consensus. A small subfamily of basic leucine zipper (bZIP) class transcription factors that interact with the elements have been identified (Choi et al., 2000; Uno et al., 2000). The factors, named as ABFs (i.e., ABF1-ABF4) or AREBs (i.e., AREB1-AREB3), are involved in ABA and various abiotic stress responses (Kang et al., 2002; Kim et al., 2004). In particular, ABF2/AREB 1, regulates seedling growth rate and plays an essential role in glucose-induced developmental arrest process. Thus, manipulating the genes involved in ABA production and signaling allow production of plants with improved seedling growth.

Modulating Abscission

[0196] Abscission refers to the process by which a plant intentionally drops one or more of its parts or organs. One model for abscission provides that auxin renders cells in the abscission zone insensitive to ethylene, thereby preventing abscission. But when auxin concentration drops below a threshold level (likely set by relative ethylene concentrations), cells in the abscission zone perceive ethylene as an abscission-inducing signal. Activation of the abscission pathway results in the expression and/or activation of cell wall degrading enzymes, such as pectinases and cellulases, which structurally weaken the plant part or organ to be dropped.

[0197] Abscission is an important process in agriculturally and ornamentally valuable plants. It follows that the modulation of abscission, whether for the purpose of inducing or inhibiting the dropping of a plant part or organ, has important and wide-ranging applications. For instance, the flowering shelf-life of ornamental plants may be extended by inhibiting abscission. Consequently, manipulating the genes involved in activating and progressing the abscission pathway would allow production of plants with improved characteristics.

Lethal Plants for Genetic Confinement Systems

[0198] As more and more transgenic plants are developed and introduced into the environment, it can be important to control the undesired spread of the transgenic triat(s) from transgenic plants to other traditional and transgenic cultivars, plant species and breeding lines, thereby preventing cross-contamination. The use of a conditionally lethal gene, i.e. one which results in plant cell death under certain conditions, has been suggested as a means to selectively kill plant cells containing a recombinant DNA (see e.g., WO 94/03619 and US patent publication 20050044596A1). The use of genes to control transmission and expression of transgenic traits is also described in U.S. application Ser. No. 10/667,295, filed on Sep. 17, 2003, which is hereby incorporated by reference. Some of the nucleotides of the invention are lethal genes, and can therefore be used as conditionally lethal genes, namely genes to be expressed in response to specific conditions, or in specific plant cells. For example, a gene that encodes a lethal trait can be placed under that control of a tissue specific promoter, or under the control of a promoter that is induced in response to specific conditions, for example, a specific chemical trigger, or specific environmental conditions.

[0199] The invention being thus described, it will be apparent to one of ordinary skill in the art that various modifications of the materials and methods for practicing the invention can be made. Such modifications are to be considered within the scope of the invention as defined by the following claims.

[0200] Each of the references from the patent and periodical literature cited herein is hereby expressly incorporated in its entirety by such citation.

What is claimed is:

1. An isolated nucleic acid molecule comprising:
a) a nucleic acid having a nucleotide sequence which encodes an amino acid sequence exhibiting at least 85% sequence identity to an amino acid sequence in the Sequence Listing; or
b) a nucleic acid which is an interfering RNA to the nucleotide sequence according to subparagraph (a).

2. The isolated nucleic acid molecule according to claim 1, which has the nucleotide sequence according to any polynucleotide sequence in the Sequence Listing.

3. The isolated nucleic acid molecule according to claim 1, wherein said amino acid sequence comprises any polypeptide sequence in the Sequence Listing.

4. A vector construct comprising:
a) a first nucleic acid having a regulatory sequence capable of directing transcription and/or translation in a plant; and
b) a second nucleic acid having the sequence of the isolated nucleic acid molecule according to claim 1;
wherein said first and second nucleic acids are operably linked.

5. The vector construct according to claim 4, wherein said first nucleic acid is native to said second nucleic acid.

6. The vector construct according to claim 4, wherein said first nucleic acid is heterologous to said second nucleic acid.

7. A host cell comprising an isolated nucleic acid molecule according to claim 1 wherein said nucleic acid molecule is flanked by exogenous sequence.

8. A host cell comprising the vector construct according to claim 4.

9. An isolated polypeptide comprising an amino acid sequence exhibiting at least 85% sequence identity with an amino acid sequence of the Sequence Listing.

10. A method of introducing an isolated nucleic acid molecule into a host cell comprising:
a) providing an isolated nucleic acid molecule according to claim 1; and
b) contacting said isolated nucleic acid molecule with said host cell under conditions that permit insertion of said nucleic acid into said host cell.

11. A method of transforming a host cell which comprises contacting a host cell with the vector construct according to claim 4.

12. A method for detecting a nucleic acid in a sample which comprises:
a) providing an isolated nucleic acid molecule according to claim 1;
b) contacting said isolated nucleic acid molecule with a sample under conditions which permit a comparison of the sequence of said isolated nucleic acid molecule with the sequence of DNA in said sample; and
c) analyzing the result of said comparison.

13. A plant, plant cell, plant material or seed of a plant which comprises a nucleic acid molecule according to claim 1 which is exogenous or heterologous to said plant or plant cell.

14. A plant, plant cell, plant material or seed of a plant which comprises the vector construct according to claim 4.

15. A plant that has been regenerated from the plant cell or seed according to claim 13 or 14.

16. A plant cell comprising an exogenous nucleic acid, said exogenous nucleic acid comprising a regulatory region operably linked to a polynucleotide that is transcribed into an interfering RNA effective for inhibiting expression of a polypeptide selected from the group consisting of a polypeptide having 85% or greater sequence identity to an amino acid sequence in Sequence Listing; wherein a tissue of a plant produced from said plant cell has a difference in polypeptide content as compared to the corresponding polypeptide content in tissue of a control plant that does not comprise said nucleic acid.

17. A method of modulating a plant growth or phenotype characteristic of a plant, said method comprising introducing into a plant cell an exogenous nucleic acid comprising a nucleotide sequence encoding a polypeptide having 85% or greater sequence identity to an amino acid sequence in the Sequence Listing, wherein a plant produced from said plant cell differs in a plant growth or phenotype characteristic as compared to a control plant that does not comprise said nucleic acid.

18. The method of claim 17, further comprising the step of selecting one or more plants from a plurality of plants that have said difference in a plant growth or phenotype characteristic.

19. The method of any one of claims 17-18, wherein said exogenous nucleic acid is operably linked to a regulatory region.

20. The method of claim 19, wherein said regulatory region is a promoter.

21. A method of producing a plant tissue, said method comprising growing a plant cell comprising an exogenous nucleic acid comprising a nucleotide sequence according to claim 1, wherein said plant tissue has a plant growth or phenotype characteristic difference as compared to a corresponding control plant that does not comprise said nucleic acid.

The application's sequence listing, which the Patent Office published only in electronic form, follows.

SEQUENCE LISTING (11108 sequences)

SEQ ID NO: 1 - DNA, 662 bp, Zea mays
  misc_feature: Ceres CLONE ID no. 207748
  misc_feature: Ceres CDNA ID no. 36707238
  CDS (54)..(335): REFERENCED BY SEQ ID NO: 2
atcgccgaggaaccaaagctagagacaaccgctgcgtaaacgaatccatcgccatggcgtctcgtctcgttgcggcggcggcctcctcctcctccctctcctcagcgtcccccctcgctcgcctaatctctcgccgcggccttgccggtgccgcagacggccatgggtctgcgaaggtgcccttgtggaaagatccgttgagcccgagcaagtggaaggaagagcactttgttctagcaagcctctcaatgtggggggttattttttatggtggttacaagctttttagtggaaagaaggaaaccaagactgaggcggcatcaccccaggcataggtggcggagatggagttctacccatatctgtggcctggcaacaatgttaaataaaaggaatgctttatgttgtgctttcaagttgataaattgtggcaacaggagattttgctttacctaggcaatatattgagaagctactcttactcatccaccatgaataatctttgctgcagtggagcttcatgtcggcgaacaatgcaaacgttgtacttctttcatgcgattgagtagttgatgttttacttctgttgccaccaacagttgaacgctgtacttgcagattgataagatctccgtgcttcctttctaaaaaaaaaaaaaaaa

SEQ ID NO: 2 - protein, 93 aa, Zea mays
  misc_feature: Ceres CLONE ID no. 207748
  misc_feature: Ceres CDNA ID no. 36707238
MASRLVAAAASSSSLSSASPLARLISRRGLAGAADGHGSAKVPLWKDPLSPSKWKEEHFVLASLSMWGVIFYGGYKLFSGKKETKTEAASPQA

SEQ ID NO: 3 - DNA, 888 bp, Zea mays
  misc_feature: Ceres CLONE ID no. 207750
  misc_feature: Ceres CDNA ID no. 36707239
  CDS (65)..(724): REFERENCED BY SEQ ID NO: 4
atttttcgaccgccgccgcccccagtccccgatccgaagctgtgcctcgtaccatttcgatccaatggcgccgacgtcgaagctgtcgacgggcatcaagcgcgcttcgcggtcgcacacgtaccatcgccgtgggctgtgggccatcaaggccaagaacggcggcgccttccccaaggccgacaaggccgccgccgccgtggaacccaagttctaccctgccgacgacgtcaagccccgcgttcccagcacccgcaagcctaagcctaccaagctcaggtcgagcatcacgcctgggacggtgctgatcctcctcgcagggcgcttcatggggaagagagtggtgtttctcaagcagctcaagtctggcctgctccttatctctgggcctttcaagatcaatggagtaccgatccgccgtgtgaaccagacctatgtcattgctacatcaaccaaagttgacatctctggtgttgatgtcgccaagtttgatgacaagtactttgccagggagaagaagcagaaggtgaagaagaccgagggcgagctttttgagacagaaaaggaggcatccaagtcactgcctgacttcaagaaggatgaccagaaggctgtggattctgctctgatcaaggctatcgaggctgtcctggagctgaaaacctatcttggcgcccggttctctctcagggatggtgacaagccccatgagatggtattctaagtttctagttttggagttcgtaggaagctgttttgtctgtgttcttgtacttctgagttttgtaccagtagcgaacgtttcattgtgattgaagtcttcctgccaaatattataagatctaagaaagttctatccgtgttggtggttcaaaaaaaaaaaaaaaa

SEQ ID NO: 4 - protein, 219 aa, Zea mays
  misc_feature: Ceres CLONE ID no. 207750
  misc_feature: Ceres CDNA ID no. 36707239
  misc_feature: null
  misc_feature: Useful for making plants with modulated nitrogen use efficiency
  misc_feature (1)..(49): Pfam Name: Ribosomal_L6e_N PFAM Desc: Ribosomal protein L6
  misc_feature (112)..(219): Pfam Name: Ribosomal_L6e PFAM Desc: Ribosomal protein L6e
  misc_feature: Homolog of GI Number: 50925014 NR Desc: OSJNBb0022F23.11
  misc_feature: Homolog of GI Number: 50909993 NR Desc: putative 60S ribosomal protein L6
  misc_feature: Homolog of GI Number: 57471700 NR Desc: ribosomal protein L6
  misc_feature: Homolog of GI Number: 21592925 NR Desc: putative 60S ribosomal protein L6
  misc_feature: Homolog of GI Number: 27311965 NR Desc: putative 60S ribosomal protein L6
  misc_feature: Homolog of GI Number: 19539 NR Desc: ribosomal protein YL16
  misc_feature: Homolog of GI Number: 9795602 NR Desc: Putative  60S ribosomal protein L6
  misc_feature: Homolog of GI Number: 21593910 NR Desc: 60S ribosomal protein L6
  misc_feature: Homolog of GI Number: 7208784 NR Desc: 60S ribosomal protein L6
  misc_feature: Homolog of GI Number: 57999636 NR Desc: 60S ribosomal protein L6 CgRPL6
MAPTSKLSTGIKRASRSHTYHRRGLWAIKAKNGGAFPKADKAAAAVEPKFYPADDVKPRVPSTRKPKPTKLRSSITPGTVLILLAGRFMGKRVVFLKQLKSGLLLISGPFKINGVPIRRVNQTYVIATSTKVDISGVDVAKFDDKYFAREKKQKVKKTEGELFETEKEASKSLPDFKKDDQKAVDSALIKAIEAVLELKTYLGARFSLRDGDKPHEMVF

SEQ ID NO: 5 - DNA, 509 bp, Zea mays
  misc_feature: Ceres CLONE ID no. 207762
  misc_feature: Ceres CDNA ID no. 36704409
  CDS (115)..(354): REFERENCED BY SEQ ID NO: 6
atggcaaattaaaaacaagccacctgctgtctgctgcccgctgcgctgagcgtgagagctagctactaccttattacctctctccggtctccgcagctgtaggcggcggcggccatggacttcgtgctccaggtcctgctgcgagtggtgatgagaagaagcatccgcaggctgcaagaggtcgttgacatcgccgtggacatcggcacggctgtcttcgtggccgtgcgggtctccggcctcgtcttccgccgccggctgcccacgccgactacgacatcgtcgtcgtcgacgacgtactactactccccggggacgtcctcctcgatcggcatgcatgtccaggaggattaattattggcaggcactagatgagctagctagctagctagggccagaagatgtatacttctcgcgggggggcatgtaagtaccaaggtcatatatctgtgcgttcttttttgtggaatcaaactaatttcgctagctacccaaaaaaaaaaaaaaaa

SEQ ID NO: 6 - protein, 79 aa, Zea mays
  misc_feature: Ceres CLONE ID no. 207762
  misc_feature: Ceres CDNA ID no. 36704409
  misc_feature: Homolog of GI Number: 34905800 NR Desc: P0401G10.26
MDFVLQVLLRVVMRRSIRRLQEVVDIAVDIGTAVFVAVRVSGLVFRRRLPTPTTTSSSSTTYYYSPGTSSSIGMHVQED

SEQ ID NO: 7 - DNA, 632 bp, Zea mays
  misc_feature: Ceres CLONE ID no. 207772
  misc_feature: Ceres CDNA ID no. 29191377
  CDS (81)..(392): REFERENCED BY SEQ ID NO: 8
atccaatccatcagtacccaaccttcccctacaccagaaaaatccccagttctttggtccgcgtcagagaggcggcggcgatgtctgggcgcggcaagggcggcaagggtctgggcaagggcggcgcgaagcgccaccggaaggtgctccgcgacaacatccagggcatcaccaagccggcgatccggaggctggctaggaggggtggcgtgaagcgcatctcggggctcatctacgaggagacccgcggcgtgctcaagatctttctcgagaacgtcatccgcgacgccgtcacctacaccgagcacgcgcgccgcaagaccgtgaccgccatggacgtcgtctacgcgctcaagcgccagggccgcaccctctacggcttcggaggctaggctaggcgcctcttcgtagtcggggactggttaggggacatgtctctgtgtgatgctttctgaggtagtattgctgcaatagctgtgtaatccatcgcttctgcaatgaagcgctttgaagcatgctacgtatgttgtgtctgtgggtgattgtatttctggtagtaacagtgattcttcctgaattttggataatacaagctcattcgcagtagtttctgatgaaaaaaaaaaaaaaaa

SEQ ID NO: 8 - protein, 103 aa, Zea mays
  misc_feature: Ceres CLONE ID no. 207772
  misc_feature: Ceres CDNA ID no. 29191377
  misc_feature (66)..(92): Pfam Name: TAF PFAM Desc: TATA box binding protein associated factor
  misc_feature: Homolog of GI Number: 57106967 NR Desc:  similar to germinal histone H4 gene
  misc_feature: Homolog of GI Number: 74004178 NR Desc:  similar to germinal histone H4 gene
  misc_feature: Homolog of GI Number: 62663604 NR Desc:  similar to Histone H2B 291B
  misc_feature: Homolog of GI Number: 76651053 NR Desc:  similar to germinal histone H4 gene
  misc_feature: Homolog of GI Number: 57110415 NR Desc:  similar to germinal histone H4 gene
  misc_feature: Homolog of GI Number: 55667113 NR Desc:  similar to germinal histone H4 gene
  misc_feature: Homolog of GI Number: 74004256 NR Desc:  similar to germinal histone H4 gene
  misc_feature: Homolog of GI Number: 57098917 NR Desc:  similar to germinal histone H4 gene
  misc_feature: Homolog of GI Number: 56798269 NR Desc: histone H4
  misc_feature: Homolog of GI Number: 68441417 NR Desc:  similar to germinal histone H4 gene
MSGRGKGGKGLGKGGAKRHRKVLRDNIQGITKPAIRRLARRGGVKRISGLIYEETRGVLKIFLENVIRDAVTYTEHARRKTVTAMDVVYALKRQGRTLYGFGG

SEQ ID NO: 9 - DNA, 655 bp, Zea mays
  misc_feature: Ceres CLONE ID no. 207818
  misc_feature: Ceres CDNA ID no. 36707635
  CDS (40)..(447): REFERENCED BY SEQ ID NO: 10
ctactgcggcttcaggactcgacctcttgcgccgccgccatgaccttcaagcgccgcaacggcggccgcaacaagcatggccgcggtcacgtcaagtacatccggtgctcaaactgcgccaagtgctgccccaaggacaaggcgatcaagaggtttcaggtgaggaacatcgtggaacaggcggccatcagggacgtccaggaagcatgcgtctatgatggctacgtcctcccgaagctgtacgccaaggtgcaccactgcgtctcgtgcgcgatccacgctcacatcgtccgcgtccgatcccgtgagaagcgcagggaccgcaagccgccggagcgcttcaggcgcagggaggataggcctgctggtggacaaggaggcccccgccctggtcctggtgctgctgctacagctccatctccagcaccggttgctgctcgcccataggctttagcttttcgaccgtgttaagtcttctgcccactcagtttcggagttgtcccctgtgcgtgtgtgaagctgctatattagagttactttttgtctaaagtctgaacattttcgaagaatttgaatatctgaacatttgaatgtttgtgctgagtttttcaaagaatttgaatatctgaacaattgaataaaaaaaaaaaaaaaa

SEQ ID NO: 10 - protein, 135 aa, Zea mays
  misc_feature: Ceres CLONE ID no. 207818
  misc_feature: Ceres CDNA ID no. 36707635
  misc_feature (1)..(117): Pfam Name: Ribosomal_S26e PFAM Desc: Ribosomal protein S26e
  misc_feature: Homolog of GI Number: 56201998 NR Desc: putative ribosomal protein S26
  misc_feature: Homolog of GI Number: 50931777 NR Desc: putative 40S ribosomal protein S26
  misc_feature: Homolog of GI Number: 7440567 NR Desc: probable ribosomal protein S31
  misc_feature: Homolog of GI Number: 5706704 NR Desc: ribosomal protein S26
  misc_feature: Homolog of GI Number: 56236112 NR Desc: At2g40510
  misc_feature: Homolog of GI Number: 24111313 NR Desc: At2g40590/T2P4.6
  misc_feature: Homolog of GI Number: 20466414 NR Desc: 40S ribosomal protein S26
  misc_feature: Homolog of GI Number: 22137298 NR Desc: AT3g56340/F18O21_300
  misc_feature: Homolog of GI Number: 3885515 NR Desc: similar to ribosomal protein S26
  misc_feature: Homolog of GI Number: 61654752 NR Desc: S26
MTFKRRNGGRNKHGRGHVKYIRCSNCAKCCPKDKAIKRFQVRNIVEQAAIRDVQEACVYDGYVLPKLYAKVHHCVSCAIHAHIVRVRSREKRRDRKPPERFRRREDRPAGGQGGPRPGPGAAATAPSPAPVAARP

SEQ ID NO: 11 - DNA, 867 bp, Zea mays
  misc_feature: Ceres CLONE ID no. 207822
  misc_feature: Ceres CDNA ID no. 36704410
  CDS (153)..(599): REFERENCED BY SEQ ID NO: 12
tcaaattggacaaccctgtcgccctctcggtctccctcgagcttttcttgtgcgcagccgcagccgctgcttttcgttcgtcttcatcctacgcgagggcgaaacccacaaaccctctccctcctgtactccggccgacacatccaggggcgatgacgctgggtagctccggcgccggatcgagcgtcgtcgttcctcgaaacttcaggctattagaggagctcgagcgtggagagaagggcattggtgatgggacagtgagctatggaatggatgatgctgatgacatctacatgcggtcatggactggtaccatcattggccctcacaatactgtacatgagggtcgcatctaccagctgaagttgttttgtgacaaagactatccggagaagccaccatctgtcagattccactcaagaatcaacatgacatgcgttaatcacgagacaggaatggttgatccaaggaagtttggtttgctagcgaactggcagcgggactacacgatggagaacatcctcacccagctcaagaaagagatggctgcctcgcagaatcgaaagttagtgcagcctccagaagggacattcttctaacgaagtgttcacttggcccgtcatgggatccaacagtaattgaaagttttatgggctaaaaaacagcgtctacatctggtgcccctgcctggctttgtgattttttatgacttttatgttcttgtatcgtgaaccgcagtgaacaacggttgttgcaagttccagggatatctttggaagtggtaaacaaatgcgtcttatttctatgtaatattagaccccgtgcgtgtgtggtttcgaggtacagctcccaaaaaaaaaaaaaaaa

SEQ ID NO: 12 - protein, 148 aa, Zea mays
  misc_feature: Ceres CLONE ID no. 207822
  misc_feature: Ceres CDNA ID no. 36704410
  misc_feature (19)..(147): Pfam Name: UQ_con PFAM Desc: Ubiquitin
  misc_feature: Homolog of GI Number: 50725506 NR Desc: putative ubiquitin
  misc_feature: Homolog of GI Number: 20260068 NR Desc: putative ubiquitin
  misc_feature: Homolog of GI Number: 30686662 NR Desc: ubiquitin
  misc_feature: Homolog of GI Number: 78191460 NR Desc: ubiquitin
  misc_feature: Homolog of GI Number: 30693656 NR Desc: ubiquitin
  misc_feature: Homolog of GI Number: 46577794 NR Desc: ubiquitin
  misc_feature: Homolog of GI Number: 77557031 NR Desc: ubiquitin
  misc_feature: Homolog of GI Number: 75755857 NR Desc: TO38
  misc_feature: Homolog of GI Number: 50929773 NR Desc: OSJNBa0088H09.10
  misc_feature: Homolog of GI Number: 2982253 NR Desc: CROC
MTLGSSGAGSSVVVPRNFRLLEELERGEKGIGDGTVSYGMDDADDIYMRSWTGTIIGPHNTVHEGRIYQLKLFCDKDYPEKPPSVRFHSRINMTCVNHETGMVDPRKFGLLANWQRDYTMENILTQLKKEMAASQNRKLVQPPEGTFF

SEQ ID NO: 13 - DNA, 733 bp, Zea mays
  misc_feature: Ceres CLONE ID no. 207830
  misc_feature: Ceres CDNA ID no. 36707240
  CDS (82)..(561): REFERENCED BY SEQ ID NO: 14
aactcgcaattccgcattcgttccaactcctgagcactttctcctcgtcccagacaagccaatcgaagccgagatacgaccatggactccaccggcaccggagcagggggtaaggggaagaagggagcggccgggcgcaaggtcggcgggccaaggaagaagtcggtgtcgaggtccgtgaaggccggtctccagttccccgtcggccgcatcgggcgctacttgaagaagggccgctacgcgcagcgtgtcggcaccggcgcccccgtctacctcgccgctgtcctcgaatacctcgccgctgaggttctggagctcgccggtaatgctgccagggacaacaagaagactcgcattattccgcgccacgtgcttctggcgatccggaacgacgaggagcttgggaagctgttgggcggcgtgaccatcgctcacggcggtgtgctccccaatatcaaccctgttctgctgcccaagaagatggcggagaaggcgtccagtggcgggagcaaggaggcaaagtcgcccaagaaggccgccaagtcccctaagaaggcatagactgactgtccggagtgatctgatgtttagcagtaccttgttaccagtatgcggtgatgcgtaggctgcagatgggacgaatgtgcttgtatgtgtatgtgtcctgctgcaagttgtcctttgctatttagaatggaagaagaaatgccttgttccaaaaaaaaaaaaaaaa

SEQ ID NO: 14 - protein, 159 aa, Zea mays
  misc_feature: Ceres CLONE ID no. 207830
  misc_feature: Ceres CDNA ID no. 36707240
  misc_feature (31)..(106): Pfam Name: Histone PFAM Desc: Core histone H2A/H2B/H3/H4
  misc_feature: Homolog of GI Number: 729671 NR Desc: Histone H2A
  misc_feature: Homolog of GI Number: 34914498 NR Desc: putative histone H2A
  misc_feature: Homolog of GI Number: 47026919 NR Desc: histone H2A
  misc_feature: Homolog of GI Number: 47026912 NR Desc: histone H2A
  misc_feature: Homolog of GI Number: 7649159 NR Desc: histone H2A
  misc_feature: Homolog of GI Number: 121982 NR Desc: Histone H2A.2.2
  misc_feature: Homolog of GI Number: 121974 NR Desc: Histone H2A.2.1
  misc_feature: Homolog of GI Number: 122006 NR Desc: Histone H2A
  misc_feature: Homolog of GI Number: 73955042 NR Desc:  similar to Histone H2A.x
  misc_feature: Homolog of GI Number: 62653580 NR Desc:  similar to Histone H2A.x
MDSTGTGAGGKGKKGAAGRKVGGPRKKSVSRSVKAGLQFPVGRIGRYLKKGRYAQRVGTGAPVYLAAVLEYLAAEVLELAGNAARDNKKTRIIPRHVLLAIRNDEELGKLLGGVTIAHGGVLPNINPVLLPKKMAEKASSGGSKEAKSPKKAAKSPKKA

SEQ ID NO: 15 - DNA, 628 bp, Zea mays
  misc_feature: Ceres CLONE ID no. 207864
  misc_feature: Ceres CDNA ID no. 36707093
  CDS (71)..(439): REFERENCED BY SEQ ID NO: 16
accaaaggtatcttgcaatcacaacgaacaaaagctctcgatctcaccgacaccgaggaagaagagatcaatggcgtccgagcagggagtcgtgatcgcgtgccacagcaaggctgagtttgacgcccacatgaccaaggcccaggaagccggcaagctggtggtcatcgacttcactgccgcctggtgcggtccatgccgcgccatcgccccactgttcgtcgaacacgccaagaagttcactcaggtcgtcttcctgaaggtggacgtggacgaagtgaaggaagtcaccgcggcctacgaggtcgaggcgatgccgaccttccacttcgtcaagaacggcaagacggtcgcgaccatcgtgggtgccaggaaggacgagctcctggccctgatcgagaagcatgccgcgcctgcgcctgcgactgcgtctgcctaaatgagatcagatcagtcgtcgccgtcaataagggccagcacgtatggctgtaaatgttgtcgttatcagttctggctttgtcgtttgtgggcgatttgtgaactagtagtatgtttgtttctatccgagccggaggcgatacttaaccatggatacttgttgtgagttcgtttcaaaaaaaaaaaaaaa

SEQ ID NO: 16 - protein, 122 aa, Zea mays
  misc_feature: Ceres CLONE ID no. 207864
  misc_feature: Ceres CDNA ID no. 36707093
  misc_feature (8)..(114): Pfam Name: Thioredoxin PFAM Desc: Thioredoxin
  misc_feature: Homolog of GI Number: 66841004 NR Desc: thioredoxin h2 protein
  misc_feature: Homolog of GI Number: 82407383 NR Desc: Chain A
  misc_feature: Homolog of GI Number: 50934769 NR Desc: Thioredoxin H
  misc_feature: Homolog of GI Number: 27461140 NR Desc: thioredoxin H
  misc_feature: Homolog of GI Number: 32186040 NR Desc: thioredoxin h isoform 1
  misc_feature: Homolog of GI Number: 20047 NR Desc: thioredoxin
  misc_feature: Homolog of GI Number: 53748515 NR Desc: thioredoxin 1
  misc_feature: Homolog of GI Number: 40287476 NR Desc: thioredoxin
  misc_feature: Homolog of GI Number: 55670844 NR Desc: Chain A
  misc_feature: Homolog of GI Number: 33621084 NR Desc: thioredoxin H3
MASEQGVVIACHSKAEFDAHMTKAQEAGKLVVIDFTAAWCGPCRAIAPLFVEHAKKFTQVVFLKVDVDEVKEVTAAYEVEAMPTFHFVKNGKTVATIVGARKDELLALIEKHAAPAPATASA

SEQ ID NO: 17 - DNA, 1081 bp, Zea mays
  misc_feature: Ceres CLONE ID no. 207996
  misc_feature: Ceres CDNA ID no. 36705508
  CDS (91)..(846): REFERENCED BY SEQ ID NO: 18
gtccaaaaccctagccctcgcgccgccgcctcctccgccacccagcgctcgagctcctcgcgtcctgcgagcgcgctccgcaacgtcaccatgaagttcaacatcgcgaacccttccaccgggtgccaaaagaagctggaaatcgatgacgaccagaagctgcgtgccttttatgaccgaaggatatcccaggaggtcagtggtgatgctctgggtgaggagttcaagggttatgtcttcaagatcatgggtggatgtgataagcaaggcttcccaatgaagcaaggagttttgacttctggtcgtgttcgtcttctgctccatagaggcactccctgcttccgtggttatggcaggcgtaatggtgagcgcaggaggaagtctgtccgtggttgcatcgtgagccaagacctatctgttatcaacttggtgattgtgaagaagggtgagaatgatctgcctggtctgactgacactgagaagccaaggatgaggggtcccaagagggcctccaagatcagaaagctgttcaaccttaacaaggatgatgatgtacgcaagtacgtgaacacataccgcaggacattcactaccaagaacggcaagaaggtcagcaaggcacctaagatccaacggcttgtgacacccttgaccctccagaggaagcgtgctagaatcgctgacaagaagaagaggataactaagaagaagtctgaggctgctgagtaccagaagcttcttgcccagaggctgaaggaacagagggaccgccggagcgagagcttggccaagaggaggtccaagctttctgccgccgtcaaggcttctgctgccacctctgcttaagaatattcagtgttttgggatctttgtaaggtctatctcgttacagcgaaagtgcctctctacttagatttatgagtaattgttgcttttttgtatgaacatggtaatggcttgtcggagtaccagaggtttactatgttggtttatgctgtgaacgtaagcgagccatattctttggtatgcagtctgaactatatgttaacgtttgtgatttttgttaaaaaaaaaaaaaaaa

SEQ ID NO: 18 - protein, 251 aa, Zea mays
  misc_feature: Ceres CLONE ID no. 207996
  misc_feature: Ceres CDNA ID no. 36705508
  misc_feature (1)..(129): Pfam Name: Ribosomal_S6e PFAM Desc: Ribosomal protein S6e
  misc_feature: Homolog of GI Number: 1917019 NR Desc: ribosomal protein S6 RPS6
  misc_feature: Homolog of GI Number: 9931636 NR Desc: ribosomal protein s6 RPS6
  misc_feature: Homolog of GI Number: 34906842 NR Desc: putative 40S ribosomal protein S6
  misc_feature: Homolog of GI Number: 37991906 NR Desc: ribosomal protein s6 RPS6
  misc_feature: Homolog of GI Number: 7649387 NR Desc: S6 ribosomal protein
  misc_feature: Homolog of GI Number: 76161014 NR Desc: ribosomal protein S6
  misc_feature: Homolog of GI Number: 44662864 NR Desc: ribosomal protein S6
  misc_feature: Homolog of GI Number: 72384462 NR Desc: 52O08_33
  misc_feature: Homolog of GI Number: 20147379 NR Desc: AT5g10360/F12B17_290
MKFNIANPSTGCQKKLEIDDDQKLRAFYDRRISQEVSGDALGEEFKGYVFKIMGGCDKQGFPMKQGVLTSGRVRLLLHRGTPCFRGYGRRNGERRRKSVRGCIVSQDLSVINLVIVKKGENDLPGLTDTEKPRMRGPKRASKIRKLFNLNKDDDVRKYVNTYRRTFTTKNGKKVSKAPKIQRLVTPLTLQRKRARIADKKKRITKKKSEAAEYQKLLAQRLKEQRDRRSESLAKRRSKLSAAVKASAATSA

SEQ ID NO: 19 - DNA, 769 bp, Zea mays
  misc_feature: Ceres CLONE ID no. 208098
  misc_feature: Ceres CDNA ID no. 36707241
  CDS (106)..(513): REFERENCED BY SEQ ID NO: 20
attcgcctctcccgcgacccgtaccccgcctcccggttcaaccaaatccctctcgcctcatccccaccagcgcaaagccgccctatcgtcctgtcgtgagaagcaatggcgggccgtggcaaggcgattggcgctggtgccgcgaagaaggcaacgtcaaggagctccaaggctgggctgcagtttcccgtcggcaggatcgctcggttcctcaaggccggcaagtacgccgagcgcgtgggcgccggcgcccctgtctacctcgcagctgtcctcgagtacctcgccgctgaggtcctggagcttgctgggaacgcagcgagggataacaagaagacccgcatcgtgccgcgtcacatccagctcgccgtgcgcaacgacgaggagctgaccaagctgcttggtggtgccaccatcgcgagcggcggcgttatgcccaacatccaccagcacctcctccccaagaaggctggctcgtccaaggcttccaccgtcgatgacgatgacaactgaagctgcccactggagaaggcattcgctaccgtcttgtttcctaggtttagcacgcagttagtcgccatgtctttgagagagttcgatgtgtttgggaatgacaatagttcctttcttggttccctaagttcgttgaatcagatgtgaatacggctaaggtttttgggttatgcaactctgggacgtacgccagttgatttgatcgtttgaaaagaaatggaaggacgttaaagtttgaccaaaaaaaaaaaaaaaa

SEQ ID NO: 20 - protein, 135 aa, Zea mays
  misc_feature: Ceres CLONE ID no. 208098
  misc_feature: Ceres CDNA ID no. 36707241
  misc_feature (25)..(89): Pfam Name: CBFD_NFYB_HMF PFAM Desc: Histone
  misc_feature: Homolog of GI Number: 50938209 NR Desc: histone H2A
  misc_feature: Homolog of GI Number: 1154954 NR Desc: histone H2A
  misc_feature: Homolog of GI Number: 77555213 NR Desc: Core histone H2A/H2B/H3/H4
  misc_feature: Homolog of GI Number: 536896 NR Desc: protein H2A
  misc_feature: Homolog of GI Number: 50938211 NR Desc: putative histone H2A
  misc_feature: Homolog of GI Number: 50945929 NR Desc: putative histone H2A
  misc_feature: Homolog of GI Number: 29824201 NR Desc: putative histone H2A
  misc_feature: Homolog of GI Number: 17065594 NR Desc: putative histone H2A protein
  misc_feature: Homolog of GI Number: 21593834 NR Desc: histone H2A
  misc_feature: Homolog of GI Number: 21617982 NR Desc: histone H2A
MAGRGKAIGAGAAKKATSRSSKAGLQFPVGRIARFLKAGKYAERVGAGAPVYLAAVLEYLAAEVLELAGNAARDNKKTRIVPRHIQLAVRNDEELTKLLGGATIASGGVMPNIHQHLLPKKAGSSKASTVDDDDN

SEQ ID NO: 21 - DNA, 764 bp, Zea mays
  misc_feature: Ceres CLONE ID no. 208119
  misc_feature: Ceres CDNA ID no. 36707242
  CDS (96)..(551): REFERENCED BY SEQ ID NO: 22
acagccaaggaaatcttccgttctcaaaccaacctaggcaattctccgcagcctctcaccctcgcgagtcccgacctcccgcagccgccgcacagatggcacccaaggcggagaagaagccggcggccaagaagcccgcggaggaggagcccgcgacagagaaggtggagaaggctccggcggggaagaagcccaaggccgagaagcgcctcccggcgggcaagtccaaggagggcggcgagggcaagaaggggaaaaagaaggcgaagaagtccgtggagacctacaagatctacatcttcaaggtgctgaagcaggtgcaccccgacatcggcatctcgtccaaggccatgtccatcatgaactccttcatcaacgacatcttcgagaagctcgcggccgagtccgccaagctggcgcgctacaacaagaagcccaccatcacctcccgcgagatccagacctcggtgcgcctcgtcctccccggcgagctcgccaagcacgccgtctccgagggcactaaggccgttacgaagttcacctcgtcttaggatccttgtaatggtcatgtgggcgtcggcggtaggcgtggctcagtttatgtgatactgctagcgatggatgatgatgatctgcgtgtaattgaattaaagaattgtgctgatctttctacaacactgttccacatcactcgttgcccgccagtgagccgccaattacatgtgcaaatctacatcaactttctgataaaaaaaaaaaaaaaa

SEQ ID NO: 22 - protein, 151 aa, Zea mays
  misc_feature: Ceres CLONE ID no. 208119
  misc_feature: Ceres CDNA ID no. 36707242
  misc_feature: No seed is being produced by the plant
  misc_feature: The plant flowers significantly late compared to wild-type.
  misc_feature: Useful for biocontainment applications
  misc_feature: Useful for making plants with modulated flowering time
  misc_feature (58)..(130): Pfam Name: Histone PFAM Desc: Core histone H2A/H2B/H3/H4
  misc_feature: Homolog of GI Number: 22323 NR Desc: H2B histone
  misc_feature: Homolog of GI Number: 577825 NR Desc: H2B histone
  misc_feature: Homolog of GI Number: 34895838 NR Desc: putative histone H2B
  misc_feature: Homolog of GI Number: 21801 NR Desc: histone H2B
  misc_feature: Homolog of GI Number: 34895896 NR Desc: putative histone H2B
  misc_feature: Homolog of GI Number: 34895832 NR Desc: putative histone H2B
  misc_feature: Homolog of GI Number: 34895904 NR Desc: putative histone H2B
  misc_feature: Homolog of GI Number: 34895908 NR Desc: putative histone H2B
  misc_feature: Homolog of GI Number: 34895900 NR Desc: putative histone H2B
  misc_feature: Homolog of GI Number: 22325 NR Desc: H2B histone
MAPKAEKKPAAKKPAEEEPATEKVEKAPAGKKPKAEKRLPAGKSKEGGEGKKGKKKAKKSVETYKIYIFKVLKQVHPDIGISSKAMSIMNSFINDIFEKLAAESAKLARYNKKPTITSREIQTSVRLVLPGELAKHAVSEGTKAVTKFTSS

SEQ ID NO: 23 - DNA, 746 bp, Zea mays
  misc_feature: Ceres CLONE ID no. 208155
  misc_feature: Ceres CDNA ID no. 36707216
  CDS (73)..(384): REFERENCED BY SEQ ID NO: 24
aactccaagcgccaccaatctcgccttccgaggaaacccaccagcccaccacagacccgagcggaagaagccatgtccgggcgcggcaagggtggcaaggggctcggcaagggcggcgcgaagcgtcaccggaaggttctgcgcgacaacatccagggcatcaccaagccggcgatccggcggctggcgaggaggggcggcgtcaagcgcatctcggggctcatctacgaggagacccgcggcgtgctcaagatcttcctcgagaacgtcatccgcgacgccgtcacctacactgagcacgcccgccgcaagaccgtcactgccatggacgtcgtctacgcgctcaagcgccagggccgcaccctctacggcttcggcggctaggctgatggactcctcgcgatgttctccccttctgcagatgcgacgttttctggccgtgcccacaagtcttgcggtcaagaaagtttcaggaactcttgttagttcatctctggctgtggtaggtttatctgaatcgtgagactagtaggtttatctgaatcgcgaggctagcaggtttacctgaatcatgaagcagtgatgaaattatgtgtgcatcggatgttggaaatcgagcttgtaatgcaatttgttactcttgatgcaaatgaatggtctggtcgttacttctgtagttacgattttaaaaaaaaaaaaaaaaaaaaaaaaaaaaaaaaaaaaaaaaaccaaaaaaaaaaaaaaaa

SEQ ID NO: 24 - protein, 103 aa, Zea mays; identical to SEQ ID NO: 8
  misc_feature: Ceres CLONE ID no. 208155
  misc_feature: Ceres CDNA ID no. 36707216
  misc_feature (66)..(92): Pfam Name: TAF PFAM Desc: TATA box binding protein associated factor
  misc_feature: Homolog of GI Number: 68441405 NR Desc:  similar to histone H2A
  misc_feature: Homolog of GI Number: 50728590 NR Desc:  similar to germinal histone H4 gene
  misc_feature: Homolog of GI Number: 57098917 NR Desc:  similar to germinal histone H4 gene
  misc_feature: Homolog of GI Number: 74004178 NR Desc:  similar to germinal histone H4 gene
  misc_feature: Homolog of GI Number: 74004256 NR Desc:  similar to germinal histone H4 gene
  misc_feature: Homolog of GI Number: 50911547 NR Desc: histone H4
  misc_feature: Homolog of GI Number: 50729214 NR Desc:  similar to germinal histone H4 gene
  misc_feature: Homolog of GI Number: 76651053 NR Desc:  similar to germinal histone H4 gene
  misc_feature: Homolog of GI Number: 50728592 NR Desc:  similar to histone protein Hist2h3c1
  misc_feature: Homolog of GI Number: 62663604 NR Desc:  similar to Histone H2B 291B

SEQ ID NO: 25 - DNA, 808 bp, Zea mays
  misc_feature: Ceres CLONE ID no. 208156
  misc_feature: Ceres CDNA ID no. 36705509
  CDS (64)..(579): REFERENCED BY SEQ ID NO: 26
gttcgtgcgaaggcgaccctccctccttcactccttccccgccgcctcccggccgtcgccgccatggtgaagtactcgcaggagccgggcaaccctaccaagtcggctaaggccatgggcagggatctgagggtccacttcaagaacacaagggagacagcctttgctcttcgcaagttgtctttgaccaaggctaagcgataccttgaggatgttattgctcacaagcaggcaattcccttccggagatactgtggcggtgttggtcgcaccgcgcaagctaagtctcgccactccaatgggcagggccgctggcctgttaaatcagccgggttcatcctggatttgctgaagaatgctgagagtaacgctgatgtgaaaggcttggatgtggacaacctctatgtttcacacatccaggtgaaccaagcccagaagcagaggcgccgcacctaccgtgctcacggacgcatcaatccctacatgtcctcaccttgccacattgagctgatcttgtcagagaaggaagagcctgtgaagaaagaggctgacaacattgtcgcagcaaggaagcagtgaagtataccagcatgctgatcgaggccattttgtcgaagtattatagccgtagctcttttatgtaccttttcaggcagccttgcctctcgagacgtttctggaaccgatgttttaaatctggattatctatgttctgtagtgaactactgtgctggactgtaagctcagctcgtaatacaatagctcttaagatatctgggcacttaatctgcaaaaaaaaaaaaaaaaa

SEQ ID NO: 26 - protein, 171 aa, Zea mays
  misc_feature: Ceres CLONE ID no. 208156
  misc_feature: Ceres CDNA ID no. 36705509
  misc_feature (17)..(153): Pfam Name: Ribosomal_L22 PFAM Desc: Ribosomal protein L22p/L17e
  misc_feature: Homolog of GI Number: 2668748 NR Desc: ribosomal protein L17
  misc_feature: Homolog of GI Number: 50899126 NR Desc: putative ribosomal protein L17
  misc_feature: Homolog of GI Number: 50947889 NR Desc: putative ribosomal protein L17
  misc_feature: Homolog of GI Number: 19104 NR Desc: ribosomal protein L17
  misc_feature: Homolog of GI Number: 421987 NR Desc: ribosomal protein L17.2
  misc_feature: Homolog of GI Number: 12240036 NR Desc: ribosomal protein L17
  misc_feature: Homolog of GI Number: 19102 NR Desc: ribosomal protein L17
  misc_feature: Homolog of GI Number: 421985 NR Desc: ribosomal protein L17.1
  misc_feature: Homolog of GI Number: 15824574 NR Desc: ribosomal protein
  misc_feature: Homolog of GI Number: 78191466 NR Desc: ribosomal protein PETRP
MVKYSQEPGNPTKSAKAMGRDLRVHFKNTRETAFALRKLSLTKAKRYLEDVIAHKQAIPFRRYCGGVGRTAQAKSRHSNGQGRWPVKSAGFILDLLKNAESNADVKGLDVDNLYVSHIQVNQAQKQRRRTYRAHGRINPYMSSPCHIELILSEKEEPVKKEADNIVAARKQ

SEQ ID NO: 27 - DNA, 517 bp, Zea mays
  misc_feature: Ceres CLONE ID no. 208347
  misc_feature: Ceres CDNA ID no. 36705510
  CDS (58)..(318): REFERENCED BY SEQ ID NO: 28
agctcctcctccgccgccgtatcaaacgcactctcctccgccgccgcccgaggcaagatggttctccagaacgacatcgaccttctgaacccgccggcagagctcgagaaactcaagcacaagaagaagcgcctcgtccaatcccccaactccttcttcatggatgtcaagtgccagggatgcttcagcataaccacggttttcagccactcccagactgttgttgtgtgcccaggctgccaaactgttctctgccagcccacgggaggaaaggcgaggctcacggagggatgctctttccgccggaagggagactagagtggagtctgttattagtactggatcggttgtcaatctccagtatgtggattcaaattttgctctgtgcccagacgttaaggtcatgaactaccttagctaaggctttccgcatgttgttctggtgctgctatgtatcgcacgttggttattgctgaacttatagcttgtttggttcggattaaaaaaaaaaaaaaaa

SEQ ID NO: 28 - protein, 86 aa, Zea mays
  misc_feature: Ceres CLONE ID no. 208347
  misc_feature: Ceres CDNA ID no. 36705510
  misc_feature (30)..(84): Pfam Name: Ribosomal_S27e PFAM Desc: Ribosomal protein S27
  misc_feature: Homolog of GI Number: 55416173 NR Desc: S27 ribosomal protein
  misc_feature: Homolog of GI Number: 14495010 NR Desc: putative ribosomal protein S27
  misc_feature: Homolog of GI Number: 50908305 NR Desc: 40S ribosomal protein S27
  misc_feature: Homolog of GI Number: 55416151 NR Desc: ribosomal protein S27
  misc_feature: Homolog of GI Number: 50923281 NR Desc: OSJNBa0020I02.1
  misc_feature: Homolog of GI Number: 19699108 NR Desc: AT3g61110/T27I15_200
  misc_feature: Homolog of GI Number: 6850878 NR Desc: ribosomal protein S27
  misc_feature: Homolog of GI Number: 76161004 NR Desc: ribosomal protein S27
  misc_feature: Homolog of GI Number: 1076733 NR Desc: probable ribosomal protein S27
  misc_feature: Homolog of GI Number: 82623413 NR Desc: ribosomal protein S27
MVLQNDIDLLNPPAELEKLKHKKKRLVQSPNSFFMDVKCQGCFSITTVFSHSQTVVVCPGCQTVLCQPTGGKARLTEGCSFRRKGD

SEQ ID NO: 29 - DNA, 841 bp, Zea mays
  misc_feature: Ceres CLONE ID no. 208381
  misc_feature: Ceres CDNA ID no. 36707220
  CDS (76)..(486): REFERENCED BY SEQ ID NO: 30
tttttccggcctcccattcctcgcgcggcgaccacccgattcgaagcgtgcggagagaccgaagaagcgggagagatggctcgtaccaagcagactgctcgcaagtccacgggagggaaggctcccaggaagcagcttgccaccaaggctgcccgtaagtctgcccccaccactggtggagtgaagaagcctcaccgctaccgccctggaactgttgccctccgtgagatccgcaagtatcagaagagcactgagctgctgatcaggaagctgcccttccagaggctcgtcagggaaattgcacaggacttcaaaactgatttgcgtttccagagccatgcggtgcttgccctccaggaggctgctgaggcataccttgttggcctgtttgaggacaccaacctgtgcgccatccatgctaagcgtgtgaccatcatgccaaaggacattcagctggcaaggaggatccgcggcgagagggcctaatcgccacctcaaacatcgtgacaaaaacatgaagtcctggggttattgttaatctggtgccattgtaaggacatatgagtagggtttgttttgtggatcgcaagtttctcttctgctactgttgctgctacctttgctggtgttattgctagggtcgaatacttaagttaactatgcgctgacagtctggactagcagtgttatgtgcgctgctggaccttgcgcgcaatgctgtggccgatttgttcgttaatgtcaagaattgtgttacagtgcgtgtatatatgtgtgtcgccgcatttttatttttgagaattgttttaagctgatgtttcgtcgaaaaaaaaaaaaaaaa

SEQ ID NO: 30 - protein, 136 aa, Zea mays
  misc_feature: Ceres CLONE ID no. 208381
  misc_feature: Ceres CDNA ID no. 36707220
  misc_feature (58)..(134): Pfam Name: Histone PFAM Desc: Core histone H2A/H2B/H3/H4
  misc_feature: Homolog of GI Number: 37991915 NR Desc: histone H3.2 protein
  misc_feature: Homolog of GI Number: 18698662 NR Desc: disease
  misc_feature: Homolog of GI Number: 62642119 NR Desc: histone 3
  misc_feature: Homolog of GI Number: 73808026 NR Desc: histone H3
  misc_feature: Homolog of GI Number: 50728592 NR Desc:  similar to histone protein Hist2h3c1
  misc_feature: Homolog of GI Number: 68441481 NR Desc:  similar to CG31613
  misc_feature: Homolog of GI Number: 61839509 NR Desc:  similar to histone 1
  misc_feature: Homolog of GI Number: 515005 NR Desc: histone H3.2 protein
  misc_feature: Homolog of GI Number: 24585677 NR Desc: CG31613
  misc_feature: Homolog of GI Number: 68362812 NR Desc:  similar to CG31613
MARTKQTARKSTGGKAPRKQLATKAARKSAPTTGGVKKPHRYRPGTVALREIRKYQKSTELLIRKLPFQRLVREIAQDFKTDLRFQSHAVLALQEAAEAYLVGLFEDTNLCAIHAKRVTIMPKDIQLARRIRGERA

SEQ ID NO: 31 - DNA, 698 bp, Zea mays
  misc_feature: Ceres CLONE ID no. 208386
  misc_feature: Ceres CDNA ID no. 36707221
  CDS (44)..(520): REFERENCED BY SEQ ID NO: 32
aaaaatcaattttctcctcggggactccactcggttgccggccatggcggagaatttggcccccgagaagcgccacaccttcgtgcacaacgggcagaaggtgttcgagtgggaccagacgctagaggaggtgaacatgtacatcgagctccccaagggcgtgcccaccaagctcttccactgcaccatccaggccagccacgtcgaggtcggcatccgcggcaacccgccatatctcaaccatgacctgatgcaccccgtgaagaccgactcgtcgttctggacaatagaggatgctgagatgcatataacactgcaaaaaagagagaaggggaaaacatggtcatccccaatacaagggcaagggattttggatccatatgctgcagatcaagagcaaaagcggcttatgctccaaaggtttcaggaagagaacccagggttcgacttttcgcaggctcagttcagtggaacctgccctgacccaagaaccttcatgggaggaatacgctctgagtgaagctccctacctgcccatgttggtgttgtattcccggttggtgtctatcatggaaataatcgtgatgtgtaaccattttgtgtgcaagctcattaattggctgtaaacccttttggcaacctttgcgtgctaaattctagttatagttgtgatcgtcaaaataaaaaaaaaaaaaaaa

SEQ ID NO: 32 - protein, 158 aa, Zea mays
  misc_feature: Ceres CLONE ID no. 208386
  misc_feature: Ceres CDNA ID no. 36707221
  misc_feature (14)..(143): Pfam Name: Nuclear_move PFAM Desc: Nuclear movement protein
  misc_feature: Homolog of GI Number: 34910948 NR Desc: OSJNBb0063G05.19
  misc_feature: Homolog of GI Number: 73954084 NR Desc:  similar to NudC domain containing protein 2
  misc_feature: Homolog of GI Number: 61822779 NR Desc:  similar to NudC domain containing 2
  misc_feature: Homolog of GI Number: 76670465 NR Desc:  similar to NudC domain containing protein 2
  misc_feature: Homolog of GI Number: 65302936 NR Desc: spliceosome
  misc_feature: Homolog of GI Number: 30524691 NR Desc: salt tolerance protein 5
  misc_feature: Homolog of GI Number: 51535412 NR Desc: putative salt tolerance protein 5
  misc_feature: Homolog of GI Number: 50912681 NR Desc: putative salt tolerance protein 5
  misc_feature: Homolog of GI Number: 71754043 NR Desc: nuclear movement protein
MAENLAPEKRHTFVHNGQKVFEWDQTLEEVNMYIELPKGVPTKLFHCTIQASHVEVGIRGNPPYLNHDLMHPVKTDSSFWTIEDAEMHITLQKREKGKTWSSPIQGQGILDPYAADQEQKRLMLQRFQEENPGFDFSQAQFSGTCPDPRTFMGGIRSE

SEQ ID NO: 33 - DNA, 807 bp, Zea mays
  misc_feature: Ceres CLONE ID no. 208389
  misc_feature: Ceres CDNA ID no. 36707222
  CDS (71)..(481): REFERENCED BY SEQ ID NO: 34
accgcatcgtcgccctcaaattcgttccgtccaggcaaggaagaaatcgagcagccaaggagaggagaagatggctcgtacgaagcagaccgcccgcaagtccaccggaggcaaggccccgcgcaagcagctcgccaccaaggcggcgaggaagtctgcgccgacgaccggcggcgtgaagaagccccacaggtacaggcccgggacggtggctctgcgcgagatccgcaagtaccagaagagcacggagctgctgatccggaagttgcccttccagcgcctggtccgtgagatcgctcaggacttcaagacggatctgcggttccagagccacgccgtcctggccctccaggaagccgccgaggcctacctcgtcggcctgttcgaggacaccaacctctgcgccatccacgccaagcgcgtcaccatcatgcccaaagacatccagctcgcccgccgcatccgcggcgagcgcgcgtaggcgtatctcgcgcccggccccagtggcggcggagggatggaggagggcaatttgtaaccttatgctgtttgttcgcttttagacggcgtggtgaagaactagtgtaaaaacggctttaaagtctattttgtgcggtagttcgtgtaggccgcttcgtcccgaagcgatcttggtaaaagacttattcgtgttgccaaacgacacaattcgtattttttttgtgtgccgtgtagaacacggtttgttgttattggaatggttcatcgaaatctgtgtgcccgtttggttaaatatcgagggcacgggaatcaaaaaaaaaaaaaaaa

SEQ ID NO: 34 - protein, 136 aa, Zea mays; identical to SEQ ID NO: 30
  misc_feature: Ceres CLONE ID no. 208389
  misc_feature: Ceres CDNA ID no. 36707222
  misc_feature (58)..(134): Pfam Name: Histone PFAM Desc: Core histone H2A/H2B/H3/H4
  misc_feature: Homolog of GI Number: 37991915 NR Desc: histone H3.2 protein
  misc_feature: Homolog of GI Number: 18698662 NR Desc: disease
  misc_feature: Homolog of GI Number: 62642119 NR Desc: histone 3
  misc_feature: Homolog of GI Number: 74003975 NR Desc:  similar to histone 1
  misc_feature: Homolog of GI Number: 73808026 NR Desc: histone H3
  misc_feature: Homolog of GI Number: 68441481 NR Desc:  similar to CG31613
  misc_feature: Homolog of GI Number: 50728592 NR Desc:  similar to histone protein Hist2h3c1
  misc_feature: Homolog of GI Number: 68441431 NR Desc:  similar to CG31613
  misc_feature: Homolog of GI Number: 515005 NR Desc: histone H3.2 protein
  misc_feature: Homolog of GI Number: 24585677 NR Desc: CG31613

SEQ ID NO: 35 - DNA, 596 bp, Zea mays
  misc_feature: Ceres CLONE ID no. 208420
  misc_feature: Ceres CDNA ID no. 36707223
  CDS (69)..(368): REFERENCED BY SEQ ID NO: 36
aaccccaccgcagcacagcgccggcaaccgccgccatcgatcgatcgcccggaaactgacctctaccgatgtctggagccggcgaggaggataagaagcccgcggagggcggcgcccacatcaaccttaaggtcaagggacaggatggcaatgaggtgttctttcgcataaagaggtccacccagctgaagaagctgatgaacgcctattgcgaccgccagtctgtggacatgaatgccattgcattcctgtttgatggccgcaggcttcgcggcgagcagacccctgatgagctggagatggaggacggcgacgagatcgacgccatgcttcaccagaccggaggcagcgttcctagcaccacctaaaagcagcagctgcggagcctcgttttgctctccgccctgcgtagtactaaacaaaagggaaaaagtctttttaaggaacttgtgatgctctggctccttgtgccattgctgagggacatccttagcctttatttagtggtatggtttggtactttgttctgtcatcactcgtttatctatccctaatacatgccgccatgtttgtacttcctaaaaaaaaaaaaaaaa

SEQ ID NO: 36 - protein, 99 aa, Zea mays
  misc_feature: Ceres CLONE ID no. 208420
  misc_feature: Ceres CDNA ID no. 36707223
  misc_feature (16)..(91): Pfam Name: ubiquitin PFAM Desc: Ubiquitin family
  misc_feature: Homolog of GI Number: 1668773 NR Desc: ubiquitin
  misc_feature: Homolog of GI Number: 34907010 NR Desc: putative ubiquitin
  misc_feature: Homolog of GI Number: 30725548 NR Desc: At4g26840
  misc_feature: Homolog of GI Number: 1707372 NR Desc: ubiquitin
  misc_feature: Homolog of GI Number: 20386084 NR Desc: ubiquitin
  misc_feature: Homolog of GI Number: 34907008 NR Desc: putative ubiquitin
  misc_feature: Homolog of GI Number: 21537401 NR Desc: ubiquitin
  misc_feature: Homolog of GI Number: 6433950 NR Desc: SUMO protein
  misc_feature: Homolog of GI Number: 2558518 NR Desc: Ubiquitin
  misc_feature: Homolog of GI Number: 55859483 NR Desc: ubiquitin
MSGAGEEDKKPAEGGAHINLKVKGQDGNEVFFRIKRSTQLKKLMNAYCDRQSVDMNAIAFLFDGRRLRGEQTPDELEMEDGDEIDAMLHQTGGSVPSTT

SEQ ID NO: 37 - DNA, 499 bp, Zea mays
  misc_feature: Ceres CLONE ID no. 208441
  misc_feature: Ceres CDNA ID no. 36707029
  CDS (53)..(241): REFERENCED BY SEQ ID NO: 38
acagccgccgccgccgcatcccagcctccatcaccgtttccgtctcgttgccatgggtaaggtgcacggatcgttggcgcgcgccgggaaggtccgcgggcagacccccaaggtggcgaagcaggacaagaagaagaagccccgcggccgcgcgcacaagaggatgcagtacaaccgccgcttcgtcaccgccgtcgtcggcttcggcaagaagcgcgggcccaactcctccgagaagtaggcgccgctcggctcgtaccggttcctcatccttcctgctctccgtatgcttatgctcttgatggtactagtttcgttgttcgcaagcagaggaagaaccttctgtagattcggttttgttgtccatgtgctcagatgggaacttgagattgtatgaatttgagatatggtgatatgagctgatgatttttattatgcttattgttgctcctctgagctgttatttttgaacgctatccaaataaaaaaaaaaaaaaaa

SEQ ID NO: 38 - protein, 62 aa, Zea mays
  misc_feature: Ceres CLONE ID no. 208441
  misc_feature: Ceres CDNA ID no. 36707029
  misc_feature (3)..(61): Pfam Name: Ribosomal_S30 PFAM Desc: Ribosomal protein S30
  misc_feature: Homolog of GI Number: 55773694 NR Desc: 40S ribosomal protein S30
  misc_feature: Homolog of GI Number: 30102786 NR Desc: At5g56670
  misc_feature: Homolog of GI Number: 25295582 NR Desc: 40S ribosomal protein S30
  misc_feature: Homolog of GI Number: 47682823 NR Desc: MGC80045 protein
  misc_feature: Homolog of GI Number: 50603825 NR Desc: MGC89853 protein
  misc_feature: Homolog of GI Number: 6679753 NR Desc: Finkel
  misc_feature: Homolog of GI Number: 15822932 NR Desc: Finkel
  misc_feature: Homolog of GI Number: 36968262 NR Desc: Finkel
  misc_feature: Homolog of GI Number: 60678256 NR Desc: Finkel
MGKVHGSLARAGKVRGQTPKVAKQDKKKKPRGRAHKRMQYNRRFVTAVVGFGKKRGPNSSEK

SEQ ID NO: 39 - DNA, 629 bp, Zea mays
  misc_feature: Ceres CLONE ID no. 208455
  misc_feature: Ceres CDNA ID no. 36707224
  CDS (63)..(464): REFERENCED BY SEQ ID NO: 40
attccccgccgcctcgcgcccccgctcgcttcacttctctaggtgcgcaccgatcagaagagatggcggtgccgctgctgacgaagaagatcgtgaagaagcgggtcaagcagttcaagaggccccacctcgaccgctacaagtgccttaagccaagctggcgcaggccaaagggtattgattcccgtgtcaggaggaagttcaagggatgcaccttgatgcccaacattggttatggttctgacaagtcgaccaggcactacctccccagcaagttcaagaagtttgtggtccacaacgtttctgagctggagttgctcatgatgcacaacaggacctactgcgctgaaattgctcacaacgtgtccaccaagaagcgcaaggagatcgtggagcgtgctgcacagctcgacattgtggtcaccaacaagcttgctaggctccgcagccaggaggacgagtagtctggtttcttgtcttaacgacgaactggatgttgccattcctttctgtagggaactactttgcttgtgtcttgttagtactgaaaaccagaggcactcctacctttttgcaatcagtagccactaaaatgtggcagattccactgtttaaaaaaaaaaaaaaaa

SEQ ID NO: 40 - protein, 133 aa, Zea mays
  misc_feature: Ceres CLONE ID no. 208455
  misc_feature: Ceres CDNA ID no. 36707224
  misc_feature (14)..(123): Pfam Name: Ribosomal_L32e PFAM Desc: Ribosomal protein L32
  misc_feature: Homolog of GI Number: 50947773 NR Desc: putative ribosomal protein L32
  misc_feature: Homolog of GI Number: 76057835 NR Desc: ribosomal L32
  misc_feature: Homolog of GI Number: 71534997 NR Desc: ribosomal protein L32
  misc_feature: Homolog of GI Number: 13899057 NR Desc: ribosomal protein L32
  misc_feature: Homolog of GI Number: 40287540 NR Desc: ly200 protein
  misc_feature: Homolog of GI Number: 77745481 NR Desc: ly200
  misc_feature: Homolog of GI Number: 23198054 NR Desc: ribosomal protein L32
  misc_feature: Homolog of GI Number: 21555143 NR Desc: ribosomal protein L32
  misc_feature: Homolog of GI Number: 10177580 NR Desc: ribosomal protein L32
  misc_feature: Homolog of GI Number: 31241003 NR Desc: ENSANGP00000017702
MAVPLLTKKIVKKRVKQFKRPHLDRYKCLKPSWRRPKGIDSRVRRKFKGCTLMPNIGYGSDKSTRHYLPSKFKKFVVHNVSELELLMMHNRTYCAEIAHNVSTKKRKEIVERAAQLDIVVTNKLARLRSQEDE

SEQ ID NO: 41 - DNA, 513 bp, Zea mays
  misc_feature: Ceres CLONE ID no. 208522
  misc_feature: Ceres CDNA ID no. 40350882
  CDS (87)..(284): REFERENCED BY SEQ ID NO: 42
agtgttctcgactcgaccgccgccgtcccagttcgcttcgcgtcacccagagctcgtcggcctccgtccccgcgagaagcgagagcatggacacccaggtgaagcttgctgttgtggtgaaggtgatgggcaggaccggctccaggggtcaggtgacccaggtcagagtgaagttcttggatgaccagaaccgtctcatcatgaggaacgtcaagggccctgttcgtgagggtgacatcctcaccctgctcgagtctgagacggaggccaggaggctgcgctgaagccctggtggccttggatgtaattctgttaattttgttctatgtttgtcgaacttgccgtgtgaccttcacaacatctgctttgagatttactcagcctggattgcagttttattttatgttcctgctggaaagtgacttgccgagacatagttatcattggttatctataatagctcaatcgacgcgtgcaatctgaaggctttgttaaataaaaaaaaaaaaaaaa

SEQ ID NO: 42 - protein, 65 aa, Zea mays
  misc_feature: Ceres CLONE ID no. 208522
  misc_feature: Ceres CDNA ID no. 40350882
  misc_feature (1)..(65): Pfam Name: Ribosomal_S28e PFAM Desc: Ribosomal protein S28e
MDTQVKLAVVVKVMGRTGSRGQVTQVRVKFLDDQNRLIMRNVKGPVREGDILTLLESETEARRLR

SEQ ID NO: 43 - DNA, 811 bp, Zea mays
  misc_feature: Ceres CLONE ID no. 208612
  misc_feature: Ceres CDNA ID no. 29191627
  CDS (130)..(591): REFERENCED BY SEQ ID NO: 44
gaatcctgcggatagcctgacggctcgtttgaccttcgtctgtcgtctcgtctcgtccacctccccagcggcgcgtgaagcttgaggcaatccccgccctctctagccctgcgcaaccagttcggttccatggccaacagcaatctcccgcgccgaatcatcaaggagacgcagcggcttctcagcgaaccagcaccggggattagcgcgtcgccgtcggaggagaatatgcggtacttcaatgtcatgatccttggccccgcgcagtcaccctatgaaggtggagttttcaagcttgaactattcttgcctgaggaatatccaatggctgccccaaaagttagatttctcacaaaaatttaccatcctaatattgacaagcttggtaggatatgcctcgacattcttaaggacaaatggagtccagctcttcagatacgtacagttctactgagcattcaggcacttctgagcgccccaaacccagatgatcctctctcagacaacattgcgaaacactggaaatccaacgaagctgaagctgttgagacagcgaaggagtggactcgcctgtacacaagtggggcatgacagccaagtgttgttccagatgtaacaacacttccatagtttggggtcgattgaacacccctcttgcttggtgtgagcaaatttgtgaaatgttgcaatggggtaaaaaaacaaaaagctccaatcatgctttgtacttgtggctgtagctccgttcgctgcagtgcccatgaacatcaaagcaggtgttgctttgtccgttccaaaaaaaaaaaaaaaa

SEQ ID NO: 44 - protein, 153 aa, Zea mays
  misc_feature: Ceres CLONE ID no. 208612
  misc_feature: Ceres CDNA ID no. 29191627
  misc_feature (9)..(146): Pfam Name: UQ_con PFAM Desc: Ubiquitin
  misc_feature: Homolog of GI Number: 34911052 NR Desc: ubiquitin
  misc_feature: Homolog of GI Number: 66354480 NR Desc: ubiquitinating enzyme
  misc_feature: Homolog of GI Number: 71040675 NR Desc: ubiquitin
  misc_feature: Homolog of GI Number: 66354478 NR Desc: ubiquitinating enzyme
  misc_feature: Homolog of GI Number: 79590480 NR Desc: ubiquitin conjugating enzyme/ ubiquitin
  misc_feature: Homolog of GI Number: 5381319 NR Desc: ubiquitin
  misc_feature: Homolog of GI Number: 3834310 NR Desc: Similar to Ubiquitin ESTs gbT88233
  misc_feature: Homolog of GI Number: 57107823 NR Desc:  similar to ubiquitin
  misc_feature: Homolog of GI Number: 16758810 NR Desc: ubiquitin
  misc_feature: Homolog of GI Number: 30583959 NR Desc: Homo sapiens ubiquitin
MANSNLPRRIIKETQRLLSEPAPGISASPSEENMRYFNVMILGPAQSPYEGGVFKLELFLPEEYPMAAPKVRFLTKIYHPNIDKLGRICLDILKDKWSPALQIRTVLLSIQALLSAPNPDDPLSDNIAKHWKSNEAEAVETAKEWTRLYTSGA

SEQ ID NO: 45 - DNA, 877 bp, Zea mays
  misc_feature: Ceres CLONE ID no. 208624
  misc_feature: Ceres CDNA ID no. 40350883
  CDS (83)..(472): REFERENCED BY SEQ ID NO: 46
atcacagctagctagcatacagacgaataatctcttcttcacctcactaacaccagctagcaactctttctctcctgcaataatggccgctcgctcctcctcctcccagccgcagctggtcgcggcggcggcggtcctggcagcggcgctgctgctgctggcggcgggggccgggacggcgtcggcggcggtgagctgcggcgaggtgacgtcgtcggtggcgccgtgcctcgggtacgcgatgggcagcgcggcgtcgccctccgcggcgtgctgcagcggggtgcgctcgctcaacagccgcgcgtcgtcggcggcggaccggcaggccacctgcaactgcctcaagagcatgacgggccggctcggcggcggcgtcagcatggccaacgccgccaacatccccggcaagtgcggcgtctccgtcggcgtgcccatcagccccaccgtcgactgcaccaagatcaactgatcgatggaaccatagtggaggtagctcgctcgttggatggcagcgtacgtggccatcagcagcatgcagtcgtcgtcgtagcagagatgtcctagctacgtgtgtgtcatgcatcagactggcacataataaagaagtagatcatgcacccactagtgatcacttcgtctagtgtccctccgttcgctgttgtcgtcgtcgtcgtcgtggtgtacctcgtacgtgacatgccgtagcacgtacgctagcagagcagcacctcaatgtccttgggtttgctttgctggctctctgttttcgtctcgtgttgcttttaatctggcacaggtttctaaattataataatgaatacttttttgtcctaaaaaaaaaaaaaaaaaaaaaaaaaaaaaaaaaaaaaaaaaa

SEQ ID NO: 46 - protein, 129 aa, Zea mays
  misc_feature: Ceres CLONE ID no. 208624
  misc_feature: Ceres CDNA ID no. 40350883
  misc_feature (39)..(125): Pfam Name: Tryp_alpha_amyl PFAM Desc: Protease inhibitor/seed storage/LTP family
MAARSSSSQPQLVAAAAVLAAALLLLAAGAGTASAAVSCGEVTSSVAPCLGYAMGSAASPSAACCSGVRSLNSRASSAADRQATCNCLKSMTGRLGGGVSMANAANIPGKCGVSVGVPISPTVDCTKIN

SEQ ID NO: 47 - DNA, 705 bp, Zea mays
  misc_feature: Ceres CLONE ID no. 209385
  misc_feature: Ceres CDNA ID no. 25445543
  CDS (77)..(529): REFERENCED BY SEQ ID NO: 48
aacaacagcgaacacatctgcttcgcatttcttcccatcccccttcgcaacccaaaccccaactcgctccgcatcgatggcgcccaaggccgagaagaagcccgcggcgaagaagccggcggaggaggagcccgcggctgagaaggcgcccgccgggaagaagccgaaggcggagaagcgggtccccgctggcaagtccgctgccaaggagggcggcgagggcaagaggggcaggaagaagggcaagaagagcgtggagacctacaagatctacatcttcaaggtgctgaagcaggtgcacccggacattggcatctcctccaaggccatgtcgatcatgaactccttcattaacgatatcttcgagaagctagctgctgaggccgccaagctcgcgcgctataacaagaagccaaccatcacctcccgtgagatacagacttccgtgcgcctcgtccttcccggggagctcgccaagcacgccgtctccgagggcaccaaggccgtcaccaagttcacctcggcctaggctgcgctgccgccgcttgcaggattgtctcctgtgttcacgtgtattgctgtagttaggtgctgctggtttctgtctgttacccatctgtctgtagcaactttgttatctgataggaccgtaatggtgcttatttaacccagctatatgtttctaaaagaaaaaaaaaaaaaaaa

SEQ ID NO: 48 - protein, 150 aa, Zea mays
  misc_feature: Ceres CLONE ID no. 209385
  misc_feature: Ceres CDNA ID no. 25445543
  misc_feature: No seed is being produced by the plant
  misc_feature: The plant flowers significantly late compared to wild-type.
  misc_feature: Useful for biocontainment applications
  misc_feature: Useful for making plants with modulated flowering time
  misc_feature (57)..(129): Pfam Name: Histone PFAM Desc: Core histone H2A/H2B/H3/H4
  misc_feature: Homolog of GI Number: 22325 NR Desc: H2B histone
  misc_feature: Homolog of GI Number: 577825 NR Desc: H2B histone
  misc_feature: Homolog of GI Number: 21801 NR Desc: histone H2B
  misc_feature: Homolog of GI Number: 22323 NR Desc: H2B histone
  misc_feature: Homolog of GI Number: 50932769 NR Desc: putative histone H2B
  misc_feature: Homolog of GI Number: 1708107 NR Desc: Histone H2B
  misc_feature: Homolog of GI Number: 34895904 NR Desc: putative histone H2B
  misc_feature: Homolog of GI Number: 34895900 NR Desc: putative histone H2B
  misc_feature: Homolog of GI Number: 34895838 NR Desc: putative histone H2B
  misc_feature: Homolog of GI Number: 34895908 NR Desc: putative histone H2B
MAPKAEKKPAAKKPAEEEPAAEKAPAGKKPKAEKRVPAGKSAAKEGGEGKRGRKKGKKSVETYKIYIFKVLKQVHPDIGISSKAMSIMNSFINDIFEKLAAEAAKLARYNKKPTITSREIQTSVRLVLPGELAKHAVSEGTKAVTKFTSA

SEQ ID NO: 49 - DNA, 1547 bp, Zea mays
  misc_feature: Ceres CLONE ID no. 209512
  misc_feature: Ceres CDNA ID no. 25402248
  CDS (118)..(1350): REFERENCED BY SEQ ID NO: 50
agagcacgagacacccaataaacacacacacacaagcgaggagcactacctgttggttggattctcttcagtctagctactcgatcggtcccttgtccacagttaagtttcagacacatggggagcattggcagaggcacggccaactgcgccaccgtgccgcagccgccgccgtcgacagggaagctcatcacgatcctgagcatcgatggcggcggcatccgcggccttatcccggcgaccatcattgcgtacctcgaggccaagctccaggagctggacggcccggacgctcggatcgccgactacttcgatgtgattgccgggacgagcaccggcgccctgctcgcgtcgatgctggcggcgccggacgagaacaaccggccgctgttcgccgccaaggacctcaccacgttctacctcgagaacggcccaaagatcttcccacagaaaaaggctgggttgctgacgccgctgaggaacctgctgggcctggtgcggggccccaagtacgacggcgtgttcctgcacgacaagatcaagagcctgacgcacgacgtcagggtggcggacacggtgaccaacgtcatcgtgccggcgttcgacgtcaagtacctgcagcccatcatcttctcgacgtacgaggccaagaccgacaccctcaagaacgcgcacctctccgacatctgcatcagcacgtcggcggcgcccacctacttcccggcgcacttcttcaagaccgaggccaccgacggccggcccccccgcgagtaccacctcgtggacggcggcgtcgcggccaacaaccccaccatggtcgccatgtccatgctcaccaaggaggtgcaccgccgcaaccccaacttcaacgccggcagccccaccgagtacaccaactacctcatcatctccgtcggcaccgggtcggcaaagcaggcggagaagtacaccgcggagcagtgcgcgaagtggggcctcatccagtggctctacaacggcggcttcacgccgatcatcgacatcttctcgcatgccagttccgacatggttgacatccatgcgtcgatcctctttcaggccctgcactgcgagaagaagtaccttcgcatccaggatgatactttgactgggaacgcatcgtccgtggacatcgccaccaaggagaacatggagtctctgatatcgatcggccaggagctgctcaagaagccagtggcgagagtgaacatcgacacaggggtgtacgagtcctgcgacggtgagggcacaaatgcacagtcgctagctgacttcgccaagcaactctctgacgagcgcaagctacgcaagagcaatctcaactccaactaataaatacctctctcagtcacagcatgtgctctttctgcagattcaccgtttcttatttttaatttcaatttcaattcagtgtatgtgcgtgtgtgtgtgactgtactgtgtgtaccaataaacatttaagttcaatcatttgcttgtctatgatcaaaagaaccatttccttctgatgcgtaaaaaaaaaaaaaaaa

SEQ ID NO: 50 - protein, 410 aa, Zea mays
  misc_feature: Ceres CLONE ID no. 209512
  misc_feature: Ceres CDNA ID no. 25402248
  misc_feature (28)..(236): Pfam Name: Patatin PFAM Desc: Patatin
  misc_feature: Homolog of GI Number: 77552020 NR Desc: patatin
  misc_feature: Homolog of GI Number: 4539676 NR Desc: patatin
  misc_feature: Homolog of GI Number: 4539677 NR Desc: patatin
  misc_feature: Homolog of GI Number: 4539656 NR Desc: patatin
  misc_feature: Homolog of GI Number: 9794868 NR Desc: patatin
  misc_feature: Homolog of GI Number: 50946833 NR Desc: putative latex protein allergen
  misc_feature: Homolog of GI Number: 2462265 NR Desc: patatin
  misc_feature: Homolog of GI Number: 50920955 NR Desc: patatin
  misc_feature: Homolog of GI Number: 50946825 NR Desc: putative latex protein allergen
  misc_feature: Homolog of GI Number: 9794870 NR Desc: patatin
  misc_feature: Useful for increasing chlorophyll and photosynthetic capacity
  misc_feature: Useful for increasing seed/fruit yield or modifying fruit content
  misc_feature: Useful for making plants with increased biomass
  misc_feature: Useful for making stronger plants
  misc_feature: Useful for making taller plants and plants with longer inflorescences
  misc_feature: Useful for modifying fruit shape and seed yield
MGSIGRGTANCATVPQPPPSTGKLITILSIDGGGIRGLIPATIIAYLEAKLQELDGPDARIADYFDVIAGTSTGALLASMLAAPDENNRPLFAAKDLTTFYLENGPKIFPQKKAGLLTPLRNLLGLVRGPKYDGVFLHDKIKSLTHDVRVADTVTNVIVPAFDVKYLQPIIFSTYEAKTDTLKNAHLSDICISTSAAPTYFPAHFFKTEATDGRPPREYHLVDGGVAANNPTMVAMSMLTKEVHRRNPNFNAGSPTEYTNYLIISVGTGSAKQAEKYTAEQCAKWGLIQWLYNGGFTPIIDIFSHASSDMVDIHASILFQALHCEKKYLRIQDDTLTGNASSVDIATKENMESLISIGQELLKKPVARVNIDTGVYESCDGEGTNAQSLADFAKQLSDERKLRKSNLNSN

SEQ ID NO: 51 - DNA, 587 bp, Zea mays
  misc_feature: Ceres CLONE ID no. 209607
  misc_feature: Ceres CDNA ID no. 25446275
  CDS (52)..(276): REFERENCED BY SEQ ID NO: 52
accaacctacaattgtcacttccattttctcaataccttaagcaaggaccaatgtctcaagcccagccccctcgttcccaagcccagtggaaacacgttaaatttcaggataaccaagctaatgccatgaaggaaccaggaaccggtgggtatggctatgggacgaaaaatgacaagaataaggatgtggatacaatagcttcggacttcatcaagctgaagcacaaggcttgggcactccagaagagcacaaccatgtaccaaccttctacctaaagccttggatatttgcggatgcggagtgaagttaccatggcatcgttgctaagaataagaaagtaatgtggttatgaggagatgtgtaattttgtggcgatattatttgcaacaatgatgtatatatgggcatgtttggttcacggctaactgtgacacactttgcctaaggttagtcgttcgaattgaagaactaaccttaggcagaaaaagttaggcaaagtgtggcaatttatgcagcaaaccaaataggcctatagttttactgctagttaatttgcttctatttggaaagaaaaaaaaaaaaaaaa

SEQ ID NO: 52 - protein, 74 aa, Zea mays
  misc_feature: Ceres CLONE ID no. 209607
  misc_feature: Ceres CDNA ID no. 25446275
  misc_feature: Homolog of GI Number: 34905988 NR Desc: P0518C01.5
MSQAQPPRSQAQWKHVKFQDNQANAMKEPGTGGYGYGTKNDKNKDVDTIASDFIKLKHKAWALQKSTTMYQPST

SEQ ID NO: 53 - DNA, 526 bp, Zea mays
  misc_feature: Ceres CLONE ID no. 209837
  misc_feature: Ceres CDNA ID no. 25445544
  CDS (114)..(311): REFERENCED BY SEQ ID NO: 54
gtaggcctagggtttccttcctcctccagtgctgtcatcgccgccgccgccgccccggtttccttcgtaagcccgccgtcctccgtccgcgactctgcgcgagaagcgagagtatggacacccaagtgaagcttgctgttgtggtgaaggtgatgggaaggaccggctccaggggtcaggttacccaggtcagagtgaagttcttggatgaccagaaccgtctcatcatgaggaacgtcaagggaccggttcgcgagggagacatcctcacactgctcgagtctgagagggaggctaggaggctgcgttgaggcgggatactgtcttggtagttttcgtatggagttggatgtcatctaattgtgctatgtttgtcaaactttggtatgacctttaaaacacctgccttgtatgattatttgtgagcctggtggtaagattgcagtttggtttttatgatccggttgagggtatgtttggcaacaatatttatcaaaatcatgtttttacaaaaaaaaaaaaaaaa

SEQ ID NO: 54 - protein, 65 aa, Zea mays
  misc_feature: Ceres CLONE ID no. 209837
  misc_feature: Ceres CDNA ID no. 25445544
  misc_feature (1)..(65): Pfam Name: Ribosomal_S28e PFAM Desc: Ribosomal protein S28e
  misc_feature: Homolog of GI Number: 32400865 NR Desc: S28 ribosomal protein
  misc_feature: Homolog of GI Number: 2739219 NR Desc: rpS28
  misc_feature: Homolog of GI Number: 557682 NR Desc: small subunit ribosomal protein S28
  misc_feature: Homolog of GI Number: 3947723 NR Desc: ribosomal protein S28
  misc_feature: Homolog of GI Number: 21902507 NR Desc: ribosomal protein small subunit 28
  misc_feature: Homolog of GI Number: 3947725 NR Desc: ribosomal protein S28
  misc_feature: Homolog of GI Number: 40287500 NR Desc: 28 kDa small subunit ribosomal protein
  misc_feature: Homolog of GI Number: 21593139 NR Desc: 40S ribosomal protein S28
  misc_feature: Homolog of GI Number: 38566518 NR Desc: At3g10090
  misc_feature: Homolog of GI Number: 51873955 NR Desc: MGC85550 protein
MDTQVKLAVVVKVMGRTGSRGQVTQVRVKFLDDQNRLIMRNVKGPVREGDILTLLESEREARRLR

SEQ ID NO: 55 - DNA, 468 bp, Zea mays
  misc_feature: Ceres CLONE ID no. 210114
  misc_feature: Ceres CDNA ID no. 36704411
  CDS (76)..(285): REFERENCED BY SEQ ID NO: 56
atttccatcctgtcgtgggatcccagccaccgccgctagaagaagagctcggcgattcccaggtcccgcgagaatatgccgaagcagatccatgagattaaggacttcctcctcaccgcgaggaggaaggatgcccgctcagtgaagatcaagaggagtaaggatgttgtcaagttcaaggtgcgctgctccaagtacttgtacacgctctgcgtcttcgatgctgagaaggcaaacaagttgaagcaatctcttcccccaggtttgaccgtcgaggaggtctgattggatacatggcaacgccgagttgaactacccaagcttctttatcagtagcagagcatgctactctatgtacttttggaacctaagctattagacctgtcagtgttggatgtctggatcttgcatttttggagaaataccaatttacctcgttcaaggatgcaagtaaaaaaaaaaaaaaaa

SEQ ID NO: 56 - protein, 69 aa, Zea mays
  misc_feature: Ceres CLONE ID no. 210114
  misc_feature: Ceres CDNA ID no. 36704411
  misc_feature (2)..(69): Pfam Name: Ribosomal_L38e PFAM Desc: Ribosomal L38e protein family
  misc_feature: Homolog of GI Number: 50938225 NR Desc: putative 60S ribosomal protein L38
  misc_feature: Homolog of GI Number: 23507773 NR Desc: At3g59540/T16L24_90
  misc_feature: Homolog of GI Number: 50931949 NR Desc: putative 60S ribosomal protein L38
  misc_feature: Homolog of GI Number: 313027 NR Desc: ribosomal protein L38
  misc_feature: Homolog of GI Number: 15825507 NR Desc: ribosomal protein L38
  misc_feature: Homolog of GI Number: 27497793 NR Desc: 60S ribosomal protein L38
  misc_feature: Homolog of GI Number: 49900028 NR Desc: MGC89823 protein
  misc_feature: Homolog of GI Number: 82895480 NR Desc:  similar to ribosomal protein L38
  misc_feature: Homolog of GI Number: 4506645 NR Desc: ribosomal protein L38
  misc_feature: Homolog of GI Number: 61372160 NR Desc: ribosomal protein L38
MPKQIHEIKDFLLTARRKDARSVKIKRSKDVVKFKVRCSKYLYTLCVFDAEKANKLKQSLPPGLTVEEV

SEQ ID NO: 57 - DNA, 468 bp, Zea mays; identical to SEQ ID NO: 55
  misc_feature: Ceres CLONE ID no. 210151
  misc_feature: Ceres CDNA ID no. 36704411
  CDS (76)..(285): REFERENCED BY SEQ ID NO: 58

SEQ ID NO: 58 - protein, 69 aa, Zea mays; identical to SEQ ID NO: 56
  misc_feature: Ceres CLONE ID no. 210151
  misc_feature: Ceres CDNA ID no. 36704411
  misc_feature (2)..(69): Pfam Name: Ribosomal_L38e PFAM Desc: Ribosomal L38e protein family
  misc_feature: Homolog of GI Number: 50938225 NR Desc: putative 60S ribosomal protein L38
  misc_feature: Homolog of GI Number: 23507773 NR Desc: At3g59540/T16L24_90
  misc_feature: Homolog of GI Number: 50931949 NR Desc: putative 60S ribosomal protein L38
  misc_feature: Homolog of GI Number: 313027 NR Desc: ribosomal protein L38
  misc_feature: Homolog of GI Number: 15825507 NR Desc: ribosomal protein L38
  misc_feature: Homolog of GI Number: 27497793 NR Desc: 60S ribosomal protein L38
  misc_feature: Homolog of GI Number: 49900028 NR Desc: MGC89823 protein
  misc_feature: Homolog of GI Number: 82895480 NR Desc:  similar to ribosomal protein L38
  misc_feature: Homolog of GI Number: 4506645 NR Desc: ribosomal protein L38
  misc_feature: Homolog of GI Number: 61372160 NR Desc: ribosomal protein L38

SEQ ID NO: 59 - DNA, 736 bp, Zea mays
  misc_feature: Ceres CLONE ID no. 210341
  misc_feature: Ceres CDNA ID no. 40350884
  CDS (121)..(531): REFERENCED BY SEQ ID NO: 60
attcgttcctggttttgttagtttcggaagcggcgctcgtcgccgattcgaatatttgtcgtgattagggttccatgatttagggattaggttttcaggtaaaccatagtttagtgacccatggctcgtactaagcaaactgctcgcaagtccactggagggaaggctcctaggaagcaacttgccaccaaggctgcccgtaagtctgcacccacaactgggggagtaaagaagcctcatcgttaccgccctggaactgttgctcttcgtgaaatccgcaagtatcagaagagcactgacctgctcataaggaagcttccgttccaaaggcttgtcagggagattgcccaggatttcaagactgatcttcgtttccagagccatgcggtgcttgcgctgcaggaggctgcggaggcgtacctggtgggtctattcgaggacactaatctgtgcgccattcatgccaagcgcgtcaccatcatgcccaaggacattcagctggctaggaggatccgtggtgaaagggcctagattctctatttactgctactgggagtggctccgtagtgtatggtttgcatctgttcgatgcttgcttttgtgaaagtttacgtttgtgggtgttcgaatttgtaatattcatccgtagtggacaagtggtaggaagtgccgcaatctgactatgttttcaaatttataattgctgtcgattagtgttataaaaaaaaaaaaaaaa

SEQ ID NO: 60 - protein, 136 aa, Zea mays
  misc_feature: Ceres CLONE ID no. 210341
  misc_feature: Ceres CDNA ID no. 40350884
  misc_feature (58)..(134): Pfam Name: Histone PFAM Desc: Core histone H2A/H2B/H3/H4
MARTKQTARKSTGGKAPRKQLATKAARKSAPTTGGVKKPHRYRPGTVALREIRKYQKSTDLLIRKLPFQRLVREIAQDFKTDLRFQSHAVLALQEAAEAYLVGLFEDTNLCAIHAKRVTIMPKDIQLARRIRGERA

SEQ ID NO: 61 - DNA, 577 bp, Zea mays
  misc_feature: Ceres CLONE ID no. 210405
  misc_feature: Ceres CDNA ID no. 36707030
  CDS (63)..(374): REFERENCED BY SEQ ID NO: 62
acacagcaagccagcagagcagaaagcagccgcagccccagcccccacaagacgaggcaacaatggcgctagaagcagccaccgccccccgcgcactcctcgccgcgtgcctcgtcctgctggtcctcggcggcggcaccggcccgtcgtcggtgctgcgcggcgccggggcgcaggccggcgggcagtgcctgccgcagctgaaccgcctcctggcgtgccgcgcgtacctggtgcccggcgcgccggaccccagcgcggactgctgcagcgcgctgagcgccgtgtcgcacgagtgcgcctgcagcaccatgggcatcatcaacagcctgcccggccggtgccacctcgcccaagccaactgctccgcttgaagcagggacctggcacgcgtgctgcaatggatggcaggaggggagaggaataagaagtgtttccatttcacagtgagagcagtcgagctccaacgttgtcgtcgtcgtcgtcttcttcttttgatattcagactctgtcttgcggtctatatcatcagcataataataataaaataagtaaaaccagaaaaaaaaaaaaaaaa

SEQ ID NO: 62 - protein, 103 aa, Zea mays
  misc_feature: Ceres CLONE ID no. 210405
  misc_feature: Ceres CDNA ID no. 36707030
  misc_feature (43)..(101): Pfam Name: Tryp_alpha_amyl PFAM Desc: Protease inhibitor/seed storage/LTP family
  misc_feature: Homolog of GI Number: 6689676 NR Desc: LTP
  misc_feature: Homolog of GI Number: 51965070 NR Desc: PREDICTED OJ1323_A06.22 gene product
  misc_feature: Homolog of GI Number: 1628471 NR Desc: Men
  misc_feature: Homolog of GI Number: 52077308 NR Desc: YY1 protein precursor
  misc_feature: Homolog of GI Number: 3378527 NR Desc: anther specific protein
  misc_feature: Homolog of GI Number: 520864 NR Desc: M7
  misc_feature: Homolog of GI Number: 452591 NR Desc: ORF
  misc_feature: Homolog of GI Number: 19152 NR Desc: 108 protein
MALEAATAPRALLAACLVLLVLGGGTGPSSVLRGAGAQAGGQCLPQLNRLLACRAYLVPGAPDPSADCCSALSAVSHECACSTMGIINSLPGRCHLAQANCSA

SEQ ID NO: 63 - DNA, 609 bp, Zea mays
  misc_feature: Ceres CLONE ID no. 210440
  misc_feature: Ceres CDNA ID no. 36707225
  CDS (77)..(388): REFERENCED BY SEQ ID NO: 64
accagagtcatcgcggcgtgttcaaatcccacaatcttcttgtagcacaccactgtcttcgtccaactcggcggcgatgtctgggcgcggcaagtgcggcaaggggctgggcaagggtggtgcgaaacgccaccgtaaggttctccgcgacaacatccagggtatcacgaagccggcaatccggaggctggcgaggaggggcggcgtgaagcgtatctccgggcttatctacgaggagacccgcggcgtgctcaagatcttcctcgagaatgtcatccgcgacgcggtcacctacaccgagcacgctcgccgcaagaccgtcaccgccatggatgttgtgtacgccctcaagcgccagggccgcactctgtacgggttcggtggttgagcgcatctcttccctcgtctgcagcggctgccggtggcgtttcctcagttccctctgccttgcttggcttgatgtagagagttatcagattaaaatatctctgatgtgcttcgttattgggtggaatcatgtgtcccagcagtgctgggaaatcgagatcaagatgtatctttctttgcagtaatgaaatgttaaaatcgagaccaaaaaaaaaaaaaaaa

SEQ ID NO: 64 - protein, 103 aa, Zea mays
  misc_feature: Ceres CLONE ID no. 210440
  misc_feature: Ceres CDNA ID no. 36707225
  misc_feature (66)..(92): Pfam Name: TAF PFAM Desc: TATA box binding protein associated factor
  misc_feature: Homolog of GI Number: 57106967 NR Desc:  similar to germinal histone H4 gene
  misc_feature: Homolog of GI Number: 61835903 NR Desc:  similar to germinal histone H4 gene
  misc_feature: Homolog of GI Number: 62663604 NR Desc:  similar to Histone H2B 291B
  misc_feature: Homolog of GI Number: 74004256 NR Desc:  similar to germinal histone H4 gene
  misc_feature: Homolog of GI Number: 74004178 NR Desc:  similar to germinal histone H4 gene
  misc_feature: Homolog of GI Number: 76631272 NR Desc:  similar to germinal histone H4 gene
  misc_feature: Homolog of GI Number: 57098917 NR Desc:  similar to germinal histone H4 gene
  misc_feature: Homolog of GI Number: 68441417 NR Desc:  similar to germinal histone H4 gene
  misc_feature: Homolog of GI Number: 61820747 NR Desc:  similar to germinal histone H4 gene
  misc_feature: Homolog of GI Number: 50729214 NR Desc:  similar to germinal histone H4 gene
MSGRGKCGKGLGKGGAKRHRKVLRDNIQGITKPAIRRLARRGGVKRISGLIYEETRGVLKIFLENVIRDAVTYTEHARRKTVTAMDVVYALKRQGRTLYGFGG

SEQ ID NO: 65 - DNA, 562 bp, Zea mays
  misc_feature: Ceres CLONE ID no. 210444
  misc_feature: Ceres CDNA ID no. 36704413
  CDS (69)..(380): REFERENCED BY SEQ ID NO: 66
aacaacaacaacaacccgcacaacggcacgattctcctcctccgtccgcgtagctctcggtttcggcgatgtcggggcgcggcaagggcggcaaggggctgggcaagggcggcgccaagcgccaccgcaaggtgctgcgcgacaacatccagggcatcacgaagccggcgatccgtaggctggccaggaggggcggcgtcaagcgcatttctgggctcatctacgaggagacccgcggcgtgctcaagatcttcctcgagaacgtcatccgcgacgccgtcacctacaccgagcacgcccgccgcaagaccgtcaccgccatggatgtcgtctacgcgctcaagcgccagggccgcacgctctacggcttcggcggctaggccgcctccccttctgatgctttgatgtgacggccgtggtcggttgtgtgtctagttggccggtctactgtagtttgttctgtatcttcgtttcgaggtgttccagtttctagcccatttggtgtaatattttcactgctattatcaatggaaagccctcggttccaaaaaaaaaaaaaaaa

SEQ ID NO: 66 - protein, 103 aa, Zea mays; identical to SEQ ID NO: 8
  misc_feature: Ceres CLONE ID no. 210444
  misc_feature: Ceres CDNA ID no. 36704413
  misc_feature (66)..(92): Pfam Name: TAF PFAM Desc: TATA box binding protein associated factor
  misc_feature: Homolog of GI Number: 74004256 NR Desc:  similar to germinal histone H4 gene
  misc_feature: Homolog of GI Number: 61820747 NR Desc:  similar to germinal histone H4 gene
  misc_feature: Homolog of GI Number: 74004178 NR Desc:  similar to germinal histone H4 gene
  misc_feature: Homolog of GI Number: 74004228 NR Desc:  similar to germinal histone H4 gene
  misc_feature: Homolog of GI Number: 57098917 NR Desc:  similar to germinal histone H4 gene
  misc_feature: Homolog of GI Number: 50728590 NR Desc:  similar to germinal histone H4 gene
  misc_feature: Homolog of GI Number: 50911547 NR Desc: histone H4
  misc_feature: Homolog of GI Number: 76651053 NR Desc:  similar to germinal histone H4 gene
  misc_feature: Homolog of GI Number: 62648434 NR Desc:  similar to germinal histone H4 gene
  misc_feature: Homolog of GI Number: 61810551 NR Desc:  similar to Hist1h4i protein

SEQ ID NO: 67 - DNA, 628 bp, Zea mays
  misc_feature: Ceres CLONE ID no. 210485
  misc_feature: Ceres CDNA ID no. 36707031
  CDS (58)..(402): REFERENCED BY SEQ ID NO: 68
gcagcgagaggaaagagaaaaaggaaaggaaaggacaaaggagcggcggcgaggtctatggcgtcgacggctgggtacctggcgcggcgggcggcgcagaaggagcgggtgcgcctgctctaccgcagggcgctcaaggacacgctcaactgggccgtccaccgccacctcttctaccaggacgcgtcggatctccgggacaagttcgaggccaaccgacacgtggataacctggacgtggtcgataggctcatcgacgatgcggaggctcagtacaggaacttccagcaccccgatccctacattgttccatgggcaccaggcggcactaaattcacaagaaacccccctccacctcaagggatcgagatcatctacaattatggcaaggaggaccagtaaacaagagtcctgcaagcggggggcagaacttccacagttccaaatcacttcctgtttaatcgagttgttgtacgagaaataagaatggaaattactggactccatccatgcttctcatttgcttgttctgataatcatgtgctcttcatctagtgcatattgaagtgatgtttcctgtcataaaatggaactgtactatctttgtcgtgcaaaaaaaaaaaaaaaa

SEQ ID NO: 68 - protein, 114 aa, Zea mays
  misc_feature: Ceres CLONE ID no. 210485
  misc_feature: Ceres CDNA ID no. 36707031
  misc_feature (13)..(78): Pfam Name: Complex1_LYR PFAM Desc: Complex 1 protein
  misc_feature: Homolog of GI Number: 53792931 NR Desc: complex 1 family protein
  misc_feature: Homolog of GI Number: 24111283 NR Desc: At4g34700/T4L20_280
  misc_feature: Homolog of GI Number: 29789148 NR Desc: NADH dehydrogenase
  misc_feature: Homolog of GI Number: 28461191 NR Desc: NADH dehydrogenase
  misc_feature: Homolog of GI Number: 50731984 NR Desc:  similar to NADH2 dehydrogenase
  misc_feature: Homolog of GI Number: 6274550 NR Desc: NADH dehydrogenase
  misc_feature: Homolog of GI Number: 4894370 NR Desc: NADH
  misc_feature: Homolog of GI Number: 55631220 NR Desc:  similar to NADH dehydrogenase NADH dehydrogenase
  misc_feature: Homolog of GI Number: 57095338 NR Desc:  similar to NADH2 dehydrogenase
MASTAGYLARRAAQKERVRLLYRRALKDTLNWAVHRHLFYQDASDLRDKFEANRHVDNLDVVDRLIDDAEAQYRNFQHPDPYIVPWAPGGTKFTRNPPPPQGIEIIYNYGKEDQ

SEQ ID NO: 69 - DNA, 823 bp, Zea mays
  misc_feature: Ceres CLONE ID no. 210492
  misc_feature: Ceres CDNA ID no. 29191378
  CDS (147)..(566): REFERENCED BY SEQ ID NO: 70
ggtcactcggcacgcaggcagaggcagcatagcagcagccagctccatccatcctctttcccctcctcgcttcgcttcctcggcggattcctcctccctcgaccgtccccgtccccgtccccttccggcgcgcaagctcgcccgagatggcaaacgcgagatcgggtgtcgctgtgaatgacgagtgcatgctcaagttcggcgagctgcagtcgaagaggctgcaccgcttcctaactttcaagatggacgacaagttcaaggagatcgttgtggaccaggtcggggatcgcgctaccagctacgaggacttcacaaacagcctccccgagaatgactgccgatacgcgatctatgatttcgactttgtcactgcagaagatgtccagaagagcaggatcttctatatcctatggtccccatcctccgccaaggtgaagagcaagatgctttatgcaagctcaaaccaaaaattcaagagtgggctcaatggcattcaggtggaactgcaggctactgatgcaagtgaaatcagccttgatgagatcaaggatcgggctcgctaggcatcatcatgatcatgcatcatggacttggcctactactgtggatttgtatgccattatagacttggtgctgtgaaagactgcttgatgatttgcgggtttgttgctgtgtaaaaaaaggtcccatggctcccagaagaccatgaaggttcggatctatcatgtaattccttgttatctgccaattatgtatggactatggacatgtgttgcgctgttcaacttactactacaaataagcaaaaaaaaaaaaaaaa

SEQ ID NO: 70 - protein, 139 aa, Zea mays
  misc_feature: Ceres CLONE ID no. 210492
  misc_feature: Ceres CDNA ID no. 29191378
  misc_feature (12)..(139): Pfam Name: Cofilin_ADF PFAM Desc: Cofilin/tropomyosin
  misc_feature: Homolog of GI Number: 1419370 NR Desc: actin depolymerizing factor
  misc_feature: Homolog of GI Number: 50919483 NR Desc: putative actin depolymerizing factor
  misc_feature: Homolog of GI Number: 14906219 NR Desc: actin
  misc_feature: Homolog of GI Number: 48374972 NR Desc: putative actin depolymerizing factor
  misc_feature: Homolog of GI Number: 38564721 NR Desc: putative actin
  misc_feature: Homolog of GI Number: 50927855 NR Desc: OSJNBb0012E24.5
  misc_feature: Homolog of GI Number: 68166241 NR Desc: actin depolymerizing factor
  misc_feature: Homolog of GI Number: 21536985 NR Desc: actin depolymerizing factor 4
  misc_feature: Homolog of GI Number: 21593877 NR Desc: Actin
  misc_feature: Homolog of GI Number: 14906210 NR Desc: actin
MANARSGVAVNDECMLKFGELQSKRLHRFLTFKMDDKFKEIVVDQVGDRATSYEDFTNSLPENDCRYAIYDFDFVTAEDVQKSRIFYILWSPSSAKVKSKMLYASSNQKFKSGLNGIQVELQATDASEISLDEIKDRAR

SEQ ID NO: 71 - DNA, 871 bp, Zea mays
  misc_feature: Ceres CLONE ID no. 211242
  misc_feature: Ceres CDNA ID no. 29191798
  CDS (91)..(636): REFERENCED BY SEQ ID NO: 72
gccccgctccttgcctccgatccccaattcctccttcggatctcgcattcagcgcagcgcaggtgtgaaggaagggggacgcggaggaagatggggctcgcgttcgggaagctcttcagccggctcttcgccaagaaggagatgcggatcctcatgttcggcctcgacgccgccggtaaaaccaccatcctctacaagctcaagctcggcgagatcgtcaccaccatccccaccatcggtttcaatgttgaaactgttgagtacaagaacattagcttcactgtctgggatgtcgggggtcaggacaagatcagacctctttggaggcattacttccagaacacccagggtcttatctttgttgtggacagcaatgaccgtgaccgtgttgttgaagccagagatgagctccacaggatgctgaacgaggatgagctacgtgatgctgtgctgcttgtttttgccaacaagcaagatcttcccaatgccatgaatgctgctgagattactgacaagcttggattacactccctgcgccagcgacactggtacatccagagcacttgtgccacaactggcgagggtctgtatgaaggcctggactggctgtccagcaacattgcgagcaaggcttgaggcctaccttgaatgtcaaccgcgaactgactaggagctccggatgtatcatggaaactcaggacagaatcgcagttgcaacctgttagatgtcttctaccggcactatatatattttttgtttgatgtgtaatgatgttactgttcaacgtttattaccctactatactgttggatgttctttggacctgtttcatttcgcacaaggattggacttccaaaaaaaaaaaaaaaa

SEQ ID NO: 72 - protein, 181 aa, Zea mays
  misc_feature: Ceres CLONE ID no. 211242
  misc_feature: Ceres CDNA ID no. 29191798
  misc_feature: null
  misc_feature: Useful for making plants with altered Lignin content
  misc_feature: Useful for making plants with altered alkaloid content
  misc_feature (19)..(179): Pfam Name: Ras PFAM Desc: Ras family
  misc_feature: Homolog of GI Number: 34900346 NR Desc: ADP
  misc_feature: Homolog of GI Number: 21592942 NR Desc: ADP
  misc_feature: Homolog of GI Number: 32129330 NR Desc: ADP
  misc_feature: Homolog of GI Number: 37791223 NR Desc: ARF
  misc_feature: Homolog of GI Number: 21553518 NR Desc: ADP
  misc_feature: Homolog of GI Number: 50198855 NR Desc: At1g10630
  misc_feature: Homolog of GI Number: 76160984 NR Desc: ARF
  misc_feature: Homolog of GI Number: 34909214 NR Desc: putative ADP
  misc_feature: Homolog of GI Number: 39653273 NR Desc: ADP
  misc_feature: Homolog of GI Number: 6573751 NR Desc: F20B24.7
  misc_feature: Useful for increasing seed/fruit yield or modifying fruit content
  misc_feature: Useful for making ornamental plants with modified leaves
  misc_feature: Useful for sterility
MGLAFGKLFSRLFAKKEMRILMFGLDAAGKTTILYKLKLGEIVTTIPTIGFNVETVEYKNISFTVWDVGGQDKIRPLWRHYFQNTQGLIFVVDSNDRDRVVEARDELHRMLNEDELRDAVLLVFANKQDLPNAMNAAEITDKLGLHSLRQRHWYIQSTCATTGEGLYEGLDWLSSNIASKA

SEQ ID NO: 73 - DNA, 468 bp, Zea mays
  misc_feature: Ceres CLONE ID no. 211644
  misc_feature: Ceres CDNA ID no. 35383154
  CDS (1)..(405): REFERENCED BY SEQ ID NO: 74
gggtcatcctctacgcgagcgggccgcttctcccatccagccgcgcacggcgtcgccggaaccggagaagggagggaggaagggagcgcgagatggacaaggccaataagctcagcgccggagcgggggagaaggcgaccaagagcaggagccacgggtccacggcgctgttcgtcgcggtggactacgcgttcctgctcgccttcgccggcttcctcgcctacctcgtcgggtcgcggatcctcccctccgccgccggctccgcctagaccggcccgcgttcgtggatctctcttctttcttccacgttttttttggagccgatggctgcgggagcaccgggatcttgccgggtggttctcgtctcggaatcgatctcgatctgatgccgctcccgcgatgtaatctggcgacaatttgacgagaagagaactagcggtgtgtttcttggcaaaaaaaaaaaaaaaa

SEQ ID NO: 74 - protein, 58 aa, Zea mays
  misc_feature: Ceres CLONE ID no. 211644
  misc_feature: Ceres CDNA ID no. 35383154
MDKANKLSAGAGEKATKSRSHGSTALFVAVDYAFLLAFAGFLAYLVGSRILPSAAGSA

SEQ ID NO: 75 - DNA, 575 bp, Zea mays
  misc_feature: Ceres CLONE ID no. 211652
  misc_feature: Ceres CDNA ID no. 36707636
  CDS (79)..(390): REFERENCED BY SEQ ID NO: 76
atccaattcacacgatcctcactcaccacaccaaccagcaagcaaaagtcccccaatcctctcgtctccgcggcgaagatgtcggggcgcggcaagggcggcaagggcctgggcaagggcggcgcgaagcgtcaccggaaggtgctgcgcgacaacatccaggggatcacgaagccggcgatccggaggctggcgcggcggggcggcgtgaagcgcatctcggggctcatctacgaggagacccgcggcgtgctcaagatcttcctggagaacgtcatccgcgacgccgtcacctacaccgagcacgcgcgccgtaagaccgtcaccgccatggacgtcgtctacgcgcttaagcgccagggccgcaccctctacggcttcggcggctaggcctgccgcgccgcgcttcgccgtcgctccggttctggtgttgctgcagttcgcaagttgtttgtgtgggcggaaaaatactagctactgtagaactgccgtgcggtatgctgcacatgctgtgtttgtctgaagaaatgttgtcaatgctggctttctctggactaagaaaaaaaaaaaaaaaa

SEQ ID NO: 76 - protein, 103 aa, Zea mays; identical to SEQ ID NO: 8
  misc_feature: Ceres CLONE ID no. 211652
  misc_feature: Ceres CDNA ID no. 36707636
  misc_feature (66)..(92): Pfam Name: TAF PFAM Desc: TATA box binding protein associated factor
  misc_feature: Homolog of GI Number: 57106967 NR Desc:  similar to germinal histone H4 gene
  misc_feature: Homolog of GI Number: 55667113 NR Desc:  similar to germinal histone H4 gene
  misc_feature: Homolog of GI Number: 62648434 NR Desc:  similar to germinal histone H4 gene
  misc_feature: Homolog of GI Number: 76651053 NR Desc:  similar to germinal histone H4 gene
  misc_feature: Homolog of GI Number: 76657391 NR Desc:  similar to germinal histone H4 gene
  misc_feature: Homolog of GI Number: 62663604 NR Desc:  similar to Histone H2B 291B
  misc_feature: Homolog of GI Number: 74004178 NR Desc:  similar to germinal histone H4 gene
  misc_feature: Homolog of GI Number: 50728590 NR Desc:  similar to germinal histone H4 gene
  misc_feature: Homolog of GI Number: 74004256 NR Desc:  similar to germinal histone H4 gene
  misc_feature: Homolog of GI Number: 68441405 NR Desc:  similar to histone H2A

SEQ ID NO: 77 - DNA, 635 bp, Zea mays
  misc_feature: Ceres CLONE ID no. 211795
  misc_feature: Ceres CDNA ID no. 36707637
  CDS (75)..(515): REFERENCED BY SEQ ID NO: 78
agccgatttcgtgtccctgcagccacggccaccgcccaatctccacttctttatcttctccgagtaggtcgaggatgccccgcagcggcttctcggggtccttcagttcgcccaagatcgacgtcgtcatcgacatgggaaaccccttcctcaaccgcaccgtcgacggcttcctcaagatcggcgccgtcggcgcctgcaaggtggctgccgaggagaccttcgagtgcctccacaggggggatgtttcgaagcacaaggttgagcatgccctgagtaagatgtgcaaggagggcgcatattggggcactgttgctggagtttatgtgagcatggtgtacggcgtggaaagggtccgtggccgcagtgactggaagaacgcgatgatcgggggcgccttgtccggcgccctgatctccggcgccagcaacagcgacagaggcaaggtcgtcaaggacgccatcaccgccggcgcggtcgccacagccgtcgagttcatcaactgcattacctagccgagcaaggagcaactgcatttgcagtgccattgtcgtgcaaaaatatgaataaagtacttcgtcatgtccagttcataaaccaccccacaccttcagtcttcaaaaaaaaaaaaaaaa

SEQ ID NO: 78 - protein, 146 aa, Zea mays
  misc_feature: Ceres CLONE ID no. 211795
  misc_feature: Ceres CDNA ID no. 36707637
  misc_feature (18)..(146): Pfam Name: Tim17 PFAM Desc: Tim17/Tim22/Tim23 family
  misc_feature: Homolog of GI Number: 52353640 NR Desc: putative amino acid selective channel protein
  misc_feature: Homolog of GI Number: 3758827 NR Desc: amino acid selective channel protein
  misc_feature: Homolog of GI Number: 1370287 NR Desc: core protein
  misc_feature: Homolog of GI Number: 60279270 NR Desc: pom14
  misc_feature: Homolog of GI Number: 21536521 NR Desc: putative membrane channel protein
  misc_feature: Homolog of GI Number: 3927837 NR Desc: putative membrane channel protein
  misc_feature: Homolog of GI Number: 34906056 NR Desc: P0698H10.23
  misc_feature: Homolog of GI Number: 16555405 NR Desc: stress
  misc_feature: Homolog of GI Number: 34905526 NR Desc: B1146F03.20
  misc_feature: Homolog of GI Number: 48525521 NR Desc: stress
MPRSGFSGSFSSPKIDVVIDMGNPFLNRTVDGFLKIGAVGACKVAAEETFECLHRGDVSKHKVEHALSKMCKEGAYWGTVAGVYVSMVYGVERVRGRSDWKNAMIGGALSGALISGASNSDRGKVVKDAITAGAVATAVEFINCIT

SEQ ID NO: 79 - DNA, 856 bp, Zea mays
  misc_feature: Ceres CLONE ID no. 211855
  misc_feature: Ceres CDNA ID no. 29191799
  CDS (122)..(670): REFERENCED BY SEQ ID NO: 80
ctcttttaattcccccgccgctgccactcgccacgctccgcaggccgctgccactcgccacgttccaccagtcggcgccccttttccttctcactccgctggcgccggcgccgcgtgatccatggcgtcggagaagaagcaatctaacccgatgagggagatcaaggtgcagaagctggtgctcaacatctccgtcggagagagtggggatcgcctcacccgcgccgccaaggtcctggagcaactgagtggccagtcaccagtgttctctaaggctaggtacactgtccgttcctttggtatcaggcgtaatgagaagattgcctgctatgttactgtaaggggtgagaaggcaatgcagcttctggagagtggacttaaggtcaaggaatatgaactgctaaggaggaacttcagtgacacagggtgctttggtttcggaatccaggagcacattgatcttggcatcaagtatgatccttcaaccggtatctacggaatggatttctacgtcgtccttgagcgcgctgggtaccgtgtagcccgacgccgcaggtgcaagtcccgtgttgggatccagcacagggtgaccaaggaggatgctatgaagtggttccaggtcaagtacgagggtgtcatcctcaacaaggctcagggcaacacttcttagagacacatgttacagcccagccgttagacatgtttaccagtagcaacagagttttcacctctactgaagttttgtcgatctctgatgatattatttgccaagactgtttggacagaggagcttatgatgatactttgaaagctgaatgcgccgattcatttggttctgctaaaaaaaaaaaaaaaa

SEQ ID NO: 80 - protein, 182 aa, Zea mays
  misc_feature: Ceres CLONE ID no. 211855
  misc_feature: Ceres CDNA ID no. 29191799
  misc_feature (66)..(165): Pfam Name: Ribosomal_L5_C PFAM Desc: ribosomal L5P family C
  misc_feature (9)..(62): Pfam Name: Ribosomal_L5 PFAM Desc: Ribosomal protein L5
  misc_feature: Homolog of GI Number: 53749326 NR Desc: putative 60S ribosomal protein L11
  misc_feature: Homolog of GI Number: 10799832 NR Desc: ribosomal protein L11
  misc_feature: Homolog of GI Number: 21542441 NR Desc: 60S ribosomal protein L11
  misc_feature: Homolog of GI Number: 12642874 NR Desc: putative ribosomal protein L11
  misc_feature: Homolog of GI Number: 78191444 NR Desc: ribosomal protein L11
  misc_feature: Homolog of GI Number: 624938 NR Desc: ribosomal protein L16
  misc_feature: Homolog of GI Number: 24817256 NR Desc: ribosomal protein RL5
  misc_feature: Homolog of GI Number: 550544 NR Desc: ribosomal protein L16
  misc_feature: Homolog of GI Number: 7268667 NR Desc: ribosomal protein L11
  misc_feature: Homolog of GI Number: 463252 NR Desc: RL5 ribosomal protein
MASEKKQSNPMREIKVQKLVLNISVGESGDRLTRAAKVLEQLSGQSPVFSKARYTVRSFGIRRNEKIACYVTVRGEKAMQLLESGLKVKEYELLRRNFSDTGCFGFGIQEHIDLGIKYDPSTGIYGMDFYVVLERAGYRVARRRRCKSRVGIQHRVTKEDAMKWFQVKYEGVILNKAQGNTS

SEQ ID NO: 81 - DNA, 575 bp, Zea mays; identical to SEQ ID NO: 75
  misc_feature: Ceres CLONE ID no. 211882
  misc_feature: Ceres CDNA ID no. 36707636
  CDS (79)..(390): REFERENCED BY SEQ ID NO: 82

SEQ ID NO: 82 - protein, 103 aa, Zea mays; identical to SEQ ID NO: 8
  misc_feature: Ceres CLONE ID no. 211882
  misc_feature: Ceres CDNA ID no. 36707636
  misc_feature (66)..(92): Pfam Name: TAF PFAM Desc: TATA box binding protein associated factor
  misc_feature: Homolog of GI Number: 57106967 NR Desc:  similar to germinal histone H4 gene
  misc_feature: Homolog of GI Number: 55667113 NR Desc:  similar to germinal histone H4 gene
  misc_feature: Homolog of GI Number: 62648434 NR Desc:  similar to germinal histone H4 gene
  misc_feature: Homolog of GI Number: 76651053 NR Desc:  similar to germinal histone H4 gene
  misc_feature: Homolog of GI Number: 76657391 NR Desc:  similar to germinal histone H4 gene
  misc_feature: Homolog of GI Number: 62663604 NR Desc:  similar to Histone H2B 291B
  misc_feature: Homolog of GI Number: 74004178 NR Desc:  similar to germinal histone H4 gene
  misc_feature: Homolog of GI Number: 50728590 NR Desc:  similar to germinal histone H4 gene
  misc_feature: Homolog of GI Number: 74004256 NR Desc:  similar to germinal histone H4 gene
  misc_feature: Homolog of GI Number: 68441405 NR Desc:  similar to histone H2A

SEQ ID NO: 83 - DNA, 956 bp, Zea mays
  misc_feature: Ceres CLONE ID no. 213477
  misc_feature: Ceres CDNA ID no. 40350885
  CDS (208)..(639): REFERENCED BY SEQ ID NO: 84
ggagacctctgaattgacgagtcaattctctcaccgaggtcctggtgcccgaggggattcgcgaccccatcccaattcacaacgcatcgtcgtctcccacaacacgctccactaaccctagcgacagcctcgggtcgtcgtttgatccccgcggggagctctagttccgccaagcgtgcgtaccggcgtccggatccgggaccgaagatgacggagtccctggtgcggaacaagccggggatggccagcatcaaggagatgccggtggtgcaggacgggccgccgccgggcggtttcgcgcccgtgcgcttcgcccgccggatccccacctcggggcccagcgccaccgccatcttcctcaccaccttcggtgctttcgcatatggcatgtaccaggtcggccaggggaacaaggtccgccgggcgctcaaagaagagaaaattgctgctcgcagtgctatactgccgatgctccaagcagaagaggatgaaagatttgtcaaagagtggaagaagtgtcttgaggaggaggcgaggatcatgaaagacgttccagggtggaaggtcggcgagagcgtgtacaactctgggaaatggatgcccccggctactggtgagctccgccctgaggtttggtaagggcctgttgcaggcactgaatgccatcatgtcacgggggcacggataaagcttcatttttcattaaggatcagctgtttaaagacctgtatttgttgtacttgaaatctggctggttaataattggacatgtaaagccgacgtttacattgatgtaacgtgttcttgtctgctattgcttcccagcctctggtgtttcttcctgtaagtcattccgaacatgaatccttgttattgaagaaagtatgaaatataagcagcgcgtagcgtggtggcggcgcctcctgtcgcgtgtggaaataaaaaaaaaaaaaaaa

SEQ ID NO: 84 - protein, 143 aa, Zea mays
  misc_feature: Ceres CLONE ID no. 213477
  misc_feature: Ceres CDNA ID no. 40350885
  misc_feature (16)..(141): Pfam Name: GRIM PFAM Desc: GRIM
MTESLVRNKPGMASIKEMPVVQDGPPPGGFAPVRFARRIPTSGPSATAIFLTTFGAFAYGMYQVGQGNKVRRALKEEKIAARSAILPMLQAEEDERFVKEWKKCLEEEARIMKDVPGWKVGESVYNSGKWMPPATGELRPEVW

SEQ ID NO: 85 - DNA, 530 bp, Zea mays
  misc_feature: Ceres CLONE ID no. 215578
  misc_feature: Ceres CDNA ID no. 25446276
  CDS (80)..(349): REFERENCED BY SEQ ID NO: 86
ttttttggcttcgagttgctcttcctactccgcgcccggccgcctttgcctgccttcccatctcctctggtcttccgccatggcccagcccgtattcctctcctctctccgctcccgcctctgctccgcgccgccgtcgccgcaccatcacctccagcccagccgcggctaccacgtcgagctcggcgctcgcgagaaagcgcttttggaggaggatgttgctttgaagaggttcaaatcatacaagaacagtgtgaaacaggtctccaagattgggaatgttctcactttagctgttgtatttggttgtagctacgagcttggtttgttggcggcaagcataaagtgaaggaaaacacagccattattccgggaagtgatccatcagcgtagactgtcattctatcacctcgtgtttttagcctgtctgtctctctcttattttgtcgtgcaccatgtataaaataaaactaaactaggttaaccttgatttgcgaataacgttttctgttgcaaaaaaaaaaaaaaaa

SEQ ID NO: 86 - protein, 89 aa, Zea mays
  misc_feature: Ceres CLONE ID no. 215578
  misc_feature: Ceres CDNA ID no. 25446276
MAQPVFLSSLRSRLCSAPPSPHHHLQPSRGYHVELGAREKALLEEDVALKRFKSYKNSVKQVSKIGNVLTLAVVFGCSYELGLLAASIK

SEQ ID NO: 87 - DNA, 428 bp, Zea mays
  misc_feature: Ceres CLONE ID no. 217532
  misc_feature: Ceres CDNA ID no. 36707076
  CDS (2)..(277): REFERENCED BY SEQ ID NO: 88
ggacaaccccgccgccgcaacatccctagtcgctcgtcagatcctccagcaccacagcaccttcgccgccgccgccgccgccgccgccatgggtaaggttcacggatcgctggcccgcgctgggaaggtgcgcgggcagacgcccaaggttgcaaagcaggacaagaagaagaagccccgcggccgcgctcacaagcgcatgcaatacaaccgccgcttcgtcaccgccgttgttggattcggcaagaagcgcggccccaactcatcggagaagtagatctagctatggctttgtgttttattccccactagtttcctcactgatggcaacttgctgaagacttatgctattatctgtatcgatgttactgcaatactgttaagtacgatatatgcatcgtttagttgatcgaaaaaaaaaaaaaaaa

SEQ ID NO: 88 - protein, 62 aa, Zea mays; identical to SEQ ID NO: 38
  misc_feature: Ceres CLONE ID no. 217532
  misc_feature: Ceres CDNA ID no. 36707076
  misc_feature (3)..(61): Pfam Name: Ribosomal_S30 PFAM Desc: Ribosomal protein S30
  misc_feature: Homolog of GI Number: 55773694 NR Desc: 40S ribosomal protein S30
  misc_feature: Homolog of GI Number: 30102786 NR Desc: At5g56670
  misc_feature: Homolog of GI Number: 25295582 NR Desc: 40S ribosomal protein S30
  misc_feature: Homolog of GI Number: 6679753 NR Desc: Finkel
  misc_feature: Homolog of GI Number: 15822932 NR Desc: Finkel
  misc_feature: Homolog of GI Number: 36968262 NR Desc: Finkel
  misc_feature: Homolog of GI Number: 60678256 NR Desc: Finkel
  misc_feature: Homolog of GI Number: 47682823 NR Desc: MGC80045 protein
  misc_feature: Homolog of GI Number: 50603825 NR Desc: MGC89853 protein
  misc_feature: Homolog of GI Number: 63694872 NR Desc:  similar to Finkel

SEQ ID NO: 89 - DNA, 700 bp, Zea mays
  misc_feature: Ceres CLONE ID no. 218054
  misc_feature: Ceres CDNA ID no. 36707227
  CDS (86)..(424): REFERENCED BY SEQ ID NO: 90
gcaactcgcaacacagtcacagacgccgccgcccaaagaaagacgtcaactccaggagacaagacagtgagaactgaagagaaggatgggcttcgagaagcagatcctgagatccggcaccggccccaagccgataaagggccagaaggtcaccgttcactgcaccggctacgggaaggatcgtgatctgtccaagaaattttggagcaccaaggaccctgggcagcagccattcagtttcagcattggtcagggttcagtgatcaaaggatgggacgagggagttatgaccatgcaagtgggtgaagttgctcgtatccagtgcacgcctgattatgcttatggagccggcgggttcccagcctggggaattcaaccaaactcagtgcttgtgttcgagattgaagtcctcagtgcccagtaattcgcatctgtcagctatggaaacgttggccatgcttctcaagtaatgaaataattccgttgtcacctcatgctacatacagcagattggtgttacgagttaaatcctgtgaaactttagcattctgtaaccgtggatgtcgagtttatggagttccttgtgtggcgcctcaagtcaagttctcgtcaaagattgtaatctgatggcttccattgtgacttgtaggcggctgcaataaacttacttgatgcaattattacaaaaaaaaaaaaaaaa

SEQ ID NO: 90 - protein, 112 aa, Zea mays
  misc_feature: Ceres CLONE ID no. 218054
  misc_feature: Ceres CDNA ID no. 36707227
  misc_feature (11)..(109): Pfam Name: FKBP_C PFAM Desc: FKBP
  misc_feature: Homolog of GI Number: 54111525 NR Desc: immunophilin
  misc_feature: Homolog of GI Number: 50913003 NR Desc: putative immunophilin
  misc_feature: Homolog of GI Number: 45544871 NR Desc: CONSTANS interacting protein 3
  misc_feature: Homolog of GI Number: 73919361 NR Desc: Peptidylprolyl isomerase FKBP12 (12 kDa FKBP) (FKBP (Immunophilin FKBP12) (Peptidyl
  misc_feature: Homolog of GI Number: 20148471 NR Desc: immunophilin
  misc_feature: Homolog of GI Number: 21536548 NR Desc: immunophilin
  misc_feature: Homolog of GI Number: 67083813 NR Desc: FKBP
  misc_feature: Homolog of GI Number: 68129668 NR Desc: peptidyl
  misc_feature: Homolog of GI Number: 70874204 NR Desc: peptidyl
  misc_feature: Homolog of GI Number: 70870933 NR Desc: peptidyl
MGFEKQILRSGTGPKPIKGQKVTVHCTGYGKDRDLSKKFWSTKDPGQQPFSFSIGQGSVIKGWDEGVMTMQVGEVARIQCTPDYAYGAGGFPAWGIQPNSVLVFEIEVLSAQ

SEQ ID NO: 91 - DNA, 1480 bp, Zea mays
  misc_feature: Ceres CLONE ID no. 218057
  misc_feature: Ceres CDNA ID no. 36707228
  CDS (1)..(1254): REFERENCED BY SEQ ID NO: 92
acatctcatcttcgtctgtgttcttgggcgtacgcggacacagccccgatccgaatcgtcgtccttgcgagcctcgccgatcccccactcccctcccctcgcttcaagatgcagatctttgtgaagaccctcaccggcaagactatcaccctcgaggtggagtcttctgacaccattgacaatgtcaaggctaagatccaggacaaggagggcatccctcctgaccagcagcggcttatcttcgccggcaagcagcttgaggacggacgcacacttgctgactacaacatccagaaggagtcaaccctccacttggtgctgcgccttaggggaggcatgcagatctttgtcaagaccttgactggcaagacaatcacccttgaggtggagtcctcagacaccattgacaatgtcaaggcaaagatccaggacaaggagggcatcccacctgaccagcaacgtctcatctttgccggcaagcagttggaggatgggaggacccttgctgactacaacatccagaaggagagcaccctccacttggtgctgcgtcttaggggtggtatgcagatctttgtgaaaacccttactggcaagaccatcactcttgaggtggagtcttcagataccattgacaatgtcaaggccaagatccaggacaaggagggcatcccgccggaccagcagcgtcttatctttgccggcaagcagctggaggatggacgcacccttgcggattacaacattcagaaggagagcaccctccacctggtgctgcgcctcaggggaggaatgcagatcttcgtgaagacattgactggcaagaccatcaccttggaggttgagagctccgacaccattgataatgtgaaggccaagatccaggacaaggagggtatccccccggaccagcagcggctgatcttcgccggcaagcagctggaggatggtcgcaccttggctgactacaacatccagaaggagagcaccctccatctggtgctccgcctgaggggcggtatgcagatctttgtgaagaccttgactggcaagaccataaccctggaggttgagagctctgacaccatcgacaacgtgaaggctaagatccaggacaaggaggggattcccccagaccagcagcgtctgatcttcgccggcaagcagctggaggatggtcgcacccttgcagactacaatatccagaaggagagcaccctccacctggtgctccgtcttcgcggtggttattaagccatcagtcgttgaagctgctgctgtatctgggttatctagtgtctctgccattgcccatggatggtgctgtctttcaaagtatttgtatggtttgtgtcgtgagtcgtgactgagctggtttcatggaccagttgtgttctcgttacccaaaactatcgtgcgaccgcatatggcttaatcatgaataaatgttgtttgaatttaaacaaaaaaaaaaaaaaaa

SEQ ID NO: 92 - protein, 381 aa, Zea mays
  misc_feature: Ceres CLONE ID no. 218057
  misc_feature: Ceres CDNA ID no. 36707228
  misc_feature (1)..(18): Pfam Name: Trigger_N PFAM Desc: Bacterial trigger factor protein
  misc_feature (153)..(170): Pfam Name: Trigger_N PFAM Desc: Bacterial trigger factor protein
  misc_feature (229)..(246): Pfam Name: Trigger_N PFAM Desc: Bacterial trigger factor protein
  misc_feature (305)..(322): Pfam Name: Trigger_N PFAM Desc: Bacterial trigger factor protein
  misc_feature (77)..(94): Pfam Name: Trigger_N PFAM Desc: Bacterial trigger factor protein
  misc_feature: Homolog of GI Number: 15982787 NR Desc: AT4g05320/C17L7_240
  misc_feature: Homolog of GI Number: 51963880 NR Desc: PREDICTED OJ9003_G05.28 gene product
  misc_feature: Homolog of GI Number: 7267292 NR Desc: polyubiquitin
  misc_feature: Homolog of GI Number: 16660462 NR Desc: polyubiquitin OUB2
  misc_feature: Homolog of GI Number: 22655101 NR Desc: polyubiquitin UBQ10
  misc_feature: Homolog of GI Number: 62083359 NR Desc: polyubiquitin
  misc_feature: Homolog of GI Number: 52076878 NR Desc: polyubiquitin
  misc_feature: Homolog of GI Number: 288114 NR Desc: polyubiquitin
  misc_feature: Homolog of GI Number: 902586 NR Desc: ubiquitin
  misc_feature: Homolog of GI Number: 2760347 NR Desc: ubiquitin
MQIFVKTLTGKTITLEVESSDTIDNVKAKIQDKEGIPPDQQRLIFAGKQLEDGRTLADYNIQKESTLHLVLRLRGGMQIFVKTLTGKTITLEVESSDTIDNVKAKIQDKEGIPPDQQRLIFAGKQLEDGRTLADYNIQKESTLHLVLRLRGGMQIFVKTLTGKTITLEVESSDTIDNVKAKIQDKEGIPPDQQRLIFAGKQLEDGRTLADYNIQKESTLHLVLRLRGGMQIFVKTLTGKTITLEVESSDTIDNVKAKIQDKEGIPPDQQRLIFAGKQLEDGRTLADYNIQKESTLHLVLRLRGGMQIFVKTLTGKTITLEVESSDTIDNVKAKIQDKEGIPPDQQRLIFAGKQLEDGRTLADYNIQKESTLHLVLRLRGGY

SEQ ID NO: 93 - DNA, 824 bp, Zea mays
  misc_feature: Ceres CLONE ID no. 218079
  misc_feature: Ceres CDNA ID no. 36705512
  CDS (71)..(358): REFERENCED BY SEQ ID NO: 94
aagtcgtcgtcttgctttgccaatccgtcgctccacctgaacacaccggcgaagaggaggcgaagaagcgatgggcgtgaccaaggaggacgtcgaggcggccatcacctctgctctcagcccttccaatctcgtggtgacggacacgtccggagggtgtggcgcgagctacgagatcgaggtggtgtcggagaagttcgaggggaagcggctgctggagaggcaccggatggtgaacaccgcgctggcgtctcacatggcggagatccacgccgtctccatcaagaaggcgctcaccccggctcaggcccagccccaggcccagccggagccggccgccgataagccccaggcttaagtgcttaacaccccccaaaacggtttgatcccatatgccgatgcacgattacattggctatctgcttgaataatgcggcggatgcacttgctaaattgcaggatgttatccttgactgattagaaacttctgcaccgtgcatttaacttctgtgtcactgtgtgtgtgttctggatgcttctgccctggtcgtttgctcgagactgtgtgttgcagttcatgctgttaatgttctgccagggtggggttttcagtcctggaatttttatatttgactgttgctatgtctttccttgcttgtaggggtaaggggtttattctttaaccttgtggattagattactgtatccatcatggtctgcagtggggagtggggtgtgatgatgatggctgcatcttgtttacacaacattttaatttcctgattgatgatgccacaatcaagatcaaaaaaaaaaaaaaaaaa

SEQ ID NO: 94 - protein, 95 aa, Zea mays
  misc_feature: Ceres CLONE ID no. 218079
  misc_feature: Ceres CDNA ID no. 36705512
  misc_feature (3)..(80): Pfam Name: BolA PFAM Desc: BolA
  misc_feature: Homolog of GI Number: 34908592 NR Desc: P0505D12.24
  misc_feature: Homolog of GI Number: 56785200 NR Desc: BolA
  misc_feature: Homolog of GI Number: 66559220 NR Desc:  similar to GA17237
  misc_feature: Homolog of GI Number: 76653515 NR Desc:  similar to BolA
  misc_feature: Homolog of GI Number: 73622130 NR Desc: BolA
  misc_feature: Homolog of GI Number: 55643705 NR Desc:  similar to My016 protein
  misc_feature: Homolog of GI Number: 62641461 NR Desc:  similar to RIKEN cDNA 1110025L05
  misc_feature: Homolog of GI Number: 62646419 NR Desc:  similar to Chain A
  misc_feature: Homolog of GI Number: 45188270 NR Desc: ADR398Wp
MGVTKEDVEAAITSALSPSNLVVTDTSGGCGASYEIEVVSEKFEGKRLLERHRMVNTALASHMAEIHAVSIKKALTPAQAQPQAQPEPAADKPQA

SEQ ID NO: 95 - DNA, 596 bp, Zea mays
  misc_feature: Ceres CLONE ID no. 218138
  misc_feature: Ceres CDNA ID no. 36707032
  CDS (85)..(414): REFERENCED BY SEQ ID NO: 96
ctagaatccaccctgccgcctcaccgcctctctcaatctgataccgcagatccgtcgtccggtgagtggaagccgcacgaacccatggcctccggcgagcttgcctgcacctacgccgctctcatcctcagcgacgatggcatcgccatcaccgccgagaagatcgccacgatcgtgaaggcggccaacatcaaggtcgagtcctactggccggccctcttcgccaagctcctggagaagcgcaacgtcgaggacctcatcctctccgttggatctggtggcggagctgctccagttgctgctgccgcacctgctggtggtgctgcggctgctgctgccccggctgtcgaggagaagaaggaagaggccaaggaggagtctgatgacgacatgggcttcagcctgttcgactgaggagaccccctcacccagccattagcaaatttcacttgtgctgtcaaagactatcttgtcttatgttatgtctctaggcttttgttacaactacccaagttttgagtttttgagatgtggctatggcatgaactcaaaccatcttatgagggtgaaacctgtttccaaaaaaaaaaaaaaaa

SEQ ID NO: 96 - protein, 109 aa, Zea mays
  misc_feature: Ceres CLONE ID no. 218138
  misc_feature: Ceres CDNA ID no. 36707032
  misc_feature (21)..(108): Pfam Name: Ribosomal_60s PFAM Desc: 60s Acidic ribosomal protein
  misc_feature: Homolog of GI Number: 2431769 NR Desc: acidic ribosomal protein P1a
  misc_feature: Homolog of GI Number: 7440758 NR Desc: acidic ribosomal protein P1
  misc_feature: Homolog of GI Number: 50940517 NR Desc: putative acidic ribosomal protein P1a
  misc_feature: Homolog of GI Number: 57471718 NR Desc: ribosomal protein P1
  misc_feature: Homolog of GI Number: 78191426 NR Desc: acidic ribosomal protein P1a
  misc_feature: Homolog of GI Number: 21592477 NR Desc: acidic ribosomal protein
  misc_feature: Homolog of GI Number: 20465333 NR Desc: putative 60S acidic ribosomal protein P1
  misc_feature: Homolog of GI Number: 20258887 NR Desc: putative acidic ribosomal protein
  misc_feature: Homolog of GI Number: 21553441 NR Desc: 60S acidic ribosomal protein P1
  misc_feature: Homolog of GI Number: 21554797 NR Desc: acidic ribosomal protein p1
MASGELACTYAALILSDDGIAITAEKIATIVKAANIKVESYWPALFAKLLEKRNVEDLILSVGSGGGAAPVAAAAPAGGAAAAAAPAVEEKKEEAKEESDDDMGFSLFD

SEQ ID NO: 97 - DNA, 725 bp, Zea mays
  misc_feature: Ceres CLONE ID no. 218145
  misc_feature: Ceres CDNA ID no. 36707229
  CDS (101)..(460): REFERENCED BY SEQ ID NO: 98
atcacacactaatcaacaagcaggaccagctagctagctcctcccactgctatcacccgggccccggccagccatctcgctgaaagagaaaagcgcagccatgaagactactagctcgggcattgcagtcgtcctcctggtggcgatgctggcagtccagtccgcggtggccgacatctcgtgctccgacgtgctcaacgacctgtcgccgtgcctgcccttcctgcagggcaaggcagccaaacccagcgagagcaacaaccagtgctgcgacggcgtgaggaccctgtacgcggcggccgacaccaggcccgacaggcaggccacgtgccggtgcctcaaggcggcctacgttcaggtccacgctgtgctctccgcggcgcaggagctgcccggcgactgcggcctctcgctgtcctacaacatcacccccgacatcgactgcgacaagatcgaatgaagggatactgttcccttaccagaatccatacgacgggatggtgatgttcagtgccctgctagcagtaggctgcatctgcactgagtgactagaataaaggatttggtgatgtttgtgctgattggtgtgttcgcctgtaatcgtgtgatgccgtcgttggcttcttatatccgtgtctaatctcgcaagtgctcgtgtttgcaactataccatttataatgtcaacttatcatgcttgtcattcgatacaaaaaaaaaaaaaaaa

SEQ ID NO: 98 - protein, 119 aa, Zea mays
  misc_feature: Ceres CLONE ID no. 218145
  misc_feature: Ceres CDNA ID no. 36707229
  misc_feature (28)..(115): Pfam Name: Tryp_alpha_amyl PFAM Desc: Protease inhibitor/seed storage/LTP family
  misc_feature: Homolog of GI Number: 31324341 NR Desc: putative lipid transfer protein
  misc_feature: Homolog of GI Number: 16903206 NR Desc: lipid transfer protein precursor
  misc_feature: Homolog of GI Number: 11095210 NR Desc: lipid transfer protein 3 precursor
  misc_feature: Homolog of GI Number: 37625029 NR Desc: lipid transfer protein
  misc_feature: Homolog of GI Number: 66271047 NR Desc: FSLTP3
  misc_feature: Homolog of GI Number: 66271045 NR Desc: FSLTP2
  misc_feature: Homolog of GI Number: 7012722 NR Desc: lipid transfer protein precursor
  misc_feature: Homolog of GI Number: 12659322 NR Desc: lipid transfer protein
  misc_feature: Homolog of GI Number: 28194086 NR Desc: lipid transfer protein isoform 4
  misc_feature: Homolog of GI Number: 19039 NR Desc: LTP 1
MKTTSSGIAVVLLVAMLAVQSAVADISCSDVLNDLSPCLPFLQGKAAKPSESNNQCCDGVRTLYAAADTRPDRQATCRCLKAAYVQVHAVLSAAQELPGDCGLSLSYNITPDIDCDKIE

SEQ ID NO: 99 - DNA, 752 bp, Zea mays
  misc_feature: Ceres CLONE ID no. 218153
  misc_feature: Ceres CDNA ID no. 36707230
  CDS (85)..(432): REFERENCED BY SEQ ID NO: 100
gtgcccgcggtgctagtgacggttgctctagatccgttcatcctggtggttttgtgaggtcgaaagcggcgagcgaattagaagatgctggacaagctgtgggacgacgtggtggccgggcctcgcccggagacgggcctcgagaagctccgcaaggccaccaccgcccgcccgctcgtcatcaacaaagacgcggacggcggcagctacaagcgggcgcagtcgacgccgtcgaccccgacgacgccggtgacgccgtcgtcgtcgacgacgccgcgcggcgccggcaacgtgtggcgcagcgtcttccacccggggagcaacctggccaccaagggcatgggcgccaacctcttcgaccggccgcagcccaactcccccaccgtctacgactggctctacagcgacgagaccaggagcaaccaccgctagatcgggcgagatggatggacagtgaagaggccatgtttgctggtccttgtggttatctaaaacgcacgcatgctctattatagctagtcatcactatatatatacttgtgtttgtgtattgttgttcttgttctgctggtgtctccgccgtttaatttgacctatgttatggagtgagtgatatatgtgccgtcactcctagtatatagtagtgagtgactagttggtatgtgtagtactgtactatcttttctccatatgcatgttttgccagcgcgtaatgaatgtaatgtcagtactgttaaaaaaaaaaaaaaaaa

SEQ ID NO: 100 - protein, 115 aa, Zea mays
  misc_feature: Ceres CLONE ID no. 218153
  misc_feature: Ceres CDNA ID no. 36707230
  misc_feature (5)..(115): Pfam Name: Auxin_repressed PFAM Desc: Dormancy/auxin associated protein
  misc_feature: Homolog of GI Number: 77552436 NR Desc: dormancy
  misc_feature: Homolog of GI Number: 77552437 NR Desc: dormancy
  misc_feature: Homolog of GI Number: 62526583 NR Desc: auxin
  misc_feature: Homolog of GI Number: 71040687 NR Desc: auxin
  misc_feature: Homolog of GI Number: 2605887 NR Desc: dormancy
  misc_feature: Homolog of GI Number: 58700653 NR Desc: auxin
  misc_feature: Homolog of GI Number: 11386111 NR Desc: auxin
  misc_feature: Homolog of GI Number: 56606540 NR Desc: dormancy
  misc_feature: Homolog of GI Number: 7488618 NR Desc: dormancy
  misc_feature: Homolog of GI Number: 13430203 NR Desc: auxin
MLDKLWDDVVAGPRPETGLEKLRKATTARPLVINKDADGGSYKRAQSTPSTPTTPVTPSSSTTPRGAGNVWRSVFHPGSNLATKGMGANLFDRPQPNSPTVYDWLYSDETRSNHR

SEQ ID NO: 101 - DNA, 1365 bp, Zea mays
  misc_feature: Ceres CLONE ID no. 218159
  misc_feature: Ceres CDNA ID no. 25445545
  CDS (249)..(1070): REFERENCED BY SEQ ID NO: 102
aaacaagggatgtcaaaactcaacaggacaaccgggtacacgtcgatgtgatatgactatatgaggcaccagcttatggatctttctgtgcctactaggctactaccgtttttgcctagtccagcagtccagccctggccacaattaaggtttctctaatttgactgccacaggcacctggttttcttgctgcttccgctgtttcttcctcaacctctccagctcagctgccgcaggctgcgactgccatggattccaaatccatggaagcatttgtggcaagtgaggcctccgtcttcatgaatcagccccctccacatatgtctagaccaacaattattatcaagctcattttgtggttgctgtggaccatcacccacttagcaatcagcattttaaatttatggtctcatctgatttatagtctagactgctatcttatttcatctggattgttgcggaagtatcagaatcttcatctgggtagactgaagtacttggctattgtggtagatagcaaagaagctaaaagtactgagaaggtcaagcgactgttacgctggctctcatctatgggtgtgaagtatgtatgtctctacgacattgagggagttctgaaaaaatcttttgaacctgctgtgaatgtttcaagagataggactgcaggagaacattttggcattggagcaaacatcaaagatctacactgtagccaaagagagatgatgatagattgtctttctggttctgatggcaaggagggtattgctaaagcagccagtttactttgctcaacttacttcaacggtgatactcatggagatggcaaaaggaaaccagcatttacagaagctgacatggctgctgcactgaaggctgtaggttgtggtggaccagaacccgatcttcttctcatgtatggtcctgctagatgccatttaggatttcctgcatggagattacggtatactgaaattatgtatatggggccactgaaatcaatgaaatatggtgcaattgtgaaagccttatataacttctcaaagaaacaccaaaattatgggaaatgatagctgatactagtttaaagaagaccatttgatcatggagaatcgacaccttggaactactggacagttactctgcggcccgcatccatttgcttctgctgctgcttactggagcacaggagtatttaacgttagacataccattgacacccatttcatgtttgcttgtaataagataaaaagtgctgtcgatagaacatacatacgggacaacatcccactgaaagttccacccatagcaatgagcaatgaaagaaacacaagaaatcttaccatctcaaaaaaaaaaaaaaaa

SEQ ID NO: 102 - protein, 273 aa, Zea mays
  misc_feature: Ceres CLONE ID no. 218159
  misc_feature: Ceres CDNA ID no. 25445545
  misc_feature: Homolog of GI Number: 4835781 NR Desc: F25C20.9
  misc_feature: Homolog of GI Number: 73946289 NR Desc:  similar to CG4775
  misc_feature: Homolog of GI Number: 50539772 NR Desc: zgc:92136
MDSKSMEAFVASEASVFMNQPPPHMSRPTIIIKLILWLLWTITHLAISILNLWSHLIYSLDCYLISSGLLRKYQNLHLGRLKYLAIVVDSKEAKSTEKVKRLLRWLSSMGVKYVCLYDIEGVLKKSFEPAVNVSRDRTAGEHFGIGANIKDLHCSQREMMIDCLSGSDGKEGIAKAASLLCSTYFNGDTHGDGKRKPAFTEADMAAALKAVGCGGPEPDLLLMYGPARCHLGFPAWRLRYTEIMYMGPLKSMKYGAIVKALYNFSKKHQNYGK

SEQ ID NO: 103 - DNA, 731 bp, Zea mays
  misc_feature: Ceres CLONE ID no. 218160
  misc_feature: Ceres CDNA ID no. 36707231
  CDS (68)..(520): REFERENCED BY SEQ ID NO: 104
acatttcgactctcaactcccaaggtccctttttttttctcgatctggaagcgccgcagtagcagccatggacgtgagcggagcaggcggtaaggcgaagaagggcgcggcggggcgcaaggccggcgggccgacgaagaagtcggtgtcgcggtcctccagggccgggctgcagttccccgtcagccgcgtcgggcggtacctcaaaaagggccggtacgcgcagcgtgtaggcacgggtgcccccgtctacctcgccgccgtcctggagtacctcgcggccgaggtgctcgagctcgccggcaacgccgcaagggacaacaagaagacgcgcatcattccgcgccacgtgctcctcgccatccgcaacgacgaggagctcggcaagctgctggccggcgtcaccatcgcccacggcggcgtcctccccaacatccacactgtgctcctccccaagaaggtggccgagaaggcggcaaaggagcccaagaaggccgccaagtcccccaagaaggcgtagagtgatctcctctcttagagggggcgggattctccattagaacactattaccattagcgatcgtgcagttagactagaccatgtttagtgtagatccgtaatgttcttgtccctgctgccatctggaacggtttatctagtacatccgtgcattttccttgctaattgcaaaaaagtgtcctaatcttttgttccaaaaaaaaaaaaaaaa

SEQ ID NO: 104 - protein, 150 aa, Zea mays
  misc_feature: Ceres CLONE ID no. 218160
  misc_feature: Ceres CDNA ID no. 36707231
  misc_feature (29)..(104): Pfam Name: Histone PFAM Desc: Core histone H2A/H2B/H3/H4
  misc_feature: Homolog of GI Number: 729671 NR Desc: Histone H2A
  misc_feature: Homolog of GI Number: 34914498 NR Desc: putative histone H2A
  misc_feature: Homolog of GI Number: 47026919 NR Desc: histone H2A
  misc_feature: Homolog of GI Number: 47026912 NR Desc: histone H2A
  misc_feature: Homolog of GI Number: 7649159 NR Desc: histone H2A
  misc_feature: Homolog of GI Number: 122006 NR Desc: Histone H2A
  misc_feature: Homolog of GI Number: 121982 NR Desc: Histone H2A.2.2
  misc_feature: Homolog of GI Number: 50931693 NR Desc: putative histone H2A
  misc_feature: Homolog of GI Number: 121974 NR Desc: Histone H2A.2.1
  misc_feature: Homolog of GI Number: 68441405 NR Desc:  similar to histone H2A
MDVSGAGGKAKKGAAGRKAGGPTKKSVSRSSRAGLQFPVSRVGRYLKKGRYAQRVGTGAPVYLAAVLEYLAAEVLELAGNAARDNKKTRIIPRHVLLAIRNDEELGKLLAGVTIAHGGVLPNIHTVLLPKKVAEKAAKEPKKAAKSPKKA

SEQ ID NO: 105 - DNA, 729 bp, Zea mays
  misc_feature: Ceres CLONE ID no. 218164
  misc_feature: Ceres CDNA ID no. 36707232
  CDS (101)..(460): REFERENCED BY SEQ ID NO: 106
atcacacactaatcaacaagcaggaccagctagctagctcctcccactgctatcacccgggccccggccagccatctcgctgaaagagaaaagcgcagccatgaagactactagctcgggcattgcagtcgtcctcctggtggcgatgctggcagtccagtccgcggtggccgacatctcgtgctccgacgtgctcaacgacctgtcgccgtgcctgcccttcctgcagggcaaggcagccaaacccagcgagagcaacaaccagtgctgcgacggcgtgaggaccctgtacgcggcggcggacaccaggcccgacaggcaggccacgtgccggtgcctcaaggcggcctacgttcaggtccacgctgtgctctccgcggcgcaggagctgcccggcgactgcggcctctcgctgtcctacaacatcacccccgacatcgactgcgacaagatcgaatgaagggatactgttcccttaccagaatccatacgacgggatggtgatgttcagtgccctgctagcagtaggctgcatctgcactgagtgactagaataaaggatttggtgatgtttgtgctgattggtgtgttcgcctgtaatcgtgtgatgccgtcgttggcttcttatatccgtgtctaatctcgcaagtgctcgtgtttgcaactataccatttataatgtcaacttatcatgcttgtcattcgattcaataaaaaaaaaaaaaaaaa

SEQ ID NO: 106 - protein, 119 aa, Zea mays; identical to SEQ ID NO: 98
  misc_feature: Ceres CLONE ID no. 218164
  misc_feature: Ceres CDNA ID no. 36707232
  misc_feature (28)..(115): Pfam Name: Tryp_alpha_amyl PFAM Desc: Protease inhibitor/seed storage/LTP family
  misc_feature: Homolog of GI Number: 31324341 NR Desc: putative lipid transfer protein
  misc_feature: Homolog of GI Number: 16903206 NR Desc: lipid transfer protein precursor
  misc_feature: Homolog of GI Number: 11095210 NR Desc: lipid transfer protein 3 precursor
  misc_feature: Homolog of GI Number: 37625029 NR Desc: lipid transfer protein
  misc_feature: Homolog of GI Number: 66271047 NR Desc: FSLTP3
  misc_feature: Homolog of GI Number: 66271045 NR Desc: FSLTP2
  misc_feature: Homolog of GI Number: 7012722 NR Desc: lipid transfer protein precursor
  misc_feature: Homolog of GI Number: 12659322 NR Desc: lipid transfer protein
  misc_feature: Homolog of GI Number: 28194086 NR Desc: lipid transfer protein isoform 4
  misc_feature: Homolog of GI Number: 19039 NR Desc: LTP 1

SEQ ID NO: 107 - DNA, 700 bp, Zea mays
  misc_feature: Ceres CLONE ID no. 218166
  misc_feature: Ceres CDNA ID no. 36707199
  CDS (64)..(453): REFERENCED BY SEQ ID NO: 108
gctaggtttactctcccctcctcttccacggccgcgcctgcgacacccatccgccgccacgccatggccaagtacaacgtggtgcagaagaacaagcgccagtgcaatcaggaccgcaagcgcgccgcgcatggggagcccgggaccggcaagctcaagcagcggaccgcgcccgtctccatgtccggcaagcggaagaagaagctcgagcgccgcctcaaccggaagcagaaagaggctgcgatgattaaggcgctggagaacaacatgggggatgtcgacatggtctcagttgaagagtcttcagaagctgcaaagggcaagtcccaagtgaagttcagtgtgaagaaaaactcaagaatacagataaagagattaaagggcaaaggcaggaagaaagccaaaaatgcaaaaccacctgccaaggagaaagttgatgccatggtagaatgacagttgatgccatggtagcatgacggacaagactacatacatccatccctttgtatgttttctcagagtttgcagcatggaccgacctcaccgaacactggcgcgtgtctcttgcatcttctgcctgaatgttaaatagaagctacttaggcctggtgttaatgtacttcaaacatgaatctacctttaatagtggactatgcgaatttgttcatgttcttattgcgtcaaaaaaaaaaaaaaaaaa

SEQ ID NO: 108 - protein, 129 aa, Zea mays
  misc_feature: Ceres CLONE ID no. 218166
  misc_feature: Ceres CDNA ID no. 36707199
MAKYNVVQKNKRQCNQDRKRAAHGEPGTGKLKQRTAPVSMSGKRKKKLERRLNRKQKEAAMIKALENNMGDVDMVSVEESSEAAKGKSQVKFSVKKNSRIQIKRLKGKGRKKAKNAKPPAKEKVDAMVE

SEQ ID NO: 109 - DNA, 578 bp, Zea mays
  misc_feature: Ceres CLONE ID no. 218169
  misc_feature: Ceres CDNA ID no. 36707033
  CDS (64)..(375): REFERENCED BY SEQ ID NO: 110
cacacagcaagccagcagagcagaaagcagccgcagccccagcccccacaagacgaggcaacaatggcgctagaagcagccaccgccccccgcgcactcctcgccgcgtgcctcgtcctgctggtcctcggcggcggcaccggcccgtcgtcggtgctgcgcggcgccggggcgcaggccggcgggcagtgcctgccgcagctgaaccgcctcctggcgtgccgcgcgtacctggtgcccggcgcgccggaccccagcgcggactgctgcagcgcgctgagcgccgtgtcgcacgagtgcgcctgcagcaccatgggcatcatcaacagcctgcccggccggtgccacctcgcccaagccaactgctccgcttgaagcagggacctggcacgcgtgctgcaatggatggcaggaggggagaggaataagaagtgtttccatttcacagtgagagcagtcgagctccaacgttgtcgtcgtcgtcgtcttcttcttttgatattcagactctgtcttgcggtctatatcatcagcataataataataaaataagtaaaaccaaaaaaaaaaaaaaaaaa

SEQ ID NO: 110 - protein, 103 aa, Zea mays; identical to SEQ ID NO: 62
  misc_feature: Ceres CLONE ID no. 218169
  misc_feature: Ceres CDNA ID no. 36707033
  misc_feature (43)..(101): Pfam Name: Tryp_alpha_amyl PFAM Desc: Protease inhibitor/seed storage/LTP family
  misc_feature: Homolog of GI Number: 6689676 NR Desc: LTP
  misc_feature: Homolog of GI Number: 51965070 NR Desc: PREDICTED OJ1323_A06.22 gene product
  misc_feature: Homolog of GI Number: 1628471 NR Desc: Men
  misc_feature: Homolog of GI Number: 52077308 NR Desc: YY1 protein precursor
  misc_feature: Homolog of GI Number: 3378527 NR Desc: anther specific protein
  misc_feature: Homolog of GI Number: 520864 NR Desc: M7
  misc_feature: Homolog of GI Number: 452591 NR Desc: ORF
  misc_feature: Homolog of GI Number: 19152 NR Desc: 108 protein

SEQ ID NO: 111 - DNA, 739 bp, Zea mays
  misc_feature: Ceres CLONE ID no. 218170
  misc_feature: Ceres CDNA ID no. 36705513
  CDS (88)..(492): REFERENCED BY SEQ ID NO: 112
acaacacaacaacaacaaccatctccaacgcagcaagcagacacagggacaggcaggcagcgagtgcaaccgcgagagcgatcagcgatgggctccttcttctcgaccttagtgacgccccctccgcccgccgccgacgacccgaactgcgccgtggtggccgcgcactccaaggccacctacgacgagcagtgggcggcccacaagagcagcagcaagctgatggtgatcgacttctcggcgtcctggtgcgggccctgccgcttcatcgagccggccttcaaggagctggcctcccgcttcaccgatgccatcttcatcaaggtcgacgtcgacgagctcgcggaggtcgcaaggacatggaaggtagaggcgatgccaacgttcgtgctggtcaaggatgggaaggaggtaggccgtgtgattggggctaagaaggacgagcttgagaggaagatcaggatgttcgtcacgtcatcttcctcgtcctaacttagcagtgcatacactcccaccttcttactggtttctcgactccagtggttcacctgggacggggttgctgaaatggttcccttctctgaatactgaaaaatcaaaaaaagaagtatatgaaaaaatgatggtagacgtgtctgggtcaataagagtttctgaaacttggatttgtatgtgtcagtctctgtgttctgtttccaaggaatggatcatgtgagtttggaaaaaaaaaaaaaaaaaa

SEQ ID NO: 112 - protein, 134 aa, Zea mays
  misc_feature: Ceres CLONE ID no. 218170
  misc_feature: Ceres CDNA ID no. 36705513
  misc_feature (23)..(129): Pfam Name: Thioredoxin PFAM Desc: Thioredoxin
  misc_feature: Homolog of GI Number: 34897150 NR Desc: putative thioredoxin
  misc_feature: Homolog of GI Number: 50934869 NR Desc: putative thioredoxin
  misc_feature: Homolog of GI Number: 53748519 NR Desc: thioredoxin 3
  misc_feature: Homolog of GI Number: 33621080 NR Desc: thioredoxin H2
  misc_feature: Homolog of GI Number: 27466896 NR Desc: thioredoxin h
  misc_feature: Homolog of GI Number: 46326970 NR Desc: thioredoxin
  misc_feature: Homolog of GI Number: 82407383 NR Desc: Chain A
  misc_feature: Homolog of GI Number: 50934769 NR Desc: Thioredoxin H
  misc_feature: Homolog of GI Number: 13624884 NR Desc: thioredoxin h
  misc_feature: Homolog of GI Number: 25990392 NR Desc: thioredoxin h
MGSFFSTLVTPPPPAADDPNCAVVAAHSKATYDEQWAAHKSSSKLMVIDFSASWCGPCRFIEPAFKELASRFTDAIFIKVDVDELAEVARTWKVEAMPTFVLVKDGKEVGRVIGAKKDELERKIRMFVTSSSSS

SEQ ID NO: 113 - DNA, 838 bp, Zea mays
  misc_feature: Ceres CLONE ID no. 218188
  misc_feature: Ceres CDNA ID no. 36707200
  CDS (60)..(506): REFERENCED BY SEQ ID NO: 114
tagtccagaccatagcctgcagccttccatccacgaactcccgttctccatttccagccatggcggtgtcgatcgagctcaccaaggagtacggctacgtcgtgctggtgctggtggcctatgtcttcctcaacctttggatgggcttccaggtcggcaaggcccgcagaaagtacaaggtgttctaccccaccatgtacgccatcgagtcggagaacaaggacgccaagctcttcaactgcgtgcagagggggcaccagaactctctagagtggatgcccgttttcttcgtcatactgctgctgggcggtctgcagcacccgaccatcgccgccggtctgggcggcatctacatcgtcgcgaggttcttctacttcaagggatacgccaccggcgttccggacaaccgtctcaagattggggggctcaactacttggcgttgcttgggctgatcatttgcacagcatctttcggcatcaacctgctcatcagggagatgctctaaactttgggtttatatgtgagctccaggctgggttaaccgcacaagttactcatggtctgagcatcaaaactttgtgatactagtcgtttggggttttatagtggagttatcgtttctttctttgtctgtgtgttgttagcaaaagaagtgtgcgtctgcgtcttatagctgtgatggaataaggagacagatgggttgaagcgtgaatcgtacagttcttgctgcttgtcactctctgatctggtttcgttgtagatgagatggttgttaatggtttgtgtttgaggcacgatccgccttattttctaccgatctgaaaaaaaaaaaaaaaa

SEQ ID NO: 114 - protein, 148 aa, Zea mays
  misc_feature: Ceres CLONE ID no. 218188
  misc_feature: Ceres CDNA ID no. 36707200
  misc_feature (9)..(140): Pfam Name: MAPEG PFAM Desc: MAPEG family
  misc_feature: Homolog of GI Number: 50918191 NR Desc: putative glutathione S
  misc_feature: Homolog of GI Number: 62733553 NR Desc: MAPEG family
  misc_feature: Homolog of GI Number: 21617891 NR Desc: glutathione
  misc_feature: Homolog of GI Number: 6686399 NR Desc: F1E22.17
  misc_feature: Homolog of GI Number: 62079616 NR Desc: microsomal glutathione S
  misc_feature: Homolog of GI Number: 50751077 NR Desc:  similar to microsomal glutathione S
  misc_feature: Homolog of GI Number: 74006225 NR Desc:  similar to microsomal glutathione S
  misc_feature: Homolog of GI Number: 27678076 NR Desc: similar to microsomal glutathione S
MAVSIELTKEYGYVVLVLVAYVFLNLWMGFQVGKARRKYKVFYPTMYAIESENKDAKLFNCVQRGHQNSLEWMPVFFVILLLGGLQHPTIAAGLGGIYIVARFFYFKGYATGVPDNRLKIGGLNYLALLGLIICTASFGINLLIREML

SEQ ID NO: 115 - DNA, 746 bp, Zea mays
  misc_feature: Ceres CLONE ID no. 218190
  misc_feature: Ceres CDNA ID no. 36707201
  CDS (69)..(527): REFERENCED BY SEQ ID NO: 116
aaccctacccacagccaccgccgccgccgccgctccctgacccctagtgtccggatttaacttcaaacatggcggacgtcgatgtcgagccggaggtcgccgccggtgctcccaagaggacgttccgcaagtacagctaccgcggcgtcgacctcgatgcgctgcttgacatgtccaccgacgacctcgttcagctcttcccagcgcgcgccaggagaaggttccagaggggtttgaagaggaagcccatggcgctcatcaagaagctgcgcaaggcgaaaaaggatgctcctgtcggcgagaagccagagccagtgaagacccatctccgcaacatgatcattgtccccgagatgattgggagcattgttggtgtctacaatggcaagaccttcaaccaggttgagatcaagcctgagatgattggccactatcttgcagagttctccatttcctacaagccggtcaagcacgggaggcccggtattggtgccactcactcctcgcggtttatccctctgaaatgagttgttacccagatctgtagcgtcccaagggtgtccagtggcattgccctttcagctttgctgcttgtttcgaacaagttacatacccaagacattttgttctgtttccagcactagatttcaaagctaagcattgcataactatgctgttttgttggaagtatgtgagtataatcttatctaatatgtgatgttacgtccaaaaaaaaaaaaaaaaaa

SEQ ID NO: 116 - protein, 152 aa, Zea mays
  misc_feature: Ceres CLONE ID no. 218190
  misc_feature: Ceres CDNA ID no. 36707201
  misc_feature (54)..(135): Pfam Name: Ribosomal_S19 PFAM Desc: Ribosomal protein S19
  misc_feature: Homolog of GI Number: 50919151 NR Desc: putative 40S ribosomal protein S15
  misc_feature: Homolog of GI Number: 50934735 NR Desc: putative 40S ribosomal protein S15
  misc_feature: Homolog of GI Number: 15425963 NR Desc: 40S ribosomal protein S15
  misc_feature: Homolog of GI Number: 20465567 NR Desc: putative ribosomal protein S15
  misc_feature: Homolog of GI Number: 20147171 NR Desc: At1g04270/F19P19_29
  misc_feature: Homolog of GI Number: 1107485 NR Desc: 40S ribosomal protein S15
  misc_feature: Homolog of GI Number: 82621162 NR Desc: 40S ribosomal protein S15
  misc_feature: Homolog of GI Number: 81076490 NR Desc: 40S ribosomal protein S15
  misc_feature: Homolog of GI Number: 2982268 NR Desc: probable 40S ribosomal protein S15
  misc_feature: Homolog of GI Number: 79316582 NR Desc: RPS15
MADVDVEPEVAAGAPKRTFRKYSYRGVDLDALLDMSTDDLVQLFPARARRRFQRGLKRKPMALIKKLRKAKKDAPVGEKPEPVKTHLRNMIIVPEMIGSIVGVYNGKTFNQVEIKPEMIGHYLAEFSISYKPVKHGRPGIGATHSSRFIPLK

SEQ ID NO: 117 - DNA, 745 bp, Zea mays
  misc_feature: Ceres CLONE ID no. 218193
  misc_feature: Ceres CDNA ID no. 36707202
  CDS (35)..(553): REFERENCED BY SEQ ID NO: 118
aggacacaccccctccagctctccgccgtcggccatgggtcaagcctggggtaatctccaagataggctccaagggcggcggtggaaggagcaccaggtgaggaagatcaccgacaaggtgttcgaccgcctcacggaggacgcccagaagcgcgacaaggaggccctcagattcgaggaggtctacatcgccgtcctctgcgtctacaatgacatcaataagtacttgccggggccgcaccacgaccccccgtccaaggagaagctcagggccatgatggaggagtacgacgtgaacctggacgggctcctggaccgcgaggagttcgcggagttcatccggaagctgaccgcggactcgctgtgctcgatcagcgtgaagctgctgatcacgctggtggcggcgccggcgctggcgatggcgaccaagcgggcgacggagggcgtccccggcgtgggcaaggtggtacgcaaggtgcccaacgcgctctacgcctccgccatcaccctgggcgttgtgctgttgcagagatcaaccgagggcgtcgagtgactcgcgctgctgaaactgcaatgtcgtcggctgtgtagatggagcagcgtatctaggataggtgttggttctttacggcttgtgcggtgaattgatctgtgtatcaattcgatgtgatttatcctggatttgggacaaatagttgtggatccttgtgaattgtcttgcttttctaaaaaaaaaaaaaaaaaa

SEQ ID NO: 118 - protein, 172 aa, Zea mays
  misc_feature: Ceres CLONE ID no. 218193
  misc_feature: Ceres CDNA ID no. 36707202
  misc_feature (77)..(105): Pfam Name: efhand PFAM Desc: EF hand
  misc_feature: Homolog of GI Number: 50928477 NR Desc: OSJNBa0083N12.20
  misc_feature: Homolog of GI Number: 50928479 NR Desc: OSJNBa0083N12.21
MGQAWGNLQDRLQGRRWKEHQVRKITDKVFDRLTEDAQKRDKEALRFEEVYIAVLCVYNDINKYLPGPHHDPPSKEKLRAMMEEYDVNLDGLLDREEFAEFIRKLTADSLCSISVKLLITLVAAPALAMATKRATEGVPGVGKVVRKVPNALYASAITLGVVLLQRSTEGVE

SEQ ID NO: 119 - DNA, 655 bp, Zea mays
  misc_feature: Ceres CLONE ID no. 218221
  misc_feature: Ceres CDNA ID no. 36707203
  CDS (94)..(453): REFERENCED BY SEQ ID NO: 120
atcacacactaatcaacaagcaggaccagctagctagctcctctcactgctatcacccgcccagccatctcgctgaaagagaaaagcgcagccatgaagactactagctcgggcattgcagtcgtcctactggtggccatgctggcagtccattccgcgttggccgacatctcgtgctccgacgtgctcaacgacctgtcgccgtgcctgcccttcctgcagggcaaggcagccaaacccagcgagagcaacaaccagtgctgcgacggcgtgagggccctgtacgcggcggcggacaccaggcccgacaggcaggccacgtgccggtgcctcaaggcggcctacgttcaggtccacgctgtgctctccgcggcgcaggagctgcccggcgactgcggcctctcgctgtcctacaacatcacccccgacatcgactgcgacaagatcgaatgaagggatactgttcccttaccagaatccatacgacgggatggtgatgttcagtgccctgctagcagtaggctgcatctgcactgagtgactagaataaaggatttggtgatgtttgtgctgattagtgtgttcgcctgtaatcgtgtgatgccgtcgttggcttcttatatccgtgtctaatctcacaaaaaaaaaaaaaaaa

SEQ ID NO: 120 - protein, 119 aa, Zea mays
  misc_feature: Ceres CLONE ID no. 218221
  misc_feature: Ceres CDNA ID no. 36707203
  misc_feature (28)..(115): Pfam Name: Tryp_alpha_amyl PFAM Desc: Protease inhibitor/seed storage/LTP family
  misc_feature: Homolog of GI Number: 31324341 NR Desc: putative lipid transfer protein
  misc_feature: Homolog of GI Number: 16903206 NR Desc: lipid transfer protein precursor
  misc_feature: Homolog of GI Number: 11095210 NR Desc: lipid transfer protein 3 precursor
  misc_feature: Homolog of GI Number: 66271045 NR Desc: FSLTP2
  misc_feature: Homolog of GI Number: 66271047 NR Desc: FSLTP3
  misc_feature: Homolog of GI Number: 7012722 NR Desc: lipid transfer protein precursor
  misc_feature: Homolog of GI Number: 37625029 NR Desc: lipid transfer protein
  misc_feature: Homolog of GI Number: 12659322 NR Desc: lipid transfer protein
  misc_feature: Homolog of GI Number: 62529290 NR Desc: non
  misc_feature: Homolog of GI Number: 19039 NR Desc: LTP 1
MKTTSSGIAVVLLVAMLAVHSALADISCSDVLNDLSPCLPFLQGKAAKPSESNNQCCDGVRALYAAADTRPDRQATCRCLKAAYVQVHAVLSAAQELPGDCGLSLSYNITPDIDCDKIE

SEQ ID NO: 121 - DNA, 781 bp, Zea mays
  misc_feature: Ceres CLONE ID no. 218255
  misc_feature: Ceres CDNA ID no. 40350886
  CDS (2)..(421): REFERENCED BY SEQ ID NO: 122
atatatatgtgctcaactgttcatcgatataatcgtcggcgagatgattgccatgtcgtcgacgccgattctgctcaccatactcttggcatacctcgcgttctctgcaaactgtaatggcgaacgtggtaatgacgaggacacaccagctgcaggtggtcaccggcggtggcagccaaacggcgacaagacgatttccggaggcagcagcgacgacgaggcggcgacgtgcgtgagcagtgaatgcgagggcagcacctgttactgctgcccaacgatgcccactagcccttgcttcttggatctggatgcttgcttgagagtctgccatggtcgtcgtcgtcgtcgtcggccagccgcaccgctgccggaggtaacgtcgtcgtctgggcgcgggtccggaccaagcagattcccctgatcgagagtagctagctagctggggcggcctcgccgtcgacgacccctagctagctccatcggcgatcgatgtcctagcttgtgacaattgacaagacgagagaacatggatgttttcgccaccaccacggctcttcctcgaacaagtatcactccaaactgaagtttctacacgtatatatagttccaaaaacaaagtaaattgcatacatataatataggcttcatgctagtgcgactatggtgcctacgaaaaattatgcaacagattaatgtgtttatataatggatgtacacatgtacactggtaaaaggaagaagagatcatgcttgtctcttacacgcaaaaaaaaaaaaaaaa

SEQ ID NO: 122 - protein, 125 aa, Zea mays
  misc_feature: Ceres CLONE ID no. 218255
  misc_feature: Ceres CDNA ID no. 40350886
MIAMSSTPILLTILLAYLAFSANCNGERGNDEDTPAAGGHRRWQPNGDKTISGGSSDDEAATCVSSECEGSTCYCCPTMPTSPCFLDLDACLRVCHGRRRRRRPAAPLPEVTSSSGRGSGPSRFP

SEQ ID NO: 123 - DNA, 712 bp, Zea mays
  misc_feature: Ceres CLONE ID no. 218272
  misc_feature: Ceres CDNA ID no. 36707204
  CDS (71)..(439): REFERENCED BY SEQ ID NO: 124
accaaaggtatcttgcaatcacaacgaacaaaagctctcgatctcaccgacaccgaggaagaagagatcaatggcgtccgagcagggagtcgtgatcgcgtgccacagcaaggctgagtttgacgcccacatgaccaaggcccaggaagccggcaagctggtggtcatcgacttcactgccgcctggtgcggtccatgccgcgccatcgccccactgttcgtcgaacacgccaagaagttcactcaggtcgtcttcctgaaggtggacgtggacgaagtgaaggaagtcaccgcggcctacgaggtcgaggcgatgccgaccttccacttcgtcaagaacggcaagacggtcgcgaccatcgtgggtgccaggaaggacgagctcctggccctgatcgagaagcatgccgcgcctgcgcctgcgactgcgtctgcctaaatgagatcagatcagtcgtcgccgtcaataagggccagcacgtatggctgtaaatgttgtcgttatcagttctggctttgtcgtttgtgggcgatttgtgaactagtagtatgtttgtttctatccgagccggaggcgatacttaaccatggatacttgttgtgagttcgtttctgttcgcgtgtgactcttgaattgaatcaaccagctcaccactgcaccaggccgtggtgagtggtgacagtgatttcctgttgaaaaaaaaaaaaaaaa

SEQ ID NO: 124 - protein, 122 aa, Zea mays; identical to SEQ ID NO: 16
  misc_feature: Ceres CLONE ID no. 218272
  misc_feature: Ceres CDNA ID no. 36707204
  misc_feature (8)..(114): Pfam Name: Thioredoxin PFAM Desc: Thioredoxin
  misc_feature: Homolog of GI Number: 66841004 NR Desc: thioredoxin h2 protein
  misc_feature: Homolog of GI Number: 82407383 NR Desc: Chain A
  misc_feature: Homolog of GI Number: 50934769 NR Desc: Thioredoxin H
  misc_feature: Homolog of GI Number: 27461140 NR Desc: thioredoxin H
  misc_feature: Homolog of GI Number: 32186040 NR Desc: thioredoxin h isoform 1
  misc_feature: Homolog of GI Number: 20047 NR Desc: thioredoxin
  misc_feature: Homolog of GI Number: 53748515 NR Desc: thioredoxin 1
  misc_feature: Homolog of GI Number: 40287476 NR Desc: thioredoxin
  misc_feature: Homolog of GI Number: 55670844 NR Desc: Chain A
  misc_feature: Homolog of GI Number: 33621084 NR Desc: thioredoxin H3

SEQ ID NO: 125 - DNA, 653 bp, Zea mays
  misc_feature: Ceres CLONE ID no. 218397
  misc_feature: Ceres CDNA ID no. 36707205
  CDS (45)..(443): REFERENCED BY SEQ ID NO: 126
gtttgcacagaggggaagagagagagagagacggaaagggggagatgagccggagcctggggatcccggtgaagttgctccatgaggcagcgggtcatgtggtgacggtggagctcaagaccggcgaagtgtaccgggggtccatggtcgagtgcgaggataactggaattgccagctcgagaacattaccttcaccgccaaggatgggaaggtttcgcagctggagcacgtcttcatcagaggaagcagagtgagatttatgattatacctgatatgctcaagaacgctcccatgttcaagcgcttggaagcgagaattaggggcaaaggatcagctattggagttgggcgtggacgtgcagttgcaatgcgtgctcgggctgcttctggtcgtggtggtggtcctgttgggcgaggcagcgcgcctcctgtgaggaggtagattttatggtgtcatgcggcttttcttgtctggctgaggatgttgcagtctgatgttaggacgctgtcttggtagtcaaaactgccgtaatgtataattcaacggcttaaggagtatgagtgtgcaacctcttattgttgaatgtaatgtgttgacggtggttgttttccttgctctattcggatggctggaccaaaaaaaaaaaaaaaa

SEQ ID NO: 126 - protein, 132 aa, Zea mays
  misc_feature: Ceres CLONE ID no. 218397
  misc_feature: Ceres CDNA ID no. 36707205
  misc_feature (10)..(75): Pfam Name: LSM PFAM Desc: LSM domain
  misc_feature: Homolog of GI Number: 51979110 NR Desc: PREDICTED B1370C05.32 gene product
  misc_feature: Homolog of GI Number: 21555384 NR Desc: small nuclear ribonucleoprotein
  misc_feature: Homolog of GI Number: 20334748 NR Desc: At1g20580/F2D10_6
  misc_feature: Homolog of GI Number: 8778615 NR Desc: F5M15.9
  misc_feature: Homolog of GI Number: 21592857 NR Desc: small nuclear ribonucleoprotein
  misc_feature: Homolog of GI Number: 41054297 NR Desc: small nuclear ribonucleoprotein D3 polypeptide 18kDa
  misc_feature: Homolog of GI Number: 47938090 NR Desc: Small nuclear ribonucleoprotein D3 polypeptide
  misc_feature: Homolog of GI Number: 27371312 NR Desc: MGC52856 protein
  misc_feature: Homolog of GI Number: 54635267 NR Desc: GA21375
  misc_feature: Homolog of GI Number: 76639653 NR Desc:  similar to small nuclear ribonucleoprotein D3
MSRSLGIPVKLLHEAAGHVVTVELKTGEVYRGSMVECEDNWNCQLENITFTAKDGKVSQLEHVFIRGSRVRFMIIPDMLKNAPMFKRLEARIRGKGSAIGVGRGRAVAMRARAASGRGGGPVGRGSAPPVRR

SEQ ID NO: 127 - DNA, 764 bp, Zea mays
  misc_feature: Ceres CLONE ID no. 218405
  misc_feature: Ceres CDNA ID no. 36707639
  CDS (112)..(522): REFERENCED BY SEQ ID NO: 128
acaggcgaaaaaaaaaactgtttgttagcgtgacgtgcgtgaggagtctggagtcggacggaatcgaaaaggcgaaaactcagtgtctcgagtttcctcggagcggaggcgatggctgggaagggagggaaaggcttgctcgccgcgaagactacggcggccaagtccgccgagaaggacaaggggaagaaggccccaatctcacgctcctcccgcgccggcctccagttccctgttgggcgtatccaccgtcagctgaagcaaaggactcaggcaaatggtcgcgttggtgccaccgcagccgtctactccgctgccatcctggagtacttgactgccgaggttctggagctggcgaatgctagcaaggatctgaaggtgaagcgtatcacccctcgccatttgcagctagccattcgtggagacgaggagctggacaccctcatcaagggcaccatcgcaggcggaggtgtcatcccgcacattcacaagtccctgatcaacaagtcctccaaggagtgaagactaggggatgtgcatctttagtttaaactagacttctgtgcgctcctcggcgagtccttgtcatcctgtaggttttagttgagctgtcaggttggagctcctctgtgtaacgcttgcctggtactgcttcatcagttatttggttattgtgtttgtgttgagttgttaacttcaggggtgcaaacctggatgcttatttagttatgtgactactgctattcggaaaaaaaaaaaaaaaa

SEQ ID NO: 128 - protein, 136 aa, Zea mays
  misc_feature: Ceres CLONE ID no. 218405
  misc_feature: Ceres CDNA ID no. 36707639
  misc_feature (32)..(107): Pfam Name: Histone PFAM Desc: Core histone H2A/H2B/H3/H4
  misc_feature: Homolog of GI Number: 50918585 NR Desc: putative histone H2A protein
  misc_feature: Homolog of GI Number: 34902610 NR Desc: Putative histone H2A
  misc_feature: Homolog of GI Number: 31432099 NR Desc: putative histone H2A
  misc_feature: Homolog of GI Number: 6319146 NR Desc: H2A protein
  misc_feature: Homolog of GI Number: 21592838 NR Desc: histone H2A.F/Z
  misc_feature: Homolog of GI Number: 62319094 NR Desc: histone H2A
  misc_feature: Homolog of GI Number: 21536635 NR Desc: putative histone H2A
  misc_feature: Homolog of GI Number: 30024110 NR Desc: putative histone H2A
  misc_feature: Homolog of GI Number: 62664724 NR Desc:  similar to H2A histone family
  misc_feature: Homolog of GI Number: 76615576 NR Desc:  similar to H2A histone family
MAGKGGKGLLAAKTTAAKSAEKDKGKKAPISRSSRAGLQFPVGRIHRQLKQRTQANGRVGATAAVYSAAILEYLTAEVLELANASKDLKVKRITPRHLQLAIRGDEELDTLIKGTIAGGGVIPHIHKSLINKSSKE

SEQ ID NO: 129 - DNA, 707 bp, Zea mays
  misc_feature: Ceres CLONE ID no. 218425
  misc_feature: Ceres CDNA ID no. 36707206
  CDS (220)..(513): REFERENCED BY SEQ ID NO: 130
caatctccttgcccgttgtgctctctctcttcattcgttcccggcctcaccccgagccagtcgtctcgctagggtttcgccgccgccgccgccatgcctcgccgcagctcaggaaggtctgccccacgcccagctccccgtgctgcttcactgaggaacccgccacagccagcacgccaggctcctcctccagctcctgttcgagatggtggtggctccatgtttggaggaattgggtccaccattgctcaaggtatggcgtttggcacgggtagtgccatggcacacagggctgttgactctgtattaggtccccggaccatccagcatgagactcttgccacagaagctcctgctgctgcccctgctgctccagcgatgaatgctgatgcttgcagcttccattctaaggctttccaagattgtctgaacaactatggcagcgagatcagcaagtgccagttctacctagacatgctgaacgagtgccgccgtggtggtgtgtctgtctaagctgcctctgggattattcatggattttcttttcggatgagggtatctcattaataagacaccgtgaaacttcgaccatctccacagcttgaaaccatacttcctgggattaatttattttgttatcctatggtgttggaacagacttttgtctcttgatcataaatatttaaaccaaaaaaaaaaaaaaaaaa

SEQ ID NO: 130 - protein, 139 aa, Zea mays
  misc_feature: Ceres CLONE ID no. 218425
  misc_feature: Ceres CDNA ID no. 36707206
  misc_feature (94)..(135): Pfam Name: CHCH PFAM Desc: CHCH domain
  misc_feature: Homolog of GI Number: 52139112 NR Desc: Similar to Nur77 downstream protein 2
  misc_feature: Homolog of GI Number: 33413978 NR Desc: Nur77 downstream protein 2
MPRRSSGRSAPRPAPRAASLRNPPQPARQAPPPAPVRDGGGSMFGGIGSTIAQGMAFGTGSAMAHRAVDSVLGPRTIQHETLATEAPAAAPAAPAMNADACSFHSKAFQDCLNNYGSEISKCQFYLDMLNECRRGGVSV

SEQ ID NO: 131 - DNA, 713 bp, Zea mays
  misc_feature: Ceres CLONE ID no. 218428
  misc_feature: Ceres CDNA ID no. 36707207
  CDS (95)..(454): REFERENCED BY SEQ ID NO: 132
atctaatcaacaagcaggaccagctagctagctcctcccactgctatcacccgggccccggccagccatctcgctgaaagagaaaagcgcagccatgaagactactagctcgggcattgcagtcgtcctcctggtggcgatgctggcagtccagtccgcggtggccgacatctcgtgctccgacgtgctcaacgacctgtcgccgtgcctgcccttcctgcagggcaaggcagccaaacccagcgagagcaacaaccagtgctgcgacggcgtgaggaccctgtacgcggcggcggacaccaggcccgacaggcaggccacgtgccggtgcctcaaggcggcctacgttcaggtccacgctgtgctctccgcggcgcaggagctgcccggcgactgcggcctctcgctgtcctacaacatcacccccgacatcgactgcgacaagatcgaatgaagggatactgttcccttaccagaatccatacgacgggatggtgatgttcagtgccctgctagcagtaggctgcatctgcactgagtgactagaataaaggatttggtgatgtttgtgctgattggtgtgttcgcctgtaatcgtgtgatgccgtcgttggcttcttatatccgtgtctaatctcgcaagtgctcgtgtttgcaactataccatttataatgtcaacttatcatgcttgtcaataaaaaaaaaaaaaaaa

SEQ ID NO: 132 - protein, 119 aa, Zea mays; identical to SEQ ID NO: 98
  misc_feature: Ceres CLONE ID no. 218428
  misc_feature: Ceres CDNA ID no. 36707207
  misc_feature (28)..(115): Pfam Name: Tryp_alpha_amyl PFAM Desc: Protease inhibitor/seed storage/LTP family
  misc_feature: Homolog of GI Number: 31324341 NR Desc: putative lipid transfer protein
  misc_feature: Homolog of GI Number: 16903206 NR Desc: lipid transfer protein precursor
  misc_feature: Homolog of GI Number: 11095210 NR Desc: lipid transfer protein 3 precursor
  misc_feature: Homolog of GI Number: 37625029 NR Desc: lipid transfer protein
  misc_feature: Homolog of GI Number: 66271047 NR Desc: FSLTP3
  misc_feature: Homolog of GI Number: 66271045 NR Desc: FSLTP2
  misc_feature: Homolog of GI Number: 7012722 NR Desc: lipid transfer protein precursor
  misc_feature: Homolog of GI Number: 12659322 NR Desc: lipid transfer protein
  misc_feature: Homolog of GI Number: 28194086 NR Desc: lipid transfer protein isoform 4
  misc_feature: Homolog of GI Number: 19039 NR Desc: LTP 1

SEQ ID NO: 133 - DNA, 806 bp, Zea mays
  misc_feature: Ceres CLONE ID no. 218445
  misc_feature: Ceres CDNA ID no. 36707208
  CDS (72)..(620): REFERENCED BY SEQ ID NO: 134
gagattttggactagattcgtgcaaaacactagaaaagaaaaggccatcgaaaacgccgccgccgcctctgatgctttccgccgtgcgatgtggtgcccttcgccggtggcgcccgccgccgcacctcctcccacgcatcctttcctcctcctttggtacatctcccgcgcgaccacaggtgggggcgctgctggagctcccggaggtggagaaggtactgcgcgacgtacgagcgggtgacgtgcgcgtattccccgtcggcgagagcggtctgcacggcggggcctgcgccgactacatggtcgtcgccacaggccgctccgattggcacgtccgtaacatcgcgcaggcgctcctctacaagataaagcaaaagcagaagggctctgatagaatattgatgccaagtgtagaaggtcagcaagcgggaaaatgggttgtcattgattctggaagcataatcatccatgcacttgaagaaagggcaagagagtattatgatttagagagcatttggtcaaaagaggtgtcccctaacacttccattcaggagttggagacctcgctggtgaagacacgtcgccggaacctatcacagaaacccatgaagagcatctgaactaggggatctggtacgatgatccgtgaaccgagataaattacgggaggtcgagcttttatctctttccattttgtagcatcttttacttacctaaacttgtcttattatggtggtagttaatgtaagattcactgcaaacattactgagttcaccatggggtaaatccaaaaaaaaaaaaaaaa

SEQ ID NO: 134 - protein, 182 aa, Zea mays
  misc_feature: Ceres CLONE ID no. 218445
  misc_feature: Ceres CDNA ID no. 36707208
  misc_feature: Homolog of GI Number: 68003458 NR Desc: Iojap
  misc_feature: Homolog of GI Number: 78224392 NR Desc: Iojap
  misc_feature: Homolog of GI Number: 76587690 NR Desc: Iojap
  misc_feature: Homolog of GI Number: 77920170 NR Desc: iojap
  misc_feature: Homolog of GI Number: 55239656 NR Desc: ENSANGP00000011454
  misc_feature: Homolog of GI Number: 39998299 NR Desc: iojap
  misc_feature: Homolog of GI Number: 75674644 NR Desc: Iojap
  misc_feature: Homolog of GI Number: 79039309 NR Desc: similar to Uncharacterized homolog of plant Iojap protein
  misc_feature: Homolog of GI Number: 68247313 NR Desc: Iojap
MLSAVRCGALRRWRPPPHLLPRILSSSFGTSPARPQVGALLELPEVEKVLRDVRAGDVRVFPVGESGLHGGACADYMVVATGRSDWHVRNIAQALLYKIKQKQKGSDRILMPSVEGQQAGKWVVIDSGSIIIHALEERAREYYDLESIWSKEVSPNTSIQELETSLVKTRRRNLSQKPMKSI

SEQ ID NO: 135 - DNA, 769 bp, Zea mays
  misc_feature: Ceres CLONE ID no. 218453
  misc_feature: Ceres CDNA ID no. 36707640
  CDS (106)..(513): REFERENCED BY SEQ ID NO: 136
attcgcctctcccgcgacccgtaccccgcctcccggttcaaccaaatccctctcgcctcatccccaccagcgcaaagccgccctatcgtcctgtcgtgagaagcaatggcgggccgtggcaaggcgattggcgctggtgccgcgaagaaggcaacgtcaaggagctccaaggctgggctgcagtttcccgtcggcaggatcgctcggttcctcaaggccggcaagtacgccgagcgcgtgggcgccggcgcccctgtctacctcgcagctgtcctcgagtacctcgccgctgaggtcctggagcttgctgggaacgcagcgagggataacaagaagacccgcatcgtgccgcgtcacatccagctcgccgtgcgcaacgacgaggagctgaccaagctgcttggtggtgccaccatcgcgagcggcggcgttatgcccaacatccaccagcacctcctccccaagaaggctggctcgtccaaggcttccaccgtcgatgacgatgacaactgaagctgcccactggagaaggcattcgctaccgtcttgtttcctaggtttagcacgcagttagtcgccatgtctttgagagagttcgatgtgtttgggaatgacaatagttcctttcttggttccctaagttcgttgaatcagatgtgaatacggctaaggtttttgggttatgcaactctgggacgtacgccagttgatttgatcgtttgaaaagaaatggaaggacgttaaagtttgagcaaaaaaaaaaaaaaaa

SEQ ID NO: 136 - protein, 135 aa, Zea mays; identical to SEQ ID NO: 20
  misc_feature: Ceres CLONE ID no. 218453
  misc_feature: Ceres CDNA ID no. 36707640
  misc_feature (25)..(89): Pfam Name: CBFD_NFYB_HMF PFAM Desc: Histone
  misc_feature: Homolog of GI Number: 50938209 NR Desc: histone H2A
  misc_feature: Homolog of GI Number: 1154954 NR Desc: histone H2A
  misc_feature: Homolog of GI Number: 77555213 NR Desc: Core histone H2A/H2B/H3/H4
  misc_feature: Homolog of GI Number: 536896 NR Desc: protein H2A
  misc_feature: Homolog of GI Number: 50938211 NR Desc: putative histone H2A
  misc_feature: Homolog of GI Number: 50945929 NR Desc: putative histone H2A
  misc_feature: Homolog of GI Number: 29824201 NR Desc: putative histone H2A
  misc_feature: Homolog of GI Number: 17065594 NR Desc: putative histone H2A protein
  misc_feature: Homolog of GI Number: 21593834 NR Desc: histone H2A
  misc_feature: Homolog of GI Number: 21617982 NR Desc: histone H2A

SEQ ID NO: 137 - DNA, 463 bp, Zea mays
  misc_feature: Ceres CLONE ID no. 219034
  misc_feature: Ceres CDNA ID no. 36704414
  CDS (84)..(320): REFERENCED BY SEQ ID NO: 138
ggacaggttgcatttgcatctgagttcctgatcgttgtattccagtttcttccgtgagttttgtgggatcgcgaggaagaaggatgtcgtgctgcggaggcaactgcgggtgcggcgccggctgcaagtgcggcagcggctgcggagggtgcaagatgtacccggacatggctgagcaggtgaccaccaccaccaccacccagactctcatcatgggtgttgcaccatccaagggcggggtcgaggcggccgccggagctgagaacggcgggtgcaagtgcggcgccaactgcacctgcgacccctgcacctgcaagtgagactacgacggtggcggcgatgacgctgcagggtctgcaggccctgatggggtcggaaggactctttatctctctagctaattaataagctctagctagtatataatattctagcagtgtcgtttacaaaaaaaaaaaaaaaa

SEQ ID NO: 138 - protein, 78 aa, Zea mays
  misc_feature: Ceres CLONE ID no. 219034
  misc_feature: Ceres CDNA ID no. 36704414
  misc_feature (1)..(77): Pfam Name: Metallothio_2 PFAM Desc: Metallothionein
  misc_feature: Homolog of GI Number: 55416162 NR Desc: metallothionein
  misc_feature: Homolog of GI Number: 46358913 NR Desc: metallothionein
  misc_feature: Homolog of GI Number: 56549629 NR Desc: metallothionein
  misc_feature: Homolog of GI Number: 32400768 NR Desc: metallothionein
  misc_feature: Homolog of GI Number: 13491970 NR Desc: metallothionein
  misc_feature: Homolog of GI Number: 3901014 NR Desc: metallothionein
  misc_feature: Homolog of GI Number: 23954357 NR Desc: metallothioneine type2
  misc_feature: Homolog of GI Number: 46850185 NR Desc: metallothionein 2a
  misc_feature: Homolog of GI Number: 34895842 NR Desc: putative metallothionein
  misc_feature: Homolog of GI Number: 15825501 NR Desc: type 2 metallothionein
MSCCGGNCGCGAGCKCGSGCGGCKMYPDMAEQVTTTTTTQTLIMGVAPSKGGVEAAAGAENGGCKCGANCTCDPCTCK

SEQ ID NO: 139 - DNA, 594 bp, Zea mays
  misc_feature: Ceres CLONE ID no. 219948
  misc_feature: Ceres CDNA ID no. 25446277
  CDS (182)..(454): REFERENCED BY SEQ ID NO: 140
agcagttcctcagacgcaaagaagatcgagtctgcagcccacaccatagtgcgagcagattgcgtccaataggcgcaaagggagatgggggtggccgctggacgagcggcggccatggtggctgcggctgctcgcgggcggcgcgcacgcggactgctacgacgactgcttcaaggactgcatggccaggttcaagtccatgagagactactgcagctacgcgtgcgagaaggtctgcgatccggacgccacgctccagcgccccctcgccgttgtggggccagcagcagcgttggccgaccaccacccgttggacaagaagcatggtgctgtctggccggcggcgttgcccgaccatcctttccacgagacgcacggcgacgtcgagccggcaggggagccggacccagctaggcacgtcgtccgtccggcacgtgtccccgtcctcccctgaacgccgccggagcgagagcgcgcgatgctagccgctcggcctggcgcccgtatgttaagcactagacgaagtgtgtgatgtgtcaaacgtataagcatgccttaactacctcacgtttatgcaaaaaaaaaaaaaaaaaa

SEQ ID NO: 140 - protein, 90 aa, Zea mays
  misc_feature: Ceres CLONE ID no. 219948
  misc_feature: Ceres CDNA ID no. 25446277
MARFKSMRDYCSYACEKVCDPDATLQRPLAVVGPAAALADHHPLDKKHGAVWPAALPDHPFHETHGDVEPAGEPDPARHVVRPARVPVLP

SEQ ID NO: 141 - DNA, 992 bp, Zea mays
  misc_feature: Ceres CLONE ID no. 220042
  misc_feature: Ceres CDNA ID no. 36707209
  CDS (96)..(851): REFERENCED BY SEQ ID NO: 142
ctctcgtccaaaaccctagccctcgcgccgccgcctccttcgccacccagcgctcgagctcctcgctccctgcgagcgcgcgccgcaacgccaccatgaagttcaacatcgcgaacccttccaccgggtgccaaaagaagctggaaatcgatgacgaccagaagctgcgtgccttttatgaccgaaggatatcccaggaggtcagtggtgatgctctgggtgaggagttcaagggttatgtcttcaagatcatgggtggatgtgacaagcaaggcttcccaatgaagcaaggagttttgacttctggtcgtgttcgtcttctgctccatagggggactccctgcttccgtggttatggcaggcgtaatggtgagcgcaggaggaagtctgtccgtggttgcatcgtgagccaagacctatctgttatcaacttggtgattgtgaagaagggtgagaatgatctgcctggtctgactgacactgagaagccaaggatgaggggtcccaagagggcctccaagatcagaaagctgttcaaccttaacaaggatgatgatgtacgcaagtacgtgaacacataccgcaggacattcactaccaagaacggcaagaaggtcagcaaggcacctaagatccaacggcttgtgacacccttgaccctccagaggaagcgtgctagaatcgctgacaagaagaagaggataactaagaagaagtctgaggctgctgagtaccagaagcttcttgcccagaggctgaaggaacagagagaccgccggagcgagagcttggccaagaggaggtccaagctttctgccgccgccaaggcttctgctgccacctctgcttaagaatgttcagtgttttgggatctttgtaaggtctatcttgtaacggcaaaagtgttttgggatctttgtaagctccatagttcacatcacttaagtgtttctgctagtagtggatccacaactaaaaaaaaaaaaaaaaaa

SEQ ID NO: 142 - protein, 251 aa, Zea mays
  misc_feature: Ceres CLONE ID no. 220042
  misc_feature: Ceres CDNA ID no. 36707209
  misc_feature (1)..(129): Pfam Name: Ribosomal_S6e PFAM Desc: Ribosomal protein S6e
  misc_feature: Homolog of GI Number: 1917019 NR Desc: ribosomal protein S6 RPS6
  misc_feature: Homolog of GI Number: 9931636 NR Desc: ribosomal protein s6 RPS6
  misc_feature: Homolog of GI Number: 34906842 NR Desc: putative 40S ribosomal protein S6
  misc_feature: Homolog of GI Number: 37991906 NR Desc: ribosomal protein s6 RPS6
  misc_feature: Homolog of GI Number: 7649387 NR Desc: S6 ribosomal protein
  misc_feature: Homolog of GI Number: 76161014 NR Desc: ribosomal protein S6
  misc_feature: Homolog of GI Number: 44662864 NR Desc: ribosomal protein S6
  misc_feature: Homolog of GI Number: 72384462 NR Desc: 52O08_33
  misc_feature: Homolog of GI Number: 20147379 NR Desc: AT5g10360/F12B17_290
MKFNIANPSTGCQKKLEIDDDQKLRAFYDRRISQEVSGDALGEEFKGYVFKIMGGCDKQGFPMKQGVLTSGRVRLLLHRGTPCFRGYGRRNGERRRKSVRGCIVSQDLSVINLVIVKKGENDLPGLTDTEKPRMRGPKRASKIRKLFNLNKDDDVRKYVNTYRRTFTTKNGKKVSKAPKIQRLVTPLTLQRKRARIADKKKRITKKKSEAAEYQKLLAQRLKEQRDRRSESLAKRRSKLSAAAKASAATSA

SEQ ID NO: 143 - DNA, 961 bp, Zea mays
  misc_feature: Ceres CLONE ID no. 220087
  misc_feature: Ceres CDNA ID no. 35383155
  CDS (43)..(687): REFERENCED BY SEQ ID NO: 144
gattagaaacggctaagcaataacgcaaagattcggctgacaatggggaaggggttcccgtcgtacttggcgatgaagacggggccggagggcggcgacggcgcggcggcggcggcgcagcaggcgctcatcgacgcggacctgcggaacctcggcgtcgccgcgcgaaagctcgccaaccacgccttcgtcctcggcggcgggttggggttcggcacttccttcctcaagtggctggccttcctcgccgcagtgtatctcttgatattggaccgcacgaactggaagaccaacatgctgacagctctcttggttccttacattttcttcactctgcctaatgtgctgttttctctgatcagaggagaggtggggaaatggattgcgattattgctcttattctgcgcctattttttccgcgccacttcccagattggttagagcttcccggttccatcatcctgctcacagcagtcgcccccagtctgttcgcacacaccttcagggatgacctcgtcggtgtcttcatatgccttgcgatcggatgctacctgctccaagagcacatcagggcgtcagatggactcaggaacgccttcaggaagggcaatggcgtgtccaactccattggcatcctcctgctcttcatctaccctgtctggaccggggtgctgcagatcctgtaggcgctgttgcctccgtgttcccgtctgctgtccaggcgtccagctccgttgccgttcgtctcttgtgcaaatgtttcttctatggtgatcgtggttctgtgctatcgggatgggatgtagatcgagatgttggccatattatcaggcgtgtaaacccttgccgcttctgttaagttgtcgcaagtttgaggatgggtgtttatagcaactactgtatatcatttgatgttatttctgaatatgatgtcaagcggtgacaaaaaaaaaaaaaaaa

SEQ ID NO: 144 - protein, 214 aa, Zea mays
  misc_feature: Ceres CLONE ID no. 220087
  misc_feature: Ceres CDNA ID no. 35383155
  misc_feature (9)..(202): Pfam Name: WCOR413 PFAM Desc: Cold acclimation protein WCOR413
  misc_feature: Homolog of GI Number: 27902673 NR Desc: cold acclimation protein COR413
  misc_feature: Homolog of GI Number: 50919035 NR Desc: putative cold acclimation protein
  misc_feature: Homolog of GI Number: 16555360 NR Desc: cold acclimation protein WCOR413
  misc_feature: Homolog of GI Number: 7489665 NR Desc: cold acclimation protein WCOR413
  misc_feature: Homolog of GI Number: 46577796 NR Desc: putative stress
  misc_feature: Homolog of GI Number: 10121841 NR Desc: cold acclimation protein WCOR413
  misc_feature: Homolog of GI Number: 10121843 NR Desc: cold acclimation protein WCOR413
  misc_feature: Homolog of GI Number: 28973359 NR Desc: putative cold acclimation protein homolog
  misc_feature: Homolog of GI Number: 21360378 NR Desc: stress
  misc_feature: Homolog of GI Number: 60317458 NR Desc: cold
  misc_feature: Useful for making lethal plants for genetic confinement systems
  misc_feature: Useful for making plants with increased biomass and foliage
MGKGFPSYLAMKTGPEGGDGAAAAAQQALIDADLRNLGVAARKLANHAFVLGGGLGFGTSFLKWLAFLAAVYLLILDRTNWKTNMLTALLVPYIFFTLPNVLFSLIRGEVGKWIAIIALILRLFFPRHFPDWLELPGSIILLTAVAPSLFAHTFRDDLVGVFICLAIGCYLLQEHIRASDGLRNAFRKGNGVSNSIGILLLFIYPVWTGVLQIL

SEQ ID NO: 145 - DNA, 787 bp, Zea mays
  misc_feature: Ceres CLONE ID no. 220105
  misc_feature: Ceres CDNA ID no. 36707210
  CDS (55)..(618): REFERENCED BY SEQ ID NO: 146
agaaccctagcgccccgcccgtcctgccgccgccgcagccgccatcgcacggccatgggtatcgatctcgtagccggcggccgcaacaagaagaccaagcgcacggcgcccaagtccgacgatgtctacctcaagctcctcgtcaagctctaccgcttccttgtgcgcaggacaaagagcaacttcaacgccgtgatcctcaagcgcctcttcatgagcaagaccaaccgcccgccgctctcgatgcgccgcctcgtcaggttcatggaggggaagggtgatcagatcgccgtgattgtgggcaccgtgaccgacgacaagaggatcagcgaggtgccggcgatgaaggtctgcgcgctcaggttcactgagacagcgagggccaggatcatcaatgctggcggagagtgcctcaccttcgaccagctcgcgctccgtgccccacttgggcaaaacacggttctgctgaggggtcctaagaacgctagggaagctgtcaggcacttcgggcctgcaccaggagtgcctcacagccacaccaagccttatgttcgctcgaagggtaggaagtttgagaaggcgagaggaaggaggaacagcaggggcttcaaggtctaagtggccactgccttgccaatctagtgccgttttgctcgtgtcagctcaatattaccgttttggtgtcatagttgtaatgttttagttgtcggaatctcgtgtcattatcggatatcgaaccaatcaaatttcgctccttttttgtttttgccgaaaaaaaaaaaaaaaa

SEQ ID NO: 146 - protein, 187 aa, Zea mays
  misc_feature: Ceres CLONE ID no. 220105
  misc_feature: Ceres CDNA ID no. 36707210
  misc_feature (12)..(186): Pfam Name: Ribosomal_L18e PFAM Desc: Eukaryotic ribosomal protein L18
  misc_feature: Homolog of GI Number: 50939929 NR Desc: putative cytoplasmic ribosomal protein L18
  misc_feature: Homolog of GI Number: 34897628 NR Desc: cytoplasmic ribosomal protein L18
  misc_feature: Homolog of GI Number: 57471708 NR Desc: ribosomal protein L18
  misc_feature: Homolog of GI Number: 23397141 NR Desc: putative 60S ribosomal protein
  misc_feature: Homolog of GI Number: 606970 NR Desc: cytoplasmic ribosomal protein L18
  misc_feature: Homolog of GI Number: 6714451 NR Desc: putative 60S ribosomal protein L18
  misc_feature: Homolog of GI Number: 3021348 NR Desc: ribosomal protein L18
  misc_feature: Homolog of GI Number: 25295214 NR Desc: 60S ribosomal protein L18
  misc_feature: Homolog of GI Number: 61654648 NR Desc: L18
  misc_feature: Homolog of GI Number: 28798549 NR Desc: 60S ribosomal protein
MGIDLVAGGRNKKTKRTAPKSDDVYLKLLVKLYRFLVRRTKSNFNAVILKRLFMSKTNRPPLSMRRLVRFMEGKGDQIAVIVGTVTDDKRISEVPAMKVCALRFTETARARIINAGGECLTFDQLALRAPLGQNTVLLRGPKNAREAVRHFGPAPGVPHSHTKPYVRSKGRKFEKARGRRNSRGFKV

SEQ ID NO: 147 - DNA, 715 bp, Zea mays
  misc_feature: Ceres CLONE ID no. 220109
  misc_feature: Ceres CDNA ID no. 36707641
  CDS (105)..(464): REFERENCED BY SEQ ID NO: 148
aagcatcacacactaatcaacaagcaggaccagctagctagctcctcccactgctatcacccgggccccggccagccatctcgctgaaagagaaaagcgcagccatgaagactactagctcgggcattgcagtcgtcctcctggtggcgatgctggcagtccagtccgcggtggccgacatctcgtgctccgacgtgctcaacgacctgtcgccgtgcctgcccttcctgcagggcaaggcagccaaacccagcgagagcaacaaccagtgctgcgacggcgtgaggaccctgtacgcggcggcggacaccaggcccgacaggcaggccacgtgccggtgcctcaaggcggcctacgttcaggtccacgctgtgctctccgcggcgcaggagctgcccggcgactgcggcctctcgctgtcctacaacatcacccccgacatcgactgcgacaagatcgaatgaagggatactgttcccttaccagaatccatacgacgggatggtgatgttcagtgccctgctagcagtaggctgcatctgcactgagtgactagaataaaggatttggtgatgtttgtgctgattggtgtgttcgcctgtaatcgtgtgatgccgtcgttggcttcttatatccgtgtctaatctcgcaagtgctcgtgtttgcgactataccatttataatgtcaacttatcatgcaaaaaaaaaaaaaaaa

SEQ ID NO: 148 - protein, 119 aa, Zea mays; identical to SEQ ID NO: 98
  misc_feature: Ceres CLONE ID no. 220109
  misc_feature: Ceres CDNA ID no. 36707641
  misc_feature (28)..(115): Pfam Name: Tryp_alpha_amyl PFAM Desc: Protease inhibitor/seed storage/LTP family
  misc_feature: Homolog of GI Number: 31324341 NR Desc: putative lipid transfer protein
  misc_feature: Homolog of GI Number: 16903206 NR Desc: lipid transfer protein precursor
  misc_feature: Homolog of GI Number: 11095210 NR Desc: lipid transfer protein 3 precursor
  misc_feature: Homolog of GI Number: 37625029 NR Desc: lipid transfer protein
  misc_feature: Homolog of GI Number: 66271047 NR Desc: FSLTP3
  misc_feature: Homolog of GI Number: 66271045 NR Desc: FSLTP2
  misc_feature: Homolog of GI Number: 7012722 NR Desc: lipid transfer protein precursor
  misc_feature: Homolog of GI Number: 12659322 NR Desc: lipid transfer protein
  misc_feature: Homolog of GI Number: 28194086 NR Desc: lipid transfer protein isoform 4
  misc_feature: Homolog of GI Number: 19039 NR Desc: LTP 1

SEQ ID NO: 149 - DNA, 1029 bp, Zea mays
  misc_feature: Ceres CLONE ID no. 220111
  misc_feature: Ceres CDNA ID no. 36707212
  CDS (88)..(834): REFERENCED BY SEQ ID NO: 150
ttctcgcgcgatcgtctcggcctctcgggattctagagtggcggccggctctccgcctgttcttgtcgtcgctgctcctttcccaggatgtcggaacgttctgagagcgcaactgaaaagattatgagcagcatcatggataccattgctgacaaccttcctaagcagaagtctgggaaatttgatccaggttcagtctctgacaaagtgaagaataagctgtttggtcgtcagaagaccttgcatggagttctgggtggtggaaaacctgctgatgtgctgttatggaggaacaaaaagatatcatcgagtgttctggctcttgcaacagctatttgggttttctttgagtggctcgactaccacttactgacaattgtttcatttgcccttgttcttggaatggttgtccagtttgtttggtccaacttctcaaacatgctaagcagcggatcccgttctcaggtgccccgagttgaattgcctgatgagttatttgtgaacattgccgttgcaatcggtgcccaaataaacaagttcctgtgcttccttcaggatgtttcttgtgaaagaaacttgaagcattttgtagtggcgatcgcaggactgtgggctgctgcggtgattggaagttggtgcaatttcctgactgtcatatatgtcgggtttgtttgtgttcacacgcttccggtgctctatgagaagtacgaagaccaagtggacgatttcctctacagccttcttggtctgctgcgagatcaatatcagaagctcgaccaaggcgtcttgagcaagattcccaaggggaacatgaaggctaagaagaacgagtagtttagcaggtggtttctcgtgaatgagatcaatatcgttttgacttgtgtcgattattacctaaggcgtgtgtgccattctgaacctggctgctagttcatcgcccgccgggggtttaaactactaagctgcaatgcacaagtaatgaagtgtgctagttcattgcccacacgggtactaaaaaaaaaaaaaaaa

SEQ ID NO: 150 - protein, 248 aa, Zea mays
  misc_feature: Ceres CLONE ID no. 220111
  misc_feature: Ceres CDNA ID no. 36707212
  misc_feature (61)..(245): Pfam Name: Reticulon PFAM Desc: Reticulon
  misc_feature: Homolog of GI Number: 30681227 NR Desc: reticulon family protein
  misc_feature: Homolog of GI Number: 83284001 NR Desc: putative 24 kDa seed maturation protein
  misc_feature: Homolog of GI Number: 34909318 NR Desc: OSJNBb0021A09.5
  misc_feature: Homolog of GI Number: 34904202 NR Desc: P0492F05.25
  misc_feature: Homolog of GI Number: 56381963 NR Desc: At3g61560
  misc_feature: Homolog of GI Number: 38049088 NR Desc: TPA: RTN
MSERSESATEKIMSSIMDTIADNLPKQKSGKFDPGSVSDKVKNKLFGRQKTLHGVLGGGKPADVLLWRNKKISSSVLALATAIWVFFEWLDYHLLTIVSFALVLGMVVQFVWSNFSNMLSSGSRSQVPRVELPDELFVNIAVAIGAQINKFLCFLQDVSCERNLKHFVVAIAGLWAAAVIGSWCNFLTVIYVGFVCVHTLPVLYEKYEDQVDDFLYSLLGLLRDQYQKLDQGVLSKIPKGNMKAKKNE

SEQ ID NO: 151 - DNA, 811 bp, Zea mays
  misc_feature: Ceres CLONE ID no. 220112
  misc_feature: Ceres CDNA ID no. 36707507
  CDS (105)..(590): REFERENCED BY SEQ ID NO: 152
agtattctgctcaagcacaccgcagaaaaagaaaaagaaaaggcaaaggcaaaggaatcccaatcaggcaagcaaaaaggaagaaccaggtgctgcggccggagatgtcgtcgcagctgatcgaggagcaccggtcgggcgcggaggtgcacgtcgggcacgagctgtgcgagcgcaagtcgcgcgagttcatggtggagctgggcctccccgacgggctcctcccgctgcccaggctcgacgaggtgggctacaaccggtcgacggggttcgtgtggctgcggcaggccgccggcctgacccacaccttcgggtccatcggcaagcaggtgtggtacgacagggaggtgacggcgttcgtggagccggggcggatgcacggcctcgccggggtgaagagcaaggagctcctcatctgggtcaccatctccgagatcgtcctcagcccctccggcaccaagatcgtgttccgcacccccgcggggctcggccgcgccttccctgtcaccgccttccagctcgagcccgcggcggccgagggggaccacaaggaggaggccgaggacgccgccgccgccgccgccaactgatctgctctagcttccggcgccggcgccggcggccgtgcgtgggctgctcgatccggtagtggcagtggctttgtgagacagtcgagtcgattgtggtttcccctccttcgccccgcagtgtgcgtgtgcgtgtagtggatgatgatgcatgaataaacggtgtccctggatccagaactcacggtttgattttggggtgatttggaaaaaaaaaaaaaaaa

SEQ ID NO: 152 - protein, 161 aa, Zea mays
  misc_feature: Ceres CLONE ID no. 220112
  misc_feature: Ceres CDNA ID no. 36707507
  misc_feature: Homolog of GI Number: 53793125 NR Desc: putative susceptibility homeodomain transcription factor
  misc_feature: Homolog of GI Number: 18644694 NR Desc: susceptibility homeodomain transciption factor
  misc_feature: Homolog of GI Number: 66779508 NR Desc: Aspartate/glutamate/uridylate kinase
  misc_feature: Homolog of GI Number: 67987177 NR Desc: 4Fe [Kineococcus radiotolerans SRS30216]
  misc_feature: Homolog of GI Number: 66776103 NR Desc: LigA
  misc_feature: Homolog of GI Number: 53792395 NR Desc: zinc knuckle containing protein
  misc_feature: Homolog of GI Number: 66776813 NR Desc: Phosphoribosylaminoimidazole
  misc_feature: Homolog of GI Number: 66778264 NR Desc: LigA
  misc_feature: Homolog of GI Number: 66778899 NR Desc: UvrD/REP helicase
MSSQLIEEHRSGAEVHVGHELCERKSREFMVELGLPDGLLPLPRLDEVGYNRSTGFVWLRQAAGLTHTFGSIGKQVWYDREVTAFVEPGRMHGLAGVKSKELLIWVTISEIVLSPSGTKIVFRTPAGLGRAFPVTAFQLEPAAAEGDHKEEAEDAAAAAAN

SEQ ID NO: 153 - DNA, 707 bp, Zea mays
  misc_feature: Ceres CLONE ID no. 220116
  misc_feature: Ceres CDNA ID no. 36707213
  CDS (1)..(450): REFERENCED BY SEQ ID NO: 154
cacgcacaccgcgacccagtccagagccagtacgtgcgaagcagcacgcacgctgctggtccgcgtacgcgagacgacggtcaggtcggccggtgcttttcagtttggaataatgacggcgacgacgacgacagccgccggcggcggcaaggtgcagccgcgcggcctgcccgcggcgctgtccctgctgctgctcctggtgttggcagcggggctgggcggtggcgccgaggcgcagcagacgtgcgcggggcagctgcgcgggctggccccctgcttgcgctacagcgtgccacccttgccggggcaggttccgccggcgcccgggccggagtgctgctccgcgctgggggccgtgtccagggactgcgcctgcggaacgttcagcatcatcaacagcctgccggccaagtgcggcctcccgccagtcagctgccagtaatgagctgatgatagccagtgcgatgcactgggcaaaaggcaagggatccaaacacgctgaataataaaaggccaccggcgtcgagtcgactcggtgtcctcattccgtcattcgtagtgaatgctaaagcaaactcttgagggtcgcgtgcccttttgcgatcttgtacgcacacgaccggcctctggctgtgcaatgtgcaacatcgctttgattcaaagaaccaacaataatacagaacccactctgaaaaaaaaaaaaaaaa

SEQ ID NO: 154 - protein, 109 aa, Zea mays
  misc_feature: Ceres CLONE ID no. 220116
  misc_feature: Ceres CDNA ID no. 36707213
  misc_feature (45)..(108): Pfam Name: Tryp_alpha_amyl PFAM Desc: Protease inhibitor/seed storage/LTP family
  misc_feature: Homolog of GI Number: 3378527 NR Desc: anther specific protein
  misc_feature: Homolog of GI Number: 52077308 NR Desc: YY1 protein precursor
  misc_feature: Homolog of GI Number: 6689676 NR Desc: LTP
  misc_feature: Homolog of GI Number: 51965070 NR Desc: PREDICTED OJ1323_A06.22 gene product
  misc_feature: Homolog of GI Number: 19152 NR Desc: 108 protein
  misc_feature: Homolog of GI Number: 431148 NR Desc: ORF
  misc_feature: Homolog of GI Number: 629876 NR Desc: hypothetical 90 protein
  misc_feature: Homolog of GI Number: 1628471 NR Desc: Men
  misc_feature: Homolog of GI Number: 452592 NR Desc: ORF
MTATTTTAAGGGKVQPRGLPAALSLLLLLVLAAGLGGGAEAQQTCAGQLRGLAPCLRYSVPPLPGQVPPAPGPECCSALGAVSRDCACGTFSIINSLPAKCGLPPVSCQ

SEQ ID NO: 155 - DNA, 765 bp, Zea mays
  misc_feature: Ceres CLONE ID no. 220134
  misc_feature: Ceres CDNA ID no. 36707214
  CDS (89)..(562): REFERENCED BY SEQ ID NO: 156
gtgctctctcagaggtgggctggcttctcctccccctcttaccaagtcctcctcgggttagggttccttagggttttgtggaggggcgatggcggcggctgatgtggagtaccgttgcttcgtcggcgggcttgcctgggccaccagcaacgagtcgctggagaatgccttcgcctcctacggcgagatcctcgactccaaggtcatcaccgaccgggagacggggaggtctcgcggcttcggcttcgttaccttctcctccgagaactccatgctcgacgctatcgagaacatgaacggcaaggagctcgacggccgtaacatcaccgttaaccaggcccagtcccgtggcggtggcggtggcggcggtggctacggcggcggtcgcggcggcggcggctatggtggcgggcgccgtgacggcggttatggcggcggtggcggctacggcggtcggcgcgagggtggtggcggcggctacggaggcggtggcggctacggcggtcggcgcgagggtggtggtggcggctacggcggcggcggcggcggctggagggactgatgtgtgggcccatcctggcttcggccgagttatcttatctatctatagtatcgtgttaccgttcgcttctgtcaccgtgttagtgtccgttctacctttggattaggtgttggtacccctgttgttccctttgtttgctcccgctatgaaacgagacgagagaagaatgagcaaggtttttgttcgcaaaaaaataaaaaaaa

SEQ ID NO: 156 - protein, 157 aa, Zea mays
  misc_feature: Ceres CLONE ID no. 220134
  misc_feature: Ceres CDNA ID no. 36707214
  misc_feature (10)..(81): Pfam Name: RRM_1 PFAM Desc: RNA recognition motif.
  misc_feature: Homolog of GI Number: 22313 NR Desc: ABA
  misc_feature: Homolog of GI Number: 10799202 NR Desc: glycine
  misc_feature: Homolog of GI Number: 21625 NR Desc: glycine
  misc_feature: Homolog of GI Number: 50881454 NR Desc: glycine
  misc_feature: Homolog of GI Number: 18347 NR Desc: glycine
  misc_feature: Homolog of GI Number: 2331131 NR Desc: glycine
  misc_feature: Homolog of GI Number: 2331133 NR Desc: glycine
  misc_feature: Homolog of GI Number: 22293 NR Desc: glycine
  misc_feature: Homolog of GI Number: 77557139 NR Desc: glycine
  misc_feature: Homolog of GI Number: 2267593 NR Desc: glycine
MAAADVEYRCFVGGLAWATSNESLENAFASYGEILDSKVITDRETGRSRGFGFVTFSSENSMLDAIENMNGKELDGRNITVNQAQSRGGGGGGGGYGGGRGGGGYGGGRRDGGYGGGGGYGGRREGGGGGYGGGGGYGGRREGGGGGYGGGGGGWRD

SEQ ID NO: 157 - DNA, 713 bp, Zea mays
  misc_feature: Ceres CLONE ID no. 220147
  misc_feature: Ceres CDNA ID no. 36705514
  CDS (73)..(525): REFERENCED BY SEQ ID NO: 158
actcatacatttcgactctcaactcccaaggtcccttttttttctcgatctggaagcgccgcagtagcagccatggacgtgagcggagcaggcgggaaggcgaagaagggcgcggccgggcgcaaggccggcgggccgacgaagaagtcggtgtcgcggtcctccagggccgggctgcagttccccgtcagccgcgtcgggcggtacctcaaaaagggccggtacgcgcagcgtgtaggcacgggtgcccccgtctacctcgccgccgtcctggagtacctcgcggccgaggtgctcgagctcgccggcaacgcggcaagggacaacaagaagacgcgcatcatcccgcgccacgtgctcctcgccatccgcaacgacgaggagctcggcaagctgctggccggcgtcaccatcgcccacggcggcgtcctccccaacatccacactgtgctcctccccaagaaggtggccgagaaggcggccaaggagcccaagaaggccgccaagtcccccaagaaggcgtagagtgatctcctgtcttagaacaatattaccattagcggccgtgcagttagactagatcatgtttagtgtagatccgcaatgttcttgtccctgctgccatctggaacggtttatctagtacatccatgcattttccttgctaattgcaaaaaagcggtctaatcttttgtctaaaaaaaaaaaaaaaa

SEQ ID NO: 158 - protein, 150 aa, Zea mays; identical to SEQ ID NO: 104
  misc_feature: Ceres CLONE ID no. 220147
  misc_feature: Ceres CDNA ID no. 36705514
  misc_feature (29)..(104): Pfam Name: Histone PFAM Desc: Core histone H2A/H2B/H3/H4
  misc_feature: Homolog of GI Number: 729671 NR Desc: Histone H2A
  misc_feature: Homolog of GI Number: 34914498 NR Desc: putative histone H2A
  misc_feature: Homolog of GI Number: 47026919 NR Desc: histone H2A
  misc_feature: Homolog of GI Number: 47026912 NR Desc: histone H2A
  misc_feature: Homolog of GI Number: 7649159 NR Desc: histone H2A
  misc_feature: Homolog of GI Number: 122006 NR Desc: Histone H2A
  misc_feature: Homolog of GI Number: 121982 NR Desc: Histone H2A.2.2
  misc_feature: Homolog of GI Number: 50931693 NR Desc: putative histone H2A
  misc_feature: Homolog of GI Number: 121974 NR Desc: Histone H2A.2.1
  misc_feature: Homolog of GI Number: 68441405 NR Desc:  similar to histone H2A

SEQ ID NO: 159 - DNA, 859 bp, Zea mays
  misc_feature: Ceres CLONE ID no. 220151
  misc_feature: Ceres CDNA ID no. 36707187
  CDS (95)..(577): REFERENCED BY SEQ ID NO: 160
gaagcttatcgcttatcatccgcgcctctacatttcttctctctctgctcctccgcctccgcctccgcctgatccatccaagacagggatcgccatgtcggactcggaggagcaccacttcgaatcgaaggccgacgctggggcgtccaagacctacccgcagcaggctggcaccgtccgtaagaacggcttcatcgtcatcaagaaccgtccctgcaaggttgtggaggtttctacctccaagactggtaagcatggccacgccaaatgccactttgtcgccatagacatattcaatgggaaaaagcttgaagatattgttccttcatcacacaactgtgacattccgcatgtgaaccgtactgagtatcagctgattgatatttctgaggatggatttgtgagccttcttacttcagatggcaacactaaggatgatcttagactcccaactgatgagactcttgtggcccagattaaggaagggttcgaaagcgggaaggatcttgttgtgactgtccagtctgcgatgggggaggagcagatctgcgcgctgaaggatgttggccccaagtaacttccttggctttggagacggaaccctactctatctcaacttaaatcggaaaagaagtgtatcaccaaaaggattgctaccgagacattcacctggcttgagctggcttttgctatagcgtgcaaggggttgctgggtgtcgtacctacctgacttatcattatctgtggttacattctggaccctgtattttctatgctttcatgtctctctactttctagtattaattatcaataagttggtttggaatggttgaattgcatccaaaaaaaaaaaaaaaa

SEQ ID NO: 160 - protein, 160 aa, Zea mays
  misc_feature: Ceres CLONE ID no. 220151
  misc_feature: Ceres CDNA ID no. 36707187
  misc_feature (28)..(64): Pfam Name: KOW PFAM Desc: KOW motif
  misc_feature (86)..(155): Pfam Name: eIF PFAM Desc: Eukaryotic initiation factor 5A hypusine
  misc_feature: Homolog of GI Number: 1546919 NR Desc: translation initiation factor 5A
  misc_feature: Homolog of GI Number: 50938957 NR Desc: translation initiation factor 5A
  misc_feature: Homolog of GI Number: 77555893 NR Desc: translation initiation factor eIF
  misc_feature: Homolog of GI Number: 13236654 NR Desc: translation initiation factor 5A
  misc_feature: Homolog of GI Number: 33325119 NR Desc: eukaryotic translation initiation factor 5A isoform II
  misc_feature: Homolog of GI Number: 8919176 NR Desc: translation initiation factor
  misc_feature: Homolog of GI Number: 33325121 NR Desc: eukaryotic translation initiation factor 5A isoform III
  misc_feature: Homolog of GI Number: 33325127 NR Desc: eukaryotic translation initiation factor 5A isoform VI
  misc_feature: Homolog of GI Number: 33325131 NR Desc: eukaryotic translation initiation factor 5A isoform VIII
  misc_feature: Homolog of GI Number: 33325123 NR Desc: eukaryotic translation initiation factor 5A isoform IV
MSDSEEHHFESKADAGASKTYPQQAGTVRKNGFIVIKNRPCKVVEVSTSKTGKHGHAKCHFVAIDIFNGKKLEDIVPSSHNCDIPHVNRTEYQLIDISEDGFVSLLTSDGNTKDDLRLPTDETLVAQIKEGFESGKDLVVTVQSAMGEEQICALKDVGPK

SEQ ID NO: 161 - DNA, 637 bp, Zea mays
  misc_feature: Ceres CLONE ID no. 220152
  misc_feature: Ceres CDNA ID no. 36705515
  CDS (48)..(383): REFERENCED BY SEQ ID NO: 162
cctagacgagcgtgtgcggtggcggcgggaggagacgaaagagaaatatgcaggcggtggcacgggcggcgcgtgggctcgcggctgcggctgcggctgcgcggccgtcggcgacggaggcagggcaccgcgggcaggtgcagcaagctcggggcatcgtggtgcaggtgagggacgggaatctggagcgggcgctgtcgatcatggagcgcaggatgcggtccagcggcatggagcgcctcatccgggcgcgcacccattaccacgtcaaggactcggagaagcgcgtgctcgcgcgtaaggggcttatgcaacgcgtccgttcccaggagctcggcaagaagctccgcgagatcctcatcaagaagatcaggggccagtgagggcatcaacgcattggccgtttaccggtagcatttgtgtgtgggtgcttcgttttgagcgcgtaacaatgctgggtactttcatcgatggttctgtggcgcagcctgagaataactcaacctaccttgagcaaaaaggcttttgctatattgcatggaggacagattgatggtaaaactattgtttttttattgtacaacttagtatatatatggatttaattactgtttgtgccaaaaaaaaaaaaaaaaaa

SEQ ID NO: 162 - protein, 111 aa, Zea mays
  misc_feature: Ceres CLONE ID no. 220152
  misc_feature: Ceres CDNA ID no. 36705515
  misc_feature: Homolog of GI Number: 15231548 NR Desc: ribosomal protein
MQAVARAARGLAAAAAAARPSATEAGHRGQVQQARGIVVQVRDGNLERALSIMERRMRSSGMERLIRARTHYHVKDSEKRVLARKGLMQRVRSQELGKKLREILIKKIRGQ

SEQ ID NO: 163 - DNA, 903 bp, Zea mays
  misc_feature: Ceres CLONE ID no. 220153
  misc_feature: Ceres CDNA ID no. 36705516
  CDS (3)..(629): REFERENCED BY SEQ ID NO: 164
accaccagttccttgttcggtcggaacgcagcgcagcggcggcggcgatagggagagaggagagagtctgcaggatccagcaggccgagggaggagtcagcggcgggccggagaatatgagcggcaacggcgcgaagaaggtggtcgatgcggcggtgaaggccggcaggacgatcatcgactgggacggcatggccaagttgctcgtcaccgacgaggcgcgcaaggagttcgccgccctccgccgcgctttcgatgacgtcaaccaccagctccagaccaagttctcccaggaaccccagccgattgattgggagtactacagaaaaggaattggatcaaaagtggtggatatgtacaaagaggcttttgaaagcatcgagatcccgaagtacgtcgacacagttactccccagtacaagccaaagtttgatgctgtgattgctgaattaaaggaggctgagaaagagcatcagaaggagtcagaaaggatagagaaggaacttgctgaaatggaggaaatgaggaaaaagatcagtacaatgacagcagatgattactttgagaagtaccctgaactcaggaagaagtttgacgatgaaatccgtaacgataactggggatattgaagagattggagagaactcttatgatgccatttccatgtccgtgaagaaccaataattttcctgtgccctgaattgggtggtttccatagcatgtgcacggggtttgggtggaatgcctacagaatcgactgtgtcaagctttcttgattccgtagaaacatgttttgtttgacctcatcatagaggatctccgcttttatcgtacaaagattgtgatatgttcttagcttctttctacctgaataagaggatttctgtaaaaaaaaaaaaaaaa

SEQ ID NO: 164 - protein, 170 aa, Zea mays
  misc_feature: Ceres CLONE ID no. 220153
  misc_feature: Ceres CDNA ID no. 36705516
  misc_feature (12)..(165): Pfam Name: Mt_ATP PFAM Desc: ATP synthase D chain
  misc_feature: Homolog of GI Number: 50946875 NR Desc: putative mitochondrial F0 ATP synthase D chain
  misc_feature: Homolog of GI Number: 48209968 NR Desc: putative mitochondrial ATP synthase
  misc_feature: Homolog of GI Number: 17939851 NR Desc: mitochondrial F0 ATP synthase D chain
  misc_feature: Homolog of GI Number: 53748419 NR Desc: mitochondrial F0 ATP synthase delta chain
MSGNGAKKVVDAAVKAGRTIIDWDGMAKLLVTDEARKEFAALRRAFDDVNHQLQTKFSQEPQPIDWEYYRKGIGSKVVDMYKEAFESIEIPKYVDTVTPQYKPKFDAVIAELKEAEKEHQKESERIEKELAEMEEMRKKISTMTADDYFEKYPELRKKFDDEIRNDNWGY

SEQ ID NO: 165 - DNA, 535 bp, Zea mays
  misc_feature: Ceres CLONE ID no. 220162
  misc_feature: Ceres CDNA ID no. 40350887
  CDS (114)..(473): REFERENCED BY SEQ ID NO: 166
acacgcacaccgcgacccagtccagagccagtacgtgcgaagcagcacgcacgctgctggtccgcgtacgcgagacgacggtcaggtcggccggtgcttttcagtttggaataatgacggcgacgacgacgacagccgccggcggcggcaaggtgcagccgcgcggcctgcccgcggcgctgtccctgctgctgctcctggtgttggcagcggggctgggcggtggcgccgaggcgcagcagacgtgcgcggggcagctgcgcgggctggccccctgcttgcgctacagcgtgccacccttgccggggcaggttccgccggcgcccgggccggagtgctgctccgcgctgggggccgtgtccagggactgcgcctgcggaacgttcagcatcatcaacagcctgccggccaagtgcggcctcccgccagtcagctgccgtaaggcctccatctctagttatttgtcgtgctgatccgccatgaatgacacacactgcgccatgccgccatccgccacgcaaaaaaaaaaaaaaaa

SEQ ID NO: 166 - protein, 119 aa, Zea mays
  misc_feature: Ceres CLONE ID no. 220162
  misc_feature: Ceres CDNA ID no. 40350887
  misc_feature (45)..(108): Pfam Name: Tryp_alpha_amyl PFAM Desc: Protease inhibitor/seed storage/LTP family
MTATTTTAAGGGKVQPRGLPAALSLLLLLVLAAGLGGGAEAQQTCAGQLRGLAPCLRYSVPPLPGQVPPAPGPECCSALGAVSRDCACGTFSIINSLPAKCGLPPVSCRKASISSYLSC

SEQ ID NO: 167 - DNA, 691 bp, Zea mays
  misc_feature: Ceres CLONE ID no. 220224
  misc_feature: Ceres CDNA ID no. 36707188
  CDS (90)..(494): REFERENCED BY SEQ ID NO: 168
acacaacacaacaacaacaaccatctccaacgcagcaagcagacacagggacaggcaggcagcgagtgcaaccgcgagagcgatcagcgatgggctccttcttctcgaccttagtgacgccccctccgcccgccgccgacgacccgaactgcgccgtggtggccgcgcactccaaggccacctacgacgagcagtgggcggcccacaagagcagcagcaagctgatggtgatcgacttctcggcgtcctggtgcgggccctgccgcttcatcgagccggccttcaaggagctggcctcccgcttcaccgatgccatcttcatcaaggtcgacgtcgacgagctcgcggaggtcgcaaggacatggaaggtagaggcgatgccaacgttcgtgctggtcaaggatgggaaggaggtaggccgtgtgattggggctaagaaggacgagcttgagaggaagatcaggatgttcgtcacgtcatcttcctcgtcctaacttagcagtgcatacactcccaccttcttactggtttctcgactccagtggttcacctgggacggggttgctgaaatggttcccttctctgaatactgaaaaatcaaaaaaagaagtatatgaaaaaatgatggtagacgtgtctgggtcaataagagtttctgaaacttggatttgtaagaaaaaaaaaaaaaaaa

SEQ ID NO: 168 - protein, 134 aa, Zea mays; identical to SEQ ID NO: 112
  misc_feature: Ceres CLONE ID no. 220224
  misc_feature: Ceres CDNA ID no. 36707188
  misc_feature (23)..(129): Pfam Name: Thioredoxin PFAM Desc: Thioredoxin
  misc_feature: Homolog of GI Number: 34897150 NR Desc: putative thioredoxin
  misc_feature: Homolog of GI Number: 50934869 NR Desc: putative thioredoxin
  misc_feature: Homolog of GI Number: 53748519 NR Desc: thioredoxin 3
  misc_feature: Homolog of GI Number: 33621080 NR Desc: thioredoxin H2
  misc_feature: Homolog of GI Number: 27466896 NR Desc: thioredoxin h
  misc_feature: Homolog of GI Number: 46326970 NR Desc: thioredoxin
  misc_feature: Homolog of GI Number: 82407383 NR Desc: Chain A
  misc_feature: Homolog of GI Number: 50934769 NR Desc: Thioredoxin H
  misc_feature: Homolog of GI Number: 13624884 NR Desc: thioredoxin h
  misc_feature: Homolog of GI Number: 25990392 NR Desc: thioredoxin h

SEQ ID NO: 169 - DNA, 989 bp, Zea mays
  misc_feature: Ceres CLONE ID no. 220525
  misc_feature: Ceres CDNA ID no. 36707034
  CDS (153)..(650): REFERENCED BY SEQ ID NO: 170
aaaccaaactcggctcaagagagatcgcatcttgcctgcccacccagcttccctttcgttcctcctcgccccagcgacgcggcctcccgtagaccgagcaaggcaacccaccactgagaggcacgcagaggagcaggaagccggagaccaagatgtcgtcggtgttcagcggcgatgagacggcccccttcttcggtttcctcggcgccgccgccgccctcgtcttctcatgcatgggcgcagcgtacgggaccgcgaagagcggcgtcggcgtggcgtcgatgggtgtgatgcggccggagctcgtcatgaagtccatcgtgcccgtggtcatggctggtgtgctcggtatctacgggctcatcatcgccgtcatcatcagcactgggatcaaccccaaggccaagccctactacctttttgatggctacgctcacctttcgtccgggcttgcctgtggccttgctgggcttgcagctggcatggccatcggcattgttggtgatgctggagtcagggcgaatgcacaacagccgaagctttttgtgggcatgatcctcatcctcattttcgcagaagcgcttgctctgtacggtctcattgttggaattatcctttcatcccgtgctggtcaatcccgggcagattaagtgcactaccattctgcaattaccgtactgtttattatgctattctaagagaattgaaaccctatgcccttgtctagtttattcttgttaccatgtattaatgaaacaatttgtagctgaaggaaggtgacacttccagccatgttggttttggcggtgttaagcagaggttatttattgggttaaggttggagggatgcgggttaagattggatggatgctcctgggctaagtggatttaatttttatccttggtgaataatgaacacggaggtgtagccaaataataacgtgatatatatatttctttgccccttttaaagaaaaaaaaaaaaaaaa

SEQ ID NO: 170 - protein, 165 aa, Zea mays
  misc_feature: Ceres CLONE ID no. 220525
  misc_feature: Ceres CDNA ID no. 36707034
  misc_feature (14)..(79): Pfam Name: ATP PFAM Desc: ATP synthase subunit C
  misc_feature: Homolog of GI Number: 54639893 NR Desc: vacuolar ATPase subunit c isoform
  misc_feature: Homolog of GI Number: 15186772 NR Desc: V
  misc_feature: Homolog of GI Number: 62701931 NR Desc: V
  misc_feature: Homolog of GI Number: 137476 NR Desc: Vacuolar ATP synthase 16 kDa proteolipid subunit
  misc_feature: Homolog of GI Number: 52851178 NR Desc: vacuolar H+
  misc_feature: Homolog of GI Number: 3334412 NR Desc: Vacuolar ATP synthase 16 kDa proteolipid subunit
  misc_feature: Homolog of GI Number: 4519260 NR Desc: vacuolar H+
  misc_feature: Homolog of GI Number: 50909323 NR Desc: putative Vacuolar ATP synthase 16 kDa proteolipid subunit
  misc_feature: Homolog of GI Number: 52353608 NR Desc: putative vacuolar ATP synthase 16 kDa proteolipid subunit
  misc_feature: Homolog of GI Number: 1429264 NR Desc: subunit c of V
MSSVFSGDETAPFFGFLGAAAALVFSCMGAAYGTAKSGVGVASMGVMRPELVMKSIVPVVMAGVLGIYGLIIAVIISTGINPKAKPYYLFDGYAHLSSGLACGLAGLAAGMAIGIVGDAGVRANAQQPKLFVGMILILIFAEALALYGLIVGIILSSRAGQSRAD

SEQ ID NO: 171 - DNA, 980 bp, Zea mays
  misc_feature: Ceres CLONE ID no. 221619
  misc_feature: Ceres CDNA ID no. 36691178
  CDS (102)..(875): REFERENCED BY SEQ ID NO: 172
atcactaccaccgctctctcttcctctcctccatctctcaacgcctgaagctcaccgcacctcccctcctcgccgcggatcccccactactccggtagaaaatggctgacgctgaggatatccagcccctcgtctgcgacaacggaactggcatggtcaaggctgggttcgccggcgacgacgccccgagggccgtcttccccagcatcgttgggcgcccgcgccacaccggtgtgatggtggggatggggcagaaggatgcctacgtcggcgacgaggcgcagtccaagaggggtatcctgaccctcaagtaccccatcgagcacggaatcgtcagcaactgggacgacatggagaagatctggcatcacaccttctacaacgagctccgtgtggctcccgaggaacaccccgtcctcctcactgaggcgcccctgaacccaaaggctaaccgtgagaagatgacccagatcatgttcgagaccttcaacacccccgctatgtacgtcgccatccaggccgtcctgtctctgtatgccagtggtcgtaccacaggtatcgtgctcgactcgggagatggtgtcagccacactgtccccatctacgagggatacgccctcccccacgccatccttcgtctcgacctggctggccgcgacctcaccgactacctcatgaagatcctgactgaacgcggctactccttcaccaccactgctgagcgggaaattgtcagggacatgaaggagagcgggcggttgtgcgcgcgggagccacgcgagctggcggcggttgtttgcggctgcgggatcctcggcggttgtgcgcgcgggagccacgggagtgaggggagagcgggggcagtctacatgtgagtcttaatagttgtagaagactttggaaagtagtggaatgtcacattctaaaaaaatagcctattctaatagtaagattctaattccccaaaaaaaaaaaaaaaa

SEQ ID NO: 172 - protein, 257 aa, Zea mays
  misc_feature: Ceres CLONE ID no. 221619
  misc_feature: Ceres CDNA ID no. 36691178
  misc_feature: The plant flowers significantly late compared to wild-type.
  misc_feature: The plant is abnormally small.
  misc_feature: Useful for making plants with modulated biomass
  misc_feature: Useful for making plants with modulated flowering time
  misc_feature (8)..(257): Pfam Name: Actin PFAM Desc: Actin
  misc_feature: Homolog of GI Number: 50918345 NR Desc: actin
  misc_feature: Homolog of GI Number: 499012 NR Desc: actin
  misc_feature: Homolog of GI Number: 295885 NR Desc: actin
  misc_feature: Homolog of GI Number: 77556832 NR Desc: Actin
  misc_feature: Homolog of GI Number: 8885543 NR Desc: actin 4
  misc_feature: Homolog of GI Number: 28827524 NR Desc: putative actin 12
  misc_feature: Homolog of GI Number: 28393806 NR Desc: putative actin 4
  misc_feature: Homolog of GI Number: 83423376 NR Desc: actin
  misc_feature: Homolog of GI Number: 22609 NR Desc: actin
  misc_feature: Homolog of GI Number: 7211789 NR Desc: actin 1
MADAEDIQPLVCDNGTGMVKAGFAGDDAPRAVFPSIVGRPRHTGVMVGMGQKDAYVGDEAQSKRGILTLKYPIEHGIVSNWDDMEKIWHHTFYNELRVAPEEHPVLLTEAPLNPKANREKMTQIMFETFNTPAMYVAIQAVLSLYASGRTTGIVLDSGDGVSHTVPIYEGYALPHAILRLDLAGRDLTDYLMKILTERGYSFTTTAEREIVRDMKESGRLCAREPRELAAVVCGCGILGGCARGSHGSEGRAGAVYM

SEQ ID NO: 173 - DNA, 852 bp, Zea mays
  misc_feature: Ceres CLONE ID no. 221638
  misc_feature: Ceres CDNA ID no. 36707190
  CDS (135)..(566): REFERENCED BY SEQ ID NO: 174
aattcacaacgcatcgtcgtctcccacaacacgctccactaaccctagcgacagcctcgggtcgtcgtttgatccccgcggggagctctagttccgccaagcgtgcgtaccggcgtccggatccgggaccgaagatgacggagtccctggtgcggaacaagccggggatggccagcatcaaggagatgccggtggtgcaggacgggccgccgccgggcggtttcgcgcccgtgcgcttcgcccgccggatccccacctcggggcccagcgccaccgccatcttcctcaccaccttcggtgctttcgcatatggcatgtaccaggtcggccaggggaacaaggtccgccgggcgctcaaagaagagaaaattgctgctcgcagtgctatactgccgatgctccaagcagaagaggatgaaagatttgtcaaagagtggaagaagtgtcttgaggaggaggcgaggatcatgaaagacgttccagggtggaaggtcggcgagagcgtgtacaactctgggaaatggatgcccccggctactggtgagctccgccctgaggtttggtaagggcctgttgcaggcactgaatgccatcatgtcacgggggcacggataaagcttcatttttcattaaggatcagctgtttaaagacctgtatttgttgtacttgaaatctggctggttaataattggacatgtaaagccgacgtttacattgatgtaacgtgttcttgtctgctattgcttcccagcctctggtgtttcttcctgtaagtcattccgaacatgaatccttgttattgaagaaagtatgaaataaaaaaaaaaaaaaaaacaaaaaaaaaaaaaaaa

SEQ ID NO: 174 - protein, 143 aa, Zea mays; identical to SEQ ID NO: 84
  misc_feature: Ceres CLONE ID no. 221638
  misc_feature: Ceres CDNA ID no. 36707190
  misc_feature (16)..(141): Pfam Name: GRIM PFAM Desc: GRIM
  misc_feature: Homolog of GI Number: 16973316 NR Desc: F6
  misc_feature: Homolog of GI Number: 34334020 NR Desc: NADH:ubiquinone oxidoreductase B16.6 subunit
  misc_feature: Homolog of GI Number: 35187443 NR Desc: fiber protein Fb20
  misc_feature: Homolog of GI Number: 21361822 NR Desc: cell death
  misc_feature: Homolog of GI Number: 34809544 NR Desc: GRIM19 protein
  misc_feature: Homolog of GI Number: 27668839 NR Desc: similar to novel cell death
  misc_feature: Homolog of GI Number: 55648697 NR Desc:  similar to cell death

SEQ ID NO: 175 - DNA, 730 bp, Zea mays
  misc_feature: Ceres CLONE ID no. 222356
  misc_feature: Ceres CDNA ID no. 25446278
  CDS (174)..(536): REFERENCED BY SEQ ID NO: 176
atcaatcggcccaggttttcctccgattgccttccgccgatcgagggctttctctgatcgatctggtgcctgttttgtggttttagtctgggtgaactccagggccaggagcagttcgccgccttcgttcgcatcacctacgcggttcgatccaactggcaggaaggaacgtgatggccaagacgagctcgttcaagctggagcacccccttgagaagaggcagtctgaggctaatcggatcagagagaagtaccctgacagaattccagtgattgttgagaaggctgagaggagtgacattcctgacatcgacaagaaaaagtacctcgtccctgctgatcttacggttggacaattcgtgtatgttgttaggaagagaatcaagctcagtgctgagaaagctatcttcatctttgtgaagaacacccttccaccaacagctgctctgatgtcttcaatctatgaagagaacaaggatgaggatggattcctctacatgacctacagtggtgagaacaccttcgggctcctctagatggctcaccacaatcgggtctgccttgcccttgcttccctactgatgccctgcctcgtgtaaataagacctgccaagcaattgtgtatattctggtttcctcgctcaactgctggaagtctaaaacctaccttatcatggacaccgtttaaattaagtaattgactggacctgaaacaaaaaaaaaaaaaaaa

SEQ ID NO: 176 - protein, 120 aa, Zea mays
  misc_feature: Ceres CLONE ID no. 222356
  misc_feature: Ceres CDNA ID no. 25446278
  misc_feature (15)..(118): Pfam Name: MAP1_LC3 PFAM Desc: Microtubule associated protein 1A/1B
  misc_feature: Homolog of GI Number: 50941899 NR Desc: putative microtubial binding protein
  misc_feature: Homolog of GI Number: 50928837 NR Desc: OSJNBa0053K19.12
  misc_feature: Homolog of GI Number: 34595981 NR Desc: microtubule
  misc_feature: Homolog of GI Number: 50937683 NR Desc: putative microtubule associated protein
  misc_feature: Homolog of GI Number: 21592920 NR Desc: putative microtubule
  misc_feature: Homolog of GI Number: 30102824 NR Desc: At4g21980
  misc_feature: Homolog of GI Number: 4581162 NR Desc: putative microtubule
  misc_feature: Homolog of GI Number: 21553487 NR Desc: symbiosis
  misc_feature: Homolog of GI Number: 2072023 NR Desc: symbiosis
  misc_feature: Homolog of GI Number: 3024687 NR Desc: SYMBIOSIS
  misc_feature: Useful for accelerating flowering time
  misc_feature: Useful for making ornamental plants with modified flowers
  misc_feature: Useful for making plants with increased biomass and foliage
  misc_feature: Useful for making shorter plants
  misc_feature: Useful for making shorter plants and plants with modified flowers
  misc_feature: Useful for making smaller plants
  misc_feature: Useful for modifying plant structure
  misc_feature: Useful for sterility
MAKTSSFKLEHPLEKRQSEANRIREKYPDRIPVIVEKAERSDIPDIDKKKYLVPADLTVGQFVYVVRKRIKLSAEKAIFIFVKNTLPPTAALMSSIYEENKDEDGFLYMTYSGENTFGLL

SEQ ID NO: 177 - DNA, 961 bp, Zea mays
  misc_feature: Ceres CLONE ID no. 222487
  misc_feature: Ceres CDNA ID no. 36707642
  CDS (77)..(607): REFERENCED BY SEQ ID NO: 178
gactcctcgcattcgccgctgcgtcaacgtgtcttccttcccgcggtctctccgccgcctcccagatccggcggccatggcaaggaacccgggctgcaccgtcttcataggtaacttggatgacaaggttcctgagagggttctgtatgaaattcttattcaggtaggtcgtgttgtagacctacacatacctcgtgacaaggaaactagccgaccaaaaggctatgcttttgctgagtatgaaacagaggagattgcccaatatgctgttaagctattttctggtcttgttcgacttcataataaaacgcttagatttgcgatctctgggcaagacaaaccctcattaaatggcaatatccctgtaactcctaggttaaactctgtaccacagccaaagcctcatcaacctatgaggtctagtgatactcctttgccacagcatgcagcagtgaatggcaggaatgccgggtatggtatcccaccaaatcattcatacgacacgcacactcaagcacaagcattcgtgatccgcccaattggctctcagggtgatcaagttataccgtttctgttacctggctgctgtccggtatttgcaagttgacctgttgtcatttccaagttcattagcgtggaagctggtgctgctggattttcacttaactggtgacttatcttgcattgtgataatgccacttcatcctagtcagaaaccagctggctttctgagtggcaaaccagcaggataccacaaatccaccatattgttggtcaagatgggttagatgcacatttctcatcgggttgtatctggaagccccatgactgcgattatgatgagctcatatatctactgaccgttgtatctgtctgtgatttgagctcgtgtacctgcagtaggccgataaaagaatggtaagatatcaatacttctgaagttccaaaaaaaaaaaaaaaa

SEQ ID NO: 178 - protein, 176 aa, Zea mays
  misc_feature: Ceres CLONE ID no. 222487
  misc_feature: Ceres CDNA ID no. 36707642
  misc_feature (9)..(81): Pfam Name: RRM_1 PFAM Desc: RNA recognition motif.
  misc_feature: Homolog of GI Number: 50931451 NR Desc: putative galactosyltransferase
  misc_feature: Homolog of GI Number: 34907328 NR Desc: P0698A10.26
  misc_feature: Homolog of GI Number: 56784854 NR Desc: galactosyltransferase
  misc_feature: Homolog of GI Number: 31432465 NR Desc: putative spliceosomal protein
  misc_feature: Homolog of GI Number: 14334958 NR Desc: putative spliceosome associated protein
  misc_feature: Homolog of GI Number: 21593441 NR Desc: putative spliceosome associated protein
  misc_feature: Homolog of GI Number: 23297611 NR Desc: putative spliceosome
  misc_feature: Homolog of GI Number: 65302503 NR Desc: splicing factor 3b subunit 4
  misc_feature: Homolog of GI Number: 56472460 NR Desc: RNA
MARNPGCTVFIGNLDDKVPERVLYEILIQVGRVVDLHIPRDKETSRPKGYAFAEYETEEIAQYAVKLFSGLVRLHNKTLRFAISGQDKPSLNGNIPVTPRLNSVPQPKPHQPMRSSDTPLPQHAAVNGRNAGYGIPPNHSYDTHTQAQAFVIRPIGSQGDQVIPFLLPGCCPVFAS

SEQ ID NO: 179 - DNA, 645 bp, Zea mays
  misc_feature: Ceres CLONE ID no. 222490
  misc_feature: Ceres CDNA ID no. 40350888
  CDS (91)..(438): REFERENCED BY SEQ ID NO: 180
aacacaacgcttataatacttacaacaaaagataagcccacgaatcagtagatcgaggtcccgcccagtccagcaaaagcacacacggagatgtcccagctgagctctgctggccacatggctgcgacgttcctcctcatcctcctcgcctccgcagcagcaacggtgtcagctgaccaacaagtctctgcctgccagaatgacatagacgcactgtggcgcagctgcaagcagttcgtccagaaggaggggcccaagatgcctccgtccgaggactgctgcaaaaccatcaaggccttagacgcgcacgcgtcctgcatctgcgactacgtcggctccccggacgccaggaataagctagacctggacaaggtgttcttcgttaccaaacagtgcggcgtcaccgtccccaagggctgcggatcaaagcaggactgaagagcggctgaatctgaatggagcaagttggctaacatacgcacggcagctacaaatacttataggaataaataaagttggtcaactgttggtttcatggtgttggagtacaacaactgtactgttcttatcctcatatatgatatatgaactctagttcatcacataatataaatctgtaagagagcccgaaaaaaaaaaaaaaaa

SEQ ID NO: 180 - protein, 115 aa, Zea mays
  misc_feature: Ceres CLONE ID no. 222490
  misc_feature: Ceres CDNA ID no. 40350888
  misc_feature (35)..(110): Pfam Name: Tryp_alpha_amyl PFAM Desc: Protease inhibitor/seed storage/LTP family
MSQLSSAGHMAATFLLILLASAAATVSADQQVSACQNDIDALWRSCKQFVQKEGPKMPPSEDCCKTIKALDAHASCICDYVGSPDARNKLDLDKVFFVTKQCGVTVPKGCGSKQD

SEQ ID NO: 181 - DNA, 758 bp, Zea mays
  misc_feature: Ceres CLONE ID no. 222499
  misc_feature: Ceres CDNA ID no. 36707191
  CDS (86)..(481): REFERENCED BY SEQ ID NO: 182
aaccgagacaccgcgtgcgaaccaagcagaccccagcagaagaagcgaagtcgtcgccggagcaggaggaagagcgagcagcaagatgtcgtggcaggcgtacgtcgatgaccacctgctgtgcgacatcgaaggccagcacctcagcgccgccgccatcgtcggccacgacggcagcgtctgggcacagtccgagaacttccccgagttaaagcctgaggaggttgctgggatgataaaggactttgatgaacctggaactcttgcaccaactggtctttttgttggaggtacgaagtacatggtgatccaaggtgaacctggagttgtcatccgaggaaagaagggcactggaggcattactatcaagaaaactggcatgtccttgattatcggtatctatgatgagccaatgactccagggcaatgcaatatggtggtggagaggctcggcgattacctgatcgaacagggcttctaagtttgtcataatgctattttggtcattgggcacttaagtttgcacctcatttggttctgtaatatgtgggcttgtgcatgtgcttggcgtattgcatgcagtgaataatttatcttcgcgttgggttggtgacaatgttgggaacggatttgaattggggtttatgcttgccatctcctcatatctcgaactcagctgctgtttcactgagtaatgtacatttccctggtaatggtacttgtgcactctgctgctttatggaaaaaaaaaaaaaaaa

SEQ ID NO: 182 - protein, 131 aa, Zea mays
  misc_feature: Ceres CLONE ID no. 222499
  misc_feature: Ceres CDNA ID no. 36707191
  misc_feature (2)..(126): Pfam Name: Profilin PFAM Desc: Profilin
  misc_feature: Homolog of GI Number: 11493677 NR Desc: profilin 5
  misc_feature: Homolog of GI Number: 2642324 NR Desc: profilin
  misc_feature: Homolog of GI Number: 55775452 NR Desc: putative profilin
  misc_feature: Homolog of GI Number: 1008443 NR Desc: profilin
  misc_feature: Homolog of GI Number: 1709779 NR Desc: Profilin
  misc_feature: Homolog of GI Number: 1052817 NR Desc: profilin
  misc_feature: Homolog of GI Number: 1008445 NR Desc: profilin
  misc_feature: Homolog of GI Number: 60418862 NR Desc: profilin 2
  misc_feature: Homolog of GI Number: 60418866 NR Desc: profilin 2
  misc_feature: Homolog of GI Number: 14161637 NR Desc: profilin
MSWQAYVDDHLLCDIEGQHLSAAAIVGHDGSVWAQSENFPELKPEEVAGMIKDFDEPGTLAPTGLFVGGTKYMVIQGEPGVVIRGKKGTGGITIKKTGMSLIIGIYDEPMTPGQCNMVVERLGDYLIEQGF

SEQ ID NO: 183 - DNA, 621 bp, Zea mays
  misc_feature: Ceres CLONE ID no. 222500
  misc_feature: Ceres CDNA ID no. 36704415
  CDS (93)..(443): REFERENCED BY SEQ ID NO: 184
acaacacaacgcttatattacttacaacaaaagataagcccacgaatcagtagatcgaggtcccgcccagtccagcagaagcgcacacggagatgtcccagctgagccctgctggccacatggctgcgacgctcctcctcatcctcctggcctccgcagcagcagcagcggtgtcagctgaccaacaggtctctgcctgccagaatgacatagacgcactgtggcgcagctgcaagcagttcgtccagaaggaggggcccaagatgcctccgtccgaggactgctgcaaaaccatcaaggccttagacgcgcacgcgtcctgcatctgcgactacgtcggctccccggacgccaggaataagctagacctggacaaggtgttcttcgttaccaaacagtgcggcgtcaccgtccccaagggctgcggatcaaagcaggactgaagagcggctgaatctgaatggagcaagttggctaacatacgcacggcagctacaaatacttataggaataaataaagttggtcaactgttggtttcatggtgttggagtacaacaactgtactgttcttatcctcatatatgatatatgaactctagttcatcgcaaaaaaaaaaaaa

SEQ ID NO: 184 - protein, 116 aa, Zea mays
  misc_feature: Ceres CLONE ID no. 222500
  misc_feature: Ceres CDNA ID no. 36704415
  misc_feature (36)..(111): Pfam Name: Tryp_alpha_amyl PFAM Desc: Protease inhibitor/seed storage/LTP family
  misc_feature: Homolog of GI Number: 78707772 NR Desc: Protease inhibitor/seed storage/LTP family
  misc_feature: Homolog of GI Number: 32395579 NR Desc: seed specific protein Bn15D18B
  misc_feature: Homolog of GI Number: 42567284 NR Desc: protease inhibitor/seed storage/lipid transfer protein
MSQLSPAGHMAATLLLILLASAAAAAVSADQQVSACQNDIDALWRSCKQFVQKEGPKMPPSEDCCKTIKALDAHASCICDYVGSPDARNKLDLDKVFFVTKQCGVTVPKGCGSKQD

SEQ ID NO: 185 - DNA, 467 bp, Zea mays
  misc_feature: Ceres CLONE ID no. 222508
  misc_feature: Ceres CDNA ID no. 25445546
  CDS (84)..(242): REFERENCED BY SEQ ID NO: 186
gccgactgggactgagaagaaacctccaaacacctacctctctacgaactacctgccgccggaaaaccctagagcgctcgaccatggatccgcagcagccggagcctgtcagttacctctgcggagattgcggagctgagaacaccctgaagcccggagatgtcatccagtgccgtgaatgtggctaccgcatcctctacaagaagcggacccgccggattgtccaatatgaagcgcgctgaagagtgaagacaagggaaaacactgaagatggttgatctattactcgccacattacctatgtaaacagtcttctgggggaaatgaaaatgtcagacttaacgtttgtatgtcgtgtgcctcctttgaacctgagctgtataatttgtaacgcttgaactggggactgatttgagaactgagacactgcagcaaaaaaaaaaaaaaaaaaaaaaaaaaaaaaaaaa

SEQ ID NO: 186 - protein, 52 aa, Zea mays
  misc_feature: Ceres CLONE ID no. 222508
  misc_feature: Ceres CDNA ID no. 25445546
  misc_feature (11)..(42): Pfam Name: DNA_RNApol_7kD PFAM Desc: DNA directed RNA polymerase
  misc_feature: Homolog of GI Number: 19112480 NR Desc: DNA
  misc_feature: Homolog of GI Number: 8248885 NR Desc: metallothionein
  misc_feature: Homolog of GI Number: 2529427 NR Desc: Rpc10
  misc_feature: Homolog of GI Number: 4826924 NR Desc: DNA directed RNA polymerase II polypeptide K
  misc_feature: Homolog of GI Number: 20306771 NR Desc: Polymerase
  misc_feature: Homolog of GI Number: 27681347 NR Desc: similar to DNA (ABC10-alpha) (RPB7.0) (RPB10alpha) (RPABC4)
  misc_feature: Homolog of GI Number: 62641997 NR Desc:  similar to DNA (ABC10-alpha) (RPB7.0) (RPB10alpha) (RPABC4)
  misc_feature: Homolog of GI Number: 25396103 NR Desc: protein F23B2.4
  misc_feature: Homolog of GI Number: 56966160 NR Desc: Chain L
MDPQQPEPVSYLCGDCGAENTLKPGDVIQCRECGYRILYKKRTRRIVQYEAR

SEQ ID NO: 187 - DNA, 435 bp, Zea mays
  misc_feature: Ceres CLONE ID no. 222966
  misc_feature: Ceres CDNA ID no. 35383156
  CDS (59)..(349): REFERENCED BY SEQ ID NO: 188
aaccctaactcattctttcacttctccagccgtcacagacaaccggccgccaggaagcatggccgaccgtgccctgctaatctcctcctccctttctgtctttcaatttgtttctgtcgctcactttcgttcggccgccaggaagcaccagcggctggctctggccgactgcaccctgcacagagccacacagccgcccactttctatttgctttctgttttttttttcgtttctacttgccgcactattactcggccgccaaggagaactagacatttgcactgtgcaattgaactcgaatctagtcctcatttactcgaatcccttactgtgtgtttaaatatatgagatggatatcttgtaatgggatcgagttttggaggtaaaaaaaaatcgtagatccgggccccgcgatatttctgttaaaaaaaaaa

SEQ ID NO: 188 - protein, 96 aa, Zea mays
  misc_feature: Ceres CLONE ID no. 222966
  misc_feature: Ceres CDNA ID no. 35383156
MADRALLISSSLSVFQFVSVAHFRSAARKHQRLALADCTLHRATQPPTFYLLSVFFFVSTCRTITRPPRRTRHLHCAIELESSPHLLESLTVCLNI

SEQ ID NO: 189 - DNA, 776 bp, Zea mays
  misc_feature: Ceres CLONE ID no. 223134
  misc_feature: Ceres CDNA ID no. 29191712
  CDS (80)..(529): REFERENCED BY SEQ ID NO: 190
ctatacgccgccatcttcgcaagccaccgcaacctaagcgcgccttcgcagcagccgcgatccccgcaaggtcgcaaacatgtctaccgtgctccagcgcccgacccccggcacggtccagtgcttcggccgcaagaagacggctgtggccgtcgcctacaccaagccggggcgcgggctgatcaaggtgaacggcgtcccgattgagctcatccggccggagatgctccgcctcaaggccttcgagcccatcctgctggcggggcgctccaggttcaaggacatcgacatgaggatccgcgtccgaggcggcgggaagacgtcgcagatctacgccatccgccaggccgtcgccaaggggctcgtcgcctactaccagaagtacgtcgacgaggccgccaagaaggaggtcaaggacatcttcacccggtacgaccgcacccttctcgtcgccgaccccaggcgctgcgagccgaagaagttcggtggtcgtggcgcccgcgccaggttccagaagtcctaccgttgagcgctcggctgcccgctcttgccggacagttgcctgtgttgtcccaacttgccagatcgatgcctgtacccgtggcttaattttctatcatcggagctacttatgtggttctataactagatgctgttttaccttcaacttgtgctgttgtaccttcatatttggactttttaagccttgtgtcggacgcctttggcattgaaatatgagagattttgaagactatctctgaaaaaaaaaaaaaaaa

SEQ ID NO: 190 - protein, 149 aa, Zea mays
  misc_feature: Ceres CLONE ID no. 223134
  misc_feature: Ceres CDNA ID no. 29191712
  misc_feature (17)..(149): Pfam Name: Ribosomal_S9 PFAM Desc: Ribosomal protein S9/S16
  misc_feature: Homolog of GI Number: 77552917 NR Desc: ribosomal protein S9
  misc_feature: Homolog of GI Number: 7440266 NR Desc: probable ribosomal protein S16
  misc_feature: Homolog of GI Number: 2641209 NR Desc: ribosomal protein S16
  misc_feature: Homolog of GI Number: 6984222 NR Desc: 40S ribosomal protein S16
  misc_feature: Homolog of GI Number: 439654 NR Desc: RS16 protein
  misc_feature: Homolog of GI Number: 21555842 NR Desc: 40S ribosomal protein S16
  misc_feature: Homolog of GI Number: 4574242 NR Desc: ribosomal protein S16
  misc_feature: Homolog of GI Number: 16323500 NR Desc: putative 40S ribosomal protein S16
  misc_feature: Homolog of GI Number: 6721162 NR Desc: putative 40S ribosomal protein S16
  misc_feature: Homolog of GI Number: 62083431 NR Desc: ribosomal protein S16
MSTVLQRPTPGTVQCFGRKKTAVAVAYTKPGRGLIKVNGVPIELIRPEMLRLKAFEPILLAGRSRFKDIDMRIRVRGGGKTSQIYAIRQAVAKGLVAYYQKYVDEAAKKEVKDIFTRYDRTLLVADPRRCEPKKFGGRGARARFQKSYR

SEQ ID NO: 191 - DNA, 1319 bp, Zea mays
  misc_feature: Ceres CLONE ID no. 223745
  misc_feature: Ceres CDNA ID no. 29191721
  CDS (118)..(1020): REFERENCED BY SEQ ID NO: 192
ccgtccaagacctctgctgctggcctgttgctgcgtagtgtcatcttatctcttcctcctaccttcactctcaaaatcttcagggagccgtagaggagcagcaggtgcaccaaaaggatggcagcgccaggctccctgcgacttctccaggccccgtccttcggtgcggccaagtgccagccgatggcgggccgggcatcggcgcggcgagcgccacggccactgttcgccgtgcgcgcttcggctgctgacgccgccaacagggacgccgtgcttaaggccttccgcgagaacagggctctcaagataatttccgggcttcagaactttgacaggagcagtgttgcatctgttgtcacagctgcagataagggaggtgcaacccatgttgacatagcatgtgacaaggacttagtaaagcttgccatggatcttaccaaccttccgatctgtgtctcatctgtagatccttcagcgttccattctgcagtacaagcaggagctaaaatggttgagattggaaactatgattccttttatgagatgggcattgagttttcctctgagcagatactgaagctaacaagggaaacaaggaagatgcttccagacatcaccttatcagtaacagttcctcacacacttagtttgccagatcagatgagactagcagagctactcgaagaggaaggagctgatataatccaaactgagggtgggaaatgttctagcccgacaaaacctggagtgcttggattgattgaaaaggcaacaccaacactcgccgcagcatactccatctctcgggctgttagtattccagtgatgtgctcgtcagggttaagctcggtgactgcaccaatggcagtaactgcaggagctgctggagttggagtcggttctgctattaacaaactcaacgacgttgtggcaatgatcgctgaggtgagaagcattgcgcaagcaatggagcttgcgccaagaatcgtgtccgaaaccctgagaacaattagttactagtggctaggaatacccttgccatttctgagcaaacttgagcagtcaataagaaagcaaaagagaggcatcgactctgcattttattctctctacgctgtcttttgcctgtggcagtgaatagcgcattagcatcatagaagtattagcttgatcaatggaagttgttcatgcgcttcttcatcgctgcaagtgttgtcatcttgtcgaactcacaataagcttagataagtgctgggtttgtgggaacatcgtttgtgcaatataaatgagatcttgcacctacaaaaaaaaaaaaaaaa

SEQ ID NO: 192 - protein, 300 aa, Zea mays
  misc_feature: Ceres CLONE ID no. 223745
  misc_feature: Ceres CDNA ID no. 29191721
  misc_feature: Homolog of GI Number: 46135031 NR Desc: COG0294: Dihydropteroate synthase and related enzymes
  misc_feature: Homolog of GI Number: 23125658 NR Desc: COG0294: Dihydropteroate synthase and related enzymes
  misc_feature: Homolog of GI Number: 48894749 NR Desc: COG0294: Dihydropteroate synthase and related enzymes
MAAPGSLRLLQAPSFGAAKCQPMAGRASARRAPRPLFAVRASAADAANRDAVLKAFRENRALKIISGLQNFDRSSVASVVTAADKGGATHVDIACDKDLVKLAMDLTNLPICVSSVDPSAFHSAVQAGAKMVEIGNYDSFYEMGIEFSSEQILKLTRETRKMLPDITLSVTVPHTLSLPDQMRLAELLEEEGADIIQTEGGKCSSPTKPGVLGLIEKATPTLAAAYSISRAVSIPVMCSSGLSSVTAPMAVTAGAAGVGVGSAINKLNDVVAMIAEVRSIAQAMELAPRIVSETLRTISY

SEQ ID NO: 193 - DNA, 815 bp, Zea mays
  misc_feature: Ceres CLONE ID no. 224507
  misc_feature: Ceres CDNA ID no. 36705232
  CDS (76)..(285): REFERENCED BY SEQ ID NO: 194
aaatttcccaaacgcaaaaccgcatcctctcatcagcttccttccacattcgtctcgagatctcgccccgtcgccatggacgcgatcgacagcgtggtggatcccctccgcgacttcgccaaggacagcgtccgcctcgtcaagcgctgccacaagcccgaccgcaaggagttcaccaaggtggcggcgcggacggcgatcgggttcgtcgtcatgggcttcgtcggcttcttcgttaagctcatcttcatccccatcaacaacatcatcgtcggttccggctaggcttacaggagtacagggaaagacaaagaccctggcgccgttgctaacatgtatatgcactacccgaggtccaatcatctgagcgaatacggatatgcctaccagtacccacctcagctcttcagcgacgagaacccgaatgcctgttctctgatgtgagaaagccagaaccaagtgaccttaagcgcgaaaataagaggggattgagttatcccctgattttggaggttcaggaagtttagaacttttcttttctatttctaaggttgaactttctgtctggtacaaagtgaactctgggctggtttgtggacatcatattgtgtatgctactggttagtaggattttgtgttgcacctttcacctttggcttttatttttgtacaaagatgtattatatatgctagttttgaaatagcttgctgctagtactctgtagtctgttgtccggaatagacggagctttctcagttaacattgccagtgatgtcggaaaaaaaaaaaaaaaaaaaaaaaaaaaaaaaaaaaa

SEQ ID NO: 194 - protein, 69 aa, Zea mays
  misc_feature: Ceres CLONE ID no. 224507
  misc_feature: Ceres CDNA ID no. 36705232
  misc_feature (10)..(66): Pfam Name: SecE PFAM Desc: SecE/Sec61
  misc_feature: Homolog of GI Number: 50252067 NR Desc: transport protein SEC61
  misc_feature: Homolog of GI Number: 51535598 NR Desc: putative transport protein SEC61
  misc_feature: Homolog of GI Number: 72076451 NR Desc:  similar to Protein transport protein SEC61 gamma subunit
  misc_feature: Homolog of GI Number: 38605207 NR Desc: Protein transport protein SEC61 gamma subunit
  misc_feature: Homolog of GI Number: 14701917 NR Desc: SEC61
  misc_feature: Homolog of GI Number: 74096057 NR Desc: sec61 protein
  misc_feature: Homolog of GI Number: 32441716 NR Desc: SEC61 gamma
  misc_feature: Homolog of GI Number: 37654254 NR Desc: LRRGT00019
  misc_feature: Homolog of GI Number: 62663916 NR Desc:  similar to RIKEN cDNA 2310047O13
MDAIDSVVDPLRDFAKDSVRLVKRCHKPDRKEFTKVAARTAIGFVVMGFVGFFVKLIFIPINNIIVGSG

SEQ ID NO: 195 - DNA, 749 bp, Zea mays
  misc_feature: Ceres CLONE ID no. 225673
  misc_feature: Ceres CDNA ID no. 25445547
  CDS (98)..(493): REFERENCED BY SEQ ID NO: 196
gagatcgatcgatcgagcttaattgcgccactgctcgttatcctcctcttgcattgcattgcaggtcgtagttgagcagcagcaaccactgcacaggatgtcgtggcagacgtacgtcgatgagcacctcatgtgcgagatcgagggccaccacctgagctctgccgccatagtcggccacgacggcgccgtttgggcccagagcaccgcattcccacagttcaagccagaggagatgaccaacatcattaaggacttcgacgagcctgggtttctggccccgatcggcctcttccttggccccaccaagtacatggtcatccaaggcgagcccggcgctgtcatccgcgggaagaagggatctggaggcataactgtgaagaagaccggacaggcgctggtgatcggcatctacgacgagcccatgacccctggacagtgcaacatggtggttgagaggctcggtgactacctcgtagagcaaggcctgtgattgaatgcatccaaacaacgacaccaacgccaacattaattaattggtagtctccatgccctgggattgtgcgtggccgctccgttaaacaccacccatccttcgttcggcattttttcccccttgtttatataattttattgtatcgttttggcaaataattttgtgattcgaccccaaagtttggttgtcttacgagatttgtaaacctggaacaatatataatgtgattgaactgcgaaaaaaaaaaaaaaaa

SEQ ID NO: 196 - protein, 131 aa, Zea mays
  misc_feature: Ceres CLONE ID no. 225673
  misc_feature: Ceres CDNA ID no. 25445547
  misc_feature: The plant is abnormally small.
  misc_feature: The plant produces a reduced number of seeds.
  misc_feature: Useful for biocontainment applications
  misc_feature: Useful for making plants with modulated biomass
  misc_feature (2)..(126): Pfam Name: Profilin PFAM Desc: Profilin
  misc_feature: Homolog of GI Number: 313142 NR Desc: profilin 3
  misc_feature: Homolog of GI Number: 31431135 NR Desc: Profilin A
  misc_feature: Homolog of GI Number: 2154730 NR Desc: profilin 1
  misc_feature: Homolog of GI Number: 313140 NR Desc: profilin 2
  misc_feature: Homolog of GI Number: 548597 NR Desc: Profilin
  misc_feature: Homolog of GI Number: 313138 NR Desc: profilin 1
  misc_feature: Homolog of GI Number: 2415702 NR Desc: profilin 4
  misc_feature: Homolog of GI Number: 6979167 NR Desc: latex profilin Hev b 8
  misc_feature: Homolog of GI Number: 453976 NR Desc: profilin
  misc_feature: Homolog of GI Number: 2415700 NR Desc: profilin 3
MSWQTYVDEHLMCEIEGHHLSSAAIVGHDGAVWAQSTAFPQFKPEEMTNIIKDFDEPGFLAPIGLFLGPTKYMVIQGEPGAVIRGKKGSGGITVKKTGQALVIGIYDEPMTPGQCNMVVERLGDYLVEQGL

SEQ ID NO: 197 - DNA, 716 bp, Zea mays
  misc_feature: Ceres CLONE ID no. 225899
  misc_feature: Ceres CDNA ID no. 25402270
  CDS (95)..(526): REFERENCED BY SEQ ID NO: 198
acaaaattctgctgattgggctccccgctcgacccaaaccctctcgctcccgttggcggtgccggtgcggcgaggtgaccacggcggcggaagaatggcgaaaggcagcgggctgatctgggcgacggcggaggatctggcgcggaataggccggtggtgctgtcgctgtacaggcagattctgcgggccctcgtcgtcatcgtcgatgtggtcgaccagaacagggcacttgtggacgcccctgatatggtcaggtgccagattaacttcaaacggctctcacttactgacatcaagattgacatcaaacgcgttcccaagaagtcaaccctgatcaaggctatggaggaagctgatgtgaagacgaagtgggaaaacagctcatggggcaagaagctgattgtccagaagaggagggctgcgctcagtgactttgacaggttcaaggtcatgctggcaaggatcaagaggggtggtgctatcaggcaagagctcgccaagctgaagaaggcgtccacggcttaagtcccttttggtggatggcatgttagtttttggtttcatgttgcatcagcattttgttttgagtgttgtcaaagccagaattagtaatatgtttcatgtgtacccttttcaaacttcatcaagaatgggtgtgctctggatattttgtcgggaatgatatgaaatacttaagctaaaaaaaaaaaaaaaa

SEQ ID NO: 198 - protein, 92 aa, Zea mays
  misc_feature: Ceres CLONE ID no. 225899
  misc_feature: Ceres CDNA ID no. 25402270
  misc_feature (2)..(78): Pfam Name: Ribosomal_L14e PFAM Desc: Ribosomal protein L14
  misc_feature: Homolog of GI Number: 48596905 NR Desc: glycoprotein
  misc_feature: Homolog of GI Number: 50910649 NR Desc: putative hydroxyproline
  misc_feature: Homolog of GI Number: 50926450 NR Desc: OSJNBb0070J16.13
  misc_feature: Homolog of GI Number: 76161008 NR Desc: glycoprotein
  misc_feature: Homolog of GI Number: 7269562 NR Desc: ribosomal protein L14
  misc_feature: Homolog of GI Number: 5762251 NR Desc: Csf
  misc_feature: Homolog of GI Number: 20465571 NR Desc: putative 60S ribosomal protein L14
  misc_feature: Homolog of GI Number: 2500365 NR Desc: Probable 60 ribosomal protein L14
  misc_feature: Homolog of GI Number: 7488810 NR Desc: hydroxyproline
  misc_feature: Homolog of GI Number: 49532974 NR Desc: Csf
MVRCQINFKRLSLTDIKIDIKRVPKKSTLIKAMEEADVKTKWENSSWGKKLIVQKRRAALSDFDRFKVMLARIKRGGAIRQELAKLKKASTA

SEQ ID NO: 199 - DNA, 727 bp, Zea mays
  misc_feature: Ceres CLONE ID no. 226203
  misc_feature: Ceres CDNA ID no. 25446279
  CDS (79)..(495): REFERENCED BY SEQ ID NO: 200
gtaagcacaagcacaaccaaaagcaaagaagagacgaagtcgatcgatcgatctcagcaactaagcaggtaggtaggcatggcggccgagaaggagggcgcggtggtgaccaagggccacgacgaggggatgaaggcggcggcggcgctgctggaggagttcgggctcccgccggggctgctgccgctggaggacgtgacggaggtggggttcgtgcgggccaccggctacttctggctcgcgcagcgcaagaaggtggagcaccggttccgcaagatcggcaagcaggtgagctacgacgtcgagatcgccggctacgtccggcccaggggcatcaggaggctcaagggggtcaaggccaaggagctcgtgctctggccgcccgtccacgagatggccgtcgacgacgacccgcccaccggcaagatccacttcaagagcctcgccggcgtcaccaagaccttccccgttgacgccttcgccgccggccagtagccacccacgcgtaccatcttatattatcactataataatacatcatacaccattatatatggcgcatatatatagtattaattaatctcttgtgttactaccttatatatatgttatgtgtgtacttgctttgctaatcctgatgatgatgaagaacgtaacctctagtttttttcctgacaaatataatgaaatgaaactgaacaataaaagtataaaaaaaaaaaaaaaa

SEQ ID NO: 200 - protein, 138 aa, Zea mays
  misc_feature: Ceres CLONE ID no. 226203
  misc_feature: Ceres CDNA ID no. 25446279
  misc_feature: Homolog of GI Number: 53793125 NR Desc: putative susceptibility homeodomain transcription factor
  misc_feature: Homolog of GI Number: 18644694 NR Desc: susceptibility homeodomain transciption factor
  misc_feature: Homolog of GI Number: 66776103 NR Desc: LigA
MAAEKEGAVVTKGHDEGMKAAAALLEEFGLPPGLLPLEDVTEVGFVRATGYFWLAQRKKVEHRFRKIGKQVSYDVEIAGYVRPRGIRRLKGVKAKELVLWPPVHEMAVDDDPPTGKIHFKSLAGVTKTFPVDAFAAGQ

SEQ ID NO: 201 - DNA, 1724 bp, Zea mays
  misc_feature: Ceres CLONE ID no. 226472
  misc_feature: Ceres CDNA ID no. 40041156
  CDS (265)..(1389): REFERENCED BY SEQ ID NO: 202
accgcgcaccgcccgaccagcgacgggaacccacgccgccccctctccgccccgtgcagtcgctccccagctcccgcgccgccgttccctgctaaccccatccccttcgcctcgcctcgtgctaagagagcgcggaccactgcggtgccacgccgacgccttctgccggccccaggtggattctgtccgcagactcctggaggtgctgctatctagccccttgatctgagctgaaattaggagctgaacctgccgggcgagccgatgtacggctcgccggtgtccaaggacctcaacctcccggtgcagccgcccatggcctcgtccgggctgctgaggtacagatcggcgcccagcacggtgctcggcgacctgtgcgaggacttcctctcttccgcgccccgcgccgccagccctgacgccggcgccgacaacgtcttctccaggttccttgctgaccaccacatccgggacgacaagccgtcgccgcttgcctccgccgccgtccacttcccgactgaaaccgacacggcctcccagcagcagcagcagcagatgatgttccactcccagcagcagcaggagatggtgagcgccaagtccggcctttaccgcaccgtgaactcaggcgtagaaaccgcggccgctgctggtgccggcggggccagctccagtgacaacgctagcaacctgattcgacagagcagctcccccgccggattcctcgatcatttgaacatggagaacggatacggggccatgctgagggcgggcatggccacggcggactccctcgcaggcggcggcagcaggctaaaagggcaactgagcttctcgtcacggcaggggtcattgatgtcccagatctcagagatggacagcgaggaggtcggagggagcagcccagaggcttccggcggcggcggcagggggtacatccctgggtacccaatgggctctgggtgggaggactcgtcggctctcttgtcagacaatttgtctggcgtcaaacgcccccgggactcgtcggagcctggccagagcggccttacgcaccagttcagcgtgcccaagacgtcgtccgagatggcaactattgagaaattcctccagttccaggacgccgtgccttgtaagatccgtgccaagcgggggtgcgccactcatccacgcagcatcgctgagagggtgaggagaacaaagatcagtgagcgaatccgaaagctgcaagaactcgttccaaatatggacaagcaaaccaacacatctgacatgctggatttggctgtcgactacatcaaggatctccagaagcaggttaaggtactaaaggagagccaagataactgcacctgctcagcaagcaagaaccagcagcactcctgctgaaaccgtaatgctcactgtacatgaatgacctcgaaagcatgtccactcgggaaagaaaaagatgcagtgtagcttttgtatgagcgaagggggatgaagcaatggcatcatcaagcattcaagtgattgggagaagggtaaaaaaagtggggagagatatatatacaggagaaacaactgtatagtttggctgtagctttgctatatatacacacacgcactaccctttcggtagaaagtggttaatttacctctgtttactagtagcaccagctgtaaatgtgccgcagataaacagtggagaagcttggaggtgttcaaaaaaaaaaaaaaaa

SEQ ID NO: 202 - protein, 374 aa, Zea mays
  misc_feature: Ceres CLONE ID no. 226472
  misc_feature: Ceres CDNA ID no. 40041156
  misc_feature: Useful for making plants with modulated growth and phenotype characteristics
  misc_feature: The sequence is a functional homolog of  SEQ ID NO 174 in the  10/714,887 US patent application
  misc_feature: The sequence is a functional homolog of  SEQ ID NO 174 in the  11/435,388 US patent application
  misc_feature: The sequence is a functional homolog of  SEQ ID NO 178 in the  10/714,887 US patent application
  misc_feature: The sequence is a functional homolog of  SEQ ID NO 178 in the  11/435,388 US patent application
  misc_feature: The sequence is a functional homolog of  SEQ ID NO 186 in the  10/714,887 US patent application
  misc_feature: The sequence is a functional homolog of  SEQ ID NO 186 in the  11/435,388 US patent application
  misc_feature (301)..(349): Pfam Name: HLH PFAM Desc: Helix
  misc_feature: Homolog of GI Number: 50947455 NR Desc: putative transcription factor RAU1
  misc_feature: Homolog of GI Number: 19401700 NR Desc: transcription factor RAU1
  misc_feature: Homolog of GI Number: 52421281 NR Desc: At2g42280
  misc_feature: Homolog of GI Number: 21554238 NR Desc: Contains similarity to bHLH transcription factor GBOF
  misc_feature: Homolog of GI Number: 50925503 NR Desc: OSJNBa0084K20.3
  misc_feature: Homolog of GI Number: 34907702 NR Desc: P0035F12.11
  misc_feature: Homolog of GI Number: 56784863 NR Desc: putative helix
  misc_feature: Homolog of GI Number: 6166283 NR Desc: helix
  misc_feature: Homolog of GI Number: 20127058 NR Desc: putative bHLH transcription factor
  misc_feature: Homolog of GI Number: 21593792 NR Desc: putative lipoamide dehydrogenase
  misc_feature: Useful for making plants with increased biomass and foliage
  misc_feature: Useful for making taller plants and plants with longer inflorescences
  misc_feature: Useful for sterility
MYGSPVSKDLNLPVQPPMASSGLLRYRSAPSTVLGDLCEDFLSSAPRAASPDAGADNVFSRFLADHHIRDDKPSPLASAAVHFPTETDTASQQQQQQMMFHSQQQQEMVSAKSGLYRTVNSGVETAAAAGAGGASSSDNASNLIRQSSSPAGFLDHLNMENGYGAMLRAGMATADSLAGGGSRLKGQLSFSSRQGSLMSQISEMDSEEVGGSSPEASGGGGRGYIPGYPMGSGWEDSSALLSDNLSGVKRPRDSSEPGQSGLTHQFSVPKTSSEMATIEKFLQFQDAVPCKIRAKRGCATHPRSIAERVRRTKISERIRKLQELVPNMDKQTNTSDMLDLAVDYIKDLQKQVKVLKESQDNCTCSASKNQQHSC

SEQ ID NO: 203 - DNA, 902 bp, Zea mays
  misc_feature: Ceres CLONE ID no. 226479
  misc_feature: Ceres CDNA ID no. 25446013
  CDS (128)..(646): REFERENCED BY SEQ ID NO: 204
ctttccctccccatcgcccgagcgccacacgaaggatcccgaagccgaagagaaccctaccgaggaggcagaaaatccgtaggcgcgcctcatacgattccgagatccgtgcctcttatcggcagccatgatgctgcgcgcggcgggcaggcgactcctcggcgtaggaggcggcgagccagcgcccgcggtcgctgctgctgtggcggcgagcaggagcagaggataccacgagcgggtggtggaccactacaacaatccgcgcaacgtggggtccttggacaaggacgacgcggacgtcggaacggggatcgtcggcgcgccggcgtgcggggacgtcatgaagctgcagatccgcgtcgacgaggggtccggcaggatcgtcgacgcgcgcttcaagaccttcggctgcggctccgccatcgcgtcctcctccttcgcttccgaatgggtcaagggcaagcaagtagaggaagtggtagccatcaagaacaccgagattgcgaagcacctgtctcttccaccagtgaagctccactgcagcatgctcgctgaggacgcaatcaaggccgccgtgaaggattacgaggcaaagaaagggaagaagatggccaaggcagaggagcaggacaccccatccccgtaagagcgacagctagtaacctgaagcgagcagtactcgtataacggctaacgagcgaggtactcgtgtgtgcagtgtgcctaaagaagcatgtatgtaatgtaaagctaggtaataacgatgcttgggttttcatagaataagcgaacttgccgcagtgtttttttttaaaaatctgctctgcacatgaataaggtctgcccgttgctcttaaaaaaaaaaaaaaaaaaaaaaaaaaaaaataaaaaaaaaaaaaaaa

SEQ ID NO: 204 - protein, 172 aa, Zea mays
  misc_feature: Ceres CLONE ID no. 226479
  misc_feature: Ceres CDNA ID no. 25446013
  misc_feature (33)..(160): Pfam Name: NifU_N PFAM Desc: NifU
  misc_feature: Homolog of GI Number: 51854290 NR Desc: putative nifU
  misc_feature: Homolog of GI Number: 34912076 NR Desc: putative nifU
  misc_feature: Homolog of GI Number: 19548021 NR Desc: AT4g22220/T10I14_50
  misc_feature: Homolog of GI Number: 21595581 NR Desc: nifU
  misc_feature: Homolog of GI Number: 50756488 NR Desc:  similar to ISCU2
  misc_feature: Homolog of GI Number: 61873066 NR Desc:  similar to iron
  misc_feature: Homolog of GI Number: 16798388 NR Desc: iron
  misc_feature: Homolog of GI Number: 7267164 NR Desc: putative NifU
  misc_feature: Homolog of GI Number: 55638805 NR Desc:  similar to ISCU2
  misc_feature: Homolog of GI Number: 56699456 NR Desc: iron
MMLRAAGRRLLGVGGGEPAPAVAAAVAASRSRGYHERVVDHYNNPRNVGSLDKDDADVGTGIVGAPACGDVMKLQIRVDEGSGRIVDARFKTFGCGSAIASSSFASEWVKGKQVEEVVAIKNTEIAKHLSLPPVKLHCSMLAEDAIKAAVKDYEAKKGKKMAKAEEQDTPSP

SEQ ID NO: 205 - DNA, 925 bp, Zea mays
  misc_feature: Ceres CLONE ID no. 229299
  misc_feature: Ceres CDNA ID no. 36707262
  CDS (75)..(740): REFERENCED BY SEQ ID NO: 206
aaactcgctctcactttactcctatccactgcggcctggacgcgtgcgagagacttgacaaagcagcagcagggatggcgcctctgaagctgtacgggatgccgctgtcccccaacgtggtgcgcgtggccaccgtgctcaacgagaagggcctcgacttcgagatcgtccccgtcgacctcaccaccggcgcccacaagcagcccgacttcctcaccctcaaccctttcggccagatcccggctctcgtcgacggagacgaagtcctcttcgagtcccgcgcgatcaaccggtacatcgccagcaagtacgcgtcggagggcacggacctgctccccgcgacggcgtcggcggcgaagctggaggtgtggctggaggtggagtcgcaccacttccacccgaacgcgtcgccgctggtgttccagctgctcgtgaggccgctcctgggcggcgcccccgacgcggcggtggtggagaagcacgcggagcagctcgccaaggtgctcgacgtgtacgaggcgcacctggcccgcaacaagtacctcgccggggacgagttcacgctcgccgacgccaaccacgcgtcctacctgctctacctcagcaagacccccaaggccgggctcgtcgccgcccgcccccacgtcaaggcctggtgggaggccatcgccgcccgccccgcgttccagaagaccgtcgccgccatccccttgcccccgccgccctcctcctcggcttgacctcgccttgcgctgcctgggtcgcggatgcgtcggagccccgagtcgaataaaagaggccgcatcctgtcttgcatttgctgctgcgccatgtgctataacagcctgtgtaataaacactgttgctttcgtgtgtgttcattgccttttggttggttggtccttgcaaaaaaaaaaaaaaaaaa

SEQ ID NO: 206 - protein, 221 aa, Zea mays
  misc_feature: Ceres CLONE ID no. 229299
  misc_feature: Ceres CDNA ID no. 36707262
  misc_feature (4)..(77): Pfam Name: GST_N PFAM Desc: Glutathione S
  misc_feature (94)..(202): Pfam Name: GST_C PFAM Desc: Glutathione S
  misc_feature: Homolog of GI Number: 4468794 NR Desc: Glutathione transferase III
  misc_feature: Homolog of GI Number: 4468792 NR Desc: Glutathione transferase III
  misc_feature: Homolog of GI Number: 3891593 NR Desc: Structure Of Glutathione S
  misc_feature: Homolog of GI Number: 34907162 NR Desc: putative glutathione S
  misc_feature: Homolog of GI Number: 11177843 NR Desc: putative glutathione S
  misc_feature: Homolog of GI Number: 23504745 NR Desc: glutathione transferase F5
  misc_feature: Homolog of GI Number: 18150415 NR Desc: glutathione S
  misc_feature: Homolog of GI Number: 7362756 NR Desc: Glutathione transferase III
  misc_feature: Homolog of GI Number: 21790 NR Desc: glutathione transferase
  misc_feature: Homolog of GI Number: 11385481 NR Desc: glutathione S
MAPLKLYGMPLSPNVVRVATVLNEKGLDFEIVPVDLTTGAHKQPDFLTLNPFGQIPALVDGDEVLFESRAINRYIASKYASEGTDLLPATASAAKLEVWLEVESHHFHPNASPLVFQLLVRPLLGGAPDAAVVEKHAEQLAKVLDVYEAHLARNKYLAGDEFTLADANHASYLLYLSKTPKAGLVAARPHVKAWWEAIAARPAFQKTVAAIPLPPPPSSSA

SEQ ID NO: 207 - DNA, 809 bp, Zea mays
  misc_feature: Ceres CLONE ID no. 232582
  misc_feature: Ceres CDNA ID no. 29191800
  CDS (63)..(512): REFERENCED BY SEQ ID NO: 208
gcccctgatccactctccgcttcccgctccgatcgacctgctccctccccaccaccgagcccatggcggaccagctcaccgacgaccagatcgccgagttcaaggaggccttcagcctcttcgacaaggacggggatggttgcatcacgaccaaggagctgggcactgtcatgcgctcgctggggcaaaatcctacagaggctgagctccaggacatgatcaacgaggtcgatgctgatggcaacggcaccatcgatttcccagagtttctcaaccttatggctcgcaagatgaaggacaccgactctgaggaagagctcaaggaggccttccgtgtgtttgacaaggaccagaacggcttcatctcggccgccgagctccgccatgtcatgacaaatcttggtgagaagctaactgatgaggaggtggacgagatgatccgtgaggctgatgtcgatggtgatggccagatcaactacgaggagtttgtcaaggtcatgatggccaagtgagccacagaaccataatctgaaggcagagaagattatgcattgcatattagtcaagatgcaactttttattccatcgacttctagtgaaacattctgctagttgtagttgctgaaaaaggcaatgtagttcctgctttgttcttccctccagtgtgttttcagaactgttgtttcatgtgaacttgtaatgattgccctctctgctgtgtcttgattgcagttaaaatcatatgtagtttcaccccacccacacatcaacttctgtttcacgctgtttgtataaaaaaaaaaaaaaaa

SEQ ID NO: 208 - protein, 149 aa, Zea mays
  misc_feature: Ceres CLONE ID no. 232582
  misc_feature: Ceres CDNA ID no. 29191800
  misc_feature (12)..(40): Pfam Name: efhand PFAM Desc: EF hand
  misc_feature: Homolog of GI Number: 62286560 NR Desc: Calmodulin
  misc_feature: Homolog of GI Number: 34304717 NR Desc: calmodulin 8
  misc_feature: Homolog of GI Number: 20190 NR Desc: calmodulin
  misc_feature: Homolog of GI Number: 1755001 NR Desc: calmodulin TaCaM2
  misc_feature: Homolog of GI Number: 4103961 NR Desc: calmodulin
  misc_feature: Homolog of GI Number: 50299519 NR Desc: calmodulin cam
  misc_feature: Homolog of GI Number: 60729721 NR Desc: calmodulin
  misc_feature: Homolog of GI Number: 30683369 NR Desc: calmodulin
  misc_feature: Homolog of GI Number: 20259049 NR Desc: putative calmodulin
  misc_feature: Homolog of GI Number: 4959148 NR Desc: calmodulin mutant SYNCAM35
MADQLTDDQIAEFKEAFSLFDKDGDGCITTKELGTVMRSLGQNPTEAELQDMINEVDADGNGTIDFPEFLNLMARKMKDTDSEEELKEAFRVFDKDQNGFISAAELRHVMTNLGEKLTDEEVDEMIREADVDGDGQINYEEFVKVMMAK

SEQ ID NO: 209 - DNA, 629 bp, Zea mays
  misc_feature: Ceres CLONE ID no. 232605
  misc_feature: Ceres CDNA ID no. 36707193
  CDS (37)..(366): REFERENCED BY SEQ ID NO: 210
atccaggattctagggttcgttcgcctcgtctcgcgatggacaagggcagcgtcgtcgtgcccccggcccctgccgccgccgccgcgaagaaggccaagcgcttcgagatcaagaagtggaacgccgtctctctctgggcctgggacatcgtggtggacaactgcgccatctgccgcaaccacatcatggacctttgcatcgagtgccaggcgaaccaggcgagcgccaccagcgaggagtgcaccgtcgcttggggaatttgcaaccatgcattccacttccactgtatcagccgttggctaaagacccgtcaagtgtgccctcttgacaacagtgagtgggagttccagaagtatggtcactagagagaatggcttcggcgtggaattgcttcatgtttctcgtcgtttagcagtagtggttactgaatagattctggtgaacatgctatggatctgtaacgtttctgaagttctgccttacttgaagctgtaggcgaatactctggttatgccatattcgtccttcggggcgctgttgaacagctcttcctcacatgaaggtgtagacgaattactcagtttgcagaaattaattggtaattgtgggcaaaaaaaaaaaaaaaaaa

SEQ ID NO: 210 - protein, 109 aa, Zea mays
  misc_feature: Ceres CLONE ID no. 232605
  misc_feature: Ceres CDNA ID no. 36707193
  misc_feature (76)..(97): Pfam Name: zf PFAM Desc: Zinc finger
  misc_feature: Homolog of GI Number: 50911983 NR Desc: putative RING box protein 1
  misc_feature: Homolog of GI Number: 31747517 NR Desc: ring box protein
  misc_feature: Homolog of GI Number: 83701143 NR Desc: RING
  misc_feature: Homolog of GI Number: 21592528 NR Desc: ring
  misc_feature: Homolog of GI Number: 55769719 NR Desc: putative ring
  misc_feature: Homolog of GI Number: 37537963 NR Desc: RING
  misc_feature: Homolog of GI Number: 19067884 NR Desc: hyperosmotic protein 21
  misc_feature: Homolog of GI Number: 68357666 NR Desc:  similar to RING
MDKGSVVVPPAPAAAAAKKAKRFEIKKWNAVSLWAWDIVVDNCAICRNHIMDLCIECQANQASATSEECTVAWGICNHAFHFHCISRWLKTRQVCPLDNSEWEFQKYGH

SEQ ID NO: 211 - DNA, 616 bp, Zea mays
  misc_feature: Ceres CLONE ID no. 232728
  misc_feature: Ceres CDNA ID no. 36707194
  CDS (82)..(444): REFERENCED BY SEQ ID NO: 212
agcagcctcccaaatccccaaagcctccgacccccttcctctctccctccgccgccgctgcgcacgcagggaacaagcgacatgggcgtctacacctttgtgtgccgcaacaacggcggcgagtggaccgccaagcagcactccggcgagatcgaggcttccgccgctaccccatacgagctgcagcgccgcctcgtcgctgccgcctccgcggccgactctgcctacggcgtccagtcgtccttctccatggtcacccccagctccgccgtgttccaggtgatcgtcggtgctgtcggtggtggtgcaatgatggtgagcggaggtggcggcggcggtgctgctgcatctggtggtgctgctgccgaggctcccaaggaggagaagaaggaagaggagaaggaagagagcgacgacgacatgggattctccctgttcgactagagttgtgtgtgtcatctggatctcagaagtggtggtttggtcctgttgccgtagttaattttgctgtcctgtctgtgaacctgaagaactcttggtaattgttacaagcgacctgttccagtttatgtgagaatttgatatgttgtttggaatcacaaaaaaaaaaaaaaaa

SEQ ID NO: 212 - protein, 120 aa, Zea mays
  misc_feature: Ceres CLONE ID no. 232728
  misc_feature: Ceres CDNA ID no. 36707194
  misc_feature (25)..(119): Pfam Name: Ribosomal_60s PFAM Desc: 60s Acidic ribosomal protein
  misc_feature: Homolog of GI Number: 7489709 NR Desc: acidic ribosomal protein P3a
  misc_feature: Homolog of GI Number: 53792736 NR Desc: putative 60S acidic ribosomal protein P3
  misc_feature: Homolog of GI Number: 56783875 NR Desc: putative acidic ribosomal protein P3a
  misc_feature: Homolog of GI Number: 20259603 NR Desc: putative acidic ribosomal protein
  misc_feature: Homolog of GI Number: 21617903 NR Desc: 60S acidic ribosomal protein P3
  misc_feature: Homolog of GI Number: 6226017 NR Desc: 60S acidic ribosomal protein P3
  misc_feature: Homolog of GI Number: 38503536 NR Desc: 60S acidic ribosomal protein P3
  misc_feature: Homolog of GI Number: 38503544 NR Desc: 60S acidic ribosomal protein P3
  misc_feature: Homolog of GI Number: 38503547 NR Desc: 60S acidic ribosomal protein P3
  misc_feature: Homolog of GI Number: 2113805 NR Desc: ribosomal protein P2
MGVYTFVCRNNGGEWTAKQHSGEIEASAATPYELQRRLVAAASAADSAYGVQSSFSMVTPSSAVFQVIVGAVGGGAMMVSGGGGGGAAASGGAAAEAPKEEKKEEEKEESDDDMGFSLFD

SEQ ID NO: 213 - DNA, 739 bp, Zea mays
  misc_feature: Ceres CLONE ID no. 232800
  misc_feature: Ceres CDNA ID no. 36707195
  CDS (85)..(459): REFERENCED BY SEQ ID NO: 214
ctttctcacacctcgacgcctctctctctttccccgagctctcgaaaccctaggtgcgtgccgaccggcggcggcggcgaggtgatggcgatggacccggacgcggtggcgaaagccttcgtggagcactactaccggacgttcgacaccaaccgcgcggcgctggtggggctgtatcaggagacctccatgctcaccttcgagggccagaagttccagggcccatccgccattgccggcaagctcggatctcttcccttccaggcctgcgagcaccagatcgtcaccgtcgactgccagccgtcggggccccagggaggcatgctcgtcttcgtctccggttccatccgcaccggccccgaggagcaccccatcaagttctctcaggcattccatttgctgccggcagctgggtccttcttcgtgcagaatgacatgttccgcctgaactatggctaaaagacagccgaaaactcttgtgatgaacgaatttgttaagggcttcatgttgagacgatgaataccgactgtcgccgctactctcatctcctttgtatctcctctgttggctgattaactgttattacaagaaattgctggacttgttttttccagttgttttgaatcatgtattatggttgcatgggcaccatttcttcgtgggatgtgaattgaaacagtccaaatcaattggtgtggcagatatctggtttgcccttctgcaaaaaaaaaaaaaaaa

SEQ ID NO: 214 - protein, 122 aa, Zea mays
  misc_feature: Ceres CLONE ID no. 232800
  misc_feature: Ceres CDNA ID no. 36707195
  misc_feature (6)..(119): Pfam Name: NTF2 PFAM Desc: Nuclear transport factor 2
  misc_feature: Homolog of GI Number: 50947933 NR Desc: nuclear transport factor 2
  misc_feature: Homolog of GI Number: 21555203 NR Desc: nuclear transport factor 2
  misc_feature: Homolog of GI Number: 12323001 NR Desc: nuclear transport factor 2
  misc_feature: Homolog of GI Number: 18377444 NR Desc: similar to nuclear transport factor 2
  misc_feature: Homolog of GI Number: 34908774 NR Desc: putative Nuclear transport factor 2
  misc_feature: Homolog of GI Number: 25402667 NR Desc: protein T23J18.22
  misc_feature: Homolog of GI Number: 21748151 NR Desc: putative nuclear transport factor 2
  misc_feature: Homolog of GI Number: 45187886 NR Desc: ADR013Wp
  misc_feature: Homolog of GI Number: 62651812 NR Desc:  similar to Chain A
  misc_feature: Homolog of GI Number: 51771618 NR Desc: similar to Nuclear transport factor 2
MDPDAVAKAFVEHYYRTFDTNRAALVGLYQETSMLTFEGQKFQGPSAIAGKLGSLPFQACEHQIVTVDCQPSGPQGGMLVFVSGSIRTGPEEHPIKFSQAFHLLPAAGSFFVQNDMFRLNYG

SEQ ID NO: 215 - DNA, 723 bp, Zea mays
  misc_feature: Ceres CLONE ID no. 232804
  misc_feature: Ceres CDNA ID no. 36707196
  CDS (74)..(511): REFERENCED BY SEQ ID NO: 216
ctccaaaccctagtctcagagcagccgcatccacaacctgcctctctcgtcccctggcggcgtccgcggcaggatggcggaatctacggcgaggacggtgaaggatgtcaacccgcacgagttcgtcaaggcctactccgcccacctcaagcgctccggcaagatggagctccctgagtgggttgacattgtgaagactgcgaggttcaaggagcttcctccttatgatcctgactggtactacatcagggctgcatccattgcaaggaagatctacctaaggcaaggcatcggtgtgggtggctttcagaagatctacggtggccgccagaggaatggctcccgcccaccacacttctgcaagagcagtggtgctgttgcacgcaacatcctgcagcagctgcagattatgggcatcatcgatgtcgatcccaagggtggacgcctcatcaccaaccagggaaggcgtgatctggaccaagtggctggaagggtcgctgttgaagcgtgagcagtgtcatctttggtttcaatggtgtcatgtttgatggttgagaaggctgcgctctatttgctcttttgggttaggattttcgagttcagaggactttaaggtttattgcatctagctatggcgccacactatgttccccgagtacctaatgtgatatcaagactcaattctcgaatctaagatatatgtttgtaaaaaaaaaaaaaaaa

SEQ ID NO: 216 - protein, 145 aa, Zea mays
  misc_feature: Ceres CLONE ID no. 232804
  misc_feature: Ceres CDNA ID no. 36707196
  misc_feature (7)..(145): Pfam Name: Ribosomal_S19e PFAM Desc: Ribosomal protein S19e
  misc_feature: Homolog of GI Number: 50916719 NR Desc: putative ribosomal protein S19
  misc_feature: Homolog of GI Number: 57164476 NR Desc: putative ribosomal protein S19
  misc_feature: Homolog of GI Number: 57164477 NR Desc: putative ribosomal protein S19
  misc_feature: Homolog of GI Number: 57164480 NR Desc: putative ribosomal protein S19
  misc_feature: Homolog of GI Number: 82623403 NR Desc: 40S ribosomal protein S19
  misc_feature: Homolog of GI Number: 34365671 NR Desc: At5g61170
  misc_feature: Homolog of GI Number: 6513924 NR Desc: putative 40S ribosomal protein S19
  misc_feature: Homolog of GI Number: 21554401 NR Desc: 40S ribosomal protein S19
  misc_feature: Homolog of GI Number: 74231114 NR Desc: 40S ribosomal protein S19
  misc_feature: Homolog of GI Number: 74231106 NR Desc: 40S ribosomal protein S19
MAESTARTVKDVNPHEFVKAYSAHLKRSGKMELPEWVDIVKTARFKELPPYDPDWYYIRAASIARKIYLRQGIGVGGFQKIYGGRQRNGSRPPHFCKSSGAVARNILQQLQIMGIIDVDPKGGRLITNQGRRDLDQVAGRVAVEA

SEQ ID NO: 217 - DNA, 764 bp, Zea mays
  misc_feature: Ceres CLONE ID no. 232882
  misc_feature: Ceres CDNA ID no. 36707197
  CDS (92)..(442): REFERENCED BY SEQ ID NO: 218
caacacaacgcttatattacttacaacaaaagataagcccacgaatcagtagatcgaggtcccgcccagtccagcagaagcgcacacggagatgtcccagctgagccctgctggccacatggctgcgacgctcctcctcatcctcctggcctccgcagcagcagcagcggtgtcagctgaccaacaggtctctgcctgccagaatgacatagacgcactgtggcgcagctgcaagcagttcgtccagaaggaggggcccaagatgcctccgtccgaggactgctgcaaaaccatcaaggccttagacgcgcacgcgtcctgcatctgcgactacgtcggctccccggacgccaggaataagctagacctggacaaggtgttcttcgttaccaaacagtgcggcgtcaccgtccccaagggctgcggatcaaagcaggactgaagagcggctgaatctgaatggagcaagttggctaacatacgcacggcagctacaaatacttataggaataaataaagttggtcaactgttggtttcatggtgttggagtacaacaactgtactgttcttatcctcatatatgatatatgaactctagttcatcacataatataaatctgtaagagagcccagaaacatagatggctcatgggacagctggagaggcttattttctttctaccatccagtttctgattcaacataaacaaaagcgaataaaaaacatgtaaaaatatgcatatccaaaaaaaaaaaaaaaaaa

SEQ ID NO: 218 - protein, 116 aa, Zea mays; identical to SEQ ID NO: 184
  misc_feature: Ceres CLONE ID no. 232882
  misc_feature: Ceres CDNA ID no. 36707197
  misc_feature (36)..(111): Pfam Name: Tryp_alpha_amyl PFAM Desc: Protease inhibitor/seed storage/LTP family
  misc_feature: Homolog of GI Number: 78707772 NR Desc: Protease inhibitor/seed storage/LTP family
  misc_feature: Homolog of GI Number: 32395579 NR Desc: seed specific protein Bn15D18B
  misc_feature: Homolog of GI Number: 42567284 NR Desc: protease inhibitor/seed storage/lipid transfer protein

SEQ ID NO: 219 - DNA, 910 bp, Zea mays
  misc_feature: Ceres CLONE ID no. 232898
  misc_feature: Ceres CDNA ID no. 36707198
  CDS (106)..(663): REFERENCED BY SEQ ID NO: 220
acacacaccgcctcaactcgcgctgcccgtcgcccccaagcctcggttccgccggcgcgcgaggggattcgagctgggtcttgggtagcctctcaccgtctcacgatgccgccagcacccaagtccggcgacgccctcttcgccagcgtggatcgcgtcaatgcggagctgttcacgctcacgtacggcgccatcgtgcggcagttgctcacggatctggaggaggtcgaggaggtcaacaagcagctcgatcagatgggttacaacattggaacacgattggttgatgagttcttagcaaagtcaaatgtatcaaggtgtgttgacttcaaggagactgccgatgttattgcgaagcttggcttcaaaatgttcttgggcgtgactgcaaccgtgaccaattgggatgctgagggtacaagttgcagccttgtcctggaagacaaccctcttgttgatttcgtcgagctccctgacacttgccaaggccttcagtattgcaatttgttaagtggagttattaggggggcattggaaatggtgtctatgaaggcggaggtgacatgggtgcgcgacatgcttcgcggggacgatgcctatgagatgcgggtgaagcttatcaagcaagtgccggaggaatacccctacaaggatgatgactagttctattttagtgcaagattgcttgtttggattttgacatcgttttcgtcgatggtccgtagttctgctataacctgatatcatacgaggaaagctgcgtctgttttgcttgtgtattgtagaaatcatacataatctttcctgagttgcggctttgaattagtctgctggattcagggcgttcgctatgcaaattggtgttatctagaaataaagtattttcgatctcaaaaaaaaaaaaaaaaaa

SEQ ID NO: 220 - protein, 185 aa, Zea mays
  misc_feature: Ceres CLONE ID no. 232898
  misc_feature: Ceres CDNA ID no. 36707198
  misc_feature (22)..(172): Pfam Name: TRAPP_Bet3 PFAM Desc: Transport protein particle
  misc_feature: Homolog of GI Number: 50939555 NR Desc: transport protein particle component Bet3
  misc_feature: Homolog of GI Number: 23308241 NR Desc: At5g54750/MBG8_1
  misc_feature: Homolog of GI Number: 50417151 NR Desc: Zgc:101005 protein
  misc_feature: Homolog of GI Number: 32450223 NR Desc: Trappc3
  misc_feature: Homolog of GI Number: 63146086 NR Desc: BET 3
  misc_feature: Homolog of GI Number: 73977068 NR Desc:  similar to trafficking protein particle complex 3
  misc_feature: Homolog of GI Number: 76614554 NR Desc:  similar to trafficking protein particle complex 3
  misc_feature: Homolog of GI Number: 23510169 NR Desc: Bet3 transport protein
  misc_feature: Homolog of GI Number: 76614560 NR Desc:  similar to Trafficking protein particle complex subunit 3
MPPAPKSGDALFASVDRVNAELFTLTYGAIVRQLLTDLEEVEEVNKQLDQMGYNIGTRLVDEFLAKSNVSRCVDFKETADVIAKLGFKMFLGVTATVTNWDAEGTSCSLVLEDNPLVDFVELPDTCQGLQYCNLLSGVIRGALEMVSMKAEVTWVRDMLRGDDAYEMRVKLIKQVPEEYPYKDDD

SEQ ID NO: 221 - DNA, 716 bp, Zea mays
  misc_feature: Ceres CLONE ID no. 233321
  misc_feature: Ceres CDNA ID no. 25401594
  CDS (178)..(468): REFERENCED BY SEQ ID NO: 222
gaacgagcactcgcctgcgctcttctctctctcgtggcgacgactgggtgaccgccggcgccccaggcctgaggcctccatcttcgggcccttcactggctacgagcaccaccaggtgtactgggtccgatccatctgagtctgatcttttgtttctcgggttcctggcagaggattatggattggctggggcagaagcgcgcggagatgctgatgcaggtgctgctggtggcgtctgctgtggcggcgttcctggtgggctacgtgcgcgcggacttccagctcatgctgctcgtctacgccggcggcgtcgtgctcacagcgctcgtcaccgtccccaactggcccttcttcaaccgtaacccgctcaagtggctcgacgctgccgaggccgagcgccacccgcgcccccaggtcagcgccggtgcggcagcagggggaaagaagaagtccgggaagaacaagtaatcgatctttcggagcgatatgtgttctttgtcgatttgactcaaacctatttaaagttttatttcgcagaactaatcaatgataaaagagctagaggtgttcgacagttttggttggtacttcaaaatatgcagttgtagatgaaatttagcttgcaatcttgcacgctacttatcagttatatctgcaatgatgatctaactaaaaggatggcaatatgcctggttgcaccaaaaaaaaaaaaaaaa

SEQ ID NO: 222 - protein, 96 aa, Zea mays
  misc_feature: Ceres CLONE ID no. 233321
  misc_feature: Ceres CDNA ID no. 25401594
  misc_feature (1)..(80): Pfam Name: SPC12 PFAM Desc: Microsomal signal peptidase 12 kDa subunit
  misc_feature: Homolog of GI Number: 77555520 NR Desc: microsomal signal peptidase 12 kda subunit
  misc_feature: Homolog of GI Number: 30102562 NR Desc: At4g40042
  misc_feature: Homolog of GI Number: 50754117 NR Desc:  similar to Microsomal signal peptidase 12 kDa subunit
  misc_feature: Homolog of GI Number: 62860158 NR Desc: LOC549392
  misc_feature: Homolog of GI Number: 7661746 NR Desc: signal peptidase 12kDa
  misc_feature: Homolog of GI Number: 57101164 NR Desc:  similar to Microsomal signal peptidase 12 kDa subunit
  misc_feature: Homolog of GI Number: 16905460 NR Desc: signal peptidase 12kDa subunit
  misc_feature: Homolog of GI Number: 27667224 NR Desc: similar to signal peptidase 12kDa
  misc_feature: Homolog of GI Number: 72153363 NR Desc:  similar to Microsomal signal peptidase 12 kDa subunit
  misc_feature: Homolog of GI Number: 67083963 NR Desc: microsomal signal peptidase 12 kDa subunit
MDWLGQKRAEMLMQVLLVASAVAAFLVGYVRADFQLMLLVYAGGVVLTALVTVPNWPFFNRNPLKWLDAAEAERHPRPQVSAGAAAGGKKKSGKNK

SEQ ID NO: 223 - DNA, 1265 bp, Zea mays
  misc_feature: Ceres CLONE ID no. 233721
  misc_feature: Ceres CDNA ID no. 25446749
  CDS (99)..(1007): REFERENCED BY SEQ ID NO: 224
atctctggagggactggacaaagtttgagagatcctataatagggtccaccattgatctctgtctaggtccatccaaccgtcgaacgacctttccaccatggacatctcgggaggaggctggcgagtacatcgtcttctgtcccacatcatagtcggagtctacttttcccttactcgagttttaggtattgtatcaggaggtacaagtgcggagtcaagacaagcattggttgagctttcactagctatagacggaattgaaggaatgagggatgtgatatttgctgatattccaaagctcattccatttattgatctggaggatatgagcctattcagttgcttctacgattttgttttcttcatctgccgtgaaaagggtcaaaagagtgtcactattcagagagctgtagcagcatggaggattgttctaagtggaaggttccgtttgcttgatcgatggtgtaacttcgttgagaagtaccaacgccataacatatccgaggatacttggcagcagctgctagctttcagcaggtgtgtaaatgaagatctggaaggttatgacccacgaggtgcttggcctgttctgattgatgattttgttgagcaaatgcacagaatttatcactccactgactgcagcagtgcgatggaatcacagtgtaacatttccagtacccttaaaggactggatcctcaacctggatcaaagaggaaatgcccacacctcaaatccaatgaagaggatgtagagctttcggatagctttacgcgctctgtccatcttacaccaataaagcgactcaaggaaagccatgacgccagatatggagcgggggaatccgccaaaactacccatttctctaatagttcctctggtggttaccacgaggatatgaatttacacaactcaagaggttgccttcagaactccccctgtaatgttgaggatgccctgtccaaagggtttgagggttgtatttcgatgaaatgtccattttgatgtaacaaatttcgtgtcagcccagaagctatacattcccttttagcggcaaaatcatcctgtgtgtgtatctagtcattttgtgcaaaaaaaatgcagtaattgaatgcattttttttaaaatgctttaaagtgtattgatcagcatcggacctgtttttagaggcatcggtatgaagggagggctgttggttgtgtttgcttgacagcaaatccctcccattcaataccccgcactttctaaaaaaaaaaaaaaaa

SEQ ID NO: 224 - protein, 302 aa, Zea mays
  misc_feature: Ceres CLONE ID no. 233721
  misc_feature: Ceres CDNA ID no. 25446749
  misc_feature: Homolog of GI Number: 50939409 NR Desc: leucine zipper protein
  misc_feature: Homolog of GI Number: 54641896 NR Desc: GA20342
  misc_feature: Homolog of GI Number: 24664675 NR Desc: CG7427
  misc_feature: Homolog of GI Number: 72126264 NR Desc:  similar to rp42 homolog
  misc_feature: Homolog of GI Number: 46250102 NR Desc: MGC81257 protein
  misc_feature: Homolog of GI Number: 18700658 NR Desc: leucine zipper protein
  misc_feature: Homolog of GI Number: 62858725 NR Desc: LOC549069
MDISGGGWRVHRLLSHIIVGVYFSLTRVLGIVSGGTSAESRQALVELSLAIDGIEGMRDVIFADIPKLIPFIDLEDMSLFSCFYDFVFFICREKGQKSVTIQRAVAAWRIVLSGRFRLLDRWCNFVEKYQRHNISEDTWQQLLAFSRCVNEDLEGYDPRGAWPVLIDDFVEQMHRIYHSTDCSSAMESQCNISSTLKGLDPQPGSKRKCPHLKSNEEDVELSDSFTRSVHLTPIKRLKESHDARYGAGESAKTTHFSNSSSGGYHEDMNLHNSRGCLQNSPCNVEDALSKGFEGCISMKCPF

SEQ ID NO: 225 - DNA, 911 bp, Zea mays
  misc_feature: Ceres CLONE ID no. 233747
  misc_feature: Ceres CDNA ID no. 36707183
  CDS (73)..(720): REFERENCED BY SEQ ID NO: 226
cattttctctcctctctccgtcgccgcctcgggccaaaccctacgcagggagttgattgatcgattgcagccatgagtaagttgcattccgagcttctcaaggattgcatctcccagatagttcaggatgccaagaagaataggaagttcactgagactgttgagcttcagattagtctgaagaattatgatccacaaaaggacaagcgtttcagtggctctgttaagttgcctcacatccctcgtccaaagatgaaggtgtgcatgcttggtgatgcccagcacgttgaggaggctgagaagatgggacttgactacatggatgttgaggccctcaagaaaatgaacaagaacaagaagcttgttaagaagcttgccaagaagtaccatgcttttttggcatcagagaccatcatcaagcaaattccccgtctccttggtcctggtctcaacaaggcaggcaagttccccactctggtcactcaccaggaatccctggaatccaaggtgaatgagacgaaggctacagtcaagtttcaactgaagaaagtcctttgcatgggtgtcgcggtcggtaacctgtctatggaggagaagcagatccaacagaacatccagatgagcatcaacttcctcgtgtctcttctgaagaagaactggcagaatgtaagatgtctctacatcaagatcaccatggggaaaccattcaggattttctaagtctgtttttttgtgaagtctgctctttatgatatttggtttttgaaccgaggttgtcttgaactaaaactcttgttagatcatgtttggttggtaggatatttgagtctgggcaggtgtcttactcttgcgccatgtctttgtaatctctctatataagttttttgagaggctcaaaaaaaaaaaaaaaa

SEQ ID NO: 226 - protein, 215 aa, Zea mays
  misc_feature: Ceres CLONE ID no. 233747
  misc_feature: Ceres CDNA ID no. 36707183
  misc_feature (9)..(211): Pfam Name: Ribosomal_L1 PFAM Desc: Ribosomal protein L1p/L10e family
  misc_feature: Homolog of GI Number: 50948455 NR Desc: putative 60S ribosomal protein L10A
  misc_feature: Homolog of GI Number: 57471702 NR Desc: ribosomal protein L10A
  misc_feature: Homolog of GI Number: 50252685 NR Desc: putative ribosomal protein L10a
  misc_feature: Homolog of GI Number: 56785395 NR Desc: putative 60S ribosomal protein L10A
  misc_feature: Homolog of GI Number: 9757825 NR Desc: 60S ribosomal protein L10A
  misc_feature: Homolog of GI Number: 21386915 NR Desc: putative ribosomal protein L10
  misc_feature: Homolog of GI Number: 15810665 NR Desc: putative 60S ribosomal protein L10A
  misc_feature: Homolog of GI Number: 25294932 NR Desc: 60S ribosomal protein L10A
  misc_feature: Homolog of GI Number: 47026982 NR Desc: 60S ribosomal protein L10A
  misc_feature: Homolog of GI Number: 70909669 NR Desc: ribosomal protein L10Ae
MSKLHSELLKDCISQIVQDAKKNRKFTETVELQISLKNYDPQKDKRFSGSVKLPHIPRPKMKVCMLGDAQHVEEAEKMGLDYMDVEALKKMNKNKKLVKKLAKKYHAFLASETIIKQIPRLLGPGLNKAGKFPTLVTHQESLESKVNETKATVKFQLKKVLCMGVAVGNLSMEEKQIQQNIQMSINFLVSLLKKNWQNVRCLYIKITMGKPFRIF

SEQ ID NO: 227 - DNA, 740 bp, Zea mays
  misc_feature: Ceres CLONE ID no. 233896
  misc_feature: Ceres CDNA ID no. 40350889
  CDS (85)..(564): REFERENCED BY SEQ ID NO: 228
atcaactcgcaattccgcattcgttccaactcctgagcactttctcctcgtcccagacaagccaatcgaagccgagatacgaccatggactccaccggcaccggagcagggggtaaggggaagaagggagcggccgggcgcaaggtcggcgggccaaggaagaagtcggtgtcgaggtccgtgaaggccggtctccagttccccgtcggccgcatcgggcgctacttgaagaagggccgctacgcgcagcgtgtcggcaccggcacccccgtctacctcgccgctgtcctcgaatacctcgccgctgaggttctggagctcgccggtaatgctgccagggacaacaagaagactcgcattattccgcgccacgtgcttctggcgatccggaacgacgaggagcttgggaagctgttgggcggcgtgaccatcgctcacggcggtgtgctccccaatatcaaccctgttctgctgcccaagaagacggcggagaaggcgtccagtggcgggagcaaggaggcaaagtcgcccaagaaggccgccaagtcccctaagaaggcatagactgactgtccggagtgatctgatgtttagcagtaccttgttaccagtatgcggtgatgcgtaggctgcagatgggacgaatgtgcttgtatgtgtatgtgtcctgctgcaagttgtcctttgctatttagaatggaagaagaaatgccttgtttctccgaaaaaaaaaaaaaaaa

SEQ ID NO: 228 - protein, 159 aa, Zea mays
  misc_feature: Ceres CLONE ID no. 233896
  misc_feature: Ceres CDNA ID no. 40350889
  misc_feature (31)..(106): Pfam Name: Histone PFAM Desc: Core histone H2A/H2B/H3/H4
MDSTGTGAGGKGKKGAAGRKVGGPRKKSVSRSVKAGLQFPVGRIGRYLKKGRYAQRVGTGTPVYLAAVLEYLAAEVLELAGNAARDNKKTRIIPRHVLLAIRNDEELGKLLGGVTIAHGGVLPNINPVLLPKKTAEKASSGGSKEAKSPKKAAKSPKKA

SEQ ID NO: 229 - DNA, 746 bp, Zea mays
  misc_feature: Ceres CLONE ID no. 234205
  misc_feature: Ceres CDNA ID no. 25446280
  CDS (158)..(487): REFERENCED BY SEQ ID NO: 230
cactaaaactcggatagatctcagtgcagtgcttccctgttccctccatcaagaaacagcaaagatccagtgcagagagagagagaagcgccatggcactctgaacaagaaaagaaagagctagagagatctcagtcagccagtctctcacaacacaatgccggcaaccaccaagccgatcttgctcccaagggcgtgggcagcagcgccactcctcctcctgctgctgctcgtcctgcacgggagaggaggccactgcgtcggcatggaggcggcggagctggagatggactcggaggcgcaccggcggctgctgtgggaggcgaccacggggcggaggtacatcagctacgacgccctgcggggcgacgtggtgccgtgctccaggaccggggtgccctactacaactgccggatctcgaccaccgccaacccctacacccggggctgcgagagcatcaccaggtgcagggacgcggatccctaggctcttgctttgcttgctccgtcgccttgcaaagggaagtgggtgtggggctgctgctcctcgctccttcgacgctgcagagcggtgttgctgcaaatgcttactaaatgaagtgtattttattctgtcttcttcttttttctttcttcctctttttttttcttggtcgtccttcctcctttgccgggatatttagtaagtgtagtaatgaagcactaatactaatggatgaatctcgtgtgcaaaaaaaaaaaaaaaa

SEQ ID NO: 230 - protein, 109 aa, Zea mays
  misc_feature: Ceres CLONE ID no. 234205
  misc_feature: Ceres CDNA ID no. 25446280
  misc_feature (37)..(106): Pfam Name: RALF PFAM Desc: Rapid ALkalinization Factor
  misc_feature: Homolog of GI Number: 77550707 NR Desc: RALF precursor
  misc_feature: Homolog of GI Number: 21593878 NR Desc: RALF precursor
  misc_feature: Homolog of GI Number: 16566316 NR Desc: RALF precursor
  misc_feature: Homolog of GI Number: 42374767 NR Desc: rapid alkalinization factor preproprotein
  misc_feature: Homolog of GI Number: 28628203 NR Desc: rapid alkalinization factor 1 precursor
  misc_feature: Homolog of GI Number: 37695573 NR Desc: rapid alkalinization factor 2
  misc_feature: Homolog of GI Number: 77556664 NR Desc: Rapid ALkalinization Factor
  misc_feature: Homolog of GI Number: 28628205 NR Desc: rapid alkalinization factor 2 precursor
  misc_feature: Homolog of GI Number: 34907152 NR Desc: P0506E04.27
  misc_feature: Homolog of GI Number: 48766856 NR Desc: rapid alkalinization factor 1
MPATTKPILLPRAWAAAPLLLLLLLVLHGRGGHCVGMEAAELEMDSEAHRRLLWEATTGRRYISYDALRGDVVPCSRTGVPYYNCRISTTANPYTRGCESITRCRDADP

SEQ ID NO: 231 - DNA, 902 bp, Zea mays
  misc_feature: Ceres CLONE ID no. 234459
  misc_feature: Ceres CDNA ID no. 36707185
  CDS (55)..(717): REFERENCED BY SEQ ID NO: 232
agccgcatcccttctttcattcgccgccgccgcctgctctctgctgccgtcgccatggggagaaggcctgcgagatgctatcgccagatcaagaacaagccataccccaagtccaggtactgccgtggtgtccctgaccccaagatcaggatctacgatgttggcatgaagagaaagggtgttgatgagttcccctactgtgtgcaccttgtctcttgggagaaggagaatgtctccagtgaggctcttgaggctgcccgtattgcctgcaacaagtacatgaccaagtctgcaggaaaggatgccttccaccttcgggtccgggttcaccccttccatgtccttcgtatcaacaagatgctttcgtgtgctggggctgataggctccagactggaatgaggggtgcctttggcaagcctcagggcacctgtgctagggtggacattggtcaggtcctcctttctgttcgatgcaaggacaacaatgctgcacatgccagtgaagctctgcgtcgcgccaagttcaagttccctggccgccaaaagattattgagagcagaaagtggggcttcaccaagttcagccgtgccgactacctgaagtacaagagtgagggtagaattgttcctgatggtgtcaacgcaaagctgctcggtaaccatggaagacttgagaagcgtgctcctgggaaggctttcctcgaggccgttgcttaagtccaatctacagttggaatgcgaatccaaacgttttggtttagcctatcttattttgctttgtgcaacatgaattttaagtgtatggggtattacagtgccttgtgtgaacctgcttatctcgtgctgaacatcgttatgcatggaagtacttatcttttgttctgataaaaaaaaaaaaaaaa

SEQ ID NO: 232 - protein, 220 aa, Zea mays
  misc_feature: Ceres CLONE ID no. 234459
  misc_feature: Ceres CDNA ID no. 36707185
  misc_feature (1)..(176): Pfam Name: Ribosomal_L10e PFAM Desc: Ribosomal L10
  misc_feature: Homolog of GI Number: 7447294 NR Desc: probable transcription factor QM
  misc_feature: Homolog of GI Number: 1293784 NR Desc: similar to human QM protein and to maize ubiquinol
  misc_feature: Homolog of GI Number: 77999313 NR Desc: 60S ribosomal protein L10
  misc_feature: Homolog of GI Number: 68449756 NR Desc: 60S ribosomal protein L10
  misc_feature: Homolog of GI Number: 77549305 NR Desc: Ribosomal L10
  misc_feature: Homolog of GI Number: 2500354 NR Desc: 60S ribosomal protein L10
  misc_feature: Homolog of GI Number: 575355 NR Desc: putative tumor suppresser
  misc_feature: Homolog of GI Number: 11036950 NR Desc: QM
  misc_feature: Homolog of GI Number: 575357 NR Desc: putative tumor supressor
  misc_feature: Homolog of GI Number: 5917743 NR Desc: 60S ribosomal protein L10
MGRRPARCYRQIKNKPYPKSRYCRGVPDPKIRIYDVGMKRKGVDEFPYCVHLVSWEKENVSSEALEAARIACNKYMTKSAGKDAFHLRVRVHPFHVLRINKMLSCAGADRLQTGMRGAFGKPQGTCARVDIGQVLLSVRCKDNNAAHASEALRRAKFKFPGRQKIIESRKWGFTKFSRADYLKYKSEGRIVPDGVNAKLLGNHGRLEKRAPGKAFLEAVA

SEQ ID NO: 233 - DNA, 921 bp, Zea mays
  misc_feature: Ceres CLONE ID no. 234526
  misc_feature: Ceres CDNA ID no. 40350892
  CDS (92)..(676): REFERENCED BY SEQ ID NO: 234
gccctgccactccactcctaccccacacagaagcggcggcggcggagcaaacgcaggcgaaggcgagggtgtgagggaaggagcaccagccatggtgcacgtcaacttctaccgcaactatggtaagacgttcaagaaaccaaggcgtccttatgagaaggagcgtcttgatgctgaactgaagctggtcggtgagtatgggctgaggtgcaagcgtgagctttggagggtccagtatgcactgagcaggatccgtaatgctgcaaggcacttgctcacccttgacgagaagaacccccatcgtatctttgagggtgaggcgcttcttcgccgcatgaaccgctatgggctgcttgctgagggtcagaacaagcttgattatgttcttgccctcaccgctgagaacttcctcgcaaggcggcttcaaacacttgtcttcaaggctggcatggccaagtccattcaccatgctcgtgtcttgatcaagcagcgtcacatcagggttggcaggcaaattgtcaacgtcccatcattcatggtgagggtggagtctgagaagcacattgacttttcactgtcaagcccattcggtggaggccccgcaggaagggtgaagagaaagaatcagaagaaggcaagcggtggcggcgatgctggcgatgaggatgaggagtgaggatggacaagtagcgttacccaatataataatattatctagttttcttgaacttgttcgaatgatgagtgcttagctgtgtgatctgacgcagagttccctgtgctgactctgtgtcatggatggtccattttatcttgtggtattatcagcctttacataactgctatgtttggatatgttcaattctgttgcaattttatgtggttgttttttgcgttttgttgccaaaaaaaaaaaaaaaa

SEQ ID NO: 234 - protein, 194 aa, Zea mays
  misc_feature: Ceres CLONE ID no. 234526
  misc_feature: Ceres CDNA ID no. 40350892
  misc_feature (109)..(156): Pfam Name: S4 PFAM Desc: S4 domain
  misc_feature (7)..(108): Pfam Name: Ribosomal_S4 PFAM Desc: Ribosomal protein S4/S9 N
MVHVNFYRNYGKTFKKPRRPYEKERLDAELKLVGEYGLRCKRELWRVQYALSRIRNAARHLLTLDEKNPHRIFEGEALLRRMNRYGLLAEGQNKLDYVLALTAENFLARRLQTLVFKAGMAKSIHHARVLIKQRHIRVGRQIVNVPSFMVRVESEKHIDFSLSSPFGGGPAGRVKRKNQKKASGGGDAGDEDEE

SEQ ID NO: 235 - DNA, 973 bp, Zea mays
  misc_feature: Ceres CLONE ID no. 234637
  misc_feature: Ceres CDNA ID no. 40350890
  CDS (121)..(786): REFERENCED BY SEQ ID NO: 236
ggacagcgcctccagttgcagagtccagacgccagacgccctctacttctctctagttagtgtacatttcaaactcttggccgccgcctcgctctctgttcgccgcgccccgccgcagaaatggcgctgccgaatcagcaggttgtggattaccccagcttcaagctcgtcatcgttggcgacggtggaactggcaaaaccacatttgtgaagaggcatcttactggcgagtttgagaagaaatatgagcccaccattggtgttgaagttcaccctctcgattttagcactaactgtggcaaaattcgtttctattgctgggacactgctgggcaagaaaagttcggtggcctcagggatggctactacattcatggtcagtgtgccatcattatgtttgatgtcacttcgaggctgacatacaagaatgttccaacatggcacagggacctgtgcagggtgtgtgagaacatccccatcgttctctgcggaaacaaggttgatgtaaagaacaggcaggtcaaagccaagcaagttacattccacaggaagaagaacttgcagtactatgagatttctgccaagagcaattacaactttgagaagcccttcctttacctcgcaaggaagctggcaggggatcagaaccttcactttgtcgaagccgttgctctgaagccaccggaagtgcagattgatatggccatgcagcagcagcatgaagctgagcttgcagctgccgctgcgcaacccctccctgatgacgatgatgacctgatcgaatagatgttccatggcccttgttgatgcgagggggagagcttttattacaaatccgtggtggttcagttcttgtcaggcctagccgtacgtgatttttctgttatgtaacctgctgttgacgagggtttttggtgatccttgattttggtaatacatcgctattgtcaggcagctaaaaaaaaaaaaaaaa

SEQ ID NO: 236 - protein, 221 aa, Zea mays
  misc_feature: Ceres CLONE ID no. 234637
  misc_feature: Ceres CDNA ID no. 40350890
  misc_feature (15)..(173): Pfam Name: Ras PFAM Desc: Ras family
MALPNQQVVDYPSFKLVIVGDGGTGKTTFVKRHLTGEFEKKYEPTIGVEVHPLDFSTNCGKIRFYCWDTAGQEKFGGLRDGYYIHGQCAIIMFDVTSRLTYKNVPTWHRDLCRVCENIPIVLCGNKVDVKNRQVKAKQVTFHRKKNLQYYEISAKSNYNFEKPFLYLARKLAGDQNLHFVEAVALKPPEVQIDMAMQQQHEAELAAAAAQPLPDDDDDLIE

SEQ ID NO: 237 - DNA, 832 bp, Zea mays
  misc_feature: Ceres CLONE ID no. 234756
  misc_feature: Ceres CDNA ID no. 40350891
  CDS (67)..(687): REFERENCED BY SEQ ID NO: 238
tccacccgcttcccccagccgcacgaaaccctaacgctgccgccgcttcacaggtaagccgccgccatggtgtccggttccggcgtatgcgcgaagcgcatcgtggtggacgcgcgccaccacatgctgggccgcctgtcgtcgattatcgccaaggaactgctcaatgggcagaaggtggtcgtcgtccgctgcgaggagatctgtatgtcgggtgggctcgtacgccagaagatgaagtacctccgctttctccgcaagcggatgaacaccaagccatcccatcgacccatccacttccgcgccccgtccaagatcctgtggcgcaccatccgcgggatgattccgcacaagaccaagaggggggaggcggctctggcgaggctcaagacgtacgagggcgtaccgccgccgtacgacaagactaagcgcctggtcatccctgacgctcttaaggttctgaggctgcaaccaggacacaagtactgcctccttggggagctttctaaggaggtcggatggaactaccatgacaccatcagggagcttgaggagaagaggaaggagaaggccaaggtggcctatgagaggaggaagcagctggccaagctgcgcctaaaggctgaggctacagccgaggaaaagctagggtcacagctggacattcttactccgatcaagtactgaatctgtggtttcgtgcctatcagttttgtggaacatctgatccatcgttttaaaagttgtgacagtataatcttgagtgctattctgaacacattttgtagccggtgaatgtattgtttgttttaccaaaaaaaaaaaaaaaaaa

SEQ ID NO: 238 - protein, 206 aa, Zea mays
  misc_feature: Ceres CLONE ID no. 234756
  misc_feature: Ceres CDNA ID no. 40350891
  misc_feature (11)..(127): Pfam Name: Ribosomal_L13 PFAM Desc: Ribosomal protein L13
MVSGSGVCAKRIVVDARHHMLGRLSSIIAKELLNGQKVVVVRCEEICMSGGLVRQKMKYLRFLRKRMNTKPSHRPIHFRAPSKILWRTIRGMIPHKTKRGEAALARLKTYEGVPPPYDKTKRLVIPDALKVLRLQPGHKYCLLGELSKEVGWNYHDTIRELEEKRKEKAKVAYERRKQLAKLRLKAEATAEEKLGSQLDILTPIKY

SEQ ID NO: 239 - DNA, 695 bp, Zea mays
  misc_feature: Ceres CLONE ID no. 234785
  misc_feature: Ceres CDNA ID no. 29191343
  CDS (94)..(453): REFERENCED BY SEQ ID NO: 240
atcacacactaatcaacaagcaggaccagctagctagctcctctcactgctatcacccgcccagccatctcgctgaaagagaaaagcgcagccatgaagactactagctcgggcattgcagtcgtcctactggtggccatgctggcagtccattccgcgttggccgacatctcgtgctccgacgtgctcaacgacctgtcgccgtgcctgcccttcctgcagggcaaggcagccaaacccagcgagagcaacaaccagtgctgcgacggcgtgagggccctgtacgcggcggcggacaccaggcccgacaggcaggccacgtgccggtgcctcaaggcggcctacgttcaggtccacgctgtgctctccgcggcgcaggagctgcccggcgactgcggcctctcgctgtcctacaacatcacccccgacatcgactgcgacaagatcgaatgaagggatactgttcccttaccagaatccatacgacgggatggtgatgttcagtgccctgctagcagtaggctgcatctgcactgagtgactagaataaaggatttggtgatgtttgtgctgattagtgtgttcgcctgtaatcgtgtgatgccgtcgttggcttcttatatccgtgtctaatctcgcaagtgctcgtgtttgcaactataccatttataatgtcaactcaaaaaaaaaaaaaa

SEQ ID NO: 240 - protein, 119 aa, Zea mays; identical to SEQ ID NO: 120
  misc_feature: Ceres CLONE ID no. 234785
  misc_feature: Ceres CDNA ID no. 29191343
  misc_feature (28)..(115): Pfam Name: Tryp_alpha_amyl PFAM Desc: Protease inhibitor/seed storage/LTP family
  misc_feature: Homolog of GI Number: 31324341 NR Desc: putative lipid transfer protein
  misc_feature: Homolog of GI Number: 16903206 NR Desc: lipid transfer protein precursor
  misc_feature: Homolog of GI Number: 11095210 NR Desc: lipid transfer protein 3 precursor
  misc_feature: Homolog of GI Number: 66271045 NR Desc: FSLTP2
  misc_feature: Homolog of GI Number: 66271047 NR Desc: FSLTP3
  misc_feature: Homolog of GI Number: 7012722 NR Desc: lipid transfer protein precursor
  misc_feature: Homolog of GI Number: 37625029 NR Desc: lipid transfer protein
  misc_feature: Homolog of GI Number: 12659322 NR Desc: lipid transfer protein
  misc_feature: Homolog of GI Number: 62529290 NR Desc: non
  misc_feature: Homolog of GI Number: 19039 NR Desc: LTP 1

SEQ ID NO: 241 - DNA, 652 bp, Zea mays
  misc_feature: Ceres CLONE ID no. 235059
  misc_feature: Ceres CDNA ID no. 25445772
  CDS (104)..(442): REFERENCED BY SEQ ID NO: 242
atcacccaatcagatccgatttcgtagagatgaagccggcagtagaggcggaggctgacgagcgagcggcggaagcagaagtggaaggaagcaggcggccaccatggtgaagggacgcacgggacagcgcgtcaggctctacgtccggggcaccatcctcggatacaagaggtccaagtcgaaccagtacgagaccacgtcgctcattcagatcgagggggtgaacaccaaggaggacgtcgcgtggtacgctggcaagcgcatggcgtacatctacaaggctaagaccaagagcagcgagacccgctacaggtgcatctggggcaaggtcacccgcccgcacggcaactcgggcgtcgtccgcgccaagttcaagtccaacctcccgcctgagtccatggggcgcaaggtcagagtgttcatgtacccgagcagcatctaaggttaggtttttgttggagtaaaggtggactctaaatggccatgcttagttcttctctctgagcttaaaatgccatgtgttggcaacttagattgttcatgtactgaacctgttgaagttctaccaaaatttgttgtcgaacggctgaacagttgtcctaatgttatgctataaacagagcttatttcccccagaaaaaaaaaaaaaaaa

SEQ ID NO: 242 - protein, 112 aa, Zea mays
  misc_feature: Ceres CLONE ID no. 235059
  misc_feature: Ceres CDNA ID no. 25445772
  misc_feature (12)..(106): Pfam Name: Ribosomal_L35Ae PFAM Desc: Ribosomal protein L35Ae
  misc_feature: Homolog of GI Number: 18092339 NR Desc: ribosomal protein L35A
  misc_feature: Homolog of GI Number: 14719290 NR Desc: ribosomal protein L35A
  misc_feature: Homolog of GI Number: 50915390 NR Desc: putative ribosomal protein L35A
  misc_feature: Homolog of GI Number: 50932737 NR Desc: putative ribosomal protein L35A
  misc_feature: Homolog of GI Number: 55741076 NR Desc: rpl35A
  misc_feature: Homolog of GI Number: 13430186 NR Desc: ribosomal protein L33
  misc_feature: Homolog of GI Number: 17104787 NR Desc: putative ribosomal protein
  misc_feature: Homolog of GI Number: 30102814 NR Desc: At1g41880
  misc_feature: Homolog of GI Number: 21593235 NR Desc: ribosomal protein L35a
  misc_feature: Homolog of GI Number: 56516344 NR Desc: Ribosomal protein
MVKGRTGQRVRLYVRGTILGYKRSKSNQYETTSLIQIEGVNTKEDVAWYAGKRMAYIYKAKTKSSETRYRCIWGKVTRPHGNSGVVRAKFKSNLPPESMGRKVRVFMYPSSI

SEQ ID NO: 243 - DNA, 807 bp, Zea mays
  misc_feature: Ceres CLONE ID no. 236631
  misc_feature: Ceres CDNA ID no. 6409809
  CDS (87)..(534): REFERENCED BY SEQ ID NO: 244
acaacaccaagaagcaagaaaactagaaaaggctcctcccgaccgcaacgcccctcatctccctcgaccccgacatccccgacccgatggcgcccaaggcggagaagaagccagcggagaagaagccggcggccgaggagaaggcggagaagacgaccgcagggaagaagcccaaggccgagaagcggctgcccgcgtccaagtcctccggcaaggagggcggcgagaagaaggggaagaagaaggccaagaagagcgtggagacctacaagatctacatcttcaaggtgctgaagcaggtgcaccccgacatcggcatatcctccaaggccatgtccatcatgaactccttcatcaacgacatctttgagaagctggccggcgaggccgccaagctggcgcggtacaacaagaagcccaccatcacgtcccgcgagatccagacctccgtgcgcctagtcctccccggagagctcgccaagcacgccgtctccgagggaaccaaggccgtcaccaagttcaccagcaactgagcgcgctgcgggatccgcggatctgttagaagggttctttgctgtgtcctttccccagtcccccaccctacccgcctagtagctagcttgcctgctctataaatccggcgcgccggattgtaatggtcctcttagatttgatgtccctgttgtggaatatagttgtatctctccgcttgctatttttctcattctttaggaacttggaaatctggtaattttgccgggagataactaggatcatcacaaattcgcgctaaaaaaaaaaaaaaaa

SEQ ID NO: 244 - protein, 148 aa, Zea mays
  misc_feature: Ceres CLONE ID no. 236631
  misc_feature: Ceres CDNA ID no. 6409809
  misc_feature: No seed is being produced by the plant
  misc_feature: The plant flowers significantly late compared to wild-type.
  misc_feature: Useful for biocontainment applications
  misc_feature: Useful for making plants with modulated flowering time
  misc_feature (55)..(127): Pfam Name: Histone PFAM Desc: Core histone H2A/H2B/H3/H4
MAPKAEKKPAEKKPAAEEKAEKTTAGKKPKAEKRLPASKSSGKEGGEKKGKKKAKKSVETYKIYIFKVLKQVHPDIGISSKAMSIMNSFINDIFEKLAGEAAKLARYNKKPTITSREIQTSVRLVLPGELAKHAVSEGTKAVTKFTSN

SEQ ID NO: 245 - DNA, 867 bp, Zea mays
  misc_feature: Ceres CLONE ID no. 237843
  misc_feature: Ceres CDNA ID no. 40350894
  CDS (161)..(454): REFERENCED BY SEQ ID NO: 246
gaggcccccgcgttcacgagccacaagagaagagaggctaaccaccgcagcggctgcggcctgcgagtgcgacaacctccgcggaggagttggagccggcggcggggatatttgcttgcccggctggggttgcggcggaaggagggagagacaaccggcgatggcggcgtccgcgaggtccggggagagggcgaccagcttcgccgtcgcgtgcagcctcctcagtcgcttcgtccgccagaacggcgtcgcggctgccgagctaggcctcaggatcaaaggcgaggtcgagcagcagaggacgccggcgacaactaactcgctccccggagcggagggcgaggaggtcgaaaggaggaaggagaccatggagctgttcccgcagagcgtcgggttcagcatcaaggatgctgctgcccctaggtgcgtaccactgctgcttcacatcatctaaatccatttcgattttggtttgcgcaacagttgttacgtagtagcacagcagaactcaagcctagctagctgtcttaggtctcctggacaaaagggcaagcaatttgactttgtaacatagagatctgagtttaatgagtgtttataggtggaacatgtggtataaaatctagttgagccggatggcaaatgacagagcatgttattacgtatgtgtaaagctaaagcatcccttgctgttcagtccgtgttggtattccttggtcaaagctgtatctttgtaatcttaagaagttaccgcctttgctgaaacaccgtgttctgcaaggtagcacaatgtttccttttatcaggcaaagcaaccaacatgctcagagattgtacctaatgtttatcataaaaaaaaaaaaaaaa

SEQ ID NO: 246 - protein, 97 aa, Zea mays
  misc_feature: Ceres CLONE ID no. 237843
  misc_feature: Ceres CDNA ID no. 40350894
MAASARSGERATSFAVACSLLSRFVRQNGVAAAELGLRIKGEVEQQRTPATTNSLPGAEGEEVERRKETMELFPQSVGFSIKDAAAPRCVPLLLHII

SEQ ID NO: 247 - DNA, 1120 bp, Zea mays
  misc_feature: Ceres CLONE ID no. 238219
  misc_feature: Ceres CDNA ID no. 29191346
  CDS (1)..(849): REFERENCED BY SEQ ID NO: 248
atgaacctccagctttctctctctccttccctcctctccagttccacagaaggctccgtgcctagatcccgtggagaatgtgttggggatcaaggagtggttgattggatccatcccctcacgtgcttccctcatcaagtttcaaatccccatctgcgcgaggaactcctctctcaaggggaaatcgctcgtaactgtgcaaacacttgttgctcgacccccctcaatcaatcgagccgtggtgtttgttgtctctctctctttaagatggttgcacggaggaatccatccattattgaagaaggtagtggatctgaagaaatccaggtggagcgtcctcgccgctcccagaccggtcatggtagaggccaagctcggggagatgttggtgggagtagttctcaacaacctgaaatcgtccatgccgctcgagaagaacctgtccctcagccacctctccatccatcttcatcacgggctgctgcagctgccgcctctcgccccatgagccgtggtaagagaagcaagaagagaggtgttcgtgcgctcatcaggggtttaaatggaatctatgctatctgtcgtgagagttatgttcaaatcgccgagctaaaaaggaaaaatgtcgagtacaatgagaactttaggagatttatgttagagtcggacaactttaggcgttatgttggtcgtgtacctctgcgtcctgctccaccatacaatcctccgccgcctatgcccgacactctggatcagtgggttcagcagacatatggtgttcctttcgacgaagatatctctgatgatgaggaagaaatctctgatgatgaagatgagtccttctggtgaacatggtcattatggtggcttcttcttcttcttggttcttgttgctaaaagggagagaagttcgtgacatttgatctagtcttttgttgctggcagttgtgagagtgagaacctaaactatgtgggatgtaataactttatgattatgttgtctcaaaacacctggcctgtaatagataattaggtgaacttgttcttattatgctactactcgtttcattatgccgtgaatcctctttatgctaagctttatgcaaaaaaaaaaaaaaaa

SEQ ID NO: 248 - protein, 193 aa, Zea mays
  misc_feature: Ceres CLONE ID no. 238219
  misc_feature: Ceres CDNA ID no. 29191346
MVARRNPSIIEEGSGSEEIQVERPRRSQTGHGRGQARGDVGGSSSQQPEIVHAAREEPVPQPPLHPSSSRAAAAAASRPMSRGKRSKKRGVRALIRGLNGIYAICRESYVQIAELKRKNVEYNENFRRFMLESDNFRRYVGRVPLRPAPPYNPPPPMPDTLDQWVQQTYGVPFDEDISDDEEEISDDEDESFW

SEQ ID NO: 249 - DNA, 767 bp, Zea mays
  misc_feature: Ceres CLONE ID no. 238235
  misc_feature: Ceres CDNA ID no. 25446282
  CDS (43)..(615): REFERENCED BY SEQ ID NO: 250
ataaaaggatcgccctccgcgcgccgccgaggaggaggcaagatgaagacgatcctggcgtcggagacgatggacatcccggagggcgtcacagtgacggtggcggccaagctggtgacggtggagggcccccgcgggaagctcacccggaacttcaagcacctcaacctcgacttccagctgcaggagggcggccgcaagctcaaggtggacgcatggttcggcacccgccgcaccatggccgccatccgcaccgccatctcccacgtccagaacctcatcaagggggtcaccaagggctaccgctacaagatgaggtttgtctacgcccatttccccatcaacgcgtccatcaccaactccaacaccgccatcgagataaggaacttcctcggcgagaagaaggtcagaaaggtggacatgcttgacggcgtgaccatcctccgctccgagaaggtcaaggacgagcttattctcgatggcaacgacgtcgagttagtctctcgctccgccgccctcatcaaccagaaatgccatgtcaagaagaaggatatcaggaagtttttggatggtatctatgtgagcgacaagggtgtgatcgaagaggagcagtgagggacaattagttgttatcgtttgagttggaattattgtttggtttgcaattttctcaaggtgaactttgtaatcggttaggatgtgttgtggaccattatcttatcctacaatattatcgtatctgtttaagaataaaaaaaaaaaaaaaa

SEQ ID NO: 250 - protein, 190 aa, Zea mays
  misc_feature: Ceres CLONE ID no. 238235
  misc_feature: Ceres CDNA ID no. 25446282
  misc_feature (98)..(177): Pfam Name: Ribosomal_L6 PFAM Desc: Ribosomal protein L6
  misc_feature: Homolog of GI Number: 33087067 NR Desc: ribosomal L9
  misc_feature: Homolog of GI Number: 7440702 NR Desc: probable ribosomal protein L9
  misc_feature: Homolog of GI Number: 51963784 NR Desc: PREDICTED OJ1435_F07.31 gene product
  misc_feature: Homolog of GI Number: 50904621 NR Desc: putative 60S ribosomal protein L9
  misc_feature: Homolog of GI Number: 20727 NR Desc: GA
  misc_feature: Homolog of GI Number: 6015604 NR Desc: ribosomal protein L9
  misc_feature: Homolog of GI Number: 12642868 NR Desc: putative ribosomal protein L9
  misc_feature: Homolog of GI Number: 21554945 NR Desc: ribosomal protein L9
MKTILASETMDIPEGVTVTVAAKLVTVEGPRGKLTRNFKHLNLDFQLQEGGRKLKVDAWFGTRRTMAAIRTAISHVQNLIKGVTKGYRYKMRFVYAHFPINASITNSNTAIEIRNFLGEKKVRKVDMLDGVTILRSEKVKDELILDGNDVELVSRSAALINQKCHVKKKDIRKFLDGIYVSDKGVIEEEQ

SEQ ID NO: 251 - DNA, 580 bp, Zea mays
  misc_feature: Ceres CLONE ID no. 238431
  misc_feature: Ceres CDNA ID no. 40350895
  CDS (74)..(277): REFERENCED BY SEQ ID NO: 252
gcctatcttcctgcttcggacagttgagagagagagagagagagaggaagggatcgagagcgcggcggaggcgatggcgagcggagggaagggactcaacgcgactggggagttcttccggcggagggacgagtggaggaggcaccctatggcggggaaccagctgcgccacgccacacccgggctcggcatcgccatcgtcgccttcgggatctacctcgtcggcgaggccgcctacaaccgcctctaccgcccctccggcgaccaccaccactagatcgccggcaggatccgtgactcggtcaagaagctggagccaactttaccaagcacttgtgctgttgatgtttttacagttttgagctcataaggtcagccatgaccatattgtaatctgtgaccgggtagacttgcccactggtccgtccaactattgtctttggaccctgtgttaatccttgctatatggatctgacagtgctcatgtaattcaagaatcctggactatcttttatgtgcttatttgagtttgcaagtgcgtttccgttaaaagttgagatgttcaaaaaaaaaaaaaaaa

SEQ ID NO: 252 - protein, 67 aa, Zea mays
  misc_feature: Ceres CLONE ID no. 238431
  misc_feature: Ceres CDNA ID no. 40350895
MASGGKGLNATGEFFRRRDEWRRHPMAGNQLRHATPGLGIAIVAFGIYLVGEAAYNRLYRPSGDHHH

SEQ ID NO: 253 - DNA, 604 bp, Zea mays
  misc_feature: Ceres CLONE ID no. 238515
  misc_feature: Ceres CDNA ID no. 25446047
  CDS (140)..(433): REFERENCED BY SEQ ID NO: 254
aatctcgttgcccgttgtgctctctctctctattcgttccccgcctcaccccgagccagccgtctcgctagggtttcgccgccgccgccgccgccgccaggctcctcctccagctcctgttcgagatggtggtggctccatgtttggaggaattgggtccaccattgctcaaggtatggcgtttggcacgggtagtgccatggcacacagggctgttgatgctgtattaggtccccggaccattcagcatgagactgttgcctcagaagctgctgctgctgcccctgcccctccagtgatgaatgctgacgcttgcagcatccattctaaggctttccaagattgtctcaacaactatggcagcgagatcagcaagtgccagttctacctagacatgctgaacgagtgccgccgtggtggtgtgtctgcctaagctgcctctggggttattcgtggattttctttcggtgatgctatctcattaataagataccgtgaaacttttgtctccacagcttgaagctaaacttcctgggattaatacattttgttatcctaaaaaaaaaaaaaaaaaaaaaaaaaaaaaaaaaaaaaaaaaaaaaaa

SEQ ID NO: 254 - protein, 97 aa, Zea mays
  misc_feature: Ceres CLONE ID no. 238515
  misc_feature: Ceres CDNA ID no. 25446047
  misc_feature (52)..(93): Pfam Name: CHCH PFAM Desc: CHCH domain
MFGGIGSTIAQGMAFGTGSAMAHRAVDAVLGPRTIQHETVASEAAAAAPAPPVMNADACSIHSKAFQDCLNNYGSEISKCQFYLDMLNECRRGGVSA

SEQ ID NO: 255 - DNA, 684 bp, Zea mays
  misc_feature: Ceres CLONE ID no. 238984
  misc_feature: Ceres CDNA ID no. 29191801
  CDS (149)..(391): REFERENCED BY SEQ ID NO: 256
attgcatccccctttctgctcctgtgctgcgtccaccagcctcgtcgttaggacgtaaggtaagacacccaggggcgagccagtgagtacagagagtagccttacgtagcgaagctcagagcaagcgagggtacggtcaaggggggtgatggcgctgtctcgacgcatggcggctcccgtcctcgtcctcatgctcctcctcgtcgccacagagctggggacgaccaaggtggcggaggcgaggcactgcctgtcgcagagccaccggttcaagggcctgtgcatgagcagcaacaactgcgccaacgtgtgccagaccgagaacttccccggcggcgagtgtaaggcggagggcgccacgcgcaagtgcttctgcaagaagatatgctagtagtagcctcggctttgctggcacaagcaggtcgtcggcacgcaacgcaattcaagcatcatatcggtcctcctcccgcgttgctgtctactcgaccccgttttctctttcgatcgatttcgttgtttcctgttgctctcttcttttcccgcgaataatatgctccatgggatctcactgttgtactttctgcatccgttggtagtcaggacgatccttcttcccgctgtcacgtgtgattcaaaatggatgtactaatgcaactgttcgttcttacaaaaaaaaaaaaaaaa

SEQ ID NO: 256 - protein, 80 aa, Zea mays
  misc_feature: Ceres CLONE ID no. 238984
  misc_feature: Ceres CDNA ID no. 29191801
  misc_feature (32)..(80): Pfam Name: Gamma PFAM Desc: Gamma
  misc_feature: Homolog of GI Number: 50910773 NR Desc: putative defensin
  misc_feature: Homolog of GI Number: 22324363 NR Desc: defensin
  misc_feature: Homolog of GI Number: 50926554 NR Desc: OSJNBa0019D11.21
  misc_feature: Homolog of GI Number: 24306004 NR Desc: defensin EGAD1
  misc_feature: Homolog of GI Number: 17066707 NR Desc: defensin protein precursor
  misc_feature: Homolog of GI Number: 533692 NR Desc: protease inhibitor
  misc_feature: Homolog of GI Number: 32400845 NR Desc: proteinase inhibitor Rgpi9
  misc_feature: Homolog of GI Number: 16225423 NR Desc: putative gamma
  misc_feature: Homolog of GI Number: 7939581 NR Desc: thionin like protein
  misc_feature: Homolog of GI Number: 61189792 NR Desc: defensin
MALSRRMAAPVLVLMLLLVATELGTTKVAEARHCLSQSHRFKGLCMSSNNCANVCQTENFPGGECKAEGATRKCFCKKIC

SEQ ID NO: 257 - DNA, 1057 bp, Zea mays
  misc_feature: Ceres CLONE ID no. 239178
  misc_feature: Ceres CDNA ID no. 25445548
  CDS (74)..(856): REFERENCED BY SEQ ID NO: 258
ctcgagcacctgcagcgccgccagacactccgtagtctgtaccccaagcaccggcgcggcggcggcggctaccatggcagtcgggaagaacaagaggatctccaagggaaagaagggtggtaagaaaaagaccgtcgatcccttctctaagaaggactggtatgacatcaaggccccatcggtcttcagtgtgcgcaacattgggaagactctcgtgtccaggacacagggtaccaggattgcctctgatggtctgaagcacagagtctttgaggtttgtctagctgatcttcagggtgacgaggatcaggcttacaggaaaatcaggctccgtgctgaagatgtgcaagacaggaatgtgctcacaaacttctggggcatgaattttaccaccgataagctcagatctctagtaaagaagtggcagacattgattgaagcccatgttgatgtcaagacaaccgacaactacatgctgcgtttgttctgcattggttttaccaagaggcgcccaaaccaggtcaagagaacctgctatgctcaggcatcccagattcggcagattcgccgcaagatggttgagattatgatcaaccaggcttctacatgtgaccttaaagaacttgtttctaagttcattccggaagttattggcaaagagattgagaagtctacctccagcatcttcccacttcaaaacgtcttcatccgcaaggtgaagatactcaaggcccccaagtttgatctcgggaagttgatggaggttcatggcgactacaaagaggacgttggtgtgaagcttgagaggcctgtcgagggtgatgaggctatgcaggaggttgctgctgccgagtagtttatttgctacttctttatctagacgaatctggacaggaggtcccttatgacgcgaacttcataaaattgtctggcgacatgttttcttctgtccctgccctaaactctaaacccaaaggttattcgtaacaagtgttttaagattatttttgtttatgtttgggttcgagtactgctgtgtacaaaaaaaaaaaaaaaa

SEQ ID NO: 258 - protein, 260 aa, Zea mays
  misc_feature: Ceres CLONE ID no. 239178
  misc_feature: Ceres CDNA ID no. 25445548
  misc_feature (11)..(222): Pfam Name: Ribosomal_S3Ae PFAM Desc: Ribosomal S3Ae family
  misc_feature: Homolog of GI Number: 50907013 NR Desc: putative ribosomal protein S3a
  misc_feature: Homolog of GI Number: 483431 NR Desc: cyc07
  misc_feature: Homolog of GI Number: 77554756 NR Desc: Ribosomal S3Ae family
  misc_feature: Homolog of GI Number: 4079800 NR Desc: S
  misc_feature: Homolog of GI Number: 6714564 NR Desc: cyc07
  misc_feature: Homolog of GI Number: 24817254 NR Desc: ribosomal protein S3a
  misc_feature: Homolog of GI Number: 81074079 NR Desc: cyc07
  misc_feature: Homolog of GI Number: 81074465 NR Desc: cyc07
  misc_feature: Homolog of GI Number: 82623437 NR Desc: 40S ribosomal protein S3a
  misc_feature: Homolog of GI Number: 1350983 NR Desc: 40S ribosomal protein S3a
  misc_feature: Useful for making shorter plants
  misc_feature: Useful for modifying plant structure
  misc_feature: Useful for sterility
MAVGKNKRISKGKKGGKKKTVDPFSKKDWYDIKAPSVFSVRNIGKTLVSRTQGTRIASDGLKHRVFEVCLADLQGDEDQAYRKIRLRAEDVQDRNVLTNFWGMNFTTDKLRSLVKKWQTLIEAHVDVKTTDNYMLRLFCIGFTKRRPNQVKRTCYAQASQIRQIRRKMVEIMINQASTCDLKELVSKFIPEVIGKEIEKSTSSIFPLQNVFIRKVKILKAPKFDLGKLMEVHGDYKEDVGVKLERPVEGDEAMQEVAAAE

SEQ ID NO: 259 - DNA, 1645 bp, Zea mays
  misc_feature: Ceres CLONE ID no. 239746
  misc_feature: Ceres CDNA ID no. 25445549
  CDS (138)..(1373): REFERENCED BY SEQ ID NO: 260
ctccagagcttgggcagactctcctcagtaactatagttttttttgttccttgggaggatagaaaaaatatatccttggttttcttgaacagataacatttcaggtgtgcttctgaagggagatttcgttgaacaggatgaatgcattggcagcaaccagcaggaacttcaagcaggcagctaagctgctgggcctcgactccaagctggagaagagcttgctcattccattcagggagatcaaggttgaatgcacaatcccaaaagatgatggaactttggcatcctatgttggatttagggttcaacatgataatgctaggggacctatgaagggtggaatcagataccaccatgaggttgatcctgatgaagttaatgccttggcacaattgatgacttggaaaacagcagtagctaacataccatatggaggagccaaaggtggaattggatgtagccctggagacctgagcatctctgagcttgagaggcttacccgagtttttactcagaaaatccatgacttgattggcatccatactgacgttccagctccagatatgggcaccaactcacagacaatggcatggatacttgacgaatactcaaagttccatggttactcacctgctgttgtgacaggaaagcctgtggacctcggaggatcattgggaagagacgccgctactggaaggggagttctgtttgctactgaagctttgcttgcagagcatggcaaaggcattgcaggccagcgtttcgtcatacagggattcggtaacgttggttcctgggcagctcagctgataagtgaagccggtggcaaggtgattgctatcagtgacgtcacaggcgccgtcaaaaacgtcgatggcctcgacatcgtgcagctagtgaagcactcggcggagaacaaggggatcaagggcttcaaggggggagacgccatcgctccagactcgttgctcactgaagagtgcgacgtcctcatcccagcagcgcttgggggagtcataaacaaggataatgctaacgacataaaggcaaagtacatcatcgaggctgccaatcaccccacagatccagaggcagacgagatcctgtcaaagaaaggcgtcctcatcctccccgacatactggccaactctggtggcgtcacagtgagctacttcgagtgggtacaaaacatccaggggttcatgtgggacgaagagaaggtaaacgcggagctgcggacgtacatgacgcgcgccttcggggacgtgaagcagatgtgccggagccacagctgcgacctccgcatgggcgccttcacgcttggcgtcaaccgcgtcgcgcgcgccaccgtcctcaggggatgggaagcatgacctccctccgtgtcgtccgtgtgcccctccctgttgtatcctcttggtcttgggcccttgtttttctttggttaattattgtcgagatcaacggagatccgagaaaaacgggctcagttaataattccaagaagtgcgtcttcttggagataaaatagcggaaggagagttataataagtctgtaactgtaacccatagctgagatgctgtctgcaagcagcaatgccaatgccaatgccatctggttttcgtgctaaaaaaaaaaaaaaaa

SEQ ID NO: 260 - protein, 411 aa, Zea mays
  misc_feature: Ceres CLONE ID no. 239746
  misc_feature: Ceres CDNA ID no. 25445549
  misc_feature (176)..(408): Pfam Name: ELFV_dehydrog PFAM Desc: Glutamate/Leucine/Phenylalanine/Valine dehydrogenase
  misc_feature (31)..(161): Pfam Name: ELFV_dehydrog_N PFAM Desc: Glu/Leu/Phe/Val dehydrogenase
  misc_feature: Homolog of GI Number: 12643763 NR Desc: Glutamate dehydrogenase
  misc_feature: Homolog of GI Number: 4688955 NR Desc: NADH glutamate dehydrogenase
  misc_feature: Homolog of GI Number: 21314959 NR Desc: NADH
  misc_feature: Homolog of GI Number: 71834851 NR Desc: NADH
  misc_feature: Homolog of GI Number: 8648956 NR Desc: NADH
  misc_feature: Homolog of GI Number: 9758899 NR Desc: glutamate dehydrogenase
  misc_feature: Homolog of GI Number: 4150965 NR Desc: glutamate dehydrogenase
  misc_feature: Homolog of GI Number: 20873461 NR Desc: glutamate dehydrogenase
  misc_feature: Homolog of GI Number: 33242905 NR Desc: glutamate dehydrogenase
  misc_feature: Homolog of GI Number: 1931631 NR Desc: glutamate dehydrogenase
MNALAATSRNFKQAAKLLGLDSKLEKSLLIPFREIKVECTIPKDDGTLASYVGFRVQHDNARGPMKGGIRYHHEVDPDEVNALAQLMTWKTAVANIPYGGAKGGIGCSPGDLSISELERLTRVFTQKIHDLIGIHTDVPAPDMGTNSQTMAWILDEYSKFHGYSPAVVTGKPVDLGGSLGRDAATGRGVLFATEALLAEHGKGIAGQRFVIQGFGNVGSWAAQLISEAGGKVIAISDVTGAVKNVDGLDIVQLVKHSAENKGIKGFKGGDAIAPDSLLTEECDVLIPAALGGVINKDNANDIKAKYIIEAANHPTDPEADEILSKKGVLILPDILANSGGVTVSYFEWVQNIQGFMWDEEKVNAELRTYMTRAFGDVKQMCRSHSCDLRMGAFTLGVNRVARATVLRGWEA

SEQ ID NO: 261 - DNA, 632 bp, Zea mays
  misc_feature: Ceres CLONE ID no. 240425
  misc_feature: Ceres CDNA ID no. 29191850
  CDS (77)..(481): REFERENCED BY SEQ ID NO: 262
ggaaatttcatgcgttccttatcttccgttccgctcggaagtctctctaccaccttctccccgtgccgctttcaagatgttggaataccaaaacgcaattggggggagactgaagctgaagggtaaagcgctggacgtaaaggatggtggggtgaagaaaaagaagaagaagtaccagcgtgaggagtcgtctcagattgcgcacgatgagctccacaaaggggggagatctgaatcaccaattgatcccaacaatgagcggattgaatctgacaagaccggagatgaagggaacccacatcctgactatggccatctcacaccagcagagcgacgctacatggaacagaagcagaagatcgacatgcagaagatggccaaagtcgccaacaagtcccatagagaccgcatccaagacttcaatcagtacctggcaaacctaagcgagcactacgacatccccaaagttggtcctggctaacatagccaaactggctgtgttacgcacaacaattgtgtgctgggtctatccatttatgttagcatgttatgtatcgtttaaaacgatttgttgccaccagaaattgatatttaatttcaaaagcatgttccaacgaaaaaaaaaaaaaaaa

SEQ ID NO: 262 - protein, 134 aa, Zea mays
  misc_feature: Ceres CLONE ID no. 240425
  misc_feature: Ceres CDNA ID no. 29191850
  misc_feature: Homolog of GI Number: 50912351 NR Desc: CGI
  misc_feature: Homolog of GI Number: 20269115 NR Desc: CGI
  misc_feature: Homolog of GI Number: 50761174 NR Desc:  similar to family with sequence similarity 32
  misc_feature: Homolog of GI Number: 51762906 NR Desc: similar to RIKEN cDNA 2510049I19
  misc_feature: Homolog of GI Number: 61873558 NR Desc:  similar to family with sequence similarity 32
  misc_feature: Homolog of GI Number: 61880745 NR Desc:  similar to zinc finger and SCAN domain containing 5
  misc_feature: Useful for making ornamental plants with modified leaves
MLEYQNAIGGRLKLKGKALDVKDGGVKKKKKKYQREESSQIAHDELHKGGRSESPIDPNNERIESDKTGDEGNPHPDYGHLTPAERRYMEQKQKIDMQKMAKVANKSHRDRIQDFNQYLANLSEHYDIPKVGPG

SEQ ID NO: 263 - DNA, 604 bp, Zea mays
  misc_feature: Ceres CLONE ID no. 241186
  misc_feature: Ceres CDNA ID no. 36584124
  CDS (159)..(311): REFERENCED BY SEQ ID NO: 264
atccgatcgcttgaagaccagctaccaccgggagagaagaagcagagagaggtaggaggagagagggggtcgccgatctgatcctctcgctgctgggaatttgggagtgtcggggaggagctgccggagcatcgcggaggcgtccgcgtggtgctctgatgtggaatgtgaacctgggggctctggttgtgctcgtcatgcgtgaagaaaagcgaccgctgccgtggagtcacacctcgccgcggctagaagattacacgcatcaagtctcgacgagcaagccactgtggattctgaggtttaacaagtagaagtagctgagcaggagctcattgaagacgagcaagccactgtggattctgaggtttaacaagtagaagtagctgagcaggagctcattgaaggagaagagcaggtggtcgaagaggagccgcctaacactgaggcattcgacttgatctaggtggcgtttctcagttgacattggcgccatcgatccttagttcgttttacctttattcttttactttgtaataagtcttccgctatgtaataaatactctgatgatttatgacatttatctctaaaaaaaaaaaaaaaaaa

SEQ ID NO: 264 - protein, 50 aa, Zea mays
  misc_feature: Ceres CLONE ID no. 241186
  misc_feature: Ceres CDNA ID no. 36584124
MWNVNLGALVVLVMREEKRPLPWSHTSPRLEDYTHQVSTSKPLWILRFNK

SEQ ID NO: 265 - DNA, 517 bp, Zea mays
  misc_feature: Ceres CLONE ID no. 241786
  misc_feature: Ceres CDNA ID no. 25446669
  CDS (16)..(408): REFERENCED BY SEQ ID NO: 266
acacacacacagaccatggtgatggaggagacgatagacgacagtgagatgagcttgtcgaacatggtgctgggcttcctggaagatttcgagagggacgagcgacggccggagaacgacgacgacaacaacgaggaggagggctccagcggcggcgacaccgccgagagcaaggccttctggcagacccaacacttgcagctgcgcgaggcactggccaagggcagcccagccgagagcaggatccgcgcggacacggaggaggccgtcaagagcatgcgcgccgcggcctgctcctgctcctgcacggggcggcccgccgcccgggactgcccttggccagtgcctcgcgcagctgcaagtgttgcgtccgccgttgatcgtcctgccagcctcctcccgttgtaaagccaaaagagccccagatctctgaccgccctcctacaaacctgtattctttctccattccctgcgacgagtcttgagcgtgcgtgtgtcaacaaaaaaaaaaaaaaaa

SEQ ID NO: 266 - protein, 130 aa, Zea mays
  misc_feature: Ceres CLONE ID no. 241786
  misc_feature: Ceres CDNA ID no. 25446669
  misc_feature: Homolog of GI Number: 34909472 NR Desc: P0481E12.6
MVMEETIDDSEMSLSNMVLGFLEDFERDERRPENDDDNNEEEGSSGGDTAESKAFWQTQHLQLREALAKGSPAESRIRADTEEAVKSMRAAACSCSCTGRPAARDCPWPVPRAAASVASAVDRPASLLPL

SEQ ID NO: 267 - DNA, 1124 bp, Zea mays
  misc_feature: Ceres CLONE ID no. 241855
  misc_feature: Ceres CDNA ID no. 25892697
  CDS (219)..(860): REFERENCED BY SEQ ID NO: 268
gattagccgagtcctttattgcaaaaacacgcatcacctccgtggttccgtcgccatctcgttcccgtgacccacccaccccgtcgcgtctcgacctggcttcctcctcctcgaggaccgccgtgcaggagcggagctccccgccgcttctctctccgccttccgagaggcccgacccctgataccacgctgagggcggtggtattaggagattagcgatggcgaggtggcggccggcggcgctgctggtagtggctctggcggcggttctatcggcggcgtggcgggcggatgcgctatcggttacggtgaccgacaccgagtgcatccacgagttcgtgccctatgagggcgacaccgtgtccgggaacttcgtcgtcgtcgaccacgacatcttctggagctccgaccacccaggaatcgacctcacggtaacgtcaccaggtggcaacactgtgtacacattgaagggaaaatctggtgagaaatttgagtttaaagctccaagaggtggcatgtataagttctgcttccataacccatatggagcacctgaaactgtttctttctacatccatgttgggcacatacccaatgagcacaatctggcgaaagatgagcacttggaccctatcaatgttaaaatcgcggagctgaaggaagcattagaatccgtcaccgccgagcagaagtacctaaaagcacgcgaagctcgtcaccgacacactaatgagagcaccagaaagcgtgtcatgttctatacgatggcggagtacctggctttcatggctgctagcgcgttgcaggtcctctacatccgccgcttgttcagtaaaaatgtgggatacaacagagtgtaggatagaaatctacttcaaaggcgacagtggaagcaccgcatatgatggtcggagcgggaaacattctctgccagtttgacaaattgtagttctgcaccctcctttttttgttagtttataagaaacactttaatttatcatcatgtacttttagcaacacttgtgatatgttaagtgcatttggtgctgaacattgttccataactaatcttcagaggtttgttatgaaagttagtatcgctctgccgaaaaaaaaaaaaaaaa

SEQ ID NO: 268 - protein, 213 aa, Zea mays
  misc_feature: Ceres CLONE ID no. 241855
  misc_feature: Ceres CDNA ID no. 25892697
  misc_feature (59)..(121): Pfam Name: EMP24_GP25L PFAM Desc: emp24/gp25L/p24 family
  misc_feature: Homolog of GI Number: 50918609 NR Desc: putative cop
  misc_feature: Homolog of GI Number: 20147305 NR Desc: AT3g22845/MWI23_22
  misc_feature: Homolog of GI Number: 51965042 NR Desc: PREDICTED P0702E04.27 gene product
  misc_feature: Homolog of GI Number: 21595553 NR Desc: putative coated vesicle membrane protein
  misc_feature: Homolog of GI Number: 6466951 NR Desc: putative coated vesicle membrane protein
  misc_feature: Homolog of GI Number: 13929014 NR Desc: coated vesicle membrane protein
  misc_feature: Homolog of GI Number: 66850147 NR Desc: endosomal cargo receptor
  misc_feature: Homolog of GI Number: 38566614 NR Desc: At1g09580
  misc_feature: Homolog of GI Number: 50913141 NR Desc: emp24/gp25L/p24
  misc_feature: Homolog of GI Number: 54642982 NR Desc: GA17526
MARWRPAALLVVALAAVLSAAWRADALSVTVTDTECIHEFVPYEGDTVSGNFVVVDHDIFWSSDHPGIDLTVTSPGGNTVYTLKGKSGEKFEFKAPRGGMYKFCFHNPYGAPETVSFYIHVGHIPNEHNLAKDEHLDPINVKIAELKEALESVTAEQKYLKAREARHRHTNESTRKRVMFYTMAEYLAFMAASALQVLYIRRLFSKNVGYNRV

SEQ ID NO: 269 - DNA, 771 bp, Zea mays
  misc_feature: Ceres CLONE ID no. 244317
  misc_feature: Ceres CDNA ID no. 25446014
  CDS (129)..(551): REFERENCED BY SEQ ID NO: 270
ggcacttataattccgccttctcccacctgtctcacaccctctagccaaaaccctagcagccgcccggtgctccctctctgcagatctcccttcgcagccgccgaggaaccccttcacagcgcggaagatggctgaacaggaggccccagtcgcggttgaggcaccaaccccagttcttggggagcctatggacttgatgactgctctgcagctcgtgatgaagaagtcaagtgctcatgacggtcttgtgaagggtctccgtgaggctgccaaggccatcgagaagcacgccgctcagctttgcgtgcttgctgaggactgtgaccagccagattacgtcaagttggtgaaggcactctgcgctgagcacaatgttcacctggtcactgttcctgccgctaagactcttggcgagtgggccgggctttgcaagattgactctgagggcaaggcaaggaaggttgtaggctgctcctgcgtcgtcgtcaaggactacggtgaacaatctgagggccttaacatagtgcaggagtatgtcaagtcgcactagatgtgtgacatgtttcagtgatactcttgatttggacctgggcttaaaattatgcttttgcatctggggcttgcctaggagattagaacattttactagaagagccgaagaggatatgtatgaacaatttggacatctgaattttttttgtttatggtgctgtcgtctggttttaatgcaaatcatgaagagccgagtttattcaaaaaaaaaaaaaaaa

SEQ ID NO: 270 - protein, 140 aa, Zea mays
  misc_feature: Ceres CLONE ID no. 244317
  misc_feature: Ceres CDNA ID no. 25446014
  misc_feature (25)..(120): Pfam Name: Ribosomal_L7Ae PFAM Desc: Ribosomal protein L7Ae/L30e/S12e/Gadd45 family
  misc_feature: Homolog of GI Number: 5106775 NR Desc: ribosomal protein S12
  misc_feature: Homolog of GI Number: 50934241 NR Desc: putative ribosomal protein S12
  misc_feature: Homolog of GI Number: 50935291 NR Desc: putative 40S ribosomal protein S12
  misc_feature: Homolog of GI Number: 21536844 NR Desc: 40S ribosomal protein S12
  misc_feature: Homolog of GI Number: 21537373 NR Desc: 40S ribosomal protein S12
  misc_feature: Homolog of GI Number: 50935293 NR Desc: putative 40S ribosomal protein S12
  misc_feature: Homolog of GI Number: 28566194 NR Desc: 40S ribosomal protein
  misc_feature: Homolog of GI Number: 18845074 NR Desc: 40S ribosomal protein S12
  misc_feature: Homolog of GI Number: 24266978 NR Desc: ribosomal protein S12
  misc_feature: Homolog of GI Number: 30025643 NR Desc: 40S ribosomal protein S12
MAEQEAPVAVEAPTPVLGEPMDLMTALQLVMKKSSAHDGLVKGLREAAKAIEKHAAQLCVLAEDCDQPDYVKLVKALCAEHNVHLVTVPAAKTLGEWAGLCKIDSEGKARKVVGCSCVVVKDYGEQSEGLNIVQEYVKSH

SEQ ID NO: 271 - DNA, 515 bp, Zea mays
  misc_feature: Ceres CLONE ID no. 244852
  misc_feature: Ceres CDNA ID no. 25446283
  CDS (2)..(268): REFERENCED BY SEQ ID NO: 272
gccgttgcgctgcgccaagcctccccacctctctcgtctcttctccacccgccgccctcgtgggagtgaaaccctagctagggttctgcccgccgccgccttcgatcaagacgccagcagccttagcgcgagcccgccatggacacaggacgcaagcgcgtcgcgccgggggtggcaaccgtggcggcggctacggcaactccgacgggaactggaggaactgagcggtggggcccgcgcggccaagttatcctgttcgctaccgtgatgtttaccctagtccagagggtttatcttcgttcgtgtcgtgtttgttgttgcccatctgtgtttttgattgcaaggtcgctctgtgtcagttgttagtgctgtgttcatcctcggtttcagcagacccatgcatcaaacagcatggactgcggatcgatggatgctgttacccccgtcaggctttattctaagttaatcttaaggaaaaaatggtgcttcttggtgctgcaaaaaaaaaaaaaaaa

SEQ ID NO: 272 - protein, 75 aa, Zea mays
  misc_feature: Ceres CLONE ID no. 244852
  misc_feature: Ceres CDNA ID no. 25446283
  misc_feature: Homolog of GI Number: 18103931 NR Desc: glycine rich RNA binding protein
MDTGRKRVAPGVATVAAATATPTGTGGTERWGPRGQVILFATVMFTLVQRVYLRSCRVCCCPSVFLIARSLCVSC

SEQ ID NO: 273 - DNA, 1171 bp, Zea mays
  misc_feature: Ceres CLONE ID no. 245112
  misc_feature: Ceres CDNA ID no. 40350896
  CDS (150)..(872): REFERENCED BY SEQ ID NO: 274
aaacactctagctaatagtttagctattagctatttttagtaaattagttaatagttagctagctaatttcactatcaatttttagctaactagcacctctaaagtttggctaccatgacatctcacagcgctgaagtccaagaagctgatggaagacatggctgcgcggggagtgaaatacgtagactgctacggagtcgacaacgcgctggttcgagttgcggatcctacgttcttagggtacttcatcgacaagggtgtgtcttctgccgccaaggtggtgaggaaggcttacccgcaagagaatgtcggggtgtttgttcaacgaggccgcggtggacctctctccgtggttgagtacagcgaaatggacgcagctatgactactgagatcaatcagtcgacagggcgactccgttactgctggagcaacatctgcctgcacatgttcactctggacttcttgaaccaagtggcgaacagcctcgagaaggacagtgtataccatctagctgagaagaagatcccttccatccatgggttcacaacgggcctgaagctggaacagtttatattcgacgccttcacttactccccatccacagagcttttcgaggtcatgcgggaggaggaattcgcgccggtaaagaacgccaacggcgcgacatacgacacccccgatagcgcgaagctcatgctgctccgcctccacagcagatgggtggtcgccgccggtggcttcttgacgcactccgtgcccttgtatatgacaggcgtcgaagtttccccgctttcctcttacgccggagagaacctggaagcgatatgccgcgggcgaacgttccatgcacccagcgagatttcgttttaggatatcgttgtgtaactgtgaactgaacggaaagggttgcaagatgtgcatgtttacttcgaggcgtgagatgggtgtcgggttgatgtgttgcttgtatgttctctgagtgttgtgatgtagcttctccaactccaaattcatctcgagttttctcccccatctccttcgactgctgccattttttaatgacaatgggtcaggttcaaatcaggcttagtgtacccgcggatacattttttacatgtgcaacggtttatcttttaagaagcacaactttttttcaatctaaaaaaaaa

SEQ ID NO: 274 - protein, 240 aa, Zea mays
  misc_feature: Ceres CLONE ID no. 245112
  misc_feature: Ceres CDNA ID no. 40350896
  misc_feature (2)..(200): Pfam Name: UDPGP PFAM Desc: UTP
MEDMAARGVKYVDCYGVDNALVRVADPTFLGYFIDKGVSSAAKVVRKAYPQENVGVFVQRGRGGPLSVVEYSEMDAAMTTEINQSTGRLRYCWSNICLHMFTLDFLNQVANSLEKDSVYHLAEKKIPSIHGFTTGLKLEQFIFDAFTYSPSTELFEVMREEEFAPVKNANGATYDTPDSAKLMLLRLHSRWVVAAGGFLTHSVPLYMTGVEVSPLSSYAGENLEAICRGRTFHAPSEISF

SEQ ID NO: 275 - DNA, 693 bp, Zea mays
  misc_feature: Ceres CLONE ID no. 245186
  misc_feature: Ceres CDNA ID no. 25446284
  CDS (82)..(510): REFERENCED BY SEQ ID NO: 276
caaggagagactgagttatgctgaaagatcaccactactcggcacctaatagtcatcgactggatcctgcagcggcgctacatgtaccgaacaagcatgccgagcgtgcaccgttcgaggatgctggcgtcggaccgcgcggcgccggacgacgacaacatccgcctctgctctatgctactggcatcggtcgtgtcgctgttgctcctctgcggggccctctccgtggtctccagcactagtgccctcgccgtcaccatggtctacgtcattgtcggcccggcggcgatcatgcttgtgctcgtcttcctcggctgtcttgtcgcctccgggatccgggcactggccgtggagctggagccgcagcctcaagcgcccgcagaggcagctcccgcgcacctggcgcgacgcctttgcgcgtgcgggctgtctgacgtggcgggcgtcgctacgatgcctgcgttcccgtttgtcgtcgtcgtcctggacgttgtgatgcaacgtttctagtagtagctatgtatgctgtatgcatgtggtgaagcaagtgctcgtcggtgtgtagtgttcgctcttctgatccattgtctgtgctctgtactgtagtgatcagcgtcaaaataaagaaatgcctgtccttgtttagaattaaatgatcactctgtcttttggtacgcaaaaaaaaaaaaaaaa

SEQ ID NO: 276 - protein, 142 aa, Zea mays
  misc_feature: Ceres CLONE ID no. 245186
  misc_feature: Ceres CDNA ID no. 25446284
MYRTSMPSVHRSRMLASDRAAPDDDNIRLCSMLLASVVSLLLLCGALSVVSSTSALAVTMVYVIVGPAAIMLVLVFLGCLVASGIRALAVELEPQPQAPAEAAPAHLARRLCACGLSDVAGVATMPAFPFVVVVLDVVMQRF

SEQ ID NO: 277 - DNA, 729 bp, Zea mays
  misc_feature: Ceres CLONE ID no. 245341
  misc_feature: Ceres CDNA ID no. 35383157
  CDS (92)..(541): REFERENCED BY SEQ ID NO: 278
acggccatagaaatcgaccgagcgaatccctcgcatcgcattcgcagcctttgctgcatcacaccaccgcgaaaccccagcagccgcatcgatggcgcctaaggcggagaagaagccggctgcgaagaagccagcggaggaggagcccgctgccgcgaaggccccggcggggaagaagcccaaggccgagaagcgcctcccggcggccaagtcgtccggcaaagaaggcggcgacaagaagggtaagaagaaggcgaagaagtcggtggagacctacaagatctacatcttcaaggtgctgaagcaggtccacccggacatcggcatctcttccaaggccatgtccatcatgaactccttcatcaacgacatcttcgagaagctcgccggcgaggctgccaagcttgcgcgctacaacaagaagcccaccatcacctctcgggagattcaaacctctgtccgccttgtccttcccggcgagctcgccaagcacgcggtctccgagggcaccaaggccgtcactaagttcacatcatcttagatttgaggtagtagctattgggtggcgttggtagctgtgtctcaatttgtctgctactaatagtggtaggagtatccatgtgtagttgggttgcggtaagaattgtgttaaactggcaatatgtttgaaattgctttttatggatgtggaatagttgtgttgcttgttctacaaaaaaaaaaaaaaaa

SEQ ID NO: 278 - protein, 149 aa, Zea mays
  misc_feature: Ceres CLONE ID no. 245341
  misc_feature: Ceres CDNA ID no. 35383157
  misc_feature: No seed is being produced by the plant
  misc_feature: The plant flowers significantly late compared to wild-type.
  misc_feature: Useful for biocontainment applications
  misc_feature: Useful for making plants with modulated flowering time
  misc_feature (56)..(128): Pfam Name: Histone PFAM Desc: Core histone H2A/H2B/H3/H4
  misc_feature: Homolog of GI Number: 21801 NR Desc: histone H2B
  misc_feature: Homolog of GI Number: 22325 NR Desc: H2B histone
  misc_feature: Homolog of GI Number: 1708107 NR Desc: Histone H2B
  misc_feature: Homolog of GI Number: 577825 NR Desc: H2B histone
  misc_feature: Homolog of GI Number: 22323 NR Desc: H2B histone
  misc_feature: Homolog of GI Number: 34895838 NR Desc: putative histone H2B
  misc_feature: Homolog of GI Number: 34895832 NR Desc: putative histone H2B
  misc_feature: Homolog of GI Number: 34895896 NR Desc: putative histone H2B
  misc_feature: Homolog of GI Number: 34895900 NR Desc: putative histone H2B
  misc_feature: Homolog of GI Number: 34895888 NR Desc: putative histone H2B
MAPKAEKKPAAKKPAEEEPAAAKAPAGKKPKAEKRLPAAKSSGKEGGDKKGKKKAKKSVETYKIYIFKVLKQVHPDIGISSKAMSIMNSFINDIFEKLAGEAAKLARYNKKPTITSREIQTSVRLVLPGELAKHAVSEGTKAVTKFTSS

SEQ ID NO: 279 - DNA, 498 bp, Zea mays
  misc_feature: Ceres CLONE ID no. 245830
  misc_feature: Ceres CDNA ID no. 25445890
  CDS (78)..(380): REFERENCED BY SEQ ID NO: 280
ctggccgcaccaagaaaaccacaacagtacagcactggaaacagaaaggtggaccaaggagcgcccgtgcggtgacaatgacggacactggcagcacgggcgccaacggcaagagccagggctcaaggggcaaggcgatgctgctcgccttgggcaagggcttccctgaccaagtcctgccccaggagaaggtggcggagagctacctccaagaaagcagctgcgacgatcccgacaccagggccaagctcgagcgcctttgcacgaccaccacagtgaggacaaggtacactgttatgtccaaggagagaaatttgctattatggagatcctcacgtgcggcttcgacgttttggaggcgtaggcgagggattagctgatatggaaaagcagggaataggccacccgctaaaacgaacaagaacactccattacttggtaacctctttgattaaaatcatgaatactcacgttgtctacaaaaaaaaaaaaaaaaaa

SEQ ID NO: 280 - protein, 100 aa, Zea mays
  misc_feature: Ceres CLONE ID no. 245830
  misc_feature: Ceres CDNA ID no. 25445890
  misc_feature (5)..(77): Pfam Name: Chal_sti_synt_N PFAM Desc: Chalcone and stilbene synthases
  misc_feature: Homolog of GI Number: 31432746 NR Desc: anther
  misc_feature: Homolog of GI Number: 1008984 NR Desc: chalcone synthase
  misc_feature: Homolog of GI Number: 15217605 NR Desc: chalcone and stilbene synthase family protein
  misc_feature: Homolog of GI Number: 68359448 NR Desc: chalcone synthase family protein
  misc_feature: Homolog of GI Number: 68359452 NR Desc: chalcone synthase family protein
  misc_feature: Homolog of GI Number: 68359456 NR Desc: chalcone synthase family protein
  misc_feature: Homolog of GI Number: 68359460 NR Desc: chalcone synthase family protein
  misc_feature: Homolog of GI Number: 68359500 NR Desc: chalcone synthase family protein
  misc_feature: Homolog of GI Number: 68359506 NR Desc: chalcone synthase family protein
  misc_feature: Homolog of GI Number: 68359490 NR Desc: chalcone synthase family protein
MTDTGSTGANGKSQGSRGKAMLLALGKGFPDQVLPQEKVAESYLQESSCDDPDTRAKLERLCTTTTVRTRYTVMSKERNLLLWRSSRAASTFWRRRRGIS

SEQ ID NO: 281 - DNA, 583 bp, Zea mays
  misc_feature: Ceres CLONE ID no. 246134
  misc_feature: Ceres CDNA ID no. 40350897
  CDS (19)..(345): REFERENCED BY SEQ ID NO: 282
actacacacaaacacacaatggcaccagaaaggatgctcctcggcgtctgtgccgtgctgatggtggtcggcgtcacgaacgcggcggagggccaggtggcgtcggtcgtcgtgggcctggcgaggtgcgccgacatcacgaggaagaacatgaaggctgaggccggtttcaagggtcttcaggtggcgatcaagtgcaagaacagcaacggcgagtacgagacaaaggccgtgagtgagatccaaagctccggagccttcagcgtcccactcgccgccgacctccacggcgccgactgccacgcgcagctccacagctttggatctctcttttttgttccataaaattgttagatctttcacttcagattgattttgttcgacatgtgcgtgttcttcttactagttacattctttctgtttctgtggaccattggactgtattctgtcgtgcaataattgttgggaggcctgagtttgttagtcgttccattctgaaaactggtatctgttctgtaatggttgtccctatcaataatgaaataattgcgtttgatccttgaataaaaaaaaaaaaaaaaaa

SEQ ID NO: 282 - protein, 108 aa, Zea mays
  misc_feature: Ceres CLONE ID no. 246134
  misc_feature: Ceres CDNA ID no. 40350897
MAPERMLLGVCAVLMVVGVTNAAEGQVASVVVGLARCADITRKNMKAEAGFKGLQVAIKCKNSNGEYETKAVSEIQSSGAFSVPLAADLHGADCHAQLHSFGSLFFVP

SEQ ID NO: 283 - DNA, 975 bp, Zea mays
  misc_feature: Ceres CLONE ID no. 246345
  misc_feature: Ceres CDNA ID no. 40350898
  CDS (247)..(696): REFERENCED BY SEQ ID NO: 284
atccaatcctcggaacgagcgcgcgggcgaggaggacccccgacggaggatggcggcggcggctagggttttacgcgggtccctcttcctgatgtccccggcggcgggcgccaaggcgtcggcagccaagaaggcgggcgcggcggcggcggcggcggcggtggccaagaagaccgaggcggccactacgaagccgaagcccgccttcgccgccgccgcctctgcgatccccgcaaggtcgcaaacatgtctaccgtgctccagcgcccgacccccggcacggtccagtgcttcggccgcaagaagacggctgtggccgtcgcctacaccaagccggggcgcgggcttatcaaggtgaacggcgtcccgattgagctcatcaggccggagatgctccgcctcaaggccttcgagcccatcctgctggcggggcgctccaggttcaaggacatcgacatgaggatccgcgtccgaggcggcgggaagacgtcgcagatctacgccatccgccaggccgtcgccaaggggctcgtcgcctactaccagaagtacgtcgacgaggccgccaagaaggaggtcaaggacatcttcacccggtacgaccgcacccttctcgtcgccgaccccaggcgctgcgagccgaagaagttcggtggtcgtggcgcccgcgccaggttccagaagtcctaccgttgagcgctcggctgcccgcgcttgccggaccgttgcctgtgttgtcccaacctgccagttcgatgcctgtacccgtggcttaattttctatcatcggagctacttatgtggttctataactagatgctgttttaccttcaacttatgctgttgtaccttcatatttggacttcttaagccttgtgtcggacgcctttggcattgtgatatgaaacatgagagattttgaagacaaaaaaaaaaaaaaaaaaaaaaaaaaaaaaaataaaaaaaaaaaaaaaa

SEQ ID NO: 284 - protein, 149 aa, Zea mays; identical to SEQ ID NO: 190
  misc_feature: Ceres CLONE ID no. 246345
  misc_feature: Ceres CDNA ID no. 40350898
  misc_feature (17)..(149): Pfam Name: Ribosomal_S9 PFAM Desc: Ribosomal protein S9/S16

SEQ ID NO: 285 - DNA, 686 bp, Zea mays
  misc_feature: Ceres CLONE ID no. 247255
  misc_feature: Ceres CDNA ID no. 25446285
  CDS (91)..(363): REFERENCED BY SEQ ID NO: 286
agtagcatccaattgattgttctatcctcttctctgttctcacccccttgcaagcaacaatcgttcaccgatcgatccagtgcgtcctgcatggaaactgccgccgtcgccgccgccggtgccgggcgccgcatcatggtggccgtggacgagggcgaggagagcctgcacgcgctcaactggtgcctcgccaacgtcgtctccccggcaggaggcgacacgctggtgctcgtccacgcccgccgcccgcgcccggtctacgccgccatggacagcgcagggtacatgatgacctcggacgtgctggcgagcgtcgacagcagtggctatggtggtggtcagagtacgagttcttgggactgaactgaattctggttagaagtgaaaaatgggtcaacctgttgggtgtgaaaaatgggtcaaccgttatcgattagtccctgttggatggagcgaatgcctgaaatttgttgcttgacttgcgagtacggtgtcaggaggtttcccagtgccttaatcttgcattttgtgttgtactagggattgcttatgttattatctgaattggtggtttcttttctacgcctcatgcttgtgctgtcttcttcacaaagtatcttgtgctaacttctgatcatagatataatttcatctaggtctcatttatatcaaaaaaaaaaaaaaaa

SEQ ID NO: 286 - protein, 90 aa, Zea mays
  misc_feature: Ceres CLONE ID no. 247255
  misc_feature: Ceres CDNA ID no. 25446285
  misc_feature (12)..(61): Pfam Name: Usp PFAM Desc: Universal stress protein family
  misc_feature: Homolog of GI Number: 34905540 NR Desc: B1146F03.27
  misc_feature: Homolog of GI Number: 52077479 NR Desc: putative ER6 protein
METAAVAAAGAGRRIMVAVDEGEESLHALNWCLANVVSPAGGDTLVLVHARRPRPVYAAMDSAGYMMTSDVLASVDSSGYGGGQSTSSWD

SEQ ID NO: 287 - DNA, 646 bp, Zea mays
  misc_feature: Ceres CLONE ID no. 256873
  misc_feature: Ceres CDNA ID no. 0
  CDS (27)..(450): REFERENCED BY SEQ ID NO: 288
gattgggtccaacaccagccgccgccatgtcgaagcgaggcaggggaggttcggcggggaacaagttccgcatgtcgctgggtctgccggttgccgcgacggtgaactgcgcggacaacacgggcgccaagaacctctacatcatctccgtcaagggcatcaagggccgcctcaaccgcctcccgtccgcctgcgttggcgacatggtcatggccaccgtcaagaaggggaagcccgacctcaggaagaaggtgatgcccgccgtcatcgtccgccagcgcaagccgtggcgccgcaaggacggtgtctacatgtacttcgaagataatgctggagtgattgtgaatcccaagggtgagatgaaaggttccgctatcactggacctatcggcaaggagtgtgctgatctttggcctaggattgctagcgcagcaaacgccattgtttgagagcttgttggaatatgttcagacttatatgatcatcttattatcagttgctaagaatgctattgggcttaataggccctttatgtttgttcactcaattttgtagtaaacagaatttggtataccaaggggatctatataacaatgtatgccataaattttctgactaccatttctcacgaaaaaaaaaaaaaaaa

SEQ ID NO: 288 - protein, 140 aa, Zea mays
  misc_feature: Ceres CLONE ID no. 256873
  misc_feature: Ceres CDNA ID no. 0
  misc_feature: The plant is abnormally small.
  misc_feature: Useful for making plants with modulated biomass
  misc_feature (19)..(140): Pfam Name: Ribosomal_L14 PFAM Desc: Ribosomal protein L14p/L23e
MSKRGRGGSAGNKFRMSLGLPVAATVNCADNTGAKNLYIISVKGIKGRLNRLPSACVGDMVMATVKKGKPDLRKKVMPAVIVRQRKPWRRKDGVYMYFEDNAGVIVNPKGEMKGSAITGPIGKECADLWPRIASAANAIV

SEQ ID NO: 289 - DNA, 901 bp, Zea mays
  misc_feature: Ceres CLONE ID no. 257529
  misc_feature: Ceres CDNA ID no. 40350899
  CDS (149)..(616): REFERENCED BY SEQ ID NO: 290
acggggaaggggaactagatggaagcaggcggcggccacggccacgaccggcagcttgtcaccgtaacagcagcggagggcgaggagccgccgatctgacctattcctagttgcgcgcgtgtcccgtgaggcgggagctctggaggccatggagagggagccggcggtcgaggaggaggacgacgacgaggaggaggtggcgtgcgagtgctgcggcttcacggaggagtgcacggcgccgtacatcgcgggcgtgcgcgcgcggttcggcgggcggtggatctgcgggctgtgcggggacgcggtgggcgaggagctggggcgcgcggggaccccgcccatctcccccgccgaggcgctggaccggcacgcccgcgcctgccgcggggcgtccgcgccgccgtcgcccgcgggcagccccgacgggctcatcgctgcgctgcgcctgctgctgcgccgcaggctcgggtccccgccggcgtcgaggaaggcgcggtccacgccgagcagcccgacgcgcgacgccgccgaccccggcgtctccgccctcgccgcgggggcgtcccggagctcgctggcgcgcacggggagctgcttcgccgcgctcgtcgaatgagaaggggaaacgaggacggactgacggaaggggaaaagatcagggtagtctctctctctctctattttgccttcaatgtgtaatgtatttctgctcgtttctatctatggaggagtgcgtaggtagtagtactagaggtgccaataaacatccgtgtatatatatatatgatggggaggaagatcgacgacgatctgtgttatttatgatatagtatacacttgtatgagaaaaaggaagtaattccatgtttttctcaggcacggaccaaaaagaaaaaaaaaa

SEQ ID NO: 290 - protein, 155 aa, Zea mays
  misc_feature: Ceres CLONE ID no. 257529
  misc_feature: Ceres CDNA ID no. 40350899
MEREPAVEEEDDDEEEVACECCGFTEECTAPYIAGVRARFGGRWICGLCGDAVGEELGRAGTPPISPAEALDRHARACRGASAPPSPAGSPDGLIAALRLLLRRRLGSPPASRKARSTPSSPTRDAADPGVSALAAGASRSSLARTGSCFAALVE

SEQ ID NO: 291 - DNA, 613 bp, Zea mays
  misc_feature: Ceres CLONE ID no. 258496
  misc_feature: Ceres CDNA ID no. 35383158
  CDS (120)..(320): REFERENCED BY SEQ ID NO: 292
aacgccgaggagacgagaggaggaggggaggtgcgccaccggaagcggaaacctcgcttagcttagccgccgctgctacgcactctcgccgtccttgttcccgcgtcgctctgctcgcgatggcgtcccgcgttgcagtgctgctcgtggccgtggcggccgtgctgttcgccgcggcgtcggcgcaggagatggacctgggcgtgccgcccgcgccggcgcccgtcacgggcgcggcagcggggaccgcggcatcggccctggccgtggcttgctctgccgtcttctccatcctcgtcgccggtcgcctcgtgcagtaggcgctgccgtcgacgtggttcggggtccggcggagccctttcgatcgttttcgccttagctagtagtagaagtagcagtcatgggctgtgttgattgtttccctgtctcccacctggtgggcgttgtgaccttgtgctattgcttattctttttgtaccatactgcattgttccacgtataccttgtgttgaggcgtgtgttgtatgaataaagatgatggatctcgttcgtcaaaaaaaaaaaaaaaaaaaaaaaaaaaaaaaaaaaaaaaaaaaaaaaaaaaaaaaaaaaa

SEQ ID NO: 292 - protein, 66 aa, Zea mays
  misc_feature: Ceres CLONE ID no. 258496
  misc_feature: Ceres CDNA ID no. 35383158
MASRVAVLLVAVAAVLFAAASAQEMDLGVPPAPAPVTGAAAGTAASALAVACSAVFSILVAGRLVQ

SEQ ID NO: 293 - DNA, 692 bp, Zea mays
  misc_feature: Ceres CLONE ID no. 258626
  misc_feature: Ceres CDNA ID no. 25445716
  CDS (3)..(530): REFERENCED BY SEQ ID NO: 294
aaggccagtctgagtgtgcgttcgattcgcttgtgctgcagctagggtttagaggttttctgggcgcggagcgggaggcggcggcggctatggctgcggcggaggaggagatcgcggtgaaggagccgctggatctgatacgcctcagcctcgacgagcgcatctacgtcaagctccgatccgaccgcgagctgcgcggccgccgccgccgccgctacgccccgcacctcgcttcatttcgtgtcgccaagatgacgaagcgcactaagaaggcaggaattgttggcaaatatggaaccaggtatggtgctagcttgcgtaagcaaatcaagaagatggaggtatctcagcattccaagtacttttgcgagttctgtgggaagtttgctgtgaagaggaaagcagttggaatttgggggtgcaaggactgtgggaaggtgaaggctggtggtgcttacaccatgaacactgctagtgcggtcaccgtcaggagcacgatccgccgcctgagggagcagactgaagcatgatatagctctttatattattggggtttcctgtagttgctcttgtcaggcatgttgtgggggccttatctagtggaaatgtggaatcactgtactggctgttttgccgagacaatgctccttatatttggtttatgctctaggatcacaaaaaaaaaaaaaaaa

SEQ ID NO: 294 - protein, 92 aa, Zea mays
  misc_feature: Ceres CLONE ID no. 258626
  misc_feature: Ceres CDNA ID no. 25445716
  misc_feature: null
  misc_feature: Useful for making plants with modulated cold sensitivity
  misc_feature (2)..(91): Pfam Name: Ribosomal_L37ae PFAM Desc: Ribosomal L37ae protein family
  misc_feature: Homolog of GI Number: 56202147 NR Desc: putative ribosomal protein L37a
  misc_feature: Homolog of GI Number: 34911166 NR Desc: putative 60S ribosomal protein L37a
  misc_feature: Homolog of GI Number: 50932741 NR Desc: putative 60S ribosomal protein L37a
  misc_feature: Homolog of GI Number: 58578274 NR Desc: 60S ribosomal protein L37a
  misc_feature: Homolog of GI Number: 4090257 NR Desc: ribosomal protein L37A
  misc_feature: Homolog of GI Number: 4741896 NR Desc: 60S ribosomal protein L37a
  misc_feature: Homolog of GI Number: 6016699 NR Desc: putative 60S ribosomal protein L37a
  misc_feature: Homolog of GI Number: 395077 NR Desc: ribosomal protein L37a
  misc_feature: Homolog of GI Number: 71042079 NR Desc: Chain D
  misc_feature: Homolog of GI Number: 7576200 NR Desc: protein synthesis initiation factor
  misc_feature: Useful for making plants with altered leaf shape eg curled leaves
  misc_feature: Utility: Cold Germination Useful for making plants with increased tolerance to cold stress
MTKRTKKAGIVGKYGTRYGASLRKQIKKMEVSQHSKYFCEFCGKFAVKRKAVGIWGCKDCGKVKAGGAYTMNTASAVTVRSTIRRLREQTEA

SEQ ID NO: 295 - DNA, 609 bp, Zea mays
  misc_feature: Ceres CLONE ID no. 259296
  misc_feature: Ceres CDNA ID no. 40350902
  CDS (88)..(303): REFERENCED BY SEQ ID NO: 296
aaaattccccgaaccaaatcactcccaccgtctccacagcaaccagcacacatttccctttggcggatcgaaggaaggaaggaggagatgggtggcggcatggaggtgcacaaaaaccggtggatcgaagagtggaacgccggccgggagaacctcgagttcaacttccgctggacccgccgcagcctcgccgtcgtcggcctcttcggcctcgctgtccccatcctcgtctacaagggcatcgtccgcgaattccatatgcaggacgaggatgcaggtcggccatacaggaagttcctgtaagaggcgtccagggctgcaggatacgtcgattcctcgaccggggctgagaggaggggagtttccattcagtttgtgtcggtctcaattctgtgtgcaaccacaaccaaactacagaatttaagaaaggttattccaattcccaattatgtgttccaatatcggcatccaaacgggctattactggtacgcccgttgtagctatttgcggctgcaaaaggcaaaccgagatgtactcagttatggaagcagctacagccacaacaaaaaaatattgcctatctagctgatcgaaaaaaaaaaaaaaaa

SEQ ID NO: 296 - protein, 71 aa, Zea mays
  misc_feature: Ceres CLONE ID no. 259296
  misc_feature: Ceres CDNA ID no. 40350902
MGGGMEVHKNRWIEEWNAGRENLEFNFRWTRRSLAVVGLFGLAVPILVYKGIVREFHMQDEDAGRPYRKFL

SEQ ID NO: 297 - DNA, 1484 bp, Zea mays
  misc_feature: Ceres CLONE ID no. 259716
  misc_feature: Ceres CDNA ID no. 40041157
  CDS (41)..(1183): REFERENCED BY SEQ ID NO: 298
attttttggagagtgtgttccagccttgcaggccgccgagatggtgggaggcagcaagccgctgggggaaagcgtattcgcggtccacgcggtcgccggtgcggcggcgatcagcgcctccgccgtcgccgtgtaccccctcgatacggtcaagacactcctccagctgggagcgacggggcagaagcagaagatggggctccggcaggtggtggaccggctcatggccgcttccggccctgcaggtttttacaatggcattggatggtccatattgggtaaacttcctggattgggagcacgttttgggacctatgaacttttaacagccttctataaagatggaagggaggacaactatgtctattattctgaggctatgaaggctggcatagctgctggtgctgtagaggctgttttctgcacaccatttgaacttttcaaacttcgtaaccaagttagttctgtgattccttcaaaagctatgggccctgcaaatgttgctcaagaatcatttccactgctttccaaactgttgcctggatatgttcctgatataagggtgtggaacaacaccatgagccttttatctgatctttctcccaagcatcctgacatgttgggtgctctgaaacagcacccatggatgcttacgggctctgggaaacccccattaccgtctgatgtgcatctaccttctagagtgatattgcttgaaggatggggtgctctttggagagggctcagatcagggatagctcgagactgtgtatttggtggtatgttcttttctacttggcaattcctacacacagtgatgctcacctggaaggcagttaatatgagccctaaacctagaaatctagaagcagcaggacctgtacccccttttgcctctagtgttgctgcaggctttgcaggagcgatagcagctgctgcttcacatacatttgatactgctaaaagtcgttcagagtgtactgtggtgcctaagtatatcgcaatggagaggaagtttcttaagtggaaagcaccaggaacgtggatagagaggaagacaggaatatcccctgctgataggaatgttttgttccgtggcattggcctacgaaccgcccgtagtggaatcgcatcatttgtgttagtcggctcatactatttagctgtgaatcacctctcgtagttgatcaagagaaatcatatggagatttttttttgcattcagaagttcaaaactaaaattttatgactgtatatgcatgcactgaatggctggaagctgactttgccacagtatccactgattatttgaaaatcctgttcacctaagtgctcagatgaaactgattgtcccacggcatgttttaaggtgccgatgtaaatgttttatggcaaaaaaaaatttgaaggctgccactttcgaaaaaaaaaaaaaaaaaaaaaaaaaaaaaaaaaaaaaaaaaaaaccaaaaaaaaaaaaaaaa

SEQ ID NO: 298 - protein, 380 aa, Zea mays
  misc_feature: Ceres CLONE ID no. 259716
  misc_feature: Ceres CDNA ID no. 40041157
  misc_feature (282)..(310): Pfam Name: Mito_carr PFAM Desc: Mitochondrial carrier protein
  misc_feature: Homolog of GI Number: 50926602 NR Desc: OSJNBa0038O10.20
  misc_feature: Homolog of GI Number: 21553549 NR Desc: putative mitochondrial carrier protein
  misc_feature: Homolog of GI Number: 20465859 NR Desc: putative mitochondrial carrier protein
MVGGSKPLGESVFAVHAVAGAAAISASAVAVYPLDTVKTLLQLGATGQKQKMGLRQVVDRLMAASGPAGFYNGIGWSILGKLPGLGARFGTYELLTAFYKDGREDNYVYYSEAMKAGIAAGAVEAVFCTPFELFKLRNQVSSVIPSKAMGPANVAQESFPLLSKLLPGYVPDIRVWNNTMSLLSDLSPKHPDMLGALKQHPWMLTGSGKPPLPSDVHLPSRVILLEGWGALWRGLRSGIARDCVFGGMFFSTWQFLHTVMLTWKAVNMSPKPRNLEAAGPVPPFASSVAAGFAGAIAAAASHTFDTAKSRSECTVVPKYIAMERKFLKWKAPGTWIERKTGISPADRNVLFRGIGLRTARSGIASFVLVGSYYLAVNHLS

SEQ ID NO: 299 - DNA, 886 bp, Zea mays
  misc_feature: Ceres CLONE ID no. 259723
  misc_feature: Ceres CDNA ID no. 25446048
  CDS (82)..(660): REFERENCED BY SEQ ID NO: 300
aaattaaaccgccggcgcctccgcttcgcgttctcgcctcatctcctcacgctcaggatccggcggcgaaggtaaggcaagatgtacacagcgaggaagaagatccagaaggataagggccttgagccctccgagttcgaggactccgtcgcccaggctttcttcgacctggagaacggtaaccaggagctcaagagcgacctcaaggacctttacatcatcggtgctatccagctggatgttgccgggagcaggaaggctgttgtgatccacgtcccataccgcttgcgcaaggccttcaggaagatccatgtcaggatcgtcagggagctggagaagaaattcagcggcaaggatgtggtaattgttgccacaaggaggatcgtgaggccgcccaagaagggttcagctgttcagcgccctcgcaccaggactctgactgctgtccatgatggcatcctggaggatgttgtcttcccagctgagattgtggggaagcgtgtcaggtaccgtctggatggtgccaagatcatcaagatcttcttggacccaaaggagaggaacaacaccgaatacaagctggacacctacactacggtctaccgcaggctgtgtgggaaagatgtggtctttgagtaccctatggccgaaaatgcataaatatgacgcccggatatccccattttattttgttgaatctggatgtttctttggggtctcaactagactgctccgtatgtacttcaaaaaccatagttttgatgccaaagttgttgcctaggaatttggtactcgggaattggtagcggacgtgaacaatgttaagttttgagcatttaaatttacctttgtcatgataccaaaaaaaaaaaaaaaaaaaaaaaaa

SEQ ID NO: 300 - protein, 192 aa, Zea mays
  misc_feature: Ceres CLONE ID no. 259723
  misc_feature: Ceres CDNA ID no. 25446048
  misc_feature: The plant is abnormally large.
  misc_feature: The plant is abnormally small.
  misc_feature: Useful for making plants with modulated biomass
  misc_feature (4)..(191): Pfam Name: Ribosomal_S7e PFAM Desc: Ribosomal protein S7e
  misc_feature: Homolog of GI Number: 4588906 NR Desc: ribosomal protein S7
  misc_feature: Homolog of GI Number: 57471724 NR Desc: ribosomal protein S7
  misc_feature: Homolog of GI Number: 22671664 NR Desc: ribosomal protein S7
  misc_feature: Homolog of GI Number: 55167942 NR Desc: putative 40S ribosomal protein S7
  misc_feature: Homolog of GI Number: 14787424 NR Desc: Ribosomal protein S7
  misc_feature: Homolog of GI Number: 77999315 NR Desc: ribosomal protein S7
  misc_feature: Homolog of GI Number: 4128206 NR Desc: 40S ribosome protein S7
  misc_feature: Homolog of GI Number: 5532505 NR Desc: 40S ribosomal protein S7 homolog
  misc_feature: Homolog of GI Number: 21555683 NR Desc: 40S ribosomal protein S7 homolog
  misc_feature: Homolog of GI Number: 6957719 NR Desc: putative 40S ribosomal protein
  misc_feature: Useful for decreasing plant size
  misc_feature: Useful for delaying flowering time
  misc_feature: Useful for increasing chlorophyll and photosynthetic capacity
  misc_feature: Useful for making larger plants
  misc_feature: Useful for making ornamental plants with modified flowers
  misc_feature: Useful for making ornamental plants with modified leaves
  misc_feature: Useful for making plants with altered leaf shape eg curled leaves
  misc_feature: Useful for making plants with increased biomass
  misc_feature: Useful for making plants with increased biomass and foliage
  misc_feature: Useful for making plants with increased biomass and foliage
MYTARKKIQKDKGLEPSEFEDSVAQAFFDLENGNQELKSDLKDLYIIGAIQLDVAGSRKAVVIHVPYRLRKAFRKIHVRIVRELEKKFSGKDVVIVATRRIVRPPKKGSAVQRPRTRTLTAVHDGILEDVVFPAEIVGKRVRYRLDGAKIIKIFLDPKERNNTEYKLDTYTTVYRRLCGKDVVFEYPMAENA

SEQ ID NO: 301 - DNA, 666 bp, Zea mays
  misc_feature: Ceres CLONE ID no. 259880
  misc_feature: Ceres CDNA ID no. 36585438
  CDS (74)..(457): REFERENCED BY SEQ ID NO: 302
ttgctcgctgcgccgccgcctccgacatcgtcccttcgtccccacgagcaaccgataatccgccggcgttgagatgttgctcgtgggggcgaagggtggtgcggccggcggcggcggcaagaagaagggctccgtcacgttcacgatcgactgcaccaagcccgtcgaggacaagatcatggagatcgccacgctcgagaagttcctgcaggagcgcatcaaggtcgctggaggcaaggccggccagctcggcgagggcgtcaccgtcacccgcgataagtccaaggtcaccgtcacctccgacgggcctttctctaagaggtacctgaaatacttgaccaagaagtacctgaagaagcacaatgtgcgtgactggctccgagttgtagcggcaagcaaggaccgcagtgtatatgagctacggtacttcaacattgctgagaacgaggaggaataggcggcttagaccttatagacgcaccgccttatctctgtcatgtgaactctggatgtgttgggacactcatactgtagccttttaagggatgagttttgatgtttaaattggtcttctgaatgtttttaagcgtgctgggacttctcatgttatgcttagataattgagtccaagaattgctggttcttgcttcaaaaaaaaaaaaaaaa

SEQ ID NO: 302 - protein, 127 aa, Zea mays
  misc_feature: Ceres CLONE ID no. 259880
  misc_feature: Ceres CDNA ID no. 36585438
  misc_feature (16)..(127): Pfam Name: Ribosomal_L22e PFAM Desc: Ribosomal L22e protein family
  misc_feature: Homolog of GI Number: 42733478 NR Desc: BRI1
  misc_feature: Homolog of GI Number: 50939919 NR Desc: putative 60S ribosomal protein L22
  misc_feature: Homolog of GI Number: 6714454 NR Desc: putative 60S ribosomal protein  L22
  misc_feature: Homolog of GI Number: 12642842 NR Desc: putative 60S ribosomal protein L22
  misc_feature: Homolog of GI Number: 6056419 NR Desc: 60S ribosomal protein  L22
  misc_feature: Homolog of GI Number: 45383834 NR Desc: ribosomal protein L22
  misc_feature: Homolog of GI Number: 13592059 NR Desc: ribosomal protein L22
  misc_feature: Homolog of GI Number: 73956651 NR Desc:  similar to 60S ribosomal protein L22
  misc_feature: Homolog of GI Number: 33150766 NR Desc: heparin
  misc_feature: Homolog of GI Number: 6677775 NR Desc: ribosomal protein L22
MLLVGAKGGAAGGGGKKKGSVTFTIDCTKPVEDKIMEIATLEKFLQERIKVAGGKAGQLGEGVTVTRDKSKVTVTSDGPFSKRYLKYLTKKYLKKHNVRDWLRVVAASKDRSVYELRYFNIAENEEE

SEQ ID NO: 303 - DNA, 822 bp, Zea mays
  misc_feature: Ceres CLONE ID no. 261304
  misc_feature: Ceres CDNA ID no. 40350903
  CDS (106)..(591): REFERENCED BY SEQ ID NO: 304
aagcgatcgcagagagttgcgcccggaccccggaccgcgccgacccggctcgcaaactcctccacaaccctcgtcgccgccggctgctccacccccgccaccgccatgggtaaattccgcaagcttggccgcaattactcccaacgcctctgcatgctcaggacgatggtgtcgcagctggtgaagcacgagcgcatcgagaccaccgttgccaaggcgaaggaggttcggcggaaggcggatcagatggtgcagctagggaaggagggtactcagcatgcagcaagacgtgctgctgcctttgttcggggtgatgatgtcgttcataagctatttactgagctggccttccgctacagagatcgagctgggggctacacaagaatgttaagaaccaggatacgtgttggtgatgctgctccaatggcatacatcgagttcgtggacagggagaatgagcttcgagaggccaaacctgcaacgccgccgccgcctcaacgagcccctcttgatccatgggccaagtcacgtgctagccaacagtgggcaggacctaaaatcaccaagacctcggaatcagacggcttatgagctagtatacctatgttccatagaaagtttcagttattttgcttaagagattttttttatctagagataactgccgatagaataattcaaactttattgtcattttgtatgcttctaattcaccaagtgaagattgcaaggctgtccacccaggaggaagtttggaacgagagagatgtatctctgctttgcttattggagttgtaacagatctaactacaaaaaaaaaaa

SEQ ID NO: 304 - protein, 161 aa, Zea mays
  misc_feature: Ceres CLONE ID no. 261304
  misc_feature: Ceres CDNA ID no. 40350903
  misc_feature (17)..(113): Pfam Name: Ribosomal_L17 PFAM Desc: Ribosomal protein L17
MGKFRKLGRNYSQRLCMLRTMVSQLVKHERIETTVAKAKEVRRKADQMVQLGKEGTQHAARRAAAFVRGDDVVHKLFTELAFRYRDRAGGYTRMLRTRIRVGDAAPMAYIEFVDRENELREAKPATPPPPQRAPLDPWAKSRASQQWAGPKITKTSESDGL

SEQ ID NO: 305 - DNA, 1080 bp, Zea mays
  misc_feature: Ceres CLONE ID no. 261439
  misc_feature: Ceres CDNA ID no. 35383159
  CDS (306)..(863): REFERENCED BY SEQ ID NO: 306
accttcttgcagccgccgccatggtgtttgctccggccaagccccggcggccactaccgatggcgcggcatgcggctagacacgggatccggccatggagcggcctgggcacgacgactccggccccagcacccctggtcggcggcgtggaggcccaggcgtgaggccccgcgtcagagcgggcaggcagccccttgacggcgtttcgcttgcccggcgcgggcccacgacgccctcggctgttcggtgcacgagcaccggcacgcggcccccggcccccggctcggcggcacggctgtccgaccatggtgccccgtcgaggttggcagcgcgagcgcgctgcccctatgcgcgcgcgggcgaggcccagcagccccgggcggtgggcgtgcaggagcggctcgggcgctcaggccttggtgtgtgcagctgctgctagggcgcgacgcgcgtcctccagcacgtcgacccgggcgcaaccgttccgatcccgcgggcgcaggcgcacatctgcgggtcgcagcggcaggctgcgctcccgccggccgacatcgcctcggcgtccatccgcgcgaagctgcgttccatcgcggcggtccaggtcgccgcagagccgaagccgtcggcggcagcgagctcctcggcgagcaggtcgtgcatccggagaccgtcgctggtgcggaccagcggccggcgcgggcgcgtggcatagcgagcgcctctggccccatgtgtgggcgtggccctggcagccccagcgcgggccccggtggccacagcgagcgtgcacggcgtctcttccagttctcggcgacatgatgcatcagaggcaattttctagccttaataatgatgatggatgactgatgtacctcgtgtcgcatcaacaatggcgaaccgcactggttattgtccctgttttccttcttgcgagttacagattcttcttctttctcagaaaacttctctctgttcttgctagcagtgctgataacgtgttgaagaatactcagcggtaacgagattgagagagaaacaaatgacagaactgttgtgtttattgccaaaaaaaaaaaaaaa

SEQ ID NO: 306 - protein, 185 aa, Zea mays
  misc_feature: Ceres CLONE ID no. 261439
  misc_feature: Ceres CDNA ID no. 35383159
  misc_feature: Homolog of GI Number: 66777231 NR Desc: Ferric
  misc_feature: Homolog of GI Number: 5821145 NR Desc: RNA binding protein
  misc_feature: Homolog of GI Number: 47124032 NR Desc: SRRM2 protein
  misc_feature: Homolog of GI Number: 5821143 NR Desc: RNA binding protein
  misc_feature: Homolog of GI Number: 6649242 NR Desc: splicing coactivator subunit SRm300
  misc_feature: Homolog of GI Number: 19923466 NR Desc: splicing coactivator subunit SRm300
  misc_feature: Homolog of GI Number: 71891780 NR Desc: KIAA0324 protein
  misc_feature: Homolog of GI Number: 67987629 NR Desc: Thymidylate kinase
  misc_feature: Homolog of GI Number: 66776813 NR Desc: Phosphoribosylaminoimidazole
  misc_feature: Homolog of GI Number: 66777128 NR Desc: Peptidase M
MVPRRGWQRERAAPMRARARPSSPGRWACRSGSGAQALVCAAAARARRASSSTSTRAQPFRSRGRRRTSAGRSGRLRSRRPTSPRRPSARSCVPSRRSRSPQSRSRRRQRAPRRAGRASGDRRWCGPAAGAGAWHSERLWPHVWAWPWQPQRGPRWPQRACTASLPVLGDMMHQRQFSSLNNDDG

SEQ ID NO: 307 - DNA, 696 bp, Zea mays
  misc_feature: Ceres CLONE ID no. 262421
  misc_feature: Ceres CDNA ID no. 25446286
  CDS (77)..(589): REFERENCED BY SEQ ID NO: 308
accaccaggctcacagccttacctgatccttgacaattctgctccctcgccgccgccgaagaagggagaggagcagatgaaagcggggaggaagaacctgcggcgggcgtgcgacgagggcgccgccgtcacgctcgccgagggagagagcatcatgcaggtcctcacgctgcgcggctccaacgtcatcgaggtgatggacggcgtgggcgtcaggtccctggccttgttccccgccaagttccagaagagcttctggatcaagaacgggagtttcgtggtcgtggatgccagcgggagggaccaggcgctggaatcggggagcaagatcgcgtgcgttgtttcgcgagtcctcttccacgaacaagttcgggccctgcagaagtctggtaactggccggccattttcaactcagctccgactccgaatgaagcttcagaggcgggagcagaagcacaggctgcccaggttgacgaggaaccagattccgatgaagaagacgacgatcttccaccacttgaggcgaacacgaacaggaataggccgtatgaattgtattctgattcagacagtggttctgacgcttgaaaagtaccaaggccatccatcctgtgcgttttgtctccaaggtattcgtgatgtgtgaatggaatggctggacctggatggctggatacaaaaaaaaaaaaaaaaaa

SEQ ID NO: 308 - protein, 170 aa, Zea mays
  misc_feature: Ceres CLONE ID no. 262421
  misc_feature: Ceres CDNA ID no. 25446286
  misc_feature: Homolog of GI Number: 22137613 NR Desc: 2010003J03Rik protein
  misc_feature: Homolog of GI Number: 62859797 NR Desc: LOC549450
MKAGRKNLRRACDEGAAVTLAEGESIMQVLTLRGSNVIEVMDGVGVRSLALFPAKFQKSFWIKNGSFVVVDASGRDQALESGSKIACVVSRVLFHEQVRALQKSGNWPAIFNSAPTPNEASEAGAEAQAAQVDEEPDSDEEDDDLPPLEANTNRNRPYELYSDSDSGSDA

SEQ ID NO: 309 - DNA, 706 bp, Zea mays
  misc_feature: Ceres CLONE ID no. 262625
  misc_feature: Ceres CDNA ID no. 25445891
  CDS (2)..(373): REFERENCED BY SEQ ID NO: 310
aatcacttcgccccatccagaaagacgacggccaatcgaaagcccgaaaaggaggaagaaccgaagtaccgaagaagaggacgcggcaccatggcgacggcacatgcagcgtcggcgtccccaacccaccaccgcgcgtctccagggatgtcgccgccgcagccgccgtaccccagcgccgccaggatcgccgactccgcctgcttcccccagtacaccgcctcgctcaagtgtatggaggccaaccaagacaagaccaagtgccagcagcagttcgacgattacaaggaatgcaagaagaaagagagggaggctcggctggaacggaataaaaccagatcactctttgggtgaacaatggcgtcccacctgagcaatatgctggcggtgcaataagtctcctgctgatgtgagcgaaatcacggctttttctttggtttcatgatgatcctctgcaacttgtgcaaggtagggaatagaaataccgatctcgagattgagagagatgtaagggcgtctgggaacagctcattaacacaatggctacggtgaatgaatcgaatgagcgaggatgtattttgagaacaaccaggcgtcatgaaacgacagtttgttcaataaaattgtattccaccccaaaaaaaaaaaaaaaaaaaaaaaaaaaaaaaaaaaaaaaaaaaaaaaaaaaagaaaaaaaaaaaaaaaa

SEQ ID NO: 310 - protein, 68 aa, Zea mays
  misc_feature: Ceres CLONE ID no. 262625
  misc_feature: Ceres CDNA ID no. 25445891
  misc_feature (12)..(52): Pfam Name: CHCH PFAM Desc: CHCH domain
MSPPQPPYPSAARIADSACFPQYTASLKCMEANQDKTKCQQQFDDYKECKKKEREARLERNKTRSLFG

SEQ ID NO: 311 - DNA, 1272 bp, Zea mays
  misc_feature: Ceres CLONE ID no. 264409
  misc_feature: Ceres CDNA ID no. 25087783
  CDS (241)..(1155): REFERENCED BY SEQ ID NO: 312
attctaacgtgctggctctgctcccctcgcatgctcctgctcattcccagccgcgccgcggttcttgcatgctttcctcggcgccaggccccgccgaggtcggaaaggagactcggccgtggatttaagtatttaaccccaccgcaagaccggacttgctggaaaggcagatcttgatccgttcctgttcctgttcctgctgctagctgctggttgctggggccgtgtacgtacgcgttgatgaaggtgaccgtggaagggagcggcgccggcccggccgcggtcaagaggaggcggagtggcgcgcctggcaggcgccagagcggcggcgtgagcgtgcggcggcgcgtgcgggtggacgcggcgaccgcgccagagccggcgccgctccagcgtctgcttgccgcgtgccgccgcgcgttcggaggccccgggaccgtgccggcgcaccacgacgtcgtcctcatcagagacatcctcgacaagatgggaccagaggatgtgcacctgagagccgtcaccaaggccgccgccgcttccggcggccctcgaacgcaccctgttcctatcatcacacgaaccaccatttataaatgcaagaacttctcggtcgtggtgttcctgctgcccccaggcgcgaccatccctctgcacaaccacccggggatgacggtgttcagcaagcttctcctcggctcgctccgcgtcacgtcctacgactgggccgaggccgaccaacgtcccgtcgccgtcggcggcgatcgcccactgctgaggctggcgaagctggtgctggacgccgacctgagcgcgccgtgcgacgccctggtgctgttcccggagtccggcggcaacatgcacaggttcgccgccgccacggcgtgcgcggtcctcgacgtcctcggcccgccctactccggcgaccgggactgcacctactaccaggacttgccataccgccgtcatatcgacgatacagatgaggccgccggggatgaggagcagaagccgcgtctggggtggctgctggagacgcgcaagcccaaggaactgcacatgtacgaggtgccgtacaggggccctccgatcctgtggaagagacggcctgcatttgactcttggcggcggcagcagcagcagcataagggacagtgagacatatagcgagtgtatgcagcatgtgcctccgtatgtacgctagctgttggtgggaggacgacgtgtgcaaattgttgagaactacgttaccctggatcaaaaaaaaaaaaaaaa

SEQ ID NO: 312 - protein, 304 aa, Zea mays
  misc_feature: Ceres CLONE ID no. 264409
  misc_feature: Ceres CDNA ID no. 25087783
  misc_feature: Homolog of GI Number: 25402861 NR Desc: protein F15H18.4
  misc_feature: Homolog of GI Number: 34912166 NR Desc: P0712E02.27
  misc_feature: Homolog of GI Number: 62665923 NR Desc:  similar to Gene model 237
  misc_feature: Homolog of GI Number: 28828711 NR Desc: similar to Oryza sativa
  misc_feature: Homolog of GI Number: 31199985 NR Desc: ENSANGP00000013232
  misc_feature: Homolog of GI Number: 53767310 NR Desc: COG1309: Transcriptional regulator
  misc_feature: Homolog of GI Number: 29247944 NR Desc: GLP_26_54603_52153
  misc_feature: Useful for making plants with altered leaf shape eg curled leaves
MKVTVEGSGAGPAAVKRRRSGAPGRRQSGGVSVRRRVRVDAATAPEPAPLQRLLAACRRAFGGPGTVPAHHDVVLIRDILDKMGPEDVHLRAVTKAAAASGGPRTHPVPIITRTTIYKCKNFSVVVFLLPPGATIPLHNHPGMTVFSKLLLGSLRVTSYDWAEADQRPVAVGGDRPLLRLAKLVLDADLSAPCDALVLFPESGGNMHRFAAATACAVLDVLGPPYSGDRDCTYYQDLPYRRHIDDTDEAAGDEEQKPRLGWLLETRKPKELHMYEVPYRGPPILWKRRPAFDSWRRQQQQHKGQ

SEQ ID NO: 313 - DNA, 748 bp, Zea mays
  misc_feature: Ceres CLONE ID no. 265013
  misc_feature: Ceres CDNA ID no. 40041158
  CDS (101)..(508): REFERENCED BY SEQ ID NO: 314
atcacacactaatcaacaagcaggaccagctagctagctcctcccactgctatcacccgggccccggccagccatctcgctgaaagagaaaagcgcagccatgaagactactagctcgggcattgcagtcgtcctcctggtggcgatgctggcagtccagtccgcggtggccgacatctcgtgctccgacgtgctcaacgacctgtcgccgtgcctgcccttcctgcagggcaaggcagccaaacccagcgagagcaacaaccagtgctgcgacggcgtgaggaccttgtacgcggcggcggacaccaggcccgacaggcaggccacgtgctctccgcggcgcaggagctgcccgacgactgcggcctctcgctgtcctacaacatcacccccgacatcgactgcgacaagatcgaatgaagggatactgttcccttaccagaatccatacgacgggatggtgatgttcagtgccctgctagcagtaggctgcatctgcactgagtgactagaataaaggatttggtgatgtttgtgctgattggtgtgttcgcctgtaatcgtgtgatgccgtcgttggcttcttatatccgtgtctaatctcgcaagtgctcgtgtttgcaactataccatttataatgtcaacttatcatgcttgtcattcgattcaaaaaaaaaaaaaaaaaaaaaaaaaaaaaaaaaaaaaaaaaaaaaaaaaaaaaaaaaaaagaaaaacaaaaaaaaaaaa

SEQ ID NO: 314 - protein, 135 aa, Zea mays
  misc_feature: Ceres CLONE ID no. 265013
  misc_feature: Ceres CDNA ID no. 40041158
  misc_feature (28)..(77): Pfam Name: Tryp_alpha_amyl PFAM Desc: Protease inhibitor/seed storage/LTP family
  misc_feature: Homolog of GI Number: 25990344 NR Desc: lipid transfer protein
  misc_feature: Homolog of GI Number: 56713105 NR Desc: type 1 non
  misc_feature: Homolog of GI Number: 56713111 NR Desc: type 1 non
  misc_feature: Homolog of GI Number: 7012722 NR Desc: lipid transfer protein precursor
  misc_feature: Homolog of GI Number: 77553485 NR Desc: nonspecific lipid
  misc_feature: Homolog of GI Number: 16555403 NR Desc: nonspecific lipid transfer protein
  misc_feature: Homolog of GI Number: 3172343 NR Desc: lipid transfer protein
MKTTSSGIAVVLLVAMLAVQSAVADISCSDVLNDLSPCLPFLQGKAAKPSESNNQCCDGVRTLYAAADTRPDRQATCSPRRRSCPTTAASRCPTTSPPTSTATRSNEGILFPYQNPYDGMVMFSALLAVGCICTE

SEQ ID NO: 315 - DNA, 1228 bp, Zea mays
  misc_feature: Ceres CLONE ID no. 272288
  misc_feature: Ceres CDNA ID no. 25446049
  CDS (240)..(980): REFERENCED BY SEQ ID NO: 316
agagattagagaggcagcaaagaaagataacagaagagacagacggaaagaacaccggaggcggagagccacaggaggaggagctcgagggacgacgaccagctgaattaggactggagggggcagacgacgtcgtcgtagcggcagcagcaggagaagggaagactcaaacgagggatctccgagagaggagtgtggtaggcaggaagaaagaataaggcgagccgagagccattcgcatggaggcggcgatggatctgatgcggcggatgccgccacggagcgcggagacggcgctcaacgcgctgctctccctcctccccgaccactccctcgacctcctctcccaggtttgcatggataaggagagcctgaaggaatacattctatgcgaatataaccgtgatgctgactcctaccgatctccttggtcaaacaaatatgacccccctttggaagatgggacagttccttctcaagggatgaggaatcttgaggttgaggcaaacgaagttttctcagtgtatcgtgaccagtactatgaaggtggcatctcatctgtttacatttgggaggatgaagataatgggtttatcgcatgcttcttaattaagaaagatggacaaggaaaaagagggtacatgcagattggttcatgggatgctattcatgttgttcaggttggtcctgaagaagaaggagcggcacattactgcttgaacagcactgtgatgctctcattgacaacaaacaacaagcagtctggaactttcaacctgtctggatccattagacggcagatgagtatgactcttgctgtagctgatggacaccttgttaatatggggaaaatgatagaagaaatggaggggaagctgagaaattcactggaccaagtttattttgggaagaccagagaaatggtttgcactcttcggccaccaccagaagttcttaatatgagactacctgacagctgagccagtgcatagaagtgtcaacttaacaaagaaaaacgtattcttctccactctaggcgtggtctgttcttgcttcgtagttaatagtctgtgcatctgtatcgacatctgttgagtggaattcagttaccaacagatgaatctccacaaaacgttgtgttggcgttctgtatcttctgaagaatctgatggtgttgtggctggccttgctatctgtcaaagtactaaaaacaaaaaaaaaaaaaaaa

SEQ ID NO: 316 - protein, 246 aa, Zea mays
  misc_feature: Ceres CLONE ID no. 272288
  misc_feature: Ceres CDNA ID no. 25446049
  misc_feature (1)..(233): Pfam Name: F_actin_cap_B PFAM Desc: F
  misc_feature: Homolog of GI Number: 50920805 NR Desc: putative capping protein beta subunit
  misc_feature: Homolog of GI Number: 7239506 NR Desc: Similar to the F
  misc_feature: Homolog of GI Number: 54644876 NR Desc: GA14356
  misc_feature: Homolog of GI Number: 17136938 NR Desc: CG17158
  misc_feature: Homolog of GI Number: 66531704 NR Desc:  similar to ENSANGP00000019124
  misc_feature: Homolog of GI Number: 27370869 NR Desc: Capzb
  misc_feature: Homolog of GI Number: 45382141 NR Desc: actin
  misc_feature: Homolog of GI Number: 1079456 NR Desc: actin
  misc_feature: Homolog of GI Number: 1345668 NR Desc: F
  misc_feature: Homolog of GI Number: 56417842 NR Desc: capping protein
MEAAMDLMRRMPPRSAETALNALLSLLPDHSLDLLSQVCMDKESLKEYILCEYNRDADSYRSPWSNKYDPPLEDGTVPSQGMRNLEVEANEVFSVYRDQYYEGGISSVYIWEDEDNGFIACFLIKKDGQGKRGYMQIGSWDAIHVVQVGPEEEGAAHYCLNSTVMLSLTTNNKQSGTFNLSGSIRRQMSMTLAVADGHLVNMGKMIEEMEGKLRNSLDQVYFGKTREMVCTLRPPPEVLNMRLPDS

SEQ ID NO: 317 - DNA, 563 bp, Zea mays
  misc_feature: Ceres CLONE ID no. 273225
  misc_feature: Ceres CDNA ID no. 25445835
  CDS (77)..(388): REFERENCED BY SEQ ID NO: 318
atccaacccacacacaggctgaccccaccaacagcaagcgaaaatctcccgatcccctctagtctccgcggcgaagatgtcggggcgcggcaagggcgggaagggcctgggcaagggcggagcgaagcgccaccggaaggtgctccgcgacaacatccaggggatcacgaagccggcgatccggcggctggcgcgcaggggcggcgtgaagcgcatctccgggctcatctacgaggagacccgcggcgtcctcaagatcttcctggagaacgtgatccgcgacgccgtcacctacaccgagcacgcgcgccgcaagaccgtcacagccatggacgtcgtctacgcactcaagcgccagggccgcaccctctacggcttcggcggctaggctaggccggtcgcgcctcgttgtcgtcgctgcggttctattgtttttgcaattcgcaagttgtggctgggtggcgaaaatgctggttactgtaccactagatcaagcatgttgtgcgtgtctgaagaaatgccaattgtgacttgctgtttgttcgaaaaaaaaaaaaaaaaaa

SEQ ID NO: 318 - protein, 103 aa, Zea mays; identical to SEQ ID NO: 8
  misc_feature: Ceres CLONE ID no. 273225
  misc_feature: Ceres CDNA ID no. 25445835
  misc_feature (66)..(92): Pfam Name: TAF PFAM Desc: TATA box binding protein associated factor
  misc_feature: Homolog of GI Number: 57106967 NR Desc:  similar to germinal histone H4 gene
  misc_feature: Homolog of GI Number: 57110415 NR Desc:  similar to germinal histone H4 gene
  misc_feature: Homolog of GI Number: 50728590 NR Desc:  similar to germinal histone H4 gene
  misc_feature: Homolog of GI Number: 34876368 NR Desc: similar to germinal histone H4 gene
  misc_feature: Homolog of GI Number: 62648434 NR Desc:  similar to germinal histone H4 gene
  misc_feature: Homolog of GI Number: 76651053 NR Desc:  similar to germinal histone H4 gene
  misc_feature: Homolog of GI Number: 62663604 NR Desc:  similar to Histone H2B 291B
  misc_feature: Homolog of GI Number: 74004178 NR Desc:  similar to germinal histone H4 gene
  misc_feature: Homolog of GI Number: 76657391 NR Desc:  similar to germinal histone H4 gene
  misc_feature: Homolog of GI Number: 74004256 NR Desc:  similar to germinal histone H4 gene

SEQ ID NO: 319 - DNA, 960 bp, Zea mays
  misc_feature: Ceres CLONE ID no. 273416
  misc_feature: Ceres CDNA ID no. 35385338
  CDS (220)..(633): REFERENCED BY SEQ ID NO: 320
gttcggtaaagtactttgctcccctttagtatttcctttcccctccttcctagttctattcgcgttctggaggcctagatctgatatttacccaaagtcgtcgtcgtcgctcatcgctttccttttgccagccagccaccgctgctatcatggaagtgtttcatgtgctgacgatgcccagagtgccctagtcttgtcaaaatctatgatcgcggtgcgatgcgtgctagaaatgtttgtgtggcttctgtggacttgttcagccaaaacagcgcagttgctactgctgcgagagaggatgggatacaatgtgtgacgctcctcacctacctcgccgccgcacagatctacaggacgaataggtctcggcactatcgtgttatggtcctcgataatgctcaccattccacacccgcaggggtctcctgttctgctgctgatggcgtgcgtgacctagatctggcgaaggcgtccgtggatacagacatttcatggaggaccactgagggtgaactgtgggccaccgccacctatggctctgctgtggaggtcaacaatgacatatcaaaccttgatggcatcgaagatatggaagcaatggtggtagatcagttgaagatggacaacttgtgaagtcttctacataagttgtttcccatattttgttgagctcaagtaaattccttcacaatgttgaccttcaacccgcctccaagaaaagctctgtctcctccttaagattgttgtcatcatcaatcatgctaaagttacatctcacaacaatggacctcttttttatttgttatgcttgttgtctagttggtctgatcatattgctattgtagtagttgtgctcaactggagcttgtggctgttgaacctattctatttgcttttggatttacgttataggatatttaaacatatttgatgtttagtactaaaaaaaaaaaaaaaaaa

SEQ ID NO: 320 - protein, 137 aa, Zea mays
  misc_feature: Ceres CLONE ID no. 273416
  misc_feature: Ceres CDNA ID no. 35385338
MRARNVCVASVDLFSQNSAVATAAREDGIQCVTLLTYLAAAQIYRTNRSRHYRVMVLDNAHHSTPAGVSCSAADGVRDLDLAKASVDTDISWRTTEGELWATATYGSAVEVNNDISNLDGIEDMEAMVVDQLKMDNL

SEQ ID NO: 321 - DNA, 593 bp, Zea mays
  misc_feature: Ceres CLONE ID no. 273944
  misc_feature: Ceres CDNA ID no. 29191340
  CDS (71)..(382): REFERENCED BY SEQ ID NO: 322
atcagtacccaatctcccctacaccagaaaaattcccagttctttggtccgcgtcagagaggcggcggcgatgtctgggcgcggcaagggcggcaagggtctgggcaagggcggcgcgaagcgccaccggaaggtgctccgcgacaacatccagggcatcaccaagccggcgatccggaggctggctaggaggggtggcgtgaagcgcatctcggggctcatctacgaggagacccgcggcgtgctcaagatctttctcgagaacgtcatccgcgacgccgtcacctacaccgagcacgcgcgccgcaagaccgtgaccgccatggacctcgtctacgcgctcaagcgccagggacgcaccctctacggcttcggaggctaggctaggcgcctcttcatagtcggggactggttaggggacatgtctctgtgtgatgctttctgtggtattattgctgcaatagccgtgtaatccatcgcttctgcaatgaagcgctcggaagcatgctacgtatgttgtgtctgtgggtgattgtatttctggtagtaacagtgattgttcctgaattttggacaaaaaaaaaaaaaaaaaa

SEQ ID NO: 322 - protein, 103 aa, Zea mays
  misc_feature: Ceres CLONE ID no. 273944
  misc_feature: Ceres CDNA ID no. 29191340
  misc_feature (25)..(96): Pfam Name: Histone PFAM Desc: Core histone H2A/H2B/H3/H4
  misc_feature: Homolog of GI Number: 57106967 NR Desc:  similar to germinal histone H4 gene
  misc_feature: Homolog of GI Number: 76651053 NR Desc:  similar to germinal histone H4 gene
  misc_feature: Homolog of GI Number: 62663604 NR Desc:  similar to Histone H2B 291B
  misc_feature: Homolog of GI Number: 74004178 NR Desc:  similar to germinal histone H4 gene
  misc_feature: Homolog of GI Number: 57110415 NR Desc:  similar to germinal histone H4 gene
  misc_feature: Homolog of GI Number: 55667113 NR Desc:  similar to germinal histone H4 gene
  misc_feature: Homolog of GI Number: 74004256 NR Desc:  similar to germinal histone H4 gene
  misc_feature: Homolog of GI Number: 55626084 NR Desc:  similar to Histone H2A.1
  misc_feature: Homolog of GI Number: 57098917 NR Desc:  similar to germinal histone H4 gene
  misc_feature: Homolog of GI Number: 56798269 NR Desc: histone H4
MSGRGKGGKGLGKGGAKRHRKVLRDNIQGITKPAIRRLARRGGVKRISGLIYEETRGVLKIFLENVIRDAVTYTEHARRKTVTAMDLVYALKRQGRTLYGFGG

SEQ ID NO: 323 - DNA, 743 bp, Zea mays
  misc_feature: Ceres CLONE ID no. 274187
  misc_feature: Ceres CDNA ID no. 29191341
  CDS (123)..(443): REFERENCED BY SEQ ID NO: 324
attttttcgactttcgagcgcagaaacgagagggccggagcagccgcagtcccggcgatcccgccgccggtcgccctcatacttcctcgtcactgccttcgtttctctttccaacaatcaagatgagccgtggcggtagcgcgggtggtggtcaaagttctctgggttacctctttggaagcggtgagccccccaaaccagcagtggcaccagctgtaagtgctccacctgctgctgcaggtgctccacctgctgagaaaccacctgctgcaaagcctgatggcaccagtcagattgctgctggggttaccagccaaaccaataactaccacagggccgacggtcagaacaccggaaacttccttacggaccgtccttcgaccaaggtccacgctgctcctggcggtggctcttccctgggatacctgtttggtggcaactgatgccgctcaccaagctatcaccccccactgtcgccgcatgctttttctgaatcgtgaacagccgttgtcatttcatgtgtacccaaacctcccgtcccgcgtgggcccgtaagctgcgcctagatttcagggctaatcgtgtgcctgaaccctcatcataagtcgtctctgtacccagcttctcgtttcgtttgcacccgtgatggtatggtttggttgttgcccgctggacctatctattctttgcatttttcctttgaaatgtatccttgcccatttcgatgaaaaaaaaaaaaaaaa

SEQ ID NO: 324 - protein, 106 aa, Zea mays
  misc_feature: Ceres CLONE ID no. 274187
  misc_feature: Ceres CDNA ID no. 29191341
  misc_feature: Homolog of GI Number: 21592628 NR Desc: putative nitrilase
  misc_feature: Homolog of GI Number: 2765837 NR Desc: NAP16kDa protein
  misc_feature: Homolog of GI Number: 21280823 NR Desc: putative nitrilase
  misc_feature: Homolog of GI Number: 21592782 NR Desc: nitrilase associated protein
  misc_feature: Homolog of GI Number: 28827480 NR Desc: putative nitrilase associated protein
MSRGGSAGGGQSSLGYLFGSGEPPKPAVAPAVSAPPAAAGAPPAEKPPAAKPDGTSQIAAGVTSQTNNYHRADGQNTGNFLTDRPSTKVHAAPGGGSSLGYLFGGN

SEQ ID NO: 325 - DNA, 646 bp, Zea mays
  misc_feature: Ceres CLONE ID no. 274204
  misc_feature: Ceres CDNA ID no. 1356595
  CDS (16)..(361): REFERENCED BY SEQ ID NO: 326
actcaaggtcgcaggatgcctccgccgcgtgagcacaaccagccccaggacgaagaggacgacgacaccgcaggcgtcgtcaagctcatcagcgccgagggcttcgaattcgttgttgacaggaaggccgccatggtctccaacaccctccgcaacatgctcacatccccaggcggcttctctgagacgcgccagggcgaggtccgcttcccagagatccccaccaacatcctcgagaagatctgccagtatttctattggtcgctccattactccagtgggaaggagacagcggagtttccaatcgaaccggagataaccctggagcttatgatggccgcaaactatctggacacttgatgaggagcctgaggggtataatcctagtttgttattaaatatgaaagaacgaagcaatgaatactagtgaatctttccttccattcgtttcctttttttttttgcattacatgatgtaaccagcatacgctggatgaaatgcttgttttttcacagatttgatctgatctgatccgatccagtgtggtctggcacaatgtaatgtaaaggtgggagggaagcagaaaccaaggaatacattttgcaatctacagtgtgtgctactatcacaaaaaaaaaaaaaaaa

SEQ ID NO: 326 - protein, 114 aa, Zea mays
  misc_feature: Ceres CLONE ID no. 274204
  misc_feature: Ceres CDNA ID no. 1356595
  misc_feature (20)..(82): Pfam Name: Skp1_POZ PFAM Desc: Skp1 family
MPPPREHNQPQDEEDDDTAGVVKLISAEGFEFVVDRKAAMVSNTLRNMLTSPGGFSETRQGEVRFPEIPTNILEKICQYFYWSLHYSSGKETAEFPIEPEITLELMMAANYLDT

SEQ ID NO: 327 - DNA, 733 bp, Zea mays
  misc_feature: Ceres CLONE ID no. 274250
  misc_feature: Ceres CDNA ID no. 25446287
  CDS (96)..(524): REFERENCED BY SEQ ID NO: 328
aaaaaaatcaacaagcaggaccagctagctagctcctcccactgctatcacccgggccccggccagccatctcgctgaaagagaaaagcgcagccatgaagactactagctcgggcattgcagtcgtcctcctggtggccgacatctcgtgctccgacgtgctcaacgacctgtcgccgtgcctgcccttcctgcagggcaaggcagccaaacccagcgagagcaacaaccagtgctgcgacggcgtgaggaccctgtacgcggcggcggacaccaggcccgacaggcaggccacgtgccggtgcctcaaggcggcctacgttcaggtccacgctgtgctctccgcggcgcaggagctgcccggcgactgcggcctctcgctgtcctacaacatcacccccgacatcgactgcgacaagttccaaagcgaagaaagtcttgcttcaccttcatcaaacaggaccaaaaatgatcgaatgaagggatactgttcccttaccagaatccatacgacgggatggtgatgttcagtgccctgctagcagtaggctgcatctgcactgagtgactagaataaaggatttggtgatgtttgtgctgattggtgtgttcgcctgtaatcgtgtgatgccgtcgttggcttcttatatccgtgtctaatctcgcaagtgctcgtgtttgcaactataccatttataatgtcaacttatcatgcaaaaaaaaaaaaaaaaaa

SEQ ID NO: 328 - protein, 142 aa, Zea mays
  misc_feature: Ceres CLONE ID no. 274250
  misc_feature: Ceres CDNA ID no. 25446287
  misc_feature (19)..(106): Pfam Name: Tryp_alpha_amyl PFAM Desc: Protease inhibitor/seed storage/LTP family
  misc_feature: Homolog of GI Number: 66271045 NR Desc: FSLTP2
  misc_feature: Homolog of GI Number: 1050918 NR Desc: lipid transfer protein
  misc_feature: Homolog of GI Number: 66271047 NR Desc: FSLTP3
  misc_feature: Homolog of GI Number: 7438274 NR Desc: lipid transfer protein SDi
  misc_feature: Homolog of GI Number: 11095210 NR Desc: lipid transfer protein 3 precursor
  misc_feature: Homolog of GI Number: 7012722 NR Desc: lipid transfer protein precursor
  misc_feature: Homolog of GI Number: 7012719 NR Desc: lipid transfer protein precursor
  misc_feature: Homolog of GI Number: 1098266 NR Desc: lipid transfer protein
  misc_feature: Homolog of GI Number: 16903206 NR Desc: lipid transfer protein precursor
  misc_feature: Homolog of GI Number: 2829204 NR Desc: lipid transfer protein precursor
MKTTSSGIAVVLLVADISCSDVLNDLSPCLPFLQGKAAKPSESNNQCCDGVRTLYAAADTRPDRQATCRCLKAAYVQVHAVLSAAQELPGDCGLSLSYNITPDIDCDKFQSEESLASPSSNRTKNDRMKGYCSLTRIHTTGW

SEQ ID NO: 329 - DNA, 1191 bp, Zea mays
  misc_feature: Ceres CLONE ID no. 274748
  misc_feature: Ceres CDNA ID no. 25446750
  CDS (2)..(934): REFERENCED BY SEQ ID NO: 330
gacttttgttcggatctcacccgattacgagtatatacatcccgcttcgctccttcccgtggcgattcgccgtgttcttgacctgtcgcggtgcctttgcgttggtgcaggaaggatgacgtgctcaatggatctcccggccaagggcgggttcagcttcgacctgtgccgccgcaacagtatgctgaagaagaacgggctcaaactcccgggattcaggaagaccggaacaaccatcgtcggcctcgtctttcaggatggggttgttcttggggcagacacaagagcaactgaggggcctatagttgctgataagaattgtgagaagatccactttatggcgccaaacatttattgttgtggagcaggaactgctgctgacactgaggctgttacagacatggtcagctcgcagctacagctgcaccgttacgcaacgggtcgcgaatctagagtcgtaactgctcttacactgctgaagtcacatctctttaggtatcaaggccatgtcagtgctgcccttgttcttggagtggattgtactggaccgcatcttcacactgtttatccacacggctccactgatactcttccttttgccacgatgggttctggatcccttgctgcaatgtcagtgtttgaatcgaagtataaagagggcctcactagggaagagggaatacaactggtgtcagaagcaatatgtgcaggtatcttcaatgacttgggtagtggaagcaatgtggatgtctgcgtgataaccaaggggaagacagaatacttgagaaaccaccagttgccgaatcccagaacttatgttagttcaaagggatatagcttcaccaaggggcagactgaggtgttgtccgcaaagatcacacatctcaagcagaaggttgaggtcactgagggcggtgatgctatggaggagtgatcctgtatgcttgcatccaggtaaaacagtcatactcttttttatattattttacttagtggaggagctaggaaaagacagaatggagatctttgttgtactttctcgactgaatccggactttcatgtcaaaggtgtttccaattaaatgcttgtttctgaatgtttaaactgcaatggtatgttacaactttctttgagatgttaaaaaaaaaaaaaaaaaaaaaaaaaaaaaaaaaaaaaaaaaaaaaaaaaaa

SEQ ID NO: 330 - protein, 272 aa, Zea mays
  misc_feature: Ceres CLONE ID no. 274748
  misc_feature: Ceres CDNA ID no. 25446750
  misc_feature (35)..(215): Pfam Name: Proteasome PFAM Desc: Proteasome A
  misc_feature: Homolog of GI Number: 50933089 NR Desc: 20S proteasome beta subunit
  misc_feature: Homolog of GI Number: 30023762 NR Desc: At3g27430
  misc_feature: Homolog of GI Number: 2511578 NR Desc: multicatalytic endopeptidase
  misc_feature: Homolog of GI Number: 9758084 NR Desc: 20S proteasome beta subunit PBB2
  misc_feature: Homolog of GI Number: 21387013 NR Desc: 20S proteasome beta subunit PBB2
  misc_feature: Homolog of GI Number: 21593337 NR Desc: 20S proteasome beta subunit PBB2
  misc_feature: Homolog of GI Number: 30688785 NR Desc: 20S proteasome beta subunit B
  misc_feature: Homolog of GI Number: 2511576 NR Desc: multicatalytic endopeptidase
  misc_feature: Homolog of GI Number: 24664391 NR Desc: CG3329
  misc_feature: Homolog of GI Number: 2564233 NR Desc: proteasome Z subunit
MTCSMDLPAKGGFSFDLCRRNSMLKKNGLKLPGFRKTGTTIVGLVFQDGVVLGADTRATEGPIVADKNCEKIHFMAPNIYCCGAGTAADTEAVTDMVSSQLQLHRYATGRESRVVTALTLLKSHLFRYQGHVSAALVLGVDCTGPHLHTVYPHGSTDTLPFATMGSGSLAAMSVFESKYKEGLTREEGIQLVSEAICAGIFNDLGSGSNVDVCVITKGKTEYLRNHQLPNPRTYVSSKGYSFTKGQTEVLSAKITHLKQKVEVTEGGDAMEE

SEQ ID NO: 331 - DNA, 1221 bp, Zea mays
  misc_feature: Ceres CLONE ID no. 275216
  misc_feature: Ceres CDNA ID no. 25403015
  CDS (419)..(1000): REFERENCED BY SEQ ID NO: 332
gctctccctcactctcattctatgaacctccagctttctctctctccttccctcctctccagttccacagaaggctccgtgcctagatcccgtggagaatgtgttggggatcaaggagtggttgattggatccatcccctcacgtgcttccctcatcaagtttcaaatccccatctgcgcgaggaactcctctctcaaggtatctttcctcgatctacctttctagcgagtttgggttgaatccctttggagtaaataaacgaaaggttcatactgccttattctctaatggattcattatttggtttgaatttgataatttgggggaggggaaatcgctcgtaactgtgcaaacacttgttgctcgacccccctcaatcaatcgagccgtggtgtttgttgtctctctctctttaagatggttgcacggaggaatccatccattattgaagaaggtagtggatctgaagaaatccaggtggagcgtcctcgccgctcccagaccggtcatggtagaggccaagctcggggagatgttggtgggagtagttctcaacaacctgaaatcgtccatgccgctcgagaagaacctgtccctcagccacctctccatccatcttcatcacgggctgctgcagctgccgcctctcgccccatgagccgtggtaagagaagcaagaagagaggtgttcgtgcgctcatcaggggtttaaatggaatctatgctatctgtcgtgagagttatgttcaaatcgccgagctaaaaaggaaaaatgtcgagtacaatgagaactttaggagatttatgttagagtcggacaactttaggcgttatgttggtcgtgtacctctgcgtcctgctccaccatacaatcctccgccgcctatgcccgacactctggatcagtgggttcagcagacatatggtgttcctttcgacgaagatatctctgatgatgaggaagaaatctctgatgatgaagatgagtccttctggtgaacatggtcattatggtggcttcttcttcttcttggttcttgttgctaaaagggagagaagttcgtgacatttgatctagtcttttgttgctggcagttgtgagagtgagaacctaaactatgtgggatgtaataactttatgattatgttgtctcaaaacacctggcctgtaatagataattaggtgaacttgttcttattatacaaaaaaaaaaaaaaaa

SEQ ID NO: 332 - protein, 193 aa, Zea mays; identical to SEQ ID NO: 248
  misc_feature: Ceres CLONE ID no. 275216
  misc_feature: Ceres CDNA ID no. 25403015

SEQ ID NO: 333 - DNA, 953 bp, Zea mays
  misc_feature: Ceres CLONE ID no. 275235
  misc_feature: Ceres CDNA ID no. 25446288
  CDS (76)..(858): REFERENCED BY SEQ ID NO: 334
cctaaaccccgatattcttcttcgcctccctttcctcctcagcacccaaaccccgaccttcagggttccgccgccatgccgcagggagaccacatcgagcttcaccagaagcgccatggcaagcgcctggaccacgaggagcgcaagcgcaagcgcgaggcgcgcgaggtgcacaggcgctcgaaggacgcccgcaatttgattggtgctaagggcaagaggttcgccaagaaacgctatgctgagaaggcgcagatgaagaagaccctgaaaatgcacgatgaatcaaataagcgacagaaggttgatgatgatgtccaagagggtgctcttcctccgtatctactggatcgtgatcagacacagcgtgctaaggtactcagcaacacaatcaagcaaaagaggaaggaaaaggctggcaaatgggatgttccgctgccaaaggtcagacctgttgctgaagaagaaatgttcaaggtgctacgaactggcaagcgaaaaaccaagcagtggaagagaatggttaccaaagccacttttgttggagctggatttacaaggaaaccaccaaagtatgagcggttcattcgaccaactggtctgcgtttcaccaaagctcatgtgactcacccagaactgaagtgcactttcaaccttgacataatttctgtgaagaaaaacccaaatggtccgatgtacacttctcttggtgttatgacaaggggaacaatcattgaggtaaatgtcagtgagcttggtctggtaactcccgctggaaaagttgtttgggggaaatatgctcaagttacaaacaacccggagaatgatgggtgtatcaatgctgttttgctagtgtagaaccatagtgagattttgtttatggtgatgaatcgtcccatttgtatctgctcttgataagatgctcccttttgatcaaaaaaaaaaaaaaaaaa

SEQ ID NO: 334 - protein, 260 aa, Zea mays
  misc_feature: Ceres CLONE ID no. 275235
  misc_feature: Ceres CDNA ID no. 25446288
  misc_feature (1)..(237): Pfam Name: Ribosomal_S8e PFAM Desc: Ribosomal protein S8e
  misc_feature: Homolog of GI Number: 50939895 NR Desc: putative TGF
  misc_feature: Homolog of GI Number: 72013892 NR Desc:  similar to TGF beta
  misc_feature: Homolog of GI Number: 62859971 NR Desc: LOC550080
  misc_feature: Homolog of GI Number: 41054639 NR Desc: Similar to RIKEN cDNA 5730427N09 gene
  misc_feature: Homolog of GI Number: 51771469 NR Desc: similar to TGF beta
  misc_feature: Homolog of GI Number: 66852442 NR Desc: Ribosomal protein S8e
  misc_feature: Homolog of GI Number: 63547607 NR Desc:  similar to TGF beta
  misc_feature: Homolog of GI Number: 62661843 NR Desc:  similar to TGF beta
MPQGDHIELHQKRHGKRLDHEERKRKREAREVHRRSKDARNLIGAKGKRFAKKRYAEKAQMKKTLKMHDESNKRQKVDDDVQEGALPPYLLDRDQTQRAKVLSNTIKQKRKEKAGKWDVPLPKVRPVAEEEMFKVLRTGKRKTKQWKRMVTKATFVGAGFTRKPPKYERFIRPTGLRFTKAHVTHPELKCTFNLDIISVKKNPNGPMYTSLGVMTRGTIIEVNVSELGLVTPAGKVVWGKYAQVTNNPENDGCINAVLLV

SEQ ID NO: 335 - DNA, 1453 bp, Zea mays
  misc_feature: Ceres CLONE ID no. 275642
  misc_feature: Ceres CDNA ID no. 40041159
  CDS (56)..(1135): REFERENCED BY SEQ ID NO: 336
gacctcctttctagcccaaggatccaatccaagcacctaattccatcccatccggatgggcgatggcgatgctgcatcggggacggggaggaggtgccccaagcacccgtcggagccgcccttcaccggcttctgctccgcctgcctcctcgacaggctccacgctaccaacctaattggtgtggttgtggcctccccttcccggccgcctcgtccgccttcgcttcccttccaccaggacctggaggaggaggaggagttcctgcctccctgttcccgttccaaagggacaacaggagaaccgccagcggttggggggaggaccacgctccttcgtctcttccagctagaggaccaaggagacgagcgtgagcaggacaccggcaccggcaccggcaccggcaccgacgccgccacctccaccagtggcggcgacgcccaagatccgccgtttcatctccagcgcaagcgctcccttcgccactcctgcagcgaatggatcgcctgctgcgacgccgccgccgccaaccattcctcctgcctaccctcccgtcagtctctcgatgcctcttcttccaccacctccgccgccgcagctgctggtgtgacgctggcgcctgttaatccacactcaaacaacgccgctgcttctgcgggaagcaattgcgctgccatggtcgagaggaggacggggagcctgaggtggaaccaactctggctaatcaagggcgtcctcgccaagcccggagggcatctgcttaacagatctttctccgagtcctctaggtcaaaatacgccctccaccccgggggcgccgccattgcaagatcctcttcgtcccagtcgcaaggtgtccgcctcaacggcagccactccgtgtcttcagctgggaatggtatggactcttctgagatatcactccccggtgattctgttggacatgcgcatgtccaccattgccggcctcgcctcatggactggctccgccgcagccgcagcgttcactacccttcttctaccagcactgtggatgctggtcttactcctttcagaagcagaagcagcagcaccaggagcaccgcacacccaaggtttcctgctggcttctttgctgcacaaagatatcaacgctgataattcttggctacacaatttgttgtagaatcaaattgtagactagcatggtaagttatggctaataattaagcaaactctgtgctgtcagtggttggccaattaataccaagggactgactgtcaatgaaattttcaagttgagctcttttggtaaacttgctatatgtacatgtagtgtacagggaaaccatgaatcattcttctcaatggctatttgtcggctgctgctttagttttgagtttgtaaattactcttttctattgcttgcttctgaatatattggctgatggattagcaaaaaaaaaaaaaaaaaa

SEQ ID NO: 336 - protein, 359 aa, Zea mays
  misc_feature: Ceres CLONE ID no. 275642
  misc_feature: Ceres CDNA ID no. 40041159
  misc_feature: Homolog of GI Number: 66845451 NR Desc: actin associated protein
  misc_feature: Homolog of GI Number: 435039 NR Desc: proline
  misc_feature: Homolog of GI Number: 451544 NR Desc: proline
  misc_feature: Homolog of GI Number: 995935 NR Desc: MAZ
  misc_feature: Homolog of GI Number: 51214392 NR Desc: Protease
  misc_feature: Homolog of GI Number: 51228140 NR Desc: Protease
  misc_feature: Homolog of GI Number: 27363326 NR Desc: At5g10430/F12B17_220
  misc_feature: Homolog of GI Number: 34894166 NR Desc: P0439B06.4
  misc_feature: Homolog of GI Number: 72127760 NR Desc:  similar to abl
MGDGDAASGTGRRCPKHPSEPPFTGFCSACLLDRLHATNLIGVVVASPSRPPRPPSLPFHQDLEEEEEFLPPCSRSKGTTGEPPAVGGRTTLLRLFQLEDQGDEREQDTGTGTGTGTDAATSTSGGDAQDPPFHLQRKRSLRHSCSEWIACCDAAAANHSSCLPSRQSLDASSSTTSAAAAAGVTLAPVNPHSNNAAASAGSNCAAMVERRTGSLRWNQLWLIKGVLAKPGGHLLNRSFSESSRSKYALHPGGAAIARSSSSQSQGVRLNGSHSVSSAGNGMDSSEISLPGDSVGHAHVHHCRPRLMDWLRRSRSVHYPSSTSTVDAGLTPFRSRSSSTRSTAHPRFPAGFFAAQRYQR

SEQ ID NO: 337 - DNA, 736 bp, Zea mays
  misc_feature: Ceres CLONE ID no. 275874
  misc_feature: Ceres CDNA ID no. 25446289
  CDS (92)..(538): REFERENCED BY SEQ ID NO: 338
gtggctataaaggccaatccactctctctccaggcaccccgagccgccaaaaccctagcgccgccgccgcgaatcccgcacgaccccaaccatgaccgtgctgagccgccctaccccgggcacggcccagtgcttcgggcggaagaagaccgccgtcgcggttgcgtacacgaagccggggcgcggcctgatcaaggtgaacggcgtcccgattgagctgatccgaccggagatgctccgcctcaaggccttcgagcccatcctgctggcggggcggtcccggttcaaggacatcgacatgcggatccgcgtccgcggcggcgggaagacgtcgcagatctacgccatccgccaggccgtcgccaaggggctcgtcgcctactaccagaagtacgtcgacgaggccgccaagaaggagatcaaggacatctttacccgctacgatcgcaccctcctcgtcgctgacccccggcgctgcgagccgaagaagttcggcggacgtggtgcccgcgccaggttccagaagtcgtaccgttgagcggctgcctgctccatctcgatttttcagatcgttgtgggtgttcttcgctttatttcctatcaatggatctgcttatctggttctatatctagctgctactttaccataatgtttagactttaatgcctagcctgaaaccttgtttgcaatgtgaaattaatgtgagagattatgaagacaaaaaaaaaaaaaaaa

SEQ ID NO: 338 - protein, 148 aa, Zea mays
  misc_feature: Ceres CLONE ID no. 275874
  misc_feature: Ceres CDNA ID no. 25446289
  misc_feature (16)..(148): Pfam Name: Ribosomal_S9 PFAM Desc: Ribosomal protein S9/S16
  misc_feature: Homolog of GI Number: 77552917 NR Desc: ribosomal protein S9
  misc_feature: Homolog of GI Number: 7440266 NR Desc: probable ribosomal protein S16
  misc_feature: Homolog of GI Number: 2641209 NR Desc: ribosomal protein S16
  misc_feature: Homolog of GI Number: 6984222 NR Desc: 40S ribosomal protein S16
  misc_feature: Homolog of GI Number: 439654 NR Desc: RS16 protein
  misc_feature: Homolog of GI Number: 21555842 NR Desc: 40S ribosomal protein S16
  misc_feature: Homolog of GI Number: 16323500 NR Desc: putative 40S ribosomal protein S16
  misc_feature: Homolog of GI Number: 4574242 NR Desc: ribosomal protein S16
  misc_feature: Homolog of GI Number: 6721162 NR Desc: putative 40S ribosomal protein S16
  misc_feature: Homolog of GI Number: 57036563 NR Desc:  similar to ribosomal protein S16
MTVLSRPTPGTAQCFGRKKTAVAVAYTKPGRGLIKVNGVPIELIRPEMLRLKAFEPILLAGRSRFKDIDMRIRVRGGGKTSQIYAIRQAVAKGLVAYYQKYVDEAAKKEIKDIFTRYDRTLLVADPRRCEPKKFGGRGARARFQKSYR

SEQ ID NO: 339 - DNA, 731 bp, Zea mays
  misc_feature: Ceres CLONE ID no. 276424
  misc_feature: Ceres CDNA ID no. 25446290
  CDS (99)..(401): REFERENCED BY SEQ ID NO: 340
taatcgaaaactcccactgcacccagtccactcgcagtcgcacgcagctagtccggtccgacctatccagtgacaccatctatcgtcggtcggggacgatgaggccggccgcgctcttcctcgccgcggtgctggccagcgtcctcctcctcctcgccgccggccgcgccgcgggcgacttctcggccctggcgccgtgcgacgtgacgcagctgaccccctgcgcgagcgcgttcgcggggaaggcgtcgcccacggccgcctgctgcgccaagctcatgtcccacgggcccgtctgcctgtgccggtacaaggacgacgccagcctgaagcgcctcgtcgacgccaggcacaagcgcagggtgttcaccgcgtgcaaggtgcccgtcccgagttgctagccgtactcctagtcctagctagctcatccgtcggccgtcggcgcaagcagccacgcacggcgaagaaataagatggacggaggagagaggggagttgttcgccgtggtctgtggtgtccggccaaggatttggctggttagatttgtttgcttctttactgtctcgcacaaaaaccagctcgtgggaggtagtgtgttgcattgcgttcgaagtcgaactcatgtcgccagttttccaatgcattgcgaaataaaaatcaccaccatcgtcgctaaagaaaacatgcacatgcgcatcaagccgttctgagttcaaaaaaaaaaaaaaaa

SEQ ID NO: 340 - protein, 100 aa, Zea mays
  misc_feature: Ceres CLONE ID no. 276424
  misc_feature: Ceres CDNA ID no. 25446290
  misc_feature (34)..(100): Pfam Name: Tryp_alpha_amyl PFAM Desc: Protease inhibitor/seed storage/LTP family
  misc_feature: Homolog of GI Number: 34911370 NR Desc: P0034C09.16
  misc_feature: Homolog of GI Number: 50932651 NR Desc: putative lipid transfer protein
  misc_feature: Homolog of GI Number: 50932655 NR Desc: putative lipid transfer protein
  misc_feature: Homolog of GI Number: 7489428 NR Desc: probable lipid transfer protein
  misc_feature: Homolog of GI Number: 498036 NR Desc: lipid transfer protein
  misc_feature: Homolog of GI Number: 493721 NR Desc: TED4
  misc_feature: Homolog of GI Number: 543650 NR Desc: P48h
  misc_feature: Homolog of GI Number: 9279661 NR Desc: lipid transfer protein
  misc_feature: Homolog of GI Number: 7488524 NR Desc: lipid transfer like protein
MRPAALFLAAVLASVLLLLAAGRAAGDFSALAPCDVTQLTPCASAFAGKASPTAACCAKLMSHGPVCLCRYKDDASLKRLVDARHKRRVFTACKVPVPSC

SEQ ID NO: 341 - DNA, 824 bp, Zea mays
  misc_feature: Ceres CLONE ID no. 276518
  misc_feature: Ceres CDNA ID no. 36703937
  CDS (121)..(579): REFERENCED BY SEQ ID NO: 342
gattccagacgcaaccctgcggctgcggggtcaaggagccagagggggtgcacagcgatcgttctgccggagatcgaaaccctcagctagggtctgaggcgccgggctgcggccgccgagatgtcgacgccggcgaggaagcggctgatgcgggacttcaggcgcctgcagcaggacccgcccgccgggatcagcggcgcgccgcacgacaacaacatcatgctctggaacgccgtcatattcgggccggatgatacgccttgggacggaggcacgttcaagcttaccttgcagtttacagaagattacccaaacaagccaccaactgttcggttcgtctctaggatgtttcatccaaacatatatgctgatggaagcatctgcttggatatcctacagaaccagtggagtcctatatatgatgttgctgcaatcttgacttctattcagtccctgctgtgtgatccaaacccgaactcccctgcaaactcagaagccgcaagactgttcagcgagaacaagcgggagtacaaccgcaaagtccgcgagattgtggagcagagctggacagccgactagtgcaggaggatgctcatcgtgcccgaaagggcacaataaggaaccatgaaaaaacatccttgtgtttgtggttcgccagacctgtcgaaacattgaagaactctagttctagtctgtcgttgtcatggttttggtctgatccagagcaccggttgctcatggtggtggctgtcgtaatgtagcggttgttgttgacatatatcttcttaaaatgatcctgcttgtgcaaaaaaaaaaaaaaaaaa

SEQ ID NO: 342 - protein, 152 aa, Zea mays
  misc_feature: Ceres CLONE ID no. 276518
  misc_feature: Ceres CDNA ID no. 36703937
  misc_feature (8)..(145): Pfam Name: UQ_con PFAM Desc: Ubiquitin
  misc_feature: Homolog of GI Number: 50934403 NR Desc: OsRad6
  misc_feature: Homolog of GI Number: 50919097 NR Desc: ubiquitin carrier protein
  misc_feature: Homolog of GI Number: 136640 NR Desc: Ubiquitin
  misc_feature: Homolog of GI Number: 56236462 NR Desc: ubiquitin carrier protein
  misc_feature: Homolog of GI Number: 58578278 NR Desc: ubiquitin
  misc_feature: Homolog of GI Number: 8118527 NR Desc: ubiquitin conjugating protein
  misc_feature: Homolog of GI Number: 52851176 NR Desc: Ubiquitin
  misc_feature: Homolog of GI Number: 13516453 NR Desc: ubiquitin
  misc_feature: Homolog of GI Number: 83283991 NR Desc: ubiquitin carrier
MSTPARKRLMRDFRRLQQDPPAGISGAPHDNNIMLWNAVIFGPDDTPWDGGTFKLTLQFTEDYPNKPPTVRFVSRMFHPNIYADGSICLDILQNQWSPIYDVAAILTSIQSLLCDPNPNSPANSEAARLFSENKREYNRKVREIVEQSWTAD

SEQ ID NO: 343 - DNA, 1124 bp, Zea mays
  misc_feature: Ceres CLONE ID no. 277280
  misc_feature: Ceres CDNA ID no. 25445476
  CDS (273)..(917): REFERENCED BY SEQ ID NO: 344
actacgactccacattttccaacggatttttatttttctaagaaaattagtttttttagaaaaatagaaatcacttggttgcactaaaaaaacaggcacactcgtcactcggtcgccgcgcgccctcccagttcgtctattaaaggggaaccagtgaaccacccgatgcaacttgcgtagagagttgggcgcagagaatccccaagcaaacaaacagggtagagggagaggagaggagaggagaggagaggagaggttgggtctgggacaccatggctccgatgaagctgtacggggcggtgatgtcgtggaacgtgacgaggtgcgcaacggcgctggaggaggctggctccgactacgagatcgtgcccatcaacttcgccaccgccgagcacaagagccccgagcacctcgtccgcaacccgtttggtcaggttccagctctgcaggatggtgacttgtacctcttcgaatcacgagcaatctgcaagtacgctgctcgcaaaaacaagccagagctgttgagggaaggaaacctcgaggaggcagcaatggtggatgtttggatcgaggtggaggctaaccagtacaccgctgcactgaaccccatcctcttccaggtcctcatcagtccgatgcttgggggaaccaccgaccagaaagttgtggatgagaaccttgagaagctgaagaaggtgctagaggtgtacgaggcacgcctgaccaagtgcaagtaccttgctggagacttcctcagcctcgccgacctgaaccatgtgtctgtcactctctgcctgtttgctacgccctacgcatctgtgctcgacgcctacccgcatgtgaaggcctggtggtctggtctgatggagaggccgtctgtccagaaggtcgctgccctgatgaagccatctgcttgaaacggttgccctgtcaatcggtgaatggaataagccaagtctgttctgggttgtttgcttgttcagtgatgtgtcttctatgacgaaagttgagtgcctatgtgtgagcatgcttgcttgtaacgagaccttgaattgttcggaaatgagcattcctgtgctcttctttaaaataaactttgccttaggttaaaaaaaaaaaaaaaa

SEQ ID NO: 344 - protein, 214 aa, Zea mays
  misc_feature: Ceres CLONE ID no. 277280
  misc_feature: Ceres CDNA ID no. 25445476
  misc_feature (4)..(77): Pfam Name: GST_N PFAM Desc: Glutathione S
  misc_feature (93)..(201): Pfam Name: GST_C PFAM Desc: Glutathione S
  misc_feature: Homolog of GI Number: 554565 NR Desc: glutathione S
  misc_feature: Homolog of GI Number: 168491 NR Desc: glutathione S
  misc_feature: Homolog of GI Number: 3891708 NR Desc: Chain D
  misc_feature: Homolog of GI Number: 66615 NR Desc: glutathione transferase
  misc_feature: Homolog of GI Number: 3891608 NR Desc: Chain B
  misc_feature: Homolog of GI Number: 56412207 NR Desc: glutathione S
  misc_feature: Homolog of GI Number: 44894209 NR Desc: glutathione s
  misc_feature: Homolog of GI Number: 23504749 NR Desc: glutathione transferase F1
  misc_feature: Homolog of GI Number: 21212950 NR Desc: glutathione
  misc_feature: Homolog of GI Number: 695789 NR Desc: glutathione transferase
  misc_feature: Useful for making larger plants
MAPMKLYGAVMSWNVTRCATALEEAGSDYEIVPINFATAEHKSPEHLVRNPFGQVPALQDGDLYLFESRAICKYAARKNKPELLREGNLEEAAMVDVWIEVEANQYTAALNPILFQVLISPMLGGTTDQKVVDENLEKLKKVLEVYEARLTKCKYLAGDFLSLADLNHVSVTLCLFATPYASVLDAYPHVKAWWSGLMERPSVQKVAALMKPSA

SEQ ID NO: 345 - DNA, 776 bp, Zea mays
  misc_feature: Ceres CLONE ID no. 277641
  misc_feature: Ceres CDNA ID no. 29191477
  CDS (150)..(416): REFERENCED BY SEQ ID NO: 346
aaaatccccaatctctgcgccgccgctgttctgtgtcgttcttcgcccgccgtcgttccgtgtcgttcttagcccgccgccgtttgtagtcgcggcttcatcgtcgcgtaccgatccccaccgcccccactgccactagaggtgtctacatgtctcagaacaacccctcccagcttctcccctcagagctgatcgaccggtgcatcgggtccaagatctgggtgatcatgaagggggacaaggagctcgttggcaccctctgcggctttgatgtctacgtcaatatggtgctggaggacgtcaccgagtatgaatacactgctgaagggcgccgtattacaaaacttgaccagatcctcctgaacggcaacaacatagccattttggttcctggtggttcaccacctgatgtgtaatgaacttttgcttcccagagtatcattcgtggtgaaggcaatggattatgaagaaacctgataaatcgaagcgcatcggttgtatttggcgtttgattgacagcgttacttttatttaaaaaatccattttttctattttacctgccgtccaaaaccagtctagaacaatctagtgatctgagaagtatttgttggttaatattcaatgtttggcctaatcatgaaattaggctttagtctgttttcgtcgtcatctaacaaagtgaactttctatgtcctgtatgtctcctagtcgtcctttgtagactttctatgtccgaaggtgatttcatctttgtccaaaaaaaaaaaaaaaaaa

SEQ ID NO: 346 - protein, 88 aa, Zea mays
  misc_feature: Ceres CLONE ID no. 277641
  misc_feature: Ceres CDNA ID no. 29191477
  misc_feature (13)..(81): Pfam Name: LSM PFAM Desc: LSM domain
  misc_feature: Homolog of GI Number: 54287604 NR Desc: putative snRNA associated protein
  misc_feature: Homolog of GI Number: 9758886 NR Desc: U6 snRNA
  misc_feature: Homolog of GI Number: 62647334 NR Desc:  similar to LSM5 homolog
  misc_feature: Homolog of GI Number: 68394601 NR Desc:  similar to LSM5 homolog
  misc_feature: Homolog of GI Number: 73967234 NR Desc:  similar to LSM5 homolog
  misc_feature: Homolog of GI Number: 50732968 NR Desc:  similar to LSM5 homolog
  misc_feature: Homolog of GI Number: 51873770 NR Desc: MGC85219 protein
  misc_feature: Homolog of GI Number: 72143300 NR Desc:  similar to LSM5 homolog
  misc_feature: Homolog of GI Number: 63706049 NR Desc:  similar to LSM5 homolog
  misc_feature: Homolog of GI Number: 21358059 NR Desc: CG6610
MSQNNPSQLLPSELIDRCIGSKIWVIMKGDKELVGTLCGFDVYVNMVLEDVTEYEYTAEGRRITKLDQILLNGNNIAILVPGGSPPDV

SEQ ID NO: 347 - DNA, 1985 bp, Zea mays
  misc_feature: Ceres CLONE ID no. 278545
  misc_feature: Ceres CDNA ID no. 40041160
  CDS (30)..(1742): REFERENCED BY SEQ ID NO: 348
aaaaagtgagccccaaaccctacaccctcatggaagcgtggccacctctcgcccccgcggcggccactccggcctgtgccttggcgtggggagcagcagcaacggcgcagcggaaggccgtggagcaggagtcagcggcgcaggcggtgagccgcatcgtggcgagctgcgccaactccagcggcgtggcagtcgccgtggtggacgccaacgccgtcatctccggcggctccgctctctccacttccgcggggcgccttgtcaccgtgcccgaggtgctcgaggaggtccgggacgcaaccgcgcggcggcgcctcgggctcctccccgttcccgttgagaccgttgaacctgcgccggagttcgttaagaaagttaccaagtttgccagggagacaggagacatccaaacgctttcagatgttgatataaagattattgctttggcttacatgttagaagctgagatccatgggactagccatttgcgagagcaccctcctcctctgcatgaggtgaatgtcagaaagctgtcagaagctcaaatgcctggttggggctctaatgtgcctaacctgaaagagtgggaagagttggatcagatgtctgaagctggtggagatatcaattctcgaatacttcctctgaaggatattgagagtcaagatatcctgatgtgtgataccaacagtctctgtggggcacaagaggatacagagctccagccatcaaagaaggatgcacctgttgcatgggaggacgatgagaacaatgtaggttggatgcctgctgttagccgcagcatgcacagaagatatttgcagaggaaggcaaggcgtgatgccctcaaggaatctggacaaagttttgagacaagttctgttgttccatcaatcgatgatgataaagttctctctgaaaatagtggattggagcatggtctgacttcaactgatggcctttcttctgtcactgagataatcagtgcacgttctgatgattttgaacatcaagcagaaaatgacactgaaattgctggagaacatttgcattctgatcagcgagcttacggtgatgatgctgatgcgtgcaccaaagaactggaaaacctagatatagaaggtgaggatgagggaggtggtgatgcacatttcattgttgatgagagcagcgagcagagttggaccctgaggtccttatccgaatcaactgtagcatgtgttactagtgattatgccatgcaaaatgtcatcctgctgattggtctccgtctcatagcaccaggtggcatgcagatacgccagatgcataggtgggttttgaggtgccatgcttgctataaggtgacccaagaggttggcaaaatattttgtccgaagtgtggtaatggtgggaccttacggaaggtttcggtaacagttggtgaaaatgggatcactatggcttcacggcgcccacgtgttacacttcgaggcacaaaattctccctcccaatgccccaaggtggaagagatgcaataactaagaaccccatccttcgtgaggatcaacttcctcagaaggttcttcatcctaaactgaagaagtcaaacaaggatgatgatttcttgggcgtggtcgacatattttcgcatggtggtgataagaaggcaccattgaaacctccagtgaggaaggcgctcgcaatgttcagcgggaaaagaaatccaaacgacaaccacttctctcgcaagaagtactaagctctgatctgtcgtcttctttttatgcacgcctgtagtaccgtagtctgtaatcccagcatgtacgtaatggttgaagcagagtgcctttttttttgttagtggcgtatactcatcatattcatatacacagatatatataagcatgtaagctatgcagttttgcagcaactttgtatggtttccgtgctactgtttttctaatgcatttgaattttgagttcgaaaaaaaaaaaaaaaaaa

SEQ ID NO: 348 - protein, 570 aa, Zea mays
  misc_feature: Ceres CLONE ID no. 278545
  misc_feature: Ceres CDNA ID no. 40041160
  misc_feature: Homolog of GI Number: 50904751 NR Desc: putative nin one binding protein
  misc_feature: Homolog of GI Number: 72094998 NR Desc:  similar to nin one binding protein
  misc_feature: Homolog of GI Number: 68439451 NR Desc:  similar to Wu:fc27e05 protein isoform 1
  misc_feature: Homolog of GI Number: 54035096 NR Desc: LOC398701 protein
  misc_feature: Homolog of GI Number: 33638123 NR Desc: nin one binding protein
  misc_feature: Homolog of GI Number: 33989722 NR Desc: Wu:fc27e05 protein
  misc_feature: Homolog of GI Number: 68439449 NR Desc:  similar to Wu:fc27e05 protein isoform 2
  misc_feature: Homolog of GI Number: 33638121 NR Desc: nin one binding protein
  misc_feature: Homolog of GI Number: 68439453 NR Desc:  similar to Wu:fc27e05 protein isoform 3
  misc_feature: Homolog of GI Number: 73957137 NR Desc:  similar to nin one binding protein isoform 1
MEAWPPLAPAAATPACALAWGAAATAQRKAVEQESAAQAVSRIVASCANSSGVAVAVVDANAVISGGSALSTSAGRLVTVPEVLEEVRDATARRRLGLLPVPVETVEPAPEFVKKVTKFARETGDIQTLSDVDIKIIALAYMLEAEIHGTSHLREHPPPLHEVNVRKLSEAQMPGWGSNVPNLKEWEELDQMSEAGGDINSRILPLKDIESQDILMCDTNSLCGAQEDTELQPSKKDAPVAWEDDENNVGWMPAVSRSMHRRYLQRKARRDALKESGQSFETSSVVPSIDDDKVLSENSGLEHGLTSTDGLSSVTEIISARSDDFEHQAENDTEIAGEHLHSDQRAYGDDADACTKELENLDIEGEDEGGGDAHFIVDESSEQSWTLRSLSESTVACVTSDYAMQNVILLIGLRLIAPGGMQIRQMHRWVLRCHACYKVTQEVGKIFCPKCGNGGTLRKVSVTVGENGITMASRRPRVTLRGTKFSLPMPQGGRDAITKNPILREDQLPQKVLHPKLKKSNKDDDFLGVVDIFSHGGDKKAPLKPPVRKALAMFSGKRNPNDNHFSRKKY

SEQ ID NO: 349 - DNA, 716 bp, Zea mays
  misc_feature: Ceres CLONE ID no. 279149
  misc_feature: Ceres CDNA ID no. 25446291
  CDS (55)..(531): REFERENCED BY SEQ ID NO: 350
agccgcatcccttctttcattcgccgccgccgcctgctctctgctgccgtcgccatggggagaaggcctgcggcggcgatggggagcgaccaggagacggagaagaagaagaccccggtggcgctaatgcccatcgcgaagcccctcgcaggaaagaagctctgcaagcggaccctcaagctcgtgcgacgagcctctgaggccaagtgcctcaagcgcggagtcaaagaggtagtcaagagcattcgtcgcgggaacaaagggttgtgtgtgattgctggaaatatttctcctattgatgtgattacacacgttccaatactatgtgaggaatttaatgttccttacatatatgttccatcaaaagaggatcttgcgaccgcaggaaccactaagaggccaacttgttgcgtcctggttctgaccaaaccaaacaagggggagctcagtgacgaggtgaaggataaactgaagtcagactatgaccaagttgtaacggaagttgctgaggctacatctgcaatgttctaaggaccattcagggaccacatcatctgagaatcatgcagctacattcttggcgtactatgtaacctgatccctgtcagtctgccctgcttgcgtgaaccgcaccagtatgctttgcatggtggctggagggatatgactatatgagtttacctatatattatggacttaaaaaaaaaaaaaaaaaa

SEQ ID NO: 350 - protein, 150 aa, Zea mays
  misc_feature: Ceres CLONE ID no. 279149
  misc_feature: Ceres CDNA ID no. 25446291
  misc_feature (30)..(124): Pfam Name: Ribosomal_L7Ae PFAM Desc: Ribosomal protein L7Ae/L30e/S12e/Gadd45 family
  misc_feature: Homolog of GI Number: 34898652 NR Desc: contains EST AU031225
  misc_feature: Homolog of GI Number: 50912367 NR Desc: putative high mobility group
  misc_feature: Homolog of GI Number: 8346555 NR Desc: nhp2
  misc_feature: Homolog of GI Number: 46439194 NR Desc: likely H/ACA snoRNP component
  misc_feature: Homolog of GI Number: 6319993 NR Desc: HMG
  misc_feature: Homolog of GI Number: 59799862 NR Desc: High mobility group (Small nucleolar RNP protein NHP2) (H/ACA snoRNP protein NHP2)
  misc_feature: Homolog of GI Number: 57227026 NR Desc: nucleolar protein family A member 2
  misc_feature: Homolog of GI Number: 50754921 NR Desc:  similar to nucleolar protein family A
  misc_feature: Homolog of GI Number: 42820767 NR Desc: HMG
  misc_feature: Homolog of GI Number: 55661284 NR Desc:  similar to NHP2
MGSDQETEKKKTPVALMPIAKPLAGKKLCKRTLKLVRRASEAKCLKRGVKEVVKSIRRGNKGLCVIAGNISPIDVITHVPILCEEFNVPYIYVPSKEDLATAGTTKRPTCCVLVLTKPNKGELSDEVKDKLKSDYDQVVTEVAEATSAMF

SEQ ID NO: 351 - DNA, 993 bp, Zea mays
  misc_feature: Ceres CLONE ID no. 279669
  misc_feature: Ceres CDNA ID no. 36707186
  CDS (125)..(847): REFERENCED BY SEQ ID NO: 352
aggaaagcaaagcgcttcgcaagcacaggcagtgatcggtaaccaaatccggacagtcttgagctctctcagtctcagcatttcagttcccagattcacatagccccagcccccaagtagcgaaatggcagctgctccgttcgcgattgccggccggctctcccccgttgcgcgcctcccggtccgcgcctggaggcccgcgcacgggtttgcgtcgtccgggagagcccgctcgctcgccgtggcgtccgcggcgcaggagaacagggacaacagtgtcgacgtacaggttagccagaacggcggcaacaggcagcagggcaacgccgtgcagcgccgcccgcgccgcgcgacagcgctcgacatctccccatccccgttcgggttagttgatccgatgtcgccgatgcggacgatgcggcagatgctggacacgatggacaggctgttcgacgacgccgtggggttccccatggggacacggaggtccccggcgaccaccggcgacgtacgcctgccgtgggacatcgtggaggacgagaaggaggtgaagatgcggatcgacatgccgggcctcgcgcgcgacgaggtgaaggtgatggtggaggacgacacgctggtcatccgaggggagcacaagaaggaggagggcgcggagggcggcagcggtggcgacggcgacgggtggtggaagcagcgcagcgtgagctcctacgacatgcggctggcgctgccggatgagtgcgacaagagcaaggtgcgggccgagctcaagaacggcgtgctcctcgtcaccgtgcccaagaccgaggtggagcgcaaggtcatcgacgtgcaggtccagtagacaaactgagctgtcacgacgggtctttgtgtagcactagcgtgggttgggctcttcgcgccgaccgtatcagtactcgtgacccaacgtgtggaataatgtgaataaataaacgcttcaattctgcgaaaaaaaaaaaaaaaaaa

SEQ ID NO: 352 - protein, 240 aa, Zea mays
  misc_feature: Ceres CLONE ID no. 279669
  misc_feature: Ceres CDNA ID no. 36707186
  misc_feature (134)..(240): Pfam Name: HSP20 PFAM Desc: Hsp20/alpha crystallin family
  misc_feature: Homolog of GI Number: 453670 NR Desc: heat shock protein 26
  misc_feature: Homolog of GI Number: 25987075 NR Desc: chloroplast low molecular weight heat shock protein HSP26.7a
  misc_feature: Homolog of GI Number: 25987077 NR Desc: chloroplast low molecular weight heat shock protein HSP26.7b
  misc_feature: Homolog of GI Number: 25987073 NR Desc: chloroplast low molecular weight heat shock protein HSP26.8
  misc_feature: Homolog of GI Number: 4996284 NR Desc: heat shock protein 26
  misc_feature: Homolog of GI Number: 25987069 NR Desc: chloroplast low molecular weight heat shock protein HSP26.2
  misc_feature: Homolog of GI Number: 21809 NR Desc: heat shock protein 26.6
  misc_feature: Homolog of GI Number: 4028571 NR Desc: heat shock protein HSP26
  misc_feature: Homolog of GI Number: 455619 NR Desc: HSP=26 kda heat shock protein {clone B186}
  misc_feature: Homolog of GI Number: 4028567 NR Desc: heat shock protein HSP26
MAAAPFAIAGRLSPVARLPVRAWRPAHGFASSGRARSLAVASAAQENRDNSVDVQVSQNGGNRQQGNAVQRRPRRATALDISPSPFGLVDPMSPMRTMRQMLDTMDRLFDDAVGFPMGTRRSPATTGDVRLPWDIVEDEKEVKMRIDMPGLARDEVKVMVEDDTLVIRGEHKKEEGAEGGSGGDGDGWWKQRSVSSYDMRLALPDECDKSKVRAELKNGVLLVTVPKTEVERKVIDVQVQ

SEQ ID NO: 353 - DNA, 690 bp, Zea mays
  misc_feature: Ceres CLONE ID no. 280148
  misc_feature: Ceres CDNA ID no. 36699298
  CDS (143)..(421): REFERENCED BY SEQ ID NO: 354
atctggatctctcctctctcgtctgcaccgcgagtccgcgactccgcaccaagcaaatcccctgcccccaaaatattgctagggattcgaggggaggaaaatccaggcgcccaggcctggcaatccgttcgtcggagaggccatgagctcggcgcaggatccgttctacatcgtccgggaggagatccaggagtcgattgataaattgcaaagtaacttccaccgctgggagcaaactgcttcaaacacaggagaatatgttcatctgacaaaggagcttctgaccagctgtgaaagcatcgagtggcaggtagatgagctggaaaagacaatctcagttgcatcaagggatccatcatactatggacttgatgaagttgagattgtctgttccatcctcatactactgctacgtacgtagcagcaacctaaggttgcgcttgcattgcactaaagatagatataccatgctgttcatctctcctccatgttgagctgttgattcttgcgcttgtacttcaaaacaaaatgaactctgtgatggtcgtcagtaacaaatctgacgaaacatcgtggctgtctgatagtgtcattcccgacactgtaagccgttcttttaccaaaatttactttactgaaaaaaaaaaaaaaaaaaaaaaaaaaaaaaaaaaaaaaaaaaaaaaaaaaaaa

SEQ ID NO: 354 - protein, 92 aa, Zea mays
  misc_feature: Ceres CLONE ID no. 280148
  misc_feature: Ceres CDNA ID no. 36699298
  misc_feature: Homolog of GI Number: 57899182 NR Desc: putative syntaxin 6
  misc_feature: Homolog of GI Number: 498040 NR Desc: ORF
  misc_feature: Homolog of GI Number: 34905840 NR Desc: putative syntaxin
  misc_feature: Homolog of GI Number: 6560768 NR Desc: F3M18.7
  misc_feature: Homolog of GI Number: 79318789 NR Desc: SYP61
  misc_feature: Homolog of GI Number: 22219302 NR Desc: Chain B
  misc_feature: Homolog of GI Number: 55239057 NR Desc: ENSANGP00000020606
  misc_feature: Homolog of GI Number: 45552581 NR Desc: CG7736
  misc_feature: Homolog of GI Number: 62901842 NR Desc: syntaxin 6
  misc_feature: Homolog of GI Number: 47938755 NR Desc: MGC78971 protein
MSSAQDPFYIVREEIQESIDKLQSNFHRWEQTASNTGEYVHLTKELLTSCESIEWQVDELEKTISVASRDPSYYGLDEVEIVCSILILLLRT

SEQ ID NO: 355 - DNA, 485 bp, Zea mays
  misc_feature: Ceres CLONE ID no. 281635
  misc_feature: Ceres CDNA ID no. 36703938
  CDS (64)..(324): REFERENCED BY SEQ ID NO: 356
aggtcgagagagagagagagagaccctaccgggcgggagagagccaggaagaggagggcgacgatggcgtccggctggggcatcaacgggaacaagggccgctgctacgacttctggctggagttcagcgagtgcatgagccgctgccgccagccctccgactgcggcctcctccgcgaggactacctcgagtgcctccaccactccaaggagttccagcgcaggaacaggatctacaaggaggagcaacgtcagatcagagctgctgctcgtaaggccaaggaggaagctgagggtgcccctgctgttgcagcacaccattagtctccctgtctattttttgtgttgttgttttctgttaactcatctttggttcagttatgctaagggcaaggcaataatctccagctgttggactacacagattttttcccccatgacttaaatatcaagactcattttgtgttaaaaaaaaaaaaaaaaaa

SEQ ID NO: 356 - protein, 86 aa, Zea mays
  misc_feature: Ceres CLONE ID no. 281635
  misc_feature: Ceres CDNA ID no. 36703938
  misc_feature: Homolog of GI Number: 50948425 NR Desc: putative fiber protein Fb14
  misc_feature: Homolog of GI Number: 30841446 NR Desc: fiber protein Fb14
MASGWGINGNKGRCYDFWLEFSECMSRCRQPSDCGLLREDYLECLHHSKEFQRRNRIYKEEQRQIRAAARKAKEEAEGAPAVAAHH

SEQ ID NO: 357 - DNA, 758 bp, Zea mays
  misc_feature: Ceres CLONE ID no. 281975
  misc_feature: Ceres CDNA ID no. 36691505
  CDS (96)..(506): REFERENCED BY SEQ ID NO: 358
actcaccggccaccgcgaatccagagccccacgccccgtccgaaccccagagcagagcaaagcctcctcgacctccctgtccccagccttccccgatggcccgcacgaagcagacggcgcgcaagtcgacgggcggcaaggcgccgcggaagcagctggcgacgaaggcggcgcgcaagtcggcgccggcgacgggcggcgtgaagaagccgcaccgcttccgcccgggcaccgtcgcgctgcgcgagatccgcaagtaccagaagagcacggagctgctgatccgcaagctcccgttccagcgcctggtccgcgagatcgcgcaggacttcaagacggacctccgcttccagtcctccgccgtcgccgcgctgcaggaggccgccgaggcctacctggtgggcctcttcgaggacaccaacctctgtgccatccacgccaagcgcgtcaccatcatgcccaaggacatccagctcgcgcgccgcatccgcggcgagcgcgcctaggcggttcggttgcggcgcctgctcgctactgctggaggtgcttagtttagcccgtcatggttgtgttataggtgtgcgttgttttcaagagtaggcttcttgctatgtgctgatgttaacggaggattatgattagcagttctgaaaaaatgcaatggatgtgatctgctctatctacatgttttctgtctttgtcctggaatcccatggtgtttagcattgatttgacatctgttaaaaaaaaaaaaaaaa

SEQ ID NO: 358 - protein, 136 aa, Zea mays
  misc_feature: Ceres CLONE ID no. 281975
  misc_feature: Ceres CDNA ID no. 36691505
  misc_feature (58)..(134): Pfam Name: Histone PFAM Desc: Core histone H2A/H2B/H3/H4
  misc_feature: Homolog of GI Number: 59799581 NR Desc: Histone H3
  misc_feature: Homolog of GI Number: 1362108 NR Desc: histone H3 homolog
  misc_feature: Homolog of GI Number: 55775689 NR Desc: histone 3
  misc_feature: Homolog of GI Number: 166384 NR Desc: histone H3
  misc_feature: Homolog of GI Number: 122083 NR Desc: Histone H3
  misc_feature: Homolog of GI Number: 74004258 NR Desc:  similar to histone 1
  misc_feature: Homolog of GI Number: 57098927 NR Desc:  similar to histone protein Hist2h3c1
  misc_feature: Homolog of GI Number: 50728592 NR Desc:  similar to histone protein Hist2h3c1
  misc_feature: Homolog of GI Number: 50729226 NR Desc:  similar to histone protein Hist2h3c1
  misc_feature: Homolog of GI Number: 76612873 NR Desc:  similar to H3 histone
MARTKQTARKSTGGKAPRKQLATKAARKSAPATGGVKKPHRFRPGTVALREIRKYQKSTELLIRKLPFQRLVREIAQDFKTDLRFQSSAVAALQEAAEAYLVGLFEDTNLCAIHAKRVTIMPKDIQLARRIRGERA

SEQ ID NO: 359 - DNA, 1016 bp, Zea mays
  misc_feature: Ceres CLONE ID no. 282069
  misc_feature: Ceres CDNA ID no. 36590181
  CDS (3)..(752): REFERENCED BY SEQ ID NO: 360
gccagttcgccacctcctttgctctcgcctcgcgcgcgctcccccccgcgcatcgtgccgttcgccaccgcaccgcgccgatggaggtcgccgccgtgcccagatccgccgcggcctgccgtgcggcgcccctgctcccggccgtccgagccgctgcgtgccacctggccctgccccggcgcgcgttctccgcatccgtcgcggcggcaccggcgccgcgccgcctcgccgctcgtcgcgctgcggatggtgacagcgtggagacggcgccggaggcggtccccattgagaaaaggttccctcccttcccgagcgtcatggacatcaaccagatccgcgagatcctcccccacaggttcccattccttttggttgatagagtaattaaatacaaggctggagaatatgcagtggggatcaagaatgttacaataaatgataatttcttcccaggacattttcctgaacgccccataatgcccggtgtcctcatggtcgaggctatggcccaggttgggggtctggtgatgctgcaacctgaagttggtggatctcgagacaacttctttttcgccgggattgacaaagttaggttcaggaagccagtgattgctggcgatacactgatcatgaggatgacactgactaagtatcagaagaggtttggactcgccaagatggaaggaaaagcttatgttggtggtgacctagtttgtgaaggggagttcctcctagtcagcgcaaccgagtagtgcaaagacacttcatgattctctgggaagaatcattggttggaatcagatctggttggatgtttgaaagaaccgagttttgaactaattatacaatcggcagttgaggcgatcctttacctgttcttaagcatgttgttgagtccatgtggtgatttctatcggttaccaagggcccaaggctgaatccacgccatgttatgttgcaattgaggattacaatatattgggtaattgtttgatggaacaaaaaaaaaaaaaaaa

SEQ ID NO: 360 - protein, 223 aa, Zea mays
  misc_feature: Ceres CLONE ID no. 282069
  misc_feature: Ceres CDNA ID no. 36590181
  misc_feature (89)..(215): Pfam Name: FabA PFAM Desc: FabA
  misc_feature: Homolog of GI Number: 50931539 NR Desc: putative beta
  misc_feature: Homolog of GI Number: 21928166 NR Desc: At2g22230/T26C19.11
  misc_feature: Homolog of GI Number: 21592599 NR Desc: putative beta
  misc_feature: Homolog of GI Number: 72255615 NR Desc: 117M18_14
  misc_feature: Homolog of GI Number: 72384415 NR Desc: 4D11_17
  misc_feature: Homolog of GI Number: 27808536 NR Desc: At5g10160
  misc_feature: Homolog of GI Number: 72384436 NR Desc: 52O08_29
  misc_feature: Homolog of GI Number: 14334124 NR Desc: putative 3
  misc_feature: Homolog of GI Number: 25319393 NR Desc: probable beta
  misc_feature: Homolog of GI Number: 55792520 NR Desc: plastid beta
MEVAAVPRSAAACRAAPLLPAVRAAACHLALPRRAFSASVAAAPAPRRLAARRAADGDSVETAPEAVPIEKRFPPFPSVMDINQIREILPHRFPFLLVDRVIKYKAGEYAVGIKNVTINDNFFPGHFPERPIMPGVLMVEAMAQVGGLVMLQPEVGGSRDNFFFAGIDKVRFRKPVIAGDTLIMRMTLTKYQKRFGLAKMEGKAYVGGDLVCEGEFLLVSATE

SEQ ID NO: 361 - DNA, 782 bp, Zea mays
  misc_feature: Ceres CLONE ID no. 282300
  misc_feature: Ceres CDNA ID no. 25445830
  CDS (119)..(511): REFERENCED BY SEQ ID NO: 362
gtaaaaatttcattgctggctcagcttgcgccataccgcgtcgtgcggagttcttctctccttccgctcgaagagaagagaaaaaagaacggtccgtgctcggctgcgcgcgcgcaagatggctgacccagaattggaagctatcaggaagagaaggatggaagaactaatggcaaaacacggtggcggtggggcaaatcaacaaaatgcaagccaacaaaaagctcaggaagacgcgaaacaggaagctgaggaacgccgacagatgatgcttgctcagatattatcttctgaagccagagaaaggatctcccgcatagctttggtcaaacctgacaaagcaagaggggtggaggatgttctgctgagagctgctcaaactggtggaatatctgaaaaggtgtccgaagaaagacttatctcccttctagagcaaattaacacccacacaagcaagcaaaccaaagttacgattcagaggcgtcgaagtgtccttgacgacgacgattagacgcgacctgcaagctttgcctctgagtgtgtgatgatgggctggtgattgattgattataagcggtaccgaacttgtttgcttaaagacaatgatctgatgcgactgcaaacagccatcaaaacttggttgtatatgatccgatgtcttgttggtgtaccccccgttgaggacagtcgatgtattggctgtgattatccctgaaacactgttcttccttgagttatagtatttattaatgggtgttcgatctccaaaaaaaaaaaaaaaa

SEQ ID NO: 362 - protein, 130 aa, Zea mays
  misc_feature: Ceres CLONE ID no. 282300
  misc_feature: Ceres CDNA ID no. 25445830
  misc_feature (9)..(121): Pfam Name: dsDNA_bind PFAM Desc: Double
  misc_feature: Homolog of GI Number: 57863854 NR Desc: cell death
  misc_feature: Homolog of GI Number: 32966259 NR Desc: apoptosis
  misc_feature: Homolog of GI Number: 30690937 NR Desc: double
  misc_feature: Homolog of GI Number: 50932605 NR Desc: putative apoptosis
  misc_feature: Homolog of GI Number: 41055911 NR Desc: similar to programmed cell death 5
  misc_feature: Homolog of GI Number: 62859829 NR Desc: Pdcd5_predicted
  misc_feature: Homolog of GI Number: 27731143 NR Desc: similar to TF
  misc_feature: Homolog of GI Number: 61871184 NR Desc:  similar to TF
MADPELEAIRKRRMEELMAKHGGGGANQQNASQQKAQEDAKQEAEERRQMMLAQILSSEARERISRIALVKPDKARGVEDVLLRAAQTGGISEKVSEERLISLLEQINTHTSKQTKVTIQRRRSVLDDDD

SEQ ID NO: 363 - DNA, 810 bp, Zea mays
  misc_feature: Ceres CLONE ID no. 282801
  misc_feature: Ceres CDNA ID no. 29191802
  CDS (75)..(683): REFERENCED BY SEQ ID NO: 364
ctggtacgttttgcagctactcgagtcattattgcttcacttcaacaagagcgcgaggaagcagagaagaggggatgatggagaagcgacacggcggcgacggcggagccggagctggaggcttcactgtgctccacctcctcggcgccggtgtcttggcgttcctgctgccgcgggccgccggagcgaccgacgatgccaagtggcacgcccatgcccattccgccgctggcagcaacggcgccgtcaccgtcggccacggtgcccccgcgccccacgtgcacgcggccggtctcccgccgctctcggcaccggcgcccacagcgggagctgacgacctgccgccaccgcccgcgcccgtgccgacgtccgtgtcctcaccgccgagccgcgagcccggcccgcacttcggcttcccgctgcagccgggcccgggcaccgcgtccgctgcggcacctgggctgggacccggcggcgaggggtatccgttcatcggaagcaacccaacggtgccgttgcccaccggcacgaccaacaccgccaccgtgctgccgctgacggacaccggggacgccgccgccgccgccaccaaggtggtggggttggcagcgtcccttggtgctcgcgtctccatgattgggcttgggatttccctcgccaccctgtccctgtccaagatctaattaatccaaaatgtgtactactgagatactgatgctgctgccgccgctttcatctaaaatgtgtactagccttgagtttttgtcatggacagatctagagatttactggctaaaaaaaaaaaaaaaa

SEQ ID NO: 364 - protein, 201 aa, Zea mays
  misc_feature: Ceres CLONE ID no. 282801
  misc_feature: Ceres CDNA ID no. 29191802
  misc_feature: Homolog of GI Number: 34905848 NR Desc: P0483G10.28
  misc_feature: Homolog of GI Number: 58381251 NR Desc: ENSANGP00000017440
  misc_feature: Homolog of GI Number: 18394953 NR Desc: hydroxyproline
  misc_feature: Homolog of GI Number: 25402935 NR Desc: protein T22I11.8
MEKRHGGDGGAGAGGFTVLHLLGAGVLAFLLPRAAGATDDAKWHAHAHSAAGSNGAVTVGHGAPAPHVHAAGLPPLSAPAPTAGADDLPPPPAPVPTSVSSPPSREPGPHFGFPLQPGPGTASAAAPGLGPGGEGYPFIGSNPTVPLPTGTTNTATVLPLTDTGDAAAAATKVVGLAASLGARVSMIGLGISLATLSLSKI

SEQ ID NO: 365 - DNA, 773 bp, Zea mays
  misc_feature: Ceres CLONE ID no. 282811
  misc_feature: Ceres CDNA ID no. 25446292
  CDS (50)..(547): REFERENCED BY SEQ ID NO: 366
agaacacagagtcacttcgccacgaacaaaagcgcaaaggaaaggggatatgtcgaggccgcccaacaggagcgacgcgcacctctccgccgaggacgaggcggcgctggaggccgaggtgcgggagtactacgacgacgcggcgccaaagcgccacaccaagccctcccgcagcgagcactccgccgtgtacgtcgacgcgctcgtcccggacgtcggcggcaactcccacccggagctggacaagttccaagagctggaagcacacaccgagaggttggtgtacgagggcgccaatgtgggagatgagttcgtggagacggagtactacaaggacctcggcggcgtcggcgagcagcaccacacgaccggaacgggtttcatcaagatggacaaagctaaaggcgcccccttcaaactgtctgaagatcccaatgcagaggagcgacatgcttcttgcaggggaaaccctgctaccaacgagtggatcccgtcagctaacacggtgtacccggcgtcagacaagccaagcagaagcgacagctgagggactgtatatctccagccatgggaattcagacgagtgctttccgccattagaataagaaaccacactggttgtccaccgtatctttactgttctgcgtcgagattcttgtgattcttacgtggaacaaattaagcgtgctacgagttagacctctgtgttctggctgtaaatggcaaggaatgaagttctaatcgtggttcagcagtcaaaaaaaaaaaaaaaa

SEQ ID NO: 366 - protein, 165 aa, Zea mays
  misc_feature: Ceres CLONE ID no. 282811
  misc_feature: Ceres CDNA ID no. 25446292
MSRPPNRSDAHLSAEDEAALEAEVREYYDDAAPKRHTKPSRSEHSAVYVDALVPDVGGNSHPELDKFQELEAHTERLVYEGANVGDEFVETEYYKDLGGVGEQHHTTGTGFIKMDKAKGAPFKLSEDPNAEERHASCRGNPATNEWIPSANTVYPASDKPSRSDS

SEQ ID NO: 367 - DNA, 1383 bp, Zea mays
  misc_feature: Ceres CLONE ID no. 283199
  misc_feature: Ceres CDNA ID no. 29191347
  CDS (123)..(1127): REFERENCED BY SEQ ID NO: 368
cccgtcggccggtttcatttacctcctcaatcctggcttgaatctgtgacccgtcgaggcggcgaagggccgaatcgcaccgcactgtagggagaagcttctgcaaggttttggagcgggcgatggaggcggcgagcaacggcgggcttctctaccacgaggtgcaggaagggaagctctgcgccgtgcactgcgtcaacaccgccctgcagggccccttcttctccgagttcgacctcgccgcgctcgccgccgacctcgaccagcgggagcgcctggtgatgctcgagggctcccgaagccccggtgcgggcaacgctgctgcaggggatttcttcgccgagggcgagggatctcacaacgtctcccttggcggcgatttcagcatccaggttttgcagaaggcgctggaggtttgggatctccaagttataccccttgattccccagctgcagggtcgtccctatttgacccagagcaggaggttgctttcatttgccacctgcaggaccactggttctgcatgaggaaggtgaacggggagtggtacaactttaatagtctctacccagctcccgagcacctgtcgaagttttacctctcagctttcattgacaccctgaaggggtcaggctggagtatatttgcagttagaggcaatttccccaaggagtgccctatggcaaccgaaggctctaacggtttcggtcaatggtttacccctgatgacgcccggaggataacagcctcctgtaaccaggtgcaaacaccacctactgagcaggtacaatcccctctacttgctgaacaaccagaagggatgagtgaaatggacatgatcgcagcgcagcaagaagaggctgatctgaatgctgctatagctgccagcttgatggacactggggttccatttgccagctatgccgcagctcgagaacatagcgattcacaagattctcctgctcgtgaagcagctccgagcaaagataataaccaggaagaagctggtaaagctgaaccgagcgcacctccctgtgaggaggacatccaggagttggcttcaggaagcgacaccagaagggaggttccttctgtagaggagaaagggtcagcgaaagaagaataggatggcactttctgatcattctgtaactgagttagacccgtacaaacagaaactgcccaccatttcagtggagttatgccttcttttttttttctctcccccgggtctgaacgccgtatacaaaaagcatagtctgaactgaatgggtttaagaacttttaactggtgtaactgttatgtgcgaagtgcatagagactctaaagtctgagtggcggttttgaaccccttttcccacgcaaaaaaaaaaaaaaaaaa

SEQ ID NO: 368 - protein, 334 aa, Zea mays
  misc_feature: Ceres CLONE ID no. 283199
  misc_feature: Ceres CDNA ID no. 29191347
  misc_feature (10)..(182): Pfam Name: Josephin PFAM Desc: Josephin
  misc_feature: Homolog of GI Number: 34908342 NR Desc: ataxin 3
  misc_feature: Homolog of GI Number: 38604054 NR Desc: At3g54130
  misc_feature: Homolog of GI Number: 76647626 NR Desc:  similar to ataxin 3 isoform 1 isoform 2
  misc_feature: Homolog of GI Number: 29437076 NR Desc: Mjd protein
  misc_feature: Homolog of GI Number: 11067443 NR Desc: rsca3 protein
  misc_feature: Homolog of GI Number: 62858473 NR Desc: LOC549143
  misc_feature: Homolog of GI Number: 33331028 NR Desc: ataxin 3
  misc_feature: Homolog of GI Number: 73962291 NR Desc:  similar to ataxin 3 isoform 1 isoform 1
  misc_feature: Homolog of GI Number: 1082578 NR Desc: Machado
MEAASNGGLLYHEVQEGKLCAVHCVNTALQGPFFSEFDLAALAADLDQRERLVMLEGSRSPGAGNAAAGDFFAEGEGSHNVSLGGDFSIQVLQKALEVWDLQVIPLDSPAAGSSLFDPEQEVAFICHLQDHWFCMRKVNGEWYNFNSLYPAPEHLSKFYLSAFIDTLKGSGWSIFAVRGNFPKECPMATEGSNGFGQWFTPDDARRITASCNQVQTPPTEQVQSPLLAEQPEGMSEMDMIAAQQEEADLNAAIAASLMDTGVPFASYAAAREHSDSQDSPAREAAPSKDNNQEEAGKAEPSAPPCEEDIQELASGSDTRREVPSVEEKGSAKEE

SEQ ID NO: 369 - DNA, 1118 bp, Zea mays
  misc_feature: Ceres CLONE ID no. 283758
  misc_feature: Ceres CDNA ID no. 36705213
  CDS (53)..(838): REFERENCED BY SEQ ID NO: 370
attagggtgaaggagacatcttccaccccactgcatccagcaagtgttctgaatggcttcttgctcctctgtccgcgccgcaccatcgctccccgtctcggcgccgcctagccggcggcgcgcgagtacggccgtatgtcttcagggtgttcgccgcagcagggtcgcgtcctgccgcgtgcggtgtagcgccggggccgggcagggcggggtcaaggtccctgcgaagctggcggagctgtggtcggcggcgaagggcgcgcctcctctggccgtgctcgcgggtgtggcggcggcggtggcgatatacaaggtcgggtccagtctccttgcgccgcgccatcctccgccccgtcggctggaggcccagacggccccgccgcctccagtcccggagccggtgcaggtgggcgagataacggaggaggaactacggcagtacgacgggtccgaccccgagaaaccgctgctgatggccatcaaggggcagatctatgacgtctcagagagcaggatgttctatggacctggcgcagcttatgctctgtttgctggtaaagatgccagtagggcattggctaagatgtcctttgaatcacaggatctgaatggtgatatatctggtctaacgccaatggagctcggcgccttgaatgactgggagtacaagttcgccaccaagtatgcgaaggtaggaaccataagaagagcagcgcccgtcgaagtggtttatggcaacatttcgcctgaaatgagggaagaagttagtgaacctgtggttgaacctgagcttgagcctgagcccgagcctgagccgcatgacgacgatgcaccatgaataggaaaaacacaaagacatcagttcgggtaggaagatgaaatggagggcggcacactgcttataatgttccagaggtagtcagaatttcgaaataatgaaaagcctcataggctcgtacttgttgcgtggatattcagaaagaatagtgtctaaatttaaaccaatagtagatgtgtactctgtagtaggattgaattgttggatatgtacatgtcattcttctattttcgtgaaacgtgtcacttcctgatctctttactgaaaaaaaaaaaaaaaa

SEQ ID NO: 370 - protein, 261 aa, Zea mays
  misc_feature: Ceres CLONE ID no. 283758
  misc_feature: Ceres CDNA ID no. 36705213
  misc_feature (121)..(218): Pfam Name: Cyt PFAM Desc: Cytochrome b5
  misc_feature: Homolog of GI Number: 37535794 NR Desc: putative steroid membrane binding protein
  misc_feature: Homolog of GI Number: 37535798 NR Desc: putative steroid membrane binding protein
  misc_feature: Homolog of GI Number: 50911086 NR Desc: steroid membrane binding protein
  misc_feature: Homolog of GI Number: 21555444 NR Desc: progesterone
  misc_feature: Homolog of GI Number: 24030304 NR Desc: putative progesterone
  misc_feature: Homolog of GI Number: 59800223 NR Desc: Putative steroid binding protein 2
  misc_feature: Homolog of GI Number: 4960154 NR Desc: putative progesterone
  misc_feature: Homolog of GI Number: 78708870 NR Desc: steroid membrane binding protein
  misc_feature: Homolog of GI Number: 50915542 NR Desc: cytochrome b5 domain
  misc_feature: Homolog of GI Number: 30725550 NR Desc: At2g24940
MASCSSVRAAPSLPVSAPPSRRRASTAVCLQGVRRSRVASCRVRCSAGAGQGGVKVPAKLAELWSAAKGAPPLAVLAGVAAAVAIYKVGSSLLAPRHPPPRRLEAQTAPPPPVPEPVQVGEITEEELRQYDGSDPEKPLLMAIKGQIYDVSESRMFYGPGAAYALFAGKDASRALAKMSFESQDLNGDISGLTPMELGALNDWEYKFATKYAKVGTIRRAAPVEVVYGNISPEMREEVSEPVVEPELEPEPEPEPHDDDAP

SEQ ID NO: 371 - DNA, 1125 bp, Zea mays
  misc_feature: Ceres CLONE ID no. 284150
  misc_feature: Ceres CDNA ID no. 40041161
  CDS (117)..(626): REFERENCED BY SEQ ID NO: 372
atttgagttgctcttcctctccccactttctatcacgcaattcctatctcgcagtcgtcgccgctccccggccgggacccagcagagcagagcagagcaggcagtgtcggcgcagcatggggaactgccaggcggcggaggcggcgacggtgctgctccagcacccgggcgggcgggtggagcggctctactggtcaaccagcgccgccgaggtcatgcgcgccaacccaggccactacgtcgcgctcgtcacgctccgcgtcgccgaggagcggcaggacgcccccggcggcgagcggcgcaccgtgcgcctcacgcgcgtcaagctgctcaagcccaaggaggcgctgctcctcggccacgtctaccgcctcatcaccacccaggaggtggcgagggcggtgcgggcgaggaaggaggagaagcagaggaaagcgcagcagctgcttgagtcgaggcagggtgtcgcgaggggcgcggccgagggggaggacgacgacgacgaggcagccctggacgccagccttgatcagttggcgcgtcaggacaacagcagccggagctccagtgcagggcaacggcagtggcggccgtcgctgcagagcatcgaagaggccacgacctgatgtcagctcagtacactcataccacgcaaccgtaggggtagggccgtaatcactgacggctggacctgtatcttctcggcgattcacctggcctcgattagttcatcgcagggggttgctattggcttactcctacatttgcacgctgtgagtttgacaccctgggacggaggactgcttcagatgcagtgcagtatgtagcctctggatccgtgtaaattttcaggccaatgatgcaggcagcagctccgggacgagttcgttagcaggaccaaaacggcggcagcctagctctagcgagagctagacagtccaatatgccagttacatacttacattgcacacgtacatcaaacgaataaatgtcaagctattctaaattttaatactacgtactgcaatggtgatgctcaaaaaaaaaaaaaaaaaaaaaaaaaaaaaaaaaaaaaaaaaaaaaaaaaaaaaaaaaaaaaaaaaaaaaaaaaaaaaaaaaaaaaaa

SEQ ID NO: 372 - protein, 169 aa, Zea mays
  misc_feature: Ceres CLONE ID no. 284150
  misc_feature: Ceres CDNA ID no. 40041161
  misc_feature: Homolog of GI Number: 5091546 NR Desc: T10O24.15
  misc_feature: Homolog of GI Number: 66778899 NR Desc: UvrD/REP helicase
  misc_feature: Homolog of GI Number: 66780099 NR Desc: PE
  misc_feature: Homolog of GI Number: 34911092 NR Desc: OJ1117_G01.13
  misc_feature: Homolog of GI Number: 45709115 NR Desc: LOC407686 protein
  misc_feature: Homolog of GI Number: 76156423 NR Desc: SJCHGC01769 protein
  misc_feature: Homolog of GI Number: 45825067 NR Desc: LP04080p
MGNCQAAEAATVLLQHPGGRVERLYWSTSAAEVMRANPGHYVALVTLRVAEERQDAPGGERRTVRLTRVKLLKPKEALLLGHVYRLITTQEVARAVRARKEEKQRKAQQLLESRQGVARGAAEGEDDDDEAALDASLDQLARQDNSSRSSSAGQRQWRPSLQSIEEATT

SEQ ID NO: 373 - DNA, 425 bp, Zea mays
  misc_feature: Ceres CLONE ID no. 284914
  misc_feature: Ceres CDNA ID no. 25446293
  CDS (3)..(302): REFERENCED BY SEQ ID NO: 374
attattcgctcctcccgcccgccgccgtgatggcggtggcggctacggcggtggcggcggctacggtggcggcggcggctacggtggtggtggcggcggctacggcggtggcaaccgtggcggcggctacggcaactccgacgggaactggaggaactgagcggtggggcccgcgcggccaagttatcctgttcgctaccgtgatgtttaccctagtccagagggtttatcttcgttcgtgtcgtgtttgttgttgcccatctgtgtttttgattgcaaggtcgctctgtgtcagttgttagtgctgtgttcatcctcggtttcagcagacccatgcatcaaacagcatggactgcggatcgatggatgctgttacccccgtcaggctttattctaagttaatcttaagaaaaaaaaaaaaaaaa

SEQ ID NO: 374 - protein, 90 aa, Zea mays
  misc_feature: Ceres CLONE ID no. 284914
  misc_feature: Ceres CDNA ID no. 25446293
  misc_feature: Homolog of GI Number: 22293 NR Desc: glycine
  misc_feature: Homolog of GI Number: 20257675 NR Desc: glycine
  misc_feature: Homolog of GI Number: 20257683 NR Desc: glycine
  misc_feature: Homolog of GI Number: 20257691 NR Desc: glycine
  misc_feature: Homolog of GI Number: 20257693 NR Desc: glycine
  misc_feature: Homolog of GI Number: 20257709 NR Desc: glycine
  misc_feature: Homolog of GI Number: 20257713 NR Desc: glycine
  misc_feature: Homolog of GI Number: 20257705 NR Desc: glycine
  misc_feature: Homolog of GI Number: 21623 NR Desc: glycine
  misc_feature: Homolog of GI Number: 20257669 NR Desc: glycine
MAVAATAVAAATVAAAATVVVAAATAVATVAAATATPTGTGGTERWGPRGQVILFATVMFTLVQRVYLRSCRVCCCPSVFLIARSLCVSC

SEQ ID NO: 375 - DNA, 754 bp, Zea mays
  misc_feature: Ceres CLONE ID no. 285578
  misc_feature: Ceres CDNA ID no. 40350907
  CDS (89)..(430): REFERENCED BY SEQ ID NO: 376
gtaccatccgccgccgcagccatccgcttgttctcttcggttcagttctcgagataaagatgttataggcatttctgcagtttccaggatgaaggtaatagctgcctatctgcttgctgttctgggtggaaacacttccccgactgctgatgatgttaagagcattctggaatcagttggtgctgaagctgatgaagaaaaactagagttcctgctcacagaactcaaagacaaggacataacagaagtgattgcagctggaagggaaaggttatcctctgtgccttcaggtggtggtgcaattgacatgggagctccagcagctgtagctggcggtggcgcagcacctgctgaagaggcaaagaaggaagaaaaggttgaagagaaggaagagtctgatgaagatatgggtttcagcttgttcgattaaaacagcactaccagtttacagtttcttcgcgaatggtctcataatattggccggtttccacaaaataagattgtcaatagctactacgtacttatgctattctgcatgtgatgtacgagtgtgcatcttcaagaatctttaagttgaatggtcggtggtcccataataatattggtaacaatgtaaattgtatgtcctgtacgtactttggtatcgcgacatctcagtgtgcatcttcaaggatcataagttgaatgttatcattaaggtcagtttggttcagataaatataattgctagttatagctaaaaaaaaaaaaaaaa

SEQ ID NO: 376 - protein, 113 aa, Zea mays
  misc_feature: Ceres CLONE ID no. 285578
  misc_feature: Ceres CDNA ID no. 40350907
  misc_feature (17)..(112): Pfam Name: Ribosomal_60s PFAM Desc: 60s Acidic ribosomal protein
MKVIAAYLLAVLGGNTSPTADDVKSILESVGAEADEEKLEFLLTELKDKDITEVIAAGRERLSSVPSGGGAIDMGAPAAVAGGGAAPAEEAKKEEKVEEKEESDEDMGFSLFD

SEQ ID NO: 377 - DNA, 476 bp, Zea mays
  misc_feature: Ceres CLONE ID no. 285992
  misc_feature: Ceres CDNA ID no. 36703156
  CDS (73)..(288): REFERENCED BY SEQ ID NO: 378
aaatcactcccaccgtctccacagcaaccagcacacatttccctttggcggatcgaaggaaggaaggaggagatgggtggcggcatggaggtgcacaaaaaccggtggatcgaagagtggaacgccggccgcgagaacctcgagttcaatttccgctggacccgccgcagcctcgccgtcgtcggcctcttcggcctcgctgtccccatcctcgtctacaagggcatcgtccgcgaattccatatgcaggacgaggatgcaggccggccatacaggaagttcctgtaagcggcgtccagggccgcaggagacgtcgatccctcgaccggggctgcgaggaggggagtttccattcagtttgtgtcggtattgttttagtctgaatctgatggagcagtttggaatgctgaactattgtgcctgatccaaatgaataaggtgtaatgactcgtctttccaaaaaaaaaaaaaaaaaa

SEQ ID NO: 378 - protein, 71 aa, Zea mays; identical to SEQ ID NO: 296
  misc_feature: Ceres CLONE ID no. 285992
  misc_feature: Ceres CDNA ID no. 36703156
  misc_feature: Homolog of GI Number: 34910868 NR Desc: P0435H01.30
  misc_feature: Homolog of GI Number: 34909562 NR Desc: P0046E05.13

SEQ ID NO: 379 - DNA, 638 bp, Zea mays
  misc_feature: Ceres CLONE ID no. 285995
  misc_feature: Ceres CDNA ID no. 25447089
  CDS (242)..(535): REFERENCED BY SEQ ID NO: 380
ctaatcgaaaaaatctcgttgcccgttgtgctctctctctctattcgttccccgcctcaccccgagccagccgtctcgctagggtttcgccgccgccgccgccgccgccgccgctatgcctcgccgcagctcaggaaggtctgccccacgcccagctacccgtgctgctccagtgaggaacccgccacagccagcacgccaggctcctcctccagctcctgttcgagatggtggtggctccatgtttggaggaattgggtccaccattgctcaaggtatggcgtttggcacgggtagtgccatggcacacagggctgttgatgctgtattaggtccccggaccattcagcatgagactgttgcctcagaagctgctgctgctgcccctgcccctccagtgatgaatgctgacgcttgcagcatccattctaaggctttccaagattgtctcaacaactatggcagcgagatcagcaagtgccagttctacctagacatgctgaacgagtgccgccgtggtggtgtgtctgcctaagctgcctctggggttattcgtggattttctttcggtgatgctatctcattaataagataccgtgaaacttcagttttttttaaaaacaaaaaaaaaaaaaaaa

SEQ ID NO: 380 - protein, 139 aa, Zea mays
  misc_feature: Ceres CLONE ID no. 285995
  misc_feature: Ceres CDNA ID no. 25447089
  misc_feature (94)..(135): Pfam Name: CHCH PFAM Desc: CHCH domain
  misc_feature: Homolog of GI Number: 73995876 NR Desc:  similar to chromosome 22 open reading frame 16
  misc_feature: Homolog of GI Number: 52139112 NR Desc: Similar to Nur77 downstream protein 2
  misc_feature: Homolog of GI Number: 54643394 NR Desc: GA18592
MPRRSSGRSAPRPATRAAPVRNPPQPARQAPPPAPVRDGGGSMFGGIGSTIAQGMAFGTGSAMAHRAVDAVLGPRTIQHETVASEAAAAAPAPPVMNADACSIHSKAFQDCLNNYGSEISKCQFYLDMLNECRRGGVSA

SEQ ID NO: 381 - DNA, 996 bp, Zea mays
  misc_feature: Ceres CLONE ID no. 287500
  misc_feature: Ceres CDNA ID no. 40350904
  CDS (73)..(753): REFERENCED BY SEQ ID NO: 382
agcatcaccattcttcatccctcgttgtcatctcacagcttgggctagagaccaaacaaaccaaagggaagcatggcagcaggcctgcaagtgtttggccagccggcgtctactgatgttgccagggttctgacgtgcctgtttgagaagaaattggagtttgagcttgtccgcattgatacatttaagacacatcacaggcttcctgagttcatcaggctgcgggatccgaatgggcaagtgaccttcaagcatggcgacaaaacccttgttgattcaagggacatatgccggtacgtttgcaaccagtttccaaattacggaaacaagagcctctatggatctggtgctctagaacgggcatcgatagaacagtggctccaggcagaagcccagaactttggccctcccagctctgcgcttgtgtttcagctggcgttcgttccgcacctcagtcacctgggcgttcgtcaggaccctgctgttattgctgaaaacgaggacaaactgaagcaggttcttgatgtttacgacgaaatactctccaagaacgagtacctggctggtgatgagttcaccctggccgacctgtctcaccttccgaactcgcactacatcgtaaacaccgagagaggaaggaagctcttcaccaacaagaagaatgtggcgaaatggtatgacaggctctcgaagcgcgagacatgggtgcaggtcgtcaagatgcagaaggaacatcctggtgcgttcaagtaatggcttgtcttggggagttgtgagtatggcttcatcgtccgtgttggtctggctcatcagtgttaaaagcccatcagtgtcgtcaaccagaataatgtgaagcccaactgtgatgtatggtcttttttttttttaaaagcgcatttgtaaactattggctatttcttgcacgtgccaattcatcgtcacatataaaataaactgtatctttgaccttgaaaaaaaaaaaaaaaaaaaaaaaaa

SEQ ID NO: 382 - protein, 226 aa, Zea mays
  misc_feature: Ceres CLONE ID no. 287500
  misc_feature: Ceres CDNA ID no. 40350904
  misc_feature (5)..(78): Pfam Name: GST_N PFAM Desc: Glutathione S
  misc_feature (97)..(209): Pfam Name: GST_C PFAM Desc: Glutathione S
MAAGLQVFGQPASTDVARVLTCLFEKKLEFELVRIDTFKTHHRLPEFIRLRDPNGQVTFKHGDKTLVDSRDICRYVCNQFPNYGNKSLYGSGALERASIEQWLQAEAQNFGPPSSALVFQLAFVPHLSHLGVRQDPAVIAENEDKLKQVLDVYDEILSKNEYLAGDEFTLADLSHLPNSHYIVNTERGRKLFTNKKNVAKWYDRLSKRETWVQVVKMQKEHPGAFK

SEQ ID NO: 383 - DNA, 817 bp, Zea mays
  misc_feature: Ceres CLONE ID no. 287903
  misc_feature: Ceres CDNA ID no. 29191478
  CDS (144)..(602): REFERENCED BY SEQ ID NO: 384
accggcgaggagacgaaaggtaagccacccactgccgccgctctcctttcaccccatttcgtctggccgtctaatccgttggccggcccgttctgttcgtggaagcgcttggatctgctctgagggagttttgagaagcataaatggctcctaaagccgctcctgtcaagaagggtgatgccaaggcccaggccttgaaggtggccaaggctgtgaagtctggggcaggcaagaagaagaccaagaagattcgcacatctgtaacatttcaccagcccaagaccctgaagaaggccagggacccgaagtacccaagaatcagcactactggaagaaacaagcttgatcagtaccaaatcctcaagtaccccctcaccacagaatctgcaatgaagaagattgaagataacaacactctggtctttattgttgacctcaaggcagacaagaaaaagatcaaggctgcagtcaagaagatgtatgacattcaagcaaagaaggtcaacaccctgatcaggcctgatgggaagaagaaggcttatgtgaaactgacacccgactacgatgcccttgatgtggccaacaaaattggcatcatctaagttaataggcaactggattcgacatctatgtcctactagttctgagcataccaacagatttttctatgttactagtaattttgtttgtcatattgggttgtttttttgcaactaagtcttgttcgcagtcgcagactacatatgcctgtattgagttcctggttgccaaattaaccatcttgaactggcattattccataaaaaaaaaaaaaaaa

SEQ ID NO: 384 - protein, 152 aa, Zea mays
  misc_feature: Ceres CLONE ID no. 287903
  misc_feature: Ceres CDNA ID no. 29191478
  misc_feature (11)..(64): Pfam Name: Ribosomal_L23eN PFAM Desc: Ribosomal protein L23
  misc_feature (70)..(149): Pfam Name: Ribosomal_L23 PFAM Desc: Ribosomal protein L23
  misc_feature: Homolog of GI Number: 70663909 NR Desc: OSJNBa0029H02.21
  misc_feature: Homolog of GI Number: 50926169 NR Desc: OSJNBa0029H02.16
  misc_feature: Homolog of GI Number: 34895146 NR Desc: putative 60S ribosomal protein L23A
  misc_feature: Homolog of GI Number: 76573339 NR Desc: ribosomal protein L25
  misc_feature: Homolog of GI Number: 1084424 NR Desc: ribosomal protein L23a
  misc_feature: Homolog of GI Number: 2641201 NR Desc: ribosomal protein L23a
  misc_feature: Homolog of GI Number: 7340791 NR Desc: ribosomal protein L23
  misc_feature: Homolog of GI Number: 13560777 NR Desc: ribosome protein L23a
  misc_feature: Homolog of GI Number: 7711063 NR Desc: ribosomal protein L23
  misc_feature: Useful for making bigger plants
  misc_feature: Useful for making plants with increased biomass and foliage
  misc_feature: Useful for sterility
MAPKAAPVKKGDAKAQALKVAKAVKSGAGKKKTKKIRTSVTFHQPKTLKKARDPKYPRISTTGRNKLDQYQILKYPLTTESAMKKIEDNNTLVFIVDLKADKKKIKAAVKKMYDIQAKKVNTLIRPDGKKKAYVKLTPDYDALDVANKIGII

SEQ ID NO: 385 - DNA, 878 bp, Zea mays
  misc_feature: Ceres CLONE ID no. 288039
  misc_feature: Ceres CDNA ID no. 40350908
  CDS (87)..(656): REFERENCED BY SEQ ID NO: 386
ctcgagcctgacccttacgccttcgctcgcgccgccgccgccgccgccgctacgccccgcacctcgcttcatttcgtgtcgccaagatgacgaagcgcactaagaaggcaggaattgttggcaaatatggaaccaggtatggtgctagcttgcgtaagcaaatcaagaagatggcgggtgctgtgcgcactggaggaaagggcagcatgcgcaggaagaagaaggcagtccacaagaccgcaaccaccgatgacaagcggcttcagagcacgttgaaaagaattggagtgaacactattcctggtattgaggaggtcaacatcttcaaggatgatattgttatccaattccagaaccctaaagtgcaagcatccattcctgcaaatacatgggtagtcagtggagtaccccagacaaaaagtctacaagaccttctgccaacaattatcaaccaactgggccctgataacctggagaacctcaagaggcttgctgagcatttccagaagcaggtacctggtgccgaagccagcgccagtgcagctgcccaggatgaggacgatgtccctgagcttgtcccaggagagacatttgaggaggctgccgaggtgaaggaggtgcctgaagcggaaccggaagagaagaaagactcgtaattttgttgcgtgtcatatccattgtttgtgaagggtcgttgtgtgtttaccatacaccatgggagagacctggtcatctatgaacccctgatgttcctcattcgtttacatgtgctccagtttttcagtttcttatttacctgggttttggtccaaacctgacaagtcagcatttggtttggcgtcaattgtgcttcaggttccacaaaaaaaaaaaaaaaa

SEQ ID NO: 386 - protein, 161 aa, Zea mays
  misc_feature: Ceres CLONE ID no. 288039
  misc_feature: Ceres CDNA ID no. 40350908
  misc_feature: The plant is abnormally large.
  misc_feature: Useful for making plants with modulated growth and phenotype characteristics
  misc_feature: The sequence is a functional homolog of  SEQ ID NO 1614 in the  11/479,226 US patent application
  misc_feature: The sequence is a functional homolog of  SEQ ID NO 1617 in the  11/479,226 US patent application
  misc_feature: The sequence is a functional homolog of  SEQ ID NO 784 in the  10/412,699 US patent application
  misc_feature: The sequence is a functional homolog of  SEQ ID NO 786 in the  10/412,699 US patent application
  misc_feature: Useful for making plants with modulated biomass
  misc_feature (27)..(84): Pfam Name: NAC PFAM Desc: NAC domain
MAGAVRTGGKGSMRRKKKAVHKTATTDDKRLQSTLKRIGVNTIPGIEEVNIFKDDIVIQFQNPKVQASIPANTWVVSGVPQTKSLQDLLPTIINQLGPDNLENLKRLAEHFQKQVPGAEASASAAAQDEDDVPELVPGETFEEAAEVKEVPEAEPEEKKDS

SEQ ID NO: 387 - DNA, 1223 bp, Zea mays
  misc_feature: Ceres CLONE ID no. 288828
  misc_feature: Ceres CDNA ID no. 40350905
  CDS (306)..(809): REFERENCED BY SEQ ID NO: 388
gtcactcgagctcgagcgatcccactcccgatcagcagctgatcgctcactcttgcagctcgatcattctttagctgctctagctctagccctagctagtagctagccactcggtcgtgtagtcatcagccttctgatcgtcacccatggccactgccgaggtacgtgtacgtagtgctcgatccatcgtagtagtctttggttcatgcatatgcacggatcggatcgtttggataatcccgaataccagctaataatgatgtttctctatctcatccatccgttcattcgatctcttctctttgatgagacagcctcctgcgttaataaccacggaggatgctaagattaatttgtactcgcgccgtgcgtgcacgtgtgcgcaggtccagaccccgaccgtcgtggcgaccgaggaagcgccggtggtggagaccccggctccggccgccgccgtgcccgaggaggctgctcccgccgccgaggccaaggtggaggagccagctgccccggcggagaccgagccagctgccgccgctgagcccgaggcggcccccgtggcggcggaggaagagacgccaaaggaggaagagacggcaaaggaggcggagccggagccggagccggcggcggctgaagaggtgaaggaggaagcggcagcgcccgctgccgagacagaagcagaaccggcagccgctgagcccgaggctgctgctgctgctgaggagcccgcggcggctgagccggccgctgaggagcccgagaaggccgagccggccgctgaggtggccgagaaggccagcgagtgaggccgtgcgccgtacgcgcactgcggcggcggacagcgggtcgggagatcgatgtctcagcgtgcgcgcgtggcgtgccagtcgcgtcgcgcgcgctggcgcctactgttcagtacaacgcgaacgcgacggtttctctccatctctctgtgtgtgacagtgtgtgtgtcgtagctatagcagtgcccggtgcggactgcgagtgacatgggctaaataaagtgtgcgtcgtctggtctggtggtggtagtggggcgcggtgccccatgtgtgccgctgcagcttgtgtctctgttttgcttcatgttctctgtctatctactctcatgtatggcagtttgggtacgggtatatcaagcatgttcagtcttcttatggatatgatcttctttataaacaaaaaaaaaaaaaaaa

SEQ ID NO: 388 - protein, 167 aa, Zea mays
  misc_feature: Ceres CLONE ID no. 288828
  misc_feature: Ceres CDNA ID no. 40350905
MRQPPALITTEDAKINLYSRRACTCAQVQTPTVVATEEAPVVETPAPAAAVPEEAAPAAEAKVEEPAAPAETEPAAAAEPEAAPVAAEEETPKEEETAKEAEPEPEPAAAEEVKEEAAAPAAETEAEPAAAEPEAAAAAEEPAAAEPAAEEPEKAEPAAEVAEKASE

SEQ ID NO: 389 - DNA, 824 bp, Zea mays
  misc_feature: Ceres CLONE ID no. 288901
  misc_feature: Ceres CDNA ID no. 29191851
  CDS (351)..(620): REFERENCED BY SEQ ID NO: 390
acctctttctcgcctctttccccattcccaatctcgtcttgtgtcgttcggagcgggcagcagcacacagccccatcccaatcctagtcgatcttcttcccctcctcaagctggttccttcgtccacacgaccgcgcgctcggaaaactccgcggagggcgaaggaggcgaaccaagggcgacgtatccgccgccggagaaggtagccctcgatccgccgtctcccacgattcgtttgtcttgcgacagctgggcgaccgtcgtcgccgccgcccttctccaggtgcccaggtcttcgccggtccctttgccgccgacgagcaccagccaggaagaaaagaagctgaaccatggggaagagaaagtcagctgctaagccacctcctaagaagcggatggacaagcttgacactgtcttttcctgcccattctgcaaccacgggagtagtgttgagtgccgaattgacatgaagaatctgattggcgaagcatcttgtagaatctgtcaggaaaacttcagcacaactgttaatgcactcactgagcctattgatatatatagtgaatggattgatgagtgtgagcgtgtcaacactgttgaaggcgacgatgatgcgtgagcgtgagcttgccccatgcgatgaaactgttacctacaatcgtaatgtaatgtgctggtattctcgaatgccatagcccatagtcagccatggcttggaataacgtagtggctgaccgatatgccagtaggcaccttatctagtacttacagaactacaaaaagtttgtactatacatatatgggcaaaaaaaaaaaaaaaaaa

SEQ ID NO: 390 - protein, 89 aa, Zea mays
  misc_feature: Ceres CLONE ID no. 288901
  misc_feature: Ceres CDNA ID no. 29191851
  misc_feature (8)..(68): Pfam Name: DUF701 PFAM Desc: Putative zinc binding domain
  misc_feature: Homolog of GI Number: 51771080 NR Desc: similar to RIKEN cDNA 1110011K10
  misc_feature: Homolog of GI Number: 51771364 NR Desc: similar to RIKEN cDNA 1110011K10
  misc_feature: Homolog of GI Number: 51771082 NR Desc: similar to RIKEN cDNA 1110011K10
  misc_feature: Homolog of GI Number: 45190840 NR Desc: AER237Wp
  misc_feature: Homolog of GI Number: 51771084 NR Desc: similar to RIKEN cDNA 1110011K10
  misc_feature: Homolog of GI Number: 62653408 NR Desc:  similar to RIKEN cDNA 1110011K10
MGKRKSAAKPPPKKRMDKLDTVFSCPFCNHGSSVECRIDMKNLIGEASCRICQENFSTTVNALTEPIDIYSEWIDECERVNTVEGDDDA

SEQ ID NO: 391 - DNA, 550 bp, Zea mays
  misc_feature: Ceres CLONE ID no. 289079
  misc_feature: Ceres CDNA ID no. 25446295
  CDS (48)..(284): REFERENCED BY SEQ ID NO: 392
gtattccagtttcttccgtgagttttgtgggatcgcgaggaagaaggatgtcgtgctgcggaggcaactgcgggtgcggcgccggctgcaagtgcggcagcggctgcggagggtgcaagatgtacccggacatggctgagcaggtgaccaccaccaccaccacccagactctcatcatgggtgttgcaccatccaagggcggggtcgaggcggccgccggagctgagaacggcgggtgcaagtgcggcgccaactgcacctgcgacccctgcacctgcaagtgagactacgacggtggcggcgatgacgctgcagggtctgcaggccctgatggggtcggaaggactctttatctctctagctaattaataagctctagctagtatataatattctagcagtgtcgtttgctgtgttttgttcgagtcagactgtgttgtgttgtgttgtgctgtgtgggccgagtgtgcagtacagcatcgggccatgcccctgttcgatctgtctgcgactttaatttgtttgtgctgtgtcaaaaaaaaaaaaaaaa

SEQ ID NO: 392 - protein, 78 aa, Zea mays; identical to SEQ ID NO: 138
  misc_feature: Ceres CLONE ID no. 289079
  misc_feature: Ceres CDNA ID no. 25446295
  misc_feature (1)..(77): Pfam Name: Metallothio_2 PFAM Desc: Metallothionein
  misc_feature: Homolog of GI Number: 55416162 NR Desc: metallothionein
  misc_feature: Homolog of GI Number: 46358913 NR Desc: metallothionein
  misc_feature: Homolog of GI Number: 56549629 NR Desc: metallothionein
  misc_feature: Homolog of GI Number: 32400768 NR Desc: metallothionein
  misc_feature: Homolog of GI Number: 13491970 NR Desc: metallothionein
  misc_feature: Homolog of GI Number: 3901014 NR Desc: metallothionein
  misc_feature: Homolog of GI Number: 23954357 NR Desc: metallothioneine type2
  misc_feature: Homolog of GI Number: 46850185 NR Desc: metallothionein 2a
  misc_feature: Homolog of GI Number: 34895842 NR Desc: putative metallothionein
  misc_feature: Homolog of GI Number: 15825501 NR Desc: type 2 metallothionein

SEQ ID NO: 393 - DNA, 734 bp, Zea mays
  misc_feature: Ceres CLONE ID no. 289527
  misc_feature: Ceres CDNA ID no. 40041162
  CDS (137)..(451): REFERENCED BY SEQ ID NO: 394
gagctgagtccccttcctttctcccgtcgcctccgcctccgcctccgccttcagtttagcctccaagcaggggcgccgcgcggggtattctgtccgtcgttgagggtagagagtcacttgcaccgggggagcggagatgaagccggttgtggggatcgtggtgtcgaacaagatccagaagtcggtggtggttgcagtggaccgcctcttccacaacaaggtatacaaccgctacgtcaagcgcacctccaagttcatagcacacgacgatgacgactcctgcaacattggcgaccgggttaggctggatccttctaggcccttgagcagacataagcactgggttgttgctgaaattctccgcagagctaaggtgtacgttccaccagctgcaacagcgtccagtgaacgtggtagcaaatctcaacaagctggtgttgctaccaaatgatccatctgaagttactcagaacaagatgcagtcacggcttgtttttctttcgctgtatgtttgtttccttgtggaatgcggttgccatgtttagccatggaagaaaaatagcaagcagccagcatctatgcttaattactgttgttcttctgtggtgtccttcgtttaacggtactagccattaaggatgtagttaccagattcaacaagaccaatggattcatattgtattggttcacttccgataaaaaaaaaaaaaaaaaaaaaaaaaaaaaaaaaaaaa

SEQ ID NO: 394 - protein, 104 aa, Zea mays
  misc_feature: Ceres CLONE ID no. 289527
  misc_feature: Ceres CDNA ID no. 40041162
  misc_feature (6)..(74): Pfam Name: Ribosomal_S17 PFAM Desc: Ribosomal protein S17
  misc_feature: Homolog of GI Number: 50944825 NR Desc: putative ribosomal protein S17
  misc_feature: Homolog of GI Number: 28416831 NR Desc: At3g18880
  misc_feature: Homolog of GI Number: 1620986 NR Desc: 40S ribosomal protein S17
  misc_feature: Homolog of GI Number: 33866608 NR Desc: 30S ribosomal protein S17
  misc_feature: Homolog of GI Number: 78185531 NR Desc: 30S ribosomal protein S17
  misc_feature: Homolog of GI Number: 78211919 NR Desc: 30S ribosomal protein S17
  misc_feature: Homolog of GI Number: 76261696 NR Desc: Ribosomal protein S17
  misc_feature: Homolog of GI Number: 15644239 NR Desc: ribosomal protein S17
  misc_feature: Homolog of GI Number: 437932 NR Desc: ribosomal protein S17
  misc_feature: Homolog of GI Number: 20808651 NR Desc: Ribosomal protein S17
MKPVVGIVVSNKIQKSVVVAVDRLFHNKVYNRYVKRTSKFIAHDDDDSCNIGDRVRLDPSRPLSRHKHWVVAEILRRAKVYVPPAATASSERGSKSQQAGVATK

SEQ ID NO: 395 - DNA, 813 bp, Zea mays
  misc_feature: Ceres CLONE ID no. 289826
  misc_feature: Ceres CDNA ID no. 35383160
  CDS (83)..(439): REFERENCED BY SEQ ID NO: 396
atcacccaaaacacaagtagggttaggaaggcggcggccagcggcgagagcgcgagaggaagagcaggaggaggggtcggccatgacggggaaggcgaagccgaagaagcacacggcgaaggagatcgccgcgaagatcgacgcggcgacgacgaaccggggcggcggcaaggccgggcaggcggaccggctggggcaggacaagggcgggcatgcgaagctggcgtgcccgctctgccgcaccccggcgcccgacatcaagtccatgcagatccaccacgaggcgcgccaccccaagctccccttcgagccggagaagctcctcaacctgcactcctccgcccccgctgctgccgccgccgccgccgctgccgccgccgctgccgaggccaccacctccaagcccaagcccggcgtccgcggcagcctcaagaagtaagcttgctgggcttggttggctcgcccgcctgcatggggcgcaattcccttcggtttcaatcccatccgccgacccgatctataatcaatcaaaccgccgccctccggcctggcggctgccgcagtcggcctgcggtgtactgttagtctgctgctgatttccgttgttatactgctggtacatgtgtcgtgtgatagatgtgtcaactatatatcaatctcgtcgccggcagctctggcatgtttgagtatgtgttgcttctctgtggtgccggcgacgatggctgctagtactgttaatgtgatcgggtctccttgaacaatggcataaatatgttgcttgtttactttttcctcaaaaaaaaaaaaaaaaaa

SEQ ID NO: 396 - protein, 118 aa, Zea mays
  misc_feature: Ceres CLONE ID no. 289826
  misc_feature: Ceres CDNA ID no. 35383160
  misc_feature: Homolog of GI Number: 53792608 NR Desc: zinc finger protein
  misc_feature: Homolog of GI Number: 62642082 NR Desc: C2H2 type zinc finger family protein
  misc_feature: Homolog of GI Number: 33150824 NR Desc: Ser/Arg
  misc_feature: Homolog of GI Number: 55586489 NR Desc:  similar to Ser/Arg
  misc_feature: Homolog of GI Number: 23274133 NR Desc: Serine/arginine repetitive matrix 1
  misc_feature: Homolog of GI Number: 42542379 NR Desc: serine/arginine repetitive matrix 1
  misc_feature: Homolog of GI Number: 67987177 NR Desc: 4Fe
  misc_feature: Homolog of GI Number: 72086012 NR Desc:  similar to Ser/Arg
MTGKAKPKKHTAKEIAAKIDAATTNRGGGKAGQADRLGQDKGGHAKLACPLCRTPAPDIKSMQIHHEARHPKLPFEPEKLLNLHSSAPAAAAAAAAAAAAAEATTSKPKPGVRGSLKK

SEQ ID NO: 397 - DNA, 1146 bp, Zea mays
  misc_feature: Ceres CLONE ID no. 289984
  misc_feature: Ceres CDNA ID no. 25446751
  CDS (75)..(932): REFERENCED BY SEQ ID NO: 398
gtctctcttcaccatttggcttcgtctctcttcaccgttggtgccaagttcacaagtatcagatctggtgataaatgaccgggaaaaagaccacggcctcctctgccggccgcactcgaaagaaggccaaggtggtgttggaggatgaggaagaggcagggttggaagatgaggaagaggcgactgtgacactatccgtggagaaggacgcactggagtgtgacatctgctgcctacccttccagtccgaagtttttatgtgcaagaacggacattctgtatgtgcaaaatgctgcatccgcacgaacggtaagtgctggacctgctccgagcgcattggcgacatacgttgccgtccgctcgagaagctcctggcggcggcgaccacctcctgcatgttcaagagcaacggctgctacgacgtcatcagctacctggagaaggtgacccacgaggagacatgccagcgcgcgccgtacaagtgccccgtccacggctgcgcctatagcggcctgcggctcggctaccacgtcgcacaggaccacggccacgacgacgacggcctcgcctccgtcgtctttatctacggcaaggcggtggcgaccgtgcgcaaggacgagccgttccgcgtcctgctgcagcgcaacacggagcgcgtgttcctgctgctcaacggccacgatttgctacaggggcgctcgctgtccctgctctgccttggcccgcgcttccaggatggcgtggaggtggagctgaagtataagatggaggtgagcggcggtgcgccgggagcgctcacgctgtcggcgtctggcaccataccgttcgcccggcggctcgatgggttccaggccaaagggtttctcttcgtgccggatgcatactggggctccgccggctcgatttccgtcaccgtcagaatttacgtctgacgtcgcctcgtgctagctggtgtggtgtggataggttgattcctactggtcaaccgttcgttcgtctcgttggtacttaccctggttcagtggttgtttatgcactctacgtgctgatgctagtacttttgttaatcgcaacaacgtatgctagtacttttgttaatcgcaacaacgtatttcctgtcgttttacattcaaaaaaaaaaaaaaa

SEQ ID NO: 398 - protein, 285 aa, Zea mays
  misc_feature: Ceres CLONE ID no. 289984
  misc_feature: Ceres CDNA ID no. 25446751
  misc_feature (91)..(280): Pfam Name: Sina PFAM Desc: Seven in absentia protein family
  misc_feature: Homolog of GI Number: 55769969 NR Desc: seven in absentia protein
  misc_feature: Homolog of GI Number: 34895428 NR Desc: P0445D12.24
  misc_feature: Homolog of GI Number: 34895424 NR Desc: P0445D12.22
  misc_feature: Homolog of GI Number: 54291093 NR Desc: SIAH1 protein
  misc_feature: Homolog of GI Number: 7657876 NR Desc: SIAH1 protein
  misc_feature: Homolog of GI Number: 15864565 NR Desc: SIAH1 protein
  misc_feature: Homolog of GI Number: 4584257 NR Desc: SINA2p
  misc_feature: Homolog of GI Number: 51979124 NR Desc: PREDICTED P0576F08.10 gene product
  misc_feature: Homolog of GI Number: 6850870 NR Desc: seven in absentia
  misc_feature: Homolog of GI Number: 63095207 NR Desc: SINA
MTGKKTTASSAGRTRKKAKVVLEDEEEAGLEDEEEATVTLSVEKDALECDICCLPFQSEVFMCKNGHSVCAKCCIRTNGKCWTCSERIGDIRCRPLEKLLAAATTSCMFKSNGCYDVISYLEKVTHEETCQRAPYKCPVHGCAYSGLRLGYHVAQDHGHDDDGLASVVFIYGKAVATVRKDEPFRVLLQRNTERVFLLLNGHDLLQGRSLSLLCLGPRFQDGVEVELKYKMEVSGGAPGALTLSASGTIPFARRLDGFQAKGFLFVPDAYWGSAGSISVTVRIYV

SEQ ID NO: 399 - DNA, 525 bp, Zea mays
  misc_feature: Ceres CLONE ID no. 290235
  misc_feature: Ceres CDNA ID no. 36707293
  CDS (69)..(368): REFERENCED BY SEQ ID NO: 400
acgccgccactcacgaccacgccgcgcctccgcctggaaccctttagccgagcggagcaaggaaagaaatggggaagggtacgggcagcttcggcaagcgccggaacaagacgcacacgctctgcatccgctgcggccgccgcagcttccacctccagaagagcacctgctcctcctgcggctaccccgccgcccgcatccgcaagtataactggagtgtgaaggccatcaggcgtaagacaactggtaccggaaggatgaggtacatgcgacacgtgcctcgccgtttcaagagcaacttcagagaagggactgaggctgccccaaagaagggtgttgctgggagctttttgctatgtctagtttaatttttatctgcaaggatatagagctaccttcccaagactttatcatcatgttttgttgcttttggttcttgaacagcgtttgcagcttagctgtaatgctttaattcgactttctatatattgttgaaccgtgttgtcaacaaaaaaaaaaaaaaaa

SEQ ID NO: 400 - protein, 99 aa, Zea mays
  misc_feature: Ceres CLONE ID no. 290235
  misc_feature: Ceres CDNA ID no. 36707293
  misc_feature (2)..(55): Pfam Name: Ribosomal_L37e PFAM Desc: Ribosomal protein L37e
  misc_feature: Homolog of GI Number: 50915832 NR Desc: putative ribosomal protein L37
  misc_feature: Homolog of GI Number: 50904689 NR Desc: putative 60S ribosomal protein L37
  misc_feature: Homolog of GI Number: 44662866 NR Desc: ribosomal protein L37
  misc_feature: Homolog of GI Number: 21280805 NR Desc: putative 60S ribosomal protein L37
  misc_feature: Homolog of GI Number: 21553481 NR Desc: putative ribosomal protein
  misc_feature: Homolog of GI Number: 21537060 NR Desc: putative 60s ribosomal protein L37
  misc_feature: Homolog of GI Number: 24642107 NR Desc: CG9091
  misc_feature: Homolog of GI Number: 45934571 NR Desc: 60S ribosomal protein L37
  misc_feature: Homolog of GI Number: 38048279 NR Desc: similar to Drosophila melanogaster CG9091
  misc_feature: Homolog of GI Number: 72538603 NR Desc: GA21535
MGKGTGSFGKRRNKTHTLCIRCGRRSFHLQKSTCSSCGYPAARIRKYNWSVKAIRRKTTGTGRMRYMRHVPRRFKSNFREGTEAAPKKGVAGSFLLCLV

SEQ ID NO: 401 - DNA, 958 bp, Zea mays
  misc_feature: Ceres CLONE ID no. 290258
  misc_feature: Ceres CDNA ID no. 40041165
  CDS (1)..(492): REFERENCED BY SEQ ID NO: 402
atgctagctgcaacaatgtactatcacaataagacgaagatgccaccaccaccttgctcttgcttctctgctgtctctgttcccttctcctccttcaaaaccataacaatgctcctcctcctcctcctcatccttcagcaactgtctgcggctgcggttgcagggatggccacaggtgaactacaccctctgcgtctcgtctctgtcgtcggaccccgagagcaggcaggcggacctccacggtctcgccatcatctcggccaagctgctgaggtcaggcgcggtggccatggaggccaagatggcggacctcagcaggaaggagcgcccatggtccccccggaggtcctgcctggacgcctgcgtcggggtgtaccgcaactccctctacgacctcggcagctccatcgtagccatccaggagaggaggtacgcggacgccaagacgtccatgagcgccgcggtggatgcgcccgtcacctgcgaggatgagttcaaggagcagggcttggagccacccatgagagcggagaccaaacgcctgtttcaacaggcggtcatctccctcgcaatcatctccctgctatgactatgggtgtgtttggtttggcttttggctttggcttttgccccctaaaagccaaaagccaaccaaagggctggatccaggaagcagctttttctaaaagccgactttctcgtagtgcaaaactgaaagcacccctagacctgcttttagtggcttttggatggtactgtgaaaacatatatcgaagaacttttaacgacttttagtggtttccaccaaacgatttttagcttttaaacagcacacagcctacagcagctttttccacagctcacagcccacagcaactttttccacagccacagcccaaccaaacagaccctatgactatatatattattgcttcttcacaaaaaaaaaaaaaaaaaa

SEQ ID NO: 402 - protein, 158 aa, Zea mays
  misc_feature: Ceres CLONE ID no. 290258
  misc_feature: Ceres CDNA ID no. 40041165
  misc_feature: Homolog of GI Number: 83722842 NR Desc: PME/invertase inhibitor
  misc_feature: Homolog of GI Number: 26190140 NR Desc: putative invertase inhibitor precursor
  misc_feature: Homolog of GI Number: 32395573 NR Desc: seed specific protein Bn15D12A
MYYHNKTKMPPPPCSCFSAVSVPFSSFKTITMLLLLLLILQQLSAAAVAGMATGELHPLRLVSVVGPREQAGGPPRSRHHLGQAAEVRRGGHGGQDGGPQQEGAPMVPPEVLPGRLRRGVPQLPLRPRQLHRSHPGEEVRGRQDVHERRGGCARHLRG

SEQ ID NO: 403 - DNA, 1112 bp, Zea mays
  misc_feature: Ceres CLONE ID no. 290490
  misc_feature: Ceres CDNA ID no. 40041163
  CDS (61)..(900): REFERENCED BY SEQ ID NO: 404
acaagcgtccacagcttccactagagaccgaagtaccgaacagatagagattggagaaccatgatgagatccggccttctctcgctatgtttccacctagccctggccatcacactggctgcaagtgttcctggccttgctcgtagtagggtaatcgacatcgaaccgcaactcaaaccgacgctgcaactagaaccaaagcatggtgtatctcaaccagacagaaaccaagaacccaaaccgacaccacaacctgagccaaaaccggagcctaaaccggaaccaaaacctgcaccacaatcagacaccaaatcagaccctaaacccgcaccacagtcagacccaaaacctgcaccacaaccggacctaaaaccagaacccaaacctacaccacagccagacccaaaaccttcaccacaaccagacccagagccaaaacccaagccagcgccacagcctgaaccaaaaccagaacccaaacctacaccacaaccagacccaaaacctggaccacaaccagacccaaaaccagaacccaaacctacaccacaaccaggcccagagccgaaacccaagccagcgcctcaacctgagccaaaacccacgccgcaaccagatccaaaacctgagccaaaacccacgccgcaaccagatccgaaacctgagccaaaaccaacaccacaaccacctttcccacagcccgagcctcaaccagatcccaaaccccaacccgaaccatccaagccagatcctaaaccccaacccgagccatccaagccagaccctcagccagagcccaaacctacaccagagccaaaaccccaaccagaaccatcgaagccggagccaccgtcgtctcttccaccaccatttggcacgggcgtcgtggaagggaactgagaggagcatagtggaaccgatcatcatcgtggatgccatctatagcttttggctatgactgataagtaatactgtttgtgtaagagtgagctctctttttatatagggtgtgtgtattgtgtgtagtactatgtttggacgatgtgtgtgtacccaccttttcccgtgtgtttccatcagcatgcatcaatgatctaaaaaaaaaaaaaaaa

SEQ ID NO: 404 - protein, 279 aa, Zea mays
  misc_feature: Ceres CLONE ID no. 290490
  misc_feature: Ceres CDNA ID no. 40041163
  misc_feature: Homolog of GI Number: 4138732 NR Desc: proline
  misc_feature: Homolog of GI Number: 29367369 NR Desc: proline
  misc_feature: Homolog of GI Number: 21842 NR Desc: proline
  misc_feature: Homolog of GI Number: 50511379 NR Desc: putative repetitive proline rich protein
  misc_feature: Homolog of GI Number: 18478606 NR Desc: repetitive proline rich protein
  misc_feature: Homolog of GI Number: 8393396 NR Desc: gamma
  misc_feature: Homolog of GI Number: 11610622 NR Desc: GABA
  misc_feature: Homolog of GI Number: 12831207 NR Desc: gamma
  misc_feature: Homolog of GI Number: 7861746 NR Desc: GABA
  misc_feature: Homolog of GI Number: 48862277 NR Desc: COG3979: Uncharacterized protein contain chitin
MMRSGLLSLCFHLALAITLAASVPGLARSRVIDIEPQLKPTLQLEPKHGVSQPDRNQEPKPTPQPEPKPEPKPEPKPAPQSDTKSDPKPAPQSDPKPAPQPDLKPEPKPTPQPDPKPSPQPDPEPKPKPAPQPEPKPEPKPTPQPDPKPGPQPDPKPEPKPTPQPGPEPKPKPAPQPEPKPTPQPDPKPEPKPTPQPDPKPEPKPTPQPPFPQPEPQPDPKPQPEPSKPDPKPQPEPSKPDPQPEPKPTPEPKPQPEPSKPEPPSSLPPPFGTGVVEGN

SEQ ID NO: 405 - DNA, 600 bp, Zea mays
  misc_feature: Ceres CLONE ID no. 290845
  misc_feature: Ceres CDNA ID no. 25445717
  CDS (82)..(291): REFERENCED BY SEQ ID NO: 406
ctccgcatttccatcctgtcgtgggatcccagccaccgccgctagaagaagagctcggcgattcccaggtcccgcgagaatatgccgaagcagatccatgagattaaggacttcctcctcaccgcgaggaggaaggatgcccgctcagtgaagatcaagaggagtaaggatgttgtcaagttcaaggtgcgctgctccaagtacttgtacacgctctgcgtcttcgatgctgagaaggcaaacaagttgaagcaatctcttcccccaggtttgaccgtcgaggaggtctgattggatacatggcaacgccgagttgaactacccaagcttctttatcagtagcagagcatgctactctatgtacttttggaacctaagcgccatggatggatggatggtctcttcttcttctccggtttgagtttttctggtgttgggtaggcatacctgtcgtctgtcagcgtagacataaaaaaaaaggtctctgggacgctcgcccatgtatgtatgtatatgatgtgaagtgatccaaggtggttcgcgtactatggcaataaacgtgtgggaaagcgatgtatcgccaaaaaaaaaaaaaaaaaa

SEQ ID NO: 406 - protein, 69 aa, Zea mays; identical to SEQ ID NO: 56
  misc_feature: Ceres CLONE ID no. 290845
  misc_feature: Ceres CDNA ID no. 25445717
  misc_feature (2)..(69): Pfam Name: Ribosomal_L38e PFAM Desc: Ribosomal L38e protein family
  misc_feature: Homolog of GI Number: 50938225 NR Desc: putative 60S ribosomal protein L38
  misc_feature: Homolog of GI Number: 23507773 NR Desc: At3g59540/T16L24_90
  misc_feature: Homolog of GI Number: 50931949 NR Desc: putative 60S ribosomal protein L38
  misc_feature: Homolog of GI Number: 313027 NR Desc: ribosomal protein L38
  misc_feature: Homolog of GI Number: 15825507 NR Desc: ribosomal protein L38
  misc_feature: Homolog of GI Number: 27497793 NR Desc: 60S ribosomal protein L38
  misc_feature: Homolog of GI Number: 49900028 NR Desc: MGC89823 protein
  misc_feature: Homolog of GI Number: 82895480 NR Desc:  similar to ribosomal protein L38
  misc_feature: Homolog of GI Number: 4506645 NR Desc: ribosomal protein L38
  misc_feature: Homolog of GI Number: 61372160 NR Desc: ribosomal protein L38

SEQ ID NO: 407 - DNA, 1119 bp, Zea mays
  misc_feature: Ceres CLONE ID no. 290910
  misc_feature: Ceres CDNA ID no. 40041164
  CDS (399)..(935): REFERENCED BY SEQ ID NO: 408
agggccctcagtggcgtgtgggcgtcctgtcccggtggatagggcacgaacccaagctccggctcaccggtgggtggcccggccaggcgcggtggccgggcgggtgcggcctcctgccccgacctcggctcggcgcgcgcaggcgcctggcagcccccagcctcggcctcggccaggcgcgcgcgacccccagccccggctcgccggctcgccggtcatggtggctccgatccgggctcctccggcatgggcaggcgcgggttcccccggctagcagcctctcctggtgggcacggcctgccccggcggctcaggaaggcgcggcggccccggcgtgcacagccgtggtccagccatggcggcgcgggcacgcagcctcggctccccggcgggcatccatggcgcagtacgggcgcgcagcccggcggctagtctgctcggcggggcagcggccctccgcgggcgtgcgtccacggccaggcgcgggccgggcagacggccctcatccagcgtgcggcagcctctggcgcggtccagcgcagtcgggcctcggccagcatgagcgcgcggcggcctcgacggcgcagacacgagacacggcctcggtacggggatccggccatggcgagggcggccgcggcagcgcgagcctgtgtacagcacggctccggcgcagacacggtcccgaggtgggctttgccggccacaacacgctccggcgcgcggccccagcatgggcgcgaccgccgaggcgcgtccccggtgtgcggctccttcagcgcgggctccggccatgtgacggcctagcacgggcgcagcagccccagccaggcgcaagcacggttgcctcgacgcggatgcctccggccactgcgcgactccacgacgtcgtggtgctggcaagcgtgtcaggcctccgctcgcttgcgacatgaggcatgcagagtttggcaggtttgcaaatagtggagattgatggatgtgtaatcctccgtgatggcaataaattacccatcatcaccatgttgcgtgagaaagaatggttgaatacaaatcacgatgacatatcaaaaaggatcagtgcatcatgaatcttacagttcaaaaaaaaaaaaaaaa

SEQ ID NO: 408 - protein, 178 aa, Zea mays
  misc_feature: Ceres CLONE ID no. 290910
  misc_feature: Ceres CDNA ID no. 40041164
  misc_feature: Homolog of GI Number: 66780099 NR Desc: PE
MAQYGRAARRLVCSAGQRPSAGVRPRPGAGRADGPHPACGSLWRGPAQSGLGQHERAAASTAQTRDTASVRGSGHGEGGRGSASLCTARLRRRHGPEVGFAGHNTLRRAAPAWARPPRRVPGVRLLQRGLRPCDGLARAQQPQPGASTVASTRMPPATARLHDVVVLASVSGLRSLAT

SEQ ID NO: 409 - DNA, 912 bp, Zea mays
  misc_feature: Ceres CLONE ID no. 291440
  misc_feature: Ceres CDNA ID no. 25446296
  CDS (3)..(386): REFERENCED BY SEQ ID NO: 410
atccttccacgatgtgctgtcggcctcatctcccaagtccaagccattcttgttccttctctgctcgttctcatggccgagctccccacgtccgccgctcctccctggcgccctcacctccattggagctcgcccctgttgagctcacctgtgctcgtcggctgccctgcagttcccccatggacgcctcctttctaatctgtgtgcaggggtttccttcccatggtcgccctcaaccccatggtcgacctcgcctagcccttcccccatctcttccccaagctcggttcggcatggaggctggccacaggacgcagcacaccaacctcaccggccataccctctgcttttccccactgtccgcagccccgatgtcgtcgtcgtgattagacatgtgtggcgaaaagaaagattctagagtttggtgggaaaggaaagctctatcacgacgaccaccaggtacgttcattgatcacgtattgtggaggacaacaacaactggaataatctcaaagtgggattgatgaatgaacccaaagctgaatgatctgatcgtactggaatgggaggtgctcgccaagcgagtatcatctaacaacactgacttagtgtttatcccaggttataattttgttctgttgtggatgctgctaagtgccggtgggctcggccttcttatataagtatatcccatctttagcttctttattgaggattgtcacttaagctagcatgtattttaaaacttataaatgttttatacattcaaattgtaatcttttgaatcaatttcttttgtaaccaactccgatgatatatattgtaatcttgctataacttgtaaatgttgtaacttgtaaccattttgtaataaataatttatttccgctgcataaaaaaaaaaaaaaaaaa

SEQ ID NO: 410 - protein, 124 aa, Zea mays
  misc_feature: Ceres CLONE ID no. 291440
  misc_feature: Ceres CDNA ID no. 25446296
MCCRPHLPSPSHSCSFSARSHGRAPHVRRSSLAPSPPLELAPVELTCARRLPCSSPMDASFLICVQGFPSHGRPQPHGRPRLALPPSLPQARFGMEAGHRTQHTNLTGHTLCFSPLSAAPMSSS

SEQ ID NO: 411 - DNA, 958 bp, Zea mays
  misc_feature: Ceres CLONE ID no. 292449
  misc_feature: Ceres CDNA ID no. 40350906
  CDS (482)..(775): REFERENCED BY SEQ ID NO: 412
agcacgcacaccaatcgcccacaagcgctcgcaggagaggtcgaaaccctagcttttgcggcgacggcggcggcggcgagagaagatgatctacgacgtgaactcccccctcttccgttccttcctcagccagaagggcggcgccgacaagaggaaaatggaggagcataaaccaaaggagcagaggcccaaggccaacgagaacaagcctgtgatgaacgaatgaatatctccagaagctttgttcaatgtgcaaccaaatgcgatgtccgtttgctctctctctttattcgttccccgcctcaccccgagccagccgtctcgctagggtttctccgccgccgccgccgccgccatgcctcgccgcagctcaggaaggtctgccccacgcccagctccccgtgctgctccagtgaggaacccgccacagccagcacgccaggctcctcctccagctcctgttcgagatggtggtggctccatgtttggaggaattgggtccaccattgctcaaggtatggcgtttggcacgggtagtgccatggcacacagggctgttgatgctgtattaggtccccggaccattcagcatgagactgttgcctcagaagctgctgctgctgcccctgcccctccagtgatgaatgctgatgcttgcagcatccattctaaggctttccaagattgtctcaacaactatggcagcgagatcagcaattgccagttctacctagacatgctgaacgagtgccgccgtggtggtgtgtctgcctaagctgcctctgggattattcatggattttctttcggtgatgttatctcattaataagataccgtgaaacttttgtctccacagcttgaagctaaacttcctgggattaatacattttgttatcctatgctgttggagcaaaaaaaaaaaaaaaaaaaaaaaaaaaaagaaaaaaaaaaaaaaaa

SEQ ID NO: 412 - protein, 139 aa, Zea mays
  misc_feature: Ceres CLONE ID no. 292449
  misc_feature: Ceres CDNA ID no. 40350906
  misc_feature (94)..(135): Pfam Name: CHCH PFAM Desc: CHCH domain
MPRRSSGRSAPRPAPRAAPVRNPPQPARQAPPPAPVRDGGGSMFGGIGSTIAQGMAFGTGSAMAHRAVDAVLGPRTIQHETVASEAAAAAPAPPVMNADACSIHSKAFQDCLNNYGSEISNCQFYLDMLNECRRGGVSA

SEQ ID NO: 413 - DNA, 648 bp, Zea mays
  misc_feature: Ceres CLONE ID no. 292729
  misc_feature: Ceres CDNA ID no. 35383161
  CDS (2)..(466): REFERENCED BY SEQ ID NO: 414
gagctcgtccggtcccgtcgatcttccaggccgccgctctcagctaatcggcacgcaggccggccggcaggtgggtggggtggtccaggtcgagagcatgcaggcggtgggcatccggcggcgcgggctgaccatcgacccggcgggggaggaggaggcccccgcggcgcgcgtggggcggctggtccgggagagccccgtggtgatcttcgcgcggcgcggctgctgcatggcgcacgtgatgcggcggctgctggcggcggtgggcgcgcacgccaccgtcatcgagctgggcggcggcgcggaggaggaggagctggcggcggccgagggtggcggcggcggcggcgtcccggcgctgttcgtgggcggcgaccccgtcggcggcctcgagggcctcatgcggctccacctcagcggccgcctcgtgccccggctccgggagctcggcgccctctgcgcctgagctgctcgcctctccctccgccgtctgtactgtacatactacgcgcccgcggcctctgcgatcgatcagggtgctcggcgcaaaacaacagccgaccggtggtgtactgtactagtactagtgctgtgcacatgattgccgtgtacatacatcctatccccttcctaaaaaaaaaaaaaaaa

SEQ ID NO: 414 - protein, 122 aa, Zea mays
  misc_feature: Ceres CLONE ID no. 292729
  misc_feature: Ceres CDNA ID no. 35383161
  misc_feature (34)..(114): Pfam Name: Glutaredoxin PFAM Desc: Glutaredoxin
  misc_feature: Homolog of GI Number: 34903534 NR Desc: P0001B06.19
  misc_feature: Homolog of GI Number: 56202242 NR Desc: glutaredoxin
  misc_feature: Homolog of GI Number: 42567797 NR Desc: glutaredoxin family protein
  misc_feature: Homolog of GI Number: 7573360 NR Desc: glutaredoxin
  misc_feature: Homolog of GI Number: 34910944 NR Desc: OSJNBb0063G05.17
  misc_feature: Homolog of GI Number: 21593833 NR Desc: glutaredoxin
  misc_feature: Homolog of GI Number: 6560751 NR Desc: F3M18.8
  misc_feature: Homolog of GI Number: 66780099 NR Desc: PE
  misc_feature: Homolog of GI Number: 50934249 NR Desc: glutaredoxin
  misc_feature: Homolog of GI Number: 66776103 NR Desc: LigA
MQAVGIRRRGLTIDPAGEEEAPAARVGRLVRESPVVIFARRGCCMAHVMRRLLAAVGAHATVIELGGGAEEEELAAAEGGGGGGVPALFVGGDPVGGLEGLMRLHLSGRLVPRLRELGALCA

SEQ ID NO: 415 - DNA, 615 bp, Zea mays
  misc_feature: Ceres CLONE ID no. 292953
  misc_feature: Ceres CDNA ID no. 29191479
  CDS (94)..(465): REFERENCED BY SEQ ID NO: 416
aaaccaagcacaagcaccaaacactcaaacagacaggaagcccgccgaacatcacaaggctgcgaacctcctagaaggtagaagctcgaggagatgctctccaagctgtcggcgtggttcgtgaacccgcggaggaatccgctcgcgcgtctccaccggaacgccgtcgcctcccgcctccgcaaatacgggctcaggtatgacgacctctacgacccgtaccacgacctagacatcaaggaggcgctggcgcggctgccgcgggaggtggtggacgcccgtaaccagcgcctcaagcgggccatggacctctccatgaagcaccagtacctacccgacgacgtccaggctatacagacgccattcaggagctacctttttgacatgcttgctcttgtgaaaaaggagagcgcagagcgtgaagcattgggagcgcttccactctaccagagaaccatcccataaagtgcctctttgcatgatccaatcaatagtgcacgcgatgatcagcagaggctgatactgtaatgtgtattgtgttttttcgaggaaatctctactacttattaagacgataagggtagcctgccgttctgacgaaaaaaaaaaaaaaaa

SEQ ID NO: 416 - protein, 123 aa, Zea mays
  misc_feature: Ceres CLONE ID no. 292953
  misc_feature: Ceres CDNA ID no. 29191479
  misc_feature (8)..(111): Pfam Name: UCR_14kD PFAM Desc: Ubiquinol
  misc_feature: Homolog of GI Number: 50919263 NR Desc: putative ubiquinol
  misc_feature: Homolog of GI Number: 633681 NR Desc: ubiquinol
  misc_feature: Homolog of GI Number: 15239430 NR Desc: ubiquinol
  misc_feature: Homolog of GI Number: 12642870 NR Desc: putative ubiquinol
  misc_feature: Homolog of GI Number: 30689398 NR Desc: ubiquinol
  misc_feature: Homolog of GI Number: 50731732 NR Desc:  similar to Ubiquinol
  misc_feature: Homolog of GI Number: 56199556 NR Desc: ubiquinol
  misc_feature: Homolog of GI Number: 54643425 NR Desc: GA17519
  misc_feature: Homolog of GI Number: 19075864 NR Desc: ubiquinol
  misc_feature: Homolog of GI Number: 190804 NR Desc: ubiquinone
MLSKLSAWFVNPRRNPLARLHRNAVASRLRKYGLRYDDLYDPYHDLDIKEALARLPREVVDARNQRLKRAMDLSMKHQYLPDDVQAIQTPFRSYLFDMLALVKKESAEREALGALPLYQRTIP

SEQ ID NO: 417 - DNA, 1268 bp, Zea mays
  misc_feature: Ceres CLONE ID no. 293186
  misc_feature: Ceres CDNA ID no. 25445523
  CDS (226)..(1128): REFERENCED BY SEQ ID NO: 418
acaacacaaccaagagccaacagagcaacgcccaggcacacacgacacgaaccaggcaaccagctgccgagggaggaaccctagcggaacactgtgcaggtgacggcggcgcgctaccggtgacgggggatacggcggcatcgtccccctcggcccctcctccatccccggcgcggcggcgccagcagccggcctgcaggttttgcaggtttcacacttcttatcatggatgataagaacaaagtcaagaaggaaatagatggcccccttggacccccacctcgcaaggggggacttaaattcgcaccaaaagtacctcagaagaaacctgccaaggttgtcccaaagaaggaaccggttgaagagagaaaggaggatgctttggataaggagttattgatgaaacttaagatgtcgcaaaacaagtatccctcaagaattaagtccgacgaaaagccaagaagtggtacacaggttgcatttggacaaggaaactcttattatgcaagaaattttcccatgcccaaaaaggattcttcagcaggtggagcttcgaagttaccaaaagaatatgcagaaccatgggactatagccatgattatcctgttactctcccactaaggaagccctactctggaaatcctgaaattctggatgaggaagaatttggagaatcttctgccagcaggacccaagatgatgaattatctgcagcagagcagcttggattaatggatatgtcgtcggaatcacagttcctcttcttccagttgccatcctctcttcctttaccgaggcagccacaatcaggtgctgaccctaacgaagtccgcgatgagaaacgtgaggacatgaggccatcatcgcacaatggctcgaaactcaaagaggttcctgaaggctatatggggaaaatgctcgtatataagagtggtaaagtgaagatgaagataggagacactctctttgatgtttcatttggctcgaattgcatgttttcccaggaggttgcagcaatcaacatcagagaaaaacattgctgtacggtgggagagatcagcaagcgtgctatcatcaccccagatattaactacatgttgggttctgttgacaagatggaagaatagtccattggtttctttcgcgcaaaccatatagaccatattatgccattacaagatagttttgctttcttatagagaacgacctgtgataccctctcagacttcttcaagaaaagatgcctcaaacaaaaaaaaaaaaaaaa

SEQ ID NO: 418 - protein, 300 aa, Zea mays
  misc_feature: Ceres CLONE ID no. 293186
  misc_feature: Ceres CDNA ID no. 25445523
  misc_feature (174)..(288): Pfam Name: RNA_pol_Rpc4 PFAM Desc: RNA polymerase III RPC4
  misc_feature: Homolog of GI Number: 50923907 NR Desc: OSJNBa0072K14.7
  misc_feature: Homolog of GI Number: 52218818 NR Desc: At4g25180
  misc_feature: Homolog of GI Number: 15234965 NR Desc: DNA
  misc_feature: Homolog of GI Number: 34907504 NR Desc: B1099D03.22
  misc_feature: Homolog of GI Number: 34874432 NR Desc: similar to DNA
  misc_feature: Homolog of GI Number: 72255539 NR Desc: polymerase
  misc_feature: Homolog of GI Number: 31981109 NR Desc: polymerase
  misc_feature: Homolog of GI Number: 73994050 NR Desc:  similar to DNA
  misc_feature: Homolog of GI Number: 179513 NR Desc: BN51 protein
  misc_feature: Homolog of GI Number: 12803547 NR Desc: RNA polymerase III 53 kDa subunit RPC4
MDDKNKVKKEIDGPLGPPPRKGGLKFAPKVPQKKPAKVVPKKEPVEERKEDALDKELLMKLKMSQNKYPSRIKSDEKPRSGTQVAFGQGNSYYARNFPMPKKDSSAGGASKLPKEYAEPWDYSHDYPVTLPLRKPYSGNPEILDEEEFGESSASRTQDDELSAAEQLGLMDMSSESQFLFFQLPSSLPLPRQPQSGADPNEVRDEKREDMRPSSHNGSKLKEVPEGYMGKMLVYKSGKVKMKIGDTLFDVSFGSNCMFSQEVAAINIREKHCCTVGEISKRAIITPDINYMLGSVDKMEE

SEQ ID NO: 419 - DNA, 782 bp, Zea mays
  misc_feature: Ceres CLONE ID no. 293449
  misc_feature: Ceres CDNA ID no. 36705192
  CDS (111)..(566): REFERENCED BY SEQ ID NO: 420
acctctctgctaacgccgctcgcgcatcctattgccctcgcgccaccgtcgccgccgctgcagcgagccaccgccctgccgtcgcctgaggtagacaccaagccaccgccatggggcgtatgcacagccgcgggaagggtatctcttcatcggcgctgccgtacaagaggactcctccgatctggctcaagacagctaccaccgaggtggaggagatgattaccaaggctgcgaagaagggccagatgccgtcgcagattggtgttctgctccgtgaccagcacggcatcccgcttgtcaagagcgtgactggtagcaagatcctccgcatcctcaaggcccatgggttggcgccggagatcccggaggatctctacttcctcattaagaaggccgtggcgattaggaagcatctggagaggaacaggaaggacaaggactccaaattcagactcattcttgttgagagcaggatccaccgccttgcccgctactacaagcgtaccaagaagctcccacccacctggaagtacgagtcaaccacggcgagcactctggtggcctaagtgatatcctctgatggcttggtctttagcacctatgagcttgttctagatatgaatttatgtaattcttgttatgtctggagctggttagatggacaaggaacctcaactttttctatgtttacttggagaatcccataaaccatttttggtttcgcaattctgtctgttaaacgtaacatgcatccatgttttgtcaaaaaaaaaaaaaaaaaa

SEQ ID NO: 420 - protein, 151 aa, Zea mays
  misc_feature: Ceres CLONE ID no. 293449
  misc_feature: Ceres CDNA ID no. 36705192
  misc_feature (1)..(60): Pfam Name: Ribosomal_S13_N PFAM Desc: Ribosomal S13/S15 N
  misc_feature (65)..(151): Pfam Name: Ribosomal_S15 PFAM Desc: Ribosomal protein S15
  misc_feature: Homolog of GI Number: 288059 NR Desc: cytoplasmatic ribosomal protein S13
  misc_feature: Homolog of GI Number: 50940531 NR Desc: putative 40S RIBOSOMAL PROTEIN S13
  misc_feature: Homolog of GI Number: 52548254 NR Desc: cytoplasmatic ribosomal protein S13
  misc_feature: Homolog of GI Number: 50940529 NR Desc: putative 40S RIBOSOMAL PROTEIN S13
  misc_feature: Homolog of GI Number: 30102866 NR Desc: At4g00100
  misc_feature: Homolog of GI Number: 19699318 NR Desc: AT3g60770/T4C21_180
  misc_feature: Homolog of GI Number: 48209913 NR Desc: cytoplasmic ribosomal protein S13
  misc_feature: Homolog of GI Number: 44662862 NR Desc: ribosomal protein S13
  misc_feature: Homolog of GI Number: 15450535 NR Desc: AT3g60770/T4C21_180
  misc_feature: Homolog of GI Number: 8131699 NR Desc: cytoplasmic ribosomal protein S13
MGRMHSRGKGISSSALPYKRTPPIWLKTATTEVEEMITKAAKKGQMPSQIGVLLRDQHGIPLVKSVTGSKILRILKAHGLAPEIPEDLYFLIKKAVAIRKHLERNRKDKDSKFRLILVESRIHRLARYYKRTKKLPPTWKYESTTASTLVA

SEQ ID NO: 421 - DNA, 1533 bp, Zea mays
  misc_feature: Ceres CLONE ID no. 293705
  misc_feature: Ceres CDNA ID no. 40350909
  CDS (194)..(1204): REFERENCED BY SEQ ID NO: 422
aatagccatggaagaattgctctgctgcttggtgtttttcctcctcccgttcacctcgccgtcgacggggccaggcggccgaacacatccttgacgaccgacgccgccctactcgcagcttcctgggtttcatcggatcctctgctagcgacgagcaccccctacaccaggccgttacttgggcgccggtgccatgcccggcgggtcttcgggtccagatggtgaagtggatgcaggatttgcgaagctccagggagaggatttcgagtattacatgcaaacgtactccatcatgctgggacgcaacagcaagaaatcaacagtggatgtggatctctcgagcctcggtgggggtatgaacatctcccgccaccacgcccggatattctacgacttccagcgccgcaggttcgcgctcgatgtcattggcaagaacgggtgccttgtcgagggcgtcctgcaccttccagggaacccccctgtcaagcttgactcgcaggatctgctgcagattggggacaagaagttctacttcctactgccaacacggtccatcttcgcttcggctgctgctgctcggcatgctcctattattccacagcagcttcctcctccaccgtatgcacatgcacgggcaggccgccctcgtttgtccgagtttcatgaccgctccttcgaaggtgattatgggcgggaggttgatgagattgggaatggtatcagtgaaactgggatgaggggaaagctggtaaagaggaacaagaagtcttctggcgacttggatatctatggtgggcatagaatcaatgtggaaccaatagggacgctaggtgaagacagtagatcagaaataagatcaaggggtgacagggatattgacaaccaacaagcccttcaagcagaagagaaggatgttgtgtcatctgtggccacagtgttatctgatctctgtggccctggagaatggatgcccatggcaaaactccacaacgagcttcttgagcagttcggcaacgtgtggcaccccagcagggtccggaagtacctgacacaggacgactggtcgccgacggagaccaagggcaggccttggttcggccttctggcgcttctcaggaagtacccggagcactttgtcatcaacacgaggtccaagggcaggatgacctcggagttcgtctcgctggtctccttgctctcctagagggacggagagggcgtgttgtgtccagcccgtgtgaccgtgtccagaagggtcggaggtgtactggctctcgtttgcttgccccttgctgtgtttcagcagctgttatatggacccaccctgttgtgctgtagtatctcgtgtggtcgaggcagctgcactggtccgtgaccgtctctgtagtgtcggcagcagtgtatggaaagcatgcgttttaagttttaacctatgctagcaattcagcagcagctcggtgattaccgtatccagcatgtatatccaaaaaaaaaaaaaaaaaaaaaaaaaaaaaaagaaaaaaaaaaaaaaaa

SEQ ID NO: 422 - protein, 336 aa, Zea mays
  misc_feature: Ceres CLONE ID no. 293705
  misc_feature: Ceres CDNA ID no. 40350909
  misc_feature: null
  misc_feature: Useful for making plants with altered Lignin content
  misc_feature: Useful for making plants with altered alkaloid content
  misc_feature (33)..(108): Pfam Name: FHA PFAM Desc: FHA domain
MPGGSSGPDGEVDAGFAKLQGEDFEYYMQTYSIMLGRNSKKSTVDVDLSSLGGGMNISRHHARIFYDFQRRRFALDVIGKNGCLVEGVLHLPGNPPVKLDSQDLLQIGDKKFYFLLPTRSIFASAAAARHAPIIPQQLPPPPYAHARAGRPRLSEFHDRSFEGDYGREVDEIGNGISETGMRGKLVKRNKKSSGDLDIYGGHRINVEPIGTLGEDSRSEIRSRGDRDIDNQQALQAEEKDVVSSVATVLSDLCGPGEWMPMAKLHNELLEQFGNVWHPSRVRKYLTQDDWSPTETKGRPWFGLLALLRKYPEHFVINTRSKGRMTSEFVSLVSLLS

SEQ ID NO: 423 - DNA, 864 bp, Zea mays
  misc_feature: Ceres CLONE ID no. 293835
  misc_feature: Ceres CDNA ID no. 40350911
  CDS (112)..(612): REFERENCED BY SEQ ID NO: 424
gcagatccaagcggagaagctgcgtcgtggcctgaccctgtccgtcctctccggtcggcgagagcaagaagagatcccgcgccgtcctcttctccacctccacctccacccatggcggcctccaccttcagcggcgacgagacggcgcccttcttcggcttcctcggcgccgccgccgcgctcgtcttctcctgcatgggcgccgcctacgggacggccaagagcggcgtcggcgtcgcctccatgggcgtcatgcgccccgagctcgtcatgaagtccatcgtccccgtcgtcatggcgggagtactcggcatctacggcctcatcatcgccgtcatcatctccaccgggatcaaccccaaggccaagccctacttcctcttcgacggctacgcgcacctctcctccggactcgcctgcggcctcgctggcctcgctgccggcatggccatcggcatcgtcggagacgccggagttagggcgaatgcacagcagccaaagttgtttgtgggcatgattctgatccttatcttcgcagaagctcttgctctgtacggtctcatcgtcggtatcattctctcatcccgtgcaggccaatctcgcgccgattagaaggcttgatatacgccacactgagtcatctgccattgtattcaaagtgttcttttctcggtgaacaatgtgagggatcatgttgagcctgttccacctttgtaacattatattgctattatgtgaagacaaacctagctagctgttgcagttatgctgttgtacttgtatttgtttgaaaataataggcagcgagccccggatgtgatgaataataagcaagctggactagttgtaaaaaaaaaaaaaaaa

SEQ ID NO: 424 - protein, 166 aa, Zea mays
  misc_feature: Ceres CLONE ID no. 293835
  misc_feature: Ceres CDNA ID no. 40350911
  misc_feature (15)..(80): Pfam Name: ATP PFAM Desc: ATP synthase subunit C
MAASTFSGDETAPFFGFLGAAAALVFSCMGAAYGTAKSGVGVASMGVMRPELVMKSIVPVVMAGVLGIYGLIIAVIISTGINPKAKPYFLFDGYAHLSSGLACGLAGLAAGMAIGIVGDAGVRANAQQPKLFVGMILILIFAEALALYGLIVGIILSSRAGQSRAD

SEQ ID NO: 425 - DNA, 730 bp, Zea mays
  misc_feature: Ceres CLONE ID no. 294036
  misc_feature: Ceres CDNA ID no. 40350910
  CDS (2)..(436): REFERENCED BY SEQ ID NO: 426
acaaggcaaagcaacacttgcttgtccagtaagtgaaggaagcggcagctgtccatcatccctcattctcagttgcgggcctgtggctgtggtggagagaggtcaggagtggagcgaggtcggaggaggtcaccacaccagcagcggcgacgacgatgctgatcctggacctggcgatctggatcatcccggtgacgctcgtcctcgtgccgttccggcggctggtggtcctggtggccaggctgcaggagctggaggagtgcatcatgcggccgcggccgccgctcatggactcgtgggcgtggggccgcgtcggcggcctgcacaccatgagcatcatgatgtgaggtggggaagtcaagcgagggcgctcaaggttcgaattcgaaccatgtataagctgcaatggagctcaaggtttttacctaggatgtaggagcttcttcccggttggtaaacggtaaccgagttcatatctctcggtcagtatggtatgggtatggatatactccgatcctgttatcttcttttttctttctgaatatgttaattgtgcaatggtggccctgtatgtaagaaaatgtagatatatctgcagtcctgtgtacatgtcattcagaaacggagcacctgctggcgcccgttgtacctgaactctcattcacaacgcatgtccatgattcagggtgctctgtcctctgtagccggggggaaaaaaaaaaaaaaaaaa

SEQ ID NO: 426 - protein, 63 aa, Zea mays
  misc_feature: Ceres CLONE ID no. 294036
  misc_feature: Ceres CDNA ID no. 40350910
MLILDLAIWIIPVTLVLVPFRRLVVLVARLQELEECIMRPRPPLMDSWAWGRVGGLHTMSIMM

SEQ ID NO: 427 - DNA, 822 bp, Zea mays
  misc_feature: Ceres CLONE ID no. 294921
  misc_feature: Ceres CDNA ID no. 40041166
  CDS (49)..(546): REFERENCED BY SEQ ID NO: 428
caaactcggtaaaccattcccctccccacctcttgtccagtgccccaaatgctggcgaccacctgcagccggccgccgtgcccgtgcgcgcggtcgcggcggctccccgcggcgaccttcagcgctaggcgcaccagtagcgcgaagcaaagggcgccgaggagagcggcggcgttgcggtgcgggctgctgcccgtggacccgtgggcgccgacgatggactcccagagcgtggcgtcgcagctcttcgccgtctcgctcttcccctacctgggattcctctacttcatgaccaggtccaagaccgcgcccgggctcacgctcttcggtttctacttcctcctcgtcttcgtcggcgccaccacaaaagttcattatggtacctcactgtccaacgttgactggctgcacgggggcgctgaatcgctgctgactctcaccaacctgtttatcgttttggggctgaggggagccctgaggaagctggaggaagagggcacagacgagattgtttctgaagcttctcaagaaaaaagttctgtctagatgggttcatcatcagtacccctgaaggtgcactcagtaactaggagtgcgctgtttttcttcttctgcagctcaactagctcgtagtgatgttttgggtgtaaggaaatctggcagatctactctctgcatactatgctgataagaaaacaatgtacaggcatctcctgcaattctgagtagtaccttcagctgttgatagtagcagtacactatagtctaggaagcttaattctattgctggctaaaaaaaaaaaaagaaaaaaaaaaaaaaaa

SEQ ID NO: 428 - protein, 165 aa, Zea mays
  misc_feature: Ceres CLONE ID no. 294921
  misc_feature: Ceres CDNA ID no. 40041166
MLATTCSRPPCPCARSRRLPAATFSARRTSSAKQRAPRRAAALRCGLLPVDPWAPTMDSQSVASQLFAVSLFPYLGFLYFMTRSKTAPGLTLFGFYFLLVFVGATTKVHYGTSLSNVDWLHGGAESLLTLTNLFIVLGLRGALRKLEEEGTDEIVSEASQEKSSV

SEQ ID NO: 429 - DNA, 569 bp, Zea mays
  misc_feature: Ceres CLONE ID no. 296410
  misc_feature: Ceres CDNA ID no. 36703157
  CDS (75)..(386): REFERENCED BY SEQ ID NO: 430
aacaacaacagcaacccgcacaagccctcttcctcgattttcctcctccgtccgcgtagttctcggtttcggcgatgtcggggcgcggcaagggcggcaaggggctgggcaagggcggcgccaagcgccaccgcaaggtgctgcgcgacaacatccagggcatcacgaagccggcgatccgtaggctggccaggaggggcggcgtcaagcgcatttctgggctcatctacgaggaaacccgcggcgtgctcaagatcttcctcgagaacgtcatccgcgacgccgtcacctacaccgagcacgcccgccgcaagactgtcaccgccatggatgtcgtctacgcgctcaagcgccagggccggacgctctacggcttcggcggctaggccgcctccccttctgatgctttgatatgacggccgtggtcggttgtgtgtctagttggccggtctactgtagtttgttctgtatcttcgtttcgaggtgttccagtttctagcccatttggtgtaatattttcacagctattatcaatggaaagccctcggttctatcaaaaaaaaaaaaaa

SEQ ID NO: 430 - protein, 103 aa, Zea mays; identical to SEQ ID NO: 8
  misc_feature: Ceres CLONE ID no. 296410
  misc_feature: Ceres CDNA ID no. 36703157
  misc_feature (66)..(92): Pfam Name: TAF PFAM Desc: TATA box binding protein associated factor
  misc_feature: Homolog of GI Number: 74004256 NR Desc:  similar to germinal histone H4 gene
  misc_feature: Homolog of GI Number: 74004178 NR Desc:  similar to germinal histone H4 gene
  misc_feature: Homolog of GI Number: 61820747 NR Desc:  similar to germinal histone H4 gene
  misc_feature: Homolog of GI Number: 57098917 NR Desc:  similar to germinal histone H4 gene
  misc_feature: Homolog of GI Number: 50728590 NR Desc:  similar to germinal histone H4 gene
  misc_feature: Homolog of GI Number: 50911547 NR Desc: histone H4
  misc_feature: Homolog of GI Number: 74004228 NR Desc:  similar to germinal histone H4 gene
  misc_feature: Homolog of GI Number: 62648434 NR Desc:  similar to germinal histone H4 gene
  misc_feature: Homolog of GI Number: 61810551 NR Desc:  similar to Hist1h4i protein
  misc_feature: Homolog of GI Number: 76651053 NR Desc:  similar to germinal histone H4 gene

SEQ ID NO: 431 - DNA, 611 bp, Zea mays
  misc_feature: Ceres CLONE ID no. 296526
  misc_feature: Ceres CDNA ID no. 25446015
  CDS (199)..(465): REFERENCED BY SEQ ID NO: 432
attccaattccaaccatccgagcatcctgctcagctcagggcgaggcgaaacaaaaccctcctccctcactgccccctcgcagacgagacgcgtggtagctagggttttggcctcgccgcgcacgcctcctgaagcttctagacgttcgaggaggaggaggggaggctcccgccgccgccgccgccgccgccgcagccatggcgtccaccaaggtgcagcgtatcatgacccagcccatcaacctcatcttccgtttcctccagagcaaagcgcgcatccagatctggctcttcgagcagaaggacctccggattgagggtcgcatcatcggattcgatgagtacatgaacttggtcctcgaagatgctgaggaaatcaacgtcaagaaaaacactaggaagacactgggccggatactcctcaaaggtgacaacataactttgatgatgaacagtggcaagtgaaagttcttatggcaggaacgatgtttggtgctcgcgttgagtatttctggcacgttgtactccatccattcagacttacatgtatcatgtcattgtggattagtgagggagttgtacctgctgttaatgacaaaaaaaaaaaaaaa

SEQ ID NO: 432 - protein, 88 aa, Zea mays
  misc_feature: Ceres CLONE ID no. 296526
  misc_feature: Ceres CDNA ID no. 25446015
  misc_feature (19)..(85): Pfam Name: LSM PFAM Desc: LSM domain
  misc_feature: Homolog of GI Number: 50904957 NR Desc: putative small nuclear ribonucleoprotein polypeptide E
  misc_feature: Homolog of GI Number: 21592486 NR Desc: putative small nuclear ribonucleoprotein E
  misc_feature: Homolog of GI Number: 21593343 NR Desc: small nuclear ribonucleoprotein homolog
  misc_feature: Homolog of GI Number: 7269933 NR Desc: small nuclear ribonucleoprotein homolog
  misc_feature: Homolog of GI Number: 58381856 NR Desc: ENSANGP00000022836
  misc_feature: Homolog of GI Number: 57111277 NR Desc:  similar to small nuclear ribonucleoprotein E
  misc_feature: Homolog of GI Number: 72111474 NR Desc:  similar to small nuclear ribonucleoprotein E isoform 2
  misc_feature: Homolog of GI Number: 54645039 NR Desc: GA15004
  misc_feature: Homolog of GI Number: 50603823 NR Desc: MGC89991 protein
  misc_feature: Homolog of GI Number: 34880220 NR Desc: similar to small nuclear ribonucleoprotein E
MASTKVQRIMTQPINLIFRFLQSKARIQIWLFEQKDLRIEGRIIGFDEYMNLVLEDAEEINVKKNTRKTLGRILLKGDNITLMMNSGK

SEQ ID NO: 433 - DNA, 782 bp, Zea mays
  misc_feature: Ceres CLONE ID no. 296836
  misc_feature: Ceres CDNA ID no. 25445524
  CDS (149)..(538): REFERENCED BY SEQ ID NO: 434
cccatatcactccaccaaaccctaaaaccgcttccgcaaccacgtataaaaacaccgcacgcgccgccgccgccgtcctattcctcggagaggagaagccgccgtcgcagcaatcacagcagcccggagaacggccaggtccgacaagatgcagatctttgtgaagacgctgacagggaagaccatcaccctcgaggtcgagagcagcgacaccatcgacaatgtcaaggccaagatccaggacaaggaagggatcccgccggaccagcagcggctgatctttgccgggaagcagctggaggatggccgcacccttgcggactataacatccaaaaggagtctacgctccacctcgtgctcagactccgcggtggcatcattgagccctcgctgcaggcgctcgctcgcaagtacaaccaggacaagatgatctgccgcaaatgctatgcacggctgcaccctagggctgtcaactgccgcaagaagaagtgtggtcacagcaaccagctgagggccaagaagaagatcaagaactgaggtgttgctgctagtcagtttcatggacaatgttgtttggttgttgaaccgtgtttgtttacgaactgtatttttgtttggttgttgaaccgtgtttgtttaccgaacatattggccttatgttatgttttaccatgttgtcgatgacacaatactatatgacgatagcaactatgctattgtagttttggtcattgttcaaaaaaaaaaaaaaaaaaaaaaaaaaccaaaaaaaaaaaaaaaa

SEQ ID NO: 434 - protein, 129 aa, Zea mays
  misc_feature: Ceres CLONE ID no. 296836
  misc_feature: Ceres CDNA ID no. 25445524
  misc_feature (1)..(74): Pfam Name: ubiquitin PFAM Desc: Ubiquitin family
  misc_feature (77)..(128): Pfam Name: Ribosomal_L40e PFAM Desc: Ribosomal L40e family
  misc_feature: Homolog of GI Number: 52077170 NR Desc: ubiquitin / ribosomal protein CEP52
  misc_feature: Homolog of GI Number: 71040673 NR Desc: ubiquitin fusion protein
  misc_feature: Homolog of GI Number: 322750 NR Desc: ubiquitin / ribosomal protein CEP52
  misc_feature: Homolog of GI Number: 16323384 NR Desc: putative ubiquitin extension protein UBQ1
  misc_feature: Homolog of GI Number: 395079 NR Desc: ubiquitin/ribosomal protein
  misc_feature: Homolog of GI Number: 76559884 NR Desc: TPA: ubiquitin
  misc_feature: Homolog of GI Number: 50920549 NR Desc: Putative ubiquitin / ribosomal protein CEP52
  misc_feature: Homolog of GI Number: 57101310 NR Desc:  similar to ubiquitin A
  misc_feature: Homolog of GI Number: 13569612 NR Desc: ubiquitin A
  misc_feature: Homolog of GI Number: 498793 NR Desc: ubiquitin
MQIFVKTLTGKTITLEVESSDTIDNVKAKIQDKEGIPPDQQRLIFAGKQLEDGRTLADYNIQKESTLHLVLRLRGGIIEPSLQALARKYNQDKMICRKCYARLHPRAVNCRKKKCGHSNQLRAKKKIKN

SEQ ID NO: 435 - DNA, 772 bp, Zea mays
  misc_feature: Ceres CLONE ID no. 297231
  misc_feature: Ceres CDNA ID no. 25446050
  CDS (315)..(584): REFERENCED BY SEQ ID NO: 436
ctcccacaatctccagccgccactacgcctccctctagctccagccgccactacgccggtcgcagagtcgccagctgcctagacgcccggaggcccgcgggcgctccctcctgggctgctggcctccttcacattattggagccagaggagcgggcggcggcttgcactccatcccatcgcttggctagcgcgccggagccacagctggagcgctcgccggcgacgagtcgccgccccgcaaggagcctacgcaggcacgcaccgccacgtctaggcgccaggcggagacgttattaccacaacattaaaggagatgccttcactccagaaagcattgcctccagaacttgctgataatgtgctcaggttatatcgtgaatgcttacggagggcgaagtatattggccatcagaaacacaatacagaacttttagtcgccatggtgagacaacaattcaagaaaaacatgcatgaaactgatccagagaagatacagaaaatgaaggacgatgctgcaaggggccttatcaatcatattctatatgagtccgagaagattacaggacgcaagttttcaggttaaaaacagaagttgaaactggacttacagtgtgtcgtgctgtatgaataatagtaaaaataatttactttcttgcctttgaatgattccggttctattgtacaaggacctgcaaatgttttttccttcggattgctgagtactcgagctattgcagcaatgattttcagtaaccaaaaaaaaaaaaaaaa

SEQ ID NO: 436 - protein, 89 aa, Zea mays
  misc_feature: Ceres CLONE ID no. 297231
  misc_feature: Ceres CDNA ID no. 25446050
  misc_feature (11)..(63): Pfam Name: Complex1_LYR PFAM Desc: Complex 1 protein
MPSLQKALPPELADNVLRLYRECLRRAKYIGHQKHNTELLVAMVRQQFKKNMHETDPEKIQKMKDDAARGLINHILYESEKITGRKFSG

SEQ ID NO: 437 - DNA, 549 bp, Zea mays
  misc_feature: Ceres CLONE ID no. 298459
  misc_feature: Ceres CDNA ID no. 40350912
  CDS (84)..(371): REFERENCED BY SEQ ID NO: 438
gtcgagtctaaccctagcgcgcgccgccacacctgccgttgctaccgccccgtacctcgcttgctttcccgtcgccgaaatgaatgcctatgcagacgaaccgcaccaagaaggctggaattgttggcaaatatggaaccaggtatggcgctagcttgcgtaagcaaatcaagaagatggaggtatctcagcactccaagtacttctgcgagttttgtgggaagtttgctgtgaagaggaaagcagttggaatttggggatgcaaggactgtgggaaggtcaaggctggcggtgcttacaccatgaacactgctagtgcagtcactgtcaggagcacgattcgtcgcttgagagagcagactgaagcatgatttagcttgctacatcaggtttctcctagttgctgttgtcgggaatgttgagctcctctagttggatcacgagactggctaaaagttgggtgctaagatttgtagttggttaccgttgtgaatttctcaagtgatattatcctatgcttgtctcaatgactcaaaaaaaaaaaaaaaa

SEQ ID NO: 438 - protein, 93 aa, Zea mays
  misc_feature: Ceres CLONE ID no. 298459
  misc_feature: Ceres CDNA ID no. 40350912
  misc_feature: null
  misc_feature: Useful for making plants with modulated cold sensitivity
  misc_feature (3)..(92): Pfam Name: Ribosomal_L37ae PFAM Desc: Ribosomal L37ae protein family
MQTNRTKKAGIVGKYGTRYGASLRKQIKKMEVSQHSKYFCEFCGKFAVKRKAVGIWGCKDCGKVKAGGAYTMNTASAVTVRSTIRRLREQTEA

SEQ ID NO: 439 - DNA, 448 bp, Zea mays
  misc_feature: Ceres CLONE ID no. 298690
  misc_feature: Ceres CDNA ID no. 36703158
  CDS (3)..(338): REFERENCED BY SEQ ID NO: 440
agtttagttggtgctggtgctggtggaggaagaagcagcgcagcaggtggcagggatgggtcgcggcggcgggatggggaacccagtcaacgtgggcatcgcggtgcaggcggactgggagaaccgcgagttcatctccaacatctccctcaacgtccgacgccccagcttcttccacccctggtgccggttcttcctccgggggtgcctggcgtaccgccggcctccgcttcaacgaatcgccgccccgtgaatcatccctgagaaaaaacttggagctgtactgtgttgtcttttacatttacacgcacgtacgtacgaactgccgtcagctgtaattttcttgttcgtcatcatcaatctgagctgtaattttctactctaccaaaaataaaactattcactatataaagcactaatttccatcgtcacaaaaaaaaaaaaaaaa

SEQ ID NO: 440 - protein, 65 aa, Zea mays
  misc_feature: Ceres CLONE ID no. 298690
  misc_feature: Ceres CDNA ID no. 36703158
  misc_feature: Homolog of GI Number: 20338425 NR Desc: BRICK1
  misc_feature: Homolog of GI Number: 50916134 NR Desc: putative BRICK1
MGRGGGMGNPVNVGIAVQADWENREFISNISLNVRRPSFFHPWCRFFLRGCLAYRRPPLQRIAAP

SEQ ID NO: 441 - DNA, 1213 bp, Zea mays
  misc_feature: Ceres CLONE ID no. 299373
  misc_feature: Ceres CDNA ID no. 36585801
  CDS (136)..(1068): REFERENCED BY SEQ ID NO: 442
tcgccgcccccgtctcctctcctctcctctcccccgcatccacggccgcaggccgcagccagccactcgacgatctagtcgtctctctctccccgctctgccgcctcgctgccgcggcttcccgtcggctggaggatgaaggtcacggtcgtgtcccggagcggccgggaggtcgtcaagggcggcatcgacctcaaggactcggccaaggtcgcggacctgcaggaggccatccatgccaggactaagaagtattatccttctaggcagcggctcaccctcccccttcaacctggaaaaggcgggaagccagttgtcctcagtccgaaggccagcctgctagaatactgcgagaagggttctgggtcactgacagtggtcttcaaagatttagggccacaggtctactacagcacactgttcttcttcgagtacctgggtcctctcatcatctaccccatgttctactatctgcctgtctacaaatacttcgggtacgagggggagcgggccatgcaccctgtccagacctacgccatgtactactggtgcttccactacttcaagcggatcatggagacattcttcgtgcaccgcttcagccacgcgacgtcgccgctctcgaacgtcttcaggaactgtgcctactactggaccttcggcgcctacattgcttactactgcaaccacccgctgtacaccccagtgagtgatctgcagatgaagattgggtttggttttggggtcgtctgccaggtcgcgaacttctactgccacatcctgctgcggaacctcaggagcccaagcggcagcggcgggtaccagatcccccgcggtttcttgttcaacatcgtgacctgcgccaattacaccaccgagatctatcagtgggtcggcttcaacatcgccacgcagaccgtggcaggttacgtcttccttgtcgtggcggcaggcatcatgaccaactgggcgctcggcaagcacagccgtctgaagaagctgtttgacggcaaggatgggaggcccaagtaccctcgccggtgggtgattctccctccgttcctgtgaagaggtggtggtggtcggcctattgtgattcgatgtctacagacagttgtactgtactaatcgtgcctgtttagcggttgaacttggattccgttgtccgaaatttctaatccgaaagatggatttcaaaaaaaaaaaaaaaaaa

SEQ ID NO: 442 - protein, 310 aa, Zea mays
  misc_feature: Ceres CLONE ID no. 299373
  misc_feature: Ceres CDNA ID no. 36585801
  misc_feature (158)..(310): Pfam Name: Steroid_dh PFAM Desc: 3
  misc_feature: Homolog of GI Number: 62866633 NR Desc: TSC13 protein
  misc_feature: Homolog of GI Number: 34895848 NR Desc: putative glycoprotein
  misc_feature: Homolog of GI Number: 55770329 NR Desc: putative synaptic glycoprotein SC2
  misc_feature: Homolog of GI Number: 25004880 NR Desc: steroid 5
  misc_feature: Homolog of GI Number: 21594270 NR Desc: synaptic glycoprotein SC2
  misc_feature: Homolog of GI Number: 17531783 NR Desc: steroid Alpha ReducTase family
  misc_feature: Homolog of GI Number: 73986266 NR Desc:  similar to Synaptic glycoprotein SC2 isoform 2
MKVTVVSRSGREVVKGGIDLKDSAKVADLQEAIHARTKKYYPSRQRLTLPLQPGKGGKPVVLSPKASLLEYCEKGSGSLTVVFKDLGPQVYYSTLFFFEYLGPLIIYPMFYYLPVYKYFGYEGERAMHPVQTYAMYYWCFHYFKRIMETFFVHRFSHATSPLSNVFRNCAYYWTFGAYIAYYCNHPLYTPVSDLQMKIGFGFGVVCQVANFYCHILLRNLRSPSGSGGYQIPRGFLFNIVTCANYTTEIYQWVGFNIATQTVAGYVFLVVAAGIMTNWALGKHSRLKKLFDGKDGRPKYPRRWVILPPFL

SEQ ID NO: 443 - DNA, 1271 bp, Zea mays
  misc_feature: Ceres CLONE ID no. 299662
  misc_feature: Ceres CDNA ID no. 36705214
  CDS (461)..(973): REFERENCED BY SEQ ID NO: 444
attttccattcctcgctcaccaagccaacagccaaatccaattcgccgacgactctctttattcctcccgctcgccgccgccgccaccgcctgaggggaagaagcgagcgagcgcaccgcggatctccctcccggccccgccgcgcgcaccggtgaagacgacgagcccctcgtgaatggtgggagcccgcgcgacgtccgtcgcctcgcagccgcagccggaggaggcctccttccgcggcttcggttactgcatgcagggctggtaccaccgctgcatcggtctcgacccctgaaccccgccgccacttgcttctttgatttgatttcattcggttcgttcggtgcccctcccgtcctggatctgttgcgcgagagcgcggcagcgcgcgagattcgcccccttctcttctcataggaagcaggaagcaagccgatcgctcgctgagcgccgccgccgatggccgtcgcggtgccgatgaagctctggagggtggagacccgcggcaaggccgccgccgcggggcccgacgaccccctgcgcgtcctggtgacggtgaccgtcctcgggagcgccggcccgttgcgcttcatcgtcctcgagggcgacacggtcgccgcgctcatccgcggcgcgctgcgctgctacgcccgcgagggccgcatgccgctgctcggcaccgaccctgccggcttcgtcctctccaccgccaacggcggatccggcgcactcggagaagacgagaggatcagcttcaacgggtgccggaacttcctgctttggcagaaggctgcggctcagggtgccgccgccaaccacggcgggtccgatgctctgacggcaaccctgagccccggcaggaagggcagcggtggattcaaggctactgatccgagccctggcaggaaaggcggcggcggctggaaggctggactgaacaagttcctcctcagcttcagcatcaaggtgtgatccatgcgtggacgagagaaggggggtgtttcttggtgtcgaggcaccgcacaacaataaaaatgcattgcattggtttgtctgttttttttcaatcaattgggattgttgccgccagtgagatggcgaagtgtaattcgtcatgcgaacccgagtcgagtcgaggcgaagtgtgattcatcgtatgtttgagtcgagtcgagtcagttgcttagtttatttggctgttcaatttccaaatcatcggatcgggttcctctgatctcttgttaaaggttctacaaaaaaaaaaaaaaaa

SEQ ID NO: 444 - protein, 164 aa, Zea mays
  misc_feature: Ceres CLONE ID no. 299662
  misc_feature: Ceres CDNA ID no. 36705214
  misc_feature: Homolog of GI Number: 16226338 NR Desc: At1g70780/F5A18_4
  misc_feature: Homolog of GI Number: 13359433 NR Desc: putative senescence
  misc_feature: Homolog of GI Number: 67986110 NR Desc: regulatory protein
  misc_feature: Homolog of GI Number: 67664382 NR Desc: LigA
  misc_feature: Homolog of GI Number: 67985765 NR Desc: Pantoate
  misc_feature: Homolog of GI Number: 67987629 NR Desc: Thymidylate kinase
  misc_feature: Homolog of GI Number: 71368905 NR Desc: similar to ATPase involved in DNA repair
  misc_feature: Homolog of GI Number: 67988281 NR Desc: N
MKLWRVETRGKAAAAGPDDPLRVLVTVTVLGSAGPLRFIVLEGDTVAALIRGALRCYAREGRMPLLGTDPAGFVLSTANGGSGALGEDERISFNGCRNFLLWQKAAAQGAAANHGGSDALTATLSPGRKGSGGFKATDPSPGRKGGGGWKAGLNKFLLSFSIKV

SEQ ID NO: 445 - DNA, 697 bp, Zea mays
  misc_feature: Ceres CLONE ID no. 300294
  misc_feature: Ceres CDNA ID no. 40350913
  CDS (76)..(465): REFERENCED BY SEQ ID NO: 446
attcctcggagaggagaagccgccgccgccgccgcagcaatcacagcagcccggagaacgtcctggtccgacaagatgcagatctttgtgaagacgctgacagggaagaccatcaccctcgaggttgagagcagcgacaccatcgacaatgtcaaggccaagatccaggacaaggaagggatcccgccggaccagcagcggctgatctttgccgggaagcagctggaggatggccgcacccttgcggactataacatccaaaaggagtctacgctccacctcgtgcttaggctccgcggtggaatcattgagccctcgctgcaggcgctcgctcgcaagtacaaccaggacaagatgatctgccgcaaatgctatgcacgcctgcaccctagggctgtcaactgccgcaagaagaagtgtggtcacagcaaccagctgagggccaagaagaagatcaagaactgaggtgctgctgctagtcagtttcatggacaatgttgtgctgtattgctgtctggttgttgaaccgcttttgtttacccaacatttgggccttctgttatgttttatcttgttgtcgatgacacaatactatatgacaatagcaactctgttattgtagttttggtcactgttcacctgatatgtgccatatttcggtaaagtatcgttagtgggcaaaaaaaaaaaaaaaaaa

SEQ ID NO: 446 - protein, 129 aa, Zea mays; identical to SEQ ID NO: 434
  misc_feature: Ceres CLONE ID no. 300294
  misc_feature: Ceres CDNA ID no. 40350913
  misc_feature (1)..(74): Pfam Name: ubiquitin PFAM Desc: Ubiquitin family
  misc_feature (77)..(128): Pfam Name: Ribosomal_L40e PFAM Desc: Ribosomal L40e family

SEQ ID NO: 447 - DNA, 642 bp, Zea mays
  misc_feature: Ceres CLONE ID no. 300331
  misc_feature: Ceres CDNA ID no. 36583404
  CDS (100)..(423): REFERENCED BY SEQ ID NO: 448
acctgccccgttcctcaccaaacttgtcgacttgtgagtctcttccgccgccgtcgacgagagctgcgctaggtgatctcggctgcttcctcgtcccccatggcgacggcgctcaaatcgttcctgaacagccccgtcggccccaagaccacccacttctggggccctgtcgccaactggggcttcgtcatcgcgggtttggttgacatgaacaagcctcctgaaatgatatctggcaatatgacagcagccatgtgtgtgtattctggactctttatgaggtttgcatggatggtacagccccgaaattatttgcttctagcatgccatgcttccaatgaaagcgtccagctctatcagttatctcgctgggttaggtctcaggggtacctggagaagaaagagccagaggccaaacagtaaagagggtatccaacactgcagtcatttgttcaataaagaaaatatgctgtggaaaacattcattctgttgccaatgcagttttttttgtatgtttgcaaaatatgctgaggaaatttcatgatacctagcgcagttacaagcgtctgcttacttttatgtgcatttgtcaagacacatttgttttttacattgctgccttcccaaaaaaaaaaaaaaaa

SEQ ID NO: 448 - protein, 107 aa, Zea mays
  misc_feature: Ceres CLONE ID no. 300331
  misc_feature: Ceres CDNA ID no. 36583404
  misc_feature (1)..(90): Pfam Name: UPF0041 PFAM Desc: Uncharacterised protein family
  misc_feature: Homolog of GI Number: 54111523 NR Desc: brain protein 44
  misc_feature: Homolog of GI Number: 50899866 NR Desc: brain protein 44
  misc_feature: Homolog of GI Number: 50945709 NR Desc: brain protein 44
  misc_feature: Homolog of GI Number: 72078983 NR Desc:  similar to brain protein 44
  misc_feature: Homolog of GI Number: 73945793 NR Desc:  similar to Brain protein 44
  misc_feature: Homolog of GI Number: 51830691 NR Desc: similar to Brain protein 44
  misc_feature: Homolog of GI Number: 72112433 NR Desc:  similar to brain protein 44
  misc_feature: Homolog of GI Number: 51477621 NR Desc:  similar to ENSANGP00000015797
MATALKSFLNSPVGPKTTHFWGPVANWGFVIAGLVDMNKPPEMISGNMTAAMCVYSGLFMRFAWMVQPRNYLLLACHASNESVQLYQLSRWVRSQGYLEKKEPEAKQ

SEQ ID NO: 449 - DNA, 437 bp, Zea mays
  misc_feature: Ceres CLONE ID no. 300536
  misc_feature: Ceres CDNA ID no. 35383162
  CDS (1)..(264): REFERENCED BY SEQ ID NO: 450
attctcgcgatgggagcggaggaagcagagggtactcccccgccgctgcccgccaccggcgagcccgcaaccacggcaagggcgcagccaatatctgcagcacaattcctctcctggaagcagcgcaaggatgcagaggtagccgtaaggaaagctgaagcagctcagaagcgagctgatgatatcgcttcgggagcggtgcagatgaacggccgcgagctgttccaacaagagccctgggtgtttgacaaccacatttactgagatcgtgtcgggctactgttcctgcattagtccaagctccagcggtggtttcattttgtactgctatatcagctttgcggaactgtggattttatttcaccgtttataagattattctctcaataggtatttgaacttgtttcaaatacgttttgacaaaaaaaaaaaaaaaa

SEQ ID NO: 450 - protein, 84 aa, Zea mays
  misc_feature: Ceres CLONE ID no. 300536
  misc_feature: Ceres CDNA ID no. 35383162
  misc_feature: Homolog of GI Number: 9280685 NR Desc: F2E2.21
MGAEEAEGTPPPLPATGEPATTARAQPISAAQFLSWKQRKDAEVAVRKAEAAQKRADDIASGAVQMNGRELFQQEPWVFDNHIY

SEQ ID NO: 451 - DNA, 616 bp, Zea mays
  misc_feature: Ceres CLONE ID no. 300884
  misc_feature: Ceres CDNA ID no. 25446827
  CDS (83)..(472): REFERENCED BY SEQ ID NO: 452
gcctggcccattgcaatctcgagaagcaactccgtcgcgccgcactcaatcgcctccgattctgcggagactcagcatcggaatggcggcggcggctcgtgccgggttccggcggctcttctccgtctcggccttcgctgcaccgcctcctcctgccgcgcgccccgcggcgaacccttgcaacaacctcttcgtctcagggttaaataaacgcacaacgtccgagggacttaaggaagcattttctaaatttggtcaggttattgaagcaagagtaatcactgataggatatctggatactccagaggatttggctttgtcaaatatgcgactgtacaagaagctggtgaggccataaaaggcatggatggaaagttccttgacagttgggttattttcgctgagacgccacacaaccatcacaacaaggagcaccagcttatgattgaagttgccatacacggtcgatgacatacactgtatttttctgccgagtgtaatagtggatgttgattgccggccaaacatttgcagagagaatgtagcttgatgtgctccttgaaaaaaaaaaaaaaaaaaaaaaaaaaaaaaaaaaaaaaaaaaaaaaaaaaaaaa

SEQ ID NO: 452 - protein, 129 aa, Zea mays
  misc_feature: Ceres CLONE ID no. 300884
  misc_feature: Ceres CDNA ID no. 25446827
  misc_feature (36)..(107): Pfam Name: RRM_1 PFAM Desc: RNA recognition motif.
  misc_feature: Homolog of GI Number: 34898598 NR Desc: RNA recognition motif
  misc_feature: Homolog of GI Number: 50940959 NR Desc: putative RNA recognition motif
  misc_feature: Homolog of GI Number: 21536972 NR Desc: putative RNA
  misc_feature: Homolog of GI Number: 25406274 NR Desc: probable RNA
  misc_feature: Homolog of GI Number: 19881711 NR Desc: Putative RNA
  misc_feature: Homolog of GI Number: 34906972 NR Desc: putative glycine
  misc_feature: Homolog of GI Number: 77555842 NR Desc: RNA
  misc_feature: Homolog of GI Number: 7439995 NR Desc: RNA binding protein 3
  misc_feature: Homolog of GI Number: 7489099 NR Desc: RNA
  misc_feature: Homolog of GI Number: 15822703 NR Desc: RNA
MAAAARAGFRRLFSVSAFAAPPPPAARPAANPCNNLFVSGLNKRTTSEGLKEAFSKFGQVIEARVITDRISGYSRGFGFVKYATVQEAGEAIKGMDGKFLDSWVIFAETPHNHHNKEHQLMIEVAIHGR

SEQ ID NO: 453 - DNA, 444 bp, Zea mays
  misc_feature: Ceres CLONE ID no. 301099
  misc_feature: Ceres CDNA ID no. 36703159
  CDS (68)..(238): REFERENCED BY SEQ ID NO: 454
atctttttcttcctcgcgccgccgccgccgtgacggaaggaagaggaggagcaaggagcacgacgcgatgggtcactccaacgtttggaactcgcaccctaagaactacggccctggctcccgcgtctgccgggtctgcgcgaaccctcacggtctgatcaggaagtacgggctcatgtgctgcaggcagtgcttccgcagcaacgccaaggacattggtttcatcaagtaccgttgaagaggccactgtgctgctgtggagaacttcctacatcaaagaaatgggtccttcattagaaggcctaatttatgcgctttagctttttgttcagaacttgagactcatgtgttaaactcgacttgttaaagttttgatggctactttgtgcttgttggaccagctataatcagaagattgaaattttcacaaaaaaaaaaaaaaaa

SEQ ID NO: 454 - protein, 56 aa, Zea mays
  misc_feature: Ceres CLONE ID no. 301099
  misc_feature: Ceres CDNA ID no. 36703159
  misc_feature (3)..(56): Pfam Name: Ribosomal_S14 PFAM Desc: Ribosomal protein S14p/S29e
  misc_feature: Homolog of GI Number: 31745220 NR Desc: putative ribosomal protein S29
  misc_feature: Homolog of GI Number: 77555907 NR Desc: ribosomal protein S14p/S29e
  misc_feature: Homolog of GI Number: 57471722 NR Desc: ribosomal protein S29
  misc_feature: Homolog of GI Number: 13194826 NR Desc: putative ribosomal S29 protein
  misc_feature: Homolog of GI Number: 51970282 NR Desc: ribosomal S29 subunit
  misc_feature: Homolog of GI Number: 51971827 NR Desc: ribosomal S29 subunit
  misc_feature: Homolog of GI Number: 61654760 NR Desc: S29
  misc_feature: Homolog of GI Number: 47026945 NR Desc: ribosomal protein S29
  misc_feature: Homolog of GI Number: 32400973 NR Desc: ribosome protein S29
MGHSNVWNSHPKNYGPGSRVCRVCANPHGLIRKYGLMCCRQCFRSNAKDIGFIKYR

SEQ ID NO: 455 - DNA, 848 bp, Zea mays
  misc_feature: Ceres CLONE ID no. 301277
  misc_feature: Ceres CDNA ID no. 25445525
  CDS (73)..(645): REFERENCED BY SEQ ID NO: 456
gacctccccccgtttcaatcaaaatggaaaaaagtttcctcccttcccctctcttctgaatccggcatcaccatgcagaacaccgtcgcgaacccttccactgcggccgccgccgctgcggcagggaacggcggcgtccaagcatcgggggctggaggggagcggccggaggacgcgtcgaagcagaacctggcgcaggtgacgagctccatccagaagacgctgggcctgctccaccagctcaacctcaccgtctcctccttcaactctgcctcccagctccccctcctccagcgcctgaatgcgcttgtggcggagctcgacacgatgcagaaactcgccgaggggtgcaacatccaggtgcctatggaggtcgtcaatttgatcgacgatgggaagaaccccgacgagttcactagggacgtgctcaacagctgcatcgtcaaaaaccagatcaccaagggcaagactgacgctttcaagggcctacggaagcatcttcttgaggagcttgaacaagctttccctgaggacgtagaagcatacagggagatacgtgctacttctgctgctgaggcaaagcggttggctcagtcccagggtactttgcctaatggagatgtcaaagtgaaagctgagcattgagcgaatggtacgactacagagggcaagtttgttatctctgcttagttttggggatggctttgttaaccagaaacatgcatatctttctattgcacgtcccctgatcagtgaatgtgtacatactatcgtagcatgtgtggcccaatgtattcaacttaactaataacttcaaaaagatatccggaacaaaaaaaaaaaaaaaa

SEQ ID NO: 456 - protein, 190 aa, Zea mays
  misc_feature: Ceres CLONE ID no. 301277
  misc_feature: Ceres CDNA ID no. 25445525
  misc_feature: Homolog of GI Number: 25403266 NR Desc: protein T24P13.4
  misc_feature: Homolog of GI Number: 72087005 NR Desc:  similar to CG5057
  misc_feature: Homolog of GI Number: 34873422 NR Desc: similar to DNA segment
  misc_feature: Homolog of GI Number: 55930938 NR Desc: DNA segment
  misc_feature: Homolog of GI Number: 49522360 NR Desc: MGC89063 protein
  misc_feature: Homolog of GI Number: 50736031 NR Desc:  similar to DNA segment
  misc_feature: Homolog of GI Number: 47937479 NR Desc: MGC78921 protein
  misc_feature: Homolog of GI Number: 74003101 NR Desc:  similar to CG5057
  misc_feature: Homolog of GI Number: 54641286 NR Desc: GA18625
MQNTVANPSTAAAAAAAGNGGVQASGAGGERPEDASKQNLAQVTSSIQKTLGLLHQLNLTVSSFNSASQLPLLQRLNALVAELDTMQKLAEGCNIQVPMEVVNLIDDGKNPDEFTRDVLNSCIVKNQITKGKTDAFKGLRKHLLEELEQAFPEDVEAYREIRATSAAEAKRLAQSQGTLPNGDVKVKAEH

SEQ ID NO: 457 - DNA, 870 bp, Zea mays
  misc_feature: Ceres CLONE ID no. 302467
  misc_feature: Ceres CDNA ID no. 40041167
  CDS (137)..(679): REFERENCED BY SEQ ID NO: 458
atagcttggctcgcacggtgtcgctggctcccctccccttccctccccactgttacatccagcgagctgttcacggccgtgccgagctcagtgaggcagcgtttgcgagtccgggacgaggggagcggcgggcgacatggggaggggccgcagcgagataaagcggatcgagaaccccacgcagcggcagtccaccttctacaagcgcagggacggcctcttcaagaaggctagggagctctccgttctgtgcgacgtggacctgctgctgctcctcttctccacctccggcaagctctaccaggccacgacgcacaccaaggtctggaccgacatccgccaggagcggcgcgcggagctggagaaggcggagcagatgtgcgagctgatggagaaggagctgcgggtcatgacggtggacgacggggagcagtacacggtgccgtcgctggagctgctggagcacagcctggaggcggccgtgcgcaaggtgcgctccgagaaggaccgcaacatcggcggcgagatcaactacctcgagaacattatcagaggacgccacgaggagcgctacgggttgtgcaacaagcttgcgcactctcaggcctcgaacaacgagggaggaggtgggtcgaccccaccaagcagcggcctggaactcaaactgggtctcaactgacgggctgggctggatggaaagctcgtggactatgctctgttccttgggtactgtactctgtaggttttggttgagtggtcgttgtcagcagttgtcctttgctgcttcgattggtggtgttaatgtactccattattcaggtgggatcaagtacctttgctgcttcgattggagcaaaaaaaaaaaaaaaa

SEQ ID NO: 458 - protein, 180 aa, Zea mays
  misc_feature: Ceres CLONE ID no. 302467
  misc_feature: Ceres CDNA ID no. 40041167
  misc_feature (55)..(154): Pfam Name: K PFAM Desc: K
  misc_feature: Homolog of GI Number: 34910770 NR Desc: P0042A10.14
  misc_feature: Homolog of GI Number: 40644782 NR Desc: putative transcription factor MADS32
  misc_feature: Homolog of GI Number: 62122359 NR Desc: MADS
  misc_feature: Homolog of GI Number: 3646326 NR Desc: MADS
  misc_feature: Homolog of GI Number: 62122347 NR Desc: MADS
  misc_feature: Homolog of GI Number: 37993053 NR Desc: APETALA3
  misc_feature: Homolog of GI Number: 5019464 NR Desc: putative MADS domain transcription factor GGM13
  misc_feature: Homolog of GI Number: 15667638 NR Desc: putative MADS
  misc_feature: Homolog of GI Number: 37993051 NR Desc: APETALA3
  misc_feature: Homolog of GI Number: 51849631 NR Desc: PISTILLATA
MGRGRSEIKRIENPTQRQSTFYKRRDGLFKKARELSVLCDVDLLLLLFSTSGKLYQATTHTKVWTDIRQERRAELEKAEQMCELMEKELRVMTVDDGEQYTVPSLELLEHSLEAAVRKVRSEKDRNIGGEINYLENIIRGRHEERYGLCNKLAHSQASNNEGGGGSTPPSSGLELKLGLN

SEQ ID NO: 459 - DNA, 1567 bp, Zea mays
  misc_feature: Ceres CLONE ID no. 302728
  misc_feature: Ceres CDNA ID no. 40041168
  CDS (45)..(1457): REFERENCED BY SEQ ID NO: 460
cgatagagttatcacacacattcgttattcgttgaactacaaccatggcgaggccgtccgaccaaagcgtccacgtcctccttctcccattccccacgcagggccacatcaacccgctgctccagttcggcaagcggctcgccggccgcgctggcgtccggtgcacgctcgcggcgacccgcttcgtcgtcagctcgacgaagccgaccccgagctcggtccacgtcgccgtgatctccgacggctgcgacgagggcggccccgccgaggtgggagggatgggcgcgcgctacttcgagcgcctcgaggcggccgggtccgagacgctggacgaggtcctccggtcggagtcggcgctggggcggccggtgcacgtggtggtgtacgacgcgttcgcaccctgggcgcagcgcgtcgcgcggcggcgcggcgccgcgtgcgcggcgttcctcacgcagacgtgcgccgtggacatcgtgtacgcgcacgcgtgggccgggcgggtgccggtgccgcccctgccgctgcgccccgaggaggtgcggggcctggccgggctgtcgacccagctcgaggtgggcgacatgccgacgttcttgggcgacaccaggtttccaccgtgctttcgggagctgctggtgaaccagtttctggggctggacaccgccgaccacgtgctcgtcaactcgttctacgacctggagccgcaggaagcggactacctggcgtctacgtggagagccaagatggtggggccgaccgtcccgtcggcgttcctcgacaaccgcctcccggacgacgtgtcctacggcatccacctgcacgccccaatggcggcagaaagcaaggcgtggctggacgcccagcaggcggggtccgtcctgtacgtgtccttcggcagcatggcgtcgctgagcccggagcagatgggcgagatagccgatggcctctacggcagcggcaagcccttcctgtgggtcgtccgggccacggagaccgccaaggtgcccaggggcttcgccgacagggcccaggccaccagggggctcctggtgtcgtggtgcccgcagctggaggtcctggcgcaccccgccgtcggctgcttcttcacgcactgcggctggaactcgacggtggaggcgctcagcgccggcgtgcccatggtggcgatgcccgactggtcggaccagacgaccaacgccaagtacatacaggacgtgtggcgcgtcggcgtgcgggtgcgcccggacggccggggcgtggtgaggagcgaggaggtggagcggtgcgtgcgggacgtcatggagggggagatgggcgaggagtttagggccagggcttcgcactggagcagcaaggccaggaaggccatgggcgagggcggtagctcggacgtcgccatctccaactttctatcctgttttggacactccactcatgttacccctgccaactgattgatcatggccggatgcaccgttttaaaaaaaaaaaaaaaaaaaaaaaaaaaaaaaaaaaaaaaaaaaaaaaaaaaaaaaaaaaaaaaaaaagaaaaaaaaaaaaaaaa

SEQ ID NO: 460 - protein, 470 aa, Zea mays
  misc_feature: Ceres CLONE ID no. 302728
  misc_feature: Ceres CDNA ID no. 40041168
  misc_feature (1)..(464): Pfam Name: UDPGT PFAM Desc: UDP
  misc_feature: Homolog of GI Number: 50726637 NR Desc: putative UDP
  misc_feature: Homolog of GI Number: 50726639 NR Desc: putative UDP
  misc_feature: Homolog of GI Number: 50726641 NR Desc: putative UDP
  misc_feature: Homolog of GI Number: 50930627 NR Desc: OSJNBa0052O21.16
  misc_feature: Homolog of GI Number: 50726636 NR Desc: putative indole
  misc_feature: Homolog of GI Number: 7385017 NR Desc: UDP
  misc_feature: Homolog of GI Number: 60649935 NR Desc: UDP
  misc_feature: Homolog of GI Number: 50930625 NR Desc: OSJNBa0052O21.15
  misc_feature: Homolog of GI Number: 50930623 NR Desc: OSJNBa0052O21.14
  misc_feature: Homolog of GI Number: 33114570 NR Desc: glucosyltransferase 2
MARPSDQSVHVLLLPFPTQGHINPLLQFGKRLAGRAGVRCTLAATRFVVSSTKPTPSSVHVAVISDGCDEGGPAEVGGMGARYFERLEAAGSETLDEVLRSESALGRPVHVVVYDAFAPWAQRVARRRGAACAAFLTQTCAVDIVYAHAWAGRVPVPPLPLRPEEVRGLAGLSTQLEVGDMPTFLGDTRFPPCFRELLVNQFLGLDTADHVLVNSFYDLEPQEADYLASTWRAKMVGPTVPSAFLDNRLPDDVSYGIHLHAPMAAESKAWLDAQQAGSVLYVSFGSMASLSPEQMGEIADGLYGSGKPFLWVVRATETAKVPRGFADRAQATRGLLVSWCPQLEVLAHPAVGCFFTHCGWNSTVEALSAGVPMVAMPDWSDQTTNAKYIQDVWRVGVRVRPDGRGVVRSEEVERCVRDVMEGEMGEEFRARASHWSSKARKAMGEGGSSDVAISNFLSCFGHSTHVTPAN

SEQ ID NO: 461 - DNA, 840 bp, Zea mays
  misc_feature: Ceres CLONE ID no. 304259
  misc_feature: Ceres CDNA ID no. 25445786
  CDS (110)..(601): REFERENCED BY SEQ ID NO: 462
agtcagtcagtcatcgacgactgccttgctttccagggaaaaaaatggtattgtcaggctcaaaggaacgctcttacgatgctcctgccatgccataccatgacatggcatgcagatcaggaggaaccagctgatctaccaggacaagccgcggctcaagactgcgctggagatgctcagggccagcatgtacatagaagacagcttgtcacaggtgacgctgccgttcttcgtcctgcacggcgaggccgacacggtgacggacccggaggtgagccgcgcgctgtacgagcgttcggccagcgccgacaagaccatcaagctgtacccggggatgtggcacggcctcaccgccggggagcccgacgagaacgtggaggccatcttctccgacatcgtgtcctggctcaaccaccgcagccggagctgggccgtggaggaacgccatatgaccaggaagctggcgccagctccggccaagtccatcgaaggccacggcaccgtggacggcaaagtgcacacacaacaagggcgccctcggcggcgccagggcttcctctgcgggcttgccggccggacgcatcaccacgcggagatgtgaaagatagaatcgccgtctcggtcccggatcagatgggcgcctgctttcttcaaccatggcaaataaaggaatgatgacctgcggtttataatatagaggtcttattatgcttgtcaaagttatgtatgaccaatcattcccagtctggtgcagattcaaactcatgctcagatatatgtaatgtaagattataacgctattagcattctggataaaaaaaaaaaaaaaaaaaaaaaaaa

SEQ ID NO: 462 - protein, 163 aa, Zea mays
  misc_feature: Ceres CLONE ID no. 304259
  misc_feature: Ceres CDNA ID no. 25445786
  misc_feature: Homolog of GI Number: 34894592 NR Desc: phospholipase
  misc_feature: Homolog of GI Number: 54287660 NR Desc: putative phospholipase
  misc_feature: Homolog of GI Number: 30695682 NR Desc: esterase/lipase/thioesterase family protein
  misc_feature: Homolog of GI Number: 21436029 NR Desc: At2g47630/F17A22.2
  misc_feature: Homolog of GI Number: 7487574 NR Desc: probable phospholipase
  misc_feature: Homolog of GI Number: 21592863 NR Desc: putative phospholipase
  misc_feature: Homolog of GI Number: 16226353 NR Desc: AT3g62860/F26K9_290
  misc_feature: Homolog of GI Number: 23505777 NR Desc: At3g62860/F26K9_290
  misc_feature: Homolog of GI Number: 3355471 NR Desc: putative phospholipase
  misc_feature: Homolog of GI Number: 21689759 NR Desc: putative phospholipase
MQIRRNQLIYQDKPRLKTALEMLRASMYIEDSLSQVTLPFFVLHGEADTVTDPEVSRALYERSASADKTIKLYPGMWHGLTAGEPDENVEAIFSDIVSWLNHRSRSWAVEERHMTRKLAPAPAKSIEGHGTVDGKVHTQQGRPRRRQGFLCGLAGRTHHHAEM

SEQ ID NO: 463 - DNA, 674 bp, Zea mays
  misc_feature: Ceres CLONE ID no. 304270
  misc_feature: Ceres CDNA ID no. 40350914
  CDS (137)..(352): REFERENCED BY SEQ ID NO: 464
aaaaagagctactcgagatagtataaagctgcaggcctgcagtcgcccccaaattccccgaaccaaatcactcccaccgtctccacagcaaccagcacacatttccctttggcggatcgaaggaaggaaggaggagatgggtggcggcatggaggtgcacaaaaaccggtggatcgaagagtggaacgccggccgggagaacctcgagttcaacttccgctggacccgccgcagcctcgccgtcgtcggcctcttcggcctcgctgtccccatcctcgtctacaagggcatcgtccgcgaattccatatgcaggacgaggatgcaggtcggccatacaggaagttcctgtaagcggcgtccagggctgcaggatacgtcgattcctcgaccggggctgcgaggaggggagtttccgttcagtttgtgtcggtattgttttagtctgaatctgatgaagcaatttggaatgctgaattattgtgcctgatccaaatgaataaggtgtaatgactcgtcttttcaattactgaaactggagatgtttgaatttacttggtcacttgtatggtaaaatagcagcgttgtcatatactgtttatgacttcatttgagcgccgtggaggaatatgggatatccatggaggattggagtttgcgaaaaaaaaaaaaaaaa

SEQ ID NO: 464 - protein, 71 aa, Zea mays; identical to SEQ ID NO: 296
  misc_feature: Ceres CLONE ID no. 304270
  misc_feature: Ceres CDNA ID no. 40350914

SEQ ID NO: 465 - DNA, 1059 bp, Zea mays
  misc_feature: Ceres CLONE ID no. 304475
  misc_feature: Ceres CDNA ID no. 25446300
  CDS (152)..(880): REFERENCED BY SEQ ID NO: 466
tctccgtcggcgacgagcctgggcgacctgcgccgccgcccctagcccaggtctccatcggacgcttcgccaggtcttgtttagacccatcgccggcaccgagcaacttttgcactcttttgatttcagttatcggatcccgcatcgtggaatgcttgccaaagggaggaaggtagctggaaggcgtgaagaaatgtctgcaaattatgcgtttggaccacaggatgatgatgcgattattaaacacaggcttctgactaggacaacgaccaccaggggtgaaccgccactaaagaagcttcagaagaagttcatgtcctttgcaactgagatcgagaaggatgcagataacataagtgactgtgaaagactgtacaaggcctttctacatgaaattaacacctttgagctacctcttctgaaaagcaaggctgtggttgatgcaaacattagggagaaagaaagctttaatgagctgcaggttgagattgagcggcagatcttgcatgctaagactgatattgaggaccttaagaagcaacttgagcagagcaagattgagaggcagcacaaagaagagtgtgaagccatccggaagctgattagtttgcagcctccacggtcagaaactgaaaaactcattgcagaccttgagaaggagataactgatttgaaggcggagaatgtagcatgcataaggactttggaactgaggaagaagcagtttgcccttcttctacatgtggttgaggaattgcagatctcgattgaagatgagcagaagagtatagcagatgagctgagagctattgctggagagcagaagatgagcatggaagaagggagcgtcggtgcttcagattccatggttgttgactgatcgagatacattcacatatgttgcagacctgcttgccaaaatccatcacatggtttttggacaatatggcgatttggtagatgtcttttgcggtgtctttgtacctcatgtaaattgaactgtatgctagtatgaagtgaaattgaagtacacgttgttgtgcaaaaaaaaaaaaaaaa

SEQ ID NO: 466 - protein, 242 aa, Zea mays
  misc_feature: Ceres CLONE ID no. 304475
  misc_feature: Ceres CDNA ID no. 25446300
  misc_feature: Homolog of GI Number: 38566184 NR Desc: Nif3l1bp1
  misc_feature: Homolog of GI Number: 32450259 NR Desc: Nif3l1bp1
  misc_feature: Homolog of GI Number: 27769070 NR Desc: 1500006O09Rik protein
  misc_feature: Homolog of GI Number: 24654586 NR Desc: CG17143
  misc_feature: Homolog of GI Number: 57101116 NR Desc:  similar to NIF3L1BP1 protein
  misc_feature: Homolog of GI Number: 24654589 NR Desc: CG17143
  misc_feature: Homolog of GI Number: 54641251 NR Desc: GA14344
MLAKGRKVAGRREEMSANYAFGPQDDDAIIKHRLLTRTTTTRGEPPLKKLQKKFMSFATEIEKDADNISDCERLYKAFLHEINTFELPLLKSKAVVDANIREKESFNELQVEIERQILHAKTDIEDLKKQLEQSKIERQHKEECEAIRKLISLQPPRSETEKLIADLEKEITDLKAENVACIRTLELRKKQFALLLHVVEELQISIEDEQKSIADELRAIAGEQKMSMEEGSVGASDSMVVD

SEQ ID NO: 467 - DNA, 1449 bp, Zea mays
  misc_feature: Ceres CLONE ID no. 305199
  misc_feature: Ceres CDNA ID no. 25400959
  CDS (111)..(1103): REFERENCED BY SEQ ID NO: 468
gtccgcctctcatccctcccgttgcggccgaccatcaccaacggaagtcggcagagtgagccaaggccctgtgtgtgtgtgtgtctgccacattacctacccagatcgaaatggcgcggtgcccagctgctcatgccgctctctgctcccttgctctgctcctcctgcttccagctgcgcgggcggcgacgttcaccatgaccaacaactgcggctacacggtgtggccggggctgctgtcgggcgccggcacggcgccgctgcccacgacggggttcgcgctggcgcacggcgcgtcggcggcggtggacgcgcccgcgggctggtcgggccgcgtgtgggcgcgcacgctctgcgccgcggacgccgccaccggcaggttctcctgcgccacgggcgactgcggctcgggagccgtccagtgcaacggcggcggcgccgccccgcccgccacgctggcggagttcacgctcggcggatccggcggcctggacttcttcgacgtcagccttgtggacggctacaacgtcccgatgctcatcgtccccgcgcagggcgcgggcggtggtggcagcagcagcagcagcaacgggtccgcgggcggctcgagcaagtgcatggccaccggctgcctcgtggatctcaacggcgcgtgcccagctgatctgagggtaatggctgcgtcggcgtcggcgtccgcgtccggcgccggaggggctgtggcgtgccgcagcgcgtgcgaggcgttcgggtcgccgcagtactgctgcagtggcgcctacggaaaccccaacacgtgccgcccgtcaacctactcgcagttcttcaagaacgcttgcccgcgcgcctacagctacgcctacgacgactctacctccaccttcacgtgcgccaccggcatcagctacgccatcacattctgcccgagcaccaccagcggcaagtactccggcgagaacccgcaggccgcgggcgtgcagcccacgaacggctcgatggtctacctcggcggcgagcaactcgccacctcggtcgccgccgcggcccgtgcgtcacagctcctcctagccgccgccgccctcgccgccgtcgcgctgctctgagcttcgttcccgacgtggccgtgtgaagtcggcggctcgagtctttgtcctctttccggcgtgacggggccagcgataaaagattcgacaaccagcagagaggctcagacgagacgagtgacgacggtgctgctacgactaaccgagagaaaaaaaacaatgaaatataggtagcttatggcgtagggtttaggataactggtagcatgagttttaacctttgcattcttctccacgcttcctcgatttgttgagccagccgaaagatgtattctatatttctatccatcgttgttcgccgtgatgctatagattacagcaatgatgactaaaaaaaaaaaaaaaa

SEQ ID NO: 468 - protein, 330 aa, Zea mays
  misc_feature: Ceres CLONE ID no. 305199
  misc_feature: Ceres CDNA ID no. 25400959
  misc_feature (32)..(272): Pfam Name: Thaumatin PFAM Desc: Thaumatin family
  misc_feature: Homolog of GI Number: 53791788 NR Desc: putative SCUTL1
  misc_feature: Homolog of GI Number: 31430155 NR Desc: putative thaumatin
  misc_feature: Homolog of GI Number: 34905146 NR Desc: putative pathogenesis
  misc_feature: Homolog of GI Number: 50920531 NR Desc: Putative thaumatin
  misc_feature: Homolog of GI Number: 31430158 NR Desc: putative thaumatin
  misc_feature: Homolog of GI Number: 50936343 NR Desc: thaumatin
  misc_feature: Homolog of GI Number: 78707766 NR Desc: Thaumatin family
  misc_feature: Homolog of GI Number: 50726590 NR Desc: putative thaumatin
  misc_feature: Homolog of GI Number: 4586372 NR Desc: thaumatin
  misc_feature: Homolog of GI Number: 21280949 NR Desc: putative thaumatin protein
MARCPAAHAALCSLALLLLLPAARAATFTMTNNCGYTVWPGLLSGAGTAPLPTTGFALAHGASAAVDAPAGWSGRVWARTLCAADAATGRFSCATGDCGSGAVQCNGGGAAPPATLAEFTLGGSGGLDFFDVSLVDGYNVPMLIVPAQGAGGGGSSSSSNGSAGGSSKCMATGCLVDLNGACPADLRVMAASASASASGAGGAVACRSACEAFGSPQYCCSGAYGNPNTCRPSTYSQFFKNACPRAYSYAYDDSTSTFTCATGISYAITFCPSTTSGKYSGENPQAAGVQPTNGSMVYLGGEQLATSVAAAARASQLLLAAAALAAVALL

SEQ ID NO: 469 - DNA, 1433 bp, Zea mays
  misc_feature: Ceres CLONE ID no. 305439
  misc_feature: Ceres CDNA ID no. 25446978
  CDS (166)..(1065): REFERENCED BY SEQ ID NO: 470
aatccttatcagggaaataactatacgcaaagataggaaggcaaggctcgacgtacgccgctgaacgggagagcagcacatctcggttgatttgaagatcgaacgcacggcaggctgcgggtttcctctgccgctacctccgttttacgcggccggcgcgcagccatggcgatggtgcaggcgggcatgggcctcacccgggtcgtggtcctcgttggcgccggcgtcgccggctccgtcgttctccgcaacggtcgcctcgccgagatcctcggtgagcttcaggggatactcgacaaggggaacaaggggaaggacggaggagggggagacggggaaaccgatctcaacgaggctcttacctcgcaggtgcgccgccttgccatggagatccggcaacttgctaattcacaaccaataactgttctcaatggaggttctggacaatcaggagtatcaggcctgatagtacctgcagcaactgttggagcactaggttatggttatatgtggtggaaagggatctcgttctcagacctaatgtatgtcaccaagcgcaacatggcaaatgctgtttcaagcatgactaaacatttggagcaagtgcaaagttctcttgctgctgctaaaaggcatttgacacagcgcattgaaaagttggacgataaattggatcagcagaaggctctatctggacaaataagagatgatgtcactgatgcacgtctgaagcttgagaatattggttcagaaatcaagaacatcaaagaattggtttggggtctggatgggaaaattgattcaatggaagctaaacaggacttctcatgtgctggtgtgatgtacctctgccaattcatggagcaaaatggtggaaagcttccggatcgcctggaaggctccaaaatgacgacaaaacgttttggaggccaaaagttcttacagggattgcaactggcaatagaatcagggaattgtggcaaggacaccattgatatgctgttgaaagatgctgattcctctgataaaataaacaggacgtcctccatcaaatctgccagctaattattatctggtcgatactgattcgatgcccagtcggaatatttatagggttttcattacaagtaaatatgtaaatagctgcagccttttgcttgcaggaagtgcattttgtttaatttgtaagcttcgcaaaatgctagtagttgctactacgtaggaacctagtcatgctttaattttgtggtttcgctttgtgaaacgagaatgcaacacgtaataaacgaaaaacaccggttggctttacaatgtggacttgtaacttaaggccgtttggatcttgtcatttttagaggaattggaatctactgtgtagattatttggcttgaaatttgatgttccaccactttgtaaaaaaaaaaaaaaaaaa

SEQ ID NO: 470 - protein, 299 aa, Zea mays
  misc_feature: Ceres CLONE ID no. 305439
  misc_feature: Ceres CDNA ID no. 25446978
  misc_feature: Homolog of GI Number: 25361065 NR Desc: protein T7N9.6
  misc_feature: Homolog of GI Number: 34894218 NR Desc: P0439B06.30
MAMVQAGMGLTRVVVLVGAGVAGSVVLRNGRLAEILGELQGILDKGNKGKDGGGGDGETDLNEALTSQVRRLAMEIRQLANSQPITVLNGGSGQSGVSGLIVPAATVGALGYGYMWWKGISFSDLMYVTKRNMANAVSSMTKHLEQVQSSLAAAKRHLTQRIEKLDDKLDQQKALSGQIRDDVTDARLKLENIGSEIKNIKELVWGLDGKIDSMEAKQDFSCAGVMYLCQFMEQNGGKLPDRLEGSKMTTKRFGGQKFLQGLQLAIESGNCGKDTIDMLLKDADSSDKINRTSSIKSAS

SEQ ID NO: 471 - DNA, 1534 bp, Zea mays
  misc_feature: Ceres CLONE ID no. 306070
  misc_feature: Ceres CDNA ID no. 25402006
  CDS (128)..(1321): REFERENCED BY SEQ ID NO: 472
atcttgcattctcgctgtccagcaaaatactcgaaaaccacctcgcaagacttggaaaccgcaacgcctcttcctccttgccaggacaggagtctcaactctcaaccaagtggagagtggaccgaccatggccaccgccgccgacatccgcgtctccatcggctaccagacccgcttcgggctccgcctcgccgccgcgctctcctccccacccccatcccccgccagcaactccgccttctccccgctctccctccacgtcgcgctcagcctcctcgccgccggcgcgggtggcgccacgcgcgaccagctcgccgccgccctcggaggcgacgctcccgccggggccgacggcctgcacgcgctcgccgagcatgtggtgcagctcgtgctcgccgacggctccggcgccggcggcccgcgcgtcgccttcgccgacggcgtcttcgtcgactcctcgctgaagctcaagccggccttcgaggaggtcgccgtgggaaagtacagggccgacacccagtccgtcgacttccagaaaaaggctgctgaagctgctggtcaagtgaactcatgggtagaaaaaattacttctggtctcatcaaagagatcctgcccccaggttctgttgaccacaccaccaggcttgttcttggtaatgcgctctattttaaaggagcttggactgagaagtttgatgcatctaaaacaaaagatagcgagttccaccttcttgatgggagctcagtccaagcacctttcatgtccagtacagacaaacaatatatcgtggcttacaacaacttgaaggtgcttaagcttccataccagcaaggtgcggacaagaggcagttctccatgtacattcttcttccagatgcaaaagatggcatctggagcttggctgaaaagctgagctctgaaccagagttcctggagaaccatgtcccaatgcacaaggttccagtcggacagttcaaagtccccaagttcaagatatcctttggatttgaggcatctgagttgctcaaaggtctcgggctccagcttccgtttagtgctgaagcggacctgtcggggttagttgattcaccagagggacggaacttgtctgtttcgtccgtattccacaagtcatttgtcgaagtgaacgaggaaggaacggaggccgctgccgcatctgctgcaacagttgtgctccggtcgttcacgatgcctcaggatttcgtcgcagatcaccctttcatgttcctgattcgcgaagacttgactggtgtggtgttgtttgtcggccacgtggtgaatcccctccttgctccatagtgtgttgttcagaagtgtggccttggtgcggttccatccccttacagatgtgtggctttgacagctgatcaagctttatgtgtaatctgccatgttttgtttttgaataaatagatgcttgatcgatgtatgtaaggctgcgagatgatagttcagaattggtatgtgtggtcatggactcatggtacttactgtgtaaaaaaaaaaaaaaaa

SEQ ID NO: 472 - protein, 397 aa, Zea mays
  misc_feature: Ceres CLONE ID no. 306070
  misc_feature: Ceres CDNA ID no. 25402006
  misc_feature (31)..(393): Pfam Name: Serpin PFAM Desc: Serpin
  misc_feature: Homolog of GI Number: 19068 NR Desc: protein Z
  misc_feature: Homolog of GI Number: 1310677 NR Desc: protein z
  misc_feature: Homolog of GI Number: 19071 NR Desc: protein zx
  misc_feature: Homolog of GI Number: 50901446 NR Desc: putative serine protease inhibitor
  misc_feature: Homolog of GI Number: 37700305 NR Desc: putative serpin
  misc_feature: Homolog of GI Number: 1197577 NR Desc: serpin
  misc_feature: Homolog of GI Number: 5734504 NR Desc: serpin
  misc_feature: Homolog of GI Number: 5734506 NR Desc: serpin
  misc_feature: Homolog of GI Number: 1885350 NR Desc: serpin
  misc_feature: Homolog of GI Number: 1885346 NR Desc: serpin
MATAADIRVSIGYQTRFGLRLAAALSSPPPSPASNSAFSPLSLHVALSLLAAGAGGATRDQLAAALGGDAPAGADGLHALAEHVVQLVLADGSGAGGPRVAFADGVFVDSSLKLKPAFEEVAVGKYRADTQSVDFQKKAAEAAGQVNSWVEKITSGLIKEILPPGSVDHTTRLVLGNALYFKGAWTEKFDASKTKDSEFHLLDGSSVQAPFMSSTDKQYIVAYNNLKVLKLPYQQGADKRQFSMYILLPDAKDGIWSLAEKLSSEPEFLENHVPMHKVPVGQFKVPKFKISFGFEASELLKGLGLQLPFSAEADLSGLVDSPEGRNLSVSSVFHKSFVEVNEEGTEAAAASAATVVLRSFTMPQDFVADHPFMFLIREDLTGVVLFVGHVVNPLLAP

SEQ ID NO: 473 - DNA, 1122 bp, Zea mays
  misc_feature: Ceres CLONE ID no. 306305
  misc_feature: Ceres CDNA ID no. 36707294
  CDS (385)..(918): REFERENCED BY SEQ ID NO: 474
atcaatagccagttctaatctcaggttgggggaaataggcctcgcgggtcgcaaaccgctctctgctgatttgggatttgggaggcgctcgagttttcaggtaaactatagtttagtgacccatggctcgtactaagcaaactgctcgcaagtccactggagggaaggctcctaggaaacaacttgccaccaaggctgcccgtaagtctgcacctacaactgggggagtaaagaagcctcaccgttaccgccctggaactgttgctcttcgtgaaatccgcaagtatcagaagagcactgacctgctcataaggaagcttccgttccaaaggcttgtcagggagattgcccaggatttcaagactgatcttcgtttccagagccatgcggtgcttgcgctgcaggaggctgcggaggcgtacctggtgggtctattcgaggacactaatctgtgcgcccccgccgcctcgcgcccccgctcgcttcacttctctaggtgcgcaccgatcagaagagatggcggtgccgctgctgacgaagaagatcgtgaagaagcgggtcaagcagttcaagaggccccacctcgaccgctacaagtgccttaagccaagctggcgcaggccaaagggtattgattcccgtgtcaggaggaagttcaagggatgcaccttgatgcccaacattggttatggttctgacaagtcgaccaggcactacctccccagcaagttcaagaagtttgtggtccacaacgtttctgagctggagttgctcatgatgcacaacaggacctactgcgctgaaattgctcacaacgtgtccaccaagaagcgcaaggagatcgtggagcgtgctgcacagctcgacattgtggtcaccaacaagcttgctaggctccgcagccaggaggacgagtagtctggtttcttgtcttaacgacgaactggatgttgccattcctttctgtagggaactactttgcttgtgtcttgttagtactgaaaaccagaggcactcctacctttttgcaatcagtagccactaaaatgtggcagattccactgtttaccttgcatctatctaaattatatgcgtttcatggttacaaaaaaaaaaaaaaaa

SEQ ID NO: 474 - protein, 133 aa, Zea mays; identical to SEQ ID NO: 40
  misc_feature: Ceres CLONE ID no. 306305
  misc_feature: Ceres CDNA ID no. 36707294
  misc_feature (14)..(123): Pfam Name: Ribosomal_L32e PFAM Desc: Ribosomal protein L32
  misc_feature: Homolog of GI Number: 50947773 NR Desc: putative ribosomal protein L32
  misc_feature: Homolog of GI Number: 76057835 NR Desc: ribosomal L32
  misc_feature: Homolog of GI Number: 71534997 NR Desc: ribosomal protein L32
  misc_feature: Homolog of GI Number: 13899057 NR Desc: ribosomal protein L32
  misc_feature: Homolog of GI Number: 40287540 NR Desc: ly200 protein
  misc_feature: Homolog of GI Number: 77745481 NR Desc: ly200
  misc_feature: Homolog of GI Number: 23198054 NR Desc: ribosomal protein L32
  misc_feature: Homolog of GI Number: 21555143 NR Desc: ribosomal protein L32
  misc_feature: Homolog of GI Number: 62642123 NR Desc: histone 3
  misc_feature: Homolog of GI Number: 10177580 NR Desc: ribosomal protein L32

SEQ ID NO: 475 - DNA, 902 bp, Zea mays
  misc_feature: Ceres CLONE ID no. 310592
  misc_feature: Ceres CDNA ID no. 25446301
  CDS (340)..(750): REFERENCED BY SEQ ID NO: 476
agtatgtcctatcttggtttcaggtgtggcacaacaagttaggctcagttagaccggttttatttattttttctattttttataaaatccgtataaacggcttggtgagtgtcactgtgtagcccaagattcaaactctcccgtgcaaaattttacggagacttgcccttccctctgccgtcccgtctctttgattcctgaaccccacccaggctggccaggcactccgcactcataatcgactgggctggccgtcgctggctctgctacttcggccccttcgccagcgacgataaccccccagttatccgagggaaaattttctatgtgctgattggaatggcgagtacagcatgctttgtaattgtcagtaagaatgatatcccaatctacgaggcagaagttggatctgcacccaaaaaagaggatttgtcttatcaccatcagtttatcctgcatgctgcgttagatgttgttcaggacctagcatggaccacaaataatgcaatgtccctgaagtcagttgatagattcaatgaccttgtggtgtctgtttatgtaactgctggtcataccagattcatgttgcttcatgactcacgcagtgaagatggaataaaaagcttttttcaagaggtccatgagatttacatcaagatattcctgaacccgctttacctgcccggctctcgcatcacatcctctcattttgataccaagatcagggctctcgcgaggaagtacctgtaatacacgggcatgcatgaagggtttgcatctcgtagagtaaagactaaagaagcagcagcaccgaaatgcagagagattgctcgaaatgagatgtgatgaatggaatagagacgccgcgcataaaatgcccctttgcaaaaaaaaaaaaaaaa

SEQ ID NO: 476 - protein, 136 aa, Zea mays
  misc_feature: Ceres CLONE ID no. 310592
  misc_feature: Ceres CDNA ID no. 25446301
  misc_feature: null
  misc_feature: Useful for biocontainment applications
  misc_feature (3)..(78): Pfam Name: Sedlin_N PFAM Desc: Sedlin
  misc_feature: Homolog of GI Number: 50926262 NR Desc: OSJNBa0014K14.9
  misc_feature: Homolog of GI Number: 49659792 NR Desc: putative TRAPP subunit
  misc_feature: Homolog of GI Number: 50910439 NR Desc: putative spondyloepiphyseal dysplasia
  misc_feature: Homolog of GI Number: 70663924 NR Desc: OSJNBa0014K14.10
  misc_feature: Homolog of GI Number: 57111631 NR Desc:  similar to Sedlin
  misc_feature: Homolog of GI Number: 14424495 NR Desc: SEDLP protein
  misc_feature: Homolog of GI Number: 38174617 NR Desc: Trafficking protein particle complex 2
  misc_feature: Homolog of GI Number: 9937493 NR Desc: MBP
  misc_feature: Homolog of GI Number: 62860188 NR Desc: LOC549396
  misc_feature: Utility: Low Nitrate Useful for making plants tolerant to low nitrogen
MASTACFVIVSKNDIPIYEAEVGSAPKKEDLSYHHQFILHAALDVVQDLAWTTNNAMSLKSVDRFNDLVVSVYVTAGHTRFMLLHDSRSEDGIKSFFQEVHEIYIKIFLNPLYLPGSRITSSHFDTKIRALARKYL

SEQ ID NO: 477 - DNA, 786 bp, Zea mays
  misc_feature: Ceres CLONE ID no. 311376
  misc_feature: Ceres CDNA ID no. 25893085
  CDS (1)..(657): REFERENCED BY SEQ ID NO: 478
atggaggcgtccttgctcgtggctcccaagccttccatgcccaggaccatcttctccgccaggcgagccggtcggagttggaggtgcctcgtcgtcgctgccaccatcaagcaacaactcggcacacggtcagaaagtgtggacgtcgatgcgccggtcgagcacctagcgccgccttcgaaggcgacgacgggagctcgcggcggcctgctcgccgccgtggcgacgacgacgagcagctgcacggcagtgttaccgtgtcacgccttatcaggcgccggagcggtggaatcgggaccgtggtggtggacgtcgccgctggacaccctgtaccgcgcggcggcggtgctgggcgacctggacccggcgacggcgcgggcggtggcgggcgtggcggggccggtgctgtcggcgttcggcttcctgttcatcctgcggatcgtcatgtcgtggtacccgaggctccccgtgacggagttcccgtacgtggtggcgtacgcgcccacggagccgttcctcgccgtcacgcgcagggtcatcccgccgctcggcggcgtcgatgtcacgcccgtcgtctggttcggcctcgtcagcttcgccagcgagatcctcgtcgggccacagggcctgctcgttctcctctcgcagcagcgctagcgaccactgcgtttctgcttccattccttcgatgaacaaattagtagtcatttttacaagggcacacttcgtgccatatccatttgattttaagatgattttaggttgtcttcaaaaaaaaaaaaaaaa

SEQ ID NO: 478 - protein, 206 aa, Zea mays
  misc_feature: Ceres CLONE ID no. 311376
  misc_feature: Ceres CDNA ID no. 25893085
  misc_feature (116)..(195): Pfam Name: YGGT PFAM Desc: YGGT family
  misc_feature: Homolog of GI Number: 34905892 NR Desc: P0458E05.22
  misc_feature: Homolog of GI Number: 57900169 NR Desc: YGGT family protein
  misc_feature: Homolog of GI Number: 23129461 NR Desc: COG0762: Predicted integral membrane protein
  misc_feature: Homolog of GI Number: 48893251 NR Desc: COG0762: Predicted integral membrane protein
  misc_feature: Homolog of GI Number: 33239527 NR Desc: YGGT family membrane protein
MPRTIFSARRAGRSWRCLVVAATIKQQLGTRSESVDVDAPVEHLAPPSKATTGARGGLLAAVATTTSSCTAVLPCHALSGAGAVESGPWWWTSPLDTLYRAAAVLGDLDPATARAVAGVAGPVLSAFGFLFILRIVMSWYPRLPVTEFPYVVAYAPTEPFLAVTRRVIPPLGGVDVTPVVWFGLVSFASEILVGPQGLLVLLSQQR

SEQ ID NO: 479 - DNA, 917 bp, Zea mays
  misc_feature: Ceres CLONE ID no. 311816
  misc_feature: Ceres CDNA ID no. 40350915
  CDS (85)..(642): REFERENCED BY SEQ ID NO: 480
atccatcgagctgcccgcgcgcggcagttaagctcacacatcagctagctcaccttggacggccgaccaggtacgttgcgagcgatggcgggatacaaagcgtcgggcggcacggcgctcggcgtcgtcctggctgttgccgcgctcctcgccgcggcggcgatggcggtggacgacgagcacatgtaccactggaagtgcttcaactcgtgcacggggaagtgccgcgacgaggacgcctttgacgacggccaccgttccggggattcgaacgtctcttccgtcgtctctggcggcaagtgcaacaacaggtgcctcagcgagtgcttcgaggacctgcctgccatctgctaccaccagtgcgtcgtcagcaagtgcctctgcttcccaccctttagcaaagagaaaacgatgtgcatgaagagctgctgcaacaagtgcttccaccacggcccgccagcgcctggtcctggcccgaagccgaggccgccaatgcctggtcctccgaagccgcctgccccgaagccgaagccgaggccgccggcgccaaagccaccgacgcccaaggcgccgccaccgccaaagaagccgtgtccctgcccgcccggcagcgacgaggcaaaggccgacagcaaaaactgattcatacgatgggatggatcggccagtcatcatcagaagcactcatatagtcatatagatagtatacttcacatcgtaagtacgcgtgtacgtgtaacgtacgtactcggcaagtaggccccactatatacgacgactcgtatgtgtacgcagtgggagtcccaaataattgttgctagcaagaaaggcgatgatgtctccgttgctgtaaactggcatatgcgtattatatatgatgatgagctgaaatttatctcctaaaaaaaaaaaaaaaa

SEQ ID NO: 480 - protein, 185 aa, Zea mays
  misc_feature: Ceres CLONE ID no. 311816
  misc_feature: Ceres CDNA ID no. 40350915
MAGYKASGGTALGVVLAVAALLAAAAMAVDDEHMYHWKCFNSCTGKCRDEDAFDDGHRSGDSNVSSVVSGGKCNNRCLSECFEDLPAICYHQCVVSKCLCFPPFSKEKTMCMKSCCNKCFHHGPPAPGPGPKPRPPMPGPPKPPAPKPKPRPPAPKPPTPKAPPPPKKPCPCPPGSDEAKADSKN

SEQ ID NO: 481 - DNA, 625 bp, Zea mays
  misc_feature: Ceres CLONE ID no. 311904
  misc_feature: Ceres CDNA ID no. 36707037
  CDS (40)..(381): REFERENCED BY SEQ ID NO: 482
ctccattccccatcccccatcccccatccaccgccgtcgatggcgaggccgacgcgcgcgctgctgctcccgctcctcctcctggtcctcgcgctggcggcgctggcccgcgcgtcggggtcgggcgacgttccggcgtcgtctctgagctgggacctcggcgtggtgggcgcgggggaggacgaggagttcggcttccccggcggcgactccgtagcgcgccgggtgctgcagggcggcggctacctcagctacggcgcgctgcgcagggacaacgtgccctgctccgtccggggcgcctcctactacaactgccgccccggcgggcaggccaacccctactcgcgcggctgtaccgccatcacacgctgccgcggctgatctcgccgcctacgcgtccaccgacggaaaacaggaggttcatatctgtcaatcccacgccgttgttgatttgagacacaccaaaaaaaatgttcatctccctccctgtccctttaatcaattatcagtacctgtatgctattgcttgttttctcctgtcgtttgaatttaacgagaatgattggtggtggttgtgggttatgcatgagttggcgcccacttgattccaaaaaaaaaaaaaaaa

SEQ ID NO: 482 - protein, 113 aa, Zea mays
  misc_feature: Ceres CLONE ID no. 311904
  misc_feature: Ceres CDNA ID no. 36707037
  misc_feature (48)..(113): Pfam Name: RALF PFAM Desc: Rapid ALkalinization Factor
  misc_feature: Homolog of GI Number: 34907152 NR Desc: P0506E04.27
  misc_feature: Homolog of GI Number: 77556664 NR Desc: Rapid ALkalinization Factor
  misc_feature: Homolog of GI Number: 16566316 NR Desc: RALF precursor
  misc_feature: Homolog of GI Number: 28628203 NR Desc: rapid alkalinization factor 1 precursor
  misc_feature: Homolog of GI Number: 42374767 NR Desc: rapid alkalinization factor preproprotein
  misc_feature: Homolog of GI Number: 21593878 NR Desc: RALF precursor
  misc_feature: Homolog of GI Number: 48766856 NR Desc: rapid alkalinization factor 1
MARPTRALLLPLLLLVLALAALARASGSGDVPASSLSWDLGVVGAGEDEEFGFPGGDSVARRVLQGGGYLSYGALRRDNVPCSVRGASYYNCRPGGQANPYSRGCTAITRCRG

SEQ ID NO: 483 - DNA, 607 bp, Zea mays
  misc_feature: Ceres CLONE ID no. 312474
  misc_feature: Ceres CDNA ID no. 40350916
  CDS (151)..(453): REFERENCED BY SEQ ID NO: 484
acctttctcccaccttgttgagcgccaccgccgtagcagagggaagggatagaaacccgccgtcgccgcctctgcgggaattggaattggtggcgtctccggcctcgaattgggtctcaggtgactcaccggtgtgggtcgaagccatcgatgggagtaatcgctttggggattgctgtggagctaggaatcgctcgtcgaagccgagctccgccctggatccgcggctcgtcgtcgactggtcgcgtcgccgcctcaactcctaacgagcaacccactgtggaacctgagcttcaacaagtagaagtagctgagcaggagctcattgcagacgagcaacccactgtggaacctgagcttcaacaagtagaagtagctgagcaggagctcattgcaggagaagaacaggtggttcaggaggagccacaaggcgaggagtatgatctgatctaggtggcgtttctcagtcgacattggcgccgacgatccttagttcgttttatatttacctttattttgtaataagacttccgctatgtaataaatactctgatgtattatgacatttatctctatacactctgttattacaaaaaaaaaaaaaaaa

SEQ ID NO: 484 - protein, 100 aa, Zea mays
  misc_feature: Ceres CLONE ID no. 312474
  misc_feature: Ceres CDNA ID no. 40350916
MGVIALGIAVELGIARRSRAPPWIRGSSSTGRVAASTPNEQPTVEPELQQVEVAEQELIADEQPTVEPELQQVEVAEQELIAGEEQVVQEEPQGEEYDLI

SEQ ID NO: 485 - DNA, 1056 bp, Zea mays
  misc_feature: Ceres CLONE ID no. 312920
  misc_feature: Ceres CDNA ID no. 25446302
  CDS (83)..(760): REFERENCED BY SEQ ID NO: 486
aaaacccattgtgtgcccgccgtcgacgcagcctccgtcctcccccgcatccgaatcacgcacgccacgtcccacccctgtcatggccacctccagcgacggcggcggcgaccagcggcgcctcctctccatccccaaggaaggcgagcgcatcatcgcgcccacgcgccgccccgacggcacgctccgcaaggccatccgcatccgcgccggttacgtgccccaggaggaggtcgccatctaccagtccaagggcgccctaatgaggaagtcagggcccgacgtgccgccggggtacgacccggcgctagtggccgacgccaaacccaagacgaaggcggccaaacggaacgagcgacggaaggagaaacggcagcaggccagtttggcaaatgataaaggaaagagtatgaacatagagggaactgatgctggagaaaccgacaaggtcctttcttccaaaacggataagcagaaggattccgtggaaagtgtaacaaagcagatgagtggcattgctatttctgagtcacatgcaatgccgtccacaaatactataaacaattcgcaaccagaatcatctgctccagacatagacaagaagattcgagcactgaaaaagaagatacgcttagctgaagcacaagtacaaggcgaccctgaaaaattgaaatctgaaacgctggaaaagattaaaaagattgatggatggtgtatggaactgaagcttttggaggacagcagagctcctgcggcctagacaaaatcgacttcggctctgatgtagtagaatagacagtagagccatcgcgaccacaccagggtgctgagctaaattccaaggtgcactgaatcaccctaggcttttccattacctgtgttggttactggaaaaccagtccggtagatgcgggtttgcgcagaacgatggagtgtttttccctgcacatttgatgtctcatgttcgccaccaagtttcaaggtttgtaccacaagatccatttatcagaaagaccacacagtgagataattcaaacgataaaaaaaaaaaaaaaa

SEQ ID NO: 486 - protein, 225 aa, Zea mays
  misc_feature: Ceres CLONE ID no. 312920
  misc_feature: Ceres CDNA ID no. 25446302
  misc_feature: Homolog of GI Number: 23477161 NR Desc: PYM protein
  misc_feature: Homolog of GI Number: 14150139 NR Desc: PYM protein
  misc_feature: Homolog of GI Number: 58388008 NR Desc: ENSANGP00000004563
  misc_feature: Homolog of GI Number: 61838879 NR Desc:  similar to PYM protein
  misc_feature: Homolog of GI Number: 73968285 NR Desc:  similar to within bgcn homolog
  misc_feature: Homolog of GI Number: 24762413 NR Desc: CG30176
  misc_feature: Homolog of GI Number: 62858847 NR Desc: LOC549028
  misc_feature: Homolog of GI Number: 23821033 NR Desc: PYM protein
  misc_feature: Homolog of GI Number: 62651918 NR Desc:  similar to PYM protein
MATSSDGGGDQRRLLSIPKEGERIIAPTRRPDGTLRKAIRIRAGYVPQEEVAIYQSKGALMRKSGPDVPPGYDPALVADAKPKTKAAKRNERRKEKRQQASLANDKGKSMNIEGTDAGETDKVLSSKTDKQKDSVESVTKQMSGIAISESHAMPSTNTINNSQPESSAPDIDKKIRALKKKIRLAEAQVQGDPEKLKSETLEKIKKIDGWCMELKLLEDSRAPAA

SEQ ID NO: 487 - DNA, 650 bp, Zea mays
  misc_feature: Ceres CLONE ID no. 313005
  misc_feature: Ceres CDNA ID no. 29191480
  CDS (68)..(493): REFERENCED BY SEQ ID NO: 488
aagagcagaacgacgaggagattgcttggttggagcctggaggagttggtgaggagaggtcgcgaacatggagaaccttgctctgctttggagcatcatcggcccgggcgtgtccggtgccatcttcggggccggatggtggttctgggtggacccggtcgtttgcagcgcggtccaggtctccttcctccactaccttccagggatcttcgcttcgctggcggcgctcatgttcaattgcgtgaacaaggatgagatcggatacgactattactcaccctacggggacgattcagagtggagagtgaagctctggctttttgtggcatatgtcgtttcttttgtctgtttagctggatccgtgggtttattggtgcaagatgcgctgacgaacaagggcccatctgtctggactggtgttgctggcgttctgcaatgtgttcttgtgttgataagcggcctggtgtattggacatgccactcagaagattaagggcgtaatgtcatgagcagacttgcaaggttggtcacagttgtgtgaaggaaattatttctggcaacatatgattttgtgtgatggaaatgacggacactgttcactgctgaatgggatgactagatgtttcatctgtacaaaaaaaaaaaaaaaa

SEQ ID NO: 488 - protein, 141 aa, Zea mays
  misc_feature: Ceres CLONE ID no. 313005
  misc_feature: Ceres CDNA ID no. 29191480
  misc_feature (15)..(135): Pfam Name: UPF0220 PFAM Desc: Uncharacterised protein family
  misc_feature: Homolog of GI Number: 8778790 NR Desc: T32E20.29
  misc_feature: Homolog of GI Number: 54641349 NR Desc: GA13431
  misc_feature: Homolog of GI Number: 24657484 NR Desc: CG15012
  misc_feature: Homolog of GI Number: 37182422 NR Desc: SMP1
MENLALLWSIIGPGVSGAIFGAGWWFWVDPVVCSAVQVSFLHYLPGIFASLAALMFNCVNKDEIGYDYYSPYGDDSEWRVKLWLFVAYVVSFVCLAGSVGLLVQDALTNKGPSVWTGVAGVLQCVLVLISGLVYWTCHSED

SEQ ID NO: 489 - DNA, 645 bp, Zea mays
  misc_feature: Ceres CLONE ID no. 314456
  misc_feature: Ceres CDNA ID no. 25446303
  CDS (124)..(555): REFERENCED BY SEQ ID NO: 490
gttgaatcgaaagtggtggttcagccgttcaggagctaccaccggcactctccttcactccttccattattttatcggtgctcgaggttcaggtttcacgcagtgcggcgagagctggcagccatgaagagggggagcccatggtcgctgcggctgctaatttgctgcgcggcaatggtggccatcgcgcttctcccccaacaaggaggccaggccgcttgtttcgtgccgacgccgggtccagctccggcaccgcccggctcctccgcgacgaacacgaacgactcctccgctgctcctcggccagccaagcccagcgcattcccacccccaatgtacggtggtgtcacccccggcagtctccagccacacgagtgcggcggccggtgcgcggggcggtgctcggcgacggcgtaccagaagccgtgcctcttcttctgccgcaagtgctgcgcggcgtgcctgtgcgtgccgccgggcacctacggcaacaagaacacctgcccctgctacaacaactggaagaccaagcggggaggccccaagtgcccctagtagccctccctctcggtctacttgatgagatcttctgttcaaaaaatcaaaaggaataagaatctgtttaacctaaaaaaaaaaaaaaaa

SEQ ID NO: 490 - protein, 143 aa, Zea mays
  misc_feature: Ceres CLONE ID no. 314456
  misc_feature: Ceres CDNA ID no. 25446303
  misc_feature (78)..(143): Pfam Name: GASA PFAM Desc: Gibberellin regulated protein
  misc_feature: Homolog of GI Number: 59042581 NR Desc: GASA2
  misc_feature: Homolog of GI Number: 44681330 NR Desc: At1g74670
  misc_feature: Homolog of GI Number: 12324817 NR Desc: GAST1
  misc_feature: Homolog of GI Number: 2982285 NR Desc: GASA5
  misc_feature: Homolog of GI Number: 19247 NR Desc: gast1
  misc_feature: Homolog of GI Number: 16516821 NR Desc: gibberellin induced protein 3
  misc_feature: Homolog of GI Number: 825524 NR Desc: gip1
  misc_feature: Homolog of GI Number: 16516819 NR Desc: putative gibberellin induced protein 2
  misc_feature: Homolog of GI Number: 53793182 NR Desc: putative gibberellin induced protein 3
  misc_feature: Homolog of GI Number: 44889867 NR Desc: GASA
MKRGSPWSLRLLICCAAMVAIALLPQQGGQAACFVPTPGPAPAPPGSSATNTNDSSAAPRPAKPSAFPPPMYGGVTPGSLQPHECGGRCAGRCSATAYQKPCLFFCRKCCAACLCVPPGTYGNKNTCPCYNNWKTKRGGPKCP

SEQ ID NO: 491 - DNA, 968 bp, Zea mays
  misc_feature: Ceres CLONE ID no. 314685
  misc_feature: Ceres CDNA ID no. 25445826
  CDS (88)..(696): REFERENCED BY SEQ ID NO: 492
aggaacatccctactcggaaggctcaccaaatcgtcctacgcttctgcctcctcctccacgaggtgaggaaaccctagcgactgaccatggcgttgctcccgcgcaccgcacggttggccttcctctctaccccgcggtcgtactccgccgccgccgctgccgctgcgggcgcctccccgacctccccagcgccatacgggggcgcgcccccaccggcgatgtcgaagacggccgagttcgtggtctccaaggttgatgacctgatgaactgggcgcgtaagggctcgatttggcccatgaccttcgggctcgcctgctgcgcggtcgagatgatgcacgccggcgcgtcccgctacgacttcgaccggttcggcgtcatcttccgtccctcgccgcgccagtccgattgcatgatcgtcgccggcacgctcaccaacaaaatggctccagccctccgcaaggtttatgaccaaatgcctgagcctagatgggttatttcaatgggcagctgtgccaacggtggtggatactaccattactcctactctgttgtacgtggatgtgaccgtatagtccccgtggacatctacgtccctgggtgcccaccaactgctgaggcactgctgtacggtgttcttcagctccaaaagaagatcaacaggcgtaaggatttccttcactggtggaccaagtgaagcatgcttctgctgttgctcgcttgctacgtttctttgcactcgacctacctgtcttatctgaaataaggacggactttgctcggattcacaaatttgttgtgcctggaaggatgtatgcccaggttgtgacgaacatataacttgtgtacttggagtcagttcgcctgtaatggacaccagacctgctgtgaatctgtttttaagcttccattgtaatacagcaatacaccatatacttgtatgttaatacaccaaaaaaaaaaaaaaaa

SEQ ID NO: 492 - protein, 202 aa, Zea mays
  misc_feature: Ceres CLONE ID no. 314685
  misc_feature: Ceres CDNA ID no. 25445826
  misc_feature (80)..(187): Pfam Name: Oxidored_q6 PFAM Desc: NADH ubiquinone oxidoreductase
  misc_feature: Homolog of GI Number: 50932455 NR Desc: putative NADH
  misc_feature: Homolog of GI Number: 34910678 NR Desc: putative NADH dehydrogenase
  misc_feature: Homolog of GI Number: 562282 NR Desc: PSST subunit of NADH: ubiquinone oxidoreductase
  misc_feature: Homolog of GI Number: 6007781 NR Desc: NADH ubiquinone oxidoreductase PSST subunit
  misc_feature: Homolog of GI Number: 15810287 NR Desc: putative NADH dehydrogenase
  misc_feature: Homolog of GI Number: 77745495 NR Desc: NADH
  misc_feature: Homolog of GI Number: 9652180 NR Desc: NADH
  misc_feature: Homolog of GI Number: 9652190 NR Desc: NADH
  misc_feature: Homolog of GI Number: 1235607 NR Desc: NADH
  misc_feature: Homolog of GI Number: 10444179 NR Desc: NADH dehydrogenase subunit 10
MALLPRTARLAFLSTPRSYSAAAAAAAGASPTSPAPYGGAPPPAMSKTAEFVVSKVDDLMNWARKGSIWPMTFGLACCAVEMMHAGASRYDFDRFGVIFRPSPRQSDCMIVAGTLTNKMAPALRKVYDQMPEPRWVISMGSCANGGGYYHYSYSVVRGCDRIVPVDIYVPGCPPTAEALLYGVLQLQKKINRRKDFLHWWTK

SEQ ID NO: 493 - DNA, 721 bp, Zea mays
  misc_feature: Ceres CLONE ID no. 314785
  misc_feature: Ceres CDNA ID no. 36585720
  CDS (2)..(484): REFERENCED BY SEQ ID NO: 494
cgatttgacccatctcccaacccctacactcccggcggcggcgcaggagcagcagcaccagcacccgaggatggtgaagttcctcaagcccggcaaggccgtgatcctcctgcagggccggttcgccggcaggaaggcggtgatcgtgcgcgtgttcgaggagggcacccgcgaccgcccctacggccactgcctcgtcgccggcctcgccaagtaccccaagaaggtggtccgcagggactcggccaagaagacggcgaagaagtcgcgcgtcaagtgcttcatcaagctcgtcaacttcacccacctcatgcccacccgctacaccctcgacgtcgacttcaaggacgtggccaccggcgggcccgacgcgctctccacccgcgacaagaaggtcgccgcatgcaaggccgccaaggcgcgcctcgaggagaggttcaagaccggcaagaacaggtggttctttaccaagctccgcttctagatggtcggcgtcccgaatggtgaccgtcggtttcttgtatgggacacactccaagccatgtctcttttcgtattgccatgaagacttcttcgtgtttagtcctggggctctcaggtatattgtgcgtgtgtacttcgaatgtttggtcttggagtcctactgaattgatgaatgttcaatttatgtcttcaggattaacagcgaatattgtttacaatctgaaaaaaaaaaaaaaaa

SEQ ID NO: 494 - protein, 137 aa, Zea mays
  misc_feature: Ceres CLONE ID no. 314785
  misc_feature: Ceres CDNA ID no. 36585720
  misc_feature (5)..(40): Pfam Name: KOW PFAM Desc: KOW motif
  misc_feature (52)..(137): Pfam Name: Ribosomal_L27e PFAM Desc: Ribosomal L27e protein family
  misc_feature: Homolog of GI Number: 50906961 NR Desc: putative 60S ribosomal protein L27
  misc_feature: Homolog of GI Number: 37536910 NR Desc: putative ribosomal protein L27
  misc_feature: Homolog of GI Number: 20466061 NR Desc: putative ribosomal protein
  misc_feature: Homolog of GI Number: 8131701 NR Desc: ribosomal protein L27
  misc_feature: Homolog of GI Number: 23198420 NR Desc: putative ribosomal protein L27
  misc_feature: Homolog of GI Number: 21554529 NR Desc: ribosomal protein L27
  misc_feature: Homolog of GI Number: 7441035 NR Desc: ribosomal protein L27
  misc_feature: Homolog of GI Number: 7441033 NR Desc: ribosomal protein L27
  misc_feature: Homolog of GI Number: 20768 NR Desc: ribosomal protein L27
  misc_feature: Homolog of GI Number: 7441034 NR Desc: ribosomal protein L27
MVKFLKPGKAVILLQGRFAGRKAVIVRVFEEGTRDRPYGHCLVAGLAKYPKKVVRRDSAKKTAKKSRVKCFIKLVNFTHLMPTRYTLDVDFKDVATGGPDALSTRDKKVAACKAAKARLEERFKTGKNRWFFTKLRF

SEQ ID NO: 495 - DNA, 713 bp, Zea mays
  misc_feature: Ceres CLONE ID no. 314906
  misc_feature: Ceres CDNA ID no. 25446305
  CDS (121)..(336): REFERENCED BY SEQ ID NO: 496
aagttctcaagctattccttactcctgacatgttgtatctgtctggtttttttttttggaaacgggtattttttttcattgcctttctgcagatacctgatcccaaactagctggccaacatggcgaacgatgaccctgtggacgacgaaaaccccagatccaacaccactaataacagcatcaatgacaagttggctgaagtgttcgacatggtctcagtccacaaacatcagtataaaatgccgacgttcgccttccacaccaacaagacgatcaccgaagctttacatcggcctctactgcgagcacaagctagcatggtcacaacctcctagcctatatatgaactggtgttatcccgactgaacttttctttttgttgacacctttcgtcaggcctctccaccagaggttgactcgtatgtctgttttctggtttctcataccagaattaacgttcttgaccttgtaaggcctcttcttgaccttgtaaggctctcactctgtgtctgcatccttctcgcatcccttgtttccttctttcccactacatgcaggatcagtcccgatattgccgtgtttgccagccttctgcatccacctactttctgttcccttctatccctcctgagctaattgttgctcctatgtaatccgtgtttattatttcggtaccatgatgatgaaattagttttaaaaaaaaaaaaaaaa

SEQ ID NO: 496 - protein, 71 aa, Zea mays
  misc_feature: Ceres CLONE ID no. 314906
  misc_feature: Ceres CDNA ID no. 25446305
MANDDPVDDENPRSNTTNNSINDKLAEVFDMVSVHKHQYKMPTFAFHTNKTITEALHRPLLRAQASMVTTS

SEQ ID NO: 497 - DNA, 1008 bp, Zea mays
  misc_feature: Ceres CLONE ID no. 315635
  misc_feature: Ceres CDNA ID no. 36707385
  CDS (112)..(765): REFERENCED BY SEQ ID NO: 498
acctggccgctccatctcgcgtccaacaatcaattcggcgtcgctctcgtctcatcagtcatcactccgcgactgcgagcgagcgagcgaggcccttccgcgccacgcgcaatggacgctgctctgctcgtgaccgtcctcgtccccgcggtggcggcgctcctcgtcctcggggccgcgtccgcctcgccgccgcgcgccttcttcgtgttcggggactccctcgtggacaacggcaacaacaactacctcatgaccacggcgcgggccgacgcgccgccctacgggatcgacttccccacgcacctgcccacggggcggttctccaacgggctcaacatccccgacatcatcagcgagcacctcggctcccagcccgcgctgccgtacctcagccccgacctccgcggcgaccagctgctcgtcggcgccaacttcgcgtccgccggcgtcggcatcctcaacgacaccggcatacagttcgtgaacatcatcgggatcgggcagcagctgcacaacttccaggactaccagcagaggctggccgcgttcgtcggcgacgacgcggcgaggcaggtcgtgagcaatgcgctcgtcctcatcacgctcggcggcaacgacttcgtcaacaactactacctggtgcccttctccttccgctcccgccagttcgccatccaggactacgtcccgtacctcatctccgagtacaggaaaatcctcacgacgagcaagccgctgtggaatctgaggttcagcaagtagaagtagctgagcaggagctcattgaaggagaagaacaggtggtcgaagaggagtcgtctaacactgaggcattcgacttgatctaggtggcgtttcccagttgacattggcgccgacgatccttagttcgttttacatttattcctttattttgtaataagtcttccgctatgtaataattactctgatgttattatgacatttatctctatacactctgttattgtaaaaaaaaaaaaaaaa

SEQ ID NO: 498 - protein, 217 aa, Zea mays
  misc_feature: Ceres CLONE ID no. 315635
  misc_feature: Ceres CDNA ID no. 36707385
  misc_feature (31)..(177): Pfam Name: Lipase_GDSL PFAM Desc: GDSL
  misc_feature: Homolog of GI Number: 50926328 NR Desc: OSJNBb0002J11.20
  misc_feature: Homolog of GI Number: 50910547 NR Desc: putative anther
  misc_feature: Homolog of GI Number: 31432540 NR Desc: putative early nodulin gene
  misc_feature: Homolog of GI Number: 22758315 NR Desc: putative early nodulin gene
  misc_feature: Homolog of GI Number: 45649132 NR Desc: GSDL
  misc_feature: Homolog of GI Number: 50948623 NR Desc: putative GDSL
  misc_feature: Homolog of GI Number: 50915858 NR Desc: putative family II lipase EXL4
  misc_feature: Homolog of GI Number: 6721157 NR Desc: putative GDSL
  misc_feature: Homolog of GI Number: 58531342 NR Desc: At5g18430
  misc_feature: Homolog of GI Number: 21592773 NR Desc: Proline
MDAALLVTVLVPAVAALLVLGAASASPPRAFFVFGDSLVDNGNNNYLMTTARADAPPYGIDFPTHLPTGRFSNGLNIPDIISEHLGSQPALPYLSPDLRGDQLLVGANFASAGVGILNDTGIQFVNIIGIGQQLHNFQDYQQRLAAFVGDDAARQVVSNALVLITLGGNDFVNNYYLVPFSFRSRQFAIQDYVPYLISEYRKILTTSKPLWNLRFSK

SEQ ID NO: 499 - DNA, 906 bp, Zea mays
  misc_feature: Ceres CLONE ID no. 315706
  misc_feature: Ceres CDNA ID no. 40041169
  CDS (157)..(666): REFERENCED BY SEQ ID NO: 500
agatcaggatccattaacacccctacgtacgcctttcctctggaaacccttctctcgcctgcctctcccccgccgcgccgccacttcccctctcccgtcaactccggcttccgcgcgaggtcgagctagcgtttggagttctcgagacctgctgtgatggcgacagagcaagcggcggagaactacacggtggaggacctcgtggccctgaacccctacaaccccgacatcctcaacgacctcgagaagttcgtcaatgagcagcaaatggaggagcaattcaaggtattgatagttctttctcactacctagagactgctaggttcagtcaattttgggatgaagcagcaaagaaccgccacatatcggaagcagtgccaggtttcgaacaagcaatccaatcctatgcgattcatgtactttccttgacataccagaaagttccaaggcctattcttgtagaggcaatcaacatcgaaggtctcgcgttggacaagtttcttgagtaccatgccgcgaactcaggttgggtgattgagaagggtgggcagtctcaagtgattgttcttccgcgtaatgagttcaatcacccagagctcaagaagaacacagccgatatccttccgtttgaacacgtaacacgcatattccctgtccttggctgattcaggcgtgctgagagatctatacaaaactcagcgagtgaagcttctcttagtcattgcatcttcagtttgtagtgtaccctattgagattatctcggtataccagtcctttttatgccggagttggtttctgcaacctatggttattgttattactataacgaaatgctcagatatgagattggtcttgtccttcgaaggaggctgtcaggtccattgtttgaaaaaaaaaaaaaaaa

SEQ ID NO: 500 - protein, 169 aa, Zea mays
  misc_feature: Ceres CLONE ID no. 315706
  misc_feature: Ceres CDNA ID no. 40041169
  misc_feature (37)..(169): Pfam Name: eIF PFAM Desc: Eukaryotic translation initiation factor 3 subunit 11
  misc_feature: Homolog of GI Number: 20453126 NR Desc: AT4g33250/F17M5_10
MATEQAAENYTVEDLVALNPYNPDILNDLEKFVNEQQMEEQFKVLIVLSHYLETARFSQFWDEAAKNRHISEAVPGFEQAIQSYAIHVLSLTYQKVPRPILVEAINIEGLALDKFLEYHAANSGWVIEKGGQSQVIVLPRNEFNHPELKKNTADILPFEHVTRIFPVLG

SEQ ID NO: 501 - DNA, 680 bp, Zea mays
  misc_feature: Ceres CLONE ID no. 316328
  misc_feature: Ceres CDNA ID no. 36698926
  CDS (65)..(433): REFERENCED BY SEQ ID NO: 502
agcagcacagtcatccacactaacgaacgaactgaggtcgacgacgactgatcgagcagcgacgatggcggctgtgctgaacagcaggaagacgccgcaggtggttgccgtgctggtggcggcggcgctgctggcgtcgtccgcttcggcggcgatcacctgcgggcaggtggggtcgtcgctggctccgtgcatcccgtacgcgacggggagggccagcgcgctccccgcgtcgtgctgcagcggcgtcaagagcctcaacagcgcggcgcggaccagcgcggaccgccaggcggcgtgccgctgcctcaagagcctcgccaacagcgtcaagagcgtcaacatgggcaccgtcgccaccatccccggcaagtgcggcgtctccgtcggattccccatcagcatgtccaccgactgcaacaagatcagctaagttatacgacgaccaagctaataagcctaccgaacgtacacgtacgtcccgcgcgctgcacgagtgatgaagccagggaagaaataaaataaagctagctgtattgccaggagcagcatgcagtatcgatctatatatatactgtactgtagtactctattatatatgtatgtgtggcctgcagtgcgagttgcttcgatccacctacttgttcagacagtttaatggtttaaaaaaaaaaaaaaaa

SEQ ID NO: 502 - protein, 122 aa, Zea mays
  misc_feature: Ceres CLONE ID no. 316328
  misc_feature: Ceres CDNA ID no. 36698926
  misc_feature (33)..(118): Pfam Name: Tryp_alpha_amyl PFAM Desc: Protease inhibitor/seed storage/LTP family
  misc_feature: Homolog of GI Number: 16904376 NR Desc: lipid transfer protein
  misc_feature: Homolog of GI Number: 77553490 NR Desc: Protease inhibitor/seed storage/LTP family
  misc_feature: Homolog of GI Number: 47155247 NR Desc: lipid transfer protein
  misc_feature: Homolog of GI Number: 77548426 NR Desc: lipid
  misc_feature: Homolog of GI Number: 77553489 NR Desc: Protease inhibitor/seed storage/LTP family
  misc_feature: Homolog of GI Number: 1261917 NR Desc: lipid transfer protein 7a2b
  misc_feature: Homolog of GI Number: 510528 NR Desc: Cw
  misc_feature: Homolog of GI Number: 30385244 NR Desc: lipid transfer protein 3
  misc_feature: Homolog of GI Number: 56713236 NR Desc: type 1 non
  misc_feature: Homolog of GI Number: 25990344 NR Desc: lipid transfer protein
MAAVLNSRKTPQVVAVLVAAALLASSASAAITCGQVGSSLAPCIPYATGRASALPASCCSGVKSLNSAARTSADRQAACRCLKSLANSVKSVNMGTVATIPGKCGVSVGFPISMSTDCNKIS

SEQ ID NO: 503 - DNA, 1070 bp, Zea mays
  misc_feature: Ceres CLONE ID no. 316402
  misc_feature: Ceres CDNA ID no. 29191382
  CDS (151)..(891): REFERENCED BY SEQ ID NO: 504
aaactctacttttcttgcggagtaagaagagtggcggcggcgggccggcggcgtgtataggcgtgttcccgagcagaggcccccccaaacgcgcagcgcacacaaacacacaccagcccagctccgagagatcatccggcggccggcgagatgagccgcggcacgggcgcgggttatgaccgccacatcaccattttctcccctgagggacgcctgtaccaagtcgagtacgcgttcaaggcggtgaagtcggcgggtgtcacgtcgatcggcgtccgcggcgcggactccgtctgcgtcgtcacccagaagaaagtcccggacaagttgctggatcagacgagcgtgacacacttgttcccgatcaccaagtacgtcggattgcttgccactggcctcacagctgatgcaaggtcattggtttcccaagcaaggaacgaagcagctgagtttcgtttcaaatggggctatgagatgccagttgatgtgttagcaaaatggattgctgacaaagctcaagtttacacgcaacatgcatacatgagaccccttggagtagttgctatggtcttgggctacgacgaagagaaaaatgcacaactattcaaatgcgaccctgcgggtcacttctttggacataaggcaactagtgccgggctcaaggagcaggaagcaataaattttttggagaagaaaatgaaggatgacccgaaattcacctatgatgaaactgttcagattgcaatatctgcattgcaatcagttctccaggaagatttcaaggccactgagatcgaagttggtgttgtgagaaaagaagaacgtcttttcagagttctcacaacagaggagattgaccagcacctgacggcaattagtgaacgggactgagctgccatatgttggacatttgatccctccacactgcgccgtgccattgtgcttcagcactgccatttagtttgacatcaaatgaactgagtgtaccatttcatgtctaacactgaaaacaagctcgttgattgaatttggcacagtttggttttgcattgttaaaaaaaaaaaaaaaa

SEQ ID NO: 504 - protein, 246 aa, Zea mays
  misc_feature: Ceres CLONE ID no. 316402
  misc_feature: Ceres CDNA ID no. 29191382
  misc_feature (32)..(220): Pfam Name: Proteasome PFAM Desc: Proteasome A
  misc_feature: Homolog of GI Number: 11967891 NR Desc: maize 20S proteasome alpha subunit
  misc_feature: Homolog of GI Number: 50920359 NR Desc: Putative alpha 1 subunit of 20S proteasome
  misc_feature: Homolog of GI Number: 4539545 NR Desc: PRCI
  misc_feature: Homolog of GI Number: 23505817 NR Desc: At2g05840/T6P5.4
  misc_feature: Homolog of GI Number: 3377794 NR Desc: proteasome IOTA subunit
  misc_feature: Homolog of GI Number: 10176805 NR Desc: multicatalytic endopeptidase complex alpha subunit
  misc_feature: Homolog of GI Number: 21386959 NR Desc: multicatalytic endopeptidase complex alpha subunit
  misc_feature: Homolog of GI Number: 2511588 NR Desc: multicatalytic endopeptidase complex
  misc_feature: Homolog of GI Number: 3421070 NR Desc: 20S proteasome subunit PAA1
  misc_feature: Homolog of GI Number: 79322198 NR Desc: PAA2
  misc_feature: Useful for delaying flowering time
  misc_feature: Useful for increasing chlorophyll and photosynthetic capacity
  misc_feature: Useful for increasing increasing anthocyanin content
  misc_feature: Useful for making ornamental plants with modified flowers
  misc_feature: Useful for making ornamental plants with modified leaves
  misc_feature: Useful for making shorter plants
MSRGTGAGYDRHITIFSPEGRLYQVEYAFKAVKSAGVTSIGVRGADSVCVVTQKKVPDKLLDQTSVTHLFPITKYVGLLATGLTADARSLVSQARNEAAEFRFKWGYEMPVDVLAKWIADKAQVYTQHAYMRPLGVVAMVLGYDEEKNAQLFKCDPAGHFFGHKATSAGLKEQEAINFLEKKMKDDPKFTYDETVQIAISALQSVLQEDFKATEIEVGVVRKEERLFRVLTTEEIDQHLTAISERD

SEQ ID NO: 505 - DNA, 469 bp, Zea mays
  misc_feature: Ceres CLONE ID no. 316496
  misc_feature: Ceres CDNA ID no. 25446306
  CDS (100)..(255): REFERENCED BY SEQ ID NO: 506
tagctctgggtagggactccaccaaccctcagtaggcctcgggtgtttttgtagaacggatcacacaggaggggcgggagaagaaccaagccgccgcccatgaatccaccacacgtcgtcactaaaaccagggggttctcggggatcgtctcaggagcacgagggatctcgctggcaaccggaccatgtgcgtggcaatgtggtggcgccataatttctcgccggagtgcatggcaccgccgagggccacattgacctgtgggtggagctcgtcatgacacaatcacgggtaagaaaggtcgtagtacaatccgcctccatctgctaactgcataagggcatgtacagtggtgtttaatgtggaggctcccgctatgaaacgagacgagagaagaatgagcaaggtttttgttcgcagctatttttgtccaatgatattgatatgttgttccgaaaaaaaaaaaaaaaa

SEQ ID NO: 506 - protein, 51 aa, Zea mays
  misc_feature: Ceres CLONE ID no. 316496
  misc_feature: Ceres CDNA ID no. 25446306
MNPPHVVTKTRGFSGIVSGARGISLATGPCAWQCGGAIISRRSAWHRRGPH

SEQ ID NO: 507 - DNA, 664 bp, Zea mays
  misc_feature: Ceres CLONE ID no. 316564
  misc_feature: Ceres CDNA ID no. 40350917
  CDS (104)..(343): REFERENCED BY SEQ ID NO: 508
atatatctccccgcgtccgctagccctagccgccgtccgccgacttcatcgtcgccgtcgtctagacctcttcacgcactggaaaggttaaagtccgacatcaatggcgaagcatcatcctgatctcatcatgtgccggaagcagcctggcatcgcgattggccgcctttgcgagaaatgtgatggcaagtgtgttgtctgcgactcgtacgtgcgcccatgtacgcttgtccgggtctgcgacgagtgcaattatggttcgttccagggaaggtgtgtgatctgtggaggagtcggcatctcagacgcttactactgcaaggagtgcacccagcaggtctagcatctttgatgcgaaggctggcattgccttgaacggcaactttgtgaagcttgtgtcctggtacgacaacgagtggggatacagcacccgagtggtcgatctgatccgccacatgaacagcaccaagtaaatgaacaaactgatgaaagcatgcaaagagtgatgaaagcatgcaaagagagttgtgtttcttccccggaagtgcttccgagaataaatttttcttatctgattgtctaaaacgtataattggtgtaatggtatcgtagtggttggttgagcattgagtgactcatattttgtctaaaaaaaaaaaaaaaa

SEQ ID NO: 508 - protein, 79 aa, Zea mays
  misc_feature: Ceres CLONE ID no. 316564
  misc_feature: Ceres CDNA ID no. 40350917
  misc_feature (1)..(78): Pfam Name: PHF5 PFAM Desc: PHF5
MAKHHPDLIMCRKQPGIAIGRLCEKCDGKCVVCDSYVRPCTLVRVCDECNYGSFQGRCVICGGVGISDAYYCKECTQQV

SEQ ID NO: 509 - DNA, 1261 bp, Zea mays
  misc_feature: Ceres CLONE ID no. 316643
  misc_feature: Ceres CDNA ID no. 40041170
  CDS (94)..(1137): REFERENCED BY SEQ ID NO: 510
atatatactcctgttgcgtagaatcggcacaagggtgcacgttcaggaggagctctcgtggcgtcctagtctgtggaaggtccaaagaagaagatggacggcgagatggacgaggacgttctcacggagatcctcgcgaggctgccgtgcaggtcgctggcgcggttccagtgcgtgtccacgtcgtggcggcgcatcatctccagcgactacctccgccgccggctgccgctcatcacgtcgggcgtgctctaccacgatggtggcaggaggcagcagtcgtacacgtacgcgtgcgcgtcaggcggcggcggcggcggcggcgccatggcggaggccgcggacatgcgcttcttcccgcgccacgagacgtccaccatcatcgacggctgcaacggcctgctgctctactacgcgtcccgcccggcggcgttccacgtcgtgagcccgaccacgcggcggtgggcggagctgccggcgccgcgcgccatgacgctgctctccgtgctggcgttcgacccccgcgcctcgccgcgctaccgggtggtgtgcttcaccgggtggctgccccggggcgccaccgtcgaggtgttcgactccgagcgcggcgcgtggcggggccacgagctcgacttcggcctcggcaccgacgccatgtcggcctccatgcactacgccgccggcgcgctccacgtgctggcctactcgggccacgtcgtccgcgtcgacctggacaccatggcgtgcgcggtcaccccgctcccggcgcccgtcagctgccgcgcgcgcgccgggcactgccgcggccgcctgcggttcgcgtccagcgacggccagcgcctcaggatctgggagctccaggacgccgccgcgggcgagtgggcgctcaagcacgagatcggggtcagcgacgtcgtccccggcgacgcggcgtcacagcccatcacgttcctgttcatggcgttccaccccgaccgggagctggtgtacctgtggtcgccgtggaagctgctggcgttcgacttggtcgagaggcgcgtccaggaatgggtgttcggctccgagaaagaaggcacgcatctcatacaggtttggctgttcccgttctcgcgccatttggccaacgcgctggcctgatcaggccggcttgccgacgagccaaaaaaaaaaaaaagaaacatggggcgcaaatgttcgttgcctatccacactgctctgcttgcttaaacattgataaaatatcaaaaaaaaaaaaaaaaaa

SEQ ID NO: 510 - protein, 347 aa, Zea mays
  misc_feature: Ceres CLONE ID no. 316643
  misc_feature: Ceres CDNA ID no. 40041170
  misc_feature (2)..(47): Pfam Name: F PFAM Desc: F
  misc_feature: Homolog of GI Number: 34907324 NR Desc: P0698A10.24
  misc_feature: Homolog of GI Number: 66779508 NR Desc: Aspartate/glutamate/uridylate kinase
  misc_feature: Homolog of GI Number: 2078483 NR Desc: antifreeze glycopeptide AFGP polyprotein precursor
  misc_feature: Homolog of GI Number: 72547023 NR Desc: proteophosphoglycan ppg4
  misc_feature: Homolog of GI Number: 67542357 NR Desc: putative lipoprotein
  misc_feature: Homolog of GI Number: 67987629 NR Desc: Thymidylate kinase
  misc_feature: Homolog of GI Number: 15901602 NR Desc: cell wall surface anchor family protein
  misc_feature: Homolog of GI Number: 82958562 NR Desc:  similar to mucin 19
  misc_feature: Homolog of GI Number: 67985353 NR Desc: UBA/THIF
  misc_feature: Homolog of GI Number: 67987580 NR Desc: ABC transporter
MDGEMDEDVLTEILARLPCRSLARFQCVSTSWRRIISSDYLRRRLPLITSGVLYHDGGRRQQSYTYACASGGGGGGGAMAEAADMRFFPRHETSTIIDGCNGLLLYYASRPAAFHVVSPTTRRWAELPAPRAMTLLSVLAFDPRASPRYRVVCFTGWLPRGATVEVFDSERGAWRGHELDFGLGTDAMSASMHYAAGALHVLAYSGHVVRVDLDTMACAVTPLPAPVSCRARAGHCRGRLRFASSDGQRLRIWELQDAAAGEWALKHEIGVSDVVPGDAASQPITFLFMAFHPDRELVYLWSPWKLLAFDLVERRVQEWVFGSEKEGTHLIQVWLFPFSRHLANALA

SEQ ID NO: 511 - DNA, 994 bp, Zea mays
  misc_feature: Ceres CLONE ID no. 316675
  misc_feature: Ceres CDNA ID no. 25445849
  CDS (49)..(834): REFERENCED BY SEQ ID NO: 512
acatcaccagcgcacagctttcctcatcgaggcccgagtcctgctctgatggcgaccgacgtggctgagactcccgcgccgttggtggatgcggcccctgaggcgcccgcggacaccccggcggcgcctgctgttgacgcgaagccggccaaggccaagaaggccacagcgccgaagaagcgcgccagcccgacccatccgccgtacgccgagatggtctcggaggcgatcgcgtcgctcaaggagaggacggggtccagcagctttgctattgccaagttcttggaggacaagcacaaggacaagctcccgcccaacttccgcaagcttctgaacgttcagctcaagaagctcgtcgccggcggcaagctgaccaaggtgaagaactcgtacaagctgtcgtccgccaccaagccaaaggccgccccgaagaagaccaagaccggcgtgaagaagcccaaggccgctgccaaaccgaaggccaagtcccccgcgaagcccaagcccgccacaaagcccaaggcggccgcgaagcccgcttccaagccgaaagcagcagcaaaacccaaggcaccagccaagcccaaggccaagcctgctgccaaggcgaagcccaaggctgccggcgctaagccgaagccagctgccaagaaggccggccgccccgccaaggcggccaagacgtcggccaaggccacgccaggaaagaaggcgccggtggccaagaagcccgcggccgccgcgaagaaggcgccggtagccaagaaggccgctccggcgaagaaggcggctgcccctgcccgaaaagcgccgtctcggaaggcgaagaagtagaggaggggtaggcgtcggagaaatgtagggtttggttctcgtattacgctagatgtttgctctccctttagcctaggtggtgtctgtgtgtgcaatgttgtaaatttgatatcggatgctgggaacactaagtcaatcttccaaaaaaaaaaaaaaaaaa

SEQ ID NO: 512 - protein, 261 aa, Zea mays
  misc_feature: Ceres CLONE ID no. 316675
  misc_feature: Ceres CDNA ID no. 25445849
  misc_feature (49)..(119): Pfam Name: Linker_histone PFAM Desc: linker histone H1 and H5 family
  misc_feature: Homolog of GI Number: 22321 NR Desc: H1 histone
  misc_feature: Homolog of GI Number: 34897182 NR Desc: histone
  misc_feature: Homolog of GI Number: 5230785 NR Desc: histone H1 WH1B.1
  misc_feature: Homolog of GI Number: 7439660 NR Desc: histone H1
  misc_feature: Homolog of GI Number: 7439656 NR Desc: histone H1
  misc_feature: Homolog of GI Number: 5230790 NR Desc: histone H1 WH1A.4
  misc_feature: Homolog of GI Number: 5230781 NR Desc: histone H1 WH1A.1
  misc_feature: Homolog of GI Number: 11558848 NR Desc: histone H1
  misc_feature: Homolog of GI Number: 5230788 NR Desc: histone H1 WH1A.3
  misc_feature: Homolog of GI Number: 5230783 NR Desc: histone H1 WH1A.2
  misc_feature: Useful for making bigger plants
  misc_feature: Useful for making ornamental plants with modified leaves
  misc_feature: Useful for making plants with increased biomass
  misc_feature: Useful for making plants with increased biomass and foliage
MATDVAETPAPLVDAAPEAPADTPAAPAVDAKPAKAKKATAPKKRASPTHPPYAEMVSEAIASLKERTGSSSFAIAKFLEDKHKDKLPPNFRKLLNVQLKKLVAGGKLTKVKNSYKLSSATKPKAAPKKTKTGVKKPKAAAKPKAKSPAKPKPATKPKAAAKPASKPKAAAKPKAPAKPKAKPAAKAKPKAAGAKPKPAAKKAGRPAKAAKTSAKATPGKKAPVAKKPAAAAKKAPVAKKAAPAKKAAAPARKAPSRKAKK

SEQ ID NO: 513 - DNA, 566 bp, Zea mays
  misc_feature: Ceres CLONE ID no. 316860
  misc_feature: Ceres CDNA ID no. 25446307
  CDS (71)..(361): REFERENCED BY SEQ ID NO: 514
tccaattcacaggctcaccacaccaaccaacaagcaaaaattccccaatcctctcgtctccgcggcgaagatgtcggggcgcggcaagggcggcgcgaagcgtcaccggaaggtgctgcgcgacaacatccaggggatcacgaagccggcgatccggaggctggcgcggcggggcggcgtgaagcgcatctcggggctcatctacgaggagacccgcggcgtgctcaagatcttcctggagaacgtcatccgcgacgccgtcacctacaccgagcacgcgcgccgtaagaccgtcaccgccatggacgtcgtctacgcgcttaagcgccagggccgcaccctctacggcttcggcggctaggcctgccgcgccgcgcttcgccgtcgctgcggttctggtgttgctgcagttcgcaagttgtttgtgtgggcggaaaaatgctagatactgtagaactgcagtgcggtatgctgcacatgctgtgtttgtctgaagaaatgttgtcaatgctggcttgctctggactcaaacatgctccattctgtgtccaaaaaaaaaaaaaaaa

SEQ ID NO: 514 - protein, 96 aa, Zea mays
  misc_feature: Ceres CLONE ID no. 316860
  misc_feature: Ceres CDNA ID no. 25446307
  misc_feature (59)..(85): Pfam Name: TAF PFAM Desc: TATA box binding protein associated factor
  misc_feature: Homolog of GI Number: 74004206 NR Desc:  similar to germinal histone H4 gene
  misc_feature: Homolog of GI Number: 57110481 NR Desc:  similar to germinal histone H4 gene
  misc_feature: Homolog of GI Number: 55667113 NR Desc:  similar to germinal histone H4 gene
  misc_feature: Homolog of GI Number: 68441405 NR Desc:  similar to histone H2A
  misc_feature: Homolog of GI Number: 57106967 NR Desc:  similar to germinal histone H4 gene
  misc_feature: Homolog of GI Number: 50728590 NR Desc:  similar to germinal histone H4 gene
  misc_feature: Homolog of GI Number: 76657391 NR Desc:  similar to germinal histone H4 gene
  misc_feature: Homolog of GI Number: 57110415 NR Desc:  similar to germinal histone H4 gene
  misc_feature: Homolog of GI Number: 224293 NR Desc: histone H4
  misc_feature: Homolog of GI Number: 70774 NR Desc: histone H4
MSGRGKGGAKRHRKVLRDNIQGITKPAIRRLARRGGVKRISGLIYEETRGVLKIFLENVIRDAVTYTEHARRKTVTAMDVVYALKRQGRTLYGFGG

SEQ ID NO: 515 - DNA, 869 bp, Zea mays
  misc_feature: Ceres CLONE ID no. 317293
  misc_feature: Ceres CDNA ID no. 36593319
  CDS (147)..(632): REFERENCED BY SEQ ID NO: 516
atgagctactataaatggccaaaccctagcggagccacaaaacactctcctccttcctccaccgccgccaacgtcgcctggcggccgtctgcagctccgcgcctctgctcggaagttgttggtgaaggtttcttgaagctgagaagatggtgctgaagacagaactctgccgcttcagcggccagaagatttatcctgggaaaggcatccgatttatccgtgctgattctcaggttttcctttttgccaactcaaaatgcaagcgctacttccacaaccgcctgaagcctgcaaagcttacctggacagcaatgtacaggaagcagcacaagaaggatatccatgctgaggctgtcaagaagaggcgccgcgccaacaagaagccatactcgaggtccattgtgggtgcttccctagaggtgatccagaagaagagggctgagaagcccgaggtccgcgatgctgctagagaagctgctcttcgcgagatcaaggagcgcatcaagaagaccaaggatgagaagaaggcgaagaaggcggaggtgaccaagtcccagaaggcgcagacgaagggcgcggtccagaagggttccaagggccccaagttgggtggcggcggtggcaagcgctgaaagaaccgaagtgtcgttccttgaccttgcaattgctcctccgtggcccaccttgttgcaccaccgccacttttgtagtacctcggttaattttgcattttctttcagagttgcttgtgggttttgagttccatctcaagagagttgagtttatttatctttatattgggtgaaatgttcatatgctttcctcagcttggatgatggtttgctttgtttctctaaaaaaaaaaaaaa

SEQ ID NO: 516 - protein, 161 aa, Zea mays
  misc_feature: Ceres CLONE ID no. 317293
  misc_feature: Ceres CDNA ID no. 36593319
  misc_feature (3)..(73): Pfam Name: Ribosomal_L24e PFAM Desc: Ribosomal protein L24e
  misc_feature: Homolog of GI Number: 50931851 NR Desc: putative 60S ribosomal protein L24
  misc_feature: Homolog of GI Number: 1154859 NR Desc: L24 ribosomal protein
  misc_feature: Homolog of GI Number: 56785063 NR Desc: putative 60S ribosomal protein L24
  misc_feature: Homolog of GI Number: 34900364 NR Desc: putative 60S ribosomal protein L24
  misc_feature: Homolog of GI Number: 2961300 NR Desc: ribosomal protein L24
  misc_feature: Homolog of GI Number: 10180025 NR Desc: 60S ribosomal protein L24
  misc_feature: Homolog of GI Number: 21553461 NR Desc: 60S ribosomal protein L24
  misc_feature: Homolog of GI Number: 30102870 NR Desc: At3g53020
  misc_feature: Homolog of GI Number: 82400154 NR Desc: ribosomal protein L24
  misc_feature: Homolog of GI Number: 25295112 NR Desc: 60S ribosomal protein L24
MVLKTELCRFSGQKIYPGKGIRFIRADSQVFLFANSKCKRYFHNRLKPAKLTWTAMYRKQHKKDIHAEAVKKRRRANKKPYSRSIVGASLEVIQKKRAEKPEVRDAAREAALREIKERIKKTKDEKKAKKAEVTKSQKAQTKGAVQKGSKGPKLGGGGGKR

SEQ ID NO: 517 - DNA, 852 bp, Zea mays
  misc_feature: Ceres CLONE ID no. 317698
  misc_feature: Ceres CDNA ID no. 40041171
  CDS (240)..(602): REFERENCED BY SEQ ID NO: 518
acgcggtctctttcttccttctctctactttcttcctcaccaaattcggatcaaacaaattcgttaaataatctcagaaaacacacggttaacgggatcgaagggattaaaacgaaaacgttccgatcctgtggccaggtctcggtgctaatcgtgtgttttttttggggtgggattttgtgatctgttgttagggtttcggatctggaggattagttctccaagttccgagtcagaccatgaatgagcagctgatgcgaccaccggcgccgctgccgttccaccagatgtgggcggcggtgccggcgatggagcctcctttcaagccggtgcgggcggcgtggaagcgggcggtgcggacgccctggaagcgcaaggcccagcctccggcgtcgggcggcgcgaggtggggcggtgcggcggccccgcgcaacacgacgtcgttccttcgccgcggctctcgtcgcctccgccgccgccttcctcttcgccgccgtccgccactgagccgatggggcctcgtgcctgcaggctacctagcagtacttcccccgccgccgccgccgccgcctagatctatttattggagtgctatccagtagtactagtagtagtgagatttgttcggtgctgtcgtgtcgtcgtcgcattttggtcggatctggtttccttggtgcagggagggtttctataccatgtcgcggtgtcggttgtgtgatctcatcccccccttgtagatagtactctgctatctcgtcgtgatcgtgagtggtgattctgtctggttgatatttgctactgatattggtcccatttgagatatgcgttgctgcgaaaaaaaaaaaaaaaaaa

SEQ ID NO: 518 - protein, 120 aa, Zea mays
  misc_feature: Ceres CLONE ID no. 317698
  misc_feature: Ceres CDNA ID no. 40041171
MNEQLMRPPAPLPFHQMWAAVPAMEPPFKPVRAAWKRAVRTPWKRKAQPPASGGARWGGAAAPRNTTSFLRRGSRRLRRRLPLRRRPPLSRWGLVPAGYLAVLPPPPPPPPRSIYWSAIQ

SEQ ID NO: 519 - DNA, 734 bp, Zea mays
  misc_feature: Ceres CLONE ID no. 317995
  misc_feature: Ceres CDNA ID no. 25446308
  CDS (117)..(575): REFERENCED BY SEQ ID NO: 520
attctataaaacctctgcccgggggctagggtttcctcccagccgtcatcgtttcgcgtctgcctcagcccgccgcaaggagaggtaagttcaggagacatcttcgagaagctgaaatggctcctaaagctgctcctgccaagaagggtgatgccaagacccaggccttgaaggttgccaaggctgtgaagtctggggcagccaagaagaagaccaagaagatccgcacgtctgtgacatttcaccgccccacgaccctgaagaaggctagggaccccaagtacccacgaatcagcactaccggaaggaacaagcttgatcagtaccaaattctcaagtacccccttaccacagaatcagcgatgaagaagattgaagataacaacactctggtcttcattgttgacctcaaggcagacaagaagaagatcaaggctgccgtcaagaagatgtatgacatccaggcaaagaaggtcaacaccttgatcaggcctgatgggaagaagaaggcttacgtgaagctgactcccgactatgatgctcttgatgttgccaacaaaatcggcatcatctaagtgctgcattaggcatcctaattcatctgttgtgtcctagttctatgtgaaaccagagttttctagctatggctctcaatcgctccattaccatgtgttatgcacacttctgaatttgatatcatccaagtgaccttttgaacaaaaaaaaaaaaaaaa

SEQ ID NO: 520 - protein, 152 aa, Zea mays
  misc_feature: Ceres CLONE ID no. 317995
  misc_feature: Ceres CDNA ID no. 25446308
  misc_feature (11)..(64): Pfam Name: Ribosomal_L23eN PFAM Desc: Ribosomal protein L23
  misc_feature (70)..(149): Pfam Name: Ribosomal_L23 PFAM Desc: Ribosomal protein L23
  misc_feature: Homolog of GI Number: 70663909 NR Desc: OSJNBa0029H02.21
  misc_feature: Homolog of GI Number: 50926169 NR Desc: OSJNBa0029H02.16
  misc_feature: Homolog of GI Number: 34895146 NR Desc: putative 60S ribosomal protein L23A
  misc_feature: Homolog of GI Number: 76573339 NR Desc: ribosomal protein L25
  misc_feature: Homolog of GI Number: 1084424 NR Desc: ribosomal protein L23a
  misc_feature: Homolog of GI Number: 2641201 NR Desc: ribosomal protein L23a
  misc_feature: Homolog of GI Number: 7340791 NR Desc: ribosomal protein L23
  misc_feature: Homolog of GI Number: 13560777 NR Desc: ribosome protein L23a
  misc_feature: Homolog of GI Number: 7711063 NR Desc: ribosomal protein L23
  misc_feature: Useful for making bigger plants
  misc_feature: Useful for making plants with increased biomass and foliage
  misc_feature: Useful for sterility
MAPKAAPAKKGDAKTQALKVAKAVKSGAAKKKTKKIRTSVTFHRPTTLKKARDPKYPRISTTGRNKLDQYQILKYPLTTESAMKKIEDNNTLVFIVDLKADKKKIKAAVKKMYDIQAKKVNTLIRPDGKKKAYVKLTPDYDALDVANKIGII

SEQ ID NO: 521 - DNA, 1336 bp, Zea mays
  misc_feature: Ceres CLONE ID no. 318026
  misc_feature: Ceres CDNA ID no. 40350918
  CDS (71)..(1069): REFERENCED BY SEQ ID NO: 522
tagaatgttcctgccgatgcttttataagagaaggttgctctttcttctctagagtgtctagctgagaacatggtgacctcaagcaagggcaaggtatgtgtaaccggggcctcaggctttgttgcctcttggcttatcaaacggctcctcgagtctggatatcatgtggtagggactgtcagggacccaggaaatcaccaaaaaacagcccacctttggaaattacctggcgctaaagagaggctgcaaatcgtgcgagctgatctgttggaagaagggagcttcgacagcgccgtgatggcctgtgagggtgtattccacactgcatcccccgtcctcgctaaacccgactctactagcaaggaggaaacgctcgttcctgcggtgaacggtactctgaacgtgctgagatcgtgcaagaagaaccccttcctgaaaagggtcgtccttacgtcttcgtcgtctgcggtgaggatcagggacgatggtggccagtccagcagtaacatctcgctggacgaaacgacatggagctccgtgccactctgcgagaagatgcacctatggtatgccctagccaaggtatttgcagagaaagcggcgtgggagttcgccaaggagaacggcatcgaccttgtgactgtcctcccgtcgttcgtgatcgggcccagtttgtcccacgagctatgcgttaccgcttcagacgtcctaggcctattccaaggcgacacggcaaggttcagctcgtacggaagaatgggatacgtccacatcgacgacgttgcgagcagccacatcctggtgtacgaggtcccccaggccgccgggaggtacctgtgcagctcagtggtgctggacaacgacgagctggtctcctcgctcgcgaaacgctacccgatattccccataccccggaggctgaacagcccctacggcaagcagtcgtaccagctgaacacgtcgaagctgcaggggctgggcttcaagttcagaggggtgcaggagatgttcgacgactgcgtacagtcgctcaaagaccagggacacctgctggagtgccccctgtgaactgcgatgggggtgcctcctgtgaacgcgccggttgggttgcgtcccgaacccgctgttaattcggtttttttcttcaataattccacgtcatgtcacggtgtcctcgcgcagactgctactgtcagggcgtcatagctcacgggctctacggctacatgaataaaatgtcacactcgtcatttgctttgccaaaaaaaaaaaaaaaaaaaaaaaaaaaaaaaaaaaaaaaaaaaaaaaaaaaaaaaaaaaaaaaaaaaaaaaaaa

SEQ ID NO: 522 - protein, 332 aa, Zea mays
  misc_feature: Ceres CLONE ID no. 318026
  misc_feature: Ceres CDNA ID no. 40350918
  misc_feature (11)..(29): Pfam Name: NAD_binding_4 PFAM Desc: Male sterility protein
  misc_feature (229)..(258): Pfam Name: Epimerase PFAM Desc: NAD dependent epimerase/dehydratase family
MVTSSKGKVCVTGASGFVASWLIKRLLESGYHVVGTVRDPGNHQKTAHLWKLPGAKERLQIVRADLLEEGSFDSAVMACEGVFHTASPVLAKPDSTSKEETLVPAVNGTLNVLRSCKKNPFLKRVVLTSSSSAVRIRDDGGQSSSNISLDETTWSSVPLCEKMHLWYALAKVFAEKAAWEFAKENGIDLVTVLPSFVIGPSLSHELCVTASDVLGLFQGDTARFSSYGRMGYVHIDDVASSHILVYEVPQAAGRYLCSSVVLDNDELVSSLAKRYPIFPIPRRLNSPYGKQSYQLNTSKLQGLGFKFRGVQEMFDDCVQSLKDQGHLLECPL

SEQ ID NO: 523 - DNA, 731 bp, Zea mays
  misc_feature: Ceres CLONE ID no. 318563
  misc_feature: Ceres CDNA ID no. 25446309
  CDS (16)..(573): REFERENCED BY SEQ ID NO: 524
atacccaaatacacaatggctggtgggtcctcctccatttcccccacctactacttcctctgctcgccttcgtcggatcggatccacagcaagcagcaacagcctgcagccggcagtcctcgcctccgcctcctccaccctgaccgtcaacagaggaagacgaggatgtcgggatccaaggtgtacaccctcgaggaggtggctaagcacaacaccaaggacgactgctggctcgtcatcggcggcaaggtgtacaatgtgaccaagtttctggaggatcaccctggaggcgatgatgttctgctgtcttccactgccaaggatgctaccgatgatttcgaagatgtggggcacagcagcactgcccgtgcaatgatggacgagtacttagtgggtgagattgatgcagccacgatacccaccaaggtgaagtacacgccccccaagcagccgcactacaaccaggacaagacccaggagttcgtcatcaagatcctccagtttttggtccccctcgcaatactgggtctggccgtcgctgtaaggatgtacaccaagtcggaatctgcctaatctcttgtcatcaacgcttcaaacatcattcacaaactgaataagttagtgttgaaatgctgcaaagatcattaattcggaaacttgagtctttgctgtcgtgtgagacgtacgtctattagtataaaatcacttctataagaaaaaaaaaaaaaaaa

SEQ ID NO: 524 - protein, 135 aa, Zea mays
  misc_feature: Ceres CLONE ID no. 318563
  misc_feature: Ceres CDNA ID no. 25446309
  misc_feature (6)..(80): Pfam Name: Cyt PFAM Desc: Cytochrome b5
  misc_feature: Homolog of GI Number: 34905998 NR Desc: putative cytochrome B5
  misc_feature: Homolog of GI Number: 52353573 NR Desc: cytochrome b5
  misc_feature: Homolog of GI Number: 414705 NR Desc: cytochrome b5
  misc_feature: Homolog of GI Number: 23197754 NR Desc: putative cytochrome b5
  misc_feature: Homolog of GI Number: 1345882 NR Desc: Cytochrome b5
  misc_feature: Homolog of GI Number: 296386 NR Desc: cytochrome b5
  misc_feature: Homolog of GI Number: 50844677 NR Desc: cytochrome b5 isoform Cb5
  misc_feature: Homolog of GI Number: 510539 NR Desc: cytochrome b5
  misc_feature: Homolog of GI Number: 1345879 NR Desc: Cytochrome b5
  misc_feature: Homolog of GI Number: 2647949 NR Desc: cytochrome b5
  misc_feature: Utility: PEG Useful for making plants with increased tolerance to drought
MSGSKVYTLEEVAKHNTKDDCWLVIGGKVYNVTKFLEDHPGGDDVLLSSTAKDATDDFEDVGHSSTARAMMDEYLVGEIDAATIPTKVKYTPPKQPHYNQDKTQEFVIKILQFLVPLAILGLAVAVRMYTKSESA

SEQ ID NO: 525 - DNA, 1197 bp, Zea mays
  misc_feature: Ceres CLONE ID no. 318691
  misc_feature: Ceres CDNA ID no. 35383163
  CDS (70)..(786): REFERENCED BY SEQ ID NO: 526
gagccaccaagagatccacgaatatacccatcccattccccacaaggctccgtcccttcggcggcggcgatgtctctcccccctggcccggcggacagtggcgccggcaccggagacgactggttcctcgactgcggcatcctcgacgacctgcccgccgcggcctgcggggccttcccgtgggacgcgtccccgtcgtcttccaaccccagtgtggaagtgggcagctatgtaaacgccaatgatgcattcaaggagcccaatgatgtcttcaaggagcctggcagcagtaaacgggaaagaatgaggaggaacaagctgaatgacaggtttcttgaactggggtctgcattagaacctgggaagccagtgaaagctgacaaagctgccatcctaagcgatgctactcgcatggttattcagctccgttcagaatcacagcaactgaaggagactaatggcagcctcgaagaaaagattaaagaactaaaggccgagaaggacgagcttcgcgacgagaagcagaaactgaaactggagaaggagagtctagagcaccagatgaagctgatggcatcggctccagcctacatgccccatccgaccctgatgccggcgcctttcgcccaggcgcccctaactccattccatgcccagggccaagctgcagggcagaagctgatgatgcccttcgtcggctacccagggtacccaatgtggcagttcatgccgccttcagaggtcgacacctcgaaggacagcgaggcgtgccctcctgtcgcatgatcaccttgatggggctggtcctgctcacaccatgtggattagccgcaactagttgtcgttgtcgatccattgatggggtataactgatgttcttaggctatctccagcagcctctctatcctattctctatcttactccctattttaaattttactctgtaaacagtacagtctatagtgtaagacaatgttttgcatgtttatatccacgccttgctggagatgggcatggtagtctgttggtgaccaaggaagctgtgatatctgtggcgaggtgccctgctagaggctcctttaatgggtgtacaattttcgtggtggaaagaagaatgttcgttcttgttctccatagcaacagtgtcatattatctatctatgccatatatattttacaaaaaaaaaaaaaaaaaa

SEQ ID NO: 526 - protein, 238 aa, Zea mays
  misc_feature: Ceres CLONE ID no. 318691
  misc_feature: Ceres CDNA ID no. 35383163
  misc_feature (69)..(120): Pfam Name: HLH PFAM Desc: Helix
  misc_feature: Homolog of GI Number: 50940947 NR Desc: helix
  misc_feature: Homolog of GI Number: 29367409 NR Desc: helix
  misc_feature: Homolog of GI Number: 21592325 NR Desc: bHLH transcription factor
  misc_feature: Homolog of GI Number: 20127115 NR Desc: putative bHLH transcription factor
  misc_feature: Homolog of GI Number: 51979114 NR Desc: PREDICTED OJ1442_E05.19 gene product
  misc_feature: Homolog of GI Number: 20127030 NR Desc: putative bHLH transcription factor
  misc_feature: Homolog of GI Number: 19705592 NR Desc: putative transcription factor BHLH11
  misc_feature: Homolog of GI Number: 51536178 NR Desc: basic helix
  misc_feature: Homolog of GI Number: 22329204 NR Desc: basic helix
  misc_feature: Useful for making lethal plants for genetic confinement systems
MSLPPGPADSGAGTGDDWFLDCGILDDLPAAACGAFPWDASPSSSNPSVEVGSYVNANDAFKEPNDVFKEPGSSKRERMRRNKLNDRFLELGSALEPGKPVKADKAAILSDATRMVIQLRSESQQLKETNGSLEEKIKELKAEKDELRDEKQKLKLEKESLEHQMKLMASAPAYMPHPTLMPAPFAQAPLTPFHAQGQAAGQKLMMPFVGYPGYPMWQFMPPSEVDTSKDSEACPPVA

SEQ ID NO: 527 - DNA, 649 bp, Zea mays
  misc_feature: Ceres CLONE ID no. 319414
  misc_feature: Ceres CDNA ID no. 40350919
  CDS (93)..(443): REFERENCED BY SEQ ID NO: 528
acaacacaacgcttatattacttacaacaaaagataagcccacgaatcagtagatcgaggtcccgcccagtccagcagaagcgcacacggagatgtcccagctgagccctgctggccacatggctgcgacgctcctcctcatcctcctggcctccgcagcagcagcagcggtgtcagctgaccaacaggtctctgcctgccagaatgacatagacgcactgtggcgcagctgcaagcagttcgtccagaaggaggggcccaagatgcctccgtccgaggactgctgcaaaaccatcaaggccttagacgcgcacgcgtcctgcatctgcgactacgtcggctccccggacgccaggaataagctagacctggacaaggtgttcttcgttaccaaacagtgcggcgtcaccgtccccaagggctgcggatcaaagcaggactgaagagcggctgaatctgaatggagcaagttggctaacatacgcacggcagctacaaatacttataggaataaataaagttggtcaactgttggtttcatggtgttggagtacaacaactgtactgttcttatcctcatatatgatatatgaactctagttcatcacataatataaatctgtaagagagcccaaaaaaaaaaaaaaaa

SEQ ID NO: 528 - protein, 116 aa, Zea mays; identical to SEQ ID NO: 184
  misc_feature: Ceres CLONE ID no. 319414
  misc_feature: Ceres CDNA ID no. 40350919
  misc_feature (36)..(111): Pfam Name: Tryp_alpha_amyl PFAM Desc: Protease inhibitor/seed storage/LTP family

SEQ ID NO: 529 - DNA, 1027 bp, Zea mays
  misc_feature: Ceres CLONE ID no. 319696
  misc_feature: Ceres CDNA ID no. 25447091
  CDS (171)..(665): REFERENCED BY SEQ ID NO: 530
aaatttaaccgttcggtgtcttttccggcttgagcgggcccggcccggatgtacacccacacaagcccggacagacctgcctcgcttctcgtctcccgtctcctccgcgttcctgctttccacccgccgccgccgccgcccaccttaccgtcacctgctccttgcccagcatgtggggtagcaccgacggcggaacgccggaggtcaccctcgagacctccatgggcgctgtctctgttgagatgtactacaggcacgcgcccaagacttgccggaacttcgtcgagctcgcgcgacgtggctactacgacaacgttatcttccaccgcatcatcaaagatttcattgtgcaaggtggggatcctacaggaaccggcagaggtggcgagtccatctatggagcaaagtttgaggatgagataaagactgagttaaagcacactggggctggaattctgtccatggcaaacgctggcccaaacacgaatggaagccagttcttcataactcttgccccttgtcagtcacttgatgggaaacatacaatttttgggagggtatgcagaggaatggaaattgttaagcgccttggaagtgtgcagactgacaaaaatgataggcctatccatgaagtgaaaatcttgcgtgccgttgtcaaagactgaagcattatccagatgtaactccgagtgttggtttaggctttaataatggccatgttcatgtaagtggtacctttgcgaaaaggtgaaaagtgcagctagttccagcctatatgagtatggtctcaagatgtggctgacctgaaaccctacctgatgagtagattggaccttttgatcaagaaggtatttgaaacagtttatatgcgtgtgtggtttgagtttctctgcgaggtatttgaaacaaatagttccagactatgttcgcttcaatcttaaagtcagttgtttggactgctgcaattgcaattcataaagaaaaaatattgtagaagcagtagaagccggcaaaaaaaaaaaaaaaa

SEQ ID NO: 530 - protein, 164 aa, Zea mays
  misc_feature: Ceres CLONE ID no. 319696
  misc_feature: Ceres CDNA ID no. 25447091
  misc_feature (11)..(163): Pfam Name: Pro_isomerase PFAM Desc: Cyclophilin type peptidyl
  misc_feature: Homolog of GI Number: 50948481 NR Desc: cyclophilin
  misc_feature: Homolog of GI Number: 20857438 NR Desc: At2g36130/F9C22.6
  misc_feature: Homolog of GI Number: 21537220 NR Desc: cyclophilin
  misc_feature: Homolog of GI Number: 17986117 NR Desc: CG13892
  misc_feature: Homolog of GI Number: 54642554 NR Desc: GA12606
  misc_feature: Homolog of GI Number: 57094450 NR Desc:  similar to Peptidyl
  misc_feature: Homolog of GI Number: 21312784 NR Desc: peptidylprolyl isomerase
  misc_feature: Homolog of GI Number: 62665751 NR Desc:  similar to Peptidyl
  misc_feature: Homolog of GI Number: 37183182 NR Desc: PPIL1
  misc_feature: Homolog of GI Number: 17539496 NR Desc: CYcloPhilin
MWGSTDGGTPEVTLETSMGAVSVEMYYRHAPKTCRNFVELARRGYYDNVIFHRIIKDFIVQGGDPTGTGRGGESIYGAKFEDEIKTELKHTGAGILSMANAGPNTNGSQFFITLAPCQSLDGKHTIFGRVCRGMEIVKRLGSVQTDKNDRPIHEVKILRAVVKD

SEQ ID NO: 531 - DNA, 1254 bp, Zea mays
  misc_feature: Ceres CLONE ID no. 319862
  misc_feature: Ceres CDNA ID no. 25446828
  CDS (196)..(1017): REFERENCED BY SEQ ID NO: 532
atccagtgggaaaaaaaaaacaaaaagggtaccggaagcggcgaaagcctcgccccccgccgctctcgcatcgtctccggagcgcacgtcagatcaggtgcgccgcgcccccctcgcctaagctgcgacgaccatccatcgaacagactcgccgtgactttgatccgtggcggtggctctgcgggtgcaggaaggatgacgggctccatggatctcccggccaagggcgggttcagcttcgacctgtgccgccggaacaacatgctggagaagaacgggctcaaggtcccgggattcaggaagaccgggacaaccatcgtcggcctcgtctttcaggatggggttgttcttggggcagacacaagggcaactgagggccccatagttgctgataagaactgtgagaaaatccactttatggcaccgaatatatactgctgtggagcaggaactgctgcggacacggaggccgttacagatatggtgagctcccagctacagcttcaccgttatgcaacgggccgcgaatcaagagttgtaactgctcttacactactgaagtcacacctcttcaagtatcaaggccatgtcagtgctgcccttgttcttggtggagtggattgtactgggccacatttacacactgtttatccacacgggtccactgatactcttccttttgccaccatgggctctggttctcttgctgcaatgtcagtgtttgaatcgaagtacaaagaaggccttactagggaggagggaatacagattgtgtgcgaagcaatctgtgctggtattttcaatgacttgggtagtgggagcaacgtggacgtctgcgtgataaccaaggggaagacagaatacttgagaaaccaccagttgccgaatcccaggacttatgctagttcaaagggatacagtttcaccaaggggcagactgaggtactgtcttcaaaggtcacacttctaaagcagaaggttgaggtcgccgagggtggtgatgctattgaggagtgatcttgcatcctgcattcatacaagcatattctgaatctgtgtaactttgcttagtggatcagctagaacaagaaaaaagaaaatttggagatctttgctgtactcgctggaccaaagccagggttcttatgctaaatgtgtttctaatgtttggcacattttaaattgcttgttgtttccgaatgtttaaaaccggtgaaggtatggtatttgcttggaacaaaaaaaaaaaaaaaa

SEQ ID NO: 532 - protein, 273 aa, Zea mays
  misc_feature: Ceres CLONE ID no. 319862
  misc_feature: Ceres CDNA ID no. 25446828
  misc_feature (35)..(216): Pfam Name: Proteasome PFAM Desc: Proteasome A
  misc_feature: Homolog of GI Number: 50933089 NR Desc: 20S proteasome beta subunit
  misc_feature: Homolog of GI Number: 9758084 NR Desc: 20S proteasome beta subunit PBB2
  misc_feature: Homolog of GI Number: 30023762 NR Desc: At3g27430
  misc_feature: Homolog of GI Number: 2511578 NR Desc: multicatalytic endopeptidase
  misc_feature: Homolog of GI Number: 21387013 NR Desc: 20S proteasome beta subunit PBB2
  misc_feature: Homolog of GI Number: 21593337 NR Desc: 20S proteasome beta subunit PBB2
  misc_feature: Homolog of GI Number: 30688785 NR Desc: 20S proteasome beta subunit B
  misc_feature: Homolog of GI Number: 2511576 NR Desc: multicatalytic endopeptidase
  misc_feature: Homolog of GI Number: 24664391 NR Desc: CG3329
  misc_feature: Homolog of GI Number: 55632297 NR Desc:  similar to Proteasome beta 7 subunit
MTGSMDLPAKGGFSFDLCRRNNMLEKNGLKVPGFRKTGTTIVGLVFQDGVVLGADTRATEGPIVADKNCEKIHFMAPNIYCCGAGTAADTEAVTDMVSSQLQLHRYATGRESRVVTALTLLKSHLFKYQGHVSAALVLGGVDCTGPHLHTVYPHGSTDTLPFATMGSGSLAAMSVFESKYKEGLTREEGIQIVCEAICAGIFNDLGSGSNVDVCVITKGKTEYLRNHQLPNPRTYASSKGYSFTKGQTEVLSSKVTLLKQKVEVAEGGDAIEE

SEQ ID NO: 533 - DNA, 1485 bp, Zea mays
  misc_feature: Ceres CLONE ID no. 320361
  misc_feature: Ceres CDNA ID no. 36707367
  CDS (61)..(1059): REFERENCED BY SEQ ID NO: 534
accaagaagtgacccacccaggtagccaggtaggtaaccgcccgtgccccgtcgccggcgatggcgaggtacgaggcgtcggcggccgcgccgggcgtagactttcaccttcccgacgagatcctggccgtgatccccaccgacccgtacgagcaactggacgtggcgcgcaagatcacctccatggccatcacctcccgcgtctcccgcctcgaggccgactctgggcgcctccgccgtgacctagccgaccgcgaccacgccgaggccgagctccgtgcccgcctcgccgactccgacgcgcgcctggccgccgctctcgacgagaacgcgaagctagcgaaggaaagggactcgctcgccgcgacgaccaaaaagctgaccaggaatttggcgaagttggaggcttttaagaaacaactgatgaaatcgttaagtgaagataatctattgcaactgtctgaaaccagtcaagatcacaacggagaagatattttgacagctcgagtcccgtattggaaagatgaagtttgtagcagtaacacttcttcagatacctccatcagatctacaataactgaatccatccatggtggaggataccagttctcaatcaaaacatatgtgcctccaaaattaactcctggctcaacacctatgatttcgtcttctagtggttctccccgagcttattcaactggcccaccctctcccaacttcttctctggtccgacttctcctacaaaagctcgatctgagggccaattgacattttcgtcatggcaaggatcatcaagtcatcagtattcagcacctacctctcctcaacgccactcattcacagggcggccacgtatagatgggaaggaattcttccggcaagcacggacaagactttcttatgagcaatttggagcatttttggccaacatcaaggagttcaatgctcaaaaacaatcacgggaggacaccctgtcaaaagcagaagagatttttggaacagaacacaaagacttgtacatttctttccagaatatgcttagtcgcaaccagtcatgaaaaatatgtcagaagcggtattttctgtctctaaatcaagcagggaagaatttgttgcaataaacgaggcccttccatagtttttttaaaaaaaaaaatgctttcataggttctcaagatcacattgtagagatctgtatgttggcaatcttaatccgaggcgtccgttctcaatgatttggagcggtgacttgagaatgaaattctcataactgccggaaaattagcccgtttgatttagcatacatccaatcattccctggcattcaagacttcttgtttgtctttctgctgtaaaggtattcattgaaaaactgaaaaggggttcagcgtacattgtgcaaagcagtaccaggtgcttagctgaggaggcaccggctaaataaaaaaatgttgggttattatcacaaaaaaaaaaaaaaaaaa

SEQ ID NO: 534 - protein, 332 aa, Zea mays
  misc_feature: Ceres CLONE ID no. 320361
  misc_feature: Ceres CDNA ID no. 36707367
  misc_feature: Homolog of GI Number: 50928725 NR Desc: OSJNBa0008M17.14
  misc_feature: Homolog of GI Number: 34909876 NR Desc: B1143G03.2
MARYEASAAAPGVDFHLPDEILAVIPTDPYEQLDVARKITSMAITSRVSRLEADSGRLRRDLADRDHAEAELRARLADSDARLAAALDENAKLAKERDSLAATTKKLTRNLAKLEAFKKQLMKSLSEDNLLQLSETSQDHNGEDILTARVPYWKDEVCSSNTSSDTSIRSTITESIHGGGYQFSIKTYVPPKLTPGSTPMISSSSGSPRAYSTGPPSPNFFSGPTSPTKARSEGQLTFSSWQGSSSHQYSAPTSPQRHSFTGRPRIDGKEFFRQARTRLSYEQFGAFLANIKEFNAQKQSREDTLSKAEEIFGTEHKDLYISFQNMLSRNQS

SEQ ID NO: 535 - DNA, 873 bp, Zea mays
  misc_feature: Ceres CLONE ID no. 320541
  misc_feature: Ceres CDNA ID no. 40350920
  CDS (161)..(370): REFERENCED BY SEQ ID NO: 536
actggtcctacaacactctccctaccacaccgaaccaacaagaggagcaagaggtagctatagcagcctagcacacaccaccacccaccaccgccaccgcgccacagagctgccgagagtgtgctgtgctttgctcatcgaccgaccgatcgatctcggcatggcggactgggggccggtgctgatcgggctggtgctcttcatcctgctctccccgggcctgctcttccagatccccggcaagggccggatcatcgagttcggcaacttccagaccagcggcctctccatcctcgtccacgccgtcatctacttcgccctcctcgccatcttcctcctcgccgtcggcgtccacatttacctcggctagctagtcgccggcgggcggccggctgaggtaaatgtggaagccggccgctgaggagcccgagaaggccgagccggccgctgaggtggccgagaaggccagcgagtgaggccgtgcgccgtacgcgcactgcggcggcggacagcgggtcgggagatcgatgtctcagcgtgcgcgcgtggcgtgccagtcgcgtcgcgcgcgctggcgcctactgttcagtacaacgcgaacgcgacggtttctctccatctctccgtgtgtgacagtgtgtgtgtcgtagctatagcagtgcccggtgcggactgcgagtgacatgggctaaataaagtgtgcgtcgtctggtctggtggtggtagtggggcgcggtgccccatgtgtgccgctgcagcttgtgtctctgtgttgcttcatgttctctgtctatctactctcatgtatggcagtttgggtacgggtatatcaagcatgttcagtcttctttggtcaaaaaaaaaaaaaaaaaa

SEQ ID NO: 536 - protein, 69 aa, Zea mays
  misc_feature: Ceres CLONE ID no. 320541
  misc_feature: Ceres CDNA ID no. 40350920
MADWGPVLIGLVLFILLSPGLLFQIPGKGRIIEFGNFQTSGLSILVHAVIYFALLAIFLLAVGVHIYLG

SEQ ID NO: 537 - DNA, 1379 bp, Zea mays
  misc_feature: Ceres CLONE ID no. 321137
  misc_feature: Ceres CDNA ID no. 40041172
  CDS (81)..(1019): REFERENCED BY SEQ ID NO: 538
aacatgctttacacgctctccctcccacttcgtgcgagcgtcccgaactaagttgctcgtggtggaggtggtttgtggcgatggccttcaagctggtcaccaagcccgcggcggcgtcgcccgctgctgctcactggggagatctcgcccgggggccgcagggtacgagccgcgttgccttcggaccagcgcccaggaacaaggggctccgcacggccaacaactccgcaacgcccatggctaaggaagagagggttgatcgaagtgaaatattgacattggatagcatcagacaagttttgattagactagaagacagcatcatatttggacttttggagagagcacagttttgttacaacgctgacacatatgatagcaatgctttccacatggatggttttggagggtctttggttgaatatatggttagagaaactgaaaagctccatgcgcaggttgggaggtacaagagcccagatgagcaccctttcttttccaaggatctgcctgagccccagttgccacctatgcaatacccaagggttttgcatcccattgctgattctatcaatatcaacaaagagatttggacaatgtattttgatgaacttcttccaagattggtgaaagaaggaagtgatggtaatgctggatccaatgctctttgtgacacaacctgcttgcaggcactctccaaaaggatccactatgggaagtttgtggcagaggccaagtttcaagagtcccctgaagcttacacgccagccataatagcccaagaccgtgatcaactcatgcgccttctcacatatgaaacggtggagcgtgctgtcgaacacagggtggaagccaaagccaagatcttcgggcaagaggtgaacattggtgctaaggacaacggcagcccaccagtctacaagatcaggccgagcttggtcgccgagctgtacagctacagaatcatgccgctaaccaaggaggttgaggtcgcgtacttgcttaggaggctggattgagtgtgtttacgtagctgtaaaactgccagatccgaaattcgtggaattaaaccattacatctgttgagaggatgatccgaactcctggcattaaaccagttttggggagaggatgggaattataccatgtgtggaactgtggcaataaacatgcagaatatcatgtggagttgtcgcctgtatggaatgctaggtcactttctttggctgggtgcccagtgcccttttgaatcggagtaaattctctcattgtcgttggatttatacagatcctctcagttccatggaaaaaaaaaaaaaaaaaaaaaaaaaaaaaaaaaaaaaaaaaaaaaaaaaaaaaaaaaaaaaaaaaaaaaaaaa

SEQ ID NO: 538 - protein, 312 aa, Zea mays
  misc_feature: Ceres CLONE ID no. 321137
  misc_feature: Ceres CDNA ID no. 40041172
  misc_feature (71)..(138): Pfam Name: CM_2 PFAM Desc: Chorismate mutase type II
  misc_feature: Homolog of GI Number: 57899563 NR Desc: putative chorismate mutase precursor
  misc_feature: Homolog of GI Number: 34909806 NR Desc: putative chorismate mutase precursor
  misc_feature: Homolog of GI Number: 76782202 NR Desc: putative chorismate mutase
  misc_feature: Homolog of GI Number: 28950893 NR Desc: At1g69370
  misc_feature: Homolog of GI Number: 429153 NR Desc: chorismate mutase precursor
  misc_feature: Homolog of GI Number: 9293913 NR Desc: chorismate mutase precursor
  misc_feature: Homolog of GI Number: 18406100 NR Desc: chorismate mutase
  misc_feature: Homolog of GI Number: 4512122 NR Desc: chorismate mutase 3
  misc_feature: Homolog of GI Number: 5824343 NR Desc: chorismate mutase
  misc_feature: Homolog of GI Number: 77556271 NR Desc: chorismate mutase
MAFKLVTKPAAASPAAAHWGDLARGPQGTSRVAFGPAPRNKGLRTANNSATPMAKEERVDRSEILTLDSIRQVLIRLEDSIIFGLLERAQFCYNADTYDSNAFHMDGFGGSLVEYMVRETEKLHAQVGRYKSPDEHPFFSKDLPEPQLPPMQYPRVLHPIADSININKEIWTMYFDELLPRLVKEGSDGNAGSNALCDTTCLQALSKRIHYGKFVAEAKFQESPEAYTPAIIAQDRDQLMRLLTYETVERAVEHRVEAKAKIFGQEVNIGAKDNGSPPVYKIRPSLVAELYSYRIMPLTKEVEVAYLLRRLD

SEQ ID NO: 539 - DNA, 1521 bp, Zea mays
  misc_feature: Ceres CLONE ID no. 321207
  misc_feature: Ceres CDNA ID no. 25445469
  CDS (148)..(1215): REFERENCED BY SEQ ID NO: 540
accgtgcagcggcaagggtgtccaggtcccgtaaaatctggcttttctccctccccataccccgcacacacactcgctttcttcggttcttcctcctcgagcagccacttccgtctctaaccctacagcgacgacgagagcgaggctatgaaggggaagaagccggtcaaggagctcaagctcaccgtgccggcgcaggagaccccggtagacaagttcctgacggcaagtggcacgttcaaggatggtgagctgaggctcaatcagagcggcttgcggcttatctctgaggaaaacggggatgaagatgaatctacaaagctgaaggtggaagatgtgcagttatcaatggatgatcttgagatgattcaagtcattggcaaaggaagcggtggtgttgtccagctagtgaggcacaaatgggtgggcacattgtttgccttaaagggtattcaaatgaacattcaggagtcagttcgtaaacaaatagtacaggagctcaaaataaaccaagcaacacagagccctcatatagttatgtgccatcaatctttttaccacaatggtgtaatatatcttgttcttgagtacatggaccgtggatcgcttgcagacattgttaagcaagtgaagactattctggagccataccttgcagtactttgtaagcaggtcttggagggtttattgtatcttcatcatcaaaggcacgtgattcacagggacataaaaccatctaacttgttggtcaaccgtaaaggtgaagtcaagattaccgacttcggagtgagtgctgtgctagcaagctcaataggtcagcgagatacatttgttggaacctacaactatatggcgcctgagcggattagtggtagcacttatgactacaaaagtgacatatggagtttgggcttagttatacttgagtgtgccattggccggttcccttatataccttcggaaggtgaaggttggttaagcttttatgaacttctggaggccattgtcgatcagccaccaccttctgcacctgcagatcagttctctccagaattctgctcatttatctcctcttgcatacagaaagatccggctcagaggatgtctgcttcagaactcttgaatcacccttttttgaagaagttcgaggataaggacttaaacctggggattcttgtggagaacctggaacctccaatgaatatacccgaatagcctgtcgtttttagtgatgaagcctttgttgtgccttcagggtttggcctcgaagcctcttggcatctgctcctcaactgcagcctccctacctgaatatgctataacatcattgtatgattcaagccccttgtggctatctgagcataagagtagagggaactatgctgcattccgtgtatggtcaccttattgtagctattgttgcgacgggccttgtgattttgagtcttgttttaacttttgcagtcttatcagcggtggattcaaaatgaacgaactgaatattcaaaaaaaaaaaaaaaa

SEQ ID NO: 540 - protein, 355 aa, Zea mays
  misc_feature: Ceres CLONE ID no. 321207
  misc_feature: Ceres CDNA ID no. 25445469
  misc_feature (71)..(330): Pfam Name: Pkinase PFAM Desc: Protein kinase domain
  misc_feature: Homolog of GI Number: 12331300 NR Desc: MAP kinase
  misc_feature: Homolog of GI Number: 51471930 NR Desc: MAPKK
  misc_feature: Homolog of GI Number: 12718822 NR Desc: NQK1 MAPKK
  misc_feature: Homolog of GI Number: 34914584 NR Desc: Oryza sativa MAP kinase kinase 1
  misc_feature: Homolog of GI Number: 10176761 NR Desc: protein kinase MEK1 homolog
  misc_feature: Homolog of GI Number: 2737973 NR Desc: protein kinase ZmMEK1
  misc_feature: Homolog of GI Number: 9843771 NR Desc: MAP kinase kinase
  misc_feature: Homolog of GI Number: 51471926 NR Desc: MAPKK
  misc_feature: Homolog of GI Number: 7434316 NR Desc: protein kinase MEK1
  misc_feature: Homolog of GI Number: 2149570 NR Desc: MAP kinase kinase protein DdMEK1
MKGKKPVKELKLTVPAQETPVDKFLTASGTFKDGELRLNQSGLRLISEENGDEDESTKLKVEDVQLSMDDLEMIQVIGKGSGGVVQLVRHKWVGTLFALKGIQMNIQESVRKQIVQELKINQATQSPHIVMCHQSFYHNGVIYLVLEYMDRGSLADIVKQVKTILEPYLAVLCKQVLEGLLYLHHQRHVIHRDIKPSNLLVNRKGEVKITDFGVSAVLASSIGQRDTFVGTYNYMAPERISGSTYDYKSDIWSLGLVILECAIGRFPYIPSEGEGWLSFYELLEAIVDQPPPSAPADQFSPEFCSFISSCIQKDPAQRMSASELLNHPFLKKFEDKDLNLGILVENLEPPMNIPE

SEQ ID NO: 541 - DNA, 504 bp, Zea mays
  misc_feature: Ceres CLONE ID no. 321216
  misc_feature: Ceres CDNA ID no. 25445827
  CDS (3)..(410): REFERENCED BY SEQ ID NO: 542
ctaccacatccgttccccttcccttccctcctctcgcgcgccggctccacgcagatccaggagatatgcctcgctatgatgaccgctatggaggcacgcgcttgtatgttggcagattggccactcgtactcgttcccgcgatttagaacatctgtttggcagatatggaagaatacgagaagtggagttgaagcgtgactatgcatttattgagttcagtgatcatcgcgatgctgatgaggctcgataccagctagatggcagggatgttgatgggagtcgtattgttgttgagtttgctaaaggggtcccacgtggttcaggtggctcacgtgaatatatggggagaggccctccaccaggtacaggtcgttgtttcaactgtggagttgtttttgtagacctgtagaccaccactacccctttcctccgtcccacccacgccctctgctattttaaatcaagaagctactggaggagacctcggaaaacaaaaaaaaaaa

SEQ ID NO: 542 - protein, 114 aa, Zea mays
  misc_feature: Ceres CLONE ID no. 321216
  misc_feature: Ceres CDNA ID no. 25445827
  misc_feature (13)..(76): Pfam Name: RRM_1 PFAM Desc: RNA recognition motif.
  misc_feature: Homolog of GI Number: 55770401 NR Desc: putative splicing factor
  misc_feature: Homolog of GI Number: 9843663 NR Desc: splicing factor RSZ33
  misc_feature: Homolog of GI Number: 9795142 NR Desc: splicing factor
  misc_feature: Homolog of GI Number: 34895952 NR Desc: putative splicing factor
  misc_feature: Homolog of GI Number: 24111329 NR Desc: At3g53500/F4P12_200
  misc_feature: Homolog of GI Number: 11346381 NR Desc: splicing factor
  misc_feature: Homolog of GI Number: 48097245 NR Desc: similar to ENSANGP00000021579
  misc_feature: Homolog of GI Number: 42571091 NR Desc: splicing factor RSZ33
  misc_feature: Homolog of GI Number: 47717981 NR Desc: MGC78772 protein
  misc_feature: Homolog of GI Number: 58387009 NR Desc: ENSANGP00000021579
  misc_feature: Useful for sterility
MPRYDDRYGGTRLYVGRLATRTRSRDLEHLFGRYGRIREVELKRDYAFIEFSDHRDADEARYQLDGRDVDGSRIVVEFAKGVPRGSGGSREYMGRGPPPGTGRCFNCGVVFVDL

SEQ ID NO: 543 - DNA, 1240 bp, Zea mays
  misc_feature: Ceres CLONE ID no. 321524
  misc_feature: Ceres CDNA ID no. 35383164
  CDS (90)..(1109): REFERENCED BY SEQ ID NO: 544
ataaatcccccgcctccctgctctcctccgtaaatcacaaaactttcgcccaattccccactagcaaccgtccccacaatcctccgacgatgcctgccgcgccgacgctgttgcccccctgcgacgcggaggagccgctgctggcggagtcctccgaccgcttctccatgttcccgatccgtttcccgcagatctgggagttctacaagaaggcggtggcctccttctggacggcggaggaggttggcctctctgccgacgcccggcactgggacgaggctctgtcccccgacgagcggcactttatctcccacgtgctcgccttcttcgctgcctccgacggcatcgtgctcgagaacctcgcttcccgcttcatgaccgacgtgcaggtcgccgaggcgcgggccttctacggcttccagatcgccatcgagaacatccactcggagatgtattcgctgctgctcgagacttacatccgcgaccacgtcgagaaggaccgcctgttccgcgccatcgacaccgtgcccgcggtccgccgcaaggctgactgggccatgcgctggatcgacggcggggagcgcttcgctgagcgcatcgttgccttcgcctgcgtcgagggcatattcttctcggggtccttctgcgccatcttctggctcaagaagcgcgggctcatgccgggcctcaccttctccaacgagctcatctcccgcgatgagggcctccactgtgatttcgcctgcctcctctacgagcttctccgcaacaagctcgacgaggcccgcgtccgcgagatcgtcgcagacgctgttgacatcgagcgcgagttcgtctgcgacgccctccctgtcgcgctcgtcggcatgaacggggatctcatgagccagtacatcgaattcgtggccgaccgcctgctcatggcgctcgggtgcaagaagatgtacaacgtgaccaatcccttcgactggatggagctcatctcgctgatggggaagaccaacttcttcgagaagcgcgtgggtgactaccagaaggcatccgtcatgaacagcctcaacggcggcgcggctgccgaccacgtcttcagcatcgatgaggacttctgagttggcacgcgtaatctatggtgtcggtttaatattagtatttgcttgtagtttgtaagtgtgatacatgtactctgagccgcttgatgcaatgatgctgtttcattttctgtgcaaaaaaaaaaaaaaaa

SEQ ID NO: 544 - protein, 339 aa, Zea mays
  misc_feature: Ceres CLONE ID no. 321524
  misc_feature: Ceres CDNA ID no. 35383164
  misc_feature (15)..(296): Pfam Name: Ribonuc_red_sm PFAM Desc: Ribonucleotide reductase
  misc_feature: Homolog of GI Number: 34898038 NR Desc: putative ribonucleoside
  misc_feature: Homolog of GI Number: 52077275 NR Desc: putative ribonucleotide reductase R2
  misc_feature: Homolog of GI Number: 55775310 NR Desc: putative ribonucleotide reductase R2
  misc_feature: Homolog of GI Number: 21436297 NR Desc: putative ribonucleotide reductase small subunit
  misc_feature: Homolog of GI Number: 1044912 NR Desc: ribonucleotide reductase R2
  misc_feature: Homolog of GI Number: 37729626 NR Desc: ribonucleotide reductase small subunit
  misc_feature: Homolog of GI Number: 4894211 NR Desc: ribonucleotide reductase small subunit
  misc_feature: Homolog of GI Number: 23505945 NR Desc: At3g23580/MDB19_7
  misc_feature: Homolog of GI Number: 840719 NR Desc: ribonucleotide reductase R2
  misc_feature: Homolog of GI Number: 72008642 NR Desc:  similar to ribonucleotide reductase M2 polypeptide isoform 1
MPAAPTLLPPCDAEEPLLAESSDRFSMFPIRFPQIWEFYKKAVASFWTAEEVGLSADARHWDEALSPDERHFISHVLAFFAASDGIVLENLASRFMTDVQVAEARAFYGFQIAIENIHSEMYSLLLETYIRDHVEKDRLFRAIDTVPAVRRKADWAMRWIDGGERFAERIVAFACVEGIFFSGSFCAIFWLKKRGLMPGLTFSNELISRDEGLHCDFACLLYELLRNKLDEARVREIVADAVDIEREFVCDALPVALVGMNGDLMSQYIEFVADRLLMALGCKKMYNVTNPFDWMELISLMGKTNFFEKRVGDYQKASVMNSLNGGAAADHVFSIDEDF

SEQ ID NO: 545 - DNA, 1114 bp, Zea mays
  misc_feature: Ceres CLONE ID no. 321622
  misc_feature: Ceres CDNA ID no. 25446310
  CDS (238)..(894): REFERENCED BY SEQ ID NO: 546
gcccacgctgcataaacaactctatctcaacggcgacgacgctcccatcttaacagccaggaagctggcgtcttgcttgtccttgttcttttcccacccggctacccccgtcgtcgccgccgctttccccgtggtttcagagctcaagtcggctagctaggccgcctggctaatctccctgccttctataagtacagagatcagggaagcggcactccatccactgactgaccgctcatggcgaaggtccacctctacgtcgccgcggcctgcgccgtcgtcctcgcgctcgccaccccggccctcgccggtgaccccgacatgctgcaggacgtctgcccggctgactacgcctccccggtgaagctgaacgggttcgcgtgcaaggcgaacttttcggcggacgacttcttcttcgacgggctgaggaacccgggcaacaccaacaacccggcgggctccgtggtgacggcggccaacgtggagaagttcctgggcgtgaacacgctgggcgtctccatggcgcgcatcgactacgcgccgggcggccagaacccgccgcacacgcacccgcgcgccaccgagatcatcttcgtcctcgagggcacgctcgaggtcggcttcatcaccaccgccaacgcgctcttcaccaagaccgtcaccaagggcgacgtcttcgtcttcccgcgcggcctcgtccacttccagcagaacagggggcacggccccgccgccgtcgtcgccgccttcaacagccagctccagggcacgcaggccatcgccatgacgctcttcggcgccgtgccgcccgtgccctccgacatcctcgccaaggccttccgcatcagcagcggcgaggtggaccacatcaaggccaacttcgcgcccaagtagagatccaacgtctgcattcccttgattttatcaataatcaatccccgcggtgtgcagttcgatttgttcgtcttcggttggtttgcttcgagacattgctgaccacgcttgtcactgctaatttgtgcggagcggaggagttgcttgtgctccgataaataagataaataatcaattctatcgtctgggttgctttgaaaataaaaaaaaaaaaaaaaaa

SEQ ID NO: 546 - protein, 218 aa, Zea mays
  misc_feature: Ceres CLONE ID no. 321622
  misc_feature: Ceres CDNA ID no. 25446310
  misc_feature (96)..(171): Pfam Name: Cupin_2 PFAM Desc: Cupin domain
  misc_feature: Homolog of GI Number: 34902528 NR Desc: probable germin protein 4
  misc_feature: Homolog of GI Number: 50933473 NR Desc: putative cupin
  misc_feature: Homolog of GI Number: 31712108 NR Desc: germin
  misc_feature: Homolog of GI Number: 34906612 NR Desc: germin
  misc_feature: Homolog of GI Number: 34904670 NR Desc: putative germin protein
  misc_feature: Homolog of GI Number: 57899940 NR Desc: putative Rhicadhesin receptor precursor
  misc_feature: Homolog of GI Number: 6689034 NR Desc: germin
  misc_feature: Homolog of GI Number: 15341550 NR Desc: nectarin I
  misc_feature: Homolog of GI Number: 40949663 NR Desc: germin
  misc_feature: Homolog of GI Number: 7447345 NR Desc: probable germin protein
  misc_feature: Useful for increasing chlorophyll and photosynthetic capacity
MAKVHLYVAAACAVVLALATPALAGDPDMLQDVCPADYASPVKLNGFACKANFSADDFFFDGLRNPGNTNNPAGSVVTAANVEKFLGVNTLGVSMARIDYAPGGQNPPHTHPRATEIIFVLEGTLEVGFITTANALFTKTVTKGDVFVFPRGLVHFQQNRGHGPAAVVAAFNSQLQGTQAIAMTLFGAVPPVPSDILAKAFRISSGEVDHIKANFAPK

SEQ ID NO: 547 - DNA, 671 bp, Zea mays
  misc_feature: Ceres CLONE ID no. 322270
  misc_feature: Ceres CDNA ID no. 25446311
  CDS (171)..(464): REFERENCED BY SEQ ID NO: 548
aatctcgttgcccgttgtgctctctctctctattcgttccccgcctcaccccgagccagccgtctcgctagggtttcgccgccgccgccgccgccgctccagtgaggaacccgccacagccagcacgccaggctcctcctccagctcctgttcgagatggtggtggctccatgtttggaggaattgggtccaccattgctcaaggtatggcgtttggcacgggtagtgccatggcacacagggctgttgatgctgtattaggtccccggaccattcagcatgagactgttgcctcagaagctgctgctgctgcccctgcccctccagtgatgaatgctgacgcttgcagcatccattctaaggctttccaagattgtctcaacaactatggcagcgagatcagcaagtgccagttctacctagacatgctgaacgagtgccgccgtggtggtgtgtctgcctaagctgcctctggggttattcgtggattttctttcggtgatgctatctcattaataagataccgtgaaacttttgtctccacagcttgaagctaaacttcctgggattaatacattttgttatcctatgctgttggagcagacttttgtctcttgatcataaatatttaaacgaacctgttatgtaggaacaaaaaaaaaaaaaaaaaa

SEQ ID NO: 548 - protein, 97 aa, Zea mays; identical to SEQ ID NO: 254
  misc_feature: Ceres CLONE ID no. 322270
  misc_feature: Ceres CDNA ID no. 25446311
  misc_feature (52)..(93): Pfam Name: CHCH PFAM Desc: CHCH domain
  misc_feature: Homolog of GI Number: 52139112 NR Desc: Similar to Nur77 downstream protein 2

SEQ ID NO: 549 - DNA, 635 bp, Zea mays
  misc_feature: Ceres CLONE ID no. 322385
  misc_feature: Ceres CDNA ID no. 36585058
  CDS (59)..(421): REFERENCED BY SEQ ID NO: 550
acacacacacatccatcaaagaaacaagcgcacaagatcaaatacctcgccgccaacaatggcctccaggtcctccatcctgctcgccatggtgatgctggctgcgctattcgttgttggtttgtgcaccacccccctcaccttccaggtcggcaagggatccaagcctggccacctgatcctcacccccaatgttgccaccatatccgacgtggagatcaaagagcacggtggcgatgacttctcctttacgctcaaggagggcccgactggcacctggacgctcgacaccaaggccccgctcaagtaccccctttgcatccgctttgctgtcaagtccggcggctaccgcatcgccgacgacgtcatccctgccgatttcaaggccgacaccacctataagaccacactcagcatctaatcaatctctggtgatgaattagatttcaaaagagctcatctagcgcacatgttagcaagacaatattattttttctatggttattttgtggaaccaaaccacccaagaaataagtgatgctagatgtaccttctgaccttgttgtattgggttgatattattacataaactaaatacattatttatttaagattttaaaaaaaaaaaaaaaaaa

SEQ ID NO: 550 - protein, 120 aa, Zea mays
  misc_feature: Ceres CLONE ID no. 322385
  misc_feature: Ceres CDNA ID no. 36585058
  misc_feature (27)..(105): Pfam Name: Pollen_allerg_1 PFAM Desc: Pollen allergen
  misc_feature: Homolog of GI Number: 33188338 NR Desc: group 3 pollen allergen
  misc_feature: Homolog of GI Number: 50923025 NR Desc: OSJNBa0063G07.3
  misc_feature: Homolog of GI Number: 50922895 NR Desc: OSJNBa0050F15.7
  misc_feature: Homolog of GI Number: 50922901 NR Desc: OSJNBa0050F15.10
  misc_feature: Homolog of GI Number: 52075915 NR Desc: putative group 3 pollen allergen
  misc_feature: Homolog of GI Number: 50922897 NR Desc: OSJNBa0050F15.8
  misc_feature: Homolog of GI Number: 52075917 NR Desc: putative group 3 pollen allergen
  misc_feature: Homolog of GI Number: 52075924 NR Desc: putative group 3 pollen allergen
  misc_feature: Homolog of GI Number: 52075913 NR Desc: putative group 3 pollen allergen
  misc_feature: Homolog of GI Number: 51536378 NR Desc: putative group 3 pollen allergen
MASRSSILLAMVMLAALFVVGLCTTPLTFQVGKGSKPGHLILTPNVATISDVEIKEHGGDDFSFTLKEGPTGTWTLDTKAPLKYPLCIRFAVKSGGYRIADDVIPADFKADTTYKTTLSI

SEQ ID NO: 551 - DNA, 1111 bp, Zea mays
  misc_feature: Ceres CLONE ID no. 322757
  misc_feature: Ceres CDNA ID no. 40350921
  CDS (135)..(842): REFERENCED BY SEQ ID NO: 552
atttttcactataaagtttcactgtatctttcaaacttagtcttatttcttattttgccagcaggaaaaaccttgccacgagtcgccgacactccatcccggaagagctaacgaggtgacaccccaccgcgcccatgggtgacagccagtactccttctccctcaccaccttcagtccgtcggggaagctcgtgcagattgagcacgcgctcacggctgtcggatccgggcagacctcgctcgggatcaaagctgccaatggtgtagtcattgccactgagaagaagctgccttctattttagtggatgaaacatctgtgcaaaagattcaggcactaacacctaatattggagttgtctatagtgggatgggtccagatttccgtgttctggtgagaaaaagtcgaaagcaggcacaacaatattatcggttgtacaaggaacatatacctgtaacacagcttgtacgagagactgctgctgtcatgcaggagttcacacagtcaggtggtgtgagaccatttggagtatcactgttgattgctgggtatgatgacaatggcccgcagttgtatcaggttgatccctcaggatcatacttctcctggaaggcatcagccatgggaaaaaatgtgtccaatgcaaagacgtttcttgaaaagagatacacagaagatatggagcttgatgatgccatccacactgcaattttgactttgaaagaaggatatgaggggcaaatttcctccaacaacattgaaatcggaattattcgagctgatcgtgagttcaaagttttaagcccagcagagatcaaggatttcttggaagaggtggagtaagctgtctgttgatgatactagttcagacaacaatagcagtgtcacttatgagcagccagcctgaagattgtcttggttttattactctgtaaactgatttgctccagcgccatgtggtggttacatttgaaccctcctcaacgcactgtagacaatgagataacgtaggatgaatgctgtatttgacatactttgcagcttgtttatgtgatgcacgttcttgcggacaaaaaaaaaaaaaaaaaaaaaaaaaaaaaaaaaaaaaaaaa

SEQ ID NO: 552 - protein, 235 aa, Zea mays
  misc_feature: Ceres CLONE ID no. 322757
  misc_feature: Ceres CDNA ID no. 40350921
  misc_feature (29)..(213): Pfam Name: Proteasome PFAM Desc: Proteasome A
MGDSQYSFSLTTFSPSGKLVQIEHALTAVGSGQTSLGIKAANGVVIATEKKLPSILVDETSVQKIQALTPNIGVVYSGMGPDFRVLVRKSRKQAQQYYRLYKEHIPVTQLVRETAAVMQEFTQSGGVRPFGVSLLIAGYDDNGPQLYQVDPSGSYFSWKASAMGKNVSNAKTFLEKRYTEDMELDDAIHTAILTLKEGYEGQISSNNIEIGIIRADREFKVLSPAEIKDFLEEVE

SEQ ID NO: 553 - DNA, 643 bp, Zea mays
  misc_feature: Ceres CLONE ID no. 322983
  misc_feature: Ceres CDNA ID no. 40041173
  CDS (22)..(441): REFERENCED BY SEQ ID NO: 554
acacacacgaacggcgacgccatgaaacacgccgcgaagctcccgtcccgcggtgcatcgtcgtcacagcaccggctctcccacgctatcccgaagacgccgccgcgtaagatcaggatcgttcacgtcttggcgccggaggttatcaaaacagaggctcgggactttcgtaaggtcgtccagcggctcaccggaatgccatcgtcccaaaagggctcctgcgcggcgtcggcactcacggacgaggatgcttcgccatcatcgctatcgtcgtggcagccgactgcgatgtcgtcgccgatgaaagtggaggccgaaacatcgtctggagaagggggagggttactgtacgatctcgatccggatggctacaacgatggcttctatgattttctcctcagctcctgcgacacagacggggtggccggctttaagttatgatcagatggtgcatgggaatgtttaccccccaagtctcctggtcagtttctctgcaagcatttacattatgagatgaacgatctcaactttaatcgttttgcaaccataaacataaatcaccggacatgtttcatggttccatgtctgtcctctttttgatagttccatgagcccaatagaacaagaaaaaaaaaaaaaaaaa

SEQ ID NO: 554 - protein, 139 aa, Zea mays
  misc_feature: Ceres CLONE ID no. 322983
  misc_feature: Ceres CDNA ID no. 40041173
  misc_feature (35)..(65): Pfam Name: VQ PFAM Desc: VQ motif
  misc_feature: Homolog of GI Number: 50929451 NR Desc: OSJNBa0087O24.11
MKHAAKLPSRGASSSQHRLSHAIPKTPPRKIRIVHVLAPEVIKTEARDFRKVVQRLTGMPSSQKGSCAASALTDEDASPSSLSSWQPTAMSSPMKVEAETSSGEGGGLLYDLDPDGYNDGFYDFLLSSCDTDGVAGFKL

SEQ ID NO: 555 - DNA, 638 bp, Zea mays
  misc_feature: Ceres CLONE ID no. 323448
  misc_feature: Ceres CDNA ID no. 25446312
  CDS (176)..(370): REFERENCED BY SEQ ID NO: 556
agagcgacgctcaagttcgcgaatcgcgagttgcggcgacggtagaggaaaaatcagccgtggactctcttccgtaagccctagcccctagccgccagtgtcgtgcattcgtgctgaggctctactgctgatccgtcttccaagctctggtttcatccctgagcactgatttaagatgtatctccagtactacatcaacgagaagggggacaaggtctacaccaccaagaaggagtcacctcttggggtgccaacgcagtctgctcacccagctcggttctcaccagatgacaagtactctcgccagcgatacctgttgaagaagagatttggacttctgccaacgcagaatccaggaccgaagtactgaagcttcaagtcaactgtccaacctgcgatgttctttttgtgtcaatccttgttggttggaatgtaccatcttcgttctcgaatatttgtggtccgttagttcaattttgaactaaaccgcgacaaataaaaaagagcggagggagtagaatataggtatttctgagaactgaaatcaaacactggtacactactatgtcatcctgcatcacattctgtcactacatgtaatgctatgtgtttttggactgaaaaaaaaaaaaaaaaaa

SEQ ID NO: 556 - protein, 64 aa, Zea mays
  misc_feature: Ceres CLONE ID no. 323448
  misc_feature: Ceres CDNA ID no. 25446312
  misc_feature (3)..(53): Pfam Name: Nop10p PFAM Desc: Nucleolar RNA
  misc_feature: Homolog of GI Number: 50910565 NR Desc: nucleolar RNA
  misc_feature: Homolog of GI Number: 79322535 NR Desc: NOP10
  misc_feature: Homolog of GI Number: 62859217 NR Desc: NOLA3
  misc_feature: Homolog of GI Number: 51467984 NR Desc: nucleolar protein family A
  misc_feature: Homolog of GI Number: 24652542 NR Desc: CG7637
  misc_feature: Homolog of GI Number: 58385557 NR Desc: ENSANGP00000015687
  misc_feature: Homolog of GI Number: 13384790 NR Desc: nucleolar protein family A
  misc_feature: Homolog of GI Number: 73999753 NR Desc:  similar to nucleolar protein family A
  misc_feature: Homolog of GI Number: 54636914 NR Desc: GA20497
MYLQYYINEKGDKVYTTKKESPLGVPTQSAHPARFSPDDKYSRQRYLLKKRFGLLPTQNPGPKY

SEQ ID NO: 557 - DNA, 1050 bp, Zea mays
  misc_feature: Ceres CLONE ID no. 323553
  misc_feature: Ceres CDNA ID no. 40041174
  CDS (81)..(650): REFERENCED BY SEQ ID NO: 558
gggccaagccaaacgcggagtcgccgaggaggaggacaaggcagggcagagagggagggaggaagaggaggaggagcgggatgcggcgggcaaggccgccgccggtcccggtcccggtcccgatgacgccgggggacgctgggccggaggtgaagtaccgcggggtgaggcggcgcccgtcggggcggtacgcggccgagatccgggacccggccaggaagaccccgatctggctcggcaccttcgagtcggccgaggccgcggcccacgcctacgacgcggccgccaggaccatccgcggcgccgccgccaggaccaacttcccctccgcctccatctcagccacggtggcgccgccagccgcccccgccgcgacgtctagccacagcagcaccgtcgagtcctggagcggcggcagcggcggcggcgcgcccgtcgggatcctccgcgccccggccgccgaggaggactgccgcagctactgcggctcctcctcgtcggcgctctgcgaggacggcgcgtcgggcccgggctgcggcgacgaggccgccgcgccgccgcggtgctccccgcttccgttcgacctgaacgtgccggacccggcggccgacgagatggactggcgctgcgacacgctgctgcacctgtagccgcgaccgcgaagcgagcactcagcaaaactgctgctatcgtgctatgtctccatagaaattgatagcttcaaatttttttccccgccgcttctttagtctcactctctcttttaccactgccaagattcggtaatacttacttatttgtgatagtgtgaataactgatcatgtaatccgtggagggaacctgttcgttctgttcttgcaaaccttcatgcttcctgctgtgtagtgtatctgtaacagcaccatgtatgtgaccacggcctcttgtcttgctgtaattctcaagatgatggaatcaagggacgcctttggttctttttaaaaaaaaaaaaaaaaaaaaaaaaaaaaaaaaaaaaaaaaaaaaaaaaaaaaataaaaaaaaaaaaaaaa

SEQ ID NO: 558 - protein, 189 aa, Zea mays
  misc_feature: Ceres CLONE ID no. 323553
  misc_feature: Ceres CDNA ID no. 40041174
  misc_feature (24)..(87): Pfam Name: AP2 PFAM Desc: AP2 domain
  misc_feature: Homolog of GI Number: 52076719 NR Desc: putative ethylene responsive element binding factor
  misc_feature: Homolog of GI Number: 50252178 NR Desc: putative ethylene responsive element binding factor
  misc_feature: Homolog of GI Number: 50905829 NR Desc: putative ethylene responsive element binding factor
  misc_feature: Homolog of GI Number: 50929507 NR Desc: OSJNBa0043A12.18
  misc_feature: Homolog of GI Number: 37625037 NR Desc: putative ethylene response factor ERF3b
  misc_feature: Homolog of GI Number: 50928641 NR Desc: OSJNBa0085I10.10
  misc_feature: Homolog of GI Number: 28972993 NR Desc: putative ethylene responsive element binding factor 8
  misc_feature: Homolog of GI Number: 20340233 NR Desc: ethylene responsive element binding factor 4
  misc_feature: Homolog of GI Number: 34908900 NR Desc: ethylene
  misc_feature: Homolog of GI Number: 4587373 NR Desc: ethylene responsive element binding factor
MRRARPPPVPVPVPMTPGDAGPEVKYRGVRRRPSGRYAAEIRDPARKTPIWLGTFESAEAAAHAYDAAARTIRGAAARTNFPSASISATVAPPAAPAATSSHSSTVESWSGGSGGGAPVGILRAPAAEEDCRSYCGSSSSALCEDGASGPGCGDEAAAPPRCSPLPFDLNVPDPAADEMDWRCDTLLHL

SEQ ID NO: 559 - DNA, 494 bp, Zea mays
  misc_feature: Ceres CLONE ID no. 324603
  misc_feature: Ceres CDNA ID no. 25446313
  CDS (172)..(402): REFERENCED BY SEQ ID NO: 560
agctcttagttcttctcctctctctctctctctctctcctctcccctctcctgtcgcactctcctgttccggccaccagcgtgcccagcatggtgcaacgctcgggtagaggagggcggagctggtcttcaggggtagcttgaactggcgaccggattggtttggataccgatgccaggaaggtgcccatactacagatggcagagggagtattttgagaaattggtgaaggagaggttgattgccttgttattcgatgattgggaggaagatgatggagaggtggattccaagaaggtttctgaagtaggaaatagtgaagacattgcaacttctgtttgtaatggttgtagtacctgtggtagtagtggtgatgtacatgttttaatgatctgtctgtaatgatgtatatgaacaattgaagaagttggaagggaatgttgaactttgtcaatacagttcaaaaaaaaaaaaaaagaaaaaaaaaaaaaaaa

SEQ ID NO: 560 - protein, 76 aa, Zea mays
  misc_feature: Ceres CLONE ID no. 324603
  misc_feature: Ceres CDNA ID no. 25446313
MPGRCPYYRWQREYFEKLVKERLIALLFDDWEEDDGEVDSKKVSEVGNSEDIATSVCNGCSTCGSSGDVHVLMICL

SEQ ID NO: 561 - DNA, 819 bp, Zea mays
  misc_feature: Ceres CLONE ID no. 324696
  misc_feature: Ceres CDNA ID no. 36698775
  CDS (87)..(596): REFERENCED BY SEQ ID NO: 562
gcaccaaaaacccaagcctcctctgccacacacacctcgccagcaccacagccaccgccacagtcacacagtcagcgagagagagcatggacctgctgaaccccgagcagatctccgagttccgggaggcgttcgcgttcttcgacaaggacggcgacgggtgcatcacggtggaggagctggcgacggtgatggggtcgctgcaggggcagcggcccagcgcggaggagctgcgcgagatgatccgcgacgccgacgccgacggcaacggcgccatcgacttcgccgagttcctgggcctcatggcgcgcaagaccgcggggggcggcgccggcggcggcgccgaccccgacgaggagctgcgcgaggcgttcaaggtgttcgacaaggacctgaacgggtacatctccgccaccgagctccgccacgtcatgatcaacctcggcgagaagctcacggacgaggaggtggagcagatgatccgcgaggccgacctcgacggcgacggccaggtcaactacgacgagttcgtcaggatgatgatgctctccgacggcgccggcgccggcgccgcagccacgggccaccaccaatgaacccatctccacctttcatcagcctagcgcttcccatcacgtcccttgccgatggagtggcggatcactccatccgtctctgcttcccttttctttttcaccccctcaaaaaaaaaaaaaaaagatcagcgtccgtctctctaatgtaacgtacgtaatgtaatgtaactgatcaaatattcaacaagaaatttaattaccgaatggaaaaaaaaaaaaaaaa

SEQ ID NO: 562 - protein, 169 aa, Zea mays
  misc_feature: Ceres CLONE ID no. 324696
  misc_feature: Ceres CDNA ID no. 36698775
  misc_feature (11)..(39): Pfam Name: efhand PFAM Desc: EF hand
  misc_feature: Homolog of GI Number: 15991282 NR Desc: Calmodulin
  misc_feature: Homolog of GI Number: 7441485 NR Desc: calmodulin
  misc_feature: Homolog of GI Number: 14625425 NR Desc: calmodulin NtCaM13
  misc_feature: Homolog of GI Number: 7441482 NR Desc: calmodulin CAM5
  misc_feature: Homolog of GI Number: 50299513 NR Desc: caomodulin cam
  misc_feature: Homolog of GI Number: 42374718 NR Desc: calmodulin
  misc_feature: Homolog of GI Number: 747917 NR Desc: calmodulin
  misc_feature: Homolog of GI Number: 21616055 NR Desc: putative calmodulin
  misc_feature: Homolog of GI Number: 49035517 NR Desc: Calmodulin
  misc_feature: Homolog of GI Number: 50748592 NR Desc:  similar to calmodulin 1
MDLLNPEQISEFREAFAFFDKDGDGCITVEELATVMGSLQGQRPSAEELREMIRDADADGNGAIDFAEFLGLMARKTAGGGAGGGADPDEELREAFKVFDKDLNGYISATELRHVMINLGEKLTDEEVEQMIREADLDGDGQVNYDEFVRMMMLSDGAGAGAAATGHHQ

SEQ ID NO: 563 - DNA, 593 bp, Zea mays
  misc_feature: Ceres CLONE ID no. 324717
  misc_feature: Ceres CDNA ID no. 25445780
  CDS (241)..(438): REFERENCED BY SEQ ID NO: 564
gagctgtgcctcacatctcatgtgacggcaatacagcataggccagccggatcgttatcttccctaggcgactaggccccctctccaagcatcggttttgcaggtcaaaaggtaaccagctccgccggcctcggagacatcgtccacatcgacccagatttcttcagataccttcgcttcgacttcgagtcgagggggaagcttcagctagaggggcgaagccagcgggagccatcagccatgtgctaccaggtgaagtgcgggtcgtgcggcaagtccacgtgggcgggctgcggccgccacgtcgcctccgtgcaccgccagattccccagggccagcactgcgcctgccgcgattggccgggcgttgccccggccggcgacaaggcggccgccgcggaggggccttcgtccacgtctgtctgcaccatcctgtgatttgagcccgcgcatgttacctctggtgtaggggatgtgcgattgtgtacggttatatttgtctctcttttttttgctcttttttcctaatctctaaatacaatacttctcttgcgagctcgaaaaaaatacttaacaaaaaaaaaaaaaaaaaa

SEQ ID NO: 564 - protein, 65 aa, Zea mays
  misc_feature: Ceres CLONE ID no. 324717
  misc_feature: Ceres CDNA ID no. 25445780
MCYQVKCGSCGKSTWAGCGRHVASVHRQIPQGQHCACRDWPGVAPAGDKAAAAEGPSSTSVCTIL

SEQ ID NO: 565 - DNA, 886 bp, Zea mays
  misc_feature: Ceres CLONE ID no. 325075
  misc_feature: Ceres CDNA ID no. 36586901
  CDS (173)..(571): REFERENCED BY SEQ ID NO: 566
atcccacgcaacaccttagcgatccaccgccctcctctccgctcccctcggtaaagccgaaatccctcccccacatcgcacggcgtacccgatctccaaatcgccccccttcccaaaccctcttcttccccctcacgtgctcgacccagatcgagggctcgatccgtcggccatggcgctggagtgggtggttctgggctacgcggcgggcgcggaggcgatcatgctgctgctgctgacgctgccggggctcgacggcctgcgccggggcatgatctccgtggtgcggagcgcgctgaagcccatgatgtcggtagtgcccttctgcctcttcctgctcatggacatctactggaagtacgagacgcgccccacctgcgacgacgagcacgcctgcaccccctccgagcacctccgccaccagaagtccatcatgaagtcgcagcggaacgcgctcctcatcgccgccgcgctgctcctctactggatcctcttctccgtcacccagctcgtcgtcaggctcgagcagatgcagcagcgcgtcgacaagctcaggaagcgctacgactgatggatccgcatccatccggtgggctcgttcttcctctgcctgccttgtgttcctgctttatgttgtggtgctgatgttttagatctcggatcgtaatttgagacctgctggtagcatttgcttcctttgccttgccgtcttcagataaaaaagaacagcgctcttggaaacgatgataatgtttaggatgtttggacgaatggtatctgtcgtaattgatgtcttcatccatgaattggttggtgtcactcaatgtacactgagatattggttaatagctactagtgctgtttttatcgaaaaaaaaaaaaaaaa

SEQ ID NO: 566 - protein, 132 aa, Zea mays
  misc_feature: Ceres CLONE ID no. 325075
  misc_feature: Ceres CDNA ID no. 36586901
  misc_feature: Homolog of GI Number: 50912505 NR Desc: Erwinia induced protein 2
  misc_feature: Homolog of GI Number: 28207685 NR Desc: Erwinia induced protein 2
  misc_feature: Homolog of GI Number: 8778685 NR Desc: T1N15.5
  misc_feature: Homolog of GI Number: 34809533 NR Desc: Epa5p
  misc_feature: Homolog of GI Number: 38323071 NR Desc: SPBC30B4.01c
  misc_feature: Homolog of GI Number: 34809534 NR Desc: Epa4p
MALEWVVLGYAAGAEAIMLLLLTLPGLDGLRRGMISVVRSALKPMMSVVPFCLFLLMDIYWKYETRPTCDDEHACTPSEHLRHQKSIMKSQRNALLIAAALLLYWILFSVTQLVVRLEQMQQRVDKLRKRYD

SEQ ID NO: 567 - DNA, 894 bp, Zea mays
  misc_feature: Ceres CLONE ID no. 325190
  misc_feature: Ceres CDNA ID no. 29191379
  CDS (3)..(869): REFERENCED BY SEQ ID NO: 568
aaccatgcgttgcgcacgctggaaaacggaggcaaggcgcgtgcaaaactccgaactcctccatcgcgtgcgcgcgcctcgcgagaccacctcggtggcgacccgccggagtcgacgcagctgcgcctcggagacgacatcgcgtggtcggagatcaacggcgtgtacgaccgcgacgactcgctcaaggagaacaccaaccccaagtgcgtcctcaagagccagcaccccggcgccgccgggtcctagcagaggttctcgggcaacctgaagcccacggcggcgcccatcatcgggctttccgggaagctcggcgcgtgcgcgcgggggcaccgccaccgcccgcccgccatgtttcctgggaaggccaggcccggcggcgggcgcgcgtccgaggcggccgtcccggaccccgggtcgcccaaggtttcctgcatcgggaaggtcctctcggaccacgagcgagcgcgcgcgcgcctcggcggcggccgcggctccggggcgcctgggtgctgcggcttcttcatgcagcgcagccggagccggtccaggcacagcgccgtcgagtgcgtcgaccagtccccgccgccgcccgaggaggctgcagcggcgaggtccgcggaggaggcgacggcgccaccgccggggctgggaggtgtgcggcggtttgcgtcggggaggcgagcggcggagtgggcggccaaggtggaggacgacgggcgcgtggcgagatctgggccgttgtagcagcaccgtgcaggcagaggcagcggtggttgaggtgtggctttcggtttggttgcgcccgtgctttagttgtagttgagctgtgtacatacgtgcttctgttcaaatccgtagaaatttgatgcttgggcaaaaaaaaaaaaaaaa

SEQ ID NO: 568 - protein, 131 aa, Zea mays
  misc_feature: Ceres CLONE ID no. 325190
  misc_feature: Ceres CDNA ID no. 29191379
  misc_feature: Homolog of GI Number: 34908494 NR Desc: P0489B03.23
  misc_feature: Homolog of GI Number: 66776813 NR Desc: Phosphoribosylaminoimidazole
  misc_feature: Homolog of GI Number: 67986808 NR Desc: Aldo/keto reductase
  misc_feature: Homolog of GI Number: 5821145 NR Desc: RNA binding protein
  misc_feature: Homolog of GI Number: 47124032 NR Desc: SRRM2 protein
  misc_feature: Homolog of GI Number: 5821143 NR Desc: RNA binding protein
  misc_feature: Homolog of GI Number: 6649242 NR Desc: splicing coactivator subunit SRm300
  misc_feature: Homolog of GI Number: 71668106 NR Desc: 60S ribosomal protein L19
  misc_feature: Homolog of GI Number: 66780099 NR Desc: PE
  misc_feature: Homolog of GI Number: 19923466 NR Desc: splicing coactivator subunit SRm300
MFPGKARPGGGRASEAAVPDPGSPKVSCIGKVLSDHERARARLGGGRGSGAPGCCGFFMQRSRSRSRHSAVECVDQSPPPPEEAAAARSAEEATAPPPGLGGVRRFASGRRAAEWAAKVEDDGRVARSGPL

SEQ ID NO: 569 - DNA, 933 bp, Zea mays
  misc_feature: Ceres CLONE ID no. 325537
  misc_feature: Ceres CDNA ID no. 35383165
  CDS (96)..(707): REFERENCED BY SEQ ID NO: 570
aaaaacaactagaaattccccagcccggttccttttcgtgcggtttgatctcgtcggaggcccggccgcagttccgccatcagccatcgaattcgatggcggccaacttcgggaacaagatccgcaacgccaagctggttcttcttggagatgtaggcgctggcaaatctagcttggttcttcggtttgtcaagggacagtttgttgaattccaggaatcaacaatcggagcagctttcttttcccagaccttagcggtaaatgatgagactgttaagtttgaaatctgggatactgctgggcaggagaggtatcatagcttggcccccatgtattataggggtgcagccgccgccattgttgtctatgacatcacaaatccggcctctaccacgtgtaccaagaaatgggttcaagaacttcaagctcaaggaaatccgaatacaatagtggctcttgctggtaacaaggttgatatgctagatgcgaggcacgtggcagtagaggaagcaaagacgtatgcccaggagaacggtctcttcttcatggagacatctgctaaaactgcaatcaatgtgaatgacatattttatgagattgcaaagagattgcttcaagggcaagaggctccaagtccacaggctggaattgttctgaatcagagaccagatgagaggatggtcagcacttcctcgtgctgctcatgaagctgtgtttcaacctcatacatagttccgttatgaaatgtatcagaggagattaagcaaaatatcccatgtggtgtcggtgtcgtccaggctgatgttgtccccttctcctgctgctcgtttcttttcacatgtttgtgatgtaaatgcccatactagaatgtcaccaaagtgttgattatgctcttatcatttgattacgcccctctcaaaaaaaaaaaaaaaa

SEQ ID NO: 570 - protein, 203 aa, Zea mays
  misc_feature: Ceres CLONE ID no. 325537
  misc_feature: Ceres CDNA ID no. 35383165
  misc_feature (1)..(172): Pfam Name: Arf PFAM Desc: ADP
  misc_feature: Homolog of GI Number: 50917575 NR Desc: putative small GTP
  misc_feature: Homolog of GI Number: 12057010 NR Desc: RAB5A protein
  misc_feature: Homolog of GI Number: 13774086 NR Desc: small GTP
  misc_feature: Homolog of GI Number: 4741844 NR Desc: small GTP
  misc_feature: Homolog of GI Number: 296878 NR Desc: ras
  misc_feature: Homolog of GI Number: 20453279 NR Desc: AT5g45130/K17O22_15
  misc_feature: Homolog of GI Number: 17104761 NR Desc: putative small GTP
  misc_feature: Homolog of GI Number: 1370178 NR Desc: RAB5A
  misc_feature: Homolog of GI Number: 6010031 NR Desc: GTP binding protein
  misc_feature: Homolog of GI Number: 12311684 NR Desc: GTP binding protein
MAANFGNKIRNAKLVLLGDVGAGKSSLVLRFVKGQFVEFQESTIGAAFFSQTLAVNDETVKFEIWDTAGQERYHSLAPMYYRGAAAAIVVYDITNPASTTCTKKWVQELQAQGNPNTIVALAGNKVDMLDARHVAVEEAKTYAQENGLFFMETSAKTAINVNDIFYEIAKRLLQGQEAPSPQAGIVLNQRPDERMVSTSSCCS

SEQ ID NO: 571 - DNA, 1149 bp, Zea mays
  misc_feature: Ceres CLONE ID no. 325601
  misc_feature: Ceres CDNA ID no. 36707645
  CDS (198)..(851): REFERENCED BY SEQ ID NO: 572
gaccaaaatcccccacccgccgcagtccactcgcccgcaccgcaccgcgcgccgcgctcgctgccgtgcccgtgtccccttcctttcccgtttccccctccctctctctttccccacgcccgacgcccccaccactctctcgatccaaagccagatcggcacgacgagcagagggccccccggagcggcgcggagcaatggcggcgggataccgggcggaggacgactacgactacctcttcaaggtggtactgatcggcgactccggcgtcggcaagtccaatctgctctcacgcttcacgcgcaacgagttcagccttgagtccaagtccaccatcggcgtcgagttcgccacccgctctctccaggtcgacggcaaggttgtcaaggcccagatttgggacactgctggccaggaacgatatcgtgctattactagtgcgtattatcgaggtgctgttggggcgttgcttgtatatgacgtcactcgtcactcaacctttgagaacgttgagcgttggctgaaggagttgagggaccacacagatcccaatatagttgttatgctggttggcaacaaatctgatctccgccatcttgtagcagttcaaactgatgaaggaaaagcattcgcagagagggagtcattgtatttcatggagacctctgcactcgagtcgactaacgttgaaaatgcattcgcagaggtcttaactcagatctaccgtattgtgagcaagagagcagttgaagctggcgaagatgcagcatctgggcctggcaagggcgagaagattaacataaaggatgatgtttcggcggtgaagaagggtggctgctgctctagctgacctgccctgctgtattttttttggagctgtggtgatgtagcttatggtacggcatttccagcgaccgagaactggtagtggcattagcagcttctatgttacctagagagtttattgtcaaactgggggaaaaaaactgaaggttagatcggtgtagatctttctggtactgtattgtgtatccggcaataggcatggtattgttttttttggctgtgaatccactggtaccatgtttaaacttatgaattgttcaaaatagaaaggtgcttcatgcttgccataaaaaaaaaaaaaa

SEQ ID NO: 572 - protein, 217 aa, Zea mays
  misc_feature: Ceres CLONE ID no. 325601
  misc_feature: Ceres CDNA ID no. 36707645
  misc_feature (10)..(175): Pfam Name: Arf PFAM Desc: ADP
  misc_feature: Homolog of GI Number: 53792703 NR Desc: GTP
  misc_feature: Homolog of GI Number: 218228 NR Desc: ras
  misc_feature: Homolog of GI Number: 49333370 NR Desc: putative GTP
  misc_feature: Homolog of GI Number: 49333384 NR Desc: putative GTP
  misc_feature: Homolog of GI Number: 50932373 NR Desc: putative GTP
  misc_feature: Homolog of GI Number: 28827250 NR Desc: putative ras
  misc_feature: Homolog of GI Number: 16323446 NR Desc: putative Rab
  misc_feature: Homolog of GI Number: 21536533 NR Desc: Rab
  misc_feature: Homolog of GI Number: 32966065 NR Desc: GTP
  misc_feature: Homolog of GI Number: 452361 NR Desc: guanine nucleotide regulatory protein
MAAGYRAEDDYDYLFKVVLIGDSGVGKSNLLSRFTRNEFSLESKSTIGVEFATRSLQVDGKVVKAQIWDTAGQERYRAITSAYYRGAVGALLVYDVTRHSTFENVERWLKELRDHTDPNIVVMLVGNKSDLRHLVAVQTDEGKAFAERESLYFMETSALESTNVENAFAEVLTQIYRIVSKRAVEAGEDAASGPGKGEKINIKDDVSAVKKGGCCSS

SEQ ID NO: 573 - DNA, 670 bp, Zea mays
  misc_feature: Ceres CLONE ID no. 325608
  misc_feature: Ceres CDNA ID no. 25445850
  CDS (2)..(394): REFERENCED BY SEQ ID NO: 574
taccgccttgttgcattctatctatgcgttgtccttagcttgtccgcccccctccctcgtcttacctcctcctctctacggccggccagatgagctccacggccatcgacgtcctctcggcgctgccgccgatcaggaccgcggcgccggagctcagctggccgggaaggacgaggagaagcgggaggtgatcaggcagctggcgtcgtccatggacgtgatgaggcaggagaacctcacgctgcgcgagcacatcagcaggggatcgtcgaagcgttcctctgcgccccgcgcgggagctgcgttcgatctcaggaaggtggccaggggcctcttctccgcgaggctgttcaccgcgcactgcaggcctacgggccccatcgtcgcgctctgagcaggatgccaggatcgtgaagagagacagcgtagatatgcatttgttgtaggcgagtgatgtgcatattataggatggcatcgatcgatattccctccgctgtctgtttctcaggttcaactaaactagagggagcactcgttttttactatgatggcgtagtagtagtagttaactgtagttaaatatttactagtcatatggatgcatgtttgtatgatggcgttaattattgttaagtattattttgtcagttcctaaaaaaaaaaaaaaaa

SEQ ID NO: 574 - protein, 60 aa, Zea mays
  misc_feature: Ceres CLONE ID no. 325608
  misc_feature: Ceres CDNA ID no. 25445850
MDVMRQENLTLREHISRGSSKRSSAPRAGAAFDLRKVARGLFSARLFTAHCRPTGPIVAL

SEQ ID NO: 575 - DNA, 688 bp, Zea mays
  misc_feature: Ceres CLONE ID no. 325701
  misc_feature: Ceres CDNA ID no. 36707386
  CDS (58)..(459): REFERENCED BY SEQ ID NO: 576
gccgctgcttaccgcctatctcgccaagcaccgccgcatcaccgaaggttcgcaaagatggcggtgccgctgctgacgcagaagatcgtgaagaagagggtcaagcagttcaagaggccccatcttgaccgctacaagtgccttaagccaagctggcgcaggcccaagggtatcgactcccgcgtgaggcgtaagttcaagggatgcaccttgatgcccaacattggatatggctccgacaagaagaccaggcactaccttcccaacaagttcaaaaagtttgttgttcacaatgtctccgagctggagctgctgctgatgcacaacaggacctactgcgctgagatcgcccacaacgtgtccacccgcaagcgcaaggagattgtcgagcgtgctgcgcaaatggacatcgtggtcaccaacaagcttgccaggctccgcagccaagaggacgagtgaaatgttgagtagttttgattgtgctctgctggtgttgaagatgttactgagattgatgttcttctgtaccatttctatgcttatgatagacttttcatatcgacaaaattatgctatgagtgaaaagagttatggggagtgccatctagttttgaccggactccatgcagtgtggagccttgcaagtaatgataatgaacctttgagtctcaaaaaaaaaaaaaaaaaa

SEQ ID NO: 576 - protein, 133 aa, Zea mays
  misc_feature: Ceres CLONE ID no. 325701
  misc_feature: Ceres CDNA ID no. 36707386
  misc_feature (14)..(123): Pfam Name: Ribosomal_L32e PFAM Desc: Ribosomal protein L32
  misc_feature: Homolog of GI Number: 50947773 NR Desc: putative ribosomal protein L32
  misc_feature: Homolog of GI Number: 76057835 NR Desc: ribosomal L32
  misc_feature: Homolog of GI Number: 71534997 NR Desc: ribosomal protein L32
  misc_feature: Homolog of GI Number: 13899057 NR Desc: ribosomal protein L32
  misc_feature: Homolog of GI Number: 40287540 NR Desc: ly200 protein
  misc_feature: Homolog of GI Number: 77745481 NR Desc: ly200
  misc_feature: Homolog of GI Number: 23198054 NR Desc: ribosomal protein L32
  misc_feature: Homolog of GI Number: 21555143 NR Desc: ribosomal protein L32
  misc_feature: Homolog of GI Number: 10177580 NR Desc: ribosomal protein L32
  misc_feature: Homolog of GI Number: 28200284 NR Desc: ribosomal protein L32
MAVPLLTQKIVKKRVKQFKRPHLDRYKCLKPSWRRPKGIDSRVRRKFKGCTLMPNIGYGSDKKTRHYLPNKFKKFVVHNVSELELLLMHNRTYCAEIAHNVSTRKRKEIVERAAQMDIVVTNKLARLRSQEDE

SEQ ID NO: 577 - DNA, 1058 bp, Zea mays
  misc_feature: Ceres CLONE ID no. 326028
  misc_feature: Ceres CDNA ID no. 36707038
  CDS (159)..(797): REFERENCED BY SEQ ID NO: 578
cactagttgcatcggctcccgcataaagatccacaccacttgagcagcagctagctcaagggaaggagaaggctggaagtggaaagaagtgggttcttgcttgagctgagctctgcctcttgctgcccttggatctgtttgggagtggagaacgcagtatggggcgcggcaagatcaagatcaagaggatcgagaactctaccaaccggcaggtgaccttctccaagcgccgggccggactggtcaagaaggcacgggagatcggcgtgctctgcgaaaccgaggtcggcgtcgtcatcttctccagcggcggcaagctctacgactactgctcgcccaggacctcgctgtccaggatcttggagaagtaccagaccaactcggggaagatactgtggggtgagaagcacaagaacctgagtgcagagatcgacagagtcaagaaggagaacgacaacatgcagattcagctcaggcatctgaaaggtgaggacctgaactccctacagcacagggagctgatcgctattgaagagggcctccagaatgggcagaccaacatgcgcgagaagcagatggactactggaggatgcacaagacgaatggaaagatgctggaggacgaacacaagatactgacttttaggatgcaccaacaggctgttgatctgagcggccgcatgagggagctggagataggataccatcaggtccagcacgacagggatttcatttcccagatgccgttcaccttccgggtgcagcccaaccaccccaacctgcaggaagacgagtagctacagcctgctggatagtgatctgcatgccgctctgaactgaagctcctcacctgcagcttctatctcgcgtttcatcattcagcgttagctgggtatctttcttttcatggcaccctggatgaagtctgtcagtacgatgtggtctttgtcttgtgcgtctcttttgactttgctgggctgatttccgtgcatgtagtgatgatgacagcgttaattaagactgaaatgtgcaattaagttgttaaaaaaaaaaaaaaa

SEQ ID NO: 578 - protein, 212 aa, Zea mays
  misc_feature: Ceres CLONE ID no. 326028
  misc_feature: Ceres CDNA ID no. 36707038
  misc_feature (71)..(170): Pfam Name: K PFAM Desc: K
  misc_feature (9)..(59): Pfam Name: SRF PFAM Desc: SRF
  misc_feature: Homolog of GI Number: 13274180 NR Desc: putative MADS
  misc_feature: Homolog of GI Number: 13274182 NR Desc: putative MADS
  misc_feature: Homolog of GI Number: 2961437 NR Desc: MADS box protein
  misc_feature: Homolog of GI Number: 53980849 NR Desc: putative MADS box protein
  misc_feature: Homolog of GI Number: 44888601 NR Desc: PISTILLATA
  misc_feature: Homolog of GI Number: 45356041 NR Desc: PISTILLATA
  misc_feature: Homolog of GI Number: 50902198 NR Desc: MADS box protein
  misc_feature: Homolog of GI Number: 45385970 NR Desc: MADS
  misc_feature: Homolog of GI Number: 13274178 NR Desc: putative MADS
  misc_feature: Homolog of GI Number: 46369967 NR Desc: globosa
MGRGKIKIKRIENSTNRQVTFSKRRAGLVKKAREIGVLCETEVGVVIFSSGGKLYDYCSPRTSLSRILEKYQTNSGKILWGEKHKNLSAEIDRVKKENDNMQIQLRHLKGEDLNSLQHRELIAIEEGLQNGQTNMREKQMDYWRMHKTNGKMLEDEHKILTFRMHQQAVDLSGRMRELEIGYHQVQHDRDFISQMPFTFRVQPNHPNLQEDE

SEQ ID NO: 579 - DNA, 720 bp, Zea mays
  misc_feature: Ceres CLONE ID no. 326086
  misc_feature: Ceres CDNA ID no. 25446314
  CDS (69)..(404): REFERENCED BY SEQ ID NO: 580
aatcgtcgaggagtccaggccttaacggcgccgaccgctccacgtccgcattctgcagtggttcaagcatggtggtcgtgggctccgcggactccttcaacagcatcttttccaaggtgcaagatgaaaagctaccacctgtcttttactacacggcggtgtggtgtggaccatgtagggcgatcgcacctttagtatcaaagctgagcagccagtatcccaagataccggtgtacaaagttgacattgaattggaaggactgggaaacaaactccgtgatctaaacatatgttcagtgccgacgttccacttctatcacaaggggcagagaattagtgaaatcgtgggtgctgatgcaaagaaaattgaagctaccatggaaagtctccacaagcagcagtagaagtttcagagcagagcctcaacctcacaccaatggaatggtttaatctacctcgcatgagaagtgttgcgcacttttggattcgtgtttttctttacgtgtcacaccgtgtgaacgccagcgtttcgtcatcagatgcttgtgattcgtgccggcttgtttcatgtgaagacatcagatgcttgtgtttcgtgccggcttgttttgagttttgggtcttgagcttcggcgactctgtccagagctgcggatgtttctcatgcttggaatgagtgagatgggttgaaaatggccacccaaaaaaaaaaaaaaaaaa

SEQ ID NO: 580 - protein, 111 aa, Zea mays
  misc_feature: Ceres CLONE ID no. 326086
  misc_feature: Ceres CDNA ID no. 25446314
  misc_feature (1)..(109): Pfam Name: Thioredoxin PFAM Desc: Thioredoxin
  misc_feature: Homolog of GI Number: 52076520 NR Desc: thioredoxin
  misc_feature: Homolog of GI Number: 3033396 NR Desc: putative thioredoxin
  misc_feature: Homolog of GI Number: 20147405 NR Desc: At2g20920/F5H14.11
  misc_feature: Homolog of GI Number: 9755396 NR Desc: F17F8.6
  misc_feature: Homolog of GI Number: 26453152 NR Desc: putative thioredoxin
  misc_feature: Homolog of GI Number: 27763683 NR Desc: thioredoxin o
  misc_feature: Homolog of GI Number: 14581677 NR Desc: Hsp70 interacting protein/thioredoxin chimera
  misc_feature: Homolog of GI Number: 17943430 NR Desc: Chain B
  misc_feature: Homolog of GI Number: 17943432 NR Desc: Chain B
  misc_feature: Homolog of GI Number: 840741 NR Desc: thioredoxin h
MVVVGSADSFNSIFSKVQDEKLPPVFYYTAVWCGPCRAIAPLVSKLSSQYPKIPVYKVDIELEGLGNKLRDLNICSVPTFHFYHKGQRISEIVGADAKKIEATMESLHKQQ

SEQ ID NO: 581 - DNA, 1120 bp, Zea mays
  misc_feature: Ceres CLONE ID no. 326119
  misc_feature: Ceres CDNA ID no. 25446315
  CDS (2)..(784): REFERENCED BY SEQ ID NO: 582
ctcggctccaaaagcctattccgtttccgcctcctccctccagcctgtcctcctgcctcgtacgtcctctgcgcggtacccggggagtcctcttgtccgcaccatcgcctccgctccgattcgccgaatcggctctggcgggcgagacgtggatctcgacggaggagactccgaccatcgctccatggaggccgcggactctgaatccgtcatctccaccttcacctgtccgcactgtcagcgggaggttccatcttcaaacattgcattgcacagcgcgcactgcgctcggaaccttcagaagcgcgaacattgcggagatatggttgccaggaagcttatggatgaacactacgatgaaaaccatgctccgatgaattgctcactttgcaaacacacagtagaacgtgagctatgggatcttcatacaggcatacaatgcccacaaaggatgctcgcgtgccaatactgtcagtttgaactgcctgcagttgatctttttgaacatcaggatctgtgtggaaatcggacagaatattgtcaaagttgcaggaagtatatcagacttcgtgaatggattggacatgaactccagttccatacgattttgaatgctgcatcagaactttcaagtgacaggactcgagcagcagcagagcagccagtaccaaagccagcccgacctgctactggttcgcttcacaaacaactgctcttgacggttgcagtaactggagttgcagttttgattggatcaatactgtaccaaggtaaggggaagtagttccggggatagtaatttcacgccccttgatgtgtaaattccctcataaccaaaagagtacagtttagaccccagttgagggaaacaaaaaagaagaaagaaagagagagtacagctgagattacaacatttatggaaggaccaatgaagctatgtcgttgttctttgtaaatggtaattttcccatcaaacttgtgggcgtttggtaacctatgcaaaatttgttacaactgcaaaagttgtaatatcttatggattcatggacaaactgtgatgtgcagtcagtcaaaataacttatcctaatacatttgccactcaaaaaaaaaaaaaaaaaa

SEQ ID NO: 582 - protein, 199 aa, Zea mays
  misc_feature: Ceres CLONE ID no. 326119
  misc_feature: Ceres CDNA ID no. 25446315
  misc_feature (30)..(79): Pfam Name: zf PFAM Desc: TRAF
  misc_feature: Homolog of GI Number: 50939745 NR Desc: XIAP associated factor
  misc_feature: Homolog of GI Number: 68380770 NR Desc:  similar to XIAP associated factor
  misc_feature: Homolog of GI Number: 68380758 NR Desc:  similar to putative polyprotein
  misc_feature: Homolog of GI Number: 72124574 NR Desc:  similar to FLN29 gene product
  misc_feature: Homolog of GI Number: 49114926 NR Desc: MGC80116 protein
  misc_feature: Homolog of GI Number: 34872552 NR Desc: similar to FLN29 gene product
  misc_feature: Homolog of GI Number: 40288191 NR Desc: XIAP associated factor
  misc_feature: Homolog of GI Number: 50758438 NR Desc:  similar to XIAP associated factor
  misc_feature: Homolog of GI Number: 1869901 NR Desc: XIAP associated factor
MEAADSESVISTFTCPHCQREVPSSNIALHSAHCARNLQKREHCGDMVARKLMDEHYDENHAPMNCSLCKHTVERELWDLHTGIQCPQRMLACQYCQFELPAVDLFEHQDLCGNRTEYCQSCRKYIRLREWIGHELQFHTILNAASELSSDRTRAAAEQPVPKPARPATGSLHKQLLLTVAVTGVAVLIGSILYQGKGK

SEQ ID NO: 583 - DNA, 995 bp, Zea mays
  misc_feature: Ceres CLONE ID no. 326202
  misc_feature: Ceres CDNA ID no. 25446316
  CDS (79)..(759): REFERENCED BY SEQ ID NO: 584
aacgacgcacacctcactagtcactactcacccatccactgcaaacacgccaaacggccggcacacaagctggcaaagatggcttcctccttggtcctcgtcgcagcggccctgcttgcgctggcctcgtcgtggcagcaggccatcgcctacgatcctagccctctccaggacttttgtgtcgcagacaagaactcgcctgttcgcgtcaacgggttcccttgcaaggacccgatggcggtcaccccggacgacttcttcaacgcggcgatgatcatcgacaagcggagggacacgaacaacaaggtggggtccaacgtcaccaacgtgaacgtggagagcttcccggggctgaacacgctgggcatctcgctggcgcgcatcgactacgcgccgctcggggtgaacccgccgcacatccatccgcgcgccaccgagctgctcaccgtgctcgagggcaccctctacctcggcttcgtcacgtccaaccccaaccgcctcttctccaaggtggtcaagaagggcgacgtcttcgtcttccccaaggctatgatccacttccagatgaacctcgaccacgacaagcccgccgcggcgctctcgtcgctcagcagccagaaccctggcgtcatcaccatcgccagcgccgtcttcggctccaagccacccatctcggacgacgtcttggccaaggcgttccaggtggagaagaaactcatcgactggctccagtctcagttctgggataccaactactagctgcctagctagctagtaatatacttgcttgcttatttgttgcatgcatgcaccaccaacacaagccttatattaattacgtatgtacatctatgtataatatcgaataaatggccggtatgcatgtggaggagtgaaacttattactgtgcgtgattaataatatttaatgtaaacttttcattattatctaatataaaaaagaatacgagttcattccaaaaaaaaaaaaaaaa

SEQ ID NO: 584 - protein, 226 aa, Zea mays
  misc_feature: Ceres CLONE ID no. 326202
  misc_feature: Ceres CDNA ID no. 25446316
  misc_feature (65)..(215): Pfam Name: Cupin_1 PFAM Desc: Cupin
  misc_feature: Homolog of GI Number: 6996619 NR Desc: oxalate oxidase
  misc_feature: Homolog of GI Number: 50942591 NR Desc: putative germin protein type 1
  misc_feature: Homolog of GI Number: 50941851 NR Desc: germin protein type 1
  misc_feature: Homolog of GI Number: 50941849 NR Desc: putative germin protein type 1
  misc_feature: Homolog of GI Number: 9837115 NR Desc: germin F
  misc_feature: Homolog of GI Number: 9837113 NR Desc: germin B
  misc_feature: Homolog of GI Number: 9837117 NR Desc: germin D
  misc_feature: Homolog of GI Number: 9837119 NR Desc: germin E
  misc_feature: Homolog of GI Number: 50941847 NR Desc: putative germin A
  misc_feature: Homolog of GI Number: 50941863 NR Desc: putative germin A
MASSLVLVAAALLALASSWQQAIAYDPSPLQDFCVADKNSPVRVNGFPCKDPMAVTPDDFFNAAMIIDKRRDTNNKVGSNVTNVNVESFPGLNTLGISLARIDYAPLGVNPPHIHPRATELLTVLEGTLYLGFVTSNPNRLFSKVVKKGDVFVFPKAMIHFQMNLDHDKPAAALSSLSSQNPGVITIASAVFGSKPPISDDVLAKAFQVEKKLIDWLQSQFWDTNY

SEQ ID NO: 585 - DNA, 624 bp, Zea mays
  misc_feature: Ceres CLONE ID no. 326319
  misc_feature: Ceres CDNA ID no. 40350922
  CDS (186)..(431): REFERENCED BY SEQ ID NO: 586
atatttacctttcgcgtcgcagcgccggatcgcccaatcagagcgcgcgttgcacgtcatccgggtacgatatcgaggcagacggcgtacacggatctcgctcggccattggactgtacaaggacgagagcgagaacagcggattcatcaccgccaggcgtcaggtcagagtgtgttaagacaagatggtggcgaatggtgatgcacctgctagagggagtgcggcggcagctgcaagcctgcgcaggcgtaggaccacaagcggtgctgctggtggtggaggcggtgccagctcgatgctccagttctacactgatgaggctgcgggccgcaaaatgtcaccaaacaccgttctgatcatgagcattgggttcatcgccgttgtcgctatgctccatgtttttgggaagctgtaccgcacctccaactaggttggtattaccataaccaagaaaacataggccaccaagacaggagccttatagagcgatttcaatggatagcaagtgactatcagagaggaaccttgtagagcgatttcaatggatagctgtgaactgttgttatagaagtttatctacacaacttgcaatgcggagggctatgataaaaaaaaaaaaaaaa

SEQ ID NO: 586 - protein, 81 aa, Zea mays
  misc_feature: Ceres CLONE ID no. 326319
  misc_feature: Ceres CDNA ID no. 40350922
  misc_feature (32)..(77): Pfam Name: Sec61_beta PFAM Desc: Sec61beta family
MVANGDAPARGSAAAAASLRRRRTTSGAAGGGGGASSMLQFYTDEAAGRKMSPNTVLIMSIGFIAVVAMLHVFGKLYRTSN

SEQ ID NO: 587 - DNA, 643 bp, Zea mays
  misc_feature: Ceres CLONE ID no. 327239
  misc_feature: Ceres CDNA ID no. 40350923
  CDS (63)..(473): REFERENCED BY SEQ ID NO: 588
acaccgcaatcttcaatctccccagcaatccctagcagaagccttccatcctcactcgctcgatggcccgcacgaagcagacggcgaggaagtccaccggcggcaaggcgccgaggaagcagctggcgactaaggcggcccgcaagtctgcccctgcgaccggcggagtgaagaagccccaccgcttccgccccggcaccgtcgcgctccgggagatccgcaagtaccagaagagcacggagctgctgatccgcaagctgccgttccagcgcctggtgcgggagatcgcgcaggacttcaagaccgacctacgcttccagagctctgctgtctccgcgctgcaggaggcggctgaggcctaccttgtcgggctcttcgaggacaccaacctctgcgccatccacgccaagcgcgtcaccatcatgcccaaggacatccagcttgcccgccgcatccgcggggagagggcctaagcgtcatattttctgtcatcagtgcccgatcagaagatgtagagatatgctgggttctgtagtttgggttactgtcgaatcatcgagtgttggctgttcactgctgtaacttaattatcatgatgcatatgaaatggcaatgaactctgttaccaaaaaaaaaaaaaaaa

SEQ ID NO: 588 - protein, 136 aa, Zea mays
  misc_feature: Ceres CLONE ID no. 327239
  misc_feature: Ceres CDNA ID no. 40350923
  misc_feature (58)..(134): Pfam Name: Histone PFAM Desc: Core histone H2A/H2B/H3/H4
MARTKQTARKSTGGKAPRKQLATKAARKSAPATGGVKKPHRFRPGTVALREIRKYQKSTELLIRKLPFQRLVREIAQDFKTDLRFQSSAVSALQEAAEAYLVGLFEDTNLCAIHAKRVTIMPKDIQLARRIRGERA

SEQ ID NO: 589 - DNA, 607 bp, Zea mays
  misc_feature: Ceres CLONE ID no. 327438
  misc_feature: Ceres CDNA ID no. 25446317
  CDS (2)..(373): REFERENCED BY SEQ ID NO: 590
acaccacagcgcagaagaacacagcacccgcctgcctcgccgccgcaatggccgccgccgcctccgctgcgagatccttcctccggtccagcggctcatcgtctctccgcagcgcggtggccagagccgcctcgcgtgcgggaccgggaccggctccgctgccgaggcggatgcccacctctgccccccgtgtactcctaaggtcgccggtggaaatgagcagcgtgtgtctggagtccttgatgcccatgcacagcgccacggcttcagcgctcatgacgtcgcttctcgccgccccggcttgcaagggattcggttggctatcagaaggcctgtgattagtgcgatggaggtcaacttggatgaagactagactgctatttattttgccatctctgttgccttggttttgcccattataaatggaacatagagcaatgtagctttcgtcgctgttaatttatatgatgttattctagagcttgagcccagattattgtgtttctatttgtagatggatgatttgtcgttactggagatctgcagtgatggtatcttgtctggattatggatacctcgtgaatttaaagcaaaaaacaaaaaaaaa

SEQ ID NO: 590 - protein, 96 aa, Zea mays
  misc_feature: Ceres CLONE ID no. 327438
  misc_feature: Ceres CDNA ID no. 25446317
  misc_feature: Homolog of GI Number: 34904474 NR Desc: OSJNBa0086P08.16
MAAAASAARSFLRSSGSSSLRSAVARAASRAGPGPAPLPRRMPTSAPRVLLRSPVEMSSVCLESLMPMHSATASALMTSLLAAPACKGFGWLSEGL

SEQ ID NO: 591 - DNA, 1622 bp, Zea mays
  misc_feature: Ceres CLONE ID no. 327736
  misc_feature: Ceres CDNA ID no. 40041175
  CDS (198)..(1379): REFERENCED BY SEQ ID NO: 592
gagtccagctcggcaggtcagtcagtagtggatagctccgctcgcggtcgcgggcggctcgagtcgcaccccagatcccaatgcgccccgccgcgccgctctaggccgcggaacggaagctaggtgcgtcacacgccggggccggtcgcggtcaccggaccggacgcacaggggcgccgtacgtgcagtcatcggccatgaaggtcctcgtcctcgccgtgctggcgctcgtcgccgccgccgccgccgccggtcagggcgaggaggggggcgggccgccgctgccgttcgcggtgggcgcggcgccggcgggctgcgacgtcgcgcagggcgagtgggtgcgcgacgacgacgcccgcccatggtaccaggaatgggagtgcccctacatccagccgcagctgacgtgccaggcgcacggccgccccgacaaggcgtaccagagctggcgctggcagccgcggggctgctcgctgcccagcttcaacgcgacgctgatgctggagatgctgcgggggaagcggatgctgttcgtgggtgactcgctgaaccgggggcagtacgtgtccctcctctgcctcctgcaccgggccatccccgacggcgccaagtcgttcgagacggtggactcgctgagcgtcttccgggcgaagaactacgacgccaccatcgagttctactgggcgccgatgctggccgagtccaactccgacgacgccgtggtgcactccgccgacgaccgcctcatccgcggcgcgcccatggacaggcactccagcttctggaagggcgccgacgtcctcgtcttcaactcctacctctggtgggtcgccggggacaagatccagatcctgaggggcgccgacaacgacccgagcaaggacatcgtggagatgaagtcggaggaggcctaccggctggtgctgcaccaggtggtccggtggctggagcgcaacgtggaccccggcaagtcgcgggtgttcttcgtcaccgcttcgccgacgcacacggacggcagggcgtggggcgacgacgacgcggagggcagcggcaactgctacaaccagacgtcgccgatcagcgccgcctcgtcctaccgtggcggcacgagccaggagatgctgcgcgcgacggaggaggtgctggccacgtcgcgggtgcccgtcgggctggtcaacatcacgcggctgtccgagtaccgccgggacgcgcacacgcagacctacaagaagcagtgggtggagccgacggccgagcagcgcgccgaccccaggagctacgccgactgcacgcactggtgcctccccggcgtgccggacacgtggaacgagctgctctactggaagctcttcttccccagcaacgatcaggtcctctgatggtgcattggtgcctgcatacatacgcctggaaaccaactgctaggggctagcccaaagaaaatgtgtctagatgaacaaagccatggggttcaaatgttttgttttgatttcggatatggacgctgtcgatgctcttgttctctgtggaattcttcttaccaactgtgcctcccatatatacatcactactgatactagaatctatgctaatattttctttcgtcaaaaaaaaaaaaaaaa

SEQ ID NO: 592 - protein, 393 aa, Zea mays
  misc_feature: Ceres CLONE ID no. 327736
  misc_feature: Ceres CDNA ID no. 40041175
  misc_feature: Homolog of GI Number: 34898234 NR Desc: leaf senescence related protein
  misc_feature: Homolog of GI Number: 34907966 NR Desc: P0446G04.14
  misc_feature: Homolog of GI Number: 52077362 NR Desc: lustrin A
  misc_feature: Homolog of GI Number: 34912638 NR Desc: P0410E01.23
  misc_feature: Homolog of GI Number: 54290286 NR Desc: leaf senescence related protein
  misc_feature: Homolog of GI Number: 51091192 NR Desc: lustrin A
  misc_feature: Homolog of GI Number: 50926336 NR Desc: OSJNBb0002J11.24
MKVLVLAVLALVAAAAAAGQGEEGGGPPLPFAVGAAPAGCDVAQGEWVRDDDARPWYQEWECPYIQPQLTCQAHGRPDKAYQSWRWQPRGCSLPSFNATLMLEMLRGKRMLFVGDSLNRGQYVSLLCLLHRAIPDGAKSFETVDSLSVFRAKNYDATIEFYWAPMLAESNSDDAVVHSADDRLIRGAPMDRHSSFWKGADVLVFNSYLWWVAGDKIQILRGADNDPSKDIVEMKSEEAYRLVLHQVVRWLERNVDPGKSRVFFVTASPTHTDGRAWGDDDAEGSGNCYNQTSPISAASSYRGGTSQEMLRATEEVLATSRVPVGLVNITRLSEYRRDAHTQTYKKQWVEPTAEQRADPRSYADCTHWCLPGVPDTWNELLYWKLFFPSNDQVL

SEQ ID NO: 593 - DNA, 427 bp, Zea mays
  misc_feature: Ceres CLONE ID no. 328877
  misc_feature: Ceres CDNA ID no. 36703160
  CDS (69)..(251): REFERENCED BY SEQ ID NO: 594
ctagccgccgccagaccattcgtttctcgcgagccatcgcttctgtaattctcaggcatccggaagaaatggccaagtcgaagaaccacacggcgcacaaccagtcgttcaaggcgcacaagaacggcattaagaaacccaagcgccaccgccagacctccaccaaggggatggaccccaagttcctgaggaacctgaggtattctaggaagggcaacaaaaagagtggtgaggctgaagctgaggagtaggaaggaaagcatggctttgtttcctctgtttttagctcagttccacctttaggacctggggttttgctaaagatggaacttaagtggtgttactgtatgatggcaaggaccttttgctgccgaaggttatgttttgaagttcatgctaccttttaaagtgaaaaaaaaaaaaaaaa

SEQ ID NO: 594 - protein, 60 aa, Zea mays
  misc_feature: Ceres CLONE ID no. 328877
  misc_feature: Ceres CDNA ID no. 36703160
  misc_feature (4)..(42): Pfam Name: Ribosomal_L29e PFAM Desc: Ribosomal L29e protein family
  misc_feature: Homolog of GI Number: 34905656 NR Desc: P0475H04.11
  misc_feature: Homolog of GI Number: 7959366 NR Desc: ribosomal protein L29
  misc_feature: Homolog of GI Number: 30679956 NR Desc: 60S ribosomal protein L29
  misc_feature: Homolog of GI Number: 7549643 NR Desc: ribosomal protein L29
  misc_feature: Homolog of GI Number: 7549645 NR Desc: ribosomal protein L29
  misc_feature: Homolog of GI Number: 27764982 NR Desc: At3g06680
  misc_feature: Homolog of GI Number: 12231298 NR Desc: ripening regulated protein DDTFR19
  misc_feature: Homolog of GI Number: 55239367 NR Desc: ENSANGP00000011508
  misc_feature: Homolog of GI Number: 72051829 NR Desc:  similar to 60S ribosomal protein L29
  misc_feature: Homolog of GI Number: 61654674 NR Desc: L29
MAKSKNHTAHNQSFKAHKNGIKKPKRHRQTSTKGMDPKFLRNLRYSRKGNKKSGEAEAEE

SEQ ID NO: 595 - DNA, 840 bp, Zea mays
  misc_feature: Ceres CLONE ID no. 329472
  misc_feature: Ceres CDNA ID no. 35383166
  CDS (216)..(611): REFERENCED BY SEQ ID NO: 596
agttccttctcatcatcgcttgctttgttttgttcttccgacctgcatctgctcctccagacacagcgcacccgccttcctcatcctgattccgtggccggcggccgcctaacctcagccccctcacccccaccgacgccgccggaacccttgaagtagcggacccgggctctcgcgcccatccgcgtcaggagttcgatgtccgtttgcgcctgatggatccgcaccggctgaccggccccgccgcgtccgacgccgacgatgccgatgactgggataacgatgactttgtgatcccaagttttagtgttgaagaatctgatatcggtgactgggaagcttcacgggctaccgatcctgaaccacctccaaagcccagcaaagatacagagaacatatatcttggaccacacggagcaccgccatctcgagcgaagaaggcagaggatacttgggctacggctgggtaccgtgagaagaacaacaaagcgagggaagctgagcagaaggcctttggaactgggaggaacagcaaagggggcaacacaggcgaattccatcgccacaatggtggcagccatggcaaggacccctacaagagatctgcttaaccttgtgtcggtcgaggctcgtccacattgatacacctatatcgtgcctacacctcaactaaaggagagtgcggtgatctatccgtgtactggaaatattacttcacttgtggccagcgcaatacattcattatcttgagctgtaggtgttcctggtcagctggtatgtacacacactatcattatactgctgcagaacttcattgtatttgcaaaaaaaaaaaaaaaa

SEQ ID NO: 596 - protein, 131 aa, Zea mays
  misc_feature: Ceres CLONE ID no. 329472
  misc_feature: Ceres CDNA ID no. 35383166
MDPHRLTGPAASDADDADDWDNDDFVIPSFSVEESDIGDWEASRATDPEPPPKPSKDTENIYLGPHGAPPSRAKKAEDTWATAGYREKNNKAREAEQKAFGTGRNSKGGNTGEFHRHNGGSHGKDPYKRSA

SEQ ID NO: 597 - DNA, 1010 bp, Zea mays
  misc_feature: Ceres CLONE ID no. 329506
  misc_feature: Ceres CDNA ID no. 25401317
  CDS (130)..(783): REFERENCED BY SEQ ID NO: 598
atacaacaaccaacgaaaagcgcacgcgcacgcgcatcccggcagtcagtagcgcagctgcctctcctctctttgccccccggagccggagcaagagcgccgccaacagctcgctaccggcgccgtgtcatggcgggggctggagacaaggtggactacgtcttcaaggtggtgctgatcggcgactcggcggttggcaagtcgcagatcctcgcccgcttcgcccgcaacgagttcagcctcgactccaaggccaccatcggcgtcgagttccagacccgcaccctcgtcatcgaccacaggagcgtcaaggcccagatctgggacaccgccggccaggagaggtacagagctgtgacaagtgcttattacagaggtgcactgggagctttgctggtctatgacattaccagacgccagagcttcgatcatataccccgctggctagatgaactccgagcccatgccgacaagaacattgtgataatgctggttggcaacaagagtgatctcgaggagcagcgagcggtgagcactgaagatgccaaggagtttgccgagaaggagaacctcttcttcctggagacctctgcgctccaggcaacaaacgtagagagtgcttttcaaactgtcttgacagagatattcaagatccacagcaagaagaacatggtgtcggagccgaagagcaatggagctgccccagcgatgccggggacaaaggtccttgtcccaggtccggcgcaggaaatcccaaagagcaagtgctgcagttccatgtgatgcttctacgtttggtgctgggtgggttgaaaatatattcacgcaacattgttttggttttaaatccctgctgaaatacttgggttttggcgggattgtgttggaacaccggtgtattttagatatctgtcacaattgtgacatgagagaaggatgtgctgatgtattagttctcttgttctctaattgatacgttttatccctgctacaaaaaaaaaaaaaaaaaa

SEQ ID NO: 598 - protein, 217 aa, Zea mays
  misc_feature: Ceres CLONE ID no. 329506
  misc_feature: Ceres CDNA ID no. 25401317
  misc_feature (7)..(172): Pfam Name: Arf PFAM Desc: ADP
  misc_feature: Homolog of GI Number: 78708412 NR Desc: Ras family
  misc_feature: Homolog of GI Number: 31431694 NR Desc: putative Ras
  misc_feature: Homolog of GI Number: 3024505 NR Desc: Ras
  misc_feature: Homolog of GI Number: 303738 NR Desc: GTP
  misc_feature: Homolog of GI Number: 3024503 NR Desc: Ras
  misc_feature: Homolog of GI Number: 1381676 NR Desc: small GTP
  misc_feature: Homolog of GI Number: 19310619 NR Desc: putative GTP
  misc_feature: Homolog of GI Number: 1370142 NR Desc: RAB11A
  misc_feature: Homolog of GI Number: 72384499 NR Desc: 80A08_30
  misc_feature: Homolog of GI Number: 22136472 NR Desc: GTP
  misc_feature: Useful for making plants with increased biomass and foliage
  misc_feature: Useful for making plants with increased biomass and foliage
  misc_feature: Utility: Cold Germination Useful for making plants with increased tolerance to cold stress
MAGAGDKVDYVFKVVLIGDSAVGKSQILARFARNEFSLDSKATIGVEFQTRTLVIDHRSVKAQIWDTAGQERYRAVTSAYYRGALGALLVYDITRRQSFDHIPRWLDELRAHADKNIVIMLVGNKSDLEEQRAVSTEDAKEFAEKENLFFLETSALQATNVESAFQTVLTEIFKIHSKKNMVSEPKSNGAAPAMPGTKVLVPGPAQEIPKSKCCSSM

SEQ ID NO: 599 - DNA, 527 bp, Zea mays
  misc_feature: Ceres CLONE ID no. 329630
  misc_feature: Ceres CDNA ID no. 25445825
  CDS (273)..(527): REFERENCED BY SEQ ID NO: 600
ttccgttcaccccgtccccctcgttctctctctcgttgcgacgactgtgtggagtaccgcccccgccccctcaccccccgacgccgacgccctaggcggctacgccagatcccgagggacgggcccttcatcttcgtcagtctattcgccgggcgacgagcacccgccagtttggttggagcttggagtttagagggaagatttggtgatgagcagccgcagcctgccgccgaaggatcgcaggatgcgtactgaacgcacctcataccgtgatgcaccatatcggagggacagccgccatggtccaagcaggtttcgtaatgatttgtgcaacaattgtaagcgtcctgggcattttgctagagagtgtcctagcgtggctgtctgccatacctgcgggcttcctgggttgtaaatttgatgtcggaggctggggtacacatgggcattctgtaccagcggtggaaggcgccggcgacgatgacgaaccagtgtgtgttattattattacaaaaaaaaaaaaaaaa

SEQ ID NO: 600 - protein, 68 aa, Zea mays
  misc_feature: Ceres CLONE ID no. 329630
  misc_feature: Ceres CDNA ID no. 25445825
  misc_feature (39)..(56): Pfam Name: zf PFAM Desc: Zinc knuckle
  misc_feature: Homolog of GI Number: 37536582 NR Desc: putative zinc finger protein
  misc_feature: Homolog of GI Number: 21537255 NR Desc: DNA
  misc_feature: Homolog of GI Number: 28973609 NR Desc: putative DNA
  misc_feature: Homolog of GI Number: 25404984 NR Desc: protein F10A5.22
  misc_feature: Homolog of GI Number: 37220736 NR Desc: putative zinc finger protein
  misc_feature: Homolog of GI Number: 47026923 NR Desc: ring zinc finger protein
MSSRSLPPKDRRMRTERTSYRDAPYRRDSRHGPSRFRNDLCNNCKRPGHFARECPSVAVCHTCGLPGL

SEQ ID NO: 601 - DNA, 820 bp, Zea mays
  misc_feature: Ceres CLONE ID no. 329656
  misc_feature: Ceres CDNA ID no. 25446318
  CDS (177)..(623): REFERENCED BY SEQ ID NO: 602
gtgctttcttagaggtgggttggcttctcctccccctccggttcgggttcgggttcgtgaggttctccggggttcggtttcgtgggtgagcggatcgagatggcggcgtcggatgttgagtaccgctgcttcgtcggcggcctcgcctgggccacggacgaccactccccgacccgatggcgcccaaggcggagaagaagccagcggagaagaagccggcggccgaggagaaggcggagaagacgaccgcagggaagaagcccaaggccgagaagcggctgccctcgtccaagtcctccggcaaggagggcggcgagaagaaggggaagaagaaggccaagaagagcgtggagacctacaagatctacatcttcaaggtgctgaagcaggtgcaccccgacatcggcatatcctccaaggccatgtccatcatgaactccttcatcaacgacatctttgagaagctggccggcgaggccgccaagctggcgcggtacaacaagaagcccaccatcacgtcccgcgagatccagacctccgtgcgcctagtcctccccggagagctcgccaagcacgccgtctccgagggaaccaaggccgtcaccaagttcaccagcaactgagcgcgctgcgggatccgcggatctgttagaagggttctttgctgtgtcctttccccagtcccccaccctacccgcctagtagctagcttgcctgctctataaatccggcgcgccggattgtaatggtcctcttagatttgatgtccctgttgtggaatatagttgtatctctccgcttgctaaaaaaaaaaaaaaaa

SEQ ID NO: 602 - protein, 148 aa, Zea mays
  misc_feature: Ceres CLONE ID no. 329656
  misc_feature: Ceres CDNA ID no. 25446318
  misc_feature: No seed is being produced by the plant
  misc_feature: The plant flowers significantly late compared to wild-type.
  misc_feature: Useful for biocontainment applications
  misc_feature: Useful for making plants with modulated flowering time
  misc_feature (55)..(127): Pfam Name: Histone PFAM Desc: Core histone H2A/H2B/H3/H4
  misc_feature: Homolog of GI Number: 21801 NR Desc: histone H2B
  misc_feature: Homolog of GI Number: 577825 NR Desc: H2B histone
  misc_feature: Homolog of GI Number: 22325 NR Desc: H2B histone
  misc_feature: Homolog of GI Number: 1708107 NR Desc: Histone H2B
  misc_feature: Homolog of GI Number: 22323 NR Desc: H2B histone
  misc_feature: Homolog of GI Number: 50947133 NR Desc: putative Histone H2B.2
  misc_feature: Homolog of GI Number: 34895888 NR Desc: putative histone H2B
  misc_feature: Homolog of GI Number: 34895838 NR Desc: putative histone H2B
  misc_feature: Homolog of GI Number: 34895832 NR Desc: putative histone H2B
  misc_feature: Homolog of GI Number: 34895896 NR Desc: putative histone H2B
MAPKAEKKPAEKKPAAEEKAEKTTAGKKPKAEKRLPSSKSSGKEGGEKKGKKKAKKSVETYKIYIFKVLKQVHPDIGISSKAMSIMNSFINDIFEKLAGEAAKLARYNKKPTITSREIQTSVRLVLPGELAKHAVSEGTKAVTKFTSN

SEQ ID NO: 603 - DNA, 1220 bp, Zea mays
  misc_feature: Ceres CLONE ID no. 330060
  misc_feature: Ceres CDNA ID no. 40041176
  CDS (17)..(952): REFERENCED BY SEQ ID NO: 604
actggtccctggcaggatggagttggggctcagcttgggggagaccatggcggatgccgggagcgacctcgtgcttgggcttgggatgggggtcggggtgcggagggaggaggaagcgcagagagggaggagggagcttgagtttgagacggggaggtgcgcccggccgtcgccggagccggcggtgcgactcacgctcctgcccggcctcggcctcccgtggccgctgtcgtccgagaccaatcgtgaggtgccgacgcgtggcttcgacgacgtgaaccgggcgctgtccgtggcctgtgctggcgcagaggaggacgaggcggccgtggccgcagccacggcggcagcatcctcgtcgcctaataacagctcgggctccttcgcgatggacttctccgcgcatggcgagggccaggcggcgcccggcgccgaccgcgcgtgctcgcgcgccagcgacgaggacgacggcggctcggcgcgcaagaagctgcgcctctccaaggaacagtccgcgttcctggaggagagcttcaaggagcgcgccacgccgaacccgaagcagaagctggcgctggcgaggcagctcaacctgcgggcgcgccaggtggaggtgtggttccagaaccgcagggccaggacgaagctgaagcagacggaggtggactgcgagcacctgaagcgctgccgcgagacgctgacgggggagaaccggcggctgcacaaggagctagccgagctccgcgcgctcaaggcggtgccccccttgttgcacatgcacctcccggccaccaccctctccatgtgcccctcctgcgagcgcgtcgcctccaccagctccgcggcccccgccgcgccggcgccagcgtcgccctcacctgctgctggtgctggcattgcggcgtcggccccggacccggatcagaggccctcgtcgtcgttcgcggcgtgaggccctctctgctttacctccggcggcgcgaatgaaggaggatatggctgtaaatacgatcaacttttttttttcttcttccttgtttttttcacttcatgcggttcttgggtttttttggactgccgatggatccgagggtgtagcgcgtcgtctggccgtgtcggattggactgggacggccagggtgcagaaagaatcagaggtgccgcaatagagttcattcattaacctcaaaaaaaaaaaaaaaagaaaaaaaaaaaaaaaa

SEQ ID NO: 604 - protein, 311 aa, Zea mays
  misc_feature: Ceres CLONE ID no. 330060
  misc_feature: Ceres CDNA ID no. 40041176
  misc_feature (157)..(211): Pfam Name: Homeobox PFAM Desc: Homeobox domain
  misc_feature (212)..(256): Pfam Name: HALZ PFAM Desc: Homeobox associated leucine zipper
  misc_feature: Homolog of GI Number: 50946605 NR Desc: putative homeobox
  misc_feature: Homolog of GI Number: 51536105 NR Desc: putative homeodomain leucine zipper protein CPHB
  misc_feature: Homolog of GI Number: 30984526 NR Desc: At3g60390
  misc_feature: Homolog of GI Number: 2344893 NR Desc: homeodomain transcription factor
  misc_feature: Homolog of GI Number: 549890 NR Desc: homeobox protein
  misc_feature: Homolog of GI Number: 22326632 NR Desc: homeobox
  misc_feature: Homolog of GI Number: 29028870 NR Desc: At5g06710
  misc_feature: Homolog of GI Number: 71089855 NR Desc: type II homeodomain
  misc_feature: Homolog of GI Number: 83833844 NR Desc: type II homeodomain
  misc_feature: Homolog of GI Number: 6634483 NR Desc: DNA
  misc_feature: Useful for delaying flowering time
  misc_feature: Useful for increasing chlorophyll and photosynthetic capacity
  misc_feature: Useful for making ornamental plants with modified leaves
  misc_feature: Useful for making shorter plants
  misc_feature: Useful for making stronger plants
MELGLSLGETMADAGSDLVLGLGMGVGVRREEEAQRGRRELEFETGRCARPSPEPAVRLTLLPGLGLPWPLSSETNREVPTRGFDDVNRALSVACAGAEEDEAAVAAATAAASSSPNNSSGSFAMDFSAHGEGQAAPGADRACSRASDEDDGGSARKKLRLSKEQSAFLEESFKERATPNPKQKLALARQLNLRARQVEVWFQNRRARTKLKQTEVDCEHLKRCRETLTGENRRLHKELAELRALKAVPPLLHMHLPATTLSMCPSCERVASTSSAAPAAPAPASPSPAAGAGIAASAPDPDQRPSSSFAA

SEQ ID NO: 605 - DNA, 650 bp, Zea mays
  misc_feature: Ceres CLONE ID no. 330186
  misc_feature: Ceres CDNA ID no. 36583317
  CDS (63)..(473): REFERENCED BY SEQ ID NO: 606
acaccgcaatcttcaatctccccagcaatccctagcagaagccttccatcctcactcgctcgatggcccgcacgaagcagacggcgaggaagtccaccggcggcaaggcgccgaggaagcagctggcgactaaggcggcccgcaagtctgcccctgcgaccggcggagtgaagaagccccaccgcttccgccccggcaccgtcgcgctccgggagatccgcaagtaccagaagagcacggagctgctgatccgcaagctgccgttccagcgcctggtgcgggagatcgcgcaggacttcaagaccgacctacgcttccagagctctgctgtctccgcgctgcaggaggcggctgaggcctaccttgtcgggctcttcgaggacaccaacctctgcgccatccacgccaagcgcgtcaccatcatgcccaaggacatccagcttgcccgccgcatccgcggggagagggcctaagcgtcatattttctgtcatcagtgcccgatcagaagatgtagagatatgctgggttctgtagtttgggttactgtcgaatcatcgagtgttggctgttcactgctgtaacttaattatcatgatgcatatgaaatggcaatgaactctgttatcagttctcaaaaaaaaaaaaaaaa

SEQ ID NO: 606 - protein, 136 aa, Zea mays; identical to SEQ ID NO: 588
  misc_feature: Ceres CLONE ID no. 330186
  misc_feature: Ceres CDNA ID no. 36583317
  misc_feature (58)..(134): Pfam Name: Histone PFAM Desc: Core histone H2A/H2B/H3/H4
  misc_feature: Homolog of GI Number: 59799581 NR Desc: Histone H3
  misc_feature: Homolog of GI Number: 166384 NR Desc: histone H3
  misc_feature: Homolog of GI Number: 1362108 NR Desc: histone H3 homolog
  misc_feature: Homolog of GI Number: 55775689 NR Desc: histone 3
  misc_feature: Homolog of GI Number: 122083 NR Desc: Histone H3
  misc_feature: Homolog of GI Number: 50960584 NR Desc: HIST2H3C protein
  misc_feature: Homolog of GI Number: 61842355 NR Desc:  similar to HIST1H3I protein
  misc_feature: Homolog of GI Number: 122070 NR Desc: Histone H3
  misc_feature: Homolog of GI Number: 68362812 NR Desc:  similar to CG31613
  misc_feature: Homolog of GI Number: 50728592 NR Desc:  similar to histone protein Hist2h3c1

SEQ ID NO: 607 - DNA, 664 bp, Zea mays
  misc_feature: Ceres CLONE ID no. 330462
  misc_feature: Ceres CDNA ID no. 40350924
  CDS (162)..(452): REFERENCED BY SEQ ID NO: 608
gaaccgatccggtttaaaagatccgctactagtgtcaccggcaacgtgtcgacgcggtcgtgtcgtgtgtgttcctggtgaggaagcgaaccctgcctgcctgcttgcttgccgggcaagaagtgagaacagcgtggggtgcggaagcgaccggaccgaggatggctacaagaaggaccgtggcggcgagcgttactgcccaccagcctgcgtgggcggccgtggcgaggaggatggagggcgtgtcgcgctacttcagcgacaaggcctccggcagggtgctcagcgaggaggagcgcgccgccgagaacgtctacatacagaagatggagcgggagaagctggagaaactgaggaggaaggaggacaaggccaaggccgaggcggccaagagggccgccgccgccgccagaggcgacacgaagaattgtgaggaggctcatcctagctgatcatcgccaaaatcggaccagtgctcccgtgaatcgtattatttcgattattctccggttggtttgtactattttttttacctcatataggttggttgtgaaagatgggggtgcattgtgttaaaagttgttttacaggatggtggtgaaatcttcgttagaacatggataataattagtactatagattctttctaaaaaaaaaaaaaaaa

SEQ ID NO: 608 - protein, 96 aa, Zea mays
  misc_feature: Ceres CLONE ID no. 330462
  misc_feature: Ceres CDNA ID no. 40350924
MATRRTVAASVTAHQPAWAAVARRMEGVSRYFSDKASGRVLSEEERAAENVYIQKMEREKLEKLRRKEDKAKAEAAKRAAAAARGDTKNCEEAHPS

SEQ ID NO: 609 - DNA, 1076 bp, Zea mays
  misc_feature: Ceres CLONE ID no. 330642
  misc_feature: Ceres CDNA ID no. 25446319
  CDS (132)..(860): REFERENCED BY SEQ ID NO: 610
cgtcggcgacgagcctgggcgacctgcgccgccgccccctagcccaggtctccatcggacgcttcgccaggtcttgtttagacccatcgccggcaccgagcaacttttgttatcggatcccgcatcgtggaatgcttgccaaagggaggaaggtagctggaaggcgtgaagaaatgtctgcaaattatgcgtttggaccacaggatgatgatgcgattattaaacacaggcttctgactaggacaacgaccaccaggggtgaaccgccactaaagaagcttcagaagaagttcatgtcctttgcaactgagatcgagaaggatgcagataacataagtgactgtgaaagactgtacaaggcctttctacatgaaattaacacctttgagctacctcttctgaaaagcaaggctgtggttgatgcaaacattagggagaaagaaagctttaatgagctgcaggttgagattgagcgacagatcttgcatgctaagactgatattgaggaccttaagaagcaacttgagcagagcaagattgagaggcagcacaaagaagagtgtgaagccatccggaagctgatttgtttgcagcctccacggtcagaaactgaaaaactcattgcagaccttgagaaggagataactgatttgaaggctgagaatgtagcatgcataaggactttggaactgaggaagaagcagtttgcccttcttctacatgtggttgaggaattgcagatctcgattgaagatgagcagaagagtatagcagatgagctgagagctattgctggagagcagaagatgagcatggaagaagggagcgtcggtgcttcagattccatggttgttgactgatcgagatacattcacatatgttgcagacctgcttgccaaaatccatcacatggtttttggacaatatggcgatttggtagatcatctaccgtagatgtcttttgcggtgtctttgtacctcatgtaaattgaactgtatgctagtatgaagtgaaattgaagtacacgttgttgtgtaacaaagtcagttcttattgatcaaaaaaaaaaaaaaaa

SEQ ID NO: 610 - protein, 228 aa, Zea mays
  misc_feature: Ceres CLONE ID no. 330642
  misc_feature: Ceres CDNA ID no. 25446319
  misc_feature: Homolog of GI Number: 38566184 NR Desc: Nif3l1bp1
  misc_feature: Homolog of GI Number: 32450259 NR Desc: Nif3l1bp1
  misc_feature: Homolog of GI Number: 27769070 NR Desc: 1500006O09Rik protein
  misc_feature: Homolog of GI Number: 24654586 NR Desc: CG17143
  misc_feature: Homolog of GI Number: 57101116 NR Desc:  similar to NIF3L1BP1 protein
  misc_feature: Homolog of GI Number: 24654589 NR Desc: CG17143
  misc_feature: Homolog of GI Number: 54641251 NR Desc: GA14344
MSANYAFGPQDDDAIIKHRLLTRTTTTRGEPPLKKLQKKFMSFATEIEKDADNISDCERLYKAFLHEINTFELPLLKSKAVVDANIREKESFNELQVEIERQILHAKTDIEDLKKQLEQSKIERQHKEECEAIRKLICLQPPRSETEKLIADLEKEITDLKAENVACIRTLELRKKQFALLLHVVEELQISIEDEQKSIADELRAIAGEQKMSMEEGSVGASDSMVVD

SEQ ID NO: 611 - DNA, 670 bp, Zea mays
  misc_feature: Ceres CLONE ID no. 330858
  misc_feature: Ceres CDNA ID no. 25446320
  CDS (152)..(433): REFERENCED BY SEQ ID NO: 612
aacagtgtgaagcccgctaaagagagtggttgcaaaaatctctactccgacccccacctaaggcaccgactcgccggggacagagagagaccgacgcgccggcagatcccaagctcaccggagagggggaagagggcgaccgaaggcggcgatgggtttcatcatggacttcgcggagaatatgatcctccgtctgatggaggacccggacaagcgcgaccaggttcggcgggagcatgtctacaagatgaaggagcggtgcgagcgcactaaggcggcgtggagcctccctctgcgcccctacggcttctggaccttcgaccgcttcaactcgcagctctcctgggatccccagatcagccaggccgccggccgtcgggacccctacgatgacctcatcgcccgccactctggctcgccgccgtcttcctgaacacccgttccgatctttgcccagaaggtctacttgggcatcaataagaaactctttcccctcaaactgattgtggttccatcctcttctgtctggaaaatgttgtcaccaaactaccctatttcctgttccagtttggcatggaagtataagttgtgtacttctattctcaagttgttgtctttgtattatgaaatgtttccaataatcagcagtttttgaaaaaaaaaaaaaaaa

SEQ ID NO: 612 - protein, 93 aa, Zea mays
  misc_feature: Ceres CLONE ID no. 330858
  misc_feature: Ceres CDNA ID no. 25446320
  misc_feature: Homolog of GI Number: 42565426 NR Desc: At1g67350
  misc_feature: Homolog of GI Number: 83776790 NR Desc: RW1
MGFIMDFAENMILRLMEDPDKRDQVRREHVYKMKERCERTKAAWSLPLRPYGFWTFDRFNSQLSWDPQISQAAGRRDPYDDLIARHSGSPPSS

SEQ ID NO: 613 - DNA, 738 bp, Zea mays
  misc_feature: Ceres CLONE ID no. 332030
  misc_feature: Ceres CDNA ID no. 40350925
  CDS (148)..(516): REFERENCED BY SEQ ID NO: 614
aaggtgagcttgcgattctgcactctaaagtctgatctcgtcccgccggatctcctccccaccccatgcgttcagatctggttcctttcgatttgactcggttttcccttcctgtgcggggtgacatagggtttaagaccggcggcgatggcggcgaagctggcgcagctgcgcacacaggtaacgcgtgcggcggagttcgcctcgaagcacggctgctcctactacaaggaggtaatggagaagaacaagcagtacgtcgttcagccccccaccgtcgagaagtgccaggagctctccaagcagctcttttacacccgcctcgcaagcctaccaggtcgctatgagtcattctggaaggagcttgattgtgtcaagcaggtatggaagaacaggaaggacctcacggtcgaggaccttggcattgcgagtttatttggagttgagctctatgcatggttctgcgtaggcgagattgtcggcagaggtttcaccttgaccggctataaggtctagatgatttccactggtcaagacctgctttataattgatactcttagctgatgcttgtcgaaacgacgacgatggtacctgccttggttcacaattttgtttctttgtaagagtttacctagtgctgaatgccagcaaagacgggcacatcgttgcaacattgcctcaataatttgctcgctcaattgttgattttggtgcatgtgaaaaaaaaaaaaaaaaaa

SEQ ID NO: 614 - protein, 122 aa, Zea mays
  misc_feature: Ceres CLONE ID no. 332030
  misc_feature: Ceres CDNA ID no. 40350925
  misc_feature (8)..(122): Pfam Name: ATP PFAM Desc: Mitochondrial ATP synthase g subunit
MAAKLAQLRTQVTRAAEFASKHGCSYYKEVMEKNKQYVVQPPTVEKCQELSKQLFYTRLASLPGRYESFWKELDCVKQVWKNRKDLTVEDLGIASLFGVELYAWFCVGEIVGRGFTLTGYKV

SEQ ID NO: 615 - DNA, 503 bp, Zea mays
  misc_feature: Ceres CLONE ID no. 332739
  misc_feature: Ceres CDNA ID no. 36707039
  CDS (117)..(335): REFERENCED BY SEQ ID NO: 616
aaaaaaatcgagaggacgccagggccgattctctgcgtgacttggggcgtcgtcgccgagttttctccggccgagggcggcgcgaccggacaaccagcgtgagcgcgaccggcgacatgactcgcggcaaccagcgtgaccgcgaccgtgagcgcgcggcggcgcggaagcccaacgccaagaactcccaggacgggctcaccccggagcagcgccgcgagagggacaagaaagctctggaggagaaggcggccaagaaggcgcagcaggcagcggccggcggcaccggtacctccacggacaacaacaagaacaaggcaggtggcaagaagtaggaggcagtggcgcgccgccacctctgtacgattaatcgatgccttgagcttgtaacttgttcgcatccttgtaggtgcgatgcttgttgggtcataaactctgatgatatcgagatttggtgatcagaataatgcgtggttttctggctttcaaaaaaaaaaaaaaaa

SEQ ID NO: 616 - protein, 72 aa, Zea mays
  misc_feature: Ceres CLONE ID no. 332739
  misc_feature: Ceres CDNA ID no. 36707039
  misc_feature (1)..(56): Pfam Name: 4F5 PFAM Desc: 4F5 protein family
  misc_feature: Homolog of GI Number: 15229580 NR Desc: four F5 family protein / 4F5 family protein
  misc_feature: Homolog of GI Number: 50902194 NR Desc: B1065E10.19
MTRGNQRDRDRERAAARKPNAKNSQDGLTPEQRRERDKKALEEKAAKKAQQAAAGGTGTSTDNNKNKAGGKK

SEQ ID NO: 617 - DNA, 1182 bp, Zea mays
  misc_feature: Ceres CLONE ID no. 333859
  misc_feature: Ceres CDNA ID no. 25446321
  CDS (205)..(936): REFERENCED BY SEQ ID NO: 618
atcgaacagacgacctcacctcgccctccgccgccgccgcagcggccgtttgatcctccttgcgagtccgaacctccccacgacggcacgcggccggatccagatcgggagtactccccactccccgcgcttctccttcgcatcacaagcggccccggcccagacccctagccggatcggatctcgcgcggcgccgtgccggagatgatgtcgtcgtcgtcggacgcggcagcggcgctggagctgcaggagtccgggtgggaggagctgcggcgggaggcgcgcaagctggagggcgacctcgacgtgaagctctcctcctacgcgcgcctcgccgcgcgctcctcctcctccgcctcgggcgccgcctcccccaccgccgaccgctcctcctggaagtccatggagttcgagatccagtcgctgctcggcaagctgcaggacgtcaacgacgccatgagccgctgcgccgcctccagcgccaccaccacctccgtctcccagaagctcgcgcgccaccgcgacatcctccacgagttcacgcaggagttcaggcggacgagggggaacctgagctccatgagggagcacgccgatctactcagctccgtccgagacgacatcaccgagtccagggcctccggtggcatgtcgccaagagtgcatttgctcagggaacgagcttccattcatggcagcatcaaccagattgatgaggtaattggccaagctcaaagcacaagagtagctctgaacaatcagagggccatgtttggagacattcaagggaaagtgaagcagctgggtgaaaagttcccggtaatcagaggtcttcttggtgccatcaagcggaagaaatcaaaggacaccataatcctctcggcagtgatcgcggcctgcaccatcttcctgatcatttactggctttcgaaatgatgggtcgcacctgagagaagctccctagatctcccttggcccggattagctggttgatatcagatagctgtatcgtctgcctcaccgagaaagatggaacgaacgagagatcagtttcttcagcttttcattgattttgttcgacaactgttgtgccctgtatctgagattccacatgtagagaatttttgctggttcagtaaatacacatatacatgcatggtaacaacaaaaaaaaaaaaaaaa

SEQ ID NO: 618 - protein, 242 aa, Zea mays
  misc_feature: Ceres CLONE ID no. 333859
  misc_feature: Ceres CDNA ID no. 25446321
  misc_feature (70)..(220): Pfam Name: V PFAM Desc: Vesicle transport v
  misc_feature: Homolog of GI Number: 50904959 NR Desc: putative 28 kDa Golgi SNARE protein
  misc_feature: Homolog of GI Number: 2583133 NR Desc: putative cis
  misc_feature: Homolog of GI Number: 28280046 NR Desc: Gosr1 protein
  misc_feature: Homolog of GI Number: 57525319 NR Desc: similar to v
  misc_feature: Homolog of GI Number: 76643529 NR Desc:  similar to golgi SNAP receptor complex member 1 isoform 2 isoform 1
  misc_feature: Homolog of GI Number: 72054393 NR Desc:  similar to 28 kDa Golgi SNARE protein
  misc_feature: Homolog of GI Number: 73967306 NR Desc:  similar to golgi SNAP receptor complex member 1 isoform 2
  misc_feature: Homolog of GI Number: 50946159 NR Desc: putative Golgi SNARE protein
  misc_feature: Homolog of GI Number: 50253013 NR Desc: putative golgi SNAP receptor complex member 1
MSSSSDAAAALELQESGWEELRREARKLEGDLDVKLSSYARLAARSSSSASGAASPTADRSSWKSMEFEIQSLLGKLQDVNDAMSRCAASSATTTSVSQKLARHRDILHEFTQEFRRTRGNLSSMREHADLLSSVRDDITESRASGGMSPRVHLLRERASIHGSINQIDEVIGQAQSTRVALNNQRAMFGDIQGKVKQLGEKFPVIRGLLGAIKRKKSKDTIILSAVIAACTIFLIIYWLSK

SEQ ID NO: 619 - DNA, 1670 bp, Zea mays
  misc_feature: Ceres CLONE ID no. 333886
  misc_feature: Ceres CDNA ID no. 40041177
  CDS (85)..(1518): REFERENCED BY SEQ ID NO: 620
aatacatccctttattatactaattggtgaaggtaagagagaagcaagcaagcaacaccggctgccgacgcgcaggtcagtacaatgagaggatcgatgttctgcggcggagatctccggtggtggatgttggccatcttcttcctctgcacactaattgctgccgcggaggagcgcgtcgtcacccatctccccggcttccagggaccactccccttccagctccgaactgggtacgtggaggtggacgaggacaatggcgtccgcctcttctactacttcaccctctccgagggctcctcagccgacgacccggtcatgctctggctcagcggcggccccggatgcacttccttcaccggcctcgtctatcagattggccctctcagtttcgaccttgacagctacatgggtggcctgcctaagctggtgtacagacctgagtcctggaccaaggtgagcaatatcatttttcttgattccccggttggagctggattttcatactctgtcaaagagcaaggatacaattcaagtgacacaaaagctgtcagccatattctggtctttctcaagaagtggtttgacgagcacccagagttcttgtcaaatccactttacattggcggtgattcatacgctggtatgattgtgcctaccgtcacttctgaaattgctaagggtttgaaaattgttggtagtaaacctacaatgaatctaaagggctgccttgttggaaatccattcacagatcaatcaaactttgatgggccatcgaaaattccatttgctcataggatggctctcatatctgaccaaatgtacaagtcatacaagaagagttgccgtggaggagacaacaggcaccaaagcatccagtgcagaaatagtcttgatgccatagatgagtgtgtcaaggatatatctgagtttcacgttctggagccccgctgtgcttatgcaagccctcaccaatacaatgttctcaagctgaagacgagtttaggtgttcagaagatgcagcagctaccagacttcactgcagaagggcttcacttgtctgagatttctacagagtgcagaacaatgctatatacactgtctagaatatgggcaaacaatgccacagtgagggaggctcttgggattcacaagggaacagttcccctatggttaagatgcaacacggacataccgtatttgaaagatattaagagttcagtgaagtaccatttggatgtgaccaccaaaggatacaaaagtctagtttacagtggtgatcatgacatgggtgtaccttatattggcacacaatcctggattaggtcacttaatttctctattgtggatgactggagaccatggtatgttgatgggcaagttgcaggatatacagtgttgtactcaaataacctcacatttgcaacggtgaagggtgctgggcatactgctccagaatacatgccaaggcaatgccttgctatgctttcaaggtggcttgctggtgataccctttgattggcgcatagagatgcactgctacatagttgtatagactttatgtgtatgtaagtgagttacttgggactagttgtctggattgttgtgtctaggcttttcgtcgtttttccctttaataaaccgagcttaacaaaaaaaaaaaaaaaaaa

SEQ ID NO: 620 - protein, 477 aa, Zea mays
  misc_feature: Ceres CLONE ID no. 333886
  misc_feature: Ceres CDNA ID no. 40041177
  misc_feature (37)..(474): Pfam Name: Peptidase_S10 PFAM Desc: Serine carboxypeptidase
  misc_feature: Homolog of GI Number: 78707589 NR Desc: Serine carboxypeptidase
  misc_feature: Homolog of GI Number: 37530314 NR Desc: putative serine carboxypeptidase
  misc_feature: Homolog of GI Number: 77552240 NR Desc: serine carboxypeptidase I
  misc_feature: Homolog of GI Number: 50930237 NR Desc: OSJNBb0051N19.2
  misc_feature: Homolog of GI Number: 50918441 NR Desc: putative serine carboxypeptidase I
  misc_feature: Homolog of GI Number: 12324326 NR Desc: putative serine carboxypeptidase
  misc_feature: Homolog of GI Number: 12324330 NR Desc: putative serine carboxypeptidase
  misc_feature: Homolog of GI Number: 12324329 NR Desc: putative serine carboxypeptidase
  misc_feature: Homolog of GI Number: 8567775 NR Desc: glucose acyltransferase
  misc_feature: Homolog of GI Number: 22136494 NR Desc: serine carboxypeptidase
  misc_feature: Useful for delaying flowering time
  misc_feature: Useful for making plants with increased biomass and foliage
  misc_feature: Useful for making plants with increased biomass and foliage
  misc_feature: Useful for sterility
MRGSMFCGGDLRWWMLAIFFLCTLIAAAEERVVTHLPGFQGPLPFQLRTGYVEVDEDNGVRLFYYFTLSEGSSADDPVMLWLSGGPGCTSFTGLVYQIGPLSFDLDSYMGGLPKLVYRPESWTKVSNIIFLDSPVGAGFSYSVKEQGYNSSDTKAVSHILVFLKKWFDEHPEFLSNPLYIGGDSYAGMIVPTVTSEIAKGLKIVGSKPTMNLKGCLVGNPFTDQSNFDGPSKIPFAHRMALISDQMYKSYKKSCRGGDNRHQSIQCRNSLDAIDECVKDISEFHVLEPRCAYASPHQYNVLKLKTSLGVQKMQQLPDFTAEGLHLSEISTECRTMLYTLSRIWANNATVREALGIHKGTVPLWLRCNTDIPYLKDIKSSVKYHLDVTTKGYKSLVYSGDHDMGVPYIGTQSWIRSLNFSIVDDWRPWYVDGQVAGYTVLYSNNLTFATVKGAGHTAPEYMPRQCLAMLSRWLAGDTL

SEQ ID NO: 621 - DNA, 456 bp, Zea mays
  misc_feature: Ceres CLONE ID no. 334042
  misc_feature: Ceres CDNA ID no. 36584640
  CDS (92)..(289): REFERENCED BY SEQ ID NO: 622
atccagtgttgtgtcctagcgccgccgccgccccaactcgccttgcgtgactgaaagctcgtcggcttccgtccacgcgagaagcgagagcatggacacccaggtgaagcttgctgttgtggtgaaggtgatgggcaggaccggctccaggggtcaggtgacccaggtcagagttaagttcttggatgaccagaaccggctcatcatgaggaatgtcaaggggcccgtccgcgagggtgacatcctcaccctgctcgagtccgagagggaggccaggaggctgcgctgaagccctagcgttcttggtgggctcttgtttggtctttggtgtcttcgaatttgtgctatgtttgaacttctgtgaccctgtcttgagagtagtaagcctggtgataagattgcagttttgtttatcctggttgaaaatggaattggtgttgaaaaaaaaaaaaaaaa

SEQ ID NO: 622 - protein, 65 aa, Zea mays; identical to SEQ ID NO: 54
  misc_feature: Ceres CLONE ID no. 334042
  misc_feature: Ceres CDNA ID no. 36584640
  misc_feature (1)..(65): Pfam Name: Ribosomal_S28e PFAM Desc: Ribosomal protein S28e
  misc_feature: Homolog of GI Number: 32400865 NR Desc: S28 ribosomal protein
  misc_feature: Homolog of GI Number: 2739219 NR Desc: rpS28
  misc_feature: Homolog of GI Number: 557682 NR Desc: small subunit ribosomal protein S28
  misc_feature: Homolog of GI Number: 3947723 NR Desc: ribosomal protein S28
  misc_feature: Homolog of GI Number: 21902507 NR Desc: ribosomal protein small subunit 28
  misc_feature: Homolog of GI Number: 3947725 NR Desc: ribosomal protein S28
  misc_feature: Homolog of GI Number: 40287500 NR Desc: 28 kDa small subunit ribosomal protein
  misc_feature: Homolog of GI Number: 21593139 NR Desc: 40S ribosomal protein S28
  misc_feature: Homolog of GI Number: 38566518 NR Desc: At3g10090
  misc_feature: Homolog of GI Number: 61808433 NR Desc:  similar to 40S ribosomal protein S28

SEQ ID NO: 623 - DNA, 1659 bp, Zea mays
  misc_feature: Ceres CLONE ID no. 334223
  misc_feature: Ceres CDNA ID no. 29191628
  CDS (122)..(1354): REFERENCED BY SEQ ID NO: 624
cccacctcacaggctcacacgatactttccccctccactagggttccccgtccgttccccctcggccgcatcagctgtttgaggcggcaaccaagggccgcggaagcatctgcgtcgagccatggataaggggatcttcaccaacgatggctccttcatggagaggttcaagcagatgcagcaggaggcgcaggagaagaaggccgctgctgcctccgcctcatcggctcccaagcatgcgaaccccaagcaggggtttgctgttgcggcaaacaagaggccattcgagctgaagaacgctgctccggtagcctcagctggtaagctggcctttagtctcaagaaggccaaggtcgccgttgcacctgtgtttgcagccgacgaggaggatgaggatgccgtggatgttgagagggaggagcccgccaaacgccagaagtctgtgcaagctgatgctcctgcggcagctgccccgtccggggctgttgtgagacaagtcgctgacaaactggcaagctttgttgccaaaaacgggagacagtttgagaatatcacacggcagaggaatcctggagatacaccattcaagtttctatttgacaaacactgtccagactacaaatattatgagtttcagcttgctgaagaggaaagggctcttgctcagtcaaaggaggctgaagcatcgaaagctaactctggcactgcaagcttcaaggcaccaggtggtacttatagaagctcatttgaacagaagtctaactatcagacacctgcatcagctttgtacggggcatatgagggtagttcttcccaaggaagctcttctagttacggtgatcatacagctccaccatcagatcctgtagcattgatggaattctatgcaaagaaggctgcactggaagaacggaagaggccaccaaggcagtcgaaagatgaaatgccgccacctccttctcttcaaggtcctcctaagaagggacaccacatgggtgatttcattcctcaagaagaacttgaaaagtttatggcacggtgtaatgatgctgcagcacaaaaggctaccaaagaagccgctgagaaggctaagattcaggcggacaatattgggcacaaacttttatctaagatgggttggagggaaggcgagggtcttgggagcgagagaagaggccgtgcagatcccgttatggctggagatgtgaagaaggatcatcttggtgttggggctgtccagcctggtgaggtcacatctgaagatgacatctatgagcaatacaagaaacggatgatgcttggataccgctataggccaaaccctctgaacaatccaaggaaatcatactactgatgcgggggagttcgtctgaggggagatgtaaggcgctgctttgctgcaattttgctcacagaactaatggttaggggatatcactaacagcattgaaagtttttgttcatcaacagaaatgtcaagaagttcgttattcagcatatttcttggaatgccacagatgcaaggcttccgggggttctacaaagctttgttctttgtgtagtgtgtttatctttgtggatttaaatgtctgttcaaacgtgtatcatgtttcagacaatgatgtattgctttcttggatcaaaaaaaaaaaaaaaaaa

SEQ ID NO: 624 - protein, 410 aa, Zea mays
  misc_feature: Ceres CLONE ID no. 334223
  misc_feature: Ceres CDNA ID no. 29191628
  misc_feature (127)..(172): Pfam Name: Surp PFAM Desc: Surp module
  misc_feature (327)..(372): Pfam Name: G PFAM Desc: G
  misc_feature: Homolog of GI Number: 50251642 NR Desc: splicing factor 4
  misc_feature: Homolog of GI Number: 4678941 NR Desc: gamma response I protein
  misc_feature: Homolog of GI Number: 20334808 NR Desc: AT3g52120/F4F15_230
  misc_feature: Homolog of GI Number: 73985873 NR Desc:  similar to splicing factor 4 isoform a isoform 1
  misc_feature: Homolog of GI Number: 62859963 NR Desc: Sf4
  misc_feature: Homolog of GI Number: 2988397 NR Desc: F23858_1
  misc_feature: Homolog of GI Number: 18482486 NR Desc: RNA
  misc_feature: Homolog of GI Number: 39793920 NR Desc: SF4 protein
  misc_feature: Homolog of GI Number: 25992259 NR Desc: splicing factor 4
MDKGIFTNDGSFMERFKQMQQEAQEKKAAAASASSAPKHANPKQGFAVAANKRPFELKNAAPVASAGKLAFSLKKAKVAVAPVFAADEEDEDAVDVEREEPAKRQKSVQADAPAAAAPSGAVVRQVADKLASFVAKNGRQFENITRQRNPGDTPFKFLFDKHCPDYKYYEFQLAEEERALAQSKEAEASKANSGTASFKAPGGTYRSSFEQKSNYQTPASALYGAYEGSSSQGSSSSYGDHTAPPSDPVALMEFYAKKAALEERKRPPRQSKDEMPPPPSLQGPPKKGHHMGDFIPQEELEKFMARCNDAAAQKATKEAAEKAKIQADNIGHKLLSKMGWREGEGLGSERRGRADPVMAGDVKKDHLGVGAVQPGEVTSEDDIYEQYKKRMMLGYRYRPNPLNNPRKSYY

SEQ ID NO: 625 - DNA, 738 bp, Zea mays
  misc_feature: Ceres CLONE ID no. 335427
  misc_feature: Ceres CDNA ID no. 29191804
  CDS (64)..(525): REFERENCED BY SEQ ID NO: 626
atcaatcagttccacaatccacttgcctcggccgctatcgtgaccgggaacaacaactgcgagatggccacggtggagacctcgggcacggcgatagggtcctccgggagatgggcactacacggcaagacagccctcgtcaccggcggcacccgcggcatcgggcgtgcggtagtggaggagctggcggcgctgggggcggccgtgcacacatgctcccggaaggcggaggagctcggcgagcgcatcaaggagtgggaggccaggggattcagcgttaccgggtccgtctgcgacctctccgagagggaccagcgggagcggttgctccgcgaggttgccgaccgcttcggcggcaagctcaacatcctcgtaaacaatgtaggaacaaacataaggaaaccaactactgagtttactgcagaggaatactcgtttctgatggctactaatcttgaatctgcatatcacttgtgtcttctccctgccctcccacccacctgtataggcgtcgccgcagagtagtttccctgtaaattgtgtactctatgttctcccatattctcccctatggttttatttttcatgggtgtagaatagcgtttaacaagagggtggtgttctaggtacattagtgtacgcgttactatctctcggtgttgcggttgccttgtgctagaataaatatggttaccatcaaaaaaaaaaaaaaaaaaaaaaacaaaaaaaaaaaaaaaa

SEQ ID NO: 626 - protein, 153 aa, Zea mays
  misc_feature: Ceres CLONE ID no. 335427
  misc_feature: Ceres CDNA ID no. 29191804
  misc_feature (24)..(59): Pfam Name: Epimerase PFAM Desc: NAD dependent epimerase/dehydratase family
  misc_feature: Homolog of GI Number: 34902058 NR Desc: putative pfam00106
  misc_feature: Homolog of GI Number: 38707448 NR Desc: short chain alcohol dehydrogenase
  misc_feature: Homolog of GI Number: 28394081 NR Desc: putative short chain alcohol dehydrogenase
  misc_feature: Homolog of GI Number: 21553459 NR Desc: putative tropinone reductase
  misc_feature: Homolog of GI Number: 42570969 NR Desc: tropinone reductase
  misc_feature: Homolog of GI Number: 3980415 NR Desc: putative tropinone reductase
  misc_feature: Homolog of GI Number: 67633558 NR Desc: putative tropinone reductase/tropine dehydrogenase
  misc_feature: Homolog of GI Number: 21536785 NR Desc: short chain alcohol dehydrogenase
  misc_feature: Homolog of GI Number: 3980406 NR Desc: putative tropinone reductase
  misc_feature: Homolog of GI Number: 34146804 NR Desc: At2g29290
  misc_feature: Useful for making ornamental plants with modified flowers
  misc_feature: Useful for making plants with altered leaf shape eg curled leaves
  misc_feature: Useful for making plants with altered leaf shape eg curled leaves
  misc_feature: Useful for making plants with increased biomass
  misc_feature: Useful for making plants with increased biomass and foliage
  misc_feature: Useful for making shorter plants and plants with modified flowers
  misc_feature: Useful for modifying plant architecture
  misc_feature: Useful for sterility
MATVETSGTAIGSSGRWALHGKTALVTGGTRGIGRAVVEELAALGAAVHTCSRKAEELGERIKEWEARGFSVTGSVCDLSERDQRERLLREVADRFGGKLNILVNNVGTNIRKPTTEFTAEEYSFLMATNLESAYHLCLLPALPPTCIGVAAE

SEQ ID NO: 627 - DNA, 1145 bp, Zea mays
  misc_feature: Ceres CLONE ID no. 336533
  misc_feature: Ceres CDNA ID no. 25446322
  CDS (28)..(879): REFERENCED BY SEQ ID NO: 628
gaaccaaaataacccaccccagcaaccatggactgctgctgttctgctcctgctccttttgtttgtttgcttgtgcttgccattcttcttctgaaagaaaataaaaatgcatctggccttgcacgcgcagacatggacgacactctgtacccgctgagccttggcatcaacctagcatgccgcaagaacatacaggagtacatgctgaagaagctgcggatcgaggagagccaggtccccaggatgtgcctggacctgtacagggagtatgggaccacaatggccggcctcaaggttttggggtacgatttcgactacgacgacttccacgcctgcgtgcacgggacgctgccgtacgagaaggtgaagcctgacccggtgctcaggcagctgctgctttccctgccgcagaggaagatcatcttcaccaactccgacaaggccaacgcggccagagtcctggagaagctcggcctccaggactgcttccaagggatcgtctgcttcgagaccctgaacccgccaccaccaaccgagaccgagaagaacagtggcggcagtgctgggacgatcctgtgcaagccctcactggcgtccatggaagccgtcatcgagatcgccaagctcgacgccgagagaacggtgttctttgacgacagcgcgcgcaacatcgccgcagggaaggccgccggtttccgcaccgtcatcgtggggagctcggcgctggtgccaggggcggacgtggcgctggagagcatccacaacatcaaggaggcgctgccggagctctgggaggttgccgccgccgctcccgccggcgaccgcgtcgacgccgtcctccggtccaccaccgccgtggagaccacagtgattgcctgagcaataataccatgtgacattaaccgtcacggactcaaggtcacggccacgtaatataatgctgccgtgtagtatttctcgtgcctgattaagtaccgaccgaggtaactaatactactgtatgtaccagaccagaactttacggttacgggtaataaggtttgtatagctcatccctgtcggcccgtgcttttttatggcgcggtccgtggtgcaaatggatgccacgtactgaatgcaaatatatatgaaaaaaaaaaaaaaaa

SEQ ID NO: 628 - protein, 248 aa, Zea mays
  misc_feature: Ceres CLONE ID no. 336533
  misc_feature: Ceres CDNA ID no. 25446322
  misc_feature (1)..(196): Pfam Name: Hydrolase PFAM Desc: haloacid dehalogenase
  misc_feature: Homolog of GI Number: 34913328 NR Desc: ripening
  misc_feature: Homolog of GI Number: 7406669 NR Desc: putative ripening
  misc_feature: Homolog of GI Number: 30695534 NR Desc: haloacid dehalogenase
  misc_feature: Homolog of GI Number: 20465781 NR Desc: putative ripening protein
  misc_feature: Homolog of GI Number: 30697236 NR Desc: haloacid dehalogenase
  misc_feature: Homolog of GI Number: 21618155 NR Desc: putative ripening
  misc_feature: Homolog of GI Number: 27527030 NR Desc: putative phosphatase
  misc_feature: Homolog of GI Number: 45681270 NR Desc: COG1011: Predicted hydrolase
  misc_feature: Homolog of GI Number: 15887729 NR Desc: AGR_C_662p
MDDTLYPLSLGINLACRKNIQEYMLKKLRIEESQVPRMCLDLYREYGTTMAGLKVLGYDFDYDDFHACVHGTLPYEKVKPDPVLRQLLLSLPQRKIIFTNSDKANAARVLEKLGLQDCFQGIVCFETLNPPPPTETEKNSGGSAGTILCKPSLASMEAVIEIAKLDAERTVFFDDSARNIAAGKAAGFRTVIVGSSALVPGADVALESIHNIKEALPELWEVAAAAPAGDRVDAVLRSTTAVETTVIA

SEQ ID NO: 629 - DNA, 1350 bp, Zea mays
  misc_feature: Ceres CLONE ID no. 336679
  misc_feature: Ceres CDNA ID no. 25445470
  CDS (110)..(1033): REFERENCED BY SEQ ID NO: 630
acttttgtccccctccctcctccacacctctcgttctctccccctccgcctgctccctctcaggagcgcgcgcgcgcgcgcccagatctagggtttcgtccgcggcaagatgagcagcccgcatggcggtctcgacgaccagatcgagcggctcatgcagtgcaagccgctcgctgagcctgaggttagagctctttgtgagaaggcaaaggagattctgatggaggaaagcaatgttcagcctgtaaagagtcctgttactatatgcggtgatattcatggacaatttcatgatcttgctgaactcttccgaatcggtggaaagtgtccagatacgaactacttgtttatgggagattatgttgaccgtggttactactctgtcgaaactgtcacacttttggtggctttaaaagttcgatatcctcagaggatcaccattctcagaggaaaccatgaaagccggcagattactcaagtgtatgggttctatgacgaatgcttaaggaagtatggaaatgcaaatgtctggaaaacctttacagatctatttgattacttccccttgactgcattggtcgagtcagaaatattttgcttgcatggtggattatcgccatccattgagaccctcgacaacatccgcaactttgaccgcgtccaagaagttcctcacgaaggtccaatgtgtgatcttctgtggtctgatccagatgatcggtgtggctggggtatttctcctcgtggtgctggttataccttcggacaggatatatcagagcagttcaaccataccaatagtctaaggctaattgctagagctcaccagttggttatggagggattcaattgggctcatgagcaaaaagtcgtgactatatttagtgcacctaattattgctaccgctgtgggaacatggcatcaatcttagaagtggatgattgcagagagcatactttcatccagtttgagccagccccaagaaggggagagccagatgtaactcgtaggacacctgactatttcctgtgacgcaaaagtgatgtggatcatgcagagcgaaggtttgatagataggcgcagtttcctggttgcagatatatatatttatatatgtttttgctgggacccctccgtgtgctattcttattatttttgccctggctcgccggccgctctgccgcgtcgtgattcaagtgtatacctacagcctgctacagctggaaggactggactgtgttctcaccttttctcaaactggttggtgcttttggctcggtgtggggccgcagtggtgtggggggttgaagcatcaagcagcgatttgtgtcaaaaaaaaaaaaaaaaaa

SEQ ID NO: 630 - protein, 307 aa, Zea mays
  misc_feature: Ceres CLONE ID no. 336679
  misc_feature: Ceres CDNA ID no. 25445470
  misc_feature (48)..(243): Pfam Name: Metallophos PFAM Desc: Calcineurin
  misc_feature: Homolog of GI Number: 33589738 NR Desc: At2g42500/F14N22.23
  misc_feature: Homolog of GI Number: 6320013 NR Desc: Catalytic subunit of protein phosphatase 2A
  misc_feature: Homolog of GI Number: 6320067 NR Desc: Catalytic subunit of protein phosphatase 2A
  misc_feature: Homolog of GI Number: 3255943 NR Desc: PP2A1 protein
  misc_feature: Homolog of GI Number: 49645498 NR Desc: YlPPH21
  misc_feature: Homolog of GI Number: 418777 NR Desc: phosphoprotein phosphatase
  misc_feature: Homolog of GI Number: 287811 NR Desc: phosphoprotein phosphatase type 2A
  misc_feature: Homolog of GI Number: 5419931 NR Desc: protein phosphatase 2A catalytic subunit
  misc_feature: Homolog of GI Number: 1929412 NR Desc: protein phosphatase type 2A
  misc_feature: Homolog of GI Number: 15810367 NR Desc: putative phosphoprotein phosphatase 2A isoform 4
MSSPHGGLDDQIERLMQCKPLAEPEVRALCEKAKEILMEESNVQPVKSPVTICGDIHGQFHDLAELFRIGGKCPDTNYLFMGDYVDRGYYSVETVTLLVALKVRYPQRITILRGNHESRQITQVYGFYDECLRKYGNANVWKTFTDLFDYFPLTALVESEIFCLHGGLSPSIETLDNIRNFDRVQEVPHEGPMCDLLWSDPDDRCGWGISPRGAGYTFGQDISEQFNHTNSLRLIARAHQLVMEGFNWAHEQKVVTIFSAPNYCYRCGNMASILEVDDCREHTFIQFEPAPRRGEPDVTRRTPDYFL

SEQ ID NO: 631 - DNA, 720 bp, Zea mays
  misc_feature: Ceres CLONE ID no. 336682
  misc_feature: Ceres CDNA ID no. 40041178
  CDS (89)..(517): REFERENCED BY SEQ ID NO: 632
gtgctctctcagaggtgggctggcttctcctccccctcttaccaagtcctcttcgggttagggttacttagggttttgtggaggggcgatggcggcggctgatgtggagtaccgttgcttcgtcggcgggcttgcctgggccaccagcaacgagtcgctggagaatgccttcgcctcctacggcgagatcctcgactccaaggtcatcaccgaccgggagacggggaggtctcgcggcttcggcttcgttaccttctcctccgagaactccatgctcgacgctatcgagaacatgaacggcaaggagctcgacggccgtaacatcaccgttaaccaggcccagtcccgtggcggtggcggtggcgggcgccgtgacggcggttatggcggcggtggcggctacggcggtcggcgcgagggtggtggcggcggctacggaggcggtggcggctacggcggtcggcgcgagggtggtggtggcggctacggcggcggcggcggcggctggagggactgatgtgtgggcccatcctggcttcggccgagttatcttatctatctatagtatcgtgttaccgttcgcttctgtcaccgtgttagtgtccgttctacctttggattaggtgttggtacccctgttgttccctttggttgctcccgctatgaaacgagacgagagaagaatgagcaaggtttttgttcgcaaaaaaaaaaaaaaaa

SEQ ID NO: 632 - protein, 142 aa, Zea mays
  misc_feature: Ceres CLONE ID no. 336682
  misc_feature: Ceres CDNA ID no. 40041178
  misc_feature: null
  misc_feature: Useful for making plants with altered Lignin content
  misc_feature: Useful for making plants with modulated nitrogen use efficiency
  misc_feature (10)..(81): Pfam Name: RRM_1 PFAM Desc: RNA recognition motif.
  misc_feature: Homolog of GI Number: 22313 NR Desc: ABA
  misc_feature: Homolog of GI Number: 10799202 NR Desc: glycine
  misc_feature: Homolog of GI Number: 21625 NR Desc: glycine
  misc_feature: Homolog of GI Number: 18347 NR Desc: glycine
  misc_feature: Homolog of GI Number: 50881454 NR Desc: glycine
  misc_feature: Homolog of GI Number: 82623423 NR Desc: putative glycine
  misc_feature: Homolog of GI Number: 2267593 NR Desc: glycine
  misc_feature: Homolog of GI Number: 20152613 NR Desc: putative glycine rich protein
  misc_feature: Homolog of GI Number: 2331131 NR Desc: glycine
  misc_feature: Homolog of GI Number: 2624326 NR Desc: OsGRP1
MAAADVEYRCFVGGLAWATSNESLENAFASYGEILDSKVITDRETGRSRGFGFVTFSSENSMLDAIENMNGKELDGRNITVNQAQSRGGGGGGRRDGGYGGGGGYGGRREGGGGGYGGGGGYGGRREGGGGGYGGGGGGWRD

SEQ ID NO: 633 - DNA, 753 bp, Zea mays
  misc_feature: Ceres CLONE ID no. 337054
  misc_feature: Ceres CDNA ID no. 29191805
  CDS (195)..(599): REFERENCED BY SEQ ID NO: 634
attttcgtcgaatcccctcctctcttcttttataatggcaattgtctcctctctaccacattctccccattccgcggttccgccctctcgcgtgcctccaggtccctcctctgcgtaactgggcggccgctgatccgccgccaccgctctgtgccctgcgtctggtgttccggtgacaagcgtccacctgcaagatgttggaataccaaaacgtagttggggggagactgaagctgaagggtaaagcgctggacgtaaaggatggtggggtgaagaaaaagaagaagaagtaccagcgtgaggagtcgtctcagattgcgcacgatgagctccacaaaggggggagatctgaattaccaattgatcccaacaatgagcggattgaatctgacaagactggagatgaagggaacccacatcctgactatggccatctcacaccagcagagcgacgctacatggaacagaagcagaagatcgacatgcagaagatggccaaagtcgccaacaagtcgcatagagaccgcatccaagacttcaatcagtatctcgcaaacctaagcgagcactacgacatccccaaagttggccctggctaacatagccaaactggctgtgttacgcacaacaattgtgtgctgggtctatccatttatgttagcatgttacgtatcgtttaaaacgatttgttgccaccagaagttgatatttaatttcaaaagcatgttccaacttaaaaaaaaaaaaaaaaaa

SEQ ID NO: 634 - protein, 134 aa, Zea mays
  misc_feature: Ceres CLONE ID no. 337054
  misc_feature: Ceres CDNA ID no. 29191805
  misc_feature: Homolog of GI Number: 50912351 NR Desc: CGI
  misc_feature: Homolog of GI Number: 20269115 NR Desc: CGI
  misc_feature: Homolog of GI Number: 50761174 NR Desc:  similar to family with sequence similarity 32
  misc_feature: Homolog of GI Number: 51762906 NR Desc: similar to RIKEN cDNA 2510049I19
  misc_feature: Homolog of GI Number: 61873558 NR Desc:  similar to family with sequence similarity 32
  misc_feature: Homolog of GI Number: 61821213 NR Desc:  similar to family with sequence similarity 32
  misc_feature: Useful for making ornamental plants with modified leaves
MLEYQNVVGGRLKLKGKALDVKDGGVKKKKKKYQREESSQIAHDELHKGGRSELPIDPNNERIESDKTGDEGNPHPDYGHLTPAERRYMEQKQKIDMQKMAKVANKSHRDRIQDFNQYLANLSEHYDIPKVGPG

SEQ ID NO: 635 - DNA, 1730 bp, Zea mays
  misc_feature: Ceres CLONE ID no. 337883
  misc_feature: Ceres CDNA ID no. 40139596
  CDS (134)..(1360): REFERENCED BY SEQ ID NO: 636
gttttaaaactgctacggccacacgcctcctcagtcaacactcaacacaactcagctcggctctactagctagtgtgttgggacttgggagctaggcggggttgattgcgattgggggaggcgggagtaggtgatgtacggcgcgccgttgcccaaggacctgaacctgccagcagccctgccgcagccgaccaggacgccaccgcagcagcagatgggctccccgggactgctgcggtacaggtcagcgccgagcacgctgctcggcgaggtgatgtgtggtggtgatcaggacttccccgcggctggcggcgcagggcacggaccaccggaccacgccgccgcggacaacgtcctcgcgcgctttctcgccgggcaccactccgagacccgcgactgcaagcctccccgccccgccgccgccgctcacttcatggacgaagctgccgtcgcgtccatggccgcctcacagcagcagcagctcatgtaccagtcgcagcaggagcagcagatggccgccatggaggggctgtaccgcaacgtcagctccggcggcacggagcacggtgcagccgttggcgctggtaacaacagcctgatccgccagagcagctcccccgccggcttcctcaaccacttgaacatggacaacgggtacgggagcatgctccgggtgggcatgggcggcggcgggttcaggaacggcgtcagcgacgcgcggctcaaggggcagctgagcttctcgtcccggcaggggtcggtgatgtcgcagatctcggaggtgggcagcgaggagctcgacggaggcggcggcagcggcagccccgaggcggccggcagcaacgccagcggcgcggcgcgtgggtacagcggcatcccggggtacccgatgggcggcctcgcgtccggcgcctggccggacgaggcgtcgccgtcgccgacgtccggcgcgaagcgcccccgcgactccggccccgcgctgcagcagccgctggcgccgcagctcagcctgcccagcggaaagaacaagggcggcagggcggcctcggcggagatggcggcgatcgagaagttcctccagttccaggacgccgtcccctgcaagatccgcgccaagcgcgggtgcgccacccacccgcgcagcatcgccgagcgggtgaggaggacgaagatcagcgagcggatacggaagctgcaggagctcgtgcccaacatggaaaagcaaaccaacactgccgacatgctggatctggccgtggactacatcaaggatcttcagaagcaggtcaaggtactgaacgacggccgcgccagctgcacctgctccgccggcgagctgcagggccagttcacccgttaaaaaggagccgcgccacctttttctcaggggggccagttcagctcgcatagttgcgttacgttacatggtgaggactgatcgaggaggtatatattggaattgagacgatagtagctagtctgtacatgcaacaagttcattagcaggcagagtaggcctcgcatgttagtgatagctgcgtcagttaatgtacgtttagattgcacatgtattcatcttgatttacatgtgttagagtagtttagtgtggattttagtttaaatttcacattaatccacttcaacatacattaaccgatgtgggtatatatgaccatctaattagaatctttatatacacatgtatttacgcaaaaaaaaaaaaaaaaaa

SEQ ID NO: 636 - protein, 408 aa, Zea mays
  misc_feature: Ceres CLONE ID no. 337883
  misc_feature: Ceres CDNA ID no. 40139596
  misc_feature: Useful for making plants with modulated growth and phenotype characteristics
  misc_feature: The sequence is a functional homolog of  SEQ ID NO 172 in the  10/714,887 US patent application
  misc_feature: The sequence is a functional homolog of  SEQ ID NO 172 in the  11/435,388 US patent application
  misc_feature: The sequence is a functional homolog of  SEQ ID NO 174 in the  10/714,887 US patent application
  misc_feature: The sequence is a functional homolog of  SEQ ID NO 174 in the  11/435,388 US patent application
  misc_feature: The sequence is a functional homolog of  SEQ ID NO 186 in the  10/714,887 US patent application
  misc_feature: The sequence is a functional homolog of  SEQ ID NO 186 in the  11/435,388 US patent application
  misc_feature (334)..(382): Pfam Name: HLH PFAM Desc: Helix
  misc_feature: Homolog of GI Number: 50947455 NR Desc: putative transcription factor RAU1
  misc_feature: Homolog of GI Number: 52421281 NR Desc: At2g42280
  misc_feature: Homolog of GI Number: 19401700 NR Desc: transcription factor RAU1
  misc_feature: Homolog of GI Number: 56784863 NR Desc: putative helix
  misc_feature: Homolog of GI Number: 34907702 NR Desc: P0035F12.11
  misc_feature: Homolog of GI Number: 50925503 NR Desc: OSJNBa0084K20.3
  misc_feature: Homolog of GI Number: 20127088 NR Desc: putative bHLH transcription factor
  misc_feature: Homolog of GI Number: 6166283 NR Desc: helix
  misc_feature: Homolog of GI Number: 21554238 NR Desc: Contains similarity to bHLH transcription factor GBOF
  misc_feature: Homolog of GI Number: 6850309 NR Desc: Contains similarity to bHLH transcription factor GBOF
MYGAPLPKDLNLPAALPQPTRTPPQQQMGSPGLLRYRSAPSTLLGEVMCGGDQDFPAAGGAGHGPPDHAAADNVLARFLAGHHSETRDCKPPRPAAAAHFMDEAAVASMAASQQQQLMYQSQQEQQMAAMEGLYRNVSSGGTEHGAAVGAGNNSLIRQSSSPAGFLNHLNMDNGYGSMLRVGMGGGGFRNGVSDARLKGQLSFSSRQGSVMSQISEVGSEELDGGGGSGSPEAAGSNASGAARGYSGIPGYPMGGLASGAWPDEASPSPTSGAKRPRDSGPALQQPLAPQLSLPSGKNKGGRAASAEMAAIEKFLQFQDAVPCKIRAKRGCATHPRSIAERVRRTKISERIRKLQELVPNMEKQTNTADMLDLAVDYIKDLQKQVKVLNDGRASCTCSAGELQGQFTR

SEQ ID NO: 637 - DNA, 1542 bp, Zea mays
  misc_feature: Ceres CLONE ID no. 338112
  misc_feature: Ceres CDNA ID no. 40041179
  CDS (547)..(1344): REFERENCED BY SEQ ID NO: 638
aggaaaagtagcaaaagaatttgaagagggattgaggggggaggggagctgtctccttcgatctcgttcttgcctttttgcctctctcgaggtcagcttttggtggactcagcaaaacaaatggtaaaagcttctctgtgatctttgctcttacttgcttaattcatcaattctttggcccaatcgaactctagtgttctcttctcgttcagcctcctatatatgctcccttctttggtcaaaacatggtgcttagatctcttgacacatggctagctatgtttctcctgtattttgttttgcatctgcaaaggcgtagagcggggagcaagagattacgcacgccgcgggcaccgatttccttcaagaatctgcaagaagcggaggatctgtcgagtccgactgttctaagaagcagctcgattctcgaaaccctagctagcaaagtagcaagctagctacaagagaaggaagctggcgaacaggtggtgggacgaggggcggctcggcctgccggagccatccctaggcaagaaccaagaagaaatggcgccttcgtccaaggacggcgccaccgagcagccgacgagcggtgggagcggcgacgaccgggagaacggcaccggtgagcccaaggaaggtgcggtggtcacgggcaaccggcggccgcgcgggcggccgccgggttccaagaacaagcccaagccacccatcttcgtgacacgtgacagccccaacgcgctgcgcagccacgtgatggaggtggccggcggggccgacgtcgccgagtccatcgcccacttcgcgcgccgcaggcagcgcggcgtctgcgtgctcagcggcgccggcaccgtcaccgacgtcgcgctccgccagcccaccgcgccgggcgccgtggtcgccctccgcggccgcttcgagatcctctcgatcaccggcacgttcctgccgggacccgcgccgccgggctccacggggctgaccgtgtacctcgcgggcggccaggggcaggtcgtcggcggcagcgtggtcggcacgctcatcgcggcgggccccgtcatggtgatggcgtccacgttcgccaacgccacctacgagaggctgccgctggacgacgccgaggaggatccagggcaggcgcagctgcctcccggccccggcggaggcccccctctgataatgggcgggatagccgatccctcggcgatgccaatgttcggcggcggcggcggcggtgtgccgccaagcctgatgatgccaggaggcgccgccgcctccggtgcgggcctgcagctcgggcacgaggggcttgcttgggctcgtgcacggccaccgccatactaggaggggatccatgtctgagaaattcgagtagaaatggaggatcgttcatcgcaccggcagcctcaaggacgactgcgactcatcatatagttacttcaagctagaactgatgatcgaattaagcatgctgccaggagcaaataaaaggttgttcgactagctaaaaaaaaaaaaaaaaaaacaaaaaaaaaaaaaaaa

SEQ ID NO: 638 - protein, 265 aa, Zea mays
  misc_feature: Ceres CLONE ID no. 338112
  misc_feature: Ceres CDNA ID no. 40041179
  misc_feature: Useful for making plants with modulated growth and phenotype characteristics
  misc_feature: The sequence is a functional homolog of  SEQ ID NO 1395 in the  10/374,780 US patent application
  misc_feature: The sequence is a functional homolog of  SEQ ID NO 1402 in the  10/374,780 US patent application
  misc_feature: The sequence is a functional homolog of  SEQ ID NO 1410 in the  10/374,780 US patent application
  misc_feature: The sequence is a functional homolog of  SEQ ID NO 1413 in the  10/374,780 US patent application
  misc_feature: The sequence is a functional homolog of  SEQ ID NO 1507 in the  10/412,699 US patent application
  misc_feature: The sequence is a functional homolog of  SEQ ID NO 22 in the  10/669,824 US patent application
  misc_feature: The sequence is a functional homolog of  SEQ ID NO 22 in the  10/870,198 US patent application
  misc_feature: The sequence is a functional homolog of  SEQ ID NO 344 in the  11/435,388 US patent application
  misc_feature: The sequence is a functional homolog of  SEQ ID NO 346 in the  10/714,887 US patent application
  misc_feature: The sequence is a functional homolog of  SEQ ID NO 346 in the  11/435,388 US patent application
  misc_feature: The sequence is a functional homolog of  SEQ ID NO 348 in the  10/714,887 US patent application
  misc_feature: The sequence is a functional homolog of  SEQ ID NO 38 in the  10/669,824 US patent application
  misc_feature: The sequence is a functional homolog of  SEQ ID NO 38 in the  10/870,198 US patent application
  misc_feature: The sequence is a functional homolog of  SEQ ID NO 66 in the  10/669,824 US patent application
  misc_feature: The sequence is a functional homolog of  SEQ ID NO 66 in the  10/870,198 US patent application
  misc_feature: The sequence is a functional homolog of  SEQ ID NO 88 in the  10/669,824 US patent application
  misc_feature: The sequence is a functional homolog of  SEQ ID NO 90 in the  10/669,824 US patent application
  misc_feature: The sequence is a functional homolog of  SEQ ID NO 92 in the  10/669,824 US patent application
  misc_feature: Homolog of GI Number: 50915952 NR Desc: DNA
  misc_feature: Homolog of GI Number: 50948561 NR Desc: putative SAP1 protein
  misc_feature: Homolog of GI Number: 21593180 NR Desc: putative DNA
  misc_feature: Homolog of GI Number: 50928377 NR Desc: OSJNBa0086O06.16
  misc_feature: Homolog of GI Number: 50252749 NR Desc: putative DNA
  misc_feature: Homolog of GI Number: 50912085 NR Desc: DNA
  misc_feature: Homolog of GI Number: 7269128 NR Desc: putative DNA binding protein
  misc_feature: Homolog of GI Number: 50725742 NR Desc: DNA
  misc_feature: Homolog of GI Number: 32815961 NR Desc: At4g12050
  misc_feature: Homolog of GI Number: 3668079 NR Desc: putative AT
  misc_feature: Useful for delaying flowering time
  misc_feature: Useful for making plants with increased biomass and foliage
  misc_feature: Useful for making smaller plants
MAPSSKDGATEQPTSGGSGDDRENGTGEPKEGAVVTGNRRPRGRPPGSKNKPKPPIFVTRDSPNALRSHVMEVAGGADVAESIAHFARRRQRGVCVLSGAGTVTDVALRQPTAPGAVVALRGRFEILSITGTFLPGPAPPGSTGLTVYLAGGQGQVVGGSVVGTLIAAGPVMVMASTFANATYERLPLDDAEEDPGQAQLPPGPGGGPPLIMGGIADPSAMPMFGGGGGGVPPSLMMPGGAAASGAGLQLGHEGLAWARARPPPY

SEQ ID NO: 639 - DNA, 1837 bp, Zea mays
  misc_feature: Ceres CLONE ID no. 338386
  misc_feature: Ceres CDNA ID no. 40041180
  CDS (242)..(1477): REFERENCED BY SEQ ID NO: 640
atgttagaaatttggtattttcaaacggagaaattgctgggccttggttggacggtggacgctgtccctttcccaaccccaaacgagaaaaacaagagagtacgaggcagcccgcatcacttcctcgctctcctctcctctacgctcctcgtcgcgtgcccacgtctcccacgcctccctcgctggctccccctccctccggacctcccccctccagatccagtctggcccgccgccgccgatgtccgaggatcccgcgtgctcccgccgctcgcggtgcgacctcggcggcgacgagcgctggctctcggggcccgccggcgacgaccacttcgaccgccttccggacgcgctcctcctcgtcatcttcaaccgcatcggcgacgtcaaggcgctcggccgctgctccctcgtctccctccgcttccacgagctcgtccccctcgtcgactccgtcttcgtccgcgtcgactgcgtcatccccgacgagcccccctcctcctcgtcctcgccgtcgacgccgttctctcctacggcgtccgtgcgagcccgtggggtcttctcacagatcgcgcgcatcgtgctcggcggcatcgtgaagcccatacaggctctcggtcagatcctctcccccgccaactccgcctctggctttccggcatcctccgattcctcgccatcgtcgtcctcctcatcttcgccactgcctcctgcggatgtgtcgcaccactctccctcggaggtgctccgctccttcaaagagctccgccaccttcgcatcgagctcccggcgggcgagctcgacatggacgacggcgtgatgctcaagtggaaggccgactttgggtccacactgggcagctgcgtcatccttggagcatcctcggcctcggcctcgccctcgccctcctccgctggctcagatagcacgagcaccgctccctctgttgacggtggccgcactgaacctgatgaatgtgtcgattcaggaagcatcccggagtcgttctacacaaacggggggtttaagctgcgggtggtttggacaatcagctcattgattgcggccgccgccaggcattacttgctgcagccgatcattgctgatcacaagacgctcgagagattggacctgacagatgctgatggccagggagtgctcaccatggacaagtgccaactgcaggagctgagggtgagaccggtatcaacatctaggggctcacaccggacgctcatgccagagcttagcatgtggctgtggtacgcaccatgtattgagctgcctggggggctggtgctaaatggcgcaacgcttgtggccatcaagccaagtgaggaaggaacaggggacacagtttggaatggggctgctggtgcagcctgggtgttggatgcattcgaggagccgtataggacagcggtgaggatgcttctcaagcagaggacctacagtcttgagatgaattcgttctaactatggggagatgacattttgaaagcgtcagatgtgagaggatgctataactactgatgtcctggatgccttttatgcaccaatctgcacctacttcagatgtgccaagtatgtgctattgtatgcttcttgttgagcatctgacagcaggaacatggatgaaatcaaagacactgtgttaatttatggaaatgccaaaggcatagttgagttggtggtgttctctgagatcagatgtggcacaaatagtttttttttctatatgtatccacatcaactcatcaatgtactagccttatgtaatttcaactgttggattgtgggattttgctgcttgtttgcagaacaaaaaaaaaaaaa

SEQ ID NO: 640 - protein, 411 aa, Zea mays
  misc_feature: Ceres CLONE ID no. 338386
  misc_feature: Ceres CDNA ID no. 40041180
  misc_feature (31)..(77): Pfam Name: F PFAM Desc: F
  misc_feature: Homolog of GI Number: 50932317 NR Desc: putative F
  misc_feature: Homolog of GI Number: 34909910 NR Desc: P0665A11.15
  misc_feature: Homolog of GI Number: 55297493 NR Desc: F
  misc_feature: Homolog of GI Number: 34909194 NR Desc: P0425G02.20
  misc_feature: Homolog of GI Number: 23308205 NR Desc: At1g30200/F12P21_1
  misc_feature: Homolog of GI Number: 72547036 NR Desc: proteophosphoglycan 5
  misc_feature: Homolog of GI Number: 72547041 NR Desc: proteophosphoglycan ppg1
  misc_feature: Homolog of GI Number: 67987177 NR Desc: 4Fe
  misc_feature: Homolog of GI Number: 72547018 NR Desc: proteophosphoglycan ppg3
  misc_feature: Homolog of GI Number: 72547023 NR Desc: proteophosphoglycan ppg4
MSEDPACSRRSRCDLGGDERWLSGPAGDDHFDRLPDALLLVIFNRIGDVKALGRCSLVSLRFHELVPLVDSVFVRVDCVIPDEPPSSSSSPSTPFSPTASVRARGVFSQIARIVLGGIVKPIQALGQILSPANSASGFPASSDSSPSSSSSSSPLPPADVSHHSPSEVLRSFKELRHLRIELPAGELDMDDGVMLKWKADFGSTLGSCVILGASSASASPSPSSAGSDSTSTAPSVDGGRTEPDECVDSGSIPESFYTNGGFKLRVVWTISSLIAAAARHYLLQPIIADHKTLERLDLTDADGQGVLTMDKCQLQELRVRPVSTSRGSHRTLMPELSMWLWYAPCIELPGGLVLNGATLVAIKPSEEGTGDTVWNGAAGAAWVLDAFEEPYRTAVRMLLKQRTYSLEMNSF

SEQ ID NO: 641 - DNA, 1121 bp, Zea mays
  misc_feature: Ceres CLONE ID no. 338742
  misc_feature: Ceres CDNA ID no. 25446051
  CDS (204)..(905): REFERENCED BY SEQ ID NO: 642
ctcctcccctccgtctcatatcctccctgtaggagcatcccgtgtcttcaccttttgctcccccacgttgatccttgatcctcgtgctcctttcttgattccttctccgtgggatctcttgccaggagtagcctgccccgtgtccgcgctcgcactcgcacagacatgcttcttgccgcgtcttgaaaggggagaaagtgaagatgggtgcttgcgcttcagttcacaaggactcggggttccccaaggagcagtttcttgactcgcccaccaaggcggaggctgcaaacgggaagggcggcagcggcggcggcgttgcttcggttggtgacgatgactttgctgatttcaagtcgaaggtcgactctgagcagcagcgggcagagttgaaccccaagagcccagattctggtagcaaggatgaagtgttcttcgaatctcgagcttggttagattccgactgcgaggatgacttctacagcgtgaatggagatttcactccatctcgtggcagcacacccatccatcagcccagagcgcagacggtgatgagcaacatctttcaaccagacacgcacggttccaaatcaccggagccttctccaactggacggaggaagctagctgagctcctgcaggaggcaatgcaaaacggccccgaagaaagcaccgaccaggagctgcagttgcggtctgttgccgcagatgggaagccggtgtctgaatccacatccagctccgcttgcagcactgtgacgactccgatcgcagtcgctaacgccaagagccggaaggagaaggcgtggtacaccggacgctgttgcctgccgagctttgttcatagcctgaccttagatgagagtgagagggggcagaagatgagctctaggccatgtgctgtttgacagtggggctccagtgccctcatggctcatgccctgagctactgtaaaggagagagtattaagagtactgtatgtataaagagagggtaatcaagtggataatagctactcgttaaatgctctgcacaccatgtttatcatttgcccttacctgtgcatatatatatatatatctaatcgaatctcaaatgtcaacagccaaaaaaaaaaaaaaaa

SEQ ID NO: 642 - protein, 233 aa, Zea mays
  misc_feature: Ceres CLONE ID no. 338742
  misc_feature: Ceres CDNA ID no. 25446051
  misc_feature: Homolog of GI Number: 50902388 NR Desc: P0678F11.22
  misc_feature: Homolog of GI Number: 50923741 NR Desc: OSJNBb0089B03.11
MGACASVHKDSGFPKEQFLDSPTKAEAANGKGGSGGGVASVGDDDFADFKSKVDSEQQRAELNPKSPDSGSKDEVFFESRAWLDSDCEDDFYSVNGDFTPSRGSTPIHQPRAQTVMSNIFQPDTHGSKSPEPSPTGRRKLAELLQEAMQNGPEESTDQELQLRSVAADGKPVSESTSSSACSTVTTPIAVANAKSRKEKAWYTGRCCLPSFVHSLTLDESERGQKMSSRPCAV

SEQ ID NO: 643 - DNA, 1263 bp, Zea mays
  misc_feature: Ceres CLONE ID no. 339107
  misc_feature: Ceres CDNA ID no. 40041181
  CDS (95)..(1090): REFERENCED BY SEQ ID NO: 644
acacacacagacagtgacattgacacacttaagagctcgagatctcactctcctcacctcagctctcagagaggaaggacactgcggccgggcgatggcgagcgtggagggcaagagggagacggtgctggtcaccggcgccagcggcttcatcggatcgaccctcgtcggcctcctcctcgaccgcggctacaacgtccatgccagcgtcctcaaccccgatgacaaggcggagacggagcacctggtcgccctgggcgccggcgccggcgaaggccggctgcgcgtcttcccgggcgacctcctcgacggcgccgcgctcatggccgccgcgcggggctgctcgggcgtgttccacctcgccaccccctgcaccgtctaccccgtgagcgacccgcaggggcagatggtggtcccggcggtggagggcacgctcaacgtcctgcgcgccgccaaggaggcccgcaccgtgcggcgggtggtggtcacctcgtccagctccgccatcatacccagccccgcgtggcccgccggcgagccccgcgacgagcggtgctgggccgacgtcgactactgcaagaagaacgaggtctggtaccctgtttccaagacgctggcagagaaggcggcttggaggtttgcggaggagaacggggtagacgtggttgtcgtcaacccggtgactgccatgggccccatgattccgcccaccatcaactgcagcatgaccgtgctcctacgcctgctacaaggttgcacggaggagtacagggacatctggatgggggcggtgcatgtgcacgacgccgccgtggcgcatgtcctggtgttcgagagcccggcggcgtccgggaggcacatctgcgctcagtccatctcccactggagcgacttcgcggccaaggtcgccgagctgtaccctgagtacaaggtgcccaagttccccaaggatacccagcctgggctggtgcgacagggagccgaggaggggtccaagaagctcgtcgcgttggggctgcacttcagccctctggagaagatcatcacggacgctgtggaggctctcaagagcagaggctacatttcgtagctagccgtccgtcggcagctatatagtggagtagtatgcctgtcgaatttcgattcccaagtggcaaatcctgcaaaacgaggtcgccaatatgaacaataaataaataacggtgtgataaaataaagcagattttctggtgcatttggcccttcaaaaaaaaaaaaaaaaaa

SEQ ID NO: 644 - protein, 331 aa, Zea mays
  misc_feature: Ceres CLONE ID no. 339107
  misc_feature: Ceres CDNA ID no. 40041181
  misc_feature (168)..(201): Pfam Name: Epimerase PFAM Desc: NAD dependent epimerase/dehydratase family
  misc_feature (9)..(148): Pfam Name: adh_short PFAM Desc: short chain dehydrogenase
  misc_feature: Homolog of GI Number: 50919439 NR Desc: putative cinnamoyl
  misc_feature: Homolog of GI Number: 76573313 NR Desc: putative cinnamoyl
  misc_feature: Homolog of GI Number: 47900734 NR Desc: putative cinnamoyl
  misc_feature: Homolog of GI Number: 21592589 NR Desc: cinnamoyl
  misc_feature: Homolog of GI Number: 68159360 NR Desc: cinnamoyl
  misc_feature: Homolog of GI Number: 29824207 NR Desc: putative cinnamoyl
  misc_feature: Homolog of GI Number: 34907928 NR Desc: putative cinnamoyl CoA reductase
  misc_feature: Homolog of GI Number: 56202090 NR Desc: putative cinnamoyl
  misc_feature: Homolog of GI Number: 34906124 NR Desc: putative cinnamoyl
  misc_feature: Homolog of GI Number: 31414896 NR Desc: cinnamoyl CoA reductase
  misc_feature: Useful for making shorter plants
  misc_feature: Useful for sterility
MASVEGKRETVLVTGASGFIGSTLVGLLLDRGYNVHASVLNPDDKAETEHLVALGAGAGEGRLRVFPGDLLDGAALMAAARGCSGVFHLATPCTVYPVSDPQGQMVVPAVEGTLNVLRAAKEARTVRRVVVTSSSSAIIPSPAWPAGEPRDERCWADVDYCKKNEVWYPVSKTLAEKAAWRFAEENGVDVVVVNPVTAMGPMIPPTINCSMTVLLRLLQGCTEEYRDIWMGAVHVHDAAVAHVLVFESPAASGRHICAQSISHWSDFAAKVAELYPEYKVPKFPKDTQPGLVRQGAEEGSKKLVALGLHFSPLEKIITDAVEALKSRGYIS

SEQ ID NO: 645 - DNA, 1626 bp, Zea mays
  misc_feature: Ceres CLONE ID no. 339477
  misc_feature: Ceres CDNA ID no. 29191597
  CDS (167)..(1357): REFERENCED BY SEQ ID NO: 646
gtgcgctgcggccgggtcggatctgagacgagacgagtcccctccccccacctcgcctcacccaaccggaacgaacaagttaccatctcatcccaaccccgcctcgaccggatctcgtcggactcggatccgcccgaccaccccgcgccgccgcagatcaaagaagatggcagctctcgacaccttcctcttcacctcggagtctgtgaacgagggacaccctgacaagctctgcgaccaggtctcagatgccgttcttgacgcttgccttgctgaggaccctgacagcaaggttgcttgtgagacctgcaccaagaccaacatggtcatggtctttggtgagatcaccaccaaggccaatgtcgactacgagaagattgtcagggagacctgccgcaacattggttttgtgtcaaacgatgtcgggcttgacgctgaccactgcaaggtgctcgtgaacattgagcagcagtcccctgatattgctcagggtgtgcatggccacttcaccaagcgccccgaggagattggagctggtgaccagggacacatgttcgggtatgcgaccgatgagacccctgagttgatgcccctcagccatgtccttgccaccaagctaggtgctcgtctcaccgaggtccgcaagaacggaacctgcccctggctcaggcctgatgggaagacccaggtgacagtcgagtaccgcaatgagggtggtgccatggtccccatccgtgtccacaccgtcctcatctccacccagcacgacgagacagtgaccaatgatgagatcgctgctgacctgaaggagcatgtcatcaagcctatcatccctgagcagtaccttgacgagaagaccatcttccaccttaacccatccggccgctttgtcattggtggacctcacggcgatgctggcctcactggccgcaagatcatcattgacacctacggtggctggggagcccatggcggtggcgctttctccggcaaggacccaaccaaggttgaccgcagcggagcctatgtcgcgaggcaggctgccaagagcatcgtcgccagcggccttgctcgccgcgccatcgtccaggtgtcctacgccatcggcgtgcccgagcctctctccgtgtttgtcgacacgtacggcaccggcgcgatccccgacaaggagatcctcaagattgtcaaggagaacttcgatttcaggcctggcatgatcatcatcaaccttgacctcaagaaaggcggcaacgggcgctacctcaagacggcagcctacggccacttcggaagggacgaccctgacttcacctgggaggtggtgaagccactcaagtcggagaaaccttctgcctaaggcggccttttttttcagtaagaagcttttggtggtctgctgtgcttaatcatgcttttatatggcttctacatgttgtggttctttcttgatctgcaccgcgcttatcgtttgtgttgtactgccctaataagtggtgcttatgaggactgtttctggttttgctgcttatgttgtaatgctttgaaacaatgaaagaagctacaggccacagctattttgagaagtaatggaacctcgtgccgttttgattaaaaaaaaaaaaaaaa

SEQ ID NO: 646 - protein, 396 aa, Zea mays
  misc_feature: Ceres CLONE ID no. 339477
  misc_feature: Ceres CDNA ID no. 29191597
  misc_feature: The plant flowers significantly earllier than wild-type.
  misc_feature: The plant is abnormally small.
  misc_feature: The plant produces a reduced number of seeds.
  misc_feature: Useful for biocontainment applications
  misc_feature: Useful for making plants with modulated biomass
  misc_feature: Useful for making plants with modulated flowering time
  misc_feature (119)..(241): Pfam Name: S PFAM Desc: S
  misc_feature (243)..(385): Pfam Name: S PFAM Desc: S
  misc_feature (5)..(105): Pfam Name: S PFAM Desc: S
  misc_feature: Homolog of GI Number: 50284517 NR Desc: S
  misc_feature: Homolog of GI Number: 1655576 NR Desc: S
  misc_feature: Homolog of GI Number: 1655578 NR Desc: S
  misc_feature: Homolog of GI Number: 16226059 NR Desc: S
  misc_feature: Homolog of GI Number: 13540316 NR Desc: S
  misc_feature: Homolog of GI Number: 13540318 NR Desc: S
  misc_feature: Homolog of GI Number: 2305014 NR Desc: S
  misc_feature: Homolog of GI Number: 51038250 NR Desc: S
  misc_feature: Homolog of GI Number: 17529621 NR Desc: S
  misc_feature: Homolog of GI Number: 76629498 NR Desc:  similar to methionine adenosyltransferase II
  misc_feature: Useful for delaying flowering time
  misc_feature: Useful for making bigger plants
  misc_feature: Useful for making plants with increased biomass and foliage
  misc_feature: Useful for making smaller plants
MAALDTFLFTSESVNEGHPDKLCDQVSDAVLDACLAEDPDSKVACETCTKTNMVMVFGEITTKANVDYEKIVRETCRNIGFVSNDVGLDADHCKVLVNIEQQSPDIAQGVHGHFTKRPEEIGAGDQGHMFGYATDETPELMPLSHVLATKLGARLTEVRKNGTCPWLRPDGKTQVTVEYRNEGGAMVPIRVHTVLISTQHDETVTNDEIAADLKEHVIKPIIPEQYLDEKTIFHLNPSGRFVIGGPHGDAGLTGRKIIIDTYGGWGAHGGGAFSGKDPTKVDRSGAYVARQAAKSIVASGLARRAIVQVSYAIGVPEPLSVFVDTYGTGAIPDKEILKIVKENFDFRPGMIIINLDLKKGGNGRYLKTAAYGHFGRDDPDFTWEVVKPLKSEKPSA

SEQ ID NO: 647 - DNA, 704 bp, Zea mays
  misc_feature: Ceres CLONE ID no. 339910
  misc_feature: Ceres CDNA ID no. 29191481
  CDS (67)..(525): REFERENCED BY SEQ ID NO: 648
agccgtcatcgtttcgcgtctgcctcagcccgccgcaaggagaggagacatcttcgagaagctgaaatggctcctaaagctgctcctgccaagaagggtgatgccaagacccaggccttgaaggttgccaaggctgtgaagtctggggcagccaagaagaagaccaagaagatccgcacgtctgtgacatttcaccgccccacgaccctgaagaaggctagggaccccaagtacccacgaatcagcactaccggaaggaacaagcttgatcagtaccaaattctcaagtacccccttaccacagaatcagcgatgaagaagattgaagataacaacactctggtcttcattgttgacctcaaggcagacaagaagaagatcaaggctgccgtcaagaagatgtatgacatccaggcaaagaaggtcaacaccttgatcaggcctgatgggaagaagaaggcttacgtgaagctgactcccgactatgatgctcttgatgttgccaacaaaatcggcatcatctaagtgctgcattaggcatcctaattcatctgttgtgtcctagttctatgtgaaaccagagttttctagctatggctctcaatcgctccattaccatgtgttatgcacacttctgaatttgatatcatccaagtgaccttttgaactagtttgcgttctgcactacaaaaaaaaaaaaaaaa

SEQ ID NO: 648 - protein, 152 aa, Zea mays; identical to SEQ ID NO: 520
  misc_feature: Ceres CLONE ID no. 339910
  misc_feature: Ceres CDNA ID no. 29191481
  misc_feature (11)..(64): Pfam Name: Ribosomal_L23eN PFAM Desc: Ribosomal protein L23
  misc_feature (70)..(149): Pfam Name: Ribosomal_L23 PFAM Desc: Ribosomal protein L23
  misc_feature: Homolog of GI Number: 70663909 NR Desc: OSJNBa0029H02.21
  misc_feature: Homolog of GI Number: 50926169 NR Desc: OSJNBa0029H02.16
  misc_feature: Homolog of GI Number: 34895146 NR Desc: putative 60S ribosomal protein L23A
  misc_feature: Homolog of GI Number: 76573339 NR Desc: ribosomal protein L25
  misc_feature: Homolog of GI Number: 1084424 NR Desc: ribosomal protein L23a
  misc_feature: Homolog of GI Number: 2641201 NR Desc: ribosomal protein L23a
  misc_feature: Homolog of GI Number: 7340791 NR Desc: ribosomal protein L23
  misc_feature: Homolog of GI Number: 13560777 NR Desc: ribosome protein L23a
  misc_feature: Homolog of GI Number: 7711063 NR Desc: ribosomal protein L23
  misc_feature: Useful for making bigger plants
  misc_feature: Useful for making plants with increased biomass and foliage
  misc_feature: Useful for sterility

SEQ ID NO: 649 - DNA, 656 bp, Zea mays
  misc_feature: Ceres CLONE ID no. 340732
  misc_feature: Ceres CDNA ID no. 25446324
  CDS (3)..(392): REFERENCED BY SEQ ID NO: 650
acccggcccagcacaggcgtagggtttattggcatctgtctcctgtcgcgccggccaccacagcgcagaagaacacatcacccgcctgcctcgccgccgcaatggccgccgccgcctccgctgcgagatccttcctccggtccagcggctcatcgtctctccgcagcgcggtggccagagccgcctcgcgtgcgggaccgggaccggctccgctgccgaggcggatgcccacctctgccccccgtgtactcctaaggtcgccggtggaaatgagcagcgtgtgtctggagtccttgatgcccatgcacagcgccacggcttcagcgctcatgacgtcgcttctcgccgccccggcttgcaagggattcggttggctatcagaagatggatgatttgtcgttactggagatctgcagtgatggtatcttgtctggattatggatacctcgtgaatttaaagtacttggttggcgtctcagttaacatgttttgtgctctgggattgcagtttgtatgaaatttgcagaattgatcctgagatttattttggctggttagctgtcaaaaagactttggtcttgacgacttgcctgatcaagtagatctggaatgaataaacttaatagaagggttttcataaaaaaaaaaaaaaaaaa

SEQ ID NO: 650 - protein, 96 aa, Zea mays
  misc_feature: Ceres CLONE ID no. 340732
  misc_feature: Ceres CDNA ID no. 25446324
  misc_feature: Homolog of GI Number: 34904474 NR Desc: OSJNBa0086P08.16
MAAAASAARSFLRSSGSSSLRSAVARAASRAGPGPAPLPRRMPTSAPRVLLRSPVEMSSVCLESLMPMHSATASALMTSLLAAPACKGFGWLSEDG

SEQ ID NO: 651 - DNA, 1145 bp, Zea mays
  misc_feature: Ceres CLONE ID no. 340887
  misc_feature: Ceres CDNA ID no. 25446829
  CDS (9)..(1031): REFERENCED BY SEQ ID NO: 652
aaaaaaatatgtccgcgtcacggttcctcctcgccgtcctcgtcgtgggcagcgccgtactgtgcaccgccgccgctccccgcgcgctcgcggcggccgccgccgcgatggcgtcgcggcacgagaagtggatggcggagcacgggcgcgcgtacaaggatgaggccgagaaggcgcggcggctggaggtgttccgggccaacgcggagctgatcgactcgttcaacgccgcagggacgcacagccaccggctggcgaccaacaggttcgccgacctcaccgtccaggagttccgcgcggccaggaccgggctccggccgcgcccggcgccgtccgcgggcgccggccggttcaggtacgagaacttcagcctggcggacgcggcgcagagcgtggactggcgggccatgggtgccgtcaccggcgtcaaggaccagggagcgtccggctgctgctgggcgttctcggcggtggcggcggtggaagggctgaacaagatccggacggggcggctggtgtcgctgtcggagcaggagctggtggactgcgacgtcagcggcgtggaccagggctgcgacggcggcctcatggacaacgccttccagttcgtcgcgcgccgcggcgggctggcctcggagtcgggctacccgtaccagtgccgggacgggccctgccgctcgtcggccgccgccgccgccgcgtccatccggggccacgaggacgtgccgcgcaacaacgaggccgcgctcgcggccgccgtggcccaccagcccgtgtccgtggccatcaacggcgaggacatggcgttccgcttctacgacagcggcgtgctgggcggggcctgcggcacggacctcaaccacgccatcacggccgtcgggtacggcacggcggccgacggcacaaggtactggctgatgaagaactcctggggcgcgtcgtggggcgagggcggatacgtccggatccgccgcggcgtccgcggggagggcgtctgcggtctcgccaagttgccgtcttaccccgtctagagccaggcttattcccgtcggttttaggccgacgagaattaagtgttttcctgtagtaataactatgtccaaaaatatgttaaacaaacaataattgcaaaaaaaaaaaaaaaa

SEQ ID NO: 652 - protein, 340 aa, Zea mays
  misc_feature: Ceres CLONE ID no. 340887
  misc_feature: Ceres CDNA ID no. 25446829
  misc_feature (125)..(340): Pfam Name: Peptidase_C1 PFAM Desc: Papain family cysteine protease
  misc_feature: Homolog of GI Number: 2224810 NR Desc: cysteine proteinase
  misc_feature: Homolog of GI Number: 31712050 NR Desc: putative cysteine protease
  misc_feature: Homolog of GI Number: 60100207 NR Desc: putative cysteine protease
  misc_feature: Homolog of GI Number: 50930647 NR Desc: OSJNBa0035O13.9
  misc_feature: Homolog of GI Number: 50930617 NR Desc: OSJNBa0052O21.11
  misc_feature: Homolog of GI Number: 50930639 NR Desc: OSJNBa0035O13.5
  misc_feature: Homolog of GI Number: 77554625 NR Desc: Papain family cysteine protease
  misc_feature: Homolog of GI Number: 13491750 NR Desc: cysteine protease
  misc_feature: Homolog of GI Number: 56961686 NR Desc: cysteine proteinase
  misc_feature: Homolog of GI Number: 50355621 NR Desc: cysteine protease
MSASRFLLAVLVVGSAVLCTAAAPRALAAAAAAMASRHEKWMAEHGRAYKDEAEKARRLEVFRANAELIDSFNAAGTHSHRLATNRFADLTVQEFRAARTGLRPRPAPSAGAGRFRYENFSLADAAQSVDWRAMGAVTGVKDQGASGCCWAFSAVAAVEGLNKIRTGRLVSLSEQELVDCDVSGVDQGCDGGLMDNAFQFVARRGGLASESGYPYQCRDGPCRSSAAAAAASIRGHEDVPRNNEAALAAAVAHQPVSVAINGEDMAFRFYDSGVLGGACGTDLNHAITAVGYGTAADGTRYWLMKNSWGASWGEGGYVRIRRGVRGEGVCGLAKLPSYPV

SEQ ID NO: 653 - DNA, 1158 bp, Zea mays
  misc_feature: Ceres CLONE ID no. 341065
  misc_feature: Ceres CDNA ID no. 25445541
  CDS (208)..(894): REFERENCED BY SEQ ID NO: 654
aggagactttttaactttcacggaaatttcccctctcttggtctcttctcttgcgcgttcctcttcttcctagtcctaggctactttcttcgatcccaactccgagtcgcctgtcatctctctctaccagattagattggggatctcatctcatccgaatccttcatagtattacacaaccagcaaggccgcccgcttgccggcaacatgaagaagatcttcggcgccaagaagaacaaggatccgccgcccacaatccaggacgcaaccgacagaatcaccaagcgcggcgacaccgtcgatgaaaagatcaagaagctcgacgccgagctcgcgcgctacaaggagcagatcaagaagacgcgcccaggccccgctcaggaggccgtcaaggcacgagccatgagggtcctcaagcagcgcaggatgtacgaagggcagcgtgacatgctctacaaccaaacatataaccttgaccaagttgcttttgcggcagagggacttaaagatgctcagcaaactatgactgcgatgaaggctgccaataaagagctcaaagggatgatgaaaactgtcaagctcgaagatattgatagtatgcaagatgagatgatggatcttatggatgtgagcactgaaatacaagaaactcttggcagaagctacaacgtcccagatgacatcgatgaggaagaacttatgggggagctcgatgctttggaagccgacatggacttcgaatcagagtcagtcccatcttacctccaaccagaccaagaacctgaactcagcttacctgctgcaccaactggccatgcagcagtcccggcaaaccagcagcaggaggatgagctaggattgcctacagtgccacaagcatccattcgtacataatcaagcagaatcacgtttcttgcagtcaacgatataaaggaagtcgtattatatatctacagctgggtgtaaaaatgctgttatgtaccgcaccacttcgattttttttgtcactccacttgtggatggtgtaaatctgattgaattgaattagttgggagttgggacattttaagatcctcttgtatttgctgtatggttgtacagaaagcagcaaggccagagcagcacgtttataccgtactgtgaaaaaaaaaaaaaaaa

SEQ ID NO: 654 - protein, 228 aa, Zea mays
  misc_feature: Ceres CLONE ID no. 341065
  misc_feature: Ceres CDNA ID no. 25445541
  misc_feature (12)..(204): Pfam Name: SNF7 PFAM Desc: SNF7
  misc_feature: Homolog of GI Number: 55769667 NR Desc: putative CGI
  misc_feature: Homolog of GI Number: 34894040 NR Desc: P0672D08.33
  misc_feature: Homolog of GI Number: 42572355 NR Desc: SNF7 family protein
  misc_feature: Homolog of GI Number: 50736119 NR Desc:  similar to HSPC177
  misc_feature: Homolog of GI Number: 54642086 NR Desc: GA19474
  misc_feature: Homolog of GI Number: 34860466 NR Desc: similar to RIKEN cDNA 5031400M07
  misc_feature: Homolog of GI Number: 48257063 NR Desc: C14orf123 protein
  misc_feature: Homolog of GI Number: 55630930 NR Desc:  similar to Snf7 homologue associated with Alix 3
MKKIFGAKKNKDPPPTIQDATDRITKRGDTVDEKIKKLDAELARYKEQIKKTRPGPAQEAVKARAMRVLKQRRMYEGQRDMLYNQTYNLDQVAFAAEGLKDAQQTMTAMKAANKELKGMMKTVKLEDIDSMQDEMMDLMDVSTEIQETLGRSYNVPDDIDEEELMGELDALEADMDFESESVPSYLQPDQEPELSLPAAPTGHAAVPANQQQEDELGLPTVPQASIRT

SEQ ID NO: 655 - DNA, 734 bp, Zea mays
  misc_feature: Ceres CLONE ID no. 342155
  misc_feature: Ceres CDNA ID no. 25446010
  CDS (134)..(418): REFERENCED BY SEQ ID NO: 656
cagagccagtctctcctcgcctctctctcgcgcaagccacagtagagcaaccaaccataccaccggcccgtgtcgatctctggcctctctcgtgcaaggaattaagcaggcaagaggccaaccttcttccagcatggccaaggcgagcagcaggctgctcttctcgctctcgctcgtcgtcctgctgctcctcgtggagaccactacttctccccatggacaggctgacgccatcgactgcggcgcgagctgctcgtaccggtgcagcaagtcgggacggcccaagatgtgcctgagggcgtgcggcacctgctgccagcgctgcggctgcgtcccgccgggcacctccggcaacgaggacgtctgcccctgctacgccaacatgaagacccacgacggccagcacaagtgcccgtgatccatccaccgtggttcccagcatcagcagctttgccaaaaagacatgatacctacatatatataagagtacctagctgctgctgctctactaccttgttggttcattatattgtgcgcgtgcatgcatgaataaataaatgaacatattagggcatgtacaacccagatacggctgcacggtactccaagtacaagatacaactaaaacacaacacaatacagtggtcatgtctaaaacatgtgtcttacgatattcattgtaccaatcagagtattcaataaattaaagtgaccaatcaaaaaaaaaaaaaaaa

SEQ ID NO: 656 - protein, 94 aa, Zea mays
  misc_feature: Ceres CLONE ID no. 342155
  misc_feature: Ceres CDNA ID no. 25446010
  misc_feature (26)..(94): Pfam Name: GASA PFAM Desc: Gibberellin regulated protein
  misc_feature: Homolog of GI Number: 887939 NR Desc: GAST1 protein homolog
  misc_feature: Homolog of GI Number: 18087524 NR Desc: At1g75750/F10A5_16
  misc_feature: Homolog of GI Number: 2792297 NR Desc: GAST
  misc_feature: Homolog of GI Number: 25313155 NR Desc: protein F10A5.6
  misc_feature: Homolog of GI Number: 5102600 NR Desc: GEG protein
  misc_feature: Homolog of GI Number: 21618022 NR Desc: GAST1
  misc_feature: Homolog of GI Number: 2253442 NR Desc: LTCOR11
  misc_feature: Homolog of GI Number: 14625945 NR Desc: snakin2
  misc_feature: Homolog of GI Number: 44889867 NR Desc: GASA
MAKASSRLLFSLSLVVLLLLVETTTSPHGQADAIDCGASCSYRCSKSGRPKMCLRACGTCCQRCGCVPPGTSGNEDVCPCYANMKTHDGQHKCP

SEQ ID NO: 657 - DNA, 710 bp, Zea mays
  misc_feature: Ceres CLONE ID no. 342405
  misc_feature: Ceres CDNA ID no. 25445892
  CDS (2)..(304): REFERENCED BY SEQ ID NO: 658
accgtcgttctccttcattctcatttcttgcacactgacaccagcccctcctgctggctgccccttgctccctcccatggggctccccctggatccctctccatggcgtggatcagccccagcttcccatggatgtcgccctcctctccctgatggctggcgtctccactccctgcagcaaggacgctttcctctgctccctgctcttcctcccatggccccccatgtagcagtaaccatggaaacccctctgggacgcgccctcagcatgctcaatgatatgctgcagcgagctccaccttgatctatgccaacccggccgcaaatcatcgaaccttggaggggaacccttgggaccgatggtgaagaggtgaagcccatccaacgtttgttaaatgttcgatagaaggttcgaaccaaaagtcatcgtcgatcttgtgatttagagtttggtttagttattgtgatccgagtgcgtgtgatctggatggagcttggagatgacggaattgcgacggatcctcatgtgccagcggctccgcctgcgctgaaccgctgtcatgcctaccatcgttgaacaaaggcagtttgtgttctgccgagcgtccatctcgagaacataatgtaatctccacttggctatcaatcatttctctgtatattattgcaatccaagctggcgatttgtccgctgaaaaaaaaaaaaaaaa

SEQ ID NO: 658 - protein, 75 aa, Zea mays
  misc_feature: Ceres CLONE ID no. 342405
  misc_feature: Ceres CDNA ID no. 25445892
MGLPLDPSPWRGSAPASHGCRPPLPDGWRLHSLQQGRFPLLPALPPMAPHVAVTMETPLGRALSMLNDMLQRAPP

SEQ ID NO: 659 - DNA, 909 bp, Zea mays
  misc_feature: Ceres CLONE ID no. 342435
  misc_feature: Ceres CDNA ID no. 35387640
  CDS (111)..(692): REFERENCED BY SEQ ID NO: 660
atcttacctgggatctgctagcttgatctctcctagtcctagcccattcgcttctcctgttcgtcgctcttaatttgcttgctcgatccctggcagtggcagctgctgcaatggcttccggtggcgcgtcgtcactggccttggccttggccgcgctgctcctcgtgagctgcgcctcggcggcggtggcgaccaagtacaccgtcggggacgcgtccggctggacgaccaccggcgactacgccacctgggccagcggcaagaagttcaaagtcggcgacagtctcgagttcaaatacgccggcggggcgcacacggtggacgaggtgagcgcggcggactacgccgcctgctcctccagcaacgcgctcagcaccgacagcgccggcgccacgaccgtgacccagccgcggccccggccccggccgcggacaccgccccagacgcccccgacaccacgccgtcgaccccgacgtccccctcgagctccggcggccgcacgcccaagagcccagacacgacggtcctctcgccgccggacaagaagtccacctcctctggcgccaccgggctcagcgccgcagtgtgggccggcttgggccttgccgggctcgtggccgtgcacctcggcgcgttctaggccagcccgctggcctggccagggaggagacagtgccgtgtgttgttgttaggctgcacgtcatgaattggattggtgtattggttgagggacttgactgcttaccagagagagatctctttttggttcagggaacttattgacgatgctttggctgtgctgtagacatgtagttggataccttggatgttatgctatcagttttgctgttgttaaaaaaaaaaaaaaaaaaaaaaaaaaaaaaaaaaaaaagaaaaaaaaaaaaaaaa

SEQ ID NO: 660 - protein, 193 aa, Zea mays
  misc_feature: Ceres CLONE ID no. 342435
  misc_feature: Ceres CDNA ID no. 35387640
  misc_feature (38)..(102): Pfam Name: Cu_bind_like PFAM Desc: Plastocyanin
  misc_feature: Homolog of GI Number: 51535359 NR Desc: putative blue copper protein
  misc_feature: Homolog of GI Number: 50912975 NR Desc: putative Blue copper protein precursor
  misc_feature: Homolog of GI Number: 21554060 NR Desc: phytocyanin
  misc_feature: Homolog of GI Number: 3341698 NR Desc: phytocyanin
  misc_feature: Homolog of GI Number: 562779 NR Desc: blue copper protein
  misc_feature: Homolog of GI Number: 3747044 NR Desc: blue copper protein
  misc_feature: Homolog of GI Number: 50927428 NR Desc: OSJNBa0079A21.5
  misc_feature: Homolog of GI Number: 14140127 NR Desc: uclacyanin 3
  misc_feature: Homolog of GI Number: 50911371 NR Desc: putative uclacyanin 3
  misc_feature: Homolog of GI Number: 50946959 NR Desc: putative blue copper protein precursor
MASGGASSLALALAALLLVSCASAAVATKYTVGDASGWTTTGDYATWASGKKFKVGDSLEFKYAGGAHTVDEVSAADYAACSSSNALSTDSAGATTVTQPRPRPRPRTPPQTPPTPRRRPRRPPRAPAAARPRAQTRRSSRRRTRSPPPLAPPGSAPQCGPAWALPGSWPCTSARSRPARWPGQGGDSAVCCC

SEQ ID NO: 661 - DNA, 419 bp, Zea mays
  misc_feature: Ceres CLONE ID no. 343173
  misc_feature: Ceres CDNA ID no. 35383168
  CDS (46)..(201): REFERENCED BY SEQ ID NO: 662
aaaccctcgccgactcagatccagcttcctcgcaccgccgtcgccatgccgttcactccaggcccctactctggcgtcagcaccctcgcccttgtggcgagggcgtcggcctttggcgtcggtgtcgtctacgggagcatcaagctctcaatcctcaaggtaacaaaacctaaaaaggaggaagtgcatgatcattactaaggacgacaaggctgctacattttaattcccacatatggaaggatgttataaattggcagtgcaccccttctccatacgtacaatacaatttcgtttatgatttgtggacctgtctgtagcatacctgctatttttttttgtgttgtaataaattcttatacaatgacatgaaatcaggaagtggaaaagcaagtcgttcgacaaaaaaaaaaaaaaaa

SEQ ID NO: 662 - protein, 51 aa, Zea mays
  misc_feature: Ceres CLONE ID no. 343173
  misc_feature: Ceres CDNA ID no. 35383168
  misc_feature: Homolog of GI Number: 50921369 NR Desc: OSJNBb0050O03.8
MPFTPGPYSGVSTLALVARASAFGVGVVYGSIKLSILKVTKPKKEEVHDHY

SEQ ID NO: 663 - DNA, 1063 bp, Zea mays
  misc_feature: Ceres CLONE ID no. 343306
  misc_feature: Ceres CDNA ID no. 40041182
  CDS (75)..(608): REFERENCED BY SEQ ID NO: 664
aggtggggtggagctgtaacagttcgccacggctaggctcctctcccctctcagctctcagctgcccctcctgcatgccgatcgcctccaagctcgtctacttccagcgccgccccccgccggcgccgcctgacgacccgggtcccgagcctcccgacccccgccgcccccgccgccgccgccgcagctccctctcctcctctcaccagaagccgggcaccaaagggatcacgctgctgcagccaagcctccggggccagtcggaaaggcagcagggcttcttcacacggcctccagcgcagggcttcttcaccaccgcagcacgtcggaccacggccggcttcccgacgccgtgcagcaggccagggaacggctccttcagaggctcggcagcgtggacctggtcctggcgggacgaaggtcctcgcacaagacatggccgccgcagacactctgggctggagctggaggactcgctcgccccgtcgttgacgcctcttcgggcggcggtcaaaccagctgcttccagttccagttccagcccggtgaacgtgaacccatccctgtgttccccaaaccggcggccttcgtcgcggtacaggaagtagaagacgggcgagccgcgcccgcggacgcagcttctgactgctccatatgcctggagaggtgcggcgccggcggcgggctcacgcagctgcgctgcgggcacgtcttccactccgcctgcctgcagcgctggctgcggtcccgcgccgactgcccctactgccgggccaccgtgcgagctcgctcctaacagcaggaaggaaggaaggatggatggatggaaagtgtggaactggatgacgatggttttattaaccgtgtgtcgctgctcacctcttgttgtaaccactccaccactagtatggttttttttttgttcttcctttgcccgttgaggtagactggtagtactgaactctgcggcttcagcgattcagtgtgatatatgtgtatgttgtgtctaatgtacgcgggaaaattagatctgtatcgttaaaaagtaaaaaaaaaaaaaaaa

SEQ ID NO: 664 - protein, 177 aa, Zea mays
  misc_feature: Ceres CLONE ID no. 343306
  misc_feature: Ceres CDNA ID no. 40041182
  misc_feature: Homolog of GI Number: 77556330 NR Desc: Zinc finger
  misc_feature: Homolog of GI Number: 22597166 NR Desc: RING
  misc_feature: Homolog of GI Number: 3790593 NR Desc: RING
  misc_feature: Homolog of GI Number: 51972062 NR Desc: At1g51930
  misc_feature: Homolog of GI Number: 50916178 NR Desc: RING zinc finger protein
  misc_feature: Homolog of GI Number: 49256561 NR Desc: MGC82583 protein
MPIASKLVYFQRRPPPAPPDDPGPEPPDPRRPRRRRRSSLSSSHQKPGTKGITLLQPSLRGQSERQQGFFTRPPAQGFFTTAARRTTAGFPTPCSRPGNGSFRGSAAWTWSWRDEGPRTRHGRRRHSGLELEDSLAPSLTPLRAAVKPAASSSSSSPVNVNPSLCSPNRRPSSRYRK

SEQ ID NO: 665 - DNA, 1487 bp, Zea mays
  misc_feature: Ceres CLONE ID no. 343480
  misc_feature: Ceres CDNA ID no. 40041183
  CDS (127)..(1092): REFERENCED BY SEQ ID NO: 666
atctctcatttcccttgtaactggaagcgaggtctcggcgccgccgccctctgcctcgtacatcgtcggcgctgcgggagcgtgcattgttgagcgagtgcggccaagcaacgcgggctcgaggagatgatgctgagcgggcacggcggcgggaggcgcctgttcacggcgtcgcagtggcaggagctcgagcaccaggcgctcatcttcaagtacatggcctcgggcgcgcccgtgccgcacgacctcgtcctaccgctccgcctcgccaccggcgtcgacaccgcgccctccctcgccttcccgccccagccttcgccgtcgctggcgtactggggctgctacggcgcgggggcgccgttcgtcggccgcaaggcggcggaggacacggagccggggcggtgccggcggacggacggcaagaagtggcggtgctccagggaggcccacggcgactccaagtactgcgagaagcacattcaccgcgggaagagccgttcaagaaagcctgtggaagtgacctcctcccccgccgccggcgccgctgcggcgtaccgaccgtccgcgatctccaccatctcgccgccccgcgcggccgacgcgccgccgccgagcctcgcctacccgcagcagcatctcctccacggcgcctcctcctccgcagcagcccgcgcccccgctggcgctctccagctccacctcgacgcgagcctgcacgcggcggcggcgtcgccatcgccgccgccgtcctaccacaggtacgcccactacacaccgccagcgtcgtcgctcttcccgggcggcggctacggctacgactacgactacgggcagtccaaggagctcaggcgacggcacttccacgcgctcggggccgacctgagcctcgacaagccgctgcccgagcccgacaccggctccgacgagaagcagcccctgcggcgtttcttcgacgagtggccgcgggagagcggcgacatggcggcggacgacgcgacgcagctttccatctccatccccgcggcttcgccctccgacctcgctgctacctccgcctccgccgccgccgcgcgattccacaacggggagtgatcggtccatctcctagctgcagccctgcaacagcgtggattgaccgctgcatttcctggctgcaatgcaagcctgcaacagcgagcagtaagccagtgacgtggatgcatctcgtagcggcaaaccctgcttctgcctctgcggtctgcgctgctttgcgcgggacggctcaggggctgaggctcaaaaaagtctgaaccgagtcaagcagtactagggactctatgatttggtcttttgttcttttgtagcagtacgttactcgtaccaaaatgttgtttatttttttgtgtgacattttcatttcttccagttccagtctgtgatgcaagctttgtcgcttttgtcaaaaaaaaaaaaaaaaaaaaaaaaaaaataaaaaaaaaaaaaaaaaa

SEQ ID NO: 666 - protein, 321 aa, Zea mays
  misc_feature: Ceres CLONE ID no. 343480
  misc_feature: Ceres CDNA ID no. 40041183
  misc_feature: Homolog of GI Number: 18390099 NR Desc: putative growth
  misc_feature: Homolog of GI Number: 46981895 NR Desc: putative growth
  misc_feature: Homolog of GI Number: 6573149 NR Desc: growth
  misc_feature: Homolog of GI Number: 51039831 NR Desc: TPA: growth
  misc_feature: Homolog of GI Number: 51039833 NR Desc: TPA: growth
  misc_feature: Homolog of GI Number: 34897962 NR Desc: putative growth
  misc_feature: Homolog of GI Number: 55775178 NR Desc: putative growth
  misc_feature: Homolog of GI Number: 51039841 NR Desc: TPA: growth
  misc_feature: Homolog of GI Number: 50911837 NR Desc: putative growth
  misc_feature: Homolog of GI Number: 32470630 NR Desc: putative growth
MMLSGHGGGRRLFTASQWQELEHQALIFKYMASGAPVPHDLVLPLRLATGVDTAPSLAFPPQPSPSLAYWGCYGAGAPFVGRKAAEDTEPGRCRRTDGKKWRCSREAHGDSKYCEKHIHRGKSRSRKPVEVTSSPAAGAAAAYRPSAISTISPPRAADAPPPSLAYPQQHLLHGASSSAAARAPAGALQLHLDASLHAAAASPSPPPSYHRYAHYTPPASSLFPGGGYGYDYDYGQSKELRRRHFHALGADLSLDKPLPEPDTGSDEKQPLRRFFDEWPRESGDMAADDATQLSISIPAASPSDLAATSASAAAARFHNGE

SEQ ID NO: 667 - DNA, 1606 bp, Zea mays
  misc_feature: Ceres CLONE ID no. 343581
  misc_feature: Ceres CDNA ID no. 40041184
  CDS (47)..(1312): REFERENCED BY SEQ ID NO: 668
gccaaatcaggaaacgggcacgacgcgggcggggcggggagccaaaatggcgctcccgggcccggcggcgacccgcgcggcggtgaggctctgccggatcgcggcgagcgcttcctcgtatttgccgtctgcggcggccgacggaaggagggagctggagctgccgttcgcgctggtggcggagcgggggatggtggtgggcggccaccgcgggatggggatgaacgcggtgggggcgccgcccggggctcgcttcggggccgccagggagcgggagaacacgctgctctccttcggccgagccgccgcacatgctgccgtcgccttcgtcgagttcgacgtccaggtcacaaaagatggctgcccaataattttccatgacgttttcatcctaacacaagggaccggggctgtatatgaaaggcgtgttactgatcttctcttggaagatttcctctcttatgggccacaaaaagaatcttgcaaggtctccaagccattacttagacgggcaggagatggtagagtccttaattggactacagaagatgacgattccctttgcacattgcaagaggcctttcaacgtgtcagtcctcgcctgggatttaacattgagctgaagtttgatgacagcattatgtatcacaggaaagaccttcagtgtgctcttaaagctgtattgcaagttgtttttgagcatgctaggaacagaccagtctttttttcatcgttccatcctgatgcagcacagatgatgcgggaactccagagcttgtatcctgtacttttcctaacagaaggagggacatcgaaacaccacgatccaaggaggaactcgtttgacgacgccgtccgggtatgcctagagtacgatctgcacgggatcgtgtcagaagcgagaggcgttctcaagaacccatccgcggtcgccagagcacaagaatctaacctcgcgcttctcacgtacgggcagctcaacaacgtgtgggaggcagtctacatccaatacctgatgggcgtgcacggcgtcatcgttgaccgggtggaggagatctcggacgccgtggctggttttggtctggggaaaccaggcctcggccggggcggtgctggcgtggacggagcgaaaacgcatcaggctgaggccttctcgcagcagcagctggggttcctgctccggcttatccctgaactgattgagcagcggcacagaaaggacggtacaccatatgtaacatcccagtttttgaccctggaagcggatggcaagaattcgtctttggggtcaacccttgtcccgactgactgactgattgataggtccgatttgacagcgtatacttgtgctgcgtgcacacactcttctgtatagtctgaaaactcgcggttccttgttggttcagtacaggtacagccgaccatggaccgtggtcgatctcttgttgtttcaagtaggctcaccagaaaaaggtcagcaatgtattgttggaaacttgtatgattgtaacgtgtgttgttgacaaccagagatgaaaaccgtaaccgaagtctattgtttccattaaagagaatatttttcgtataaagaaaaaaaaaaaaaaaa

SEQ ID NO: 668 - protein, 421 aa, Zea mays
  misc_feature: Ceres CLONE ID no. 343581
  misc_feature: Ceres CDNA ID no. 40041184
  misc_feature (54)..(336): Pfam Name: GDPD PFAM Desc: Glycerophosphoryl diester phosphodiesterase family
  misc_feature: Homolog of GI Number: 50947999 NR Desc: PHO85
  misc_feature: Homolog of GI Number: 82792094 NR Desc: glycerophosphoryl diester phosphodisterase
  misc_feature: Homolog of GI Number: 42573537 NR Desc: glycerophosphoryl diester phosphodiesterase family protein
  misc_feature: Homolog of GI Number: 34146826 NR Desc: At5g43300
  misc_feature: Homolog of GI Number: 50923901 NR Desc: OSJNBa0072K14.4
  misc_feature: Homolog of GI Number: 6325147 NR Desc: Ypl110cp
  misc_feature: Homolog of GI Number: 66851127 NR Desc: cyclin dependent kinase
  misc_feature: Homolog of GI Number: 45201319 NR Desc: AGR223Wp
  misc_feature: Homolog of GI Number: 54645004 NR Desc: GA15473
  misc_feature: Homolog of GI Number: 24581525 NR Desc: CG2818
MALPGPAATRAAVRLCRIAASASSYLPSAAADGRRELELPFALVAERGMVVGGHRGMGMNAVGAPPGARFGAARERENTLLSFGRAAAHAAVAFVEFDVQVTKDGCPIIFHDVFILTQGTGAVYERRVTDLLLEDFLSYGPQKESCKVSKPLLRRAGDGRVLNWTTEDDDSLCTLQEAFQRVSPRLGFNIELKFDDSIMYHRKDLQCALKAVLQVVFEHARNRPVFFSSFHPDAAQMMRELQSLYPVLFLTEGGTSKHHDPRRNSFDDAVRVCLEYDLHGIVSEARGVLKNPSAVARAQESNLALLTYGQLNNVWEAVYIQYLMGVHGVIVDRVEEISDAVAGFGLGKPGLGRGGAGVDGAKTHQAEAFSQQQLGFLLRLIPELIEQRHRKDGTPYVTSQFLTLEADGKNSSLGSTLVPTD

SEQ ID NO: 669 - DNA, 648 bp, Zea mays
  misc_feature: Ceres CLONE ID no. 343712
  misc_feature: Ceres CDNA ID no. 29191806
  CDS (2)..(481): REFERENCED BY SEQ ID NO: 670
tcacttctctctcctccctccctcgtttctctcttacgcgggagcaggcaacacgcaagccgcgcgcgagccaagcccaggccgcgaccctaagccccggcggcgccctgcagcaagccgcgcccgctctgcgcgcatccagcccaggcgcgagcgacgccgagcgcgtgccgtccgatgccgcctgtgcaagccacgaccgagcccgaccctgccgcgcctgctctctgcgcaaccgctcgagtgcccctgcgcgcgttacttcttcgtggtccaagtgatcttgccaagttacgagcagcaagcagagatcagatcatccatcggcaatgtcgaacatcgggcagtccttccaggccggcaaggcggaggcccagggcgagtaccaggcggagcacgcggcgcagtgcgtcaaggacaccgccggagccgcggccgacagcgcgcagctgcagcagcaccgcgccaccggcaccgttgagcaggtggcgcagacgggccagggcgtggcggcaggcgtcaaggacacggtggcgggcgcggcggttggcgtcaccaacacggtggcgggcgtggcggcgggcggcttgcgtgttgcctgtagatgatcgagctgctttctgtttgcctggaaaaaaaaaaaaaaaa

SEQ ID NO: 670 - protein, 92 aa, Zea mays
  misc_feature: Ceres CLONE ID no. 343712
  misc_feature: Ceres CDNA ID no. 29191806
  misc_feature: Homolog of GI Number: 66780099 NR Desc: PE
  misc_feature: Homolog of GI Number: 67984658 NR Desc: type II secretion system protein E
MSNIGQSFQAGKAEAQGEYQAEHAAQCVKDTAGAAADSAQLQQHRATGTVEQVAQTGQGVAAGVKDTVAGAAVGVTNTVAGVAAGGLRVACR

SEQ ID NO: 671 - DNA, 883 bp, Zea mays
  misc_feature: Ceres CLONE ID no. 343716
  misc_feature: Ceres CDNA ID no. 25446327
  CDS (61)..(474): REFERENCED BY SEQ ID NO: 672
agagtccagaccatagcctgcagccttccatccacgaactcccgttctccatttccagccatggcggtgtcgatcgagctcaccaaggagtacggctacgtcgtgctggtgctggtggcctatgtcttcctcaacctttggatgggcttccaggtcggcaaggcccgcagaaagtacaaggtgttctaccccaccatgtacgccatcgagtcggagaacaaggacgccaagctcttcaactgcgtgcagagggggcaccagaactctctagagtggatgcccgttttcttcgtcatactgctgctgggcggtctgcagcacccgaccatcgccgccggtctgggcggcatctacatcgtcgcgaggttcttctacttcaagggatacgccaccggcgttccggacaaccgtctcaagattggggggctcaactacttggcgttgcttggagttgaaagagcaaggagtcgatgaagatgttgcaatggctgtagcagataacgagtaccggacagagaagaaggcaaagaagaaagcgtacaaggagctgaaagaaatcgcccgcagtgaagggaggaagccacctccgaatccatacccgagtaccataaaggaaatacaagcggaggaaaagaagtatgtcatggaccgtttgcataacccgaaggtaatcgagattgcgaacaagatgaaggaggagcgagacaggatgttgagggatagagcagcaggtcagcggtagtcgtagcagcaggtaatgtttggactggccgactgggtgttgttgttcacgacatgggccaactggcgtcataaataatggttgttggagattgatatggcaaatatgaaactcttgtttttgttaaaaaaaaaaaaaaaa

SEQ ID NO: 672 - protein, 137 aa, Zea mays
  misc_feature: Ceres CLONE ID no. 343716
  misc_feature: Ceres CDNA ID no. 25446327
  misc_feature (9)..(137): Pfam Name: MAPEG PFAM Desc: MAPEG family
  misc_feature: Homolog of GI Number: 50918191 NR Desc: putative glutathione S
  misc_feature: Homolog of GI Number: 62733553 NR Desc: MAPEG family
  misc_feature: Homolog of GI Number: 21617891 NR Desc: glutathione
  misc_feature: Homolog of GI Number: 6686399 NR Desc: F1E22.17
  misc_feature: Homolog of GI Number: 50751077 NR Desc:  similar to microsomal glutathione S
  misc_feature: Homolog of GI Number: 57095308 NR Desc:  similar to microsomal glutathione S
  misc_feature: Homolog of GI Number: 61861854 NR Desc:  similar to microsomal glutathione S
  misc_feature: Homolog of GI Number: 13385010 NR Desc: microsomal glutathione S
  misc_feature: Homolog of GI Number: 16118439 NR Desc: microsomal glutathione S
MAVSIELTKEYGYVVLVLVAYVFLNLWMGFQVGKARRKYKVFYPTMYAIESENKDAKLFNCVQRGHQNSLEWMPVFFVILLLGGLQHPTIAAGLGGIYIVARFFYFKGYATGVPDNRLKIGGLNYLALLGVERARSR

SEQ ID NO: 673 - DNA, 810 bp, Zea mays
  misc_feature: Ceres CLONE ID no. 344357
  misc_feature: Ceres CDNA ID no. 25445542
  CDS (241)..(477): REFERENCED BY SEQ ID NO: 674
acgttggcccgcccggcccggaggcctggtgcacggccacggcgaccccagtcagtgtgagatccgaaagaccggccgccgccgcccaccgggtcatcgccattcgccacaaagccatttgaaccccccacgtctcctcgcctcgttccccatttgctgcgtctccttgcccgcgccgccgctcgccgtttgcccctcgtctccgcaccgcgcgctgttgtccatccttgtgcagcaaaaatgacggctggctacattgttggctcactggtcggatcctttgccattgcatacctgtgtgacacatttatctctgacaagaaggcatttggaggtagcacccccaagactgtttctgagaaggagtggtggcaagccacagacaccaagttccaggcctggcctcgcactgctgggccaccggttgtcatgaaccccatcagccgccagaacttcatcgtcaagtccactgagtaggtttgggctggagaagctggttctgcgacttggtgccgccatgaagccagagttccttttctaaggtcttaatcaattgtaataaaacgaaatacagtcaggatttttttgtgatttttacttgatctgtgagcgaacactgggtctttcaccttgtcatccaatgggttctgctccttggtgaaatctcccaccagccagtaaagaactgggttgttttcataatatatgcttttgctacgcagcctctgctgttgtaaggaattgcattgttatcttatatcactgtatggtgatgtttaactagtttgttgatgaaaaaaaaaaaaaaaa

SEQ ID NO: 674 - protein, 78 aa, Zea mays
  misc_feature: Ceres CLONE ID no. 344357
  misc_feature: Ceres CDNA ID no. 25445542
  misc_feature: Homolog of GI Number: 34897944 NR Desc: ozone
  misc_feature: Homolog of GI Number: 34897932 NR Desc: ozone
  misc_feature: Homolog of GI Number: 15223334 NR Desc: ozone
  misc_feature: Homolog of GI Number: 21387039 NR Desc: stress
  misc_feature: Homolog of GI Number: 6715639 NR Desc: T25K16.16
  misc_feature: Homolog of GI Number: 50910341 NR Desc: putative stress
  misc_feature: Homolog of GI Number: 7739775 NR Desc: stress
  misc_feature: Homolog of GI Number: 50925981 NR Desc: OSJNBa0067K08.15
MTAGYIVGSLVGSFAIAYLCDTFISDKKAFGGSTPKTVSEKEWWQATDTKFQAWPRTAGPPVVMNPISRQNFIVKSTE

SEQ ID NO: 675 - DNA, 746 bp, Zea mays
  misc_feature: Ceres CLONE ID no. 344833
  misc_feature: Ceres CDNA ID no. 40350926
  CDS (133)..(453): REFERENCED BY SEQ ID NO: 676
aaaaaaaatttttttttcgactttcgagcgcagaaacgagagggccggagcagccgcagtcccggcgatcccgccgccggtcgccctcatacttcctcgtcactgccttcgtttctctttccaacaatcaagatgagccgtggcggtagcgcgggtggtggtcaaagttctctgggttacctctttggaagcggtgagccccccaaaccagcagtggcaccagctgtaagtgctccacctgctgctgcaggtgctccacctgctgagaaaccacctgctgcaaagcctgatggcaccagtcagattgctgctggggttaccagccaaaccaataactaccacagggccgacggtcagaacaccggaaacttccttacggaccgtccttcgaccaaggtccacgctgctcctggcggtggctcttccctgggatacctgtttggtggcaactgatgccgctcaccaagctatcaccccccactgtcgccgcatgctttttctgaatcgtgaacagccgttgtcatttcatgtgtacccaaacctcccgtcccgcgtgggcccgtaagctgcgcctagatttcagggctaatcgtgtgcctgaaccctcatcataagtcgtctctgtacccagcttctcgtttcgtttgcacccgtgatggtatggtttggttgttgcccgctggacctatctattctttgcatttttcctttgaaatgtatccttgctcaaaaaaaaaaaaaaaaaa

SEQ ID NO: 676 - protein, 106 aa, Zea mays; identical to SEQ ID NO: 324
  misc_feature: Ceres CLONE ID no. 344833
  misc_feature: Ceres CDNA ID no. 40350926

SEQ ID NO: 677 - DNA, 832 bp, Zea mays
  misc_feature: Ceres CLONE ID no. 345006
  misc_feature: Ceres CDNA ID no. 25446328
  CDS (95)..(457): REFERENCED BY SEQ ID NO: 678
gaaaacccaccgcaccctttcatcagcctgcctgtccactgttggcttggtgacttcctccgctccgctccgctcccgaacggtcgatctttgcatggcagcagcagctggctccaaggggcgggcgatcgctggaagcttcgtcagccgcgtcctcgccggcaaggccgcctcgccgaggagggccgtgcacgcctcggcgtacgacaagaacctggaggaccaggtgcgcccggcgttcgtgccggacgatgtgatcggcagcgccgggagccccgacaagtactggagcccccaccccaagaccggcgtgttcggcccggcggcggttgaccccaagctggcagctggtggcgcgccggacgccggcgcggatgctgcaggaggcacggtgctggaccagaaggtgtggttccgcccgctcgaggacgtcgagaagccgccccccgccgcgtgagccgcgcggcgctgctaggccagcccacactgctgctcgctcataaaaagggcggcgggagagcctggcagtggcaggcactctgctcgtgctcggccgggctgggctccctgcttatatcactgcaatattatactactagtagtggtgcttgatagcagtgtgtggctgtgctaataccagtataatactggttctactataatacagtcgtatcaggcatggcgtgcatcaggactggttgtgatagtagcaacgtgatgctcgtgcctgtaataagaacaagcaggcgatgtgtgcctgtgatgtaccggtgtcgtcagtgttataagtacttgggtcaatggttttctgcagaaaaaaaaaaaaaaaaaa

SEQ ID NO: 678 - protein, 120 aa, Zea mays
  misc_feature: Ceres CLONE ID no. 345006
  misc_feature: Ceres CDNA ID no. 25446328
  misc_feature: Homolog of GI Number: 50900502 NR Desc: OSJNBa0093F12.14
  misc_feature: Homolog of GI Number: 32395571 NR Desc: seed specific protein Bn15D1B
MAAAAGSKGRAIAGSFVSRVLAGKAASPRRAVHASAYDKNLEDQVRPAFVPDDVIGSAGSPDKYWSPHPKTGVFGPAAVDPKLAAGGAPDAGADAAGGTVLDQKVWFRPLEDVEKPPPAA

SEQ ID NO: 679 - DNA, 626 bp, Zea mays
  misc_feature: Ceres CLONE ID no. 345197
  misc_feature: Ceres CDNA ID no. 25446329
  CDS (358)..(588): REFERENCED BY SEQ ID NO: 680
gatccactgtagctcttagttcttctcctctctctcctctcccctctcctgtcgcactctcctgttccggccaccagcgtgcccagcatggtgcaacgctcgggtagaggagggcggagctggtcttcaggggtagcttgaactggcgaccggattggtttggagaccggtttgtccctgatttggtgccccaagtgcaagatggcccgagtgattgaactgagggtgaagagggagaatgagaacctaggccaagtgtttatcaagtgccctaggagtgttgacgctttgattgccattactttgtgtttttcgaaatctgattttggattatttgatttgcttttgtatgtgtagatgccaggaaggtgcccatactacagatggcagagggagtattttgagaaattggtgaaggagaggttgattgccttgttattcgatgattgggaggaagatgatggagaggtggattccaagaaggtttctgaagtaggaactagtgaagacattgcaacttctgtttgtaatggttgtagtacctgtggtagtagtggtgatgtacatgttttaatgatctgtctgtaatgatgtatatgaacaattgaacaaaaaaaaaaaaaaaa

SEQ ID NO: 680 - protein, 76 aa, Zea mays
  misc_feature: Ceres CLONE ID no. 345197
  misc_feature: Ceres CDNA ID no. 25446329
MPGRCPYYRWQREYFEKLVKERLIALLFDDWEEDDGEVDSKKVSEVGTSEDIATSVCNGCSTCGSSGDVHVLMICL

SEQ ID NO: 681 - DNA, 751 bp, Zea mays
  misc_feature: Ceres CLONE ID no. 345621
  misc_feature: Ceres CDNA ID no. 29191807
  CDS (92)..(451): REFERENCED BY SEQ ID NO: 682
accgatcacaaaaccaatcgcggagaggcaatcaccacgtacgtatacactgcacacgggcacgtagctagctagcagtcgtagagtgacgatgaggggtctctctgttgcggtcgctctggtcgtggtggtggccgcggcctgcctcgccgcgccgcgggtcgcggacggcgcgggcgagtgcggggcgacgccgccggacacggtggcgctgaggctggcgccgtgcgcgtcggcggcggaggaccccggctccgcgccgtccggctcctgctgcagcgcggtgcacgccatcgggaagcagagccccaggtgcctctgcgctgtcatgctgtccaacaccgccaggagcgccgggatcaaggccgaggtcgccatcaccatccccaaacgctgcaacctcgccgaccgccccgttggctacaagtgcggagattacaccctgccatgagcggcggtgagttctccaggccggatttgctgcatggcatgcccgagtatcaccgaagcgcgagcgcctcttgtgtcgagcgagtccgtgtctgtcagtcagtctctatgtgttgcccataataaacaaagacatgcgagtaccagacatgtgcaactctagtagtatggtgcgtgttatcactaggcacgcgtactcgtatagttgtgttcagttctgggtctatagagatatgtagccctgcattatcgaaataaatactgtgtccactcgttcgtgaaatcaaaaaaaaaaaaaaaa

SEQ ID NO: 682 - protein, 119 aa, Zea mays
  misc_feature: Ceres CLONE ID no. 345621
  misc_feature: Ceres CDNA ID no. 29191807
  misc_feature (31)..(113): Pfam Name: Tryp_alpha_amyl PFAM Desc: Protease inhibitor/seed storage/LTP family
  misc_feature: Homolog of GI Number: 50924127 NR Desc: OJ991214_12.11
  misc_feature: Homolog of GI Number: 50924129 NR Desc: OJ991214_12.12
  misc_feature: Homolog of GI Number: 50934537 NR Desc: protease inhibitor
  misc_feature: Homolog of GI Number: 50919137 NR Desc: putative protease inhibitor
  misc_feature: Homolog of GI Number: 75994095 NR Desc: phospholipid transfer protein 2
MRGLSVAVALVVVVAAACLAAPRVADGAGECGATPPDTVALRLAPCASAAEDPGSAPSGSCCSAVHAIGKQSPRCLCAVMLSNTARSAGIKAEVAITIPKRCNLADRPVGYKCGDYTLP

SEQ ID NO: 683 - DNA, 1309 bp, Zea mays
  misc_feature: Ceres CLONE ID no. 346282
  misc_feature: Ceres CDNA ID no. 40041185
  CDS (2)..(1102): REFERENCED BY SEQ ID NO: 684
aacaaactctgattggtcctccggcactggcagcctggtcatcatcaggtcacccgtcctactccgtgtccatgtggtccacgacgaaccggcgcacgatgcggacgagctcgtcggcgcgctccgaccaggggtccaccacgaagaagccgtggtcggcgccggcgacctccacgtactccacctccttgccccactcctccttcatccgccgcgcgtactgcgcgttccggtccctcagcacgtcgcgcccgccggccaccaccagcacgggggccatctccacggcctccagcccgggcgcccgcggccccgccgggctgagcaccgggtcgtccctgctggcgccctcgggcagcgccagccgcgcgtacctgtcgtacatctcggtggtgaggaacgcgtcgcgcgggcactccagctccgcgcgcgtgcgggcctcgccggccatggccggcgccaggaggagcgcgccgcggatccggacgccgggtcccaggccggccctgccgagcccgaccgcgacgtggtgggcgatgttgccgcccgccgagtcgcccgccacgaagacgcgcgcgaagtcggccgcgtcggcgagccaggggtcgccgccgccggcggcggcggagcgcagccaggacatggccctggcgccgtcctcctgggcggccgggagccggtgctcgggcgccaggcggtagtcgaaggagagcaccacggcggggagctcggagcacaggcggaggcaccaggcgtggaagttgggccaccgcccggacccgatgcagaagccgccgccgtggaagtaggccaccacggggatccgcgcgtcgttggccgcgcccaggtgccgcggccggtacaggcgcgcgttcaggccgtgcgccgggtcccacgtcacgtccttccactccacgccgcactcgtcttccgagacgtccaccgccgagaacagcgccggaggctccgcgctgcgccgcaccgtgccgtcgctcatcagctgcagcacgccgcggcagtcctccaccacgtgcggctccgtctgcggcgccgacgacgacatagctggctttctgggacaggcaacagcagtctggtctgatggtgatgggttctacaaaagacgcacatctcaaacgtgccctcaaacgttgagcgcaataattgattgtattatttggcctcggccctcggtagctccacgcttagagcatcttagagcatctctaaccattcctaagctcctataactttttttgagagagaataagaaaaaaccacatccaagagttcaaaaaaaaaaaaaaaa

SEQ ID NO: 684 - protein, 209 aa, Zea mays
  misc_feature: Ceres CLONE ID no. 346282
  misc_feature: Ceres CDNA ID no. 40041185
  misc_feature: Homolog of GI Number: 66778264 NR Desc: LigA
  misc_feature: Homolog of GI Number: 66776813 NR Desc: Phosphoribosylaminoimidazole
  misc_feature: Homolog of GI Number: 76818066 NR Desc: 200 kDa antigen p200
  misc_feature: Homolog of GI Number: 67987371 NR Desc: Aldehyde dehydrogenase
  misc_feature: Homolog of GI Number: 67987177 NR Desc: 4Fe
  misc_feature: Homolog of GI Number: 66778899 NR Desc: UvrD/REP helicase
  misc_feature: Homolog of GI Number: 67984719 NR Desc: Initiation factor 2:Small GTP
  misc_feature: Homolog of GI Number: 67985322 NR Desc: Prolyl
  misc_feature: Homolog of GI Number: 71368905 NR Desc: similar to ATPase involved in DNA repair
  misc_feature: Homolog of GI Number: 66779508 NR Desc: Aspartate/glutamate/uridylate kinase
MWSTTNRRTMRTSSSARSDQGSTTKKPWSAPATSTYSTSLPHSSFIRRAYCAFRSLSTSRPPATTSTGAISTASSPGARGPAGLSTGSSLLAPSGSASRAYLSYISVVRNASRGHSSSARVRASPAMAGARRSAPRIRTPGPRPALPSPTATWWAMLPPAESPATKTRAKSAASASQGSPPPAAAERSQDMALAPSSWAAGSRCSGARR

SEQ ID NO: 685 - DNA, 564 bp, Zea mays
  misc_feature: Ceres CLONE ID no. 346477
  misc_feature: Ceres CDNA ID no. 25446330
  CDS (96)..(404): REFERENCED BY SEQ ID NO: 686
aagaaacaaacgaagccagccagccagccagccgggtcctcccgcgtagcgtagccgtaggcgtagccgtagcagcgtgtgcgagaggggaagaaatgctggagggaagggcacgggtggaggacacggacatgccggcgcggatgcaggacgcggcgacctccgcggcctcgcgcgcgctcgacctcttcgacgtcgccgactgccgcgccatcgccggccacatcaagacggagttcgacaagcggtacggcgtcgggtggcagtgcgtggtgggcgccaacttcgggtgcttcttcacccacagcagcggcaccttcatctacttctccatggagcgcctctccttcctcctcttcaaggccgccgtcgtcgcagccgccgccgccgccgtcgcctcctaatcaaccaagtctccgtccatcacaccgtgcactttgtactgctagctagtactatataacatttgtaatgtccagaagctcaaatcctgtacggccagcagcctgtgtaaatacatcgccccatgctttcgctcgttccttgaaaaaaaaaaaaaaaaaa

SEQ ID NO: 686 - protein, 102 aa, Zea mays
  misc_feature: Ceres CLONE ID no. 346477
  misc_feature: Ceres CDNA ID no. 25446330
  misc_feature (1)..(91): Pfam Name: Dynein_light PFAM Desc: Dynein light chain type 1
  misc_feature: Homolog of GI Number: 50251496 NR Desc: dynein light chain type 1
  misc_feature: Homolog of GI Number: 50901996 NR Desc: putative dynein light chain
  misc_feature: Homolog of GI Number: 45752676 NR Desc: At5g20110
  misc_feature: Homolog of GI Number: 50758408 NR Desc:  similar to dynein light chain
  misc_feature: Homolog of GI Number: 2208914 NR Desc: outer arm dynein LC6
  misc_feature: Homolog of GI Number: 50253310 NR Desc: putative dynein light chain 2
  misc_feature: Homolog of GI Number: 57091177 NR Desc:  similar to dynein light chain
  misc_feature: Homolog of GI Number: 62738694 NR Desc: Chain C
MLEGRARVEDTDMPARMQDAATSAASRALDLFDVADCRAIAGHIKTEFDKRYGVGWQCVVGANFGCFFTHSSGTFIYFSMERLSFLLFKAAVVAAAAAAVAS

SEQ ID NO: 687 - DNA, 1182 bp, Zea mays
  misc_feature: Ceres CLONE ID no. 346915
  misc_feature: Ceres CDNA ID no. 36707388
  CDS (114)..(941): REFERENCED BY SEQ ID NO: 688
aaaagcgaacaatccacaattcccagtaccctcacgccggcatccgtcgaagctgctcgacctcgactcaagccttccttgctccttgccgccgtcgagtcgtcgcaggaacgatgacccggcggaacggctgtacgatctacgtgggcaacctccccggcgacatccgcgagagggaagtggatgatctcttctacaagtatggacgtatagtggaaattgacttgaaaattccaccaaggcctcctggttttgcttttgttgagtttgaggacgctgatgctgaagatgcaatatatggccgtgatggatacaactttgatggccataggttgcgggtggaattagcccatggtggacgaggcacatcttcttttgatcgatctagcagctatagcagtgctggacaacgcggtgcctcaaaacgttctgattaccgtgttatggttactggattaccttcttcagcatcatggcaagatctcaaggaccatatgcggcgagctggtgatgtctgtttcactgatgtgtatcgtgaggctggagcaactattggaatagctgattatactaactatgaagatatgaaacacgcgataaggaagctagatgattctgagttccgtaatgctttttcaaggacatatgtccgggtgagggagtatgatgctaggcgcagccgttctcgctccagaggcagaaaccgctctaagtcaagaagcagaagccacagccattcgtactcaagaagcagaagccgcagttatagcaagagcaggagcccaagatctagatctgcttcagagtcaaaatcacctgttaaggcaagatcaccatccagatcccctcctatttctccccggcgtgacaagtctgcaagcaggagtcctgccaggagcaagagtctgccccgatcttgttctccggcaaaatcagagtgaatcggattctgcacttgaaacgttcagaaaggcagagctcgagctaaaagattgctgtacggattatgagcactgtgctagtagcattgctgtcccttccatatttttacaaatactctgttctttgaggagatcactgtatgctactactctgtacctgacatgatgcaaacgttgttggtttttaaacttttgcagaacgatgactttgatcaaaaaaaaaagaaaaaaaaaaaaaaaa

SEQ ID NO: 688 - protein, 275 aa, Zea mays
  misc_feature: Ceres CLONE ID no. 346915
  misc_feature: Ceres CDNA ID no. 36707388
  misc_feature (9)..(76): Pfam Name: RRM_1 PFAM Desc: RNA recognition motif.
  misc_feature: Homolog of GI Number: 52140012 NR Desc: ASF/SF2
  misc_feature: Homolog of GI Number: 52140014 NR Desc: ASF/SF2
  misc_feature: Homolog of GI Number: 52140013 NR Desc: ASF/SF2
  misc_feature: Homolog of GI Number: 52140015 NR Desc: ASF/SF2
  misc_feature: Homolog of GI Number: 52140009 NR Desc: ASF/SF2
  misc_feature: Homolog of GI Number: 50939903 NR Desc: putative pre
  misc_feature: Homolog of GI Number: 52140005 NR Desc: ASF/SF2
  misc_feature: Homolog of GI Number: 52140010 NR Desc: ASF/SF2
  misc_feature: Homolog of GI Number: 6056417 NR Desc: alternative splicing factor SF2a
  misc_feature: Homolog of GI Number: 5815235 NR Desc: splicing factor SR1
MTRRNGCTIYVGNLPGDIREREVDDLFYKYGRIVEIDLKIPPRPPGFAFVEFEDADAEDAIYGRDGYNFDGHRLRVELAHGGRGTSSFDRSSSYSSAGQRGASKRSDYRVMVTGLPSSASWQDLKDHMRRAGDVCFTDVYREAGATIGIADYTNYEDMKHAIRKLDDSEFRNAFSRTYVRVREYDARRSRSRSRGRNRSKSRSRSHSHSYSRSRSRSYSKSRSPRSRSASESKSPVKARSPSRSPPISPRRDKSASRSPARSKSLPRSCSPAKSE

SEQ ID NO: 689 - DNA, 735 bp, Zea mays
  misc_feature: Ceres CLONE ID no. 346972
  misc_feature: Ceres CDNA ID no. 29191359
  CDS (113)..(610): REFERENCED BY SEQ ID NO: 690
gccaacaaccgtggccccgtcaaatttgcccttcctgtctcggactctcggttccctcttcccggcgcaccagcctacctcgccgacgccaggccgccacgccgccggagacatgaaccagcccgtgcagaagaacaccctctacgtcggtgggctggcggaggaggtggacgagaaaatcctgcacgccgcgttcgtgcccttcggtgaggtcaaggacgtcaagacgccgctcgaccagtccacgcagaagcaccgctccttcggcttcgtcaccttcctggagcgcgaggacgccgccgctgccatggacaacatggacggcgccgagctcttcggccgcgtgcttaccgtcaactacgccttccccgagcgcatcaagggaggggagcagggatgggctgcccagccaatctgggccgatgcggacacttggttcgagaggcagcagcaggaagaggagatgcagcggctgcaggcagagcaccgtgcagcgatgcaggcagcagagaagctgcacagggagaaactggccgctgaaagggaaggcgagaaagaagaagatcccatggctgccgcagaggcccaggctgtgaaacaaagttcttaagaaccggatatcaactcataactcatgtgctacgttgctgcctgtttgtcagatatgactaaacgaatcttgcgaatgctgtttgttttgctgaaagaaccctatttctaaaaaaaaaaaaaaaa

SEQ ID NO: 690 - protein, 165 aa, Zea mays
  misc_feature: Ceres CLONE ID no. 346972
  misc_feature: Ceres CDNA ID no. 29191359
  misc_feature: null
  misc_feature: Useful for making plants with altered Lignin content
  misc_feature: Useful for making plants with altered terpenoid content
  misc_feature (10)..(81): Pfam Name: RRM_1 PFAM Desc: RNA recognition motif.
  misc_feature: Homolog of GI Number: 34896798 NR Desc: putative peptidyl
  misc_feature: Homolog of GI Number: 30683419 NR Desc: RNA recognition motif
  misc_feature: Homolog of GI Number: 66518019 NR Desc:  similar to ENSANGP00000015053
  misc_feature: Homolog of GI Number: 55586874 NR Desc:  similar to peptidylprolyl isomerase E isoform 2
  misc_feature: Homolog of GI Number: 2828149 NR Desc: cyclophilin
  misc_feature: Homolog of GI Number: 56203257 NR Desc: peptidylprolyl isomerase E
  misc_feature: Homolog of GI Number: 5174637 NR Desc: peptidylprolyl isomerase E isoform 1
  misc_feature: Homolog of GI Number: 45439316 NR Desc: peptidylprolyl isomerase E isoform 2
  misc_feature: Homolog of GI Number: 33086482 NR Desc: Ab1
  misc_feature: Homolog of GI Number: 62649592 NR Desc:  similar to peptidylprolyl isomerase E
MNQPVQKNTLYVGGLAEEVDEKILHAAFVPFGEVKDVKTPLDQSTQKHRSFGFVTFLEREDAAAAMDNMDGAELFGRVLTVNYAFPERIKGGEQGWAAQPIWADADTWFERQQQEEEMQRLQAEHRAAMQAAEKLHREKLAAEREGEKEEDPMAAAEAQAVKQSS

SEQ ID NO: 691 - DNA, 1025 bp, Zea mays
  misc_feature: Ceres CLONE ID no. 347259
  misc_feature: Ceres CDNA ID no. 29191360
  CDS (1)..(717): REFERENCED BY SEQ ID NO: 692
gattttgatggtcggtttgggtcacagctggacgagctagagaagaagctcgccggcgaggtcagggtgaggaacagggcggagaggaggctcaggagggccatcaagaagctggagtccctcaagatcctggacgtcgagctctcggaaggctccattgggtcgctgtcctccaacggccgttcggatcaccaggcgccggaggccgaggagaggaacggccctggctcgttgaccactcgtgggtctgtgctggcatccggtccttccggagaccccgacgccgacgccgacagggaatcgtcagagggatcatgcacccaggtgaattcgtcctcccgggacgggagctggtgctccgttgcgtcagagcaatcccggcctggttcttgcatggatcttgccggaaacaccaccaactgcggctcagaggggagttgcggtgaccatgattcagagagggaacaccttgatgcatccagtggctgtggctcagcaaaatgggaagaagcgttctacgaaagcgacgacaggctagcgctatcgcggggtctcgttgaaccaccaccagcagctgcaggcgaaggtccaagaacgcaggataacgacacgcatgcaggagaggtccgtgccatggatcacgaggaagaagaggagaccaacaagcttgcgatcgttctagccgacccccagccacagtcgcaaggcgacgtgtagtccgttctcctggcgctgcggcgggtgaaggagcagctgcgctacaccatgaaccaggaactcgccgcgccaaccaggagctctacgcccaccgagcgagcgtgccacactaggaaaccgtgtggctcacttctactacggtgtccaacattcggttccgtgaattattcgtagtgctgtttaggggagtggagtatctgtacagaatggaataaggtcgctcatgtggatgtggagtcactattttattaaaaagattgaatctctaggtgctttgcttgcttctgtttaaaaaaaaaaaaaaaaaa

SEQ ID NO: 692 - protein, 107 aa, Zea mays
  misc_feature: Ceres CLONE ID no. 347259
  misc_feature: Ceres CDNA ID no. 29191360
MDLAGNTTNCGSEGSCGDHDSEREHLDASSGCGSAKWEEAFYESDDRLALSRGLVEPPPAAAGEGPRTQDNDTHAGEVRAMDHEEEEETNKLAIVLADPQPQSQGDV

SEQ ID NO: 693 - DNA, 1078 bp, Zea mays
  misc_feature: Ceres CLONE ID no. 347326
  misc_feature: Ceres CDNA ID no. 25401608
  CDS (50)..(586): REFERENCED BY SEQ ID NO: 694
gacactacacccctcatggacaagtagctcgtcctcgagctgcaacataatgggtgtccatagactgactcaacttggcctaaacttacacctagaagaacatgttttttacatctcggctcattctctattggtagagtactgcaaattctttgttggggcgccattgaggtgggccccatccagactcatcaagagagaggcattattggctggcttggccaccgtagcccacaaggcgtgtcacaagcccatgaccgatgggcagccctgcagtggaggagctaggcagccagctgttgtggccgcccttgccgctggttgtgtcgttagatatctgaagaaaatggtggttgccgttgcacatcttctgcactctccatcgtgcaaggaagccacgagcaacaacatgcagacccacaaccacgaacgtctggcgcaatgcggccaacgccaactgccactcacgttgcaccgctgccttgatttgcagcagcccctgctcaaccaccaggagcgaggcttgcatctttgcgagatcagcccttatgttggcccacaagtccaccatcgatggagatggtgatggttgagccgtggcttcccctattggcgttgcccatggagaaggtgatggctgcatcgacgacagtgccatgggcgcagcgactgcccatgtggatgtcagcagtgttggggacggcggcgtgacgaaattggcagcagaggtggctatgtctttcaacagcaaggctgctgatgcagaggactgggcagcaaggaagccaatctgtcgctgtcgcttgaagatgcgacactgagtacgcaggatgaaggactggacgaaatcagcagtagaagccatgcggtgtagatcgaaacccaagctatccgataccagattgttatggactacgttgggattggggaattggagagggagttgtagttgcaggaacgccggacgagggcctctgcccactaccgggcaagaagaaggcttgcttctaatttttgcttaccttaactgatacaataatgtcccttttacagagacgacctaaaaaaaaaaaaaaaa

SEQ ID NO: 694 - protein, 178 aa, Zea mays
  misc_feature: Ceres CLONE ID no. 347326
  misc_feature: Ceres CDNA ID no. 25401608
MGVHRLTQLGLNLHLEEHVFYISAHSLLVEYCKFFVGAPLRWAPSRLIKREALLAGLATVAHKACHKPMTDGQPCSGGARQPAVVAALAAGCVVRYLKKMVVAVAHLLHSPSCKEATSNNMQTHNHERLAQCGQRQLPLTLHRCLDLQQPLLNHQERGLHLCEISPYVGPQVHHRWRW

SEQ ID NO: 695 - DNA, 1797 bp, Zea mays
  misc_feature: Ceres CLONE ID no. 347610
  misc_feature: Ceres CDNA ID no. 25445473
  CDS (205)..(1293): REFERENCED BY SEQ ID NO: 696
acaacactcgtttgcctctcatctcgcttcgcttccattccatcgcgccagtcgccagactcacctgggagagtggggggaaatatcaattagaaacaacgaggaattagcaaagaaagaagaataactcccataagaaaaatcgccaaatacgccattcatcttcttcgcccgggtttcagaacgtacggcagtttagccaggatggtggcgatcgagaaccagagccaggccgcggtggcggcggaggcggtggcggcgccggcgtcgcggatccccagggaggcgcggcgcctgctgcacgagctggcggcggcgtgggcggacgtggccgactgccgcgcgctggaggtcgtgccgctcaagggggccatgaccaacgaggtctaccaggcgcgctggctcactgcaggccctgccggccagaaggaggagcccagggcggagagggaggtgaggaaggtgctcgtgcggatttacggcgacggcgtcgacctcttcttcgaccgcgaggacgaggtgcgcaccttcgagtgcatgtcacgccatggccagggtccccgcctcctcggccgctttccgaacggccgcgtcgaggagttcatccacgcaaggacattgtcagctgccgaccttcgcgatcctgaaatttcagctctggtggcttccaagctgagggagttccacaaccttgacatgcctggtcccaaatctgtgctcatttgggacagacttaggaactggctcagaactgccaagagcttgtgtccacctgaagaagccaaggaatttcggttggacagtctggagaaccagattactgcattggagaacgagtgttcaggtgattaccagtggattggtttctgtcacaatgatcttcagtatggcaatatcatgattgatgaagagaccaacgtgctgaccatcattgattatgagtatgcaagcttcaacccagttgcatatgacattgctaaccatttctgtgagatggcagcagactatcattcatcaaagcctcatatactggactacagcagatatccagatgttgatgagcagaagcgttttgttaagacctacctgaacatttctggtgaggaacctgatgcggaagttgtggagaacctgctccaaagcattgagaagcacacgctcgccagccatctagtatggggcctctggggaataatttcggaccatgttaacgacattgacttcgactacaaggagtatgcgaggcagagattcgagcagtactggcacaagtctgcgatcttaacatcttgaacatgtgtataaacacccgtacgtggtctcaggaactccctgagggcctgtggctgcacacacgaaattgtgcagtgccactgacacatagataagctgtgaaagaagaaatactgacgacgacgacgaataatcccgttttgggctcgggaggttatttctccgcaactcgatgagcttcaggcttcagcttcaggaaggaaggaaggagctatggggatttggctgcccgcttatgctgtaccaatgcaattaaaagataaagatccggtccggtgttgcgtgtgctatgtttagttttggctagcaccgccgagagccgtggtcctgttgtggtgtttctagtttctgtatgcttgatgttgttagtgtgctggataatttggttttgtgcttggggagtccttagctttgggacaacgcatacattgtatactgggtagatgtataaacataaaacagctatgggaatttggttctctaccttgaaaaaaaaaaaaaaaa

SEQ ID NO: 696 - protein, 362 aa, Zea mays
  misc_feature: Ceres CLONE ID no. 347610
  misc_feature: Ceres CDNA ID no. 25445473
  misc_feature (1)..(48): Pfam Name: Choline_kin_N PFAM Desc: Choline kinase N terminus
  misc_feature (49)..(294): Pfam Name: APH PFAM Desc: Phosphotransferase enzyme family
  misc_feature: Homolog of GI Number: 33149685 NR Desc: choline kinase
  misc_feature: Homolog of GI Number: 57899680 NR Desc: putative choline kinase CK2
  misc_feature: Homolog of GI Number: 34910612 NR Desc: putative choline kinase
  misc_feature: Homolog of GI Number: 50932475 NR Desc: putative choline kinase
  misc_feature: Homolog of GI Number: 1438883 NR Desc: GmCK3p
  misc_feature: Homolog of GI Number: 30984574 NR Desc: At1g74320
  misc_feature: Homolog of GI Number: 12324898 NR Desc: putative choline kinase
  misc_feature: Homolog of GI Number: 55770759 NR Desc: putative choline kinase
  misc_feature: Homolog of GI Number: 1438881 NR Desc: GmCK2p
  misc_feature: Homolog of GI Number: 30725296 NR Desc: At1g71697
  misc_feature: Useful for making plants with increased biomass and foliage
  misc_feature: Useful for making shorter plants
MVAIENQSQAAVAAEAVAAPASRIPREARRLLHELAAAWADVADCRALEVVPLKGAMTNEVYQARWLTAGPAGQKEEPRAEREVRKVLVRIYGDGVDLFFDREDEVRTFECMSRHGQGPRLLGRFPNGRVEEFIHARTLSAADLRDPEISALVASKLREFHNLDMPGPKSVLIWDRLRNWLRTAKSLCPPEEAKEFRLDSLENQITALENECSGDYQWIGFCHNDLQYGNIMIDEETNVLTIIDYEYASFNPVAYDIANHFCEMAADYHSSKPHILDYSRYPDVDEQKRFVKTYLNISGEEPDAEVVENLLQSIEKHTLASHLVWGLWGIISDHVNDIDFDYKEYARQRFEQYWHKSAILTS

SEQ ID NO: 697 - DNA, 998 bp, Zea mays
  misc_feature: Ceres CLONE ID no. 348402
  misc_feature: Ceres CDNA ID no. 35383169
  CDS (124)..(795): REFERENCED BY SEQ ID NO: 698
aaatgcactcgtgctggataagcagcctctggtccaagaaaaaaaaggttccagctggttctcaggcagaggcagaggtcaccttctgctgctcaacgcaacactgcacatacatacatacagatgggttccgaggggccttctcccgtcaccaccaccgtccacgtcactgggttcaagaagttccacggagtcgccgacaaccccaccgagaagatcgtgcgcaacctcgcgtcgttcatggacaccagagggctgcccaagggcctggtgctcgggagctgcaccgtcctcgaggccgccgggcagggcgcgcttggcccactgtaccaactgctggagtccaccgtcgtctccggccggggacgtgggatgccggctcaggagcgagtgattctgctccattttggcgccaacagtggttcacataggtttgcgcttgagaatcgagctgtcaatgaagctactttccgttgccctgatgagctaggatggaaaccacagaggacgcctatcatatcatccgatggaaacatcttacacgcaagacagaccacactgccactgaaggaaataagcaagtctctccagcaaatgggatatgatgtgatgccttcagatgacgctggtcgatttgtgtgcaactatgtctattaccactcgcttaagtttgcagagaagcatggcatgacgtctctcttcgttcatttccccctcttcctggcaattgatgaggaagttcagatgcaatttgttgcctcccttcttgaagtcctcgcttccttgaacttctagtagtaacctgatggtagatctatctcttccagtggtgtattgttcccaatttatttggaagggttcccaatttacatgtggagtgaataagaatgaggaatcattcatggagttatgtgtgcttcaaaatgtgtaaaaaaacagctcttctcaaaaaaaaaaaaaaaaaaaaaaaaaaaaaaaaaataaaaaaaaaaaaaaaa

SEQ ID NO: 698 - protein, 223 aa, Zea mays
  misc_feature: Ceres CLONE ID no. 348402
  misc_feature: Ceres CDNA ID no. 35383169
  misc_feature (11)..(217): Pfam Name: Peptidase_C15 PFAM Desc: Pyroglutamyl peptidase
  misc_feature: Homolog of GI Number: 12039349 NR Desc: putative pyrrolidone carboxyl peptidase
  misc_feature: Homolog of GI Number: 50939513 NR Desc: pyrrolidone carboxyl peptidase
  misc_feature: Homolog of GI Number: 50252601 NR Desc: pyrrolidone carboxyl peptidase
  misc_feature: Homolog of GI Number: 21554239 NR Desc: putative pyrrolidone carboxyl peptidase
  misc_feature: Homolog of GI Number: 8778575 NR Desc: F28C11.8
  misc_feature: Homolog of GI Number: 9295697 NR Desc: F26F24.31
  misc_feature: Homolog of GI Number: 42571611 NR Desc: pyrrolidone
  misc_feature: Homolog of GI Number: 18977671 NR Desc: pyroglutamyl
  misc_feature: Useful for delaying flowering time
  misc_feature: Useful for making larger plants
  misc_feature: Useful for making shorter plants
  misc_feature: Useful for making stronger plants
MGSEGPSPVTTTVHVTGFKKFHGVADNPTEKIVRNLASFMDTRGLPKGLVLGSCTVLEAAGQGALGPLYQLLESTVVSGRGRGMPAQERVILLHFGANSGSHRFALENRAVNEATFRCPDELGWKPQRTPIISSDGNILHARQTTLPLKEISKSLQQMGYDVMPSDDAGRFVCNYVYYHSLKFAEKHGMTSLFVHFPLFLAIDEEVQMQFVASLLEVLASLNF

SEQ ID NO: 699 - DNA, 628 bp, Zea mays
  misc_feature: Ceres CLONE ID no. 348518
  misc_feature: Ceres CDNA ID no. 29191337
  CDS (1)..(234): REFERENCED BY SEQ ID NO: 700
tctggtctccgcgtgcggcggcgcgatttctttgcttctcccttccacttcgagagattgttgattattctagagccagatccgggtaacagattcgagtttgcgcccgccctgttcggcttcagccgccaaactgccagacgcacagccgcggagccgccagagacagacgctgccgccgtcggccgtcctccgccctccagatatggggaacactacatctgtgcaagctgaggcttcagattcagcgcagaaacctgccacaacagctcctgcacctgggtcaaagccgaaaaagatctgctgtgcttgcccagatacaaagaagctgagggacgattgcatcgtgcagaatggcgaggatgcctgcggaaagctcatcgaagcccacctgaaatgcctgagagccgaagggttcagcgtctgacgtggtgctccatcatggcaactccacacacctgtttctgcagtaatctgattttgatcatgaacagtgtgatgaataaggacttctggtagagtgatagaaacaactcgcagttttatttctagactggaaggaggaaatcccctgaacattgccagtttgcaagagtttttctatcttttttcaaaaaaaaaaaaaaaa

SEQ ID NO: 700 - protein, 73 aa, Zea mays
  misc_feature: Ceres CLONE ID no. 348518
  misc_feature: Ceres CDNA ID no. 29191337
  misc_feature (11)..(73): Pfam Name: COX17 PFAM Desc: Cytochrome C oxidase copper chaperone
  misc_feature: Homolog of GI Number: 50725970 NR Desc: copper chaperone COX17
  misc_feature: Homolog of GI Number: 50915562 NR Desc: putative copper chaperone COX17
  misc_feature: Homolog of GI Number: 14794886 NR Desc: copper chaperone COX17
  misc_feature: Homolog of GI Number: 21536915 NR Desc: cytochrome C oxidase assembly protein
  misc_feature: Homolog of GI Number: 24642093 NR Desc: CG9065
  misc_feature: Homolog of GI Number: 9022433 NR Desc: putative copper chaperone Cox17
  misc_feature: Homolog of GI Number: 62900083 NR Desc: Cytochrome c oxidase copper chaperone
MGNTTSVQAEASDSAQKPATTAPAPGSKPKKICCACPDTKKLRDDCIVQNGEDACGKLIEAHLKCLRAEGFSV

SEQ ID NO: 701 - DNA, 872 bp, Zea mays
  misc_feature: Ceres CLONE ID no. 348580
  misc_feature: Ceres CDNA ID no. 25446332
  CDS (108)..(617): REFERENCED BY SEQ ID NO: 702
atccatatcgcttgctggctttgctttcttccttcctccctctagatctcgccttcacaacaacgacgaacagcgggtacgtacttggagatccaagaagctaagaaatgtcagcccagtttgcatccgagcatgcttgctatgtcaactgcaactattgcaacactatcctggtggtgaatgtgccaagcagttgttcctacaacgtggtgactgttaaatgtgggcattgtacaatggtgctgtccatggatctcagtcccttccatcagcaggcacgcactgtcccagacaaccaggttgtccagaacagagggtttcagtataacaattttgggagctacgagcaagcctcgtcaagaaatctacgaacgcctcccatgtatccagtgtcaaacaatcagccacaagtgccaccaatacgaccctcagagaagagacagcgtgttccatcagcatacaacagattcatcaaggaagaaatacaaaggataaagacgagcaacccagagattagccacagggaagcattcagtgctgcagcaaagaattgggctcatctccctcggctccatttcggcctcagcgtcgctgacggcggcggcggcagcaactagggaagacgatgattacggatcgagctcttcgccttacacatatatatatgcagtgtgctatgtcgtgcttggattttgtaagccttattaagttttttgacaacctgtgttttcagacctgttgcgtacttgcatgcatgaatcctgcattgcgtgcagtaattaacatgtttgatgctatatatgatatatgcatgcatggtgtacaacattactaaataaatggaaaatatttgtccaaaaaaaaaaaaaaaa

SEQ ID NO: 702 - protein, 169 aa, Zea mays
  misc_feature: Ceres CLONE ID no. 348580
  misc_feature: Ceres CDNA ID no. 25446332
  misc_feature (1)..(159): Pfam Name: YABBY PFAM Desc: YABBY protein
  misc_feature: Homolog of GI Number: 50934335 NR Desc: putative MADS
  misc_feature: Homolog of GI Number: 55771072 NR Desc: YABBY2 like protein
  misc_feature: Homolog of GI Number: 41745658 NR Desc: YABBY2
  misc_feature: Homolog of GI Number: 4928751 NR Desc: YABBY2
  misc_feature: Homolog of GI Number: 37551421 NR Desc: FIL
  misc_feature: Homolog of GI Number: 32330679 NR Desc: yabby9 protein
  misc_feature: Homolog of GI Number: 50911144 NR Desc: putative YABBY transcription factor CDM51
  misc_feature: Homolog of GI Number: 50926748 NR Desc: OSJNBb0020O11.2
  misc_feature: Homolog of GI Number: 58891059 NR Desc: CRABS CLAW
  misc_feature: Useful for making bigger plants
  misc_feature: Useful for making plants with altered leaf shape eg curled leaves
MSAQFASEHACYVNCNYCNTILVVNVPSSCSYNVVTVKCGHCTMVLSMDLSPFHQQARTVPDNQVVQNRGFQYNNFGSYEQASSRNLRTPPMYPVSNNQPQVPPIRPSEKRQRVPSAYNRFIKEEIQRIKTSNPEISHREAFSAAAKNWAHLPRLHFGLSVADGGGGSN

SEQ ID NO: 703 - DNA, 875 bp, Zea mays
  misc_feature: Ceres CLONE ID no. 348597
  misc_feature: Ceres CDNA ID no. 40350927
  CDS (102)..(383): REFERENCED BY SEQ ID NO: 704
ataccaccagggagtaaaggttaggatgttgttgtcgtgcttgaacctggaagcatgctccaccgggacctgggttcggtcgagcaacaactagtccgctaatgacgccagtcgccggctgctgttcggaggctagcaaaagggcgagagggtttgctagtacgtacagagcgtgcgcgagtaagtggctgggagcccgccgttgtcaagagagaagttgcgaggggcagaggatcatggcgctagaacttgtcgatgcgcagggagttcgccgaagggcgttaaagagcaccgaagccttggcgagtttcctccatactccgaaatttgtcgtcgtgccgttacagcgtgggtcgacgtcactgcggtctcgttgccggtgagcatctttctctttgtgtcatcgttttctctgtttattttttttgtgcgactcggacggtttagtgctcaggagtatgtcggcaccgcgtcatgaccagacagagcgccgccgtggccagcggtttcttccgtgcctggttaatcggggagagcgtggtggagggattgccagcaatggcgccgccactgtccgttatcgaccgccgtgaccggttggttaggaggaagaagacacggggaggtcgttgatcgtggaacgaacgaccaggatttgatctggtattctggttcgcccgtggtgtggttaaccgtagatcttcgatcgtggggccgtgggtggtctgaagttctttaaatccggttcgtcggatcttgatccgatggcggtcctcgcataccgcttcagtgtcagagtgatttaatcctggcccttgaatctgatcgggtggctgagatcgactcgtaccccttcgtcaaaaaaaaaaaaaaaa

SEQ ID NO: 704 - protein, 93 aa, Zea mays
  misc_feature: Ceres CLONE ID no. 348597
  misc_feature: Ceres CDNA ID no. 40350927
MTPVAGCCSEASKRARGFASTYRACASKWLGARRCQERSCEGQRIMALELVDAQGVRRRALKSTEALASFLHTPKFVVVPLQRGSTSLRSRCR

SEQ ID NO: 705 - DNA, 1360 bp, Zea mays
  misc_feature: Ceres CLONE ID no. 349100
  misc_feature: Ceres CDNA ID no. 40041186
  CDS (50)..(1117): REFERENCED BY SEQ ID NO: 706
aacatatagcaggcctagcagtgccgttctggaaagggcgggagaggggatgaggacgagaggtggcagcggattcgccggcctgcaggtggcgtgcgtcgtcgccgccctgtgcctgctcctgccgacggggagccgcgcccaactgcaggtggggttctacaacacctcctgccccaacgccgaggcgctcgtgcgtcaggtcgtcacggctgctttcgccaacaactccggcgtcgcacccgggctcatccgcctccatttccatgactgcttcgtcaggggctgcgatgcctccgtgctcctgtccgtgaaccccgccggcggcaaaacggagcgtgagtccccggccaacgacccgagcctgcgcgtcttcgacgtgatcgacgccgccaaggccgccgtggagaggagctgcccacgcacggtgtcgtgcgccgatgtcctcgcattcgcggcccgcgacagcgtcaccctgacgggcaacctcttctacgacgtgccagcggggcggcgggacggccgcgtgtccaacgagacggaggccaacgacaacctgctggggccggacagcacggcggagatcctcatcgacggcttcgggaagaagaacctgagcatcgaggacatggtggtcctgtccggctcccacactatcggccgctcccactgcttctccttcctgtccaccaaccggcagcggctggccaacgggaccataagcccggcgtaccaggcgctgctggaggcgctgtgcccgcccaacccgggccagttcacccccaacaccacggagatcgacgtcagcacgcccaccgtgctggacaacaactactacaagctgctgccgctcaacctgggcctgcacttctccgacgaccagctcatccgcaacggcacgctcgcgccgttcgccagcgccttcgccgccaacgagacgctttggaaggacaagttcgccgccgccatgatcaagatgggcaacatcgaggtcaagaccggcaccacggatgagatccgcctcaactgcagcgtcgtcaacccgtcgtcgtcgtcgtccaccgccggggtgatcgagatgcggttccctgcagccgacgaggttgccacgagctgatgactgatcgaaaaaatatatccacacgtgttaataacgcgcgtgcggcatgcatgagtacgtacatatcttcgcctttgtacgtacgtggacctcgcttgtttgctgcgcgcacagtcgtactgaactgggtttgatttgtgggtgtggtgaaagtactgaactgggtttgatttgtgggtgtggtgaaagcacgaataaaagttgcttacacggcgtgcgaaatcaaaaaaaaaaaaaaaa

SEQ ID NO: 706 - protein, 355 aa, Zea mays
  misc_feature: Ceres CLONE ID no. 349100
  misc_feature: Ceres CDNA ID no. 40041186
  misc_feature (49)..(295): Pfam Name: peroxidase PFAM Desc: Peroxidase
  misc_feature: Homolog of GI Number: 57635161 NR Desc: peroxidase 8
  misc_feature: Homolog of GI Number: 34894760 NR Desc: putative peroxidase
  misc_feature: Homolog of GI Number: 53791491 NR Desc: putative peroxidase
  misc_feature: Homolog of GI Number: 34894758 NR Desc: putative peroxidase
  misc_feature: Homolog of GI Number: 12056448 NR Desc: peroxidase
  misc_feature: Homolog of GI Number: 52077569 NR Desc: putative peroxidase
  misc_feature: Homolog of GI Number: 34894748 NR Desc: putative peroxidase
  misc_feature: Homolog of GI Number: 34894752 NR Desc: putative peroxidase
  misc_feature: Homolog of GI Number: 34894766 NR Desc: putative peroxidase
  misc_feature: Homolog of GI Number: 51038121 NR Desc: peroxidase
  misc_feature: Useful for making ornamental plants with modified flowers
MRTRGGSGFAGLQVACVVAALCLLLPTGSRAQLQVGFYNTSCPNAEALVRQVVTAAFANNSGVAPGLIRLHFHDCFVRGCDASVLLSVNPAGGKTERESPANDPSLRVFDVIDAAKAAVERSCPRTVSCADVLAFAARDSVTLTGNLFYDVPAGRRDGRVSNETEANDNLLGPDSTAEILIDGFGKKNLSIEDMVVLSGSHTIGRSHCFSFLSTNRQRLANGTISPAYQALLEALCPPNPGQFTPNTTEIDVSTPTVLDNNYYKLLPLNLGLHFSDDQLIRNGTLAPFASAFAANETLWKDKFAAAMIKMGNIEVKTGTTDEIRLNCSVVNPSSSSSTAGVIEMRFPAADEVATS

SEQ ID NO: 707 - DNA, 1819 bp, Zea mays
  misc_feature: Ceres CLONE ID no. 349577
  misc_feature: Ceres CDNA ID no. 40041187
  CDS (141)..(1613): REFERENCED BY SEQ ID NO: 708
attcggtcaacgatcggtcgggactccggactcgggagtcggcactcgggtctcgacgtctcgtctcgtctcgtctcgcctgcccgcagccccttggcttcgttccatccggcttctcggcggcggcggagaggagggggatggcgcaccggctgctgcgggacgcgcaggcggacgggtgggagcggtcggacttccccatcatctgcgagtcatgcctcggcgacaacccctacgtccggatgttaagagctgaatatgacaaagaatgcaaaatttgtgcacgtccttttactgtattccggtggcgtcctgggcgagatgcaaggtacaagaagactgagatctgccagacatgttgcaagctaaagaatgtctgccaggtctgcctgctggatcttgaatatggtctgcctgttcaggtccgagatacagcactctctatcaattccaatgatgcaattccaaggagtgatgtcaatcgcgaatattttgcagaagagcatgataggagggccagagctggcatagactatgattcatcctatgggaaggctcgcccaaatgataccattctgaagcttcaaaggacagcaccatattacaagaggaacagagctcatgtttgcagtttctttgtgcgaggtgaatgtacaagaggagctgagtgcccttatcgtcatgagatgcctgaaactggggagttatctcagcagaacattaaagatcgctactatggagttaatgatccagttgcactgaaacttttgagcaaggcaggtgagatgccatccctgacaccaccagatgatgagactataaggaccctctacattggcggactcgatagcagaataaccgagcaggatttgagggatcagttttatgcccatggtgagatcgagtccataaggatggtacttcaacgtgcaatcgcatttgtgacgtatactacaagagaaggcgcagagaaggctgcagaagagcttgctaataagctagtcatcaagggcgtgcgcctgaagctgatgtggggcaagcctcaggccccaaagcctgaggaggatgagtctgggaggctggggcaggtttcccacggagggctgctccctagggctgtcatatctcagcagcagagcggtgaccagcctcagccccccgggatggagggccaacagcaacaggctgcaccagcatcgtactacttcaacattccagcaccaccagcaacggagcggactgtgtatccatccatggatccacagaggatgggtgctatagtaaaaccacatgacagtgaaggcaaactagggccgcagcaagccgggcaagctcagacatcaagcaacccagcacaagggggcggctatcctgcaccaccgccatactaccatggtcagtatccaccatactatccacccccaccaccatacggtggctacatgcctccaccgcgcatgccctacccaccgcaatatccgccttaccagccgatgctagctcaaccagcacaggtacaggctagttcatctcggcaaccaccgcatgcaggtggagggcagcagcagccgcctgatggccctccagctcagcagcagccaattcagaactgaagtcctgtcaagatgttgggtattggtactgctctaactgctcggcaggagaatgcaacccccgtgggtcaccagctttcgtaatttcttaatttgtggttaacagtaaaaactttgttgtattgcttatcaacgtttgaagaaaaaccgtgagatataccggatgtatccagcttctggattttgtggtaaaaaaaaaaaaaaaa

SEQ ID NO: 708 - protein, 490 aa, Zea mays
  misc_feature: Ceres CLONE ID no. 349577
  misc_feature: Ceres CDNA ID no. 40041187
  misc_feature (158)..(183): Pfam Name: zf PFAM Desc: Zinc finger C
  misc_feature (230)..(296): Pfam Name: RRM_1 PFAM Desc: RNA recognition motif.
  misc_feature: Homolog of GI Number: 50949165 NR Desc: ESTs AU082563
  misc_feature: Homolog of GI Number: 8778549 NR Desc: F22G5.30
  misc_feature: Homolog of GI Number: 50935893 NR Desc: RRM
  misc_feature: Homolog of GI Number: 82400164 NR Desc: RRM
  misc_feature: Homolog of GI Number: 83283985 NR Desc: RRM
  misc_feature: Homolog of GI Number: 3980378 NR Desc: putative RNA
  misc_feature: Homolog of GI Number: 9759562 NR Desc: RNA
  misc_feature: Homolog of GI Number: 61371511 NR Desc: RNA binding motif protein 22
  misc_feature: Homolog of GI Number: 72163574 NR Desc:  similar to RNA binding motif protein 22
  misc_feature: Homolog of GI Number: 55625210 NR Desc:  similar to RNA binding motif protein 22
MAHRLLRDAQADGWERSDFPIICESCLGDNPYVRMLRAEYDKECKICARPFTVFRWRPGRDARYKKTEICQTCCKLKNVCQVCLLDLEYGLPVQVRDTALSINSNDAIPRSDVNREYFAEEHDRRARAGIDYDSSYGKARPNDTILKLQRTAPYYKRNRAHVCSFFVRGECTRGAECPYRHEMPETGELSQQNIKDRYYGVNDPVALKLLSKAGEMPSLTPPDDETIRTLYIGGLDSRITEQDLRDQFYAHGEIESIRMVLQRAIAFVTYTTREGAEKAAEELANKLVIKGVRLKLMWGKPQAPKPEEDESGRLGQVSHGGLLPRAVISQQQSGDQPQPPGMEGQQQQAAPASYYFNIPAPPATERTVYPSMDPQRMGAIVKPHDSEGKLGPQQAGQAQTSSNPAQGGGYPAPPPYYHGQYPPYYPPPPPYGGYMPPPRMPYPPQYPPYQPMLAQPAQVQASSSRQPPHAGGGQQQPPDGPPAQQQPIQN

SEQ ID NO: 709 - DNA, 1542 bp, Zea mays
  misc_feature: Ceres CLONE ID no. 350346
  misc_feature: Ceres CDNA ID no. 25446052
  CDS (145)..(1254): REFERENCED BY SEQ ID NO: 710
aaaatagcacaattgctggggccaaatgaggttcgcaatccctagtcgtcttgtcctgatcttacttgagtgctcgtgagctctttccagtggctaatgactgcagatttgagttctggcccaagaaccgcgtgctagcccgccatggaggtgaggtccgagcaagggctgatggcggggagggatctattcggcttgacgaagagcccgccggcgcccgcgccgccgtcgtccgccgccatgcagagcgtgcgcatggcgtacaccgcggacggcaccgccgtgttcgctccggtgagctcttcgcctgcgacgccgtcttaccagccgcagggcgcagcccacggcgctagcatgtccgcggcgacggtcgttggaggcaatggcgctccagctgcgccgagcatgggtgagccgctggccaagaagaagcgcggacgaccaaggaagtacgggcccgacgggtccatggcgctggcaatggtgcctgcttcggcggcttcagggtcgccggcgacagggcagggtttttctgggccgttctcaccgcctgcgttaaatccggcgagctctctggtggtggcgtcgccagacggattcaagaagcggggccggcctaagggttctaccaacaagccacgcgtggacgctgctgggtcatcaggagctggatttacacctcatgttatcacagttcaagctggggaggacgtggcatcaaagattatgtcattttcccagcatggaacacacggagtttgtgttctttcagcaaatggctccatatcaaatgtaacgcttcgtcagactgctacatcaggcagaactgtaacatacgagggtcaattcgagatactgtcgctgtcggggtcattcttcctggctgaggatggtgtccagcgcagccgaaacggaagcctcagcgtgtcgctggctggtcctgatggccgtctgttgggtggtggggtcgcaggacttctagtagcggcttcaccggttcagatagtactgggaagcttcaattctggaggcggaaaggagccacaaaagcaggctccttcagaacccacatcggctccaccgagggttgctccgacagccgggatgggaggacccagcagcccttcttcaagaggcacattgagcgagtcatccggtggcgctggaagcccaccgccactgcatcgagccatggctgctagtgctagcaatagtaaccagccaccgttcttgtccagcatgccttggagatgagtttgcagcttgcattctcttggccaattccaggcaggatgtagcaatctgcgctttcagtagcgcccgttgtgtgagtagctgtgtgtagtacaagccagaagcttgggtgggaatagaattgcgtctggtaaatctgtagctctgttgtaggttccaccctgaattcctgtgctaggtgtgttgagctgtgtaagcaatgtaatcctttcagcgttatcaaatgctatttagttaaatgtttctaccaaggcatgtcgatttgaatcatgaaaaaaaaaaaaaaaa

SEQ ID NO: 710 - protein, 369 aa, Zea mays
  misc_feature: Ceres CLONE ID no. 350346
  misc_feature: Ceres CDNA ID no. 25446052
  misc_feature (94)..(106): Pfam Name: AT_hook PFAM Desc: AT hook motif
  misc_feature: Homolog of GI Number: 50947571 NR Desc: putative AT
  misc_feature: Homolog of GI Number: 50947573 NR Desc: putative AT
  misc_feature: Homolog of GI Number: 37537056 NR Desc: putative AT
  misc_feature: Homolog of GI Number: 50928371 NR Desc: OSJNBa0086O06.13
  misc_feature: Homolog of GI Number: 2598227 NR Desc: AT
  misc_feature: Homolog of GI Number: 20196849 NR Desc: AT
  misc_feature: Homolog of GI Number: 25408293 NR Desc: AT
  misc_feature: Homolog of GI Number: 14326504 NR Desc: At2g33620/F4P9.39
  misc_feature: Homolog of GI Number: 78709037 NR Desc: AT
  misc_feature: Homolog of GI Number: 50725730 NR Desc: putative AT
MEVRSEQGLMAGRDLFGLTKSPPAPAPPSSAAMQSVRMAYTADGTAVFAPVSSSPATPSYQPQGAAHGASMSAATVVGGNGAPAAPSMGEPLAKKKRGRPRKYGPDGSMALAMVPASAASGSPATGQGFSGPFSPPALNPASSLVVASPDGFKKRGRPKGSTNKPRVDAAGSSGAGFTPHVITVQAGEDVASKIMSFSQHGTHGVCVLSANGSISNVTLRQTATSGRTVTYEGQFEILSLSGSFFLAEDGVQRSRNGSLSVSLAGPDGRLLGGGVAGLLVAASPVQIVLGSFNSGGGKEPQKQAPSEPTSAPPRVAPTAGMGGPSSPSSRGTLSESSGGAGSPPPLHRAMAASASNSNQPPFLSSMPWR

SEQ ID NO: 711 - DNA, 694 bp, Zea mays
  misc_feature: Ceres CLONE ID no. 350709
  misc_feature: Ceres CDNA ID no. 25446053
  CDS (79)..(510): REFERENCED BY SEQ ID NO: 712
aaaaactcccgcagccgccacctcaacccaggaacagagcgaggcgacgccgcggcacctcttctccggcgaagggaaatggcaaccgttccaggggatctgatctggcaggttgtgaggaagaacaactccttccttgtgaagcagttcggcaacggcaatgccaaggtgcagttcaccaaggagccgaacaacctctacaacatccactccttcaaacactcgggtttggcgaacaagaagactgtgacgatccagccagctgcaaaggactcggctgtggtcctctctactaccaagaccaagaagcagaacgcacctgcgaagctcagccacaagtctgtgatgcgcaaggagttccgcaagatggccaaggctgtgaaaaaccaggttagtgacaactactacaggcctgatctgaccaagccagctcttgctaggctaagctcggtgtaccgcagcctccaggttgccaagtccggtgtcaagaagaagaacaggcagtcctaagcgctaagtttgtgttctgtcagggggcatgttggtgctcgtagtcccagcttatatttatctatgttccaacagttttgagacttgttagaactgagcaaaccatgttaagatgctgctgtgtgtcattccttaaaaaaattgccttgcactttgtgattactgtctaaaaaaaaaaaaaaaa

SEQ ID NO: 712 - protein, 143 aa, Zea mays
  misc_feature: Ceres CLONE ID no. 350709
  misc_feature: Ceres CDNA ID no. 25446053
  misc_feature: null
  misc_feature: Useful for making plants with altered oil content
  misc_feature (5)..(136): Pfam Name: Ribosomal_L28e PFAM Desc: Ribosomal L28e protein family
  misc_feature: Homolog of GI Number: 50915960 NR Desc: putative 60S ribosomal protein L28
  misc_feature: Homolog of GI Number: 55908881 NR Desc: putative 60S ribosomal L28 protein
  misc_feature: Homolog of GI Number: 34910390 NR Desc: ribosomal protein L28
  misc_feature: Homolog of GI Number: 19310757 NR Desc: putative ribosomal protein L28
  misc_feature: Homolog of GI Number: 55908882 NR Desc: putative 60S ribosomal L28 protein
  misc_feature: Homolog of GI Number: 61654672 NR Desc: L28
  misc_feature: Homolog of GI Number: 66845184 NR Desc: Ribosomal L28e protein family
  misc_feature: Homolog of GI Number: 32411169 NR Desc: predicted protein
  misc_feature: Homolog of GI Number: 20976820 NR Desc: GH04183p
MATVPGDLIWQVVRKNNSFLVKQFGNGNAKVQFTKEPNNLYNIHSFKHSGLANKKTVTIQPAAKDSAVVLSTTKTKKQNAPAKLSHKSVMRKEFRKMAKAVKNQVSDNYYRPDLTKPALARLSSVYRSLQVAKSGVKKKNRQS

SEQ ID NO: 713 - DNA, 1113 bp, Zea mays
  misc_feature: Ceres CLONE ID no. 351080
  misc_feature: Ceres CDNA ID no. 25446054
  CDS (3)..(719): REFERENCED BY SEQ ID NO: 714
atgcggcgagggtggcattcgctggcgccgcgggtttccccgccaccacgttcccatcggccgccggactgtttgcccttttcgatgcgagcgaggactccatggagagctccgaagagatggttacccccagggccgccgcgtcggagccggacgaggaggagaggaaggcccccgcggccgaggttcccgtggagcgtgccgtcgaggcggacgtcgccgggtctggggaggtcattgtggacccgtttccaccggaaaccgctgggcatgtacgtgagggcgaggtggatgaagcagaggtggaggtgcacgccgtggtggcacaggaaccggaggtgaaggatgtgttggtggccgaggaatccgtggtacaggagtcagtggctgatgcgccggcggtgaaagaggtggccaaggtgcatccggtgcttgaatctgagctgaaggttgatgaagttgtggtggtcgagcaaacgcctgtagcaccagatgtgaagggcgccggggctactgttgtgttgaaaacaccagagctgattaggaggaatgtggttgtcaaggaccctgctgaggtgtcgagatctcaggacactgctgatgtgcatactacagaggtggcccgtggacctgcagtggcagtggttgcttcagggcagcgggcaacatggtggaattgctgtggcctttttgatgctttgattggttcagggagatagatgaagcgttagaacttgaagtcaagaagacagaaaatgcggtgactttcagttcaaagctgatgagcagctgtaactagtcacatgaatgatgaagcagaaggattccggataacatcgagctgatgtttccacttccttcctccctgtgtctctgcatctgtgcaaagttacatcccctggtcgcggttaatattcttaatttccttagcatccccaacgcctagtcgtgtcgtctaggtactggtcttgtagcatagtaagtgttgaagtgggtcgaccgtaaagaatgttttgttgtttctgctttttttatacttattttttcttgtcacttgtaaggagtatatttattcaaacaagttgagatggttcttcaaaaaaaaaaaaaaaa

SEQ ID NO: 714 - protein, 205 aa, Zea mays
  misc_feature: Ceres CLONE ID no. 351080
  misc_feature: Ceres CDNA ID no. 25446054
  misc_feature: Homolog of GI Number: 34911482 NR Desc: P0454A11.15
  misc_feature: Homolog of GI Number: 55775280 NR Desc: putative glycine
  misc_feature: Homolog of GI Number: 929566 NR Desc: fibrillarin
  misc_feature: Homolog of GI Number: 50252223 NR Desc: AAA ATPase containing von Willebrand factor type A
  misc_feature: Homolog of GI Number: 111900 NR Desc: keratin
  misc_feature: Homolog of GI Number: 72608016 NR Desc: lipoprotein
  misc_feature: Homolog of GI Number: 395147 NR Desc: glycine
  misc_feature: Homolog of GI Number: 27374264 NR Desc: Fib
  misc_feature: Homolog of GI Number: 17647425 NR Desc: CG9888
MESSEEMVTPRAAASEPDEEERKAPAAEVPVERAVEADVAGSGEVIVDPFPPETAGHVREGEVDEAEVEVHAVVAQEPEVKDVLVAEESVVQESVADAPAVKEVAKVHPVLESELKVDEVVVVEQTPVAPDVKGAGATVVLKTPELIRRNVVVKDPAEVSRSQDTADVHTTEVARGPAVAVVASGQRATWWNCCGLFDALIGSGR

SEQ ID NO: 715 - DNA, 1115 bp, Zea mays
  misc_feature: Ceres CLONE ID no. 351106
  misc_feature: Ceres CDNA ID no. 25446055
  CDS (469)..(969): REFERENCED BY SEQ ID NO: 716
aaggaaacacaattcagcagcacacgcaccaccaaaaagagggagaagagtcttcgcctcgcggagagacgtgctgcctagcataatatatagccacgaaatagagtgctgggtctagctatagctaactagccagcagcagcagcagcgtgcgtgcgttcaaggcagcagaggtagagaggttttgagagagaatggcaagcaggcaaggtgtagccgcctccatgttcgccacggcattgctcctcggcgtctttgcatccatcccacaaagtgctgaggccatcggggtgtgctacggcatgagcgccaacaacctgccggcggcgagcacggtggtgagcatgtacaaggcgaatggcatctcggcgatgcggctgtacgcgctcaaaaccctagccgccgagtgccgcccaccgcccgcccgccctccgccgcgcgtcggacggtgccgagggaagaggcaccatgaggttggagaagtgctggttctgctcctctaccatctaccccggccatggaatccagttcgtccgcaacgacgccaaggtcttccgcttttgccggtcaaagtgccataaaaacttcaagatgaagaggaaccctcgtaaggttaagtggacaaaagcatacaggcatttgcatggcaaggacatgacccaggatacaacctttgagtttgagaggaagaggaacaggcccgagcgctacgaccgcaatttgacggagcagactctgaaggctatcccgcttattgcaaagattaggcatgaccgtatgggaaaacacatctcaaacagacataaacctggtaaacgcaaggagatggaaaaggactccaaggagctggagcaggacatcggcatgctcccgaagaagcttattatcaaccatctcgcggctgagaaaacgaaggtcaaggttgaagttgttcagcagcagacagaagataacgctatggaagagtagtgcgtggcattttgtgtgcttgtgttttcatgtctgatgcagatccttttgtatttgcgtaagaagctatgtagttgatgaaagatgtttatttgatatatatattaatggatggattcgtggactgagtaaaaaaaaaaaaaaaa

SEQ ID NO: 716 - protein, 166 aa, Zea mays
  misc_feature: Ceres CLONE ID no. 351106
  misc_feature: Ceres CDNA ID no. 25446055
  misc_feature (1)..(71): Pfam Name: Ribosomal_L24e PFAM Desc: Ribosomal protein L24e
  misc_feature: Homolog of GI Number: 50936047 NR Desc: putative 60S ribosomal protein L30
  misc_feature: Homolog of GI Number: 56201782 NR Desc: 60S ribosomal protein L30
  misc_feature: Homolog of GI Number: 21592958 NR Desc: 60S ribosomal protein L30
  misc_feature: Homolog of GI Number: 34914662 NR Desc: putative ribosomal protein
  misc_feature: Homolog of GI Number: 82996540 NR Desc:  similar to ribosomal protein L24
  misc_feature: Homolog of GI Number: 38348464 NR Desc: Similar to 60S ribosomal protein L30 isolog
  misc_feature: Homolog of GI Number: 50752912 NR Desc:  similar to ribosomal protein L24
  misc_feature: Homolog of GI Number: 16740902 NR Desc: Ribosomal protein L24
  misc_feature: Homolog of GI Number: 55642163 NR Desc:  similar to ribosomal protein L24
  misc_feature: Homolog of GI Number: 57108219 NR Desc:  similar to ribosomal protein L24
MRLEKCWFCSSTIYPGHGIQFVRNDAKVFRFCRSKCHKNFKMKRNPRKVKWTKAYRHLHGKDMTQDTTFEFERKRNRPERYDRNLTEQTLKAIPLIAKIRHDRMGKHISNRHKPGKRKEMEKDSKELEQDIGMLPKKLIINHLAAEKTKVKVEVVQQQTEDNAMEE

SEQ ID NO: 717 - DNA, 1198 bp, Zea mays
  misc_feature: Ceres CLONE ID no. 351199
  misc_feature: Ceres CDNA ID no. 25446056
  CDS (362)..(1045): REFERENCED BY SEQ ID NO: 718
cccccaagatgacctagaggctagagagttcgttcgttgtcagttgatatcccagccacagcccacagcttccttgctcgcttccctgcctctcctcctacctaacctcaccaccacctgcaacaacaaagcacacgcccggcactaccatccatccatccgcgcgctcttaatttagcttcctcctcctcacctactagcaggcacagcaggcagcagcatcgatcggatcggagcagcacagcgcgcgtcaccgcaagctcaagtgtcttcttccttgcttgcttgcctgctgcttacctctcagttccccactcacgtcccttgccgtacgtacgtgcgtccaacacaccaggtgaaaatgggctcggagacggagacggtcaacgtggaaggcatcccgttcccggcggagatcaccgtcggcaaccctctctccctcctaggcacaggtatcacggacatcgagatccacttcctgcagatcaagtacaacgccatcggagtctacctccacaacgccggcggcggcgacagcaccacgcccacgctgctgggccacctcggggcctggaagggcaagacggcggaggagctcctagcggacgccgccttctgggccgcgctggtcgcggcccccgtcgagaagctgttccgcgtcgtggtcatcaaggagatcaagggctcgcagtacggcgtgcagcttgagagctccgtccgcgaccgcctcgccgccgccgacctctacgaggacgacgaagaggaggcgctcgagaaggtcgccgacttcttccagtccaagtacttcaagccgggctccgtcgtcaccttccacttcccggcaccggcctccgcctccccgggacccgcggcggagatcaccttcgcgacggagggcaagggcgacgccaggatcgcggtggagaacgggaacgtcgccgggatgatccagacctggtacctcggcggcgactccgcggtgtcccccagcaccgtccgcagcctggccaaccgtttcgccgcgctgctcgccgtcgccgcgtgatttataccggtcggcgggccggttggtcgagttgcgttggatttgagttcgtgaatgtccgtcctgtacgcgtgttgtctggtgtgtgttgtcgtttgcagcgaatttgcaagtaataataataaaaattatgacaaaaaaaaaaaaaaaaaa

SEQ ID NO: 718 - protein, 227 aa, Zea mays
  misc_feature: Ceres CLONE ID no. 351199
  misc_feature: Ceres CDNA ID no. 25446056
  misc_feature (203)..(224): Pfam Name: Chalcone PFAM Desc: Chalcone
  misc_feature: Homolog of GI Number: 77553494 NR Desc: Chalcone
  misc_feature: Homolog of GI Number: 77548434 NR Desc: contains similarity to chalcone
  misc_feature: Homolog of GI Number: 51039630 NR Desc: putative chalcone isomerase 4
  misc_feature: Homolog of GI Number: 51039632 NR Desc: chalcone isomerase 4B
  misc_feature: Homolog of GI Number: 4126399 NR Desc: chalcone isomerase
  misc_feature: Homolog of GI Number: 62433123 NR Desc: chalcone flavonone isomerase
  misc_feature: Homolog of GI Number: 50788695 NR Desc: chalcone isomerase
  misc_feature: Homolog of GI Number: 68481 NR Desc: chalcone isomerase
  misc_feature: Homolog of GI Number: 228617 NR Desc: chalcone flavanone isomerase
  misc_feature: Homolog of GI Number: 14582263 NR Desc: chalcone isomerase
MGSETETVNVEGIPFPAEITVGNPLSLLGTGITDIEIHFLQIKYNAIGVYLHNAGGGDSTTPTLLGHLGAWKGKTAEELLADAAFWAALVAAPVEKLFRVVVIKEIKGSQYGVQLESSVRDRLAAADLYEDDEEEALEKVADFFQSKYFKPGSVVTFHFPAPASASPGPAAEITFATEGKGDARIAVENGNVAGMIQTWYLGGDSAVSPSTVRSLANRFAALLAVAA

SEQ ID NO: 719 - DNA, 1456 bp, Zea mays
  misc_feature: Ceres CLONE ID no. 352091
  misc_feature: Ceres CDNA ID no. 40350928
  CDS (84)..(1208): REFERENCED BY SEQ ID NO: 720
agagcagaagcaaagcgagcaacagagcaaagctaagcacagagctagcaagtgaccgaccgagagcaaacaggcaaggcaagatggtgcaacagcaagccgcgaaggaggtgatcccgctgctgacgccttacaagatggggcagttcgagctctctcaccgggtggtgctggcgccgctgacgaggtgccgctcctacggcaacgtgccgcagccacacgccgccgtgtactactcgcagcgcgccaccaggggtggcctgctcatcgcggaggccacgggggtgtcggccaccgcgcaggggttcccggagtctcctggcatctggacgcaggagcaggtcgaggcgtggaagcccatcgtcgacgccgtccaccgcaagggcgccatcttcgtctgccagatctggcatgtgggcagggtctccaccaacgagctccagcccaacggcgacgcgcctatctcgagcacggacaagcagatctcccccgacgccaagtccggaacggcgtactcgaagccgcgccggctgcggaccgacgaggtccccgggatcgtcgacgacttcaggcgggccgcacggaacgcgatccaggctggtttcgacgccgtcgagatccacggcgcgcacgggtacctcctggagcagttcatgaaggacagctgcaacgaccgcacggaccagtacggcggcagcctggagaaccggtgccgtctcgccgtggaggtcgtggacgccgtcgtccgcgaggtgggcgcgcgccgcgtcggcatcaggctgtcgcccttcgtcgacttcgtggactgcgtggactcggacccggtggcgctcggccactacatggtgcagcagctcaacaggcatagcggcttgctctactgccacatggtggagccccgcattaccgcccacgggcgcaggcagatccctcacgggctcttgccgttccgaaaggcgtttcatggaacgttcatcgccgccggtgggtacgatcgggaggaaggcaacaaggtggtggcagaagggtatgctgacctcgtcgcgtatgggaagctgttcttggctaacccggacctgcctaggaggttcgagctggatgtggcactcaacaaatacgaccgctccaccttctacacgcaagatcctattgttggctacacagattaccctttctttgaagaagaagatggcaagaatgagaggtgaaatctgataatgtggagggttcatcaagtataagttcgtcattatttccaccattcattattggtcattgtggtggagtcattgtgtcatgttgtttcattctgtactagtgtggtgtgaagtgaaataaatctatttggtgaaattgttataaaataaattatagacttgtcggatttacactctattgttaaggggctatttgtatggaggtatatcagtttttagacgcaaaaaaaaaaaaaaaa

SEQ ID NO: 720 - protein, 374 aa, Zea mays
  misc_feature: Ceres CLONE ID no. 352091
  misc_feature: Ceres CDNA ID no. 40350928
  misc_feature (12)..(343): Pfam Name: Oxidored_FMN PFAM Desc: NADH:flavin oxidoreductase / NADH oxidase family
MVQQQAAKEVIPLLTPYKMGQFELSHRVVLAPLTRCRSYGNVPQPHAAVYYSQRATRGGLLIAEATGVSATAQGFPESPGIWTQEQVEAWKPIVDAVHRKGAIFVCQIWHVGRVSTNELQPNGDAPISSTDKQISPDAKSGTAYSKPRRLRTDEVPGIVDDFRRAARNAIQAGFDAVEIHGAHGYLLEQFMKDSCNDRTDQYGGSLENRCRLAVEVVDAVVREVGARRVGIRLSPFVDFVDCVDSDPVALGHYMVQQLNRHSGLLYCHMVEPRITAHGRRQIPHGLLPFRKAFHGTFIAAGGYDREEGNKVVAEGYADLVAYGKLFLANPDLPRRFELDVALNKYDRSTFYTQDPIVGYTDYPFFEEEDGKNER

SEQ ID NO: 721 - DNA, 2016 bp, Zea mays
  misc_feature: Ceres CLONE ID no. 352158
  misc_feature: Ceres CDNA ID no. 40041188
  CDS (169)..(1677): REFERENCED BY SEQ ID NO: 722
acctccagcattccaaacctcagatcccccgcacgccgcgcctccgaaattccgaaacccaaatcagagcgccgcccccggcccccgctgcacgcaccgggcgggggcccatgcggccgcgcggctccgcgcccgcgccacaccgttggaaccgagcgggcgcgctagatgcctgagcccggcggccgctgcctcggcgacctcggcggtcagcgccaggtgctcaagggctggcctgacctgtggctggtgggggacaagcccggcctccgcgcgctctccaccgcggccatggccgccgcgccccagccgccgccgctcgaggccgaccaaaccctagcgctcccggacgtgcttctcctccgcgtcctcgcctgcctccctgagccccagctcacgggcgccgcctcgctcgtctgcaggcggtggacgcgcctcgcggggcgcctgcgccgccgcctcgccgtgcgggactgggccttcgtcgcgcaccgactgccataccgcttcccggacctggccgacctcgacctgttcccggcctctatcgccgcgcccaccacggcggtgccccacggcgccgctgcctccccgcttctcacctgcggcgtggtctcgctaaccctagacaccagcgcagacccgccgctcggcgcctgccggttcatcgacgacgacgcgctcgaccggggactcgccgccgtcgccgctagcttccccaacctcagccgcctctcggccaccgccgcctctgagtccggcgggctcatggccatcgctgtcggatgcccgacgcttcaggagctcgagctccaccgctgcaccgacctcgccctccgcccggtttccgccttcgcgcacctccagatcctccgcattgtcgccgcgtcccccgcgctctacggcaccgccgagggcggcggcgtcactgacatcggcctcaccatcctggcccatggatgcaagcggctggtcaagctggagcttcagggttgcgaggggagctacgacggcatcgcggctgtggggcgctgctgtgcgatgcttgaggagctcaccatcgctgaccacaggatggacggtgggtggcttgccgcgctagccttctgtgggaatctcaagaccctgcggctgcagagttgcagtaggatcgacgacgaccctggcccagcggaacaccttggtgcttgtctcacgctcgagagcctgcagctgcatcggtgccagctgcgtgaccgtagcgccctccacgccctctttttggtctgtgagggagcccgtgagatacagttccagaattgctgggggcttgaagatgatatgtttgccttggctggcctatgcaggagagtaaaaatcctgttgttagaagggtgctcactattaacaactcgaggtctagaatcggtgataacctcatggggcgacctccagagtctagaagttgttacctgcaacaaaatcaaggatgaggaaataactcctacccttgcagagcttttctccaatctcaaagagctgaagtggcggcccgacaacaagtcacttcttgctgcaagcctcgttggcactgggatgggaaagaagggcagggtatttttcaaaaggcttatcttacctgcccatcaacgaatcaaagggaaggtgctcaacaattcagcaggtgttgctgcttagttggattgctagtcgaaactaggctaccgcacaaagttcctagttcttgacttgatcaaagtcaaccacgtttcttgatactcaaaagccgtacacaatgtggcatctgttcttccacttaagaccaaggacagtcataactagtcagaacctggtagtttgatgatgcacagtttcgggtaccaggcgcctgatttgtgtttgtacctgtgttcatgtgttgtaactgacaagctgaggtttgctcagaggagcctgaccgtagtatttctgtatgaggaaaagcattgcttcataaattatggcagagttaaattatggacaaaaaaaaaaaaaaaa

SEQ ID NO: 722 - protein, 502 aa, Zea mays
  misc_feature: Ceres CLONE ID no. 352158
  misc_feature: Ceres CDNA ID no. 40041188
  misc_feature (209)..(233): Pfam Name: LRR_1 PFAM Desc: Leucine Rich Repeat
  misc_feature: Homolog of GI Number: 50911471 NR Desc: F
  misc_feature: Homolog of GI Number: 42568460 NR Desc: F
  misc_feature: Homolog of GI Number: 67985322 NR Desc: Prolyl
  misc_feature: Homolog of GI Number: 72547023 NR Desc: proteophosphoglycan ppg4
  misc_feature: Homolog of GI Number: 72547036 NR Desc: proteophosphoglycan 5
  misc_feature: Homolog of GI Number: 67987177 NR Desc: 4Fe
  misc_feature: Homolog of GI Number: 67986009 NR Desc: Recombination protein O
  misc_feature: Homolog of GI Number: 12018147 NR Desc: vegetative cell wall protein gp1
  misc_feature: Homolog of GI Number: 67987629 NR Desc: Thymidylate kinase
  misc_feature: Homolog of GI Number: 72547041 NR Desc: proteophosphoglycan ppg1
MPEPGGRCLGDLGGQRQVLKGWPDLWLVGDKPGLRALSTAAMAAAPQPPPLEADQTLALPDVLLLRVLACLPEPQLTGAASLVCRRWTRLAGRLRRRLAVRDWAFVAHRLPYRFPDLADLDLFPASIAAPTTAVPHGAAASPLLTCGVVSLTLDTSADPPLGACRFIDDDALDRGLAAVAASFPNLSRLSATAASESGGLMAIAVGCPTLQELELHRCTDLALRPVSAFAHLQILRIVAASPALYGTAEGGGVTDIGLTILAHGCKRLVKLELQGCEGSYDGIAAVGRCCAMLEELTIADHRMDGGWLAALAFCGNLKTLRLQSCSRIDDDPGPAEHLGACLTLESLQLHRCQLRDRSALHALFLVCEGAREIQFQNCWGLEDDMFALAGLCRRVKILLLEGCSLLTTRGLESVITSWGDLQSLEVVTCNKIKDEEITPTLAELFSNLKELKWRPDNKSLLAASLVGTGMGKKGRVFFKRLILPAHQRIKGKVLNNSAGVAA

SEQ ID NO: 723 - DNA, 760 bp, Zea mays
  misc_feature: Ceres CLONE ID no. 352541
  misc_feature: Ceres CDNA ID no. 25446057
  CDS (110)..(547): REFERENCED BY SEQ ID NO: 724
agagccgcagcagcacactcccgcagtagcagcagccgccgccgccgccgcccagccgcaggaaacaggaggaagatgccggcggggcacgggcttcggtcgcggcaggatggcggcttctactgcgaggacggtgaaggatgtgaacccccacgagtttgtcaaggcctactccgcccatctcaaacgctccggcaagatggagcttcctgagtgggttgacattgtgaagactgcgaggttcaaggagctccctccttatgaccctgactggtactacatcagggctgcatctgtagcaaggaagatctacttgagacaaggcattggtgttggtggcttccagaagatttatggtggccgccagaggaatggctcacgcccacctcacttctgcaagagcagtggtgccatttcacgcaacatcctccagcagctgcaggagatgggcatcattgatgtcgatcccaagggtggacggcgcatcacctcccagggaaggcgtgatctggaccaggtggctggaagggttgctgttgaagcttgagcaatctcatatttggtttctatgatgtcatgtttgattgttgagatggctacactttatttgcactttggattaggatttttgtgttaagagaactcaaggcattctagctatggttcacactgtattttccctgagtacctatttatcaaaacctattcgtatgtttgggaagtgtctgagctgatattcatgacaaaaaaaaaaaaaaaa

SEQ ID NO: 724 - protein, 145 aa, Zea mays
  misc_feature: Ceres CLONE ID no. 352541
  misc_feature: Ceres CDNA ID no. 25446057
  misc_feature (7)..(145): Pfam Name: Ribosomal_S19e PFAM Desc: Ribosomal protein S19e
  misc_feature: Homolog of GI Number: 50916719 NR Desc: putative ribosomal protein S19
  misc_feature: Homolog of GI Number: 57164476 NR Desc: putative ribosomal protein S19
  misc_feature: Homolog of GI Number: 57164477 NR Desc: putative ribosomal protein S19
  misc_feature: Homolog of GI Number: 57164480 NR Desc: putative ribosomal protein S19
  misc_feature: Homolog of GI Number: 82623403 NR Desc: 40S ribosomal protein S19
  misc_feature: Homolog of GI Number: 6513924 NR Desc: putative 40S ribosomal protein S19
  misc_feature: Homolog of GI Number: 21554401 NR Desc: 40S ribosomal protein S19
  misc_feature: Homolog of GI Number: 34365671 NR Desc: At5g61170
  misc_feature: Homolog of GI Number: 74231114 NR Desc: 40S ribosomal protein S19
  misc_feature: Homolog of GI Number: 74231106 NR Desc: 40S ribosomal protein S19
MAASTARTVKDVNPHEFVKAYSAHLKRSGKMELPEWVDIVKTARFKELPPYDPDWYYIRAASVARKIYLRQGIGVGGFQKIYGGRQRNGSRPPHFCKSSGAISRNILQQLQEMGIIDVDPKGGRRITSQGRRDLDQVAGRVAVEA

SEQ ID NO: 725 - DNA, 619 bp, Zea mays
  misc_feature: Ceres CLONE ID no. 353029
  misc_feature: Ceres CDNA ID no. 25446665
  CDS (62)..(529): REFERENCED BY SEQ ID NO: 726
atagttccatggcctgttttcagcggcacgcgccgtcttatctctcgcttgctcctcagggatggcggacgggagcctctacgcctggtggtgctgtgccttgggctgggcgctggcgcttgtcgcagcggacggcttcctcgtggacatcacctatgtggaaagcgccgtggccaaaggagcagtgtgtttggatggtagtgcgccggcgtaccatctcgcccgcggctccggctccggtgagaacagctggctggtccatttcgaggggggaggatggtgcaacaatgtcaccacctgcctgcaacggaagcgcactcggttgggttcgtccaaggagatggcgacgcagattgccttctccggaatcctgagtgacacgccggatgacaacccagatttttacaattggaacaaggtcaaggttcggtactgtgatggttcatcttattgtaagttttggagtttgttgttgcacacgcaacgatggaccgcctgtgatatctttaataaatgtaaccgcagataataatgaaataaaaagaacgcatggctattgtattattaaaaaaaaaaaaaaaaaaaaaaaaaaaaaaaaaaaaaaaaaaaaaaaaaaaaa

SEQ ID NO: 726 - protein, 155 aa, Zea mays
  misc_feature: Ceres CLONE ID no. 353029
  misc_feature: Ceres CDNA ID no. 25446665
  misc_feature (12)..(152): Pfam Name: PAE PFAM Desc: Pectinacetylesterase
  misc_feature: Homolog of GI Number: 50911861 NR Desc: putative pectin acetylesterase
  misc_feature: Homolog of GI Number: 1431629 NR Desc: pectinacetylesterase precursor
  misc_feature: Homolog of GI Number: 52421285 NR Desc: At4g19420
  misc_feature: Homolog of GI Number: 42572957 NR Desc: pectinacetylesterase family protein
  misc_feature: Homolog of GI Number: 21593445 NR Desc: pectin acetylesterase
  misc_feature: Homolog of GI Number: 10176999 NR Desc: pectin acetylesterase
  misc_feature: Homolog of GI Number: 23297554 NR Desc: putative pectin acetylesterase
  misc_feature: Homolog of GI Number: 51963586 NR Desc: PREDICTED P0455H11.118
  misc_feature: Homolog of GI Number: 34913332 NR Desc: putative pectinacetylesterase precursor
  misc_feature: Homolog of GI Number: 62321403 NR Desc: putative pectinacetylesterase protein
MADGSLYAWWCCALGWALALVAADGFLVDITYVESAVAKGAVCLDGSAPAYHLARGSGSGENSWLVHFEGGGWCNNVTTCLQRKRTRLGSSKEMATQIAFSGILSDTPDDNPDFYNWNKVKVRYCDGSSYCKFWSLLLHTQRWTACDIFNKCNRR

SEQ ID NO: 727 - DNA, 1432 bp, Zea mays
  misc_feature: Ceres CLONE ID no. 353400
  misc_feature: Ceres CDNA ID no. 25445474
  CDS (136)..(1149): REFERENCED BY SEQ ID NO: 728
cagaacagagtctacggcgccgccgtcgcacgacaggagagggagagggagagagacgcgggctttgacttgccgccggtgcgtccgtgcgtgcctggtgggaggagtgggagacgccggtacagtacaggagccatggcgccgagctgctacgacgcggcagcgtccatgctcctctgcgccgaggagcacagcagcatcctgtggtacgacgaggaggaggaggagctggaggcggtcgggagaaggagaggccagtcgccgggctacggggacgacttcggcgcggacttgttcccgccgcagtcggaggaatgcgtggccggtctggtggagcgggaacgggaccacatgccggggccgtgctacggcgacaggctgcgcggcggcggcggctgtctctgcgtccgccgggaggccgtcgactggatttggaaggcttacacgcaccacaggttccgccctctcactgcctacttggcagtgaactacctcgatcgcttcctctcgctgtctgaggtgccggactgcaaggactggatgacgcagctcctcgcggtggcgtgcgtttctctggccgccaagatggaggaaaccgccgtcccgcagtgcctggaccttcaggaggtcggagacgcgcggtacgtgttcgaggcgaagacggtccagaggatggagctcctggttctaacaaccctcaactggaggatgcatgccgtgacgccgttctcctacgtggattacttcctgaacaagctcaacaacggcggcagcacggcgccgaggagctgctggctcttgcagtccgcggagcttatcttgcgtgcggccagaggaaccggctgcgtcgggttcaggccgtccgagatcgccgccgcggttgcagccgccgtggccggagacgtggacgacgcggacggcgtcgagaacgcctgctgcgctcacgtagataaggagcgggtgttgcggtgccaggaagcgatcgggtccatggcgtcctcggcggccattgacgacgctaccgtgccaccgaaatctgcgagacgcaggagctcccccgtgcccgtgccgcagagccctgtgggggggaacaccaccttgcacggagagccgaaacctcctccatgcagggatctggatgcctgctaggtttgcttcggagcattacgagcacgcgcataacttggctcgtactgtaaggtgtgcaaactgcacacagcggaggctgtgttatttgtattctgaagctttcttgtgtttcgtcaagaaagcttctctaacttttatcctgcactatcagataaacggtaaattgatagagaataagatgttttcgagctcatgtttagtggcaaacgctttatatttttggcaagctgtgaaggagctgaaccagtgacaactcgaagaatccaaaaaaaaaaaaaaaaaa

SEQ ID NO: 728 - protein, 337 aa, Zea mays
  misc_feature: Ceres CLONE ID no. 353400
  misc_feature: Ceres CDNA ID no. 25445474
  misc_feature (60)..(193): Pfam Name: Cyclin_N PFAM Desc: Cyclin
  misc_feature: Homolog of GI Number: 19070615 NR Desc: D
  misc_feature: Homolog of GI Number: 50946891 NR Desc: putative D
  misc_feature: Homolog of GI Number: 54043089 NR Desc: D
  misc_feature: Homolog of GI Number: 50900280 NR Desc: cyclin
  misc_feature: Homolog of GI Number: 19070611 NR Desc: D
  misc_feature: Homolog of GI Number: 33324661 NR Desc: cyclin D2
  misc_feature: Homolog of GI Number: 78217447 NR Desc: D
  misc_feature: Homolog of GI Number: 4160298 NR Desc: cyclin D2.1 protein
  misc_feature: Homolog of GI Number: 42362309 NR Desc: cyclin d2
  misc_feature: Homolog of GI Number: 1770190 NR Desc: cyclin
MAPSCYDAAASMLLCAEEHSSILWYDEEEEELEAVGRRRGQSPGYGDDFGADLFPPQSEECVAGLVERERDHMPGPCYGDRLRGGGGCLCVRREAVDWIWKAYTHHRFRPLTAYLAVNYLDRFLSLSEVPDCKDWMTQLLAVACVSLAAKMEETAVPQCLDLQEVGDARYVFEAKTVQRMELLVLTTLNWRMHAVTPFSYVDYFLNKLNNGGSTAPRSCWLLQSAELILRAARGTGCVGFRPSEIAAAVAAAVAGDVDDADGVENACCAHVDKERVLRCQEAIGSMASSAAIDDATVPPKSARRRSSPVPVPQSPVGGNTTLHGEPKPPPCRDLDAC

SEQ ID NO: 729 - DNA, 1365 bp, Zea mays
  misc_feature: Ceres CLONE ID no. 353773
  misc_feature: Ceres CDNA ID no. 40350929
  CDS (70)..(846): REFERENCED BY SEQ ID NO: 730
acacccgcatctgcttcattccacccgccccgcgaggagcttctagaagagggagaccccggaggagccatggcggaggaaaaggagtcgacgtcgatcccgctcagccaggcggcagaggctgtcgaccccgaggacccggccaagtcgccgccgcggcccagctcgcccaccacctccacacgcaaggcatgctgtgctgttcttcaaagttgggtctcaagaaagtttatgactggatgtgtagtcctttttcctgttgcagtcacgttcttcatcacatggtggtttattcaatttgttgatgggtttttcagtcccctatatgcaaaaattggaatcgacatatttggtcttggttttttgacttctatggtattcatatttctggttggaatatttgtttcttcatgggttggttcaaccatcttctgggtgggcgagtggtttataaagaaaatgccatttgtaagacatatatattcagcatcaaagcaagtcagcactgcaatttcaccagatcaaaatacgactgctttcaaagaagttgcaataattcgtcatccacgaattggtgaatatgcatttggattcataacatcaactgtggtccttcagactgacaaaggcgatgaagaactgtgtagtgtgtatgtgccaacaaatcatctatacatcggtgacatatttctggtgaactctgaggagatcataagacctaatttatccattcgagaaggaattgaaataattgtgtcaggaggaatgaccatgcctcaggtgattgcatcactggagcccatgccacggaaaagccagaacattcgtctaaatagaatgacgtgatgtaaaacatgtcacatatgcaacaaggtcgtgcatcaagcagatagcatgacctgtggggcacgattagggtgccttggctatatgcgtagccatgtgatttggatagaggaacaactttgtgctgagccattgtggcatttccatactgcagggaagcatcgtgttgatgccctgggataatttattgtcttaggctagtttggcaaccccatttttacaggggattcctattttttcaagaaaatatagtttattttcccttaaaaaatagaaatctctttaaaaaatggagttgccaaactaatcagtaaattgaaggggatcatgggcttcaattcactggtcaccaaaccagccctcaaacttgtgctactctttgtgcacttactagtactggttcaaaatgttagcgtctacgcgtgaggtgtataattgattaaattcgtttgtaactacgtgctgtataacatcttacgttacaaagagatcacacaacgctcaaaaaaaaaaaaaaaa

SEQ ID NO: 730 - protein, 258 aa, Zea mays
  misc_feature: Ceres CLONE ID no. 353773
  misc_feature: Ceres CDNA ID no. 40350929
MAEEKESTSIPLSQAAEAVDPEDPAKSPPRPSSPTTSTRKACCAVLQSWVSRKFMTGCVVLFPVAVTFFITWWFIQFVDGFFSPLYAKIGIDIFGLGFLTSMVFIFLVGIFVSSWVGSTIFWVGEWFIKKMPFVRHIYSASKQVSTAISPDQNTTAFKEVAIIRHPRIGEYAFGFITSTVVLQTDKGDEELCSVYVPTNHLYIGDIFLVNSEEIIRPNLSIREGIEIIVSGGMTMPQVIASLEPMPRKSQNIRLNRMT

SEQ ID NO: 731 - DNA, 838 bp, Zea mays
  misc_feature: Ceres CLONE ID no. 354097
  misc_feature: Ceres CDNA ID no. 40350930
  CDS (2)..(691): REFERENCED BY SEQ ID NO: 732
acccgcttcccctctcctcccgacgccgtctccctccctccctccgcctccgccgtcgccgccgggacacgcgaagcttccagatctccccgacgaggaggaagtctctacagcggaggggagggagatgtcgtacatgcggggtgacctgctgacgaggatgcggaagctggtgaagggcctcgccaggcccgagccccggtggctcaaggccttggaacgggctccgccagtgacatttcctcgcccagaggggaagatcaagactctggtgcttcctgaggatgtgtatgtcacgaagttcaacagaatacatccagattcgctttaccatgatgcaatcaagataagtggatttgatccaccgccagctcgagtgtttgcttggcgtgtcctggagttgaaagagcaaggagtcgatgaagatgttgcaatggctgtagcagataacgagtaccggacagagaagaaggcaaagaagaaagcgtacaaggagctgaaagaaatcgcccgcagtgaagggaggaagccacctccgaatccatacccgagtgccataaaggaaatacaagcggaggaaaagaagtatgtcatggaccgtttgcataacccgaaggtaatcgagattgcgaacaagatgaaggaggagcgagacaggatgttgagggatagagcagcaggtcagcggtagtcgtagcagcaggtaatgtttggactggccgactgggtgttgttgttcacgacatgggccaactggcgtcataaataatggttgttggagattgatatggcaaatatgaaactcttgtttttgttattcgcaaaaaaaaaaaaaaaa

SEQ ID NO: 732 - protein, 187 aa, Zea mays
  misc_feature: Ceres CLONE ID no. 354097
  misc_feature: Ceres CDNA ID no. 40350930
MSYMRGDLLTRMRKLVKGLARPEPRWLKALERAPPVTFPRPEGKIKTLVLPEDVYVTKFNRIHPDSLYHDAIKISGFDPPPARVFAWRVLELKEQGVDEDVAMAVADNEYRTEKKAKKKAYKELKEIARSEGRKPPPNPYPSAIKEIQAEEKKYVMDRLHNPKVIEIANKMKEERDRMLRDRAAGQR

SEQ ID NO: 733 - DNA, 1459 bp, Zea mays
  misc_feature: Ceres CLONE ID no. 354208
  misc_feature: Ceres CDNA ID no. 25446831
  CDS (137)..(1204): REFERENCED BY SEQ ID NO: 734
aaaaaaattttaccctcgcgtcccgtccctttcctttgttcctccagcctagtagtttcttgctctgcagttcgccagttttgggctcctgatcgatcgaatcgtcgtcctggtggctcccatacagccggaccgcatggctgggcagcgctgggtcggtaaagtggcggctgctgctgttgtggcgctcttgctcctgtcgaccgctcttcccggaggagcacggagagaacccgatgtcaacaacaatggacggagttttgtttttaactatactctggccaaggctgttgtggaatatgctgcagctgtatatatgacagatctgacggctctatacacatggacatgctcaagatgcaatgacttgactcgaggctttgagatgacttgtataattgttgatgtccagaattgcttgcaggcattcgtcggtgttgatcacaatctcaatgctatcattgtttccattagggggactcaagagaacagcatacagaattggattaaggacctgatatggaagcaggttaaacttaattatccaaacatgcccaatgctaaggtccacattgggttttactcttcttacaataatacagttttacgtccagccatcacgaatgctgttcgcaaggcaaggaagctacatggacacagtgacgtaattgtaacagggcattcgatgggtggagcactagcttctttttgtgctcttgatcttgcaatgagctttggaagtaacaatgttcatctgatgacttttgggcaaccacgcgttggcaatgctgcatttgcctcctactttgcccagtatgtgccatacacagtccgaatgacacatgaacgtgatattgtacctcatctgccgccttatttcttcttcctcccaaaactgacatacaagcacttccccagagaggtgtgggaacatgaagtcgatggcaacacaacctatcaagtctgtgatggcagcggtgaagacccaaactgttgcaggagtgtgtttgcgctgttctggagcgcttctgaccatttgacctacatgggagttgagatagcggccgacgactggagcacctgcaggatcgtccttgggcgaggcgtcgagcagctcaaagggagtcttcccaacaacattgttacgtccggacgctccgtcgacgttgtcatcgcagatgatgatacacttcagattgattgacgcagttcagggtagtcgttggtagtcatgcatatagctagaagataagctgttggctgtttgtgcatgcttcagagcaaattaaagggctttcttccttttttgcctgtggttctttcagccatatgtactatgcagcttgtgaatgtaaagctgtacggaaggtgacatgtttctagcttcgtatatagttggagctcaatatagccaagctggtactcactccgttatttttttttaaaaaaaaaaaaaaaa

SEQ ID NO: 734 - protein, 355 aa, Zea mays
  misc_feature: Ceres CLONE ID no. 354208
  misc_feature: Ceres CDNA ID no. 25446831
  misc_feature (109)..(249): Pfam Name: Lipase_3 PFAM Desc: Lipase
  misc_feature: Homolog of GI Number: 51963632 NR Desc: PREDICTED P0625E02.103 gene product
  misc_feature: Homolog of GI Number: 50939829 NR Desc: putative triacylglycerol lipase
  misc_feature: Homolog of GI Number: 21425571 NR Desc: triacylglycerol lipase
  misc_feature: Homolog of GI Number: 21425569 NR Desc: triacylglycerol Lipase
  misc_feature: Homolog of GI Number: 15238889 NR Desc: lipase class 3 family protein
  misc_feature: Homolog of GI Number: 50198977 NR Desc: At5g18630
  misc_feature: Homolog of GI Number: 23397205 NR Desc: putative triacylglycerol lipase
  misc_feature: Homolog of GI Number: 77552336 NR Desc: triacylglycerol lipase
  misc_feature: Homolog of GI Number: 50931235 NR Desc: 'putative triglyceride lipase
  misc_feature: Homolog of GI Number: 42573417 NR Desc: lipase class 3 family protein
MAGQRWVGKVAAAAVVALLLLSTALPGGARREPDVNNNGRSFVFNYTLAKAVVEYAAAVYMTDLTALYTWTCSRCNDLTRGFEMTCIIVDVQNCLQAFVGVDHNLNAIIVSIRGTQENSIQNWIKDLIWKQVKLNYPNMPNAKVHIGFYSSYNNTVLRPAITNAVRKARKLHGHSDVIVTGHSMGGALASFCALDLAMSFGSNNVHLMTFGQPRVGNAAFASYFAQYVPYTVRMTHERDIVPHLPPYFFFLPKLTYKHFPREVWEHEVDGNTTYQVCDGSGEDPNCCRSVFALFWSASDHLTYMGVEIAADDWSTCRIVLGRGVEQLKGSLPNNIVTSGRSVDVVIADDDTLQID

SEQ ID NO: 735 - DNA, 947 bp, Zea mays
  misc_feature: Ceres CLONE ID no. 354826
  misc_feature: Ceres CDNA ID no. 36587304
  CDS (105)..(848): REFERENCED BY SEQ ID NO: 736
aaaaaaacccgatccccaaccgcccggcccgacattccctccaaccgccgctgcggctgcgccgcccaccgccgacaggcgcagcagtcaacaggaaccgagccatggcgagcgcggatctgctgcggagggaggaggagttctactcctccctgtttgattccgccaaaggcgatggcgccaggtcgcgctcacagctgatcgagaggaagatcgaggccctggaggacatggccaccagggtcagtaaccggagatcgcggaagtggtttaacgaccgtttgctgattgaactcgtcccgcgtctttacgttgaagagatcaaaggcctattcgctcctccgccgtggggtgagcaagtgcccttgtcagcattctacagggcaaatgttggtgaatgggattccttcaggagcattgacatggatgctgaggcaagattgatgcagcatatgaaaaaatcattggaaaaacccaggaatcatgtcgatgaaggggaatcgattgcgctgaatgcttggcatcgaatagatcgacacactagagaagcaataaagagaaatttccttcctgatctgcttggaatatatgaagaacgcgttagggccttcattgaagacgctagtgacaaagatgctcttgtgctgaatgttcaggacccatttcagagactactgctccacggtgtttgtgagttctacaacgtgagctcgacaaccaccagcagtgtgagagaagatgggaggccttggaaggcaaccaccatcaagaagaggcagggcaccggcgttccctctagaatcacactagttagctttctgagaatgaagaagaatggatcgcagtaacgttagttagcgttcaagaatacaacaaaattgctttagattccgtttaggctgttgcaagacaagtgagtggtcactgacaaaaaaaaaaaaaaaaaa

SEQ ID NO: 736 - protein, 247 aa, Zea mays
  misc_feature: Ceres CLONE ID no. 354826
  misc_feature: Ceres CDNA ID no. 36587304
MASADLLRREEEFYSSLFDSAKGDGARSRSQLIERKIEALEDMATRVSNRRSRKWFNDRLLIELVPRLYVEEIKGLFAPPPWGEQVPLSAFYRANVGEWDSFRSIDMDAEARLMQHMKKSLEKPRNHVDEGESIALNAWHRIDRHTREAIKRNFLPDLLGIYEERVRAFIEDASDKDALVLNVQDPFQRLLLHGVCEFYNVSSTTTSSVREDGRPWKATTIKKRQGTGVPSRITLVSFLRMKKNGSQ

SEQ ID NO: 737 - DNA, 930 bp, Zea mays
  misc_feature: Ceres CLONE ID no. 354831
  misc_feature: Ceres CDNA ID no. 40350931
  CDS (74)..(811): REFERENCED BY SEQ ID NO: 738
gtacgctctgccgcgccaagctccgcctccatccgcgcggatctgagtttgtgctgtctggctctctgcgcagatgtcggctgcagaggcgaaggcggcggcggtcccggagtctgtgctgcggaagcgcaagcgggaggagcaatgggcagcggacaagaaggagaaggcgctcgcggacaggaagaaggcgctcgagagccgcaagatcatcttcgcccgcgccaagcagtacgccgaggagtaccacgcccaggagaaggagcttgtgcagctcaagcgtgaggcccggttgaagggtgggttctatgtgagcccagaggccaagcttctgtttgtggttcgcatccgtggtatcaatgccatgcaccccaagacccgcaagatcttgcagctcctgcgattgaggcagatcttcaacggtgtcttcctcaaggttaacaaggcaaccattaacatgctgcgcagggtggagccatatgttgcgtacggataccccaacctgaagagcgttagggagttgatctacaagagaggttacgggaagctgaacaagcagaggattccacttagcaacaacagtgtcatcgaggagggcctcgggaagcacaatatcatctgcattgaggaccttgtccacgagatcatgacggtgggcccgcacttcaaggaggccaacaacttcctctggccgttcaagctgaaggcacccctcggcggcctcaagaagaagaggaaccactacgtggagggcggtgacgccggaaaccgtgagaactacatcaacgagctcatcaagaggatgaactaggttctctcttgtatcctgtgagaatgcttttctgtgtcagcgtggttgtttttgctctagtaagttgacggataatgatggatatgcaattttttttggtgtcaaaaaaaaaaaaaaaa

SEQ ID NO: 738 - protein, 245 aa, Zea mays
  misc_feature: Ceres CLONE ID no. 354831
  misc_feature: Ceres CDNA ID no. 40350931
  misc_feature (14)..(84): Pfam Name: Ribosomal_L30_N PFAM Desc: Ribosomal L30 N
  misc_feature (85)..(137): Pfam Name: Ribosomal_L30 PFAM Desc: Ribosomal protein L30p/L7e
MSAAEAKAAAVPESVLRKRKREEQWAADKKEKALADRKKALESRKIIFARAKQYAEEYHAQEKELVQLKREARLKGGFYVSPEAKLLFVVRIRGINAMHPKTRKILQLLRLRQIFNGVFLKVNKATINMLRRVEPYVAYGYPNLKSVRELIYKRGYGKLNKQRIPLSNNSVIEEGLGKHNIICIEDLVHEIMTVGPHFKEANNFLWPFKLKAPLGGLKKKRNHYVEGGDAGNRENYINELIKRMN

SEQ ID NO: 739 - DNA, 676 bp, Zea mays
  misc_feature: Ceres CLONE ID no. 355026
  misc_feature: Ceres CDNA ID no. 35383170
  CDS (332)..(613): REFERENCED BY SEQ ID NO: 740
agtctcctctagccgtctcgcgcgcttcaccttccccaccccgccgccgccatcgcacgcccgcagccgcatccgctatgggtgcgtacaagtacgtctcggagctatggcggaggaagcagtccgatgtgatgcggttcgtgcagcgcgtgcgctgctgggagtacaggcagcagccggccatcgtccgcctcacaaggcccactcgccctgacaaggcgcgccgcctcggctacaaggccaagcagggttatgttgtttaccgttaacgaggcccagtcccgcggcggccgtggaggcggcggtggcggatacggtggcgggcgccgtgatggaggcggctacggcggtggcggtggaggctacggcggtggtcgtggaggctacggcggcggtgggggatacggtggtgcaaaccgcggcggcggctacggcaacaacgacgggaactggaggaactgagcggtggggtccgctgaggcctagttatcttgttcgcttctgctaccgtgttcaccctagtctagagggggtttatcttcgtctgtggtcgtctcgtgtccgtatgtttcgtttcgtgttcgttgttgttgttgcccatctgtgtttttgaccgcaagctcgctcctctgatgttgttagtgatgtctacaatcgtccaaaaaaaaaaaaaaaa

SEQ ID NO: 740 - protein, 93 aa, Zea mays
  misc_feature: Ceres CLONE ID no. 355026
  misc_feature: Ceres CDNA ID no. 35383170
  misc_feature: Homolog of GI Number: 20257669 NR Desc: glycine
  misc_feature: Homolog of GI Number: 20257673 NR Desc: glycine
  misc_feature: Homolog of GI Number: 20257681 NR Desc: glycine
  misc_feature: Homolog of GI Number: 20257689 NR Desc: glycine
  misc_feature: Homolog of GI Number: 20257695 NR Desc: glycine
  misc_feature: Homolog of GI Number: 20257697 NR Desc: glycine
  misc_feature: Homolog of GI Number: 20257701 NR Desc: glycine
  misc_feature: Homolog of GI Number: 20257707 NR Desc: glycine
  misc_feature: Homolog of GI Number: 20257711 NR Desc: glycine
  misc_feature: Homolog of GI Number: 20257721 NR Desc: glycine
  misc_feature: Useful for sterility
MEAATAVAVEATAVVVEATAAVGDTVVQTAAAATATTTGTGGTERWGPLRPSYLVRFCYRVHPSLEGVYLRLWSSRVRMFRFVFVVVVAHLCF

SEQ ID NO: 741 - DNA, 453 bp, Zea mays
  misc_feature: Ceres CLONE ID no. 355225
  misc_feature: Ceres CDNA ID no. 35383171
  CDS (27)..(263): REFERENCED BY SEQ ID NO: 742
ccggcgaagggtttcggacagagaagatggcgacggcggcggcagggttggctccggcaaaggaggtggtggagaagaaggtggaactcctgaaggagatacgggcgcacgaggtggcgatcgcggagctagacaacctgaatccctcccgagcgtccccatcaccaccggagcgcccaccgccgcctgagtcgtccatctatcctcgcgatcgctccagacatgaacgacccgacctacgaataatgtatctgcgtaattaattactatctgtcttgtgtcctagtagctgttttaaaacccttaattaattttattatgggcgagctagctcaagagtggagtcataaaaccgcatggatggtgaggtattgtatagtacctgtgtaagacaagcttggctggtttttttattttatattttaatctgtttgcgcaaaaaaaaaaaaaaaa

SEQ ID NO: 742 - protein, 78 aa, Zea mays
  misc_feature: Ceres CLONE ID no. 355225
  misc_feature: Ceres CDNA ID no. 35383171
MATAAAGLAPAKEVVEKKVELLKEIRAHEVAIAELDNLNPSRASPSPPERPPPPESSIYPRDRSRHERPDLRIMYLRN

SEQ ID NO: 743 - DNA, 1769 bp, Zea mays
  misc_feature: Ceres CLONE ID no. 355425
  misc_feature: Ceres CDNA ID no. 40041189
  CDS (3)..(1550): REFERENCED BY SEQ ID NO: 744
agtttctgcaattgcttgttttttttcgctgtgttttcagtggagggacatcttctccagcgattcagcgcgggatcctgctggactggcctgatccctccgtgctggtgtcggcgagcatgcaaggaaggatgcgaggcgcgcggcggagcgcgcgcggggaatcgtcccggaaggcggcgggccgcgaggtggagccattcacgctgtgcggcgagatgtcccatctcaccagggccacgtcagagccgtgccgcagggctcgcggcgccgccttcgcccgccgggcgaggcccttctcggcgtacgagctggtgtcggcgcgggaggccggccgcgcgggcggcgccgggttctccgcggccgatcgagcctacctcggcaggcagcacatccccaccaaggggccgtggggcgtcgacgacgtggaaagcgaggcctacgtctcgcagttctccgccgatggctcgttgctcatcgcggggtttcggggaagccgcatcagagtctacgacgccgagaaagggtggaagatccacaaggatataagctgcagaagtgtgcactggacggtttcagatattgctctctcacctgaccaacgattccttgcctatgcaagtctgacacctattgttcacattgtgaatgttcagaatgctggaaaggaatcacatgctaatattactgaaattcatgagggattggatttaaccggtggtgatgaggatgaggactttggaatattttctgttaaattctccaaagatggtaaagaagttgttgttgggaacaatgaaaagtcaatatatgtttatgacctttcagcaaataaagtgtcagcccgcatccgtgctcataaagctgatgtcaatgctgttaccttcgctgatgaaactggaaacgtgttgtactctggaagtgatgatagtctctgtaaggtgtgggacaggcgttgcctttcaggggaaaagtcagcaggtattttgacaggtcatttagatggagttacatttatcgatagccgtggtgatgggcgttatttcatctccaattgcaaggatcagagaatcaaactttgggacatcaggaaaatgtcttccgtcgtgagatctcgcccagtgagtctagtggactgggactataggtggatgccatttccatcagaagctcataatcttaagcatccaggtgatcagtctgtggccacatacagaggccattcagttctgcgaacacttatccgttgctatttctcccctgtgcacagcacgggtcagaggtacatatacacgggatccagtgacaagtctgtacatatttatgacgtggtaaccggggaggctgtcaagaggctttcgtggcatggctccatcatcagagactgcacctggcatccatactacccaacgctcgtcagctcctcctgggacggcttcgttgcccggtgggaggcctcgggcgacgacgacgaccattcggtgctcgtcgccgacgagatgagaggaagcccttactaccggagatacggcgatcccttggtgatgtagagatgtctgcaaagtggttaacaccaaatggtagtgagcatgtactttgctttgttgtttgggaattacaactgagcagcatgtacagtgccgtttggctcatgtggttgtatagccttacgataaataatatgtagggatacagaaagaacacatgagatcgaagcgactttataaatcctatggaatttatagaaacagacaaaaaaaaaaaaaaaa

SEQ ID NO: 744 - protein, 476 aa, Zea mays
  misc_feature: Ceres CLONE ID no. 355425
  misc_feature: Ceres CDNA ID no. 40041189
  misc_feature (360)..(403): Pfam Name: WD40 PFAM Desc: WD domain
  misc_feature: Homolog of GI Number: 2351587 NR Desc: LEC14B homolog
  misc_feature: Homolog of GI Number: 3122326 NR Desc: LEC14B protein
  misc_feature: Homolog of GI Number: 55733926 NR Desc: putative WD
  misc_feature: Homolog of GI Number: 23198298 NR Desc: putative WD
  misc_feature: Homolog of GI Number: 7269787 NR Desc: putative WD
  misc_feature: Homolog of GI Number: 34914962 NR Desc: LEC14B like
  misc_feature: Homolog of GI Number: 73962520 NR Desc:  similar to WD repeat domain 23 isoform 1 isoform 1
  misc_feature: Homolog of GI Number: 73962526 NR Desc:  similar to WD repeat domain 23 isoform 1 isoform 7
  misc_feature: Homolog of GI Number: 73962528 NR Desc:  similar to WD repeat domain 23 isoform 2 isoform 8
  misc_feature: Homolog of GI Number: 12006043 NR Desc: GL014
MQGRMRGARRSARGESSRKAAGREVEPFTLCGEMSHLTRATSEPCRRARGAAFARRARPFSAYELVSAREAGRAGGAGFSAADRAYLGRQHIPTKGPWGVDDVESEAYVSQFSADGSLLIAGFRGSRIRVYDAEKGWKIHKDISCRSVHWTVSDIALSPDQRFLAYASLTPIVHIVNVQNAGKESHANITEIHEGLDLTGGDEDEDFGIFSVKFSKDGKEVVVGNNEKSIYVYDLSANKVSARIRAHKADVNAVTFADETGNVLYSGSDDSLCKVWDRRCLSGEKSAGILTGHLDGVTFIDSRGDGRYFISNCKDQRIKLWDIRKMSSVVRSRPVSLVDWDYRWMPFPSEAHNLKHPGDQSVATYRGHSVLRTLIRCYFSPVHSTGQRYIYTGSSDKSVHIYDVVTGEAVKRLSWHGSIIRDCTWHPYYPTLVSSSWDGFVARWEASGDDDDHSVLVADEMRGSPYYRRYGDPLVM

SEQ ID NO: 745 - DNA, 651 bp, Zea mays
  misc_feature: Ceres CLONE ID no. 355903
  misc_feature: Ceres CDNA ID no. 25446333
  CDS (135)..(344): REFERENCED BY SEQ ID NO: 746
aaaaaaaaatatacaattgtctcgtcctcgtaaccctagacaacccataaggccataccctccaaccgctggatcgggtatcggcattactgggcgcacgagactagggatttcccccttgcaatcacgaatccatggcggatgctgaacctgttgatcagaagaattaccttgaggaacgttgcaagccgcaatgtgtaaaaacattgtatgattatgagaaatgcgtcaagagagtcgagagcgacggaagtgggcagaagcactgcaccggccaatacttcgactactggtcatgcgttgacaagtgtgttgcaccaaagctcttcgacaaactgaaatgataacggaacgcaactttgaaggcgcggctcctttcaggaagtcaaatagctccaataaacccatgccttggcctctggaatttgtttgctgaacctgtggcagggagcctcattttgatacgttttgctgaaccgtctttgttttttttttcccctgaatctgtgtggtatcccaagcgtcgagcccaatttcttttgtataagaataatgaggtgcccataaaaaataggccccaagaagattgttcgaatgtacacaagcaaaacaaatttcctcataattggcaactcaaaaaaaaaaaaaaaa

SEQ ID NO: 746 - protein, 69 aa, Zea mays
  misc_feature: Ceres CLONE ID no. 355903
  misc_feature: Ceres CDNA ID no. 25446333
  misc_feature (7)..(69): Pfam Name: UCR_hinge PFAM Desc: Ubiquinol
  misc_feature: Homolog of GI Number: 62732974 NR Desc: ubiquinol
  misc_feature: Homolog of GI Number: 21554004 NR Desc: putative ubiquinol
  misc_feature: Homolog of GI Number: 15218058 NR Desc: ubiquinol
  misc_feature: Homolog of GI Number: 488712 NR Desc: ubiquinol
  misc_feature: Homolog of GI Number: 5103810 NR Desc: Similar to gbX79273 cytochrome c reductase hinge protein subunit from Solanum tuberosum.
  misc_feature: Homolog of GI Number: 50252217 NR Desc: putative ubiquinol
  misc_feature: Homolog of GI Number: 14532878 NR Desc: putative ubiquinol
  misc_feature: Homolog of GI Number: 68128316 NR Desc: ubiquinol
  misc_feature: Homolog of GI Number: 23509470 NR Desc: ubiquinol
  misc_feature: Homolog of GI Number: 56496460 NR Desc: ubiquinol
MADAEPVDQKNYLEERCKPQCVKTLYDYEKCVKRVESDGSGQKHCTGQYFDYWSCVDKCVAPKLFDKLK

SEQ ID NO: 747 - DNA, 970 bp, Zea mays
  misc_feature: Ceres CLONE ID no. 356913
  misc_feature: Ceres CDNA ID no. 25446334
  CDS (98)..(652): REFERENCED BY SEQ ID NO: 748
aaaaacttgtgcgtgcctgcgtctgcgtcccctccccctgcgctgcacacccacgccacggcgcggcagaggagcagggatcagcgatcgagcgaggatgggcaactgccaggcggcggaggcggcggcggcggtggtgcagcacccgggcggccgcgtccagcgcctgtactgggccaccagcgccgccgaggtcatgcgcgccaacccaggccactacgtggcgctcgtgacgcaccgcgcgggcgccggcgacgaggggaagcggtcccagcagcagcgggagcaggagcagcagaggcacggcgccgcgcgcgtgacgcgcgtgaagctgctcaagccccgggacacgctggtgctcggccaggcgtaccgcctcatcaccgtcgccgaggtcgccaaggcgctgcaggccaagaaggaggagaagacccggaaggcgcagcagcagctgctgctgcaggtagctgagccgaagcacggcggcgggagcacgggctccggcgacgagttgcagccgcaggagcaggtggcggatggctgccttgatcaggagaaggacgggcaacggaggagcagcagcggctcaggcgcggcggcgcatcgccactggcgcccttcgctccacagcatcgccgaagccagcagctagctggtgtgtgtgcgcggcgcgcgcgtggtcggcctcggtcaggcagaggaagggacgaatcggaacaatggaaagcccatgcatgtaatatactaacaacaagtcacagagacgatctggctcaggtcattttggctggcgagaggaaaaagatggatcggactggaagcgccgcggggaaaacaagcggtgcggtgcgctgcactgtttatactcaggcacgagcacgatgcgttgcagcagggggggtgtatgtcagtaatgtatccctttgcaggtatagcttttgagggtcttttgttaaaaaaaaaaaaaaaa

SEQ ID NO: 748 - protein, 184 aa, Zea mays
  misc_feature: Ceres CLONE ID no. 356913
  misc_feature: Ceres CDNA ID no. 25446334
  misc_feature: Homolog of GI Number: 5091546 NR Desc: T10O24.15
  misc_feature: Homolog of GI Number: 66776365 NR Desc: PE
  misc_feature: Homolog of GI Number: 66780099 NR Desc: PE
  misc_feature: Homolog of GI Number: 66778264 NR Desc: LigA
  misc_feature: Homolog of GI Number: 66778899 NR Desc: UvrD/REP helicase
  misc_feature: Homolog of GI Number: 66779656 NR Desc: Insulinase
  misc_feature: Homolog of GI Number: 53769716 NR Desc: COG0454: Histone acetyltransferase HPA2 and related acetyltransferases
  misc_feature: Homolog of GI Number: 34912098 NR Desc: P0671D01.28
MGNCQAAEAAAAVVQHPGGRVQRLYWATSAAEVMRANPGHYVALVTHRAGAGDEGKRSQQQREQEQQRHGAARVTRVKLLKPRDTLVLGQAYRLITVAEVAKALQAKKEEKTRKAQQQLLLQVAEPKHGGGSTGSGDELQPQEQVADGCLDQEKDGQRRSSSGSGAAAHRHWRPSLHSIAEASS

SEQ ID NO: 749 - DNA, 1657 bp, Zea mays
  misc_feature: Ceres CLONE ID no. 358521
  misc_feature: Ceres CDNA ID no. 25446666
  CDS (256)..(1212): REFERENCED BY SEQ ID NO: 750
agcccggcagcaatcgcgtgccgcctttccactcacgtacaccaccaccaccaccacctctcagtctcagcacagcagtcggcccgttcgttcgttgccgcgtcaaatcggggcaagaagccagcagctagccagcccccctgtcgcagtgttgcttcgcgtgccctgctgtcgttgcttgcaccgcgcacgtacgtacctggagcaagctgcggtcgattgatccaccggtggttcgctgtcgctgcggtcggcatgtcgtcctcgtcctcgtcgtcctccgccgccacggtgttcccgccgtccccgcagctgccgccgcctctcctggtggagaacctgccgccgctgcatcagcttacgccgccggtagccgcggccgcgccggcctccgagcagctctgctacgtgcactgccacttctgcgacaccgtcctcgtcgtgagcgtgcctacgagcagcctgttcaagacggtgacggtacgatgcggccactgcagcagcttgctcaccgtcaacatgaggggcctcctcttcccgggcacgccggcgaacacagccgcggccgccgcggccgcgccaccaccaccaccagctgctgtcaccagtactaccgccaccatcaccacggcgccgccgccgccgccagccacctcggtcaacaacaacgggcagttccacttcatcccccactcgctcgacctcgcgctgcccatccctccccaccaatccctcctgctggacgagatatccagcgccgcgaacccgagcctgcagttgctgcagcagcacggcctcggcggcatgatccccagcggcaggaacggggccgcgccgcacccgcccccgccccagccccagccgcctgcggcgggtaaaggggccaaagagccgtcgccgcgcgctaactccgccatcaacagacctccggagaagaggcagcgcgtgccgtcggcgtacaaccgcttcatcaaggacgaaatccaacgcatcaaggctggcaatcccgacatctcgcacagggaggccttcagcgcggcggccaagaactgggcgcactttccacacatccactttggactcatgccagatcaccaggggcccaagaagacaagcctgctacctcaggatcaccagagaagcgacggcggcgggctactaaaggaagggctgtacgctgcggcagccaacatgggggttgctccatactaatataataataatcactcctacgtacgtgctcaagcttataatattagagtagcaaagctgctacgtactgttagggctctatggactactacgaagctatggacgtgtttggtaggctgcatatgggccggccaggctggtaagatacagcgtacgcttgtttggttgcttgtctctgtatctggtgggctgaggggcggtgtttggttgcctgtatgtctgtgctcacctgcactgcgggatgcaacatctcgctgtgagccaggctgtggagaaacgagtttcatttctgtatctcgggagccaggccctggctagcctgtttggagcgggcaggctccactgcgaaacgaaccaaacacgccctatatgtatctagctagctagggctgttacgttaagttagacaaggccgggcttagcgtgacctcataaaaaaaaaaaa

SEQ ID NO: 750 - protein, 318 aa, Zea mays
  misc_feature: Ceres CLONE ID no. 358521
  misc_feature: Ceres CDNA ID no. 25446666
  misc_feature (40)..(93): Pfam Name: YABBY PFAM Desc: YABBY protein
  misc_feature: Homolog of GI Number: 32330681 NR Desc: yabby10 protein
  misc_feature: Homolog of GI Number: 32330679 NR Desc: yabby9 protein
  misc_feature: Homolog of GI Number: 37551421 NR Desc: FIL
  misc_feature: Homolog of GI Number: 32330677 NR Desc: yabby15 protein
  misc_feature: Homolog of GI Number: 50926748 NR Desc: OSJNBb0020O11.2
  misc_feature: Homolog of GI Number: 27363318 NR Desc: At4g00180/F6N15_22
  misc_feature: Homolog of GI Number: 27804377 NR Desc: YABBY transcription factor CDM51
  misc_feature: Homolog of GI Number: 41745624 NR Desc: YABBY
  misc_feature: Homolog of GI Number: 62733410 NR Desc: Putative YABBY protein
  misc_feature: Homolog of GI Number: 41745691 NR Desc: YABBY
  misc_feature: Useful for delaying flowering time
  misc_feature: Useful for delaying senescence
  misc_feature: Useful for increasing chlorophyll and photosynthetic capacity
  misc_feature: Useful for increasing increasing anthocyanin content
  misc_feature: Useful for increasing seed/fruit yield or modifying fruit content
  misc_feature: Useful for increasing seed/fruit yield or modifying fruit content
  misc_feature: Useful for making bigger plants
  misc_feature: Useful for making ornamental plants with modified leaves
  misc_feature: Useful for making plants with altered leaf shape eg curled leaves
  misc_feature: Useful for making plants with altered leaf shape eg curled leaves
MSSSSSSSSAATVFPPSPQLPPPLLVENLPPLHQLTPPVAAAAPASEQLCYVHCHFCDTVLVVSVPTSSLFKTVTVRCGHCSSLLTVNMRGLLFPGTPANTAAAAAAAPPPPPAAVTSTTATITTAPPPPPATSVNNNGQFHFIPHSLDLALPIPPHQSLLLDEISSAANPSLQLLQQHGLGGMIPSGRNGAAPHPPPPQPQPPAAGKGAKEPSPRANSAINRPPEKRQRVPSAYNRFIKDEIQRIKAGNPDISHREAFSAAAKNWAHFPHIHFGLMPDHQGPKKTSLLPQDHQRSDGGGLLKEGLYAAAANMGVAPY

SEQ ID NO: 751 - DNA, 1503 bp, Zea mays
  misc_feature: Ceres CLONE ID no. 358684
  misc_feature: Ceres CDNA ID no. 25446058
  CDS (96)..(1364): REFERENCED BY SEQ ID NO: 752
agcatttcgatcccgacaccccaaaatccctcagccctctggccttggcggcgctcaaaccctcgccgtcccgccgtctccaaaaccctcttaccatggccgccgcgacaaccgcgggggccggagccgcgacgccgcagccgccacggcagtacaagctagctccgcagagcgagctgcgtgtggaggtgctccccgacgcgcccctccgagtgcgcctcgtccccgtccctccccgatccaagatcgccattttcacctggcacggcgcgacggtggaactggacggggtgagcgagagcgagtacacgtctgacgagactccaatggtaatttatgtcaacacgcacgccattctggatgcccgcagggcaagggcgagaaccgccgcagctcaggggggcgataaggaggcctcacagggacctagagtgattgttgtggggccaacagattctggaaaaagtactctctgcaaaatgcttcttagctgggctgccaaactgggctggaagcctacgtatgtcgatttagatattggccagggatctataacgatccctggatgtatttctgctacaccaattgagaaacctatagatataattgatgggattcccttggagatgccactggtatacttctatggtcacccaaatccaagtattaatgcggatgtttacaaagttcttatgaaggagctagctaaaacattggagaaacagttctctggcaatgctgaatctagggcagcgggaatggttatcaatacaatggggtgggttgaaggccttgggtatgagttacttctcaatgcaattgaaaccttcaaggccaatgtagtactggtactgggacaggagaaactctggaagatgttgaaagatgcagttcaaagcaagtccaacattgatgttgtaaaacttcataaatcagagggtgttgtcctcagaaattcaaaatatcggcaaagaacgagaagcttccgaatcaaggaatacttttatgggattgcaaatgatcttgcaccgcactcaaacattgtcaatttcagtgatgtctcggtgtacaaaatcggtggtggccatcaagctccccgttcagcattacctatcggtgcagagcctgtggcagatcctactcgacttgttgctgtcaacatcagcacggatatgatccatacagtgcttgcaatttcctatgctaaggaacctgaagaaataatatctagcaatgttgccggattcattcatgttactgatgttgacatccaaaggaagaagctgacgtacattgcaccttgcccgggggacttgccaagcaggttgttgatcgcgagttcacttacatggtatgaagcatgatcagtctaagttagatgggccataacgcatgttgtaaagccaggacatgtgacgttgggactgagcgttcgatgtctactgctaaccaagagaaacgatgcaaggacaaatatcctgttcgaaaaaaaaaaaaaaaaaa

SEQ ID NO: 752 - protein, 422 aa, Zea mays
  misc_feature: Ceres CLONE ID no. 358684
  misc_feature: Ceres CDNA ID no. 25446058
  misc_feature (148)..(421): Pfam Name: Clp1 PFAM Desc: Pre
  misc_feature: Homolog of GI Number: 50906345 NR Desc: putative ATP/GTP
  misc_feature: Homolog of GI Number: 10176985 NR Desc: ATP/GTP
  misc_feature: Homolog of GI Number: 58377970 NR Desc: ENSANGP00000020766
  misc_feature: Homolog of GI Number: 59709481 NR Desc: ATP/GTP
  misc_feature: Homolog of GI Number: 5803029 NR Desc: ATP/GTP
  misc_feature: Homolog of GI Number: 57012719 NR Desc: Pre
  misc_feature: Homolog of GI Number: 61819707 NR Desc:  similar to Pre
  misc_feature: Homolog of GI Number: 66541960 NR Desc:  similar to ENSANGP00000020766
  misc_feature: Homolog of GI Number: 34856236 NR Desc: similar to ATP/GTP
  misc_feature: Homolog of GI Number: 55635943 NR Desc:  similar to Pre
MAAATTAGAGAATPQPPRQYKLAPQSELRVEVLPDAPLRVRLVPVPPRSKIAIFTWHGATVELDGVSESEYTSDETPMVIYVNTHAILDARRARARTAAAQGGDKEASQGPRVIVVGPTDSGKSTLCKMLLSWAAKLGWKPTYVDLDIGQGSITIPGCISATPIEKPIDIIDGIPLEMPLVYFYGHPNPSINADVYKVLMKELAKTLEKQFSGNAESRAAGMVINTMGWVEGLGYELLLNAIETFKANVVLVLGQEKLWKMLKDAVQSKSNIDVVKLHKSEGVVLRNSKYRQRTRSFRIKEYFYGIANDLAPHSNIVNFSDVSVYKIGGGHQAPRSALPIGAEPVADPTRLVAVNISTDMIHTVLAISYAKEPEEIISSNVAGFIHVTDVDIQRKKLTYIAPCPGDLPSRLLIASSLTWYEA

SEQ ID NO: 753 - DNA, 1124 bp, Zea mays
  misc_feature: Ceres CLONE ID no. 359192
  misc_feature: Ceres CDNA ID no. 40350932
  CDS (2)..(787): REFERENCED BY SEQ ID NO: 754
ctcccgcagagcagccgacaactctctaccatccgagaccccaagcaccagcgcggcggcggcggcggattgcggggtgtgcgccatctgcctcgacaggatagcgctccaggagacggccctcgtcaagggttgcgaccacgcctactgtgtgacctgtattttgaggtgggcatcctacaaggagaaccctctctgcccacagtgcaagcatccattcgaattcctcagcgtgcaccgctctctcgacggctgcctacatgactacctgtttgaggagagtgtttgcctccttctgagggcagcttggtttgaacctctgatcgtagaggctcacgaggaggctctggaagaagaagagtttctccaccagcagtaccaatacgatgatgacgaagatgatcttgacgaggaatcttattacatgaacaggtccccaagcatccgtattggtaacaggagatggggtgacaatgggtacatcaggggaggcaggaaagaggcgaggccagtgaatactgatgtggctgctggtccatccaggactccgaagaagaaagagaaagccgcatcctcttcggcgtcggtgtcagtgtctggttcggggtcaggatcggggtctgtatccaaggatgtcgctggaaggcgggcgaagagggcgcagaagcgagaagctgcagacaaggcagctgcagagaagcacctgaagcacctgcagaggttggggctgagaaaatcgccagagcctgtagtgcccgaggaggttgggccacaggtgaatgagtgacttaagccgccgcctagtgctatatggtgctgctaaaaacactgcagccctttgggccacaaaataatcttccactgtgaagagcttgagcgtggccttgtatcatggcagcttttcgcctcgttgtacatagtctagtttctcatcactgttttagattcagcacagaaatgcagctgctgtctgcacgactgttgcagctatgaagctgtatgtacctcactgttggtgcactattttagttattgctaatcacaggggatgcaatcggcatctgtgttgattactatggggacaaatgaggcgtggaaccaattctacaaaaaaaaaaaaaaaa

SEQ ID NO: 754 - protein, 120 aa, Zea mays
  misc_feature: Ceres CLONE ID no. 359192
  misc_feature: Ceres CDNA ID no. 40350932
MNRSPSIRIGNRRWGDNGYIRGGRKEARPVNTDVAAGPSRTPKKKEKAASSSASVSVSGSGSGSGSVSKDVAGRRAKRAQKREAADKAAAEKHLKHLQRLGLRKSPEPVVPEEVGPQVNE

SEQ ID NO: 755 - DNA, 2080 bp, Zea mays
  misc_feature: Ceres CLONE ID no. 359695
  misc_feature: Ceres CDNA ID no. 40350933
  CDS (284)..(1837): REFERENCED BY SEQ ID NO: 756
gaaaaaccaatccaatccctacctgctcgggaaccacccgtcgggctcctcccgcccccctcgccgcatctgcatgcggcggggatctccgggctcgctccgtcaccggagccccaatcaccgccacctcatccaagcccccgaatcccccggacgcgcagcacaaccttgccgcgatcgcgcgcgggaaccgccgctgattgggtcgtgaaagctcgattttgggcgattttgattcggagaacccgccgtcattcgattttggcgcgcgttgcgagccgggatggggttgcagcagtccaaagaggaactgctgtaccagcaggtcaactacggcaacgtcgacgggattcgcacgctccgggggcaaggcgctggtctcgagtggattgacaaggaagggaagacgcccctgatgcttgcctgtatgcgcccggatctgttcgacgtggccaaggtgctgatcgagttgggagctaatgtgaatgcctacaggcctgggtcacactgtgggacagcattgcaccatgctgccaagaaaggacttcagcagactgtccatttactactctcacatggagctaatccgttcataccaaacgatgattgcaatactgccctcgaattggcaagagaaaagggtcatgtgaatgttgttcgtgccatagagggacggctttgtcttttttgtggatggatgagagagaactatgctcctgcttttttggatgcaattgctccacagttcatgacaagaaaaatttgggctgttgttttaccccgtgaagtgcgaactccaaccaggcctcttaagttagagatagctatatatcctgaattacaggcttctaaaccacgttctgtacttaaactatggaaatgtcaaattgagcaaccaaagcttaatcaggctgacccttccattatcatttttgacaaaggaacaaagactagatacaagatcttaccggcctatgaaggtgacaaacagcagcttcaatggttttataatgcatgttgtggcatggcacaggttttgaacacggctccagtagcaccagcaaatctccctatgccaaatccagcaccggcaatttcatctgtggcgccttcagaacaatctgcacccagcaaggaggatgttgaattagcaatggctatcaatgcctccattcaatcagctattgcagagggagtatcagtgcccaatgttcaaccaaatgcatccacccccaacaacaatggctgggctgcccctccaagtaattctcacaacggatggggaccaccagccactcctgcaccatcaaagacgagcggtcagtcccaggtccgggtagacgccccaagcagcagcacttacaatggatgggatgtgcccggaacaagctctagtcaaagttcatcgaaaccccaccaaacccaaaccaaccctccagtcttgattccacaggaagcacttcaggctctcccaaccccaaccgcgccaccatttgctgaagaaaccttctacaacggtcctgttcactatccatccatagactctacgcctgtcgatgtaaccatgccggctaccactggaggcggtagtacaacagtcatcgcaacggcagcacctacagaacagttagaaaatgaagctgatgcaagtgacagcggcaaaactccctctggtacttgcgttatatgtctggatgcccctgtggaaggcgcctgcatcccgtgcggccacatggctggttgcatgtcctgtttgaaggatatagaatccaagaagtggggatgccctatctgccgtgccacgattaaccaggttgttcgcctctatgctgtttgaggagttgaaacggtgggttcagaaagttggcaatggattggagggttctcgcaacaaatgttgatgggaacgtctctatctcaaaattgtgcaattatgctattttgcacttcgtactgcactacaaatatgacttccgtgtaatgtatgtgggctgacgcctttatgtacataggtagtactatacaagacaattttataaaaatctgggtattgttgcaagttgcaaaaaaaaaaaaaaaa

SEQ ID NO: 756 - protein, 517 aa, Zea mays
  misc_feature: Ceres CLONE ID no. 359695
  misc_feature: Ceres CDNA ID no. 40350933
  misc_feature (466)..(504): Pfam Name: zf PFAM Desc: Zinc finger
  misc_feature (75)..(107): Pfam Name: Ank PFAM Desc: Ankyrin repeat
MGLQQSKEELLYQQVNYGNVDGIRTLRGQGAGLEWIDKEGKTPLMLACMRPDLFDVAKVLIELGANVNAYRPGSHCGTALHHAAKKGLQQTVHLLLSHGANPFIPNDDCNTALELAREKGHVNVVRAIEGRLCLFCGWMRENYAPAFLDAIAPQFMTRKIWAVVLPREVRTPTRPLKLEIAIYPELQASKPRSVLKLWKCQIEQPKLNQADPSIIIFDKGTKTRYKILPAYEGDKQQLQWFYNACCGMAQVLNTAPVAPANLPMPNPAPAISSVAPSEQSAPSKEDVELAMAINASIQSAIAEGVSVPNVQPNASTPNNNGWAAPPSNSHNGWGPPATPAPSKTSGQSQVRVDAPSSSTYNGWDVPGTSSSQSSSKPHQTQTNPPVLIPQEALQALPTPTAPPFAEETFYNGPVHYPSIDSTPVDVTMPATTGGGSTTVIATAAPTEQLENEADASDSGKTPSGTCVICLDAPVEGACIPCGHMAGCMSCLKDIESKKWGCPICRATINQVVRLYAV

SEQ ID NO: 757 - DNA, 725 bp, Zea mays
  misc_feature: Ceres CLONE ID no. 360011
  misc_feature: Ceres CDNA ID no. 25446336
  CDS (112)..(342): REFERENCED BY SEQ ID NO: 758
gcccgttgtgctctctctctctattcgttccccgcctcaccccgagccagccgtctcgctagggtttcgccgccgccgccgccgccgccgccgctatgcctcgggtacgcgatgggcagcgcggcgtcgccctccgcggcgtgctgcagcggggtgcgctcgctcaacagccgcgcgtcgtcggcggcggaccggcaggccacctgcaactgcctcaagagcatgacgggccggctcggcggcggcgtcagcatggccaacgccgccaacatccccggcaagtgcggcgtctccgtcggcgtgcccatcagccccaccgtcgactgcaccaagatcaactgatcgatggaaccatagtggaggtagctcgctcgttggatggcagcgtacgtggccatcagcagcatgcagtcgtcgtcgtagcagagatgtcctagctacgtgtgtgtcatgcatcagactggcacataataaagaagtagatcatgcacccactagtgatcacttcgtctagtgtccctccgttcgctgttgtcgtcgtcgtcgtcgtggtgtacctcgtacgtgacatgccgtagcacgtacgctagcagagcagcacctcaatgtccttgggtttgctttgctggctctctgttttcgtctcgtgttgcttttaatctggcacaggtttctaaattataataatgaatacttttttgtcctacaaaaaaaaaaaaaaaaaa

SEQ ID NO: 758 - protein, 76 aa, Zea mays
  misc_feature: Ceres CLONE ID no. 360011
  misc_feature: Ceres CDNA ID no. 25446336
  misc_feature (2)..(72): Pfam Name: Tryp_alpha_amyl PFAM Desc: Protease inhibitor/seed storage/LTP family
  misc_feature: Homolog of GI Number: 56713111 NR Desc: type 1 non
  misc_feature: Homolog of GI Number: 56713105 NR Desc: type 1 non
  misc_feature: Homolog of GI Number: 25990344 NR Desc: lipid transfer protein
  misc_feature: Homolog of GI Number: 7438278 NR Desc: lipid transfer protein precursor
  misc_feature: Homolog of GI Number: 77548420 NR Desc: nonspecific lipid
  misc_feature: Homolog of GI Number: 510337 NR Desc: lipid transfer protein
  misc_feature: Homolog of GI Number: 7438281 NR Desc: probable lipid transfer protein precursor
  misc_feature: Homolog of GI Number: 77553487 NR Desc: nonspecific lipid
  misc_feature: Homolog of GI Number: 2407273 NR Desc: lipid transfer protein LPT II
  misc_feature: Homolog of GI Number: 31879432 NR Desc: lipid transfer protein
MGSAASPSAACCSGVRSLNSRASSAADRQATCNCLKSMTGRLGGGVSMANAANIPGKCGVSVGVPISPTVDCTKIN

SEQ ID NO: 759 - DNA, 494 bp, Zea mays
  misc_feature: Ceres CLONE ID no. 360141
  misc_feature: Ceres CDNA ID no. 40041190
  CDS (34)..(363): REFERENCED BY SEQ ID NO: 760
aacaaccgagcgaacaggagggagattaccgccatggcgaggagcctgcgtcccgtggtggacctccgcgtcaccaagaatcccgagccggccgaagaccctgcgccatcgcctatcgtctggccgaacgctttggcgccctcgtcctcctcgacacctcctccgtcgcgtccagccatccatcgatccgctgaccgccgggccaccgccgccatggggtttcatcgcgccgctataacacgtcaagagcaggtaccacaggatgaggcgcgtggaggatgctgtgatgagttcgtgagtggtctaggccgtcgtctcccagtcaactttgggttgctggaccgttgtctccttataatgtaattatttattttgtatagaactcctattatatagtaaagatgtgacattcgatccaaaaaaaaaaaaaaaaaaaaaaaaaaaaaaaaaaaaccaaaaaaaaaaaaaaaaaaaaagaaaaaaaaaaaaaaaaa

SEQ ID NO: 760 - protein, 109 aa, Zea mays
  misc_feature: Ceres CLONE ID no. 360141
  misc_feature: Ceres CDNA ID no. 40041190
  misc_feature: Homolog of GI Number: 76156423 NR Desc: SJCHGC01769 protein
MARSLRPVVDLRVTKNPEPAEDPAPSPIVWPNALAPSSSSTPPPSRPAIHRSADRRATAAMGFHRAAITRQEQVPQDEARGGCCDEFVSGLGRRLPVNFGLLDRCLLIM

SEQ ID NO: 761 - DNA, 916 bp, Zea mays
  misc_feature: Ceres CLONE ID no. 360158
  misc_feature: Ceres CDNA ID no. 40350934
  CDS (113)..(625): REFERENCED BY SEQ ID NO: 762
ttattactggaacaaaaagaaaaaaaacacgagaaaaatcaaatcaggagacggggattccagagagccccgttcgggtagggaagggaaggagaggcgaagcggaggcgagatgggggcggccgaatccgtgccggagacctccatacacgaattcaccgtcaaggattgcaacggcaaggaagtgagcctggaaacctacaaggggaaggtcctccttgttgttaacgtcgcctccaaatgtgggttcacggagaccaattacacgcagctgacggagctttatcagaagtacagggacaaagacttcgagatattggcattcccttgcaatcagttcttgcgacaggagccaggtactgatcagcagatacaagactttgcttgcaccagatttaaagctgaatacccagtttttcagaaggtgcgcgtaaacggaccagatgcggcgccggtttacaagtttctgaaagctagcaagcctggtttgtttgggtcatcaaggatcaaatggaactttaccaagtttctggtggacaaagatgggaaggtcatcgagagatacggaacctcgacagctccaatggcaattgagaaggacatccagaaggcccttgaggaataattttttgtgagcttgtctcgtctcatccaccacacacttgcagcagaaataggcacttgctgaaatatttcgtcgtagtaacattcagaccggacgtctttgcttatctgtagtaaaaattctgtgtaatgttaccctccttttcgccttccgttcgtgtaagtagaggttgtattaagtagccatcatctgctagcttttgccctttctgtgtgaagaagtgaagacatggtatattgatgcaaaacttaacgttggtgaagcatgtatgttgtaaaaaaaaaaaaaaaa

SEQ ID NO: 762 - protein, 170 aa, Zea mays
  misc_feature: Ceres CLONE ID no. 360158
  misc_feature: Ceres CDNA ID no. 40350934
  misc_feature: The plant flowers significantly late compared to wild-type.
  misc_feature: Useful for making plants with modulated flowering time
  misc_feature (11)..(120): Pfam Name: GSHPx PFAM Desc: Glutathione peroxidase
MGAAESVPETSIHEFTVKDCNGKEVSLETYKGKVLLVVNVASKCGFTETNYTQLTELYQKYRDKDFEILAFPCNQFLRQEPGTDQQIQDFACTRFKAEYPVFQKVRVNGPDAAPVYKFLKASKPGLFGSSRIKWNFTKFLVDKDGKVIERYGTSTAPMAIEKDIQKALEE

SEQ ID NO: 763 - DNA, 987 bp, Zea mays
  misc_feature: Ceres CLONE ID no. 361163
  misc_feature: Ceres CDNA ID no. 36587398
  CDS (190)..(744): REFERENCED BY SEQ ID NO: 764
gcagtcgcctgtcctgtgtcctccggtcccggacctctgtgccgcactgcccacagcgacagcatcgacatcgccccggtcccgtgtcgcttcgcttcgtagttcgccgccttccccgcgccccagcagcaacggattcccctcccctcgagagatccgacccttggcccggtcgctggggagagcggcatggggctctgggattcgctcctcaactggctgcggagcttgttttttaagcaagaaatggaactctccctggttgggttgcagaatgctgggaagacatcgctggtcaatgctgttgctacaggtggctacagtgaggacatgattccaaccgtaggcttcaatatgcggaaaatcaccaaggggaatgtcacaattaaactttgggatcttggtgggcaacgaagattccgcactatgtgggagcgctactgccgtggagtttctgctattctatatgttgtggacgctgctgaccgagatagcatcccaatagcgaaaagtgaattgcttgatctgctgacaaaacagtctttagctgggattcccttgcttgtccttggcaacaaaattgacaagtcagaagcgctttcgaagcaggcattggttgatcaacttggactggaattgataaaggaccgcgaagtttgttgctacatgatctcctgtaaggattctgtgaacatagacgttgtcatcgactggcttatcaagcactctagaacagcaaagtaggctttatgtgtgtttgtatcacttgatgcatggtaatttgaatttacctttgtgaatcagtactcccagaatcctgatttcttggtccagatgttaaaagcgttcacctcgtaatttatgatccctttggtctcgcagacgaattgtatggtatctagaagaccagaaccttgtatttcctttgcaattcccttgaatttttttattattcttactgtgaatgtcgtgcaaaaaaaaaaaaaa

SEQ ID NO: 764 - protein, 184 aa, Zea mays
  misc_feature: Ceres CLONE ID no. 361163
  misc_feature: Ceres CDNA ID no. 36587398
  misc_feature: null
  misc_feature: Useful for making plants with altered terpenoid content
  misc_feature: Homolog of GI Number: 50912455 NR Desc: putative ADP
  misc_feature: Homolog of GI Number: 21553410 NR Desc: ADP
  misc_feature: Homolog of GI Number: 21593081 NR Desc: ADP
  misc_feature: Homolog of GI Number: 9757978 NR Desc: ADP
  misc_feature: Homolog of GI Number: 21389677 NR Desc: ADP
  misc_feature: Homolog of GI Number: 9757877 NR Desc: ADP
  misc_feature: Homolog of GI Number: 76648606 NR Desc:  similar to ADP
  misc_feature: Homolog of GI Number: 68369362 NR Desc:  similar to ADP
  misc_feature: Homolog of GI Number: 50754608 NR Desc:  similar to ADP
  misc_feature: Homolog of GI Number: 38174393 NR Desc: ADP
MGLWDSLLNWLRSLFFKQEMELSLVGLQNAGKTSLVNAVATGGYSEDMIPTVGFNMRKITKGNVTIKLWDLGGQRRFRTMWERYCRGVSAILYVVDAADRDSIPIAKSELLDLLTKQSLAGIPLLVLGNKIDKSEALSKQALVDQLGLELIKDREVCCYMISCKDSVNIDVVIDWLIKHSRTAK

SEQ ID NO: 765 - DNA, 1019 bp, Zea mays
  misc_feature: Ceres CLONE ID no. 361795
  misc_feature: Ceres CDNA ID no. 40041191
  CDS (102)..(800): REFERENCED BY SEQ ID NO: 766
aaaacactcgcctgctctgcacacacacaccacacacacactgacacacccacacactagttgtatgtgctagagctgcagttaccttggcatcagaggccatgaaactgaaacaggagcaagcagacgacgactgcagcaagatgcagggaggtcgtggcctgatgagcaaccttgagctcaggctgggcatgtcttcagacaatggcgacgccagctgcggcggtgatccgtggcttggcgttggagtgcacccctggagccttgcctccagacaagcagagaaggtagcccaggagcaagaccaccaccagcgttctccgccgcagccggtgggatggccaccggtgggcgcgttccgcaggagccacctgcaggtttcttcgaagaccgtggaggaaccggcgggcaaggtgaagtccggcggcgagaggctggcgccggcggccaccatgttcgtgaaggtcaacatggagggctgcgccgtcgggaggaaggtggacctgctggcgcaccgcgggtacgcgtcgctgtcgcgcgcgctgcaggccatgttccgtggcttcctgtcagatggtgagtggaggatcgttggcagtgaggacgacgccgacgacgacgagcagcagccggagccgacgaagaaggggggcagtaagagcaacaagaaggcgtacattcttctgtacgaggacaacgagggcgaccggatgctcgtcggcgacgtgccgtgggagctgttcatggcttcggtgaagaggctctacatcgcacaggacccaaggaagacgaagaattagctaattaagctagttagggcctggctaggagaaacgttgctggctgccttattatttctacaatagctccaagttgaagcagatagctaagctagcactcccttcttcgatcctgtaatcctgtcgagcatcagttcatatacagcgcgtgtagtcggcatctctagtccaatattaatatataggaaattttgccttggaataaaaaaaaaaaaaaaa

SEQ ID NO: 766 - protein, 232 aa, Zea mays
  misc_feature: Ceres CLONE ID no. 361795
  misc_feature: Ceres CDNA ID no. 40041191
  misc_feature (78)..(152): Pfam Name: AUX_IAA PFAM Desc: AUX/IAA family
  misc_feature: Homolog of GI Number: 51091056 NR Desc: putative auxin
  misc_feature: Homolog of GI Number: 50933087 NR Desc: putative auxin
  misc_feature: Homolog of GI Number: 34906394 NR Desc: P0710E05.9
  misc_feature: Homolog of GI Number: 50906555 NR Desc: putative aux/IAA protein
  misc_feature: Homolog of GI Number: 30410707 NR Desc: auxin
  misc_feature: Homolog of GI Number: 21593333 NR Desc: phytochrome
  misc_feature: Homolog of GI Number: 4093155 NR Desc: phytochrome
  misc_feature: Homolog of GI Number: 2618725 NR Desc: IAA18
  misc_feature: Homolog of GI Number: 32400272 NR Desc: IAA1 protein
  misc_feature: Homolog of GI Number: 15810073 NR Desc: At1g51950/T14L22_14
MKLKQEQADDDCSKMQGGRGLMSNLELRLGMSSDNGDASCGGDPWLGVGVHPWSLASRQAEKVAQEQDHHQRSPPQPVGWPPVGAFRRSHLQVSSKTVEEPAGKVKSGGERLAPAATMFVKVNMEGCAVGRKVDLLAHRGYASLSRALQAMFRGFLSDGEWRIVGSEDDADDDEQQPEPTKKGGSKSNKKAYILLYEDNEGDRMLVGDVPWELFMASVKRLYIAQDPRKTKN

SEQ ID NO: 767 - DNA, 850 bp, Zea mays
  misc_feature: Ceres CLONE ID no. 362145
  misc_feature: Ceres CDNA ID no. 25446059
  CDS (2)..(508): REFERENCED BY SEQ ID NO: 768
gcacaaacgcgtcgcatccgctccacaggatcctctgcgccaccgcaaccgtgtgaccgcccgtgccgccggcgatcccgatccgccgacccgtcccagccccgctcgcagccatgtcgccgtcggcggcggtgagctgcggcgaggtgacgtcgtcggtggcgccgtgcctcgggtacgcgatgggcagcgcggcgtcgccctccgcggcgtgctgcagcggggtgcgctcgctcaacagccgcgcgtcgtcggcggcggaccggcaggccacctgcaactgcctcaagagcatgacgggccggctcggcggcggcgtcagcatggccaacgccgccaacatccccggcaagtgcggcgtctccgtcggcgtgcccatcagccccaccgtcgactgcaccaagatcaactgatcgatggaaccatagtggaggtagctcgctcgttggatggcagcgtacgtggccatcagcagcatgcagtcgtcgtcgtagcagagatgtcctagctacgtgtgtgtcatgcatcagactggcacataataaagaagtagatcatgcacccactagtgatcacttcgtctagtgtccctccgttcgctgttgtcgtcgtcgtcgtcgtggtgtacctcgtacgtgacatgccgtagcacgtacgctagcagagcagcacctcaatgtccttgggtttgctttgctggctctctgttttcgtctcgtgttgcttttaatctggcacaggtttctaaattataataatgaatacttttttgtcctatataaaaaaaaaaaaaaaaaaaaaaaaaaaaaaaaaaaaaaaaaaaaaaaaaaaaaaaaaaaaaaaaaaaaaa

SEQ ID NO: 768 - protein, 99 aa, Zea mays
  misc_feature: Ceres CLONE ID no. 362145
  misc_feature: Ceres CDNA ID no. 25446059
  misc_feature (9)..(95): Pfam Name: Tryp_alpha_amyl PFAM Desc: Protease inhibitor/seed storage/LTP family
  misc_feature: Homolog of GI Number: 25990344 NR Desc: lipid transfer protein
  misc_feature: Homolog of GI Number: 7438278 NR Desc: lipid transfer protein precursor
  misc_feature: Homolog of GI Number: 56713111 NR Desc: type 1 non
  misc_feature: Homolog of GI Number: 56713105 NR Desc: type 1 non
  misc_feature: Homolog of GI Number: 77548420 NR Desc: nonspecific lipid
  misc_feature: Homolog of GI Number: 510337 NR Desc: lipid transfer protein
  misc_feature: Homolog of GI Number: 7438281 NR Desc: probable lipid transfer protein precursor
  misc_feature: Homolog of GI Number: 77553487 NR Desc: nonspecific lipid
  misc_feature: Homolog of GI Number: 2407271 NR Desc: lipid transfer protein
  misc_feature: Homolog of GI Number: 1498597 NR Desc: phospholipid transfer protein
MSPSAAVSCGEVTSSVAPCLGYAMGSAASPSAACCSGVRSLNSRASSAADRQATCNCLKSMTGRLGGGVSMANAANIPGKCGVSVGVPISPTVDCTKIN

SEQ ID NO: 769 - DNA, 526 bp, Zea mays
  misc_feature: Ceres CLONE ID no. 362423
  misc_feature: Ceres CDNA ID no. 25446338
  CDS (79)..(402): REFERENCED BY SEQ ID NO: 770
atacaatccgaggtctcaaagtcgaagagggttaatcccctcccgttccactgttgcccaagtccaaccaccagcgagatggcggggaccgtgaccgcgaccgcaaccacggcggtggcgggcgccgtgatggcggtggcggctacggcggtggcggcggctacggtggcggcggcggctacggtggtggtggcggcggctacggcggtggcaaccgtggcggcggctacggcaactccgacgggaactggaggaactgagcggtggggcccgcgcggccaagttatcctgttcgctaccgtgatgtttaccctagtccagagggtttatcttcgttcgtgtcgtgtttgttgttgcccatctgtgtttttgattgcaaggtcgctctgtgtcagttgttagtgctgtgttcatcctcggtttcagcagacccatgcatcaaacagcatggactgcggatcgatggatgctgttacccccgtcaggctttattctaagttaatcttaaggaaaaaaaaaaaaaaaa

SEQ ID NO: 770 - protein, 107 aa, Zea mays
  misc_feature: Ceres CLONE ID no. 362423
  misc_feature: Ceres CDNA ID no. 25446338
  misc_feature: Homolog of GI Number: 22293 NR Desc: glycine
  misc_feature: Homolog of GI Number: 20257675 NR Desc: glycine
  misc_feature: Homolog of GI Number: 20257683 NR Desc: glycine
  misc_feature: Homolog of GI Number: 20257691 NR Desc: glycine
  misc_feature: Homolog of GI Number: 20257693 NR Desc: glycine
  misc_feature: Homolog of GI Number: 20257709 NR Desc: glycine
  misc_feature: Homolog of GI Number: 20257713 NR Desc: glycine
  misc_feature: Homolog of GI Number: 20257705 NR Desc: glycine
  misc_feature: Homolog of GI Number: 21623 NR Desc: glycine
  misc_feature: Homolog of GI Number: 20257669 NR Desc: glycine
MAGTVTATATTAVAGAVMAVAATAVAAATVAAAATVVVAAATAVATVAAATATPTGTGGTERWGPRGQVILFATVMFTLVQRVYLRSCRVCCCPSVFLIARSLCVSC

SEQ ID NO: 771 - DNA, 598 bp, Zea mays
  misc_feature: Ceres CLONE ID no. 363905
  misc_feature: Ceres CDNA ID no. 25447094
  CDS (233)..(439): REFERENCED BY SEQ ID NO: 772
actgattccctcgtcgacagccttagtgtactcggtgcccgatgccatgctttccctctgcgctacttacagtctgtagtaccgtgcgcgtcttaagcatccgtgcacctggcacagtgactgcctgcctttgccttccactggttcgcttctccctctcctgcgcttggctgctgcttgcccgttgagcacacagcacagcagggggggccgtgcctgcacagccgccgcgatgagggactgggcgccgtcgatcatcgccacggcgctgttcgcgctcctgtgcccgggcggcgtgctgcagatgcccggccggcaccgccccgtcgacctcatgaacatgaagaccagcttcccgtccatgctcgtccacgccgtcatctacttcctgctgctcatgctcttcctcgtcatcctgcagcctcacctctacatctgacgtgagcgtgttccccaccccttcacacaagcttctagcatgtttcagtttcttctttctcggggtgcagttttgggcccttttaatagctttgtaaccttatcaaccagaggattatatacgtaatatgcgttccgtaaaaaaaaaaaaaaaaaaaaa

SEQ ID NO: 772 - protein, 68 aa, Zea mays
  misc_feature: Ceres CLONE ID no. 363905
  misc_feature: Ceres CDNA ID no. 25447094
  misc_feature: Homolog of GI Number: 50902086 NR Desc: P0005H10.27
  misc_feature: Homolog of GI Number: 50904308 NR Desc: P0592G05.7
MRDWAPSIIATALFALLCPGGVLQMPGRHRPVDLMNMKTSFPSMLVHAVIYFLLLMLFLVILQPHLYI

SEQ ID NO: 773 - DNA, 1595 bp, Zea mays
  misc_feature: Ceres CLONE ID no. 364664
  misc_feature: Ceres CDNA ID no. 40350935
  CDS (89)..(1210): REFERENCED BY SEQ ID NO: 774
aaaaatacacggagcctgcacgcgtgtttctccacatgccctctccttctcggatcctctaccgtaatctcccggcgacgccgccgccatgtcttcccagtcttctgcaggaggtccggcgatccatcatccccactccaactaccacccgtacatctttcagcatgaccctccgctccactctaattcccgccgtcgccgccgtaaccatgatgacccatatcaaccctatctgcctctaccccacgctcactcccacggagccactgccgtcgttaccggcaccgttcgttgccatgtcccccgggatccacttgtgctctcacacctccaggagcgcctctttccgactctccctcaacatcacccgatcgcgggtccacccccgacgaagcgggcccgccgcgcgccagatactccgtgggatccgccgccgccaacgctgcagccggcacttgtcccggtggcgctagagaggcctccggatgtaggacattctgccggggcgttgctttcgcgtgacgagatcgagaggcggtctccatcaagaagggacgggatcgattccgcgcttgaggccaggctgcgtgcgtcctactgcgcctacctgcattgcctcggcaaccggctcgggttgccgcagacaacaattgcgacggctgtggtgttctgccatcggttcttcttccacagatctcatgcctgccatgatagatttttggttgcgactgcagccttgttcctggcagcaaaggcagaagaaacaacatgccttttgaatactgttcttagggcttcatgtgaggtttctcaaaatcaggaattcaatcttcttccttacatgctatgtggtcaggactggtttgaacagtacagagagagtgtaatacaagcggagcaaatgatacttacaacacttgattttgaactcgaagtagcccacccatatgcttccctatcctctgctttgggcaaactaggactcacacatactgttctgtttaatgtggcttggaatctgatcaatgaagggctacgaagttcactttggcttcagttcaagccccatcatattgctgctggagctgcattccttgctgcaaagttcctccactatgacatcacattccatccaaatttctggcatgaattcaagacaagtccatatattgttcaagatgttgtccagcagttgaaggagctactttaggatacaacattcaatgtatttacataatactcagagatcctcttggtttatacgctgtagtgagtagtgatcactgccaaaagtacgtacacattagcatgtggtcactttcatcaattactgaacatctttcatgtaggtttttacaaccacagtgctatgtacaaaaggggaagatgttattcaaaagttgcccttttagttttggggaggtaaaagcaaacaatctttagaagagatgtgacgaacaacaagagataaaaaaaggcaaaaaggtgtaagagatgtaaaaagttgatgaaatgttggatcccttaattggttgtccggttgtgattatctgatatatatagaggatggtttatcccgaaaaaaaaaaaaaaaa

SEQ ID NO: 774 - protein, 373 aa, Zea mays
  misc_feature: Ceres CLONE ID no. 364664
  misc_feature: Ceres CDNA ID no. 40350935
  misc_feature (142)..(282): Pfam Name: Cyclin_N PFAM Desc: Cyclin
MSSQSSAGGPAIHHPHSNYHPYIFQHDPPLHSNSRRRRRNHDDPYQPYLPLPHAHSHGATAVVTGTVRCHVPRDPLVLSHLQERLFPTLPQHHPIAGPPPTKRARRAPDTPWDPPPPTLQPALVPVALERPPDVGHSAGALLSRDEIERRSPSRRDGIDSALEARLRASYCAYLHCLGNRLGLPQTTIATAVVFCHRFFFHRSHACHDRFLVATAALFLAAKAEETTCLLNTVLRASCEVSQNQEFNLLPYMLCGQDWFEQYRESVIQAEQMILTTLDFELEVAHPYASLSSALGKLGLTHTVLFNVAWNLINEGLRSSLWLQFKPHHIAAGAAFLAAKFLHYDITFHPNFWHEFKTSPYIVQDVVQQLKELL

SEQ ID NO: 775 - DNA, 1339 bp, Zea mays
  misc_feature: Ceres CLONE ID no. 364768
  misc_feature: Ceres CDNA ID no. 35383172
  CDS (136)..(1197): REFERENCED BY SEQ ID NO: 776
atacacattactcataaaaaacggaacgcaagaccgcaaggcgcaccgcgcacgctcctggagtcctgggcgccgctgttcgcaacccaagcagtagccgagccaacgaaggcgtgcgagcggaggcaatcatacatggacggcagccgcaagagggtggacgcggaagacgtcaaagaggcttccaccggcgggaagcgattgcgagcatcggagtcatttcaaagtggcgtaggaagcaaagtgaagctatgcaccaattttttcagtacttatggttgtccctttggtgagggctgccattttgtccattacttccctggtgactaccgggccgtttcagaaatgaccaacctgggtggcgcaacaatcgcacctcctggaggaatgatgatggatgggccacctacacccatcgtgaagactcgcttgtgcaacaagtacaacactgcagagggatgcaaatggggggacagatgccactttgcacatggtgaaagtgagcttggcaagtctatgatggacaactatatgccaccccccatcggaccaccaccaaccggttattttgcacctccacctatggcacctccacctatggcgcctccacccatggcacctccacctatggcacctctacctatggcgcctccacccatggcacctccacctatggcgcctccacccatggcacctccacctatggcgcctctacctatggcgcctccacctatggcacctccacctatggcacctccacccatggcacctctacctatggcgcctccacccatggcacctccacctatggccaaccctggtttggccactccagctagcttcggcgcttatgccacggccaagatcagtgtcgatgcgtcccttgcaggtggcatcattgggaagggtggagctaacataaagcaaatatcttccgtcacaggggccaaggtggtcattcaggaggaccgccatgaatcagacaccagcttgaaaaacattgagtttgagggcacctttgatcagatcaggaacgctagtgctatggtcatcgagctgattgttagcatcagtggcataggaagcaacttcaagaccaagatgtgtgagaacttcgcaaaagggtcatgctcttatggcggcaaatgccactttgcccatggtgagagtgagctgcgcaagcctgccgctgcttgagatccatgccctgtttcttacctcatagtcattagtcaatgtaactcaaaacttggcctctgatgatggatttgttggcttctttaggtctacgctaatgaattgctggcttcaggcctactacaaaaaaaaaaaaaaaaaa

SEQ ID NO: 776 - protein, 353 aa, Zea mays
  misc_feature: Ceres CLONE ID no. 364768
  misc_feature: Ceres CDNA ID no. 35383172
  misc_feature (241)..(305): Pfam Name: KH_1 PFAM Desc: KH domain
  misc_feature (35)..(61): Pfam Name: zf PFAM Desc: Zinc finger C
  misc_feature: Homolog of GI Number: 51090454 NR Desc: KH domain
  misc_feature: Homolog of GI Number: 50929447 NR Desc: OSJNBa0087O24.9
  misc_feature: Homolog of GI Number: 50905911 NR Desc: KH domain
  misc_feature: Homolog of GI Number: 57899154 NR Desc: putative receptor protein kinase PERK1
  misc_feature: Homolog of GI Number: 21322711 NR Desc: pherophorin
  misc_feature: Useful for delaying flowering time
  misc_feature: Useful for increasing chlorophyll and photosynthetic capacity
  misc_feature: Useful for making ornamental plants with modified flowers
  misc_feature: Useful for making plants that grow better in shade
MDGSRKRVDAEDVKEASTGGKRLRASESFQSGVGSKVKLCTNFFSTYGCPFGEGCHFVHYFPGDYRAVSEMTNLGGATIAPPGGMMMDGPPTPIVKTRLCNKYNTAEGCKWGDRCHFAHGESELGKSMMDNYMPPPIGPPPTGYFAPPPMAPPPMAPPPMAPPPMAPLPMAPPPMAPPPMAPPPMAPPPMAPLPMAPPPMAPPPMAPPPMAPLPMAPPPMAPPPMANPGLATPASFGAYATAKISVDASLAGGIIGKGGANIKQISSVTGAKVVIQEDRHESDTSLKNIEFEGTFDQIRNASAMVIELIVSISGIGSNFKTKMCENFAKGSCSYGGKCHFAHGESELRKPAAA

SEQ ID NO: 777 - DNA, 1531 bp, Zea mays
  misc_feature: Ceres CLONE ID no. 365048
  misc_feature: Ceres CDNA ID no. 25446060
  CDS (190)..(1200): REFERENCED BY SEQ ID NO: 778
gccatggaagaattgctctgctgcttggtgtttttcctcctcccgttcacctcgccgtcgacggggccaggcggccgaacacatccttgacgaccgacgccgccctactcgcagcttcctgggtttcatcggatcctctgctagcgacgagcaccccctacaccaggccgttacttgggcgccggtgccatgcccggcgggtcttcgggtccagatggtgaagtggatgcaggatttgcgaagctccagggagaggatttcgagtattacatgcaaacgtactccatcatgctgggacgcaacagcaagaaatcaacagtggatgtggatctctcgagcctcggtgggggtatgaacatctcccgccaccacgcccggatattctacgacttccagcgccgcaggttcgcgctcgatgtcattggcaagaacgggtgccttgtcgagggcgtcctgcaccttccagggaacccccctgtcaagcttgactcgcaggatctgctgcagattggggacaagaagttctacttcctactgccaacacggtccatcttcgcttcggctgctgctgctcggcatgctcctattattccacagcagcttcctcctccaccgtatgcacatgcacgggcaggccgccctcgtttgtccgagtttcatgaccgctccttcgaaggtgattatgggcgggaggttgatgagattgggaatggtatcagtgaaactgggatgaggggaaagctggtaaagaggaacaagaagtcttctggcgacttggatatctatggtgggcatagaatcaatgtggaaccaatagggacgctaggtgaagacagtagatcagaaataagatcaaggggtgacagggatattgacaaccaacaagcccttcaagcagaagagaaggatgttgtgtcatctgtggccacagtgttatctgatctctgtggccctggagaatggatgcccatggcaaaactccacaacgagcttcttgagcagttcggcaacgtgtggcaccccagcagggtccggaagtacctgacacaggacgactggtcgccgacggagaccaagggcaggccttggttcggccttctggcgcttctcaggaagtacccggagcactttgtcatcaacacgaggtccaagggcaggatgacctcggagttcgtctcgctggtctccttgctctcctagagggacggagagggcgtgttgtgtccagcccgtgtgaccgtgtccagaagggtcggaggtgtactggctctcgtttgcttgccccttgctgtgtttcagcagctgttatatggacccaccctgttgtgctgtagtatctcgtgtggtcgaggcagctgcactggtccgtgaccgtctctgtagtgtcggcagcagtgtatggaaagcatgcgttttaagttttaacctatgctagcaattcagcagcagctcggtgattaccgtatccagcatgtatatccaatgccatacttgtaactgttgtgtggtgtctaaaaaaaaaaaaaaaaaa

SEQ ID NO: 778 - protein, 336 aa, Zea mays; identical to SEQ ID NO: 422
  misc_feature: Ceres CLONE ID no. 365048
  misc_feature: Ceres CDNA ID no. 25446060
  misc_feature: null
  misc_feature: Useful for making plants with altered Lignin content
  misc_feature: Useful for making plants with altered alkaloid content
  misc_feature (33)..(108): Pfam Name: FHA PFAM Desc: FHA domain
  misc_feature: Homolog of GI Number: 51965036 NR Desc: PREDICTED OJ1770_H02.14 gene product
  misc_feature: Homolog of GI Number: 50947859 NR Desc: putative transcriptional activator
  misc_feature: Homolog of GI Number: 77550677 NR Desc: FHA domain
  misc_feature: Homolog of GI Number: 15705932 NR Desc: transcriptional activator FHA1
  misc_feature: Homolog of GI Number: 19115184 NR Desc: similar to N
  misc_feature: Homolog of GI Number: 6325361 NR Desc: Fhl1p
  misc_feature: Homolog of GI Number: 46436423 NR Desc: potential forkhead
  misc_feature: Homolog of GI Number: 46436360 NR Desc: potential forkhead
  misc_feature: Homolog of GI Number: 45190279 NR Desc: AEL327Wp
  misc_feature: Homolog of GI Number: 6753906 NR Desc: forkhead box K1 beta isoform

SEQ ID NO: 779 - DNA, 1106 bp, Zea mays
  misc_feature: Ceres CLONE ID no. 365339
  misc_feature: Ceres CDNA ID no. 25446061
  CDS (272)..(832): REFERENCED BY SEQ ID NO: 780
aaaaaaaagtttcaggcccctgcacgcgtccactgaccagacctggccagcccaggcgtggaggtgctcgtctcctccgccgcgccgggaccggcgatgaacggcgggctccctggattccacaatgcgccggcgtcaaaggccgtggtcgtcgccgcaggtctcttctccgtcgcctttggcttccgcggccactccctcaacctcggccttgcctaccagagtgtttatgaaaagctgagtgtatggagactgattgcattgggatcccatggccaagctcgccgtcctcctcctcctcgccgtggccgcgtccgccacagtgccggcgcacggccgcgataccccgactgagatcaagctcatcaaaggcacggacgcctccggcgtgggcgacgacagcatggagtgcgtgtacacggtgttcatccggacggggtcgatcttgaaggccgggacggacgcgaacgtcacgctggagctggccgccgcggacggcaacggcgtggggatctcgaacctgcccgcctggggcgggctcatggggcagggctactcctacttcgagcgcagcaacctggacatcttcagcggccgcgggccctgcatggcgaaggcgccgtgctggatgcggctggccaccgacggcaccggcgaccaccacgggtggtactgcaactacgtggaggtcaccaccacgggcccgcacaaggggtgcgggcagcagctgttcaccgtcgagcagtggctcgccaccgacgccccgcccttcaagctcgaggccgttcgcgactactgcagcggcgacgccaagggcgcctcggcggcgtgatgtggccggcggccggtagaggagagcacagcacacacgcctggactggacctgctgggtggcttggtttggttggttggtgacgagtcgtaataagttgtgggcgcatgggcgccgcgctcgtgagtggcgtgcgccacgatgcatgcgtgtatggtgatgaactgaattggagccgtgcagcaagtcgaataatcgggagccacctcgcgtgatgtgtagtggctagtttttgtacatggacgtgttggatctcaaaaaaaaaaaaaaaaaa

SEQ ID NO: 780 - protein, 186 aa, Zea mays
  misc_feature: Ceres CLONE ID no. 365339
  misc_feature: Ceres CDNA ID no. 25446061
  misc_feature (47)..(171): Pfam Name: PLAT PFAM Desc: PLAT/LH2 domain
  misc_feature: Homolog of GI Number: 50912867 NR Desc: putative elicitor
  misc_feature: Homolog of GI Number: 50924744 NR Desc: OSJNBa0006M15.20
  misc_feature: Homolog of GI Number: 51535090 NR Desc: putative dehydration stress
  misc_feature: Homolog of GI Number: 40287496 NR Desc: elicitor
  misc_feature: Homolog of GI Number: 50924742 NR Desc: OSJNBa0006M15.19
  misc_feature: Homolog of GI Number: 51457948 NR Desc: wound/stress protein
  misc_feature: Homolog of GI Number: 50924740 NR Desc: OSJNBa0006M15.18
  misc_feature: Homolog of GI Number: 12667247 NR Desc: dehydration stress
  misc_feature: Homolog of GI Number: 34909056 NR Desc: P0702B09.35
  misc_feature: Useful for making ornamental plants with modified leaves
  misc_feature: Useful for making plants with increased biomass and foliage
  misc_feature: Useful for making plants with increased biomass and foliage
  misc_feature: Useful for sterility
MAKLAVLLLLAVAASATVPAHGRDTPTEIKLIKGTDASGVGDDSMECVYTVFIRTGSILKAGTDANVTLELAAADGNGVGISNLPAWGGLMGQGYSYFERSNLDIFSGRGPCMAKAPCWMRLATDGTGDHHGWYCNYVEVTTTGPHKGCGQQLFTVEQWLATDAPPFKLEAVRDYCSGDAKGASAA

SEQ ID NO: 781 - DNA, 1063 bp, Zea mays
  misc_feature: Ceres CLONE ID no. 365699
  misc_feature: Ceres CDNA ID no. 25445529
  CDS (395)..(868): REFERENCED BY SEQ ID NO: 782
acccaatgtcgcgtgcggccactagatttttcctgacgcggtgtctgctcccacttcccctcctctcccccaggtggcggcagcggcggcggggtagcatttgtgctacgagggcttttgcaatggcggcttcggggttcggcggcggcgaggcgttccggctctcggccgcaccaggggccggcttactgaagctgcacaagggcgacatcaccctctggtccgtcgactgcgccaccgacgccatcgttaatgctgctaatgagcgaatgttaggtggcggaggtgttgatggagctatacatcaagctgctggaccagagctagtgcaagcatgccggaaagttccagaggtcaaaccaggtaagcaggagcgtccaccccagccgccgccatgaagcgcaacccccgcgtcacgagctcccgccggaagtgccgcaaggcgcacttcacggccccgtcctccgtccgccgcgtgctcatgtccgcggcgctatcgacggagctccgccacaagtacaatgtgcgttccatcccgatccgcaaggacgacgaggtgcaggtcgtgcgcggcacctacaagggccgtgagggcaaagtggtgcaggtgtaccgccgtcgctgggtcatccacgtcgagcggatcacccgcgagaaggtgaacggctccaccgtgaacgtgggcatccacccttccaaggtgatggttacaaagctgaagcttgacaaggaccgcaaggctctcctcgaccgcaaggcccggggccgcgccgccgacaaggctaagggcaagtttactgccgacgacgtcgccgccgctgctggtggcgccgccgccactggcgcgtctctccaggagatcgactaggcgcttcgcggggatctgatggtggtcctaccgcctattactccttatcgctctagtttttgctatcaatgattatgtgctaggagttttatgttacttataaactgctttgagcctcgatgggagttgaacttaatgtggagtgtatctgagatatgaagaactcattatatggccaaaaaaaaaaaaaaaaaa

SEQ ID NO: 782 - protein, 157 aa, Zea mays
  misc_feature: Ceres CLONE ID no. 365699
  misc_feature: Ceres CDNA ID no. 25445529
  misc_feature: The plant is abnormally small.
  misc_feature: Useful for making plants with modulated biomass
  misc_feature (49)..(82): Pfam Name: KOW PFAM Desc: KOW motif
  misc_feature: Homolog of GI Number: 34895672 NR Desc: putative ribosomal protein L26
  misc_feature: Homolog of GI Number: 62732715 NR Desc: ribosomal protein L24
  misc_feature: Homolog of GI Number: 77553015 NR Desc: ribosomal protein L24
  misc_feature: Homolog of GI Number: 62701693 NR Desc: ribosomal protein L24
  misc_feature: Homolog of GI Number: 3747050 NR Desc: ribosomal protein L26
  misc_feature: Homolog of GI Number: 64420807 NR Desc: putative L24 ribosomal protein
  misc_feature: Homolog of GI Number: 23397084 NR Desc: putative 60S ribosomal protein
  misc_feature: Homolog of GI Number: 21554514 NR Desc: 60S ribosomal protein L26
  misc_feature: Homolog of GI Number: 3914740 NR Desc: 60S ribosomal protein L26
  misc_feature: Homolog of GI Number: 72159025 NR Desc:  similar to CG6846
  misc_feature: Useful for increasing chlorophyll and photosynthetic capacity
  misc_feature: Useful for making ornamental plants with modified leaves
  misc_feature: Useful for making shorter plants
  misc_feature: Useful for sterility
MKRNPRVTSSRRKCRKAHFTAPSSVRRVLMSAALSTELRHKYNVRSIPIRKDDEVQVVRGTYKGREGKVVQVYRRRWVIHVERITREKVNGSTVNVGIHPSKVMVTKLKLDKDRKALLDRKARGRAADKAKGKFTADDVAAAAGGAAATGASLQEID

SEQ ID NO: 783 - DNA, 662 bp, Zea mays
  misc_feature: Ceres CLONE ID no. 366323
  misc_feature: Ceres CDNA ID no. 40350936
  CDS (119)..(256): REFERENCED BY SEQ ID NO: 784
aggagaaagaaaagttgcgaaaaaagaacaacaaaaaaggaaacgaaaacgagcgggggagctcgcggaccccaaaaccttaaccccgcggacccacctggcggcggcggcggcggcgatggcggacggcggaggagaaggaggacctcctgcggcgtcggcggcgctcaaggaccaggggaatgagcagttcaaggcggggagctacctcaaggctgccgcgctctacacgcaggaggagacgcatcgaggttagcacgcgaagaagcgaccatgagggccaagtggaagaagaagcgcatgaggaggctcaagaggaagcgcagaaagatgaggcagagatccaagtaggcagatcgagatggattgtggacctgatgacatgcgtgggtacatacatttcttcggatgcgttggtgtgcctgtggagagatgtcaacctgccatggtgtcacggtccgccatcagttgaacgtcttgcctgcacttcagtaggccacttttcatggttctagttgtatttgaatccagcgtttgccactaagataaatcagacagtcgttttgtgaacctattatgatggagctttatttgctgataatatctagctacctatttgagctgaaaaaaaaaaaaaaaaaaaaagaaaaaaaaaaaaaaaa

SEQ ID NO: 784 - protein, 110 aa, Zea mays
  misc_feature: Ceres CLONE ID no. 366323
  misc_feature: Ceres CDNA ID no. 40350936
MSSSRRGATSRLPRSTRRRRRIEVSTRRSDHEGQVEEEAHEEAQEEAQKDEAEIQVGRSRWIVDLMTCVGTYISSDALVCLWRDVNLPWCHGPPSVERLACTSVGHFSWF

SEQ ID NO: 785 - DNA, 546 bp, Zea mays
  misc_feature: Ceres CLONE ID no. 366686
  misc_feature: Ceres CDNA ID no. 25445893
  CDS (119)..(397): REFERENCED BY SEQ ID NO: 786
tccaaatcgactcccttttctggttgggttgaatttatcgggtggtgtctctagttggatggatttattttaagccctaactcgggcagtgtgtctactctctacgcagttgcttccgatggacggtgctgcagctgcaggaggaagtagggaaccggcggccaacggttccaaacctgaggagcagcagtttgatcccagccgaatgatcgggatagttaaaaggaaggcctcaattaaagacttggccacggcataccatgctgaatgtatagcatcctgtaaagaactcctgcagcttcagagaaagtgggaggaggagcagcaagttgaagccaaaatgcctgaagaaccaagatcgttggtgttcaagacctcgaagcataggaagaagtagatttaggagactagtttttacttcctttcaaaagaacactttttggctctgtcaactgctgtgattgttagcttgaaagtaaactaaacgccgggaaacattgccttaaggtgggtttatactgtaaaaaaaaaaaaaaaaaaaaaaaa

SEQ ID NO: 786 - protein, 92 aa, Zea mays
  misc_feature: Ceres CLONE ID no. 366686
  misc_feature: Ceres CDNA ID no. 25445893
MDGAAAAGGSREPAANGSKPEEQQFDPSRMIGIVKRKASIKDLATAYHAECIASCKELLQLQRKWEEEQQVEAKMPEEPRSLVFKTSKHRKK

SEQ ID NO: 787 - DNA, 2037 bp, Zea mays
  misc_feature: Ceres CLONE ID no. 367265
  misc_feature: Ceres CDNA ID no. 40350937
  CDS (102)..(1586): REFERENCED BY SEQ ID NO: 788
aaaaaacacgaacccactagccctctctgcttcctctccgtttctcctccactcaccactcccgattgctgtcgagtctcgatctgccagcgcgcggcgcgatggccgacaaggcggcgtccccggagaagaagtcatgggccgacgtcgaagaggaggaggaggccaaggccaaggcgaccgcggcgtcctcttcctcctccatcaccgagccggcggtggaggagcaggccaagcagatcgaggcgctctccctcgccccgtcggtggacgacgccgcaggcgaagagggcccgcccctcctcgatgactccgacgactcgcaaatccaagccgtgatttcgggtggcacagtgtacgagtcggccaccacgttcgaggatctgaagctgtcgcccgagctgcttaaggggctgcacgacgagatggggttcagccgcccgagcaagatccaggcgatcaccctgcccatgatcctcacgccgccctacaaggacctcgtcgcgcaggcgcacaacggttctggcaagaccacctgtttcgtcctcggcatgctcagccgcgtcgacccgcaacacaagataccccaggctatctgcatttgccccaccagggagcttgcgcagcagaataaggcagttctcatgaggatgggcaagtttactggcattacatgcgcctgtgcaatcccgccagctcaaaaagactacatgccgatctcaaaaatggctccgatcactgaccagatcgttatcggcacatctggtacgctcatcaaatggattacccataagaagctggccacaagggacatcaagatacttgtgtttgatgaggcagatcatatgcttgctgaggatggctttaggagtgactctgaaaggatgatgagggatatacaaagaagcgctggtggttgtcaggtgcttctcttttctgcgaccttcaatgatagggtgaaggattttgttacaaaggtcattagggatggaaatcagatatttgtgaagaaggaagagcttactttggaaaaagttaagcagtacaaagttcaagtacctgatgaatcggcaaaaatagaggttataagggacaagatatttgaatttggacagaaagttggccaggttatcatatttgttagaacaaagcaaagtactaagaatgttcacaatgctttgacgagggaggactatgtgtgctcctcaattcaaggatcccttgaccaatcagagagggaaaagataatacaggaattcaaagatggctacaccaaggttcttatatcaaccgatgttcttgctcgaggttttgaccaagcacaggttaaccttgtcatcaactacgacatgccaatcaaatttggtacaagagatgaacctgattatgaggtgtacttgcacagaattggcagagctgggcgctttggccggaaaggtgctgtgttcaacttgctgtgtggtcaaaccgataatgttgtgatgaagaagatcgaggactatttccagcacagtgtgcctgaggttcggaattggcaacgtgaagaagattttgaggctgctctcaaggatgcaggtttactttaaagtaaccacggaaacttgtggtgagcagcgctctccggctcgggacaattgaccggtgattttttttgctgagcctgctgcacaacgttattgtgctctttctgctctcctgttggcagcactgattttcaccggtgatttttttttcgctgagcgtgctgcacagcgttgctgtgctcttatgttcatcctgttgtcagcactgattgttttgcagcagagttgtggattatgttaaaagactagaacagctattgtgttgtgagctttatatgaagcagagggtcgttaagaggtgttcatttggcaatatgcttgtagcgcagttacgagcattaccatttggaactgtaaatctttttactagagagtagactttatttgccgtggagacgcttgtgttactatcttttttacagtgaatgtgttttatataaaaaaaaaaaaaaaa

SEQ ID NO: 788 - protein, 386 aa, Zea mays
  misc_feature: Ceres CLONE ID no. 367265
  misc_feature: Ceres CDNA ID no. 40350937
  misc_feature (251)..(335): Pfam Name: Helicase_C PFAM Desc: Helicase conserved C
  misc_feature (6)..(181): Pfam Name: DEAD PFAM Desc: DEAD/DEAH box helicase
MGFSRPSKIQAITLPMILTPPYKDLVAQAHNGSGKTTCFVLGMLSRVDPQHKIPQAICICPTRELAQQNKAVLMRMGKFTGITCACAIPPAQKDYMPISKMAPITDQIVIGTSGTLIKWITHKKLATRDIKILVFDEADHMLAEDGFRSDSERMMRDIQRSAGGCQVLLFSATFNDRVKDFVTKVIRDGNQIFVKKEELTLEKVKQYKVQVPDESAKIEVIRDKIFEFGQKVGQVIIFVRTKQSTKNVHNALTREDYVCSSIQGSLDQSEREKIIQEFKDGYTKVLISTDVLARGFDQAQVNLVINYDMPIKFGTRDEPDYEVYLHRIGRAGRFGRKGAVFNLLCGQTDNVVMKKIEDYFQHSVPEVRNWQREEDFEAALKDAGLL

SEQ ID NO: 789 - DNA, 675 bp, Zea mays
  misc_feature: Ceres CLONE ID no. 367741
  misc_feature: Ceres CDNA ID no. 40041192
  CDS (260)..(589): REFERENCED BY SEQ ID NO: 790
aaaaaatccaaattttcttatcttccacacgtccctttcttctagtatcttcataccaccgcagcccaggctctcagccttatccccttcgtacaacactgtcaccaggaattcccttgcctttgctcgttctcatggccgagcacaagtcttcctcaagcgtcgcctgctgtaccagtgtcgagctccccacgcccaccgctactcctagcccctctcctccctggatttcgcccagtctccatctctctttctagccatggacggcgacctctcctgcctacagcagggcgccgcatgctgcttcctatacatcgtgcgactccctggtgcttgctctcgccctagtccatggagcagtagcagccacgacactccttcgtgtcgcgccctcgacgtgttcgatgaaatactgcagcgagctccaactcgatctgcacagcccctgcgcgacgtcacaaactccgctcgttgtcgatgtcgtgcttcgggcatcgcgtgttcgacgaaaatcccaagtccatggacagcacatgcacaactcaaatccgatcggccaggttgtttgatgtgtattttactcatttgatttagttgatgacgtatttgtatgtgtggggtgatgagaaaaataaaggagatgcgtcgttcggtagcaaaaaaaaaaaaaaaaaa

SEQ ID NO: 790 - protein, 109 aa, Zea mays
  misc_feature: Ceres CLONE ID no. 367741
  misc_feature: Ceres CDNA ID no. 40041192
MDGDLSCLQQGAACCFLYIVRLPGACSRPSPWSSSSHDTPSCRALDVFDEILQRAPTRSAQPLRDVTNSARCRCRASGIACSTKIPSPWTAHAQLKSDRPGCLMCILLI

SEQ ID NO: 791 - DNA, 920 bp, Zea mays
  misc_feature: Ceres CLONE ID no. 367792
  misc_feature: Ceres CDNA ID no. 25445987
  CDS (3)..(530): REFERENCED BY SEQ ID NO: 792
ggggtgactgcatgcgagataggattaggaggcagagaataccacggttccgtcgccagggcgtccatccgatccgcgacgatccacaggccacagccatggcgatggcttacaagatggcgacggaggggatggacgtgaaggaggagtgccagcgctggttcatggagatgaagtggaagaaggtgcaccgcttcgtggtgtacaggatcgacgagcggtcgcgcgccgtgctggtggacagggtgggcggccccggggaggggtacgaggagctcgtggccgcgctgccaggtgacgactgccgctacgccgtcttcgacttcgacttcgtcagcgtcgacaactgccagaagagcaagatcttcttcatcgcctggtcaccggcggcgtcgaggatacgggccaagatcctgtacgcgacgtcgaagcagggcctgcggcggctgctggacggggtgcactacgaggtgcaggccaccgacccctccgagatgggcttcgacgtcatcagaggccgcgcgcaatgagagcgtgattggcgttggtgtgatgagctgagcctcccgatgatgccggtctgacgaggcttcgcgtgtgtttgctttccccccggttcttccgagagatggtgcagtgcaggggcgtggtgtgctgatgctgatgggtggagttactggagtagaagctgagggagtggcagcggattaatgaaacgtccatctccgcgacgtagaattccactgaacaatgctccagtgcaccataagctgctgcttcagatttgtttagaaagcaacgcctctctacgtacaattccgaccagagttgttatgggcttgtgaatgatccgtttttttttttttttgttcgaagaatatatgtcggagtttgtgtgttcgaaaaaaaaaaaaaaaaaa

SEQ ID NO: 792 - protein, 143 aa, Zea mays
  misc_feature: Ceres CLONE ID no. 367792
  misc_feature: Ceres CDNA ID no. 25445987
  misc_feature (16)..(143): Pfam Name: Cofilin_ADF PFAM Desc: Cofilin/tropomyosin
  misc_feature: Homolog of GI Number: 15293263 NR Desc: putative actin depolymerizing factor 5
  misc_feature: Homolog of GI Number: 25295742 NR Desc: actin depolymerizing factor 5
  misc_feature: Homolog of GI Number: 7270448 NR Desc: actin depolymerizing factor
  misc_feature: Homolog of GI Number: 18874466 NR Desc: actin depolymerizing factor
  misc_feature: Homolog of GI Number: 7330254 NR Desc: actin depolymerizing factor
  misc_feature: Homolog of GI Number: 4566614 NR Desc: actin depolymerizing factor
  misc_feature: Homolog of GI Number: 24745620 NR Desc: actin depolymerizing factor 6
  misc_feature: Homolog of GI Number: 77556720 NR Desc: Cofilin/tropomyosin
  misc_feature: Homolog of GI Number: 37536154 NR Desc: putative actin depolymerizing factor
  misc_feature: Homolog of GI Number: 78708922 NR Desc: actin depolymerizing factor
MAMAYKMATEGMDVKEECQRWFMEMKWKKVHRFVVYRIDERSRAVLVDRVGGPGEGYEELVAALPGDDCRYAVFDFDFVSVDNCQKSKIFFIAWSPAASRIRAKILYATSKQGLRRLLDGVHYEVQATDPSEMGFDVIRGRAQ

SEQ ID NO: 793 - DNA, 775 bp, Zea mays
  misc_feature: Ceres CLONE ID no. 368416
  misc_feature: Ceres CDNA ID no. 40041194
  CDS (114)..(557): REFERENCED BY SEQ ID NO: 794
agctagcctttcagttcatcgagcaccactgcacatcccgatcatcattttgcgatacacattctaccaaactcgatcgcaagaagaagaaacagctagctcgctaccaatcaatggcgtccaacgacaacgtcgccgtggccagcgaggtgagcagcgccgtggccaagctcaacgaccacctcgccaccgccctcaccggcagcggcagtgagaacgccggcaccgtcatcacgctggccgggaagaacagcggcgccaccatggaggcggcggccgcgggcgacgtggaggacctcgtcgtcgtcggcagcgtggacgcggaggagcacgacgaaggccatggccaccaggacaacgaggaggaggaggaggaggagatggaggagaacgtggtcatcaccgcctacgccaacagcaactaccaggccgtcaacaactcggtgctcgtcgccggcagctgcgccgtcgacgaccccggcgtgcacgtcgtcgtggtggagcacgtcgacgagatacgcgactacgacgaggacatcgacggccaagagttctaagcactactgcattgttattactgcaagctatatggatggattgaagggcatatatatatatatatatatatatatatcgtcataatatccctgcatgacaaatatatatctatgtactatatcggctttgtactggtactactgtaagttgttttgatgcatactgctacttgaataaaaaaactagctgaatatatatcaaaaaaaaaaaaaaaaaa

SEQ ID NO: 794 - protein, 147 aa, Zea mays
  misc_feature: Ceres CLONE ID no. 368416
  misc_feature: Ceres CDNA ID no. 40041194
  misc_feature: Homolog of GI Number: 50921225 NR Desc: OSJNBa0094O15.16
  misc_feature: Homolog of GI Number: 67987580 NR Desc: ABC transporter
  misc_feature: Homolog of GI Number: 67986808 NR Desc: Aldo/keto reductase
  misc_feature: Homolog of GI Number: 66780099 NR Desc: PE
  misc_feature: Homolog of GI Number: 6678139 NR Desc: simple repeat sequence
  misc_feature: Homolog of GI Number: 18958209 NR Desc: subtilisin
  misc_feature: Homolog of GI Number: 60729660 NR Desc: protamine P2
  misc_feature: Homolog of GI Number: 56283929 NR Desc: CG3047
  misc_feature: Homolog of GI Number: 66777243 NR Desc: Ribonuclease PH
  misc_feature: Homolog of GI Number: 55235847 NR Desc: ENSANGP00000004655
MASNDNVAVASEVSSAVAKLNDHLATALTGSGSENAGTVITLAGKNSGATMEAAAAGDVEDLVVVGSVDAEEHDEGHGHQDNEEEEEEEMEENVVITAYANSNYQAVNNSVLVAGSCAVDDPGVHVVVVEHVDEIRDYDEDIDGQEF

SEQ ID NO: 795 - DNA, 964 bp, Zea mays
  misc_feature: Ceres CLONE ID no. 368677
  misc_feature: Ceres CDNA ID no. 35387660
  CDS (51)..(758): REFERENCED BY SEQ ID NO: 796
atcaccgattcaccaccaacaacatctccagcaacaaacctgcagcagggatgaggactagtcgcctggtgttcctatttgccatccccctcctgctactgctagcatcttcagatttgacgacgacgaaggcttcgaccgccggatgcccgcatccccgttcgatgatcctgtacccagacctgccctgtgaccccgacgtgtgcgccaagagctgcgccaagggactgaacaacggcaacggcacctgcatgaggccgcttggatgtgattgcgagtactgcgtgccagctgcaaccgtcgcaaaacgcccggctgctgtctctacgcgtttgacgacaacgacgacgacaatggcgtcggccggatgcccgcacccccgttcgacgatcctgtacccagacctgccatgcgatcccgacgtgtgtgccaagagttgcgccaagggattgaacaacggcaacggcacctgcatgaggccgattggatgtgattgcgtgttctgcgtgccagaaaccgtcgcaaaacgcccggctgtctctacgcgtttgacgacgacgacgacgacaatggcgtcggccggatgcccgcacccccgttcgacgatcctgtacccagacctgccatgcgatcccgacgtgtgtgccaagagttgcgccaagggattgaacaacggcaacggcacctgcgtgaggccgattggatgtgattgcgtgttctgtgtgccaacagccggccaagctgcacgtacaacgtagctatgctacgtaattaaagggatgtagtagaagccgatttggacccggcgttcgcgagttttttttacaatctatggcggagatgtagttaataatcatgtactgcaaactgagttattggagggtcagcgttgtacccacgcagcaatacagtatgttcatctcaaaaaaaaaaaaaaaaaaaaaaaaaaaaaaaaaaaaaaaaa

SEQ ID NO: 796 - protein, 235 aa, Zea mays
  misc_feature: Ceres CLONE ID no. 368677
  misc_feature: Ceres CDNA ID no. 35387660
MRTSRLVFLFAIPLLLLLASSDLTTTKASTAGCPHPRSMILYPDLPCDPDVCAKSCAKGLNNGNGTCMRPLGCDCEYCVPAATVAKRPAAVSTRLTTTTTTMASAGCPHPRSTILYPDLPCDPDVCAKSCAKGLNNGNGTCMRPIGCDCVFCVPETVAKRPAVSTRLTTTTTTMASAGCPHPRSTILYPDLPCDPDVCAKSCAKGLNNGNGTCVRPIGCDCVFCVPTAGQAARTT

SEQ ID NO: 797 - DNA, 736 bp, Zea mays
  misc_feature: Ceres CLONE ID no. 369204
  misc_feature: Ceres CDNA ID no. 40350938
  CDS (175)..(492): REFERENCED BY SEQ ID NO: 798
agcgcagccagtagcccagtactccttgctccacgccgccgctcaaaaccggcagaagtaagaacggggagggaagcacgccccaaacgttccgaggtttcgcctctcggagcgcaccaacgccacccggagcgactcgccaccggcgcggagaaggagggcggaggctaggcgatggcggacgagaatgaggctgggaagaaagaggaagaggaatttagcacaggccctctgtcagtactaatgatgagtgttaagaacaacacccaggttctcatcaattgccgcaacaacaagaagctgcttggccgggttcgtgcttttgatcgccactgtaacatggtgctcgagaacgtgcgggagatgtggacagaggtccccaagactggcaagggcaaaaagaaggctctgcctgtgaacaaggatagattcatcagcaagatgttcctcaggggcgactcggtcatcatcgtgctgaggaaccccaagtgatcgcccaaccggaagccaggtctctgttgaaaactgtagcttatgatgtatgttggggatgattaactggttatcttgaactgacgttcatgtggcatcgcaatggcacatgaacatacggcgttccatgagtttgttaaccggagtatgaacctaccacctgcggtatttgatccctgaatgttgagtttgcacttctgcttattattgccttgccccaccgtgttcaaaaaaaaaaaaaaaa

SEQ ID NO: 798 - protein, 105 aa, Zea mays
  misc_feature: Ceres CLONE ID no. 369204
  misc_feature: Ceres CDNA ID no. 40350938
  misc_feature (23)..(102): Pfam Name: LSM PFAM Desc: LSM domain
MADENEAGKKEEEEFSTGPLSVLMMSVKNNTQVLINCRNNKKLLGRVRAFDRHCNMVLENVREMWTEVPKTGKGKKKALPVNKDRFISKMFLRGDSVIIVLRNPK

SEQ ID NO: 799 - DNA, 482 bp, Zea mays
  misc_feature: Ceres CLONE ID no. 369316
  misc_feature: Ceres CDNA ID no. 40350939
  CDS (83)..(247): REFERENCED BY SEQ ID NO: 800
atcacagctagctagcatacagacgaataatctcttcttcacctcactaacaccagctagcaactctttctctcctgcaataatggccgctcgctcctcctcctcccagccgcagctggtcgcggcggcggcggtcctggcagcggcgctgctgctgctggcggcgggggccgggacggcgtcggcggcggtgagctgcggcgaggtgacgtcgtctcagaataacttcatatactatagcacttgacttcgcaagtgtacgtgtgtgggtacgtcggcacatcaagtaggccccactatacgacgcgacgcatatatgtacgcaatgggagtacgtgccacttttacgtacttcattgctgctaccaaggaaaaggaaggaaagcaatgctagctccgttgctgtaaatgatgcatgtactgatagttatacataaatgaatgaatgcatgtatatgttgatgttaaaaaaaaaaaaaaaa

SEQ ID NO: 800 - protein, 54 aa, Zea mays
  misc_feature: Ceres CLONE ID no. 369316
  misc_feature: Ceres CDNA ID no. 40350939
MAARSSSSQPQLVAAAAVLAAALLLLAAGAGTASAAVSCGEVTSSQNNFIYYST

SEQ ID NO: 801 - DNA, 700 bp, Zea mays
  misc_feature: Ceres CLONE ID no. 369764
  misc_feature: Ceres CDNA ID no. 25446339
  CDS (2)..(391): REFERENCED BY SEQ ID NO: 802
aatcagagcgcgcgttgcacgtcatccgggtaccaggccagacgccggccagacgcaaagccggaagccagcgtatatacatgtgaataacgcgggtcaggcggaccgtacggcgtacacggatctcgctcggccatcgggactgtacaaggacgagagggagaagagaacagcggattcatcaccgccaggcgtcaggtcagagtgtgttaagacaagatggtggcgaatggcgacgcacctgctagagggagtgcggcggcagctgcaagcctgcgcaggcgtaggaccacaagcggtgctgctgctggcggaggtggtgccagctcgatgctccagttttacaccgatgaggctgcgggccgcaaaatgtcaccaaacaccgttctgatcatgagcattgggttcatcgctgttgtcgctatgctccatgtttttgggaagctgtaccgcacctccaactaggttggtactaccataaccaagaaaacagaggccaccaagagaggagccttatagagccatttcaatggatagcaagtgactatcagagaggaaccttgtagagtgatttcaatggatagcaagtgactatcggattgtgaactgttatagaagtttatctacacaacttgcaatgctcagggctatgataaatccctgcgagtcttgtttatgctccaaaaaaaaaaaaaaaaaa

SEQ ID NO: 802 - protein, 81 aa, Zea mays
  misc_feature: Ceres CLONE ID no. 369764
  misc_feature: Ceres CDNA ID no. 25446339
  misc_feature (32)..(77): Pfam Name: Sec61_beta PFAM Desc: Sec61beta family
  misc_feature: Homolog of GI Number: 34914212 NR Desc: P0697C12.13
  misc_feature: Homolog of GI Number: 77553785 NR Desc: Sec61beta family
  misc_feature: Homolog of GI Number: 24030258 NR Desc: putative transport protein SEC61 beta
  misc_feature: Homolog of GI Number: 7288002 NR Desc: transport protein subunit
  misc_feature: Homolog of GI Number: 26450635 NR Desc: putative transport protein subunit
  misc_feature: Homolog of GI Number: 77548256 NR Desc: protein transport protein subunit
  misc_feature: Homolog of GI Number: 77552788 NR Desc: protein transport protein subunit
  misc_feature: Homolog of GI Number: 54635780 NR Desc: GA10096
  misc_feature: Homolog of GI Number: 38048293 NR Desc: similar to Drosophila melanogaster Sec61beta
  misc_feature: Homolog of GI Number: 58390541 NR Desc: ENSANGP00000014901
MVANGDAPARGSAAAAASLRRRRTTSGAAAGGGGASSMLQFYTDEAAGRKMSPNTVLIMSIGFIAVVAMLHVFGKLYRTSN

SEQ ID NO: 803 - DNA, 562 bp, Zea mays
  misc_feature: Ceres CLONE ID no. 369768
  misc_feature: Ceres CDNA ID no. 40350940
  CDS (1)..(399): REFERENCED BY SEQ ID NO: 804
caggcaatcgacgggagcacagagctagctagccagccagccagcagccagcttgctcgccgcgcccgtccttcttcctcgcctccgttccattccgtcccgccctccaccgccgccgccgcattcagggatggagatgaagaagatcgcctgcgccgtcctcgtcgccgcctcggcggccaccgtggcgctcgccgcggaggctccggctccggcccccaccagcggctcctccgccgtcgcgcccgccgtcggcgccgccctcggggccgccgtcgcctccttcttcgcctactacattcagtgagccggccggggcgcccggaggccgaggaagagacgaaggggagagagagtgacatggctgcgcgcattccgatgcgtgggcattttttttgattcgacacaccttttgtcctctttttctttgtttccttaatttaacgaattgatgcatgccgctgatgttcttcccctgagagagggattaacacttgtatcatttcatcgcttgccatttgtttgaatccattcaacaattcatccaaaaaaaaaaaaaaaa

SEQ ID NO: 804 - protein, 58 aa, Zea mays
  misc_feature: Ceres CLONE ID no. 369768
  misc_feature: Ceres CDNA ID no. 40350940
MEMKKIACAVLVAASAATVALAAEAPAPAPTSGSSAVAPAVGAALGAAVASFFAYYIQ

SEQ ID NO: 805 - DNA, 650 bp, Zea mays
  misc_feature: Ceres CLONE ID no. 369834
  misc_feature: Ceres CDNA ID no. 40350941
  CDS (80)..(358): REFERENCED BY SEQ ID NO: 806
gtcgagtctaaccctagcgcgcgccgccacacctgccgttgctaccgccccgtacctcgcttgctttcccgtcgccgaaatgacgaagcgcaccaagaaggctggaattgttggcaaatatggaaccaggtatggcgctagcttgcgtaagcaaatcaagaagatggaggtatctcagcactccaagtacttctgcgagttttgtgggaagtttgctgtgaagaggaaagcagttggaatttggggatgcaaggactgtgggaaggtcaaggctggcggtgcttacaccatgaacactgctagtgcagtcactgtcaggagcacgattcgtcgcttgagagagcagactgaagcatgatttagcttgctacatcagggttctcctagttgctgttgtcgggaatgttgagctcctctagttggatcacgagactcgctaaaagttgggtgctaagatttgtagttggttaccgttgcgaatttctcaagtgatattatcctatgcttgtctcaatgactcaaatttggttgtggtttctatgcttttggctgtgtcaatggtttgccattgttgttgaaattcaacccttaatgctgcctctatataataaaaagttttttattggtctggtttaaaaaaaaaaaaaaaa

SEQ ID NO: 806 - protein, 92 aa, Zea mays; identical to SEQ ID NO: 294
  misc_feature: Ceres CLONE ID no. 369834
  misc_feature: Ceres CDNA ID no. 40350941
  misc_feature: null
  misc_feature: Useful for making plants with modulated cold sensitivity
  misc_feature (2)..(91): Pfam Name: Ribosomal_L37ae PFAM Desc: Ribosomal L37ae protein family

SEQ ID NO: 807 - DNA, 813 bp, Zea mays
  misc_feature: Ceres CLONE ID no. 369948
  misc_feature: Ceres CDNA ID no. 35387666
  CDS (106)..(522): REFERENCED BY SEQ ID NO: 808
gaggcgattgaagcagaaaaaatcagtcgccgtagcagcgccgcctccgccgccgtggggaggtagcatctaggcccattccgccgcctccatctccggccagcaatggcttcggcggtggagcggcggagggaggagcacgcgcggagatcgcgttccccagcacggggcagggagcggaggggaacgccgccacgcaggcggagttccccagagcggaggaagggttcgcctgctagggcacggtctcctgctgcgaagtcaagtgcgtcgcatagggacagggagaggtcgcctccgagggagaaggtgaaggagcgtgtcaggtcgccagagtctcctgctaaggtcagcctgttgcacaaggggagagagaggtcgtctcccagggagaaggcgaaggaccagcgggtcaggtcgccgaaacgtaagcaggagcagtcacgatcaccctcacctgctaggcgacacttctctaggtccctcgccgcgctccaagaggacgaggggagcgcagggtgagcgggaggcggtgcagtttactggcagtgatcgccggaaggccagtcacagggaggagcaggatacactgaggcacagggagcatgatgaggggagggatgcttcaagagacaggaaagtggatcgggaggcagtgcatgtaacaaatggtgatcgccgcaagccctctcatggggaagagagggactcatggggcaagcacagggaacatgatgaagggagggttgcatcgatagataggaagtcggatcgagaggataccagaggtactgcaaaaaaaaaaaaaaaaaa

SEQ ID NO: 808 - protein, 138 aa, Zea mays
  misc_feature: Ceres CLONE ID no. 369948
  misc_feature: Ceres CDNA ID no. 35387666
  misc_feature: Homolog of GI Number: 58737192 NR Desc: putative nuclear protein
  misc_feature: Homolog of GI Number: 47087297 NR Desc: zgc:63496
  misc_feature: Homolog of GI Number: 57900228 NR Desc: peptidylprolyl cis
  misc_feature: Homolog of GI Number: 50730849 NR Desc:  similar to KIAA0853 protein
  misc_feature: Homolog of GI Number: 72086012 NR Desc:  similar to Ser/Arg
  misc_feature: Homolog of GI Number: 15027957 NR Desc: putative arginine/serine
  misc_feature: Homolog of GI Number: 34905768 NR Desc: P0401G10.10
  misc_feature: Homolog of GI Number: 72082973 NR Desc:  similar to Splicing factor
  misc_feature: Homolog of GI Number: 51703810 NR Desc: Snrp70
MASAVERRREEHARRSRSPARGRERRGTPPRRRSSPERRKGSPARARSPAAKSSASHRDRERSPPREKVKERVRSPESPAKVSLLHKGRERSSPREKAKDQRVRSPKRKQEQSRSPSPARRHFSRSLAALQEDEGSAG

SEQ ID NO: 809 - DNA, 649 bp, Zea mays
  misc_feature: Ceres CLONE ID no. 369996
  misc_feature: Ceres CDNA ID no. 25446340
  CDS (181)..(471): REFERENCED BY SEQ ID NO: 810
gctcccccaaattcgtttgtttcccacggcgcaagaaagaaacaagggtacaagaacagcccgctaaaggaaagaaacaagggctacacaagaacagcttgagagctcctctccgatcccgacccaccgcctgcaactcttcttctctcctacgtgttcgtcagcccgctaagtgttaagatggcttcaagtgatggtcaaacagaagctgcggccccatctgtccccaaaaaccctgctatggcatcatgccggaagaagaaaacagatgatgctaccttcctcgaagatctgaaagaccacatcgatgagttcatccatgcctccatggatgagcacaagacctgctttaagaagacgatccagaagatgtttgggatgtcgaaggctgttgcagagagatccgcggcagaagcgaaggaagctggagttgaaagtgctttgccacttcagaccagtgtctcgcagtagaatttcacgttggtagtttcttgcttgacgccggcctttttttatacaagggttttgttgctctgtgttgtctgaaacgtataagcgtctcagtggcatgttttcataactgtattgtagtgctttcatcattctccgaagtttgttgtgtgagtatgccttaaaaaaaaaaaaaaaa

SEQ ID NO: 810 - protein, 96 aa, Zea mays
  misc_feature: Ceres CLONE ID no. 369996
  misc_feature: Ceres CDNA ID no. 25446340
MASSDGQTEAAAPSVPKNPAMASCRKKKTDDATFLEDLKDHIDEFIHASMDEHKTCFKKTIQKMFGMSKAVAERSAAEAKEAGVESALPLQTSVSQ

SEQ ID NO: 811 - DNA, 915 bp, Zea mays
  misc_feature: Ceres CLONE ID no. 370032
  misc_feature: Ceres CDNA ID no. 25445773
  CDS (492)..(752): REFERENCED BY SEQ ID NO: 812
agtttaagttagataccataattctagtaataccattgcaaacctaaggaaaaaaaactagctatgtcaagaaaatttggttggacacgcgaaggcaaagcaacaccgcaaatctctcccccctccctggaattgccattccacctccgctcgaattgccattccccctctctctcagtttctcttggattgaattgatagtttattagagtgaagttgtcgggggagggaggctaggcgttaggtgggcgcctgcgtgctacgcctcgggagaaggtcaaaagaaaccgccccaccaccaacccaggcgactcccccccaacccaacccaacccgccattgctcttctttccctccccgtcgccagctggccagagccgccccgcccggagcccaaaggcgccgcctttcctgaaccccgtccgcggcagattgatcgattggttgttcggttccttggtcgggaatcagaggaggcagcaagagaagagatgtgcccgctgcgggtgatcctcatcttcctctccgccaccgttgccggcttcttcctcatcaggggcctcaacgctgagcccgaccagttcgacgccgacgccgacgactcgggatcccccagggcacccctgccccttcattccaaggttggatcggccgtgaaagcagggttgtggacgatggtggacatggcgagcgggcggtacctctggcgcaccctcgctgcccaagcccagccttccaagtcggcgcggtgaaagtgaaaccatctcgtcctgcccatgcagtggagactggtacagtccgtcatgttgttgtaatgctgttacgtattggtatatattcaagtaaatttgcaaaaacaaaaactattcttgtgctgagctgagccttgtgttgtgtgtaaaaaaaaaaaaaaaa

SEQ ID NO: 812 - protein, 86 aa, Zea mays
  misc_feature: Ceres CLONE ID no. 370032
  misc_feature: Ceres CDNA ID no. 25445773
MCPLRVILIFLSATVAGFFLIRGLNAEPDQFDADADDSGSPRAPLPLHSKVGSAVKAGLWTMVDMASGRYLWRTLAAQAQPSKSAR

SEQ ID NO: 813 - DNA, 856 bp, Zea mays
  misc_feature: Ceres CLONE ID no. 370145
  misc_feature: Ceres CDNA ID no. 40350942
  CDS (74)..(655): REFERENCED BY SEQ ID NO: 814
accacactccactgctctcctccactccactgcctcccatccctgctgctccctctcccatcccggttccatcatgggcggcctctcggtgatcgcaccgcccgcgcgggactcggcttccccgcagcaccggcgcgcgcgccgcgcgttcctcgtgtccaactacctcatcctgggctgcgcctccgggtgcggcttcctcacgctctcgctccgcctggccccctccgtcgacggcttcctcctcatcctgctgcacgcgctcacggtggccgccgccgtggccgggtgcgccgtcatcgcggcgccggaccctccgcgcggccgctgctacaccgtccacatgtccgccaccgtcgtcgtctccatcctgcagggcgccgccgccgtgctcgccttctcccgcacgtcggagttcctctccgacggcctcaagtcgtacgtccgcgaggaggacggcgccgtcatcctccgcatggtcggcggcctcggcgtcgccatcttctgcctcgagtgggtcgcgctcgcgctcgccttcgtgctcaggtactacgtctacgtcgacagggagtgcggcggcaaccccatgcgccgcagcgccaaggtcggcggcgaggacggcgccggcacctggccctggcccttccaggtctgaagtggaccatgagtttttggaagggaaatcaagcgtcgagtgttatagaactatgtgggggacgggatgcacaatgttgtgattcgtttatttgtttattatgtggttttgtaatgtcatatttgtaacgctgttatatttatatgtgaaatttgcactgcattgcgatcgagcagtctgaaaataaaaaaaaaaaaaaaa

SEQ ID NO: 814 - protein, 193 aa, Zea mays
  misc_feature: Ceres CLONE ID no. 370145
  misc_feature: Ceres CDNA ID no. 40350942
MGGLSVIAPPARDSASPQHRRARRAFLVSNYLILGCASGCGFLTLSLRLAPSVDGFLLILLHALTVAAAVAGCAVIAAPDPPRGRCYTVHMSATVVVSILQGAAAVLAFSRTSEFLSDGLKSYVREEDGAVILRMVGGLGVAIFCLEWVALALAFVLRYYVYVDRECGGNPMRRSAKVGGEDGAGTWPWPFQV

SEQ ID NO: 815 - DNA, 671 bp, Zea mays
  misc_feature: Ceres CLONE ID no. 370225
  misc_feature: Ceres CDNA ID no. 29191482
  CDS (114)..(404): REFERENCED BY SEQ ID NO: 816
aaaaacatcatccccctcgccaagaaagaaggcagacgaaggcaaaccctagccaacgcgtacgcctcgccccccgcgcctcctcccccagatccggccgatccgtcgttgccatggcgctgcgagctctcgccggcaagctgagggtcctcccttcacgagcggcggcctctcgctccttcgcctcccagatggagaagaaatgcagcaagtgtgctcttgaagagcaggctggatccttctctcaatggttggatgaaaggaagaggcgtgatatggaagagcttgcaaggttcagaaggaagagctacgtgcacaatgtgctagttcttgctggtagtgttggctttgtggcattcacgttgtcatgcgttgctgatgttatagcagatgaaatgaactagggagaaggggaggggagcacggcggcagcaaatgctccatgattggactggtagcttccccagggtcagaaaaaagaatgtgactcactgactgtaggggaatgccatggaagtgtagatgtgatgtttcttctcaattgtatatgccattggattgatgtttggaaattttacgtgtagtatgtctaagataagtccttttatgtactggttccgtgaacctataaaaatgcttcagctagttcttgagtaaaaaaaaaaaaaaaa

SEQ ID NO: 816 - protein, 96 aa, Zea mays
  misc_feature: Ceres CLONE ID no. 370225
  misc_feature: Ceres CDNA ID no. 29191482
MALRALAGKLRVLPSRAAASRSFASQMEKKCSKCALEEQAGSFSQWLDERKRRDMEELARFRRKSYVHNVLVLAGSVGFVAFTLSCVADVIADEMN

SEQ ID NO: 817 - DNA, 914 bp, Zea mays
  misc_feature: Ceres CLONE ID no. 370247
  misc_feature: Ceres CDNA ID no. 25446341
  CDS (138)..(659): REFERENCED BY SEQ ID NO: 818
atgacactgacaccgttcgaagcaaaaagagcgaacacgagcacgaacacaagcgcagagcagccaagcgccacacacacgccgacgcgaaccaaccaaccagctggtagtaggttcgccgcggcgccgcgctgacgatgatgcctcgccgcgcccttctcttcgccgcggtgctcctcgcggcctccgccgccgcggtctccgggtttcacctcggcggggacgagagcggtctcgtgaggggtgtgctcgccgcgctccgcgagcgggccgaggccgtggacgccgctcgcttcgccgtcgcccactacaacaagaaccagggcgccgctttggagtttactagggtgctcaaatccaagcggcaggtggtgaccgggaccctgcatgacctgatactggaggcagctgatgctggaaaaaagagtgtgtacagagcaaaggtttgggtgaagccgtgggaagatttcaagtctgtcgtcgagtttcgccttgttggagactctgaatctgaacccgagccttctgttgcttctgatgttagctctgggcaagcaattgccaaactctctcttgaagcagatattgtacaagaagaggctcgcctgcacaccattgagaatgatgggctttccggcgatttcacatcatcatcttaggattccaggcaaggatggaaagcgtaaaggtttaaatgaagatttaggtatttagggttctacatagtatgtcaagctgaaatgctttgccttgtttattggaatatgtatgtttcgtttcaaacgtgggagcatagaactgtatatttcggtatttcacactgttcatttccatgtctgtatataaggaggttcttctggctatatgtatattttgatcctcaagtacttattctcaaaaaaaaaaaaaaaaaa

SEQ ID NO: 818 - protein, 173 aa, Zea mays
  misc_feature: Ceres CLONE ID no. 370247
  misc_feature: Ceres CDNA ID no. 25446341
  misc_feature (36)..(121): Pfam Name: Cystatin PFAM Desc: Cystatin domain
  misc_feature: Homolog of GI Number: 71061122 NR Desc: TPA: putative cystatin
  misc_feature: Homolog of GI Number: 71794641 NR Desc: putative cystatin
  misc_feature: Homolog of GI Number: 71061120 NR Desc: TPA: putative cystatin
  misc_feature: Homolog of GI Number: 71794639 NR Desc: putative cystatin
  misc_feature: Homolog of GI Number: 18874516 NR Desc: cystatin
  misc_feature: Homolog of GI Number: 585033 NR Desc: Multicystatin
  misc_feature: Homolog of GI Number: 15795168 NR Desc: cysteine proteinase inhibitor
  misc_feature: Homolog of GI Number: 3452387 NR Desc: cysteine protease inhibitor
  misc_feature: Homolog of GI Number: 27752377 NR Desc: cysteine protease inhibitor cystatin
  misc_feature: Homolog of GI Number: 56783763 NR Desc: putative cysteine proteinase inhibitor
MMPRRALLFAAVLLAASAAAVSGFHLGGDESGLVRGVLAALRERAEAVDAARFAVAHYNKNQGAALEFTRVLKSKRQVVTGTLHDLILEAADAGKKSVYRAKVWVKPWEDFKSVVEFRLVGDSESEPEPSVASDVSSGQAIAKLSLEADIVQEEARLHTIENDGLSGDFTSSS

SEQ ID NO: 819 - DNA, 1303 bp, Zea mays
  misc_feature: Ceres CLONE ID no. 370256
  misc_feature: Ceres CDNA ID no. 40041195
  CDS (148)..(930): REFERENCED BY SEQ ID NO: 820
actcatcacaaatctctctctctctctacaagctccagctagactgtcctgctctgcttcggcgctactgtgcagtgtgcacagccagccagctctgcagcagagcagagtccggctgtgagccctgaccagagaggattcagtgccatggagagacctgcgcaggcgcccacgcagctgccgccggggttccggttccaccccaccgacgaggagctggtagtgctgtacctccgccggaaggccctggctcgcccgctgccggcagccgtcatccccgtcgtccacgacgtcgccgggctcgatccatgggacctccctggggcaagcgaaggggagggttacttctttagcctgcggcgagcgccggcgaccggccgtggcagccgcaggaggagagctgggagcgggtactggaaggccacgggcaaggaggagccggtgttcctacagtgcggcggcggcggcgtaggcggcaagaggcagctgctcgtgggcggcaagacggcgctcgccttccaccgcagtgagccgtcgccgccgtcgtcgtcgcggacaggctgggtcatgcacgagtaccggctcgccgccgcgtcccgcggcgtggccgagcagaggaagaagaatgcgagccatggttgttgcgatgctgagccgggagagtgggtcgtgtgccgggtctttctgaagaagggagcaagaagaagcaggccgggccgggatggtaaccacagcagagctctgagacaccgcgcatccgctgcgccgccgcagctccgggaaggtgtgggaggacggcagccgttgctgttcccggcgccacagtcgccgtcctcaagctgtgtcaccggcgttaccgacttgtcagacgaagaagacgaagtcagcagcggcagcgtaacaagagttgcacctcagagagaggcctgatggggattttaagtgttccctcccccctctctcatggtcccgtagcccaacctttttatggtaccatataatgatgatgaattaagcaccagataatcaggtttaaggcatgtccagcgcaggagtgatcccgaaatatcatgtcaaatggatctggcaacctgagtttaaatcaggagcaatagtttctacgcttcatctgtgaagcagcatccactttgatttggaactagaaaatgggcgctgcaacggcccgatggtgtgtaaaatctaaaaacgtagccaaggcattctttaagctgtatacctccatcccaaaatataatttattttagactaaatatatattcattaagcaaaaaaaaaaaaaaaa

SEQ ID NO: 820 - protein, 260 aa, Zea mays
  misc_feature: Ceres CLONE ID no. 370256
  misc_feature: Ceres CDNA ID no. 40041195
  misc_feature (11)..(147): Pfam Name: NAM PFAM Desc: No apical meristem
  misc_feature: Homolog of GI Number: 77555431 NR Desc: NAC domain protein NAC2
  misc_feature: Homolog of GI Number: 51979711 NR Desc: PREDICTED OSJNBa0033D24.25 gene product
  misc_feature: Homolog of GI Number: 2459430 NR Desc: putative NAM
  misc_feature: Homolog of GI Number: 34899790 NR Desc: putative OsNAC5 protein
  misc_feature: Homolog of GI Number: 34902154 NR Desc: Putative NAM
  misc_feature: Homolog of GI Number: 23506087 NR Desc: At5g13180/T19L5_140
  misc_feature: Homolog of GI Number: 4325286 NR Desc: NAC domain protein NAM
  misc_feature: Homolog of GI Number: 23198168 NR Desc: NAM
  misc_feature: Homolog of GI Number: 6730940 NR Desc: OsNAC5 protein
  misc_feature: Homolog of GI Number: 21554226 NR Desc: NAM
MERPAQAPTQLPPGFRFHPTDEELVVLYLRRKALARPLPAAVIPVVHDVAGLDPWDLPGASEGEGYFFSLRRAPATGRGSRRRRAGSGYWKATGKEEPVFLQCGGGGVGGKRQLLVGGKTALAFHRSEPSPPSSSRTGWVMHEYRLAAASRGVAEQRKKNASHGCCDAEPGEWVVCRVFLKKGARRSRPGRDGNHSRALRHRASAAPPQLREGVGGRQPLLFPAPQSPSSSCVTGVTDLSDEEDEVSSGSVTRVAPQREA

SEQ ID NO: 821 - DNA, 550 bp, Zea mays; identical to SEQ ID NO: 391
  misc_feature: Ceres CLONE ID no. 370708
  misc_feature: Ceres CDNA ID no. 25446295
  CDS (48)..(284): REFERENCED BY SEQ ID NO: 822

SEQ ID NO: 822 - protein, 78 aa, Zea mays; identical to SEQ ID NO: 138
  misc_feature: Ceres CLONE ID no. 370708
  misc_feature: Ceres CDNA ID no. 25446295
  misc_feature (1)..(77): Pfam Name: Metallothio_2 PFAM Desc: Metallothionein
  misc_feature: Homolog of GI Number: 55416162 NR Desc: metallothionein
  misc_feature: Homolog of GI Number: 46358913 NR Desc: metallothionein
  misc_feature: Homolog of GI Number: 56549629 NR Desc: metallothionein
  misc_feature: Homolog of GI Number: 32400768 NR Desc: metallothionein
  misc_feature: Homolog of GI Number: 13491970 NR Desc: metallothionein
  misc_feature: Homolog of GI Number: 3901014 NR Desc: metallothionein
  misc_feature: Homolog of GI Number: 23954357 NR Desc: metallothioneine type2
  misc_feature: Homolog of GI Number: 46850185 NR Desc: metallothionein 2a
  misc_feature: Homolog of GI Number: 34895842 NR Desc: putative metallothionein
  misc_feature: Homolog of GI Number: 15825501 NR Desc: type 2 metallothionein

SEQ ID NO: 823 - DNA, 641 bp, Zea mays
  misc_feature: Ceres CLONE ID no. 370764
  misc_feature: Ceres CDNA ID no. 25445617
  CDS (84)..(350): REFERENCED BY SEQ ID NO: 824
atcacttatcatccccatccgcacctctctccatctccctgctcctccgccttcttcttgatccagccaagccagggatcgccatgtcggactcggaggagcaccacttcgaatcgaaggccgacgccggagcgtccaagacctacccgcagcaggctggcaccgtccgtaagaacggcttcatcgtcatcaagaaccgcccctgcaaggttgtggaggtttctacctcaaagactggtaagcatggtcatgccaaatgccactttgttgccatagatatattcaacgggaaaaagctcgaagatattgttccttcgacgctgtcaagggagattggaagttcagggtgaagcacttcagcgcctacgggctttggtgaaatcctggggagttaagtagtttgtttgttctgatggagcaacgctttacgctcttgtcaaataccatgcttggatctgttgtgctgcttctgtacaatgttgctgctgttaaaatgcttgcaaattgcactgctctgctgctgaaaacaggagcagcagtagaaactaccgcaacaggagggcgtgctacctgctactgttatgtattattatactatattctaagtataataagacttagttttttaaaaaaaaaaaaaa

SEQ ID NO: 824 - protein, 88 aa, Zea mays
  misc_feature: Ceres CLONE ID no. 370764
  misc_feature: Ceres CDNA ID no. 25445617
  misc_feature (28)..(64): Pfam Name: KOW PFAM Desc: KOW motif
  misc_feature: Homolog of GI Number: 1546919 NR Desc: translation initiation factor 5A
  misc_feature: Homolog of GI Number: 50938957 NR Desc: translation initiation factor 5A
  misc_feature: Homolog of GI Number: 34915268 NR Desc: putative translation initiation factor 5A
  misc_feature: Homolog of GI Number: 13236654 NR Desc: translation initiation factor 5A
  misc_feature: Homolog of GI Number: 8919176 NR Desc: translation initiation factor
  misc_feature: Homolog of GI Number: 77555893 NR Desc: translation initiation factor eIF
  misc_feature: Homolog of GI Number: 44894088 NR Desc: eukaryotic initiation factor 5A2
  misc_feature: Homolog of GI Number: 7443511 NR Desc: translation initiation factor eIF
  misc_feature: Homolog of GI Number: 33325131 NR Desc: eukaryotic translation initiation factor 5A isoform VIII
  misc_feature: Homolog of GI Number: 19887 NR Desc: eukaryotic initiatin factor 5A
  misc_feature: Useful for making plants that grow better in shade
  misc_feature: Useful for making plants with increased biomass and foliage
MSDSEEHHFESKADAGASKTYPQQAGTVRKNGFIVIKNRPCKVVEVSTSKTGKHGHAKCHFVAIDIFNGKKLEDIVPSTLSREIGSSG

SEQ ID NO: 825 - DNA, 769 bp, Zea mays
  misc_feature: Ceres CLONE ID no. 370920
  misc_feature: Ceres CDNA ID no. 36707368
  CDS (207)..(566): REFERENCED BY SEQ ID NO: 826
acgttagcgtttgcgtgcgcgtagcaactccccacgcaaagccgccgccgttccctctcgtcttccccagttcccctacgccggtaatcccacgtcctatcagccgccgatccagccttgcttccatccatccatccatccatccatccatctcgtcgcttctctctgttccgcgtgcgatcgagtagatcaaaaggaggaggaggatggcgaggagttcgttcaagttggagcaccccttcgaaaggaggcaagctgaggctaaccgcatcagggagaaataccctgacagaatccctgtcattgttgagaaggccgagaggagtgacatcccagacattgacaagaaaaagtaccttgttcctgccgacctcacagtcggacagtttgtgtatgtggtacggaagcggatcaagctaagcgctgagaaggcaatcttcatcttcgtaaagaacaccctcccaccaacagctgctctgatgtctgccatctacgaggagaacaaggacgaggacggcttcctctacatgacgtacagcggcgagaacaccttcgggctgttctgagtgggcgccgctatggatccacattgggcaatgcctcctgtaaatactaaacatgcatcacaagaatctgtgtccataacgtaatctggtctgtctgtctgtctgtctgtctgtcattacgcaacttgacgtgcaatgctaaacacatttaagtaataatatatactactctgctttgggatgctccaaaaaaaaaaaaaaaa

SEQ ID NO: 826 - protein, 119 aa, Zea mays
  misc_feature: Ceres CLONE ID no. 370920
  misc_feature: Ceres CDNA ID no. 36707368
  misc_feature (14)..(117): Pfam Name: MAP1_LC3 PFAM Desc: Microtubule associated protein 1A/1B
  misc_feature: Homolog of GI Number: 50941899 NR Desc: putative microtubial binding protein
  misc_feature: Homolog of GI Number: 34595981 NR Desc: microtubule
  misc_feature: Homolog of GI Number: 50928837 NR Desc: OSJNBa0053K19.12
  misc_feature: Homolog of GI Number: 50937683 NR Desc: putative microtubule associated protein
  misc_feature: Homolog of GI Number: 21592920 NR Desc: putative microtubule
  misc_feature: Homolog of GI Number: 4581162 NR Desc: putative microtubule
  misc_feature: Homolog of GI Number: 30102824 NR Desc: At4g21980
  misc_feature: Homolog of GI Number: 21553487 NR Desc: symbiosis
  misc_feature: Homolog of GI Number: 3024687 NR Desc: SYMBIOSIS
  misc_feature: Homolog of GI Number: 2072023 NR Desc: symbiosis
MARSSFKLEHPFERRQAEANRIREKYPDRIPVIVEKAERSDIPDIDKKKYLVPADLTVGQFVYVVRKRIKLSAEKAIFIFVKNTLPPTAALMSAIYEENKDEDGFLYMTYSGENTFGLF

SEQ ID NO: 827 - DNA, 1251 bp, Zea mays
  misc_feature: Ceres CLONE ID no. 370931
  misc_feature: Ceres CDNA ID no. 40041196
  CDS (338)..(973): REFERENCED BY SEQ ID NO: 828
gtgaccacacagggcggggactggggcgtgtgcggcacgcagatgcagatttccccggatggggcgtgtgcggctgccggggccgcatcgtgtgcacgccaaactctcccgtcctcttcccctcctcgacaccaagctagcgacgctacgcagcagcagctacggagtatcttattatccccccccgctggcactctggtagctattacccttccccacactgctgcgccgcgcagtcttctgcttctccccaccctcgcctcagcttccctgccgttccctccgatcaccagctgctgagtgctgagccaagaaccatcgcgtttcattggtagcgatgaagatcttgaaccagctcatcagcccaggcggccacccggtgtcgttcccgccggcggcggccaaggagagcgggcatctcgtgccggcgcagccgaccaccacggcggccgcggggcggtcccatgcgcactgccctcggtggcaggcgcagacgctgcgccgggccagcagctacgtcggcgtcgagcacatcgacgggaccaccgcgtccgtcccagtcccagtcccagtcccagtcgcggccccgttcaagccgctcacgctcgacttcctgcggtcgctcctggaccggaactgcagcatggcccccgccgtcccggacggggaggccagcgccccgccgccgccgcagatggtcgcgctccgggtgctggtgacctccgccgtggagctggacgcgcgccaggccgagcgcatcgcgcgcaagatgcgccgcctcaccggctttgtcgacctcaaggtcgagatcgccgtggacgcgtccctcatcgccggcttcgtcgtctgctacggcaccgacgactcgcacgtcatcgacctcagcgtcaggggccagctcgcggcgctcaagagccgcgtcgactccatcgaccagaccgcgcatgcccacggacacccacaccaccactgaccgtcgatccaacaccagatgcaccggagcaaagcacagcgcgccgtcaccgtgctacagcttacaatacaagcctatactgtacacgcacagaatgacagaaccgaacgcgcgccatggcaacaacagttttcctatgtaatgttgttgtaaatcgatagcgagaaaacttaattgctgctaccttccttcctgctgagcttgtatacgtttctattgctaaagaaacgaacgctattgattgtatatttgatcgatgtggaaaaaaaaaaaaaaaa

SEQ ID NO: 828 - protein, 211 aa, Zea mays
  misc_feature: Ceres CLONE ID no. 370931
  misc_feature: Ceres CDNA ID no. 40041196
  misc_feature (37)..(195): Pfam Name: OSCP PFAM Desc: ATP synthase delta
  misc_feature: Homolog of GI Number: 67988031 NR Desc: ROK
  misc_feature: Homolog of GI Number: 67987133 NR Desc: Oligopeptide/dipeptide ABC transporter
  misc_feature: Homolog of GI Number: 5902612 NR Desc: ATP synthase
  misc_feature: Homolog of GI Number: 67986468 NR Desc: Carbohydrate kinase
  misc_feature: Homolog of GI Number: 311237 NR Desc: H
  misc_feature: Homolog of GI Number: 1134976 NR Desc: chloroplast ATP synthase subunit delta precursor
  misc_feature: Homolog of GI Number: 55643233 NR Desc:  similar to splicing coactivator subunit SRm300 RNA binding protein
  misc_feature: Homolog of GI Number: 7949115 NR Desc: Ser/Arg
MKILNQLISPGGHPVSFPPAAAKESGHLVPAQPTTTAAAGRSHAHCPRWQAQTLRRASSYVGVEHIDGTTASVPVPVPVPVAAPFKPLTLDFLRSLLDRNCSMAPAVPDGEASAPPPPQMVALRVLVTSAVELDARQAERIARKMRRLTGFVDLKVEIAVDASLIAGFVVCYGTDDSHVIDLSVRGQLAALKSRVDSIDQTAHAHGHPHHH

SEQ ID NO: 829 - DNA, 886 bp, Zea mays
  misc_feature: Ceres CLONE ID no. 370971
  misc_feature: Ceres CDNA ID no. 25445774
  CDS (150)..(617): REFERENCED BY SEQ ID NO: 830
aaggcaccaccacctgctagctctctgtctcctgctcagagtcgcagttcgctttgttgtactagagcgctgagcagatctttccttgtttcttcattccggtacgaaggggaggggtccaagtgaagagaagagaaggcctgcgagcgatgggcatcgtcgacgtcgtctccgagttctgctccttgccgaggactcgccggcatctcaagaagaggaagcagttccagacggtggagatgaaggtgcgcatcgactgcgaagggtgcgagcgcaaggtgaagaaggcggtggagggcatgaagggcgtgagctccgtggaggtggcggccaagcagaacaaggtgacggtcacgggctacgtggacgccgccaaggtcatgcgccgcgtcgcctacaagacgggcaagcgggtggagccctggccctacgtgccctacgagatggtgcagcacccctacgcgccgggcgcctacgacaagaaggcccccgccggctacgtccgcaacgtcgtctccgaccccaccgccgcgccgctcgccagggcctcctccaccgaggtccgctacaccgccgccttcagcgacgagaaccccaacgcctgctccgtcatgtagacccacccaccgaccgaccccttgttttctagctattagttactacttagtataggtgcttgcttgggagagttgctcttggagggaggttttgctcttcctgtttttttctttttattttttttttcgttttccggtttcatgtagatgtagtgtgcgttttgatttttgtgaaaaaaaataaaccagtttgtaacggtagaccacttgtgcaaactaggatcagaaaaaaaatcagttcgtccttgcaaacaaaaaaaaaaaaaaaa

SEQ ID NO: 830 - protein, 155 aa, Zea mays
  misc_feature: Ceres CLONE ID no. 370971
  misc_feature: Ceres CDNA ID no. 25445774
  misc_feature (29)..(91): Pfam Name: HMA PFAM Desc: Heavy
  misc_feature: Homolog of GI Number: 50921835 NR Desc: OSJNBa0091C12.3
  misc_feature: Homolog of GI Number: 23304411 NR Desc: farnesylated protein 1
  misc_feature: Homolog of GI Number: 50919765 NR Desc: Putative atfp6
  misc_feature: Homolog of GI Number: 51970154 NR Desc: atfp6
  misc_feature: Homolog of GI Number: 12642882 NR Desc: putative farnesylated protein ATFP6
  misc_feature: Homolog of GI Number: 21536547 NR Desc: farnesylated protein
  misc_feature: Homolog of GI Number: 4097573 NR Desc: GMFP7
  misc_feature: Homolog of GI Number: 37202066 NR Desc: At5g66110
  misc_feature: Homolog of GI Number: 34914538 NR Desc: OSJNBa0094H06.16
MGIVDVVSEFCSLPRTRRHLKKRKQFQTVEMKVRIDCEGCERKVKKAVEGMKGVSSVEVAAKQNKVTVTGYVDAAKVMRRVAYKTGKRVEPWPYVPYEMVQHPYAPGAYDKKAPAGYVRNVVSDPTAAPLARASSTEVRYTAAFSDENPNACSVM

SEQ ID NO: 831 - DNA, 434 bp, Zea mays
  misc_feature: Ceres CLONE ID no. 370990
  misc_feature: Ceres CDNA ID no. 29191361
  CDS (192)..(344): REFERENCED BY SEQ ID NO: 832
agtaaaaaaaagttctcgcgcatggtcggtctgcgactgcctctgaccgcactgctctcttctcctgttctctctccccacttcgagacttcctccattcgcggtttgcctctctgcctccctccctcagatcctccctaagattgccatggcggaccgcgaatagaagaatctccgtgggagaggtactgatgagagagagcgactattttgtgttcataatattcattaccttttttttagcttttttcggtcgttgcccagttcgtagtttttgccttacattggacttcgctccgattttttttctctgcttttccttcatagactggtgtaagctgtaaccgaacactgtcaaatgcaaatcatcttagggccccttcggttattactgaatggaggcatggaataatttcaaaaaaaaaaaaaaaaaa

SEQ ID NO: 832 - protein, 50 aa, Zea mays
  misc_feature: Ceres CLONE ID no. 370990
  misc_feature: Ceres CDNA ID no. 29191361
MRESDYFVFIIFITFFLAFFGRCPVRSFCLTLDFAPIFFLCFSFIDWCKL

SEQ ID NO: 833 - DNA, 645 bp, Zea mays
  misc_feature: Ceres CLONE ID no. 371362
  misc_feature: Ceres CDNA ID no. 29191853
  CDS (1)..(390): REFERENCED BY SEQ ID NO: 834
aagaggccaagaccgagccgcctggatctgattgggttggctctcgtcgcgggggcgaaggggaaggggaggaagaaccaggaggcgtgcgttctcgtccaagatgctgcagctgctgatggcgctggccttctcggcggccccgctgacgctgtacgtgccgccggtgcgcagcctcagcctcttcgtggaggccatggaggccgtctgccgcgactgcgggccctactcccacggcgccgtcgcccgcttccgcctcggcttctcccgcgtcctcgccggcctagcgcgcgccctccgctaggcaggccggcaccccatcgccggcgccggttcctcctgcctacaggagtatatacagtatactacacggacacgcacgttcggtgaccttgtgctctccctggtttctatgtcctttttgtattactagcgaggaagtggtttctagcgcagcacagcaatctacatgcaggagcaggactagcggcggtcagtttcgagatcttctgcttcgtttctccctttttgtgctctctctttcttttctgttttttttttgaggattgggtgtagcatgtagagtgaggaaaggttaataaatctgtccaaaaagggagattttgcaaaaaaaaaaaaaaaaaa

SEQ ID NO: 834 - protein, 66 aa, Zea mays
  misc_feature: Ceres CLONE ID no. 371362
  misc_feature: Ceres CDNA ID no. 29191853
MLQLLMALAFSAAPLTLYVPPVRSLSLFVEAMEAVCRDCGPYSHGAVARFRLGFSRVLAGLARALR

SEQ ID NO: 835 - DNA, 575 bp, Zea mays
  misc_feature: Ceres CLONE ID no. 371529
  misc_feature: Ceres CDNA ID no. 25446342
  CDS (105)..(332): REFERENCED BY SEQ ID NO: 836
cccggcacgcgaggtaggtcggtgccgctctcgccgtctgtccctcccacgcctcgagtcgctccccgctgatacactcggccgcatcacagggcgcagcgttgatggcggcggcaccggcggacgctaaggcggaggccgccaagatggacctcctcgaggacgatgacgagttcgaagagttcgagatcgaccaagaatgggatgaccaggaagaaggcaacgaagccgtccagcagtgggaggatgattgggatgacgatgacgtgaacgatgatttctcgctgcagcttaaggaagagctggacggaagcaacggccagaagagctgaagtattatttctctactttatataaatgatttttatatggcagctacttttggaaccgttgatgtgctttggatgtgaaagtttttggacatcagtcggcaatttgacagcactgtacgtgttagttgtcgttaggatatgtctctagccgaaacgctagaatccgccacaatgtctacgccccaactgtttctcttaaaagagtgccgcaactgtttttgtaccaaaaaaaaaaaaaaaaaa

SEQ ID NO: 836 - protein, 75 aa, Zea mays
  misc_feature: Ceres CLONE ID no. 371529
  misc_feature: Ceres CDNA ID no. 25446342
  misc_feature (8)..(70): Pfam Name: DSS1_SEM1 PFAM Desc: DSS1/SEM1 family
  misc_feature: Homolog of GI Number: 37050895 NR Desc: deleted in split hand/splt foot protein 1
  misc_feature: Homolog of GI Number: 66509809 NR Desc:  similar to ENSANGP00000017966
  misc_feature: Homolog of GI Number: 32416282 NR Desc: predicted protein
  misc_feature: Homolog of GI Number: 60465541 NR Desc: DSS1/SEM1 family protein
  misc_feature: Homolog of GI Number: 55628924 NR Desc:  similar to 26 proteasome complex subunit DSS1
MAAAPADAKAEAAKMDLLEDDDEFEEFEIDQEWDDQEEGNEAVQQWEDDWDDDDVNDDFSLQLKEELDGSNGQKS

SEQ ID NO: 837 - DNA, 695 bp, Zea mays
  misc_feature: Ceres CLONE ID no. 371701
  misc_feature: Ceres CDNA ID no. 25446343
  CDS (87)..(410): REFERENCED BY SEQ ID NO: 838
gagagtaatctctttttgcaaagaggccgccaactcttgtaccatcacggcgtcggagggccagtcgacctctctgctcgcgaaaaatggcggcggcagcggaaggtttggctgcctacagggcggtgctgcgggcggcgcggcggacgttcgcgggcgaccagctgatgctgaaggagtctgcggtggagatccggcgccgctttgaggaccaccgtggtctaaccccgggctccgacgatgcagcgcgtgccctcgccgacgcccgcgaggcggcgcacttcatcacccatatgatagtccaggccacacgcgcaccctccggatccttcgttgtgaagcctgagagtgttcatgctggagctacactggaagttccttccgaggagatcctttcaaagttgaagtaggtcactagcattgctgaagtaggtcaccatcttcatgctagtaaaataagaccagtttgcaacggttgattcttgtgttgcatactggtgcacttagtagcttcacacttttgcttttattattattattattattactgagagcatttagcggcaccaaggtaccggtgtcttcgatgcaaagtagtgtgaaacggctattgaggtttttgaaaatcgactgtatgatgaggaattatgcaaataggaaaattgcagtgccgtggaataaaaaaaaaaaaaaaa

SEQ ID NO: 838 - protein, 107 aa, Zea mays
  misc_feature: Ceres CLONE ID no. 371701
  misc_feature: Ceres CDNA ID no. 25446343
  misc_feature (2)..(69): Pfam Name: Complex1_LYR PFAM Desc: Complex 1 protein
MAAAAEGLAAYRAVLRAARRTFAGDQLMLKESAVEIRRRFEDHRGLTPGSDDAARALADAREAAHFITHMIVQATRAPSGSFVVKPESVHAGATLEVPSEEILSKLK

SEQ ID NO: 839 - DNA, 1070 bp, Zea mays
  misc_feature: Ceres CLONE ID no. 372099
  misc_feature: Ceres CDNA ID no. 40041197
  CDS (87)..(824): REFERENCED BY SEQ ID NO: 840
agttctccacccgcttcttttccctcgctcgctcgcggctcgtccgtcgcccgcctgcctgccagtgcgcgccctctccctccctcatggcggactgcttcccgcccgagtcggacgacttccaccgccgctggctgccgcgggagatcctcgccgacattggcatcgccgaccccgaggccgtcggcgccgagaccccgcccgaggccgccgccgccgccgccgtggaggagctcgcggcgcagctcgccggcatcctcggcggcggcgccaaggcgtggccgctcggcccgccgccgcagccgcctacgcccgccgctccgcccgtcgccgcggcggccgttgccccgtgctacggcgcgaaggtctgcgggctgcaaggtagcgtcgtcgtgtcctgcggcgagaccaatggcggcggcgccgtgtcttggccgttcgtgccgtacccgccgcagctccactggcaggtcgggagcggcctggtgaaccacggcggcgtgctggactacccggtgctgccccctgctgctctaccctgccacgtcccgccgcccgccaacctgcgcggcggcaccggcgtgttcctgccgcgcatcgaggcgtaccgctacgcggccgctcccccggccaccgccaaaggtggggcagcgacaaagccgtgggctgggactgggagcaggccggcaacggggaagaagcaggagcggcagcaggccgagcaggcggcgccggcagcaaagcacccccagaagcagcggcagcagcagcagcaggctaccggcgcagcgctggctctgccccaggactggtgctaccgctgatgatgtgttggaggcgcgtgcgtgcatgcatggacatggacatggacatggacatggatggacgcgatggtgcctgccaagacagatggcgaacgttcaagcaattcgtattcgtagcagacgttctttagtagtggcagtggccagggaaaaagaataacaacaacaataaataagaataaggaaacgatgatggatggatggataatgtagctgcagctgcaagacaaaaaaaaaaaaaaaaaa

SEQ ID NO: 840 - protein, 245 aa, Zea mays
  misc_feature: Ceres CLONE ID no. 372099
  misc_feature: Ceres CDNA ID no. 40041197
  misc_feature: Homolog of GI Number: 71367849 NR Desc: similar to Methylase involved in ubiquinone/menaquinone biosynthesis
  misc_feature: Homolog of GI Number: 66778264 NR Desc: LigA
  misc_feature: Homolog of GI Number: 67985353 NR Desc: UBA/THIF
  misc_feature: Homolog of GI Number: 66778899 NR Desc: UvrD/REP helicase
  misc_feature: Homolog of GI Number: 66780099 NR Desc: PE
  misc_feature: Homolog of GI Number: 66776103 NR Desc: LigA
  misc_feature: Homolog of GI Number: 76819764 NR Desc: putative 1
  misc_feature: Homolog of GI Number: 67987580 NR Desc: ABC transporter
  misc_feature: Homolog of GI Number: 67987177 NR Desc: 4Fe
  misc_feature: Homolog of GI Number: 66776716 NR Desc: Glycosyl transferase
MADCFPPESDDFHRRWLPREILADIGIADPEAVGAETPPEAAAAAAVEELAAQLAGILGGGAKAWPLGPPPQPPTPAAPPVAAAAVAPCYGAKVCGLQGSVVVSCGETNGGGAVSWPFVPYPPQLHWQVGSGLVNHGGVLDYPVLPPAALPCHVPPPANLRGGTGVFLPRIEAYRYAAAPPATAKGGAATKPWAGTGSRPATGKKQERQQAEQAAPAAKHPQKQRQQQQQATGAALALPQDWCYR

SEQ ID NO: 841 - DNA, 923 bp, Zea mays
  misc_feature: Ceres CLONE ID no. 372115
  misc_feature: Ceres CDNA ID no. 25445520
  CDS (376)..(762): REFERENCED BY SEQ ID NO: 842
aaatgcacacaaaactagggtttcccaccccagccggcgtcaccctcatgagccagccgccaccccacgtccccacccatccgccagccccaggcttctagcctctgtcccagccggcagcccgccacccgcgaggccgcgaccggcgaccgcccgcccctgacgcggtgactgcgtcctcctccactctccgtgcgccaccctgaagcggtgaggcggcgacctccaggcaccgccctcccccggttcggcggctccctcgaggccttcctccccaccggttcagcagctcccgatccacacggccaaaggccgattcgcgctcctccagccttcctccgcgtccaacagcaagtgaaaaacttcaacccatgaatggcgatgtcttggacaagagggttaaagcatggtgttgttccgaggcatgccgctcaattggtagagagcagaagccttgcaattgcaagcaaggcgaagaagggtggaaagggtgatgcttccaaaactcctgctctcagccaagaactcaagagtacaacagtgttcggggcaaacatcttcaaggagggttctgatccgaaaatccaaccagactctgagtatcctgactggctgtggcacttgctcgacaagcgtcctgtactaagtgagctgcggaggaaagatcccaagacactctcttatgaagacctgaagcgttttgtcaagttggacaaccgatccaggatcaagataaggaatgacctcaatgctaagaactgacctggagtcttggacgaaacaggacctgttctactgttctttttattattaatataatactagacgatatgaataatttttctggagtttttggcaaaacatagcgacctgggatgttaaaatgttaagatttgcttggtttgctaaaaaaaaaaaaaaaa

SEQ ID NO: 842 - protein, 126 aa, Zea mays
  misc_feature: Ceres CLONE ID no. 372115
  misc_feature: Ceres CDNA ID no. 25445520
  misc_feature: Homolog of GI Number: 48138358 NR Desc: similar to CG9353
  misc_feature: Homolog of GI Number: 57102172 NR Desc:  similar to mitochondrial ribosomal protein L54
MSWTRGLKHGVVPRHAAQLVESRSLAIASKAKKGGKGDASKTPALSQELKSTTVFGANIFKEGSDPKIQPDSEYPDWLWHLLDKRPVLSELRRKDPKTLSYEDLKRFVKLDNRSRIKIRNDLNAKN

SEQ ID NO: 843 - DNA, 870 bp, Zea mays
  misc_feature: Ceres CLONE ID no. 372183
  misc_feature: Ceres CDNA ID no. 36586956
  CDS (94)..(792): REFERENCED BY SEQ ID NO: 844
gtagtacatcacgagtgctccaaacaaatagagttttccttcaccgagccagacccagaagaaggggagccggaggtagaaagaccagagaagatggcgaccaccgagccggcggcggtgaggctggtgggctccttcgccagcccgttcgtccaccgcgccgaggtggccctgcgcctcaaaggggtgccctacgagctcatcctggaggacctgggcaacaagagcgagctgctgctggcacacaaccccgtgcacaaactcgtgcccgtgctcctccacggcgacagggccatctccgagtcgctcgtcatcctcgagtacgtcgacgaggccttcgacgggccgcctctcctccccgcggaaccccacgcgagggcggacgcgcggttctgggcccacttcatcgaccaaaagttcgcgcggccgttctggatgtcgttctggacggacgacgaggagcgcagggaggctatggcgaaggaggccaaggagaacctggctctgctcgaggcgcagctcagggggcagaggttcttcggcggcgaggccatcggcttcgtcgacatcgccgcctgtgcgctggcgcactgggtcggggtcatcgaggaggctgccggggtggtcctcgtcggcggcgaggagttcccagcgctccgcgagtgggccgacgcctacgtcaacgacgccaccgtgaagcagtgcttgaggagccgcgacgagctcgtcgattacttctccgccaggaaggagatgtacttgctgcgagcgagggccactccgcgcagctgatctggaccccatgtttccttccgttcgcaataagccaataataaagactagtttggtaacaaaaaaaaaaaaaaaaaa

SEQ ID NO: 844 - protein, 232 aa, Zea mays
  misc_feature: Ceres CLONE ID no. 372183
  misc_feature: Ceres CDNA ID no. 36586956
  misc_feature (88)..(199): Pfam Name: GST_C PFAM Desc: Glutathione S
  misc_feature (9)..(80): Pfam Name: GST_N PFAM Desc: Glutathione S
  misc_feature: Homolog of GI Number: 11385507 NR Desc: glutathione S
  misc_feature: Homolog of GI Number: 57900467 NR Desc: putative glutathione S
  misc_feature: Homolog of GI Number: 50904497 NR Desc: putative glutathione S
  misc_feature: Homolog of GI Number: 50904491 NR Desc: putative glutathione S
  misc_feature: Homolog of GI Number: 4468798 NR Desc: GST7 protein
  misc_feature: Homolog of GI Number: 57900466 NR Desc: putative glutathione S
  misc_feature: Homolog of GI Number: 50904501 NR Desc: putative glutathione S
  misc_feature: Homolog of GI Number: 13699857 NR Desc: glutathione S
  misc_feature: Homolog of GI Number: 34896730 NR Desc: putative glutathione transferase
  misc_feature: Homolog of GI Number: 11385509 NR Desc: glutathione S
MATTEPAAVRLVGSFASPFVHRAEVALRLKGVPYELILEDLGNKSELLLAHNPVHKLVPVLLHGDRAISESLVILEYVDEAFDGPPLLPAEPHARADARFWAHFIDQKFARPFWMSFWTDDEERREAMAKEAKENLALLEAQLRGQRFFGGEAIGFVDIAACALAHWVGVIEEAAGVVLVGGEEFPALREWADAYVNDATVKQCLRSRDELVDYFSARKEMYLLRARATPRS

SEQ ID NO: 845 - DNA, 624 bp, Zea mays
  misc_feature: Ceres CLONE ID no. 372359
  misc_feature: Ceres CDNA ID no. 25445758
  CDS (3)..(287): REFERENCED BY SEQ ID NO: 846
aaggaaaaaaacttgtccgggctcgcgtttctgattcccgtggatctctcatctcgcttgtctcctccatagcagccaggcagccagcatggcggcggctagggtttgcatcgccggtgcatcttgagatccgctgctgctcacgtgtccacgttgcatcgcctttaatccccacatgctccatccatacactgctggtgctcgtcgctattctcttcatcgccgggacttgtcggcactactaccatcgccatctgaaccgagctcatgtgcatttacagcggtgaccgagcttggatcctagcgaggcctaatctacattttgacttctttgaatcatgtctgctgatggtacttacaaggtgtctgctgatggtacttacaaggtggacatattgtactggatttacactagcctgcttgcaggtcgtcatccatttttgggacattgttgtgaagattggcatgagaaccacctgtatgaactttggaatcgttaactttggagtgccttctgccttgtggcaatttatgtaatttgaatttgtatggaatgttttgttcgattcacgtatttataccgaacaaagtttatccttgctaccgaaaaaaaaaaaaaaaaaa

SEQ ID NO: 846 - protein, 89 aa, Zea mays
  misc_feature: Ceres CLONE ID no. 372359
  misc_feature: Ceres CDNA ID no. 25445758
MCIYSGDRAWILARPNLHFDFFESCLLMVLTRCLLMVLTRWTYCTGFTLACLQVVIHFWDIVVKIGMRTTCMNFGIVNFGVPSALWQFM

SEQ ID NO: 847 - DNA, 608 bp, Zea mays
  misc_feature: Ceres CLONE ID no. 372393
  misc_feature: Ceres CDNA ID no. 0
  CDS (88)..(331): REFERENCED BY SEQ ID NO: 848
gccaaaggaaggcttgtgttgtgtttggctagggtttgctcgcgtctcctccttcccttggctgctgtcgtgccggtcggcggcgacatgtcgaagaagaacaatcttgccaagaggaagaagcagtacgagttcgacctccaacgggagaaggaggccaaggagaagcaggccaagaagctgcaagccaagaaatccaagatgaagatagatggtgctgaaaagaaacgtaaaggtggccaatttaaggtcggcaagaaaaaggtgaagacgaaactttcagccttagcaaaagccaaagccgcgcaagccatggaggtcgacaagtgactgcggagcacaagcatcatcagcttaatcgtcgagccagagttggaactctgaattctgtgcccacatgaatagctcccgtcgggtgcagctgcagcttgttgaacctttctttctaaaaagaatgtcattcttgcttttttaagggtaatcaagctctagttataggttttggtgataacgactatgatgttagagaactaatgagatttatggagctaaatgaaaaagagaaaaatacatgtgatttttgatgctacaaaaaaaaaaaaaaaaaa

SEQ ID NO: 848 - protein, 80 aa, Zea mays
  misc_feature: Ceres CLONE ID no. 372393
  misc_feature: Ceres CDNA ID no. 0
MSKKNNLAKRKKQYEFDLQREKEAKEKQAKKLQAKKSKMKIDGAEKKRKGGQFKVGKKKVKTKLSALAKAKAAQAMEVDK

SEQ ID NO: 849 - DNA, 852 bp, Zea mays
  misc_feature: Ceres CLONE ID no. 372528
  misc_feature: Ceres CDNA ID no. 25447095
  CDS (117)..(665): REFERENCED BY SEQ ID NO: 850
agctgcgcattctttctctagctagctagctctctctctctctcaagtgataggaggagcgagatatatacatctgaatccagcagcagcaggtagcatagcatagcatagcatagatggcggcggaggtggaggccgccaaggacatcgccgaggagaaggccgtcgtgccgttgccaccgtcgcccgccaagccggccgacgacgactccaaagccatcgtcgctcttgtcgtcaaggacgctgctgctgggaaaccttctacagctattattggaggctcaactgaaagagatgcttacctcgccaagatcgtgtccgagaagaggctgagtctgatcaccgcctgggaggagagccagaaggcgagagccgacaacagggctgccaagaagcttgccttcatcacgtcctgggagaacgccaagaaagcggagatggaggcggagctcagaaagatcgaggagcaactgcagaagaagaaggcggcgtacgaggagaagctcaagaacaagctggcgatgctgcacaggacggcggaggagaggagggcgcagacggaggccaggcgcggcgaggagaccatcctggcggaggagatggccgccaagtaccgcgccaagggcgagggccccaccaagctctttggcctcttgaaagcgtgacctcttgctatggagaatgccctgtttcgtgcgtgtatttcgtattcccaattgcacttggtgtgtgtgtgtacgtgttgtttgttgttttctcttgtattcgatggcttgcttgacatctgttgtattgtatttgtatagaagtgcagtgcagtgcagtgctattcttccaaaaaaaaaaaaaaaa

SEQ ID NO: 850 - protein, 182 aa, Zea mays
  misc_feature: Ceres CLONE ID no. 372528
  misc_feature: Ceres CDNA ID no. 25447095
  misc_feature (68)..(177): Pfam Name: Remorin_C PFAM Desc: Remorin
  misc_feature: Homolog of GI Number: 50926698 NR Desc: OSJNBb0039L24.13
  misc_feature: Homolog of GI Number: 4731573 NR Desc: remorin 1
  misc_feature: Homolog of GI Number: 34925093 NR Desc: Remorin
  misc_feature: Homolog of GI Number: 21555669 NR Desc: remorin
  misc_feature: Homolog of GI Number: 42573455 NR Desc: remorin family protein
  misc_feature: Homolog of GI Number: 6522572 NR Desc: remorin
  misc_feature: Homolog of GI Number: 62733593 NR Desc: Remorin
  misc_feature: Homolog of GI Number: 17104525 NR Desc: putative DNA
  misc_feature: Homolog of GI Number: 22758339 NR Desc: putative remorin protein
  misc_feature: Homolog of GI Number: 56541805 NR Desc: putative remorin 1 protein
MAAEVEAAKDIAEEKAVVPLPPSPAKPADDDSKAIVALVVKDAAAGKPSTAIIGGSTERDAYLAKIVSEKRLSLITAWEESQKARADNRAAKKLAFITSWENAKKAEMEAELRKIEEQLQKKKAAYEEKLKNKLAMLHRTAEERRAQTEARRGEETILAEEMAAKYRAKGEGPTKLFGLLKA

SEQ ID NO: 851 - DNA, 724 bp, Zea mays
  misc_feature: Ceres CLONE ID no. 373272
  misc_feature: Ceres CDNA ID no. 2790900
  CDS (201)..(411): REFERENCED BY SEQ ID NO: 852
tcaacaattcctgataaaaacagacccacttcctctgatcctcttcaacccacccaccgtgggttcgtccagccttccggccttcccccccggtggtcatcacatctcccccaattcgccgccccctccgacctcgccgtactcctctcgctccgttgaagtagcctcttcatctgctcgccgcagttcgtccgttgcccatggcggatgaggaggtaactgatccaaaggcgttcctagaggaacgttcaaaggctaagtgtgtgtcgcagtggtatgaatatcagaaatgtgttaagaggattgagaatgacgagactgggcacaaacactgtaccggccagtactttgattactggaaatgtgttgacaagaatgttgcagaaaaactctttgagatgttaaaatgacaagaaaagttttccctacttcagttatccacccaaagttggtaataattgtatcacttgtgtggcctatagactattaaggcgctcaatatttgttagagaagttttgccacttgggtaacacaaattttccactgccagtttgcatttcatttctgctactagtattgaaccagcaggtttcctcctgcattgttggataaaaaatccatcgaatatttacaagattgtggctgattattaaatgctgtaatacaccttaattgcttttacggtgtattttgaggagcacatagccaaaaaaaaaaaaaaaa

SEQ ID NO: 852 - protein, 69 aa, Zea mays
  misc_feature: Ceres CLONE ID no. 373272
  misc_feature: Ceres CDNA ID no. 2790900
  misc_feature (7)..(69): Pfam Name: UCR_hinge PFAM Desc: Ubiquinol
MADEEVTDPKAFLEERSKAKCVSQWYEYQKCVKRIENDETGHKHCTGQYFDYWKCVDKNVAEKLFEMLK

SEQ ID NO: 853 - DNA, 697 bp, Zea mays
  misc_feature: Ceres CLONE ID no. 373368
  misc_feature: Ceres CDNA ID no. 25445521
  CDS (57)..(404): REFERENCED BY SEQ ID NO: 854
aattgcttactacctactgtgattcattcattgacttgtcttccgcctcccgccccatgcaggctgccaggaaatggggcccacaggcagccgccgtgacgcaagggacgccatgcgtgccgctgccgaggtttccggtgcctcaccccatctacagcagaccggcgatggtacctccgccgccaagcaccaccaagctagctcaactgcatctggagctccaagcgcacccgtccaaggagagcatcgacgcagccatcggagatgttttagtgaagccatggctgccgcttccactggggctcaagccgccgtcgctcgacagcgtcatgtcggagctgcacaagcaaggcgtaccaaaaatcccaccggcggctgccaccaccaccggcgccaccggatgacatactatctcgtcgacaatacatgcatgtacaatagacggatgtctagtagtatagtagattgctgctagctagctagccgctagagtgtagtagcatatgcatgccttttttttcttcttctttttttgcccttattattaagctggctaatagcgattgagatggagcttgacacagatctgctagctagctatttgagggtttctcttgtatgctacctattgctgctgcttgctgctgagacaagtaatgtacgtacgcctgtgcaaacgacaaaaaaaaaaaaaaaa

SEQ ID NO: 854 - protein, 115 aa, Zea mays
  misc_feature: Ceres CLONE ID no. 373368
  misc_feature: Ceres CDNA ID no. 25445521
  misc_feature: Homolog of GI Number: 11177540 NR Desc: putative transcription factor Golden2
  misc_feature: Homolog of GI Number: 56784113 NR Desc: putative transcription factor OsGLK2
  misc_feature: Homolog of GI Number: 13940500 NR Desc: putative transcription factor OsGLK2
  misc_feature: Homolog of GI Number: 34904478 NR Desc: OSJNBa0086P08.18
  misc_feature: Homolog of GI Number: 54291303 NR Desc: putative golden2
  misc_feature: Homolog of GI Number: 13940498 NR Desc: putative transcription factor OsGLK1
  misc_feature: Homolog of GI Number: 54291302 NR Desc: putative golden2
  misc_feature: Homolog of GI Number: 62632221 NR Desc: golden2
  misc_feature: Homolog of GI Number: 13940496 NR Desc: putative transcription factor ZmGLK1
  misc_feature: Homolog of GI Number: 55669165 NR Desc: golden 2
MQAARKWGPQAAAVTQGTPCVPLPRFPVPHPIYSRPAMVPPPPSTTKLAQLHLELQAHPSKESIDAAIGDVLVKPWLPLPLGLKPPSLDSVMSELHKQGVPKIPPAAATTTGATG

SEQ ID NO: 855 - DNA, 643 bp, Zea mays
  misc_feature: Ceres CLONE ID no. 373587
  misc_feature: Ceres CDNA ID no. 25446344
  CDS (102)..(374): REFERENCED BY SEQ ID NO: 856
cctcgttcagttgttcctcaacctacctacgcctacgccgctccgcgctcgaccgcctttgcctgccttcccattccccccgtctcctcttcccttccgccatggcccagcccgctttcctctcctctctccgctcccgcctcggctccgcgccgccgcccccgccgaaccatcgcctccagcccaggcgcggctaccacgtcgagcttggggctcgcgaaaaagcgcttttggaggaggatgttgctttgaagaggttcaaatcatacaaaaacagtgtgaaacaggtctccaagatcgggaatgctctcactttagctgttgtacttgcttgcagctacgagcttgctgtgttggcgactagcacaaaatgaaggaaaactcagtcatgtggcggcacggttattccgggaagtgatccatcagcatgaactggcactctctctcttcgtgtttttttagccccgtttgttgatcactcgtaccgtgtaaaataaaataaactaggttaaccttaattggcaaataatgtctctgtttttatggcctagttgcaaacaaagtgagagaagcattccgtggtgaatcgtgaagaatgaacgccgcctgctttgtttaaaaaaacaaaaaaaaaaaaaaaaaa

SEQ ID NO: 856 - protein, 90 aa, Zea mays
  misc_feature: Ceres CLONE ID no. 373587
  misc_feature: Ceres CDNA ID no. 25446344
MAQPAFLSSLRSRLGSAPPPPPNHRLQPRRGYHVELGAREKALLEEDVALKRFKSYKNSVKQVSKIGNALTLAVVLACSYELAVLATSTK

SEQ ID NO: 857 - DNA, 1081 bp, Zea mays
  misc_feature: Ceres CLONE ID no. 373636
  misc_feature: Ceres CDNA ID no. 40350945
  CDS (71)..(703): REFERENCED BY SEQ ID NO: 858
atcagctattcattcagctatcacaaaagaaaaaaaaaaggccgcgacgagccgacgagcaacgacgaccatggcgacgatggccgcttcttcctgccacgggcaacttctcctgtttctcctcgtggccgtcgcgtcggcctgcctcggctccgcggcagcgcatcaagccggatctggagagggctacacgatcgctggccgcgtcaagatcgatggcacgagcgtgaagggctttggtcttgcaacaaagacatcaaacacaaaagtgatacttaatggcggccagagggttacatttgccaggccagacggctactttgcattccacaacgtgccagctggaactcatctgattgaggtctcctcaattggttacttcttttccccagttcgcgtagatatcagtgcaaggaatcctggttatattcaagcagcattgactgaaactagaagagttctaaatgagcttgtcctggaacctctgaaagaagagcagtactatgaggttagggagcctttctccgtcatgtcacttttgaagagccccatggggttgatggttggttttatggtcttaatggtctttgtgatgcccaagatgatggagaacatagatcctgaggagatgaagcaagctcaagaacaaatgaggaacaaccccgtatcattgtctggcttgctagccagagcgcagggctagaagtagcacatgaggatgctgcaagggtctagattctataatgtgtttaagggcagtactgaagtgcttgacatgccatgtcactcggagtaatttcctggggacaaggtggaaactctttcccctgtttttactgtattttaacttgcagtttttctgttagggcttgttcggttattttcaatccatatgtattggaggggattgatacggattggaggggattttgactttgaatccccctcaatccatatggattggggcagaaccgaacatggccttatgtagaaccttctgaaacctctagctgagctagtcatttggcacatcatataaccacacattgagatattcttgtccaaaaaaaaaaaaaaaaaa

SEQ ID NO: 858 - protein, 210 aa, Zea mays
  misc_feature: Ceres CLONE ID no. 373636
  misc_feature: Ceres CDNA ID no. 40350945
MATMAASSCHGQLLLFLLVAVASACLGSAAAHQAGSGEGYTIAGRVKIDGTSVKGFGLATKTSNTKVILNGGQRVTFARPDGYFAFHNVPAGTHLIEVSSIGYFFSPVRVDISARNPGYIQAALTETRRVLNELVLEPLKEEQYYEVREPFSVMSLLKSPMGLMVGFMVLMVFVMPKMMENIDPEEMKQAQEQMRNNPVSLSGLLARAQG

SEQ ID NO: 859 - DNA, 1142 bp, Zea mays
  misc_feature: Ceres CLONE ID no. 374537
  misc_feature: Ceres CDNA ID no. 40041198
  CDS (112)..(753): REFERENCED BY SEQ ID NO: 860
ataaataactggccttcccaaatcgcccacaactctcacacggagacccacccacctgcgctgcgcctcggttttacggcccttccctcaccgccccgcgcgagcgaaatcatgaagcttgaggtcatgcccaagcagcgggtgctggaggcggagcagagggaggaggccatggagatgagtggcctggacctgtggaagcacgagaagcccccaaggatctgccccttgcccccgtcgctcccggcgccgccagcgtgcgacgaggcggcgctcgtgccgccgctcaacttcgccatggtcgacgacggcatattccgctccggcttcccggagaccgccaatttccggttcctcaagtccctcaacctccgctccatcgtgtacctgtgcccggagccgtacccagagacgaacacggagttcctcgagaagaacgggatcaggctccaccagttcggaatcgaggggcgaaaggaaccatttgtcaatatacccgatgacaaaataagggaggcgctcaaagttgtcttagacccaagaaaccaacctctgcttattcattgtaagagaggcaagcaccgaactggttgtttggtcgggtgcttgaggaagctgcagaaatggtgcttgtcttcagtcttcgacgagtaccatcgctttgccgctgcgaaagcgcggatcactgaccagagattcatggagctgttcgacgtctcaagcttgaagcacctgacaccctcacattgttaaccccaaggcgcgtgatcgcttgatcccccccaacttctagtacatctccaaggctatcttcctgcagctactgaaccgattcagccgtgaataattttggaaccccctagagtccatgaggtagtgatgaaaccattgcagaacattcgtgcttgagaggtttagtttcccccctgcttagcgcactggagagcctgagaaccagactgctgcggtcgatttgcgaggggttctcttttttggtagctctcgcgaggaattcgccattgtttttgggtactgaagcagcatgtactcgagcagcttctgaggaggaatgaactactctctaagtgcaaaaaggcgtctcttcttgcaaaaaaaaaaaaaaaagaaaaaaaaaaaaaaaa

SEQ ID NO: 860 - protein, 213 aa, Zea mays
  misc_feature: Ceres CLONE ID no. 374537
  misc_feature: Ceres CDNA ID no. 40041198
  misc_feature (55)..(207): Pfam Name: Y_phosphatase2 PFAM Desc: Tyrosine phosphatase family
  misc_feature: Homolog of GI Number: 50313187 NR Desc: tyrosine
  misc_feature: Homolog of GI Number: 73921030 NR Desc: Probable tyrosine
  misc_feature: Homolog of GI Number: 56554690 NR Desc: Chain B
  misc_feature: Homolog of GI Number: 50898778 NR Desc: putative tyrosine specific protein phosphatase protein
  misc_feature: Homolog of GI Number: 30102538 NR Desc: At2g32960
  misc_feature: Homolog of GI Number: 60459387 NR Desc: tyrosine specific protein phosphatase family protein
  misc_feature: Homolog of GI Number: 77554827 NR Desc: tyrosine phosphatase family
  misc_feature: Homolog of GI Number: 71656659 NR Desc: tyrosine phosphatase
  misc_feature: Homolog of GI Number: 71064100 NR Desc: Oca1p
  misc_feature: Homolog of GI Number: 2257529 NR Desc: HYPOTHETICAL 32.8KD PROTEIN IN NCE3
MKLEVMPKQRVLEAEQREEAMEMSGLDLWKHEKPPRICPLPPSLPAPPACDEAALVPPLNFAMVDDGIFRSGFPETANFRFLKSLNLRSIVYLCPEPYPETNTEFLEKNGIRLHQFGIEGRKEPFVNIPDDKIREALKVVLDPRNQPLLIHCKRGKHRTGCLVGCLRKLQKWCLSSVFDEYHRFAAAKARITDQRFMELFDVSSLKHLTPSHC

SEQ ID NO: 861 - DNA, 1503 bp, Zea mays
  misc_feature: Ceres CLONE ID no. 375368
  misc_feature: Ceres CDNA ID no. 25445522
  CDS (125)..(1252): REFERENCED BY SEQ ID NO: 862
aaaccaaaccaaaccccaccaggccacccaagcgcaaagcgctagcgatcgaactcgagcccaatccagcggaaacccccaaccctagctcccgactcgagccgatcgaccccgatccgatctaatgttccccaccgtcgacgagccctccgccgccggcgccatggtctcgtcctccttccctgacgccgacgcctacggcaacggcgactccgacggcctcgacttccccgtcgaccccaaccccaaccccgtcttctcctccccggccgctgccgcggcccccgggtccgctggcgcggctggggagcggcgccagctgttccagcgcctgtggacggacgaggacgagatcgtgatcctgcgcgccttcgcggagttcacggcgcagcgtggcacctccttcgcgtcgcaccagtacgacaccacccccttctacgaggacatgcgccgccgcctcaacaccggcttcaccaagaaccagctcgccgagaagatccgccgcctcaagcgcaagtaccgtaactgcgtcgagcgcctccgcgtcgccggctccggcttcaccttccgctccccgcacgagcaggccatctttgagatcgcccgcaccatctggcgccccgcctccgacaagcacggccgcgactccgacgacgagggcggcggcggcaacgtccacgacgccaccttcgcccccttcgccatcgacgccgccgccaacggtgagtccgccaagtcttccaggccacgccgtggccggcgccgccgcacgggcgacttccccgccgacgcggtcgcgctgccgccggcgcccatgccgatgcaggtgatgaccgaggacgcgctcccgtcgttcccgcaggcgactgcggcggcggtcatgaacgggggctgcggcctcatcgtggacccagcctctggtctgccaaccgcgctgtcatcagctgcggcggcggcaacggccgtgtccggcggcagcaccacggagaaccccatcctcacggcgctgttcaaggagatggtacgcgcgatgctgagcgtcgtcggcagcggcggtggcaccacggcacttcaggggctggagccaccgccccctatcgcgggggtgccgatggaaggggagaagtggcggcagcagcggatccgggagctggaggtgtacctgcgtcggatggacctgctgcaggaccaggccagggcggcgctggaggaactcaggtccgcgccgcacgccgggggcatgaacacttgattgtcttgggttcagcagctcctccagcgtcgcgtcttcttgcagatagcgcatcgtccataaccattagaaagaaagggtcatcttactggtaggtttctctaggctcgagcagcagtagaacaaggtgttttcgtctgtaatcctgattttctgtctgcgctgcagactagccgcgcgtcgtcgttcttatttatatagagcaactggtataaagagcttcctatcgtgcccgaaaaaaaaaaaaaaaa

SEQ ID NO: 862 - protein, 375 aa, Zea mays
  misc_feature: Ceres CLONE ID no. 375368
  misc_feature: Ceres CDNA ID no. 25445522
  misc_feature: Homolog of GI Number: 67987177 NR Desc: 4Fe
  misc_feature: Homolog of GI Number: 60678627 NR Desc: plus agglutinin
  misc_feature: Homolog of GI Number: 41400381 NR Desc: minus agglutinin
  misc_feature: Homolog of GI Number: 41400384 NR Desc: plus agglutinin
  misc_feature: Homolog of GI Number: 188864 NR Desc: mucin
  misc_feature: Homolog of GI Number: 12018147 NR Desc: vegetative cell wall protein gp1
  misc_feature: Homolog of GI Number: 186396 NR Desc: mucin
  misc_feature: Homolog of GI Number: 25056007 NR Desc: extensin
  misc_feature: Homolog of GI Number: 57472005 NR Desc: minus agglutinin
  misc_feature: Useful for delaying flowering time
  misc_feature: Useful for increasing chlorophyll and photosynthetic capacity
MFPTVDEPSAAGAMVSSSFPDADAYGNGDSDGLDFPVDPNPNPVFSSPAAAAAPGSAGAAGERRQLFQRLWTDEDEIVILRAFAEFTAQRGTSFASHQYDTTPFYEDMRRRLNTGFTKNQLAEKIRRLKRKYRNCVERLRVAGSGFTFRSPHEQAIFEIARTIWRPASDKHGRDSDDEGGGGNVHDATFAPFAIDAAANGESAKSSRPRRGRRRRTGDFPADAVALPPAPMPMQVMTEDALPSFPQATAAAVMNGGCGLIVDPASGLPTALSSAAAAATAVSGGSTTENPILTALFKEMVRAMLSVVGSGGGTTALQGLEPPPPIAGVPMEGEKWRQQRIRELEVYLRRMDLLQDQARAALEELRSAPHAGGMNT

SEQ ID NO: 863 - DNA, 534 bp, Zea mays
  misc_feature: Ceres CLONE ID no. 376259
  misc_feature: Ceres CDNA ID no. 25446345
  CDS (3)..(332): REFERENCED BY SEQ ID NO: 864
atctcttctccaaccaacttccacggctcgcgccctggtacccacccgacgccctcctcccttccttcgtgcatcggcgatccacgctacccaccggaggtcgcctccctccccactccgcacgacgaacccccatatcgagcctacacccgcatccttcccatctccccaggtgccatggtctcgatccacacaaggaacctcgacccagactcgccggccgtgtccctcgccacccgcacgacgaggcagaccgactgacgtgccacctgcacgatgagcccagactcatcggcacattcctccccacccgccggtgcgtccattcctagccgccggtgcaccacgctcatcaccaggtcggcacgtcaatcaactacgaccaactcctcagtgaatgttccaaagtgcgctggccttgttttatgatttctcatatatctctccatcttctgtgatctgcctgattcctgtgttcccagctgctcattgaatgtcgctatttctttaaaaaaaaaaaaaaaaaaaaaaaaa

SEQ ID NO: 864 - protein, 50 aa, Zea mays
  misc_feature: Ceres CLONE ID no. 376259
  misc_feature: Ceres CDNA ID no. 25446345
  misc_feature: Homolog of GI Number: 7321040 NR Desc: putative proline
MSPDSSAHSSPPAGASIPSRRCTTLITRSARQSTTTNSSVNVPKCAGLVL

SEQ ID NO: 865 - DNA, 720 bp, Zea mays
  misc_feature: Ceres CLONE ID no. 376522
  misc_feature: Ceres CDNA ID no. 25446063
  CDS (152)..(508): REFERENCED BY SEQ ID NO: 866
gaattcctcattccccacctcagcccaccaaatgaggtagggtttccgattgcttccgcggttcaatcaccgcccacgtagaacccctccgctccttccagctcgctctctacctgcaccagcctcgcccgcccttcgctcgccgccgccgatgaaggcgggcaaggccgggttcgaggctggcatgatggatccgcagcacaggatccgcatcacgctctcctccaagagcgtcaagaacctcgagaaagtctgcggggatctggtgaagggcgccaagggtaaggagctcaaggtcaagggccccgtgcggatgcctaccaaggtgctccacatcaccaccaggaagtctccctgtggagaaggtaccaacacctgggatcgctttgagatgaggattcacaagagggtgatcgatctcgtcagtacaccagacgttgtcaagcagatcacctcgatcactattgaaccaggtgtcgaggttgaggtgactatcagtgacgcttaatatggtagccttatcatttcaaaaggcttctagtgaacaggatattttcaattcctagtgagaacttgtgtaacagaggaatccaagtatttcatatcaaagttaaaaagtcttatcgagggttcgcggtatggatgtatcctgtttcaaatgatttcccctaatgtatgaatgaaaacggttaatggatgccctcaaaaaaaaaaaaaaaa

SEQ ID NO: 866 - protein, 118 aa, Zea mays
  misc_feature: Ceres CLONE ID no. 376522
  misc_feature: Ceres CDNA ID no. 25446063
  misc_feature: The plant flowers significantly late compared to wild-type.
  misc_feature: The plant is abnormally large.
  misc_feature: null
  misc_feature: Useful for making plants with modulated biomass
  misc_feature: Useful for making plants with modulated flowering time
  misc_feature: Useful for making plants with modulated phosphate use efficiency
  misc_feature (18)..(113): Pfam Name: Ribosomal_S10 PFAM Desc: Ribosomal protein S10p/S20e
  misc_feature: Homolog of GI Number: 55775376 NR Desc: 40S subunit ribosomal protein
  misc_feature: Homolog of GI Number: 50933555 NR Desc: 40S ribosomal protein S20
  misc_feature: Homolog of GI Number: 31430421 NR Desc: putative ribosomal protein S10p/S20e
  misc_feature: Homolog of GI Number: 21281054 NR Desc: putative 40S ribsomomal protein
  misc_feature: Homolog of GI Number: 21617905 NR Desc: 40S ribosomal protein S20
  misc_feature: Homolog of GI Number: 23198348 NR Desc: 40S ribosomal protein S20
  misc_feature: Homolog of GI Number: 54208698 NR Desc: ribosomal protein S10p/S20e
  misc_feature: Homolog of GI Number: 55630698 NR Desc:  similar to 40S ribosomal protein S20
  misc_feature: Homolog of GI Number: 22203726 NR Desc: ribosomal protein S20
  misc_feature: Homolog of GI Number: 40643004 NR Desc: ribosomal protein S20
  misc_feature: Useful for making shorter plants
  misc_feature: Useful for sterility
  misc_feature: Useful for sterility
MKAGKAGFEAGMMDPQHRIRITLSSKSVKNLEKVCGDLVKGAKGKELKVKGPVRMPTKVLHITTRKSPCGEGTNTWDRFEMRIHKRVIDLVSTPDVVKQITSITIEPGVEVEVTISDA

SEQ ID NO: 867 - DNA, 566 bp, Zea mays
  misc_feature: Ceres CLONE ID no. 377435
  misc_feature: Ceres CDNA ID no. 36707390
  CDS (28)..(402): REFERENCED BY SEQ ID NO: 868
aggtcagtcgggtgtacgtacggtgccatggcctcggcctcgctgccgctcctcgtcatcgtcctcctcgtctcggtcgtcggagcttgcactcgtgctgccgaggcggcggctacccgtaggaaggacgatgtcatcacaacaaccaccagcagcagccgtggatcatcctcaccgtcgtcgtcaccctccccaggagcagcagcagagaagaaggagaagcccaagggcggtggcggcgcgacgtccgcgaagaagccgtcgccgccggccaagtgcgtgacgagcaaggactgccacctcaagcggctggtgtgcgccaagaagtgcaccatggccgcacacaacaagtgcgccgccaagtgttcccactcttgcaacgccctccccatctgcacctagctgacatgcatgctatgtaacccccagtaaaaatattatttatttaataaaatggaccacatgtctgtagttcaatccgtaaaaaaaaaaaaaaaaaaaaaaaaaaaaaaaaaaaaaaaaaaaaaaaaaaaaaaaaaaaaaaaaaaaaaaaaaaaaaaaaaaaa

SEQ ID NO: 868 - protein, 124 aa, Zea mays
  misc_feature: Ceres CLONE ID no. 377435
  misc_feature: Ceres CDNA ID no. 36707390
  misc_feature: Homolog of GI Number: 76156423 NR Desc: SJCHGC01769 protein
  misc_feature: Homolog of GI Number: 50929649 NR Desc: OSJNBa0064G10.17
  misc_feature: Homolog of GI Number: 37361866 NR Desc: LRRGT00090
  misc_feature: Homolog of GI Number: 45709115 NR Desc: LOC407686 protein
  misc_feature: Homolog of GI Number: 45825067 NR Desc: LP04080p
MASASLPLLVIVLLVSVVGACTRAAEAAATRRKDDVITTTTSSSRGSSSPSSSPSPGAAAEKKEKPKGGGGATSAKKPSPPAKCVTSKDCHLKRLVCAKKCTMAAHNKCAAKCSHSCNALPICT

SEQ ID NO: 869 - DNA, 2204 bp, Zea mays
  misc_feature: Ceres CLONE ID no. 377736
  misc_feature: Ceres CDNA ID no. 40350946
  CDS (402)..(2012): REFERENCED BY SEQ ID NO: 870
ctcaaagcatcactcacacaccatcgtcctctccttttgccagcaccgccgaacccgccaccagccttctcccacccacgaagtacggaaggctgccggaaggagctctcacctcacatccatctctgtcgcgcccgtcatcctcctcctcctcccctcctcaactgctatcggattggcgctgcagtggagatcgacccgggctggaatttctttcgttggtaaggaaccctaatttggtcggatgggattttcatcttcgacgaagcccgcgagattgatcgaccttagctgacgcgagggattggaaagctaaggctcgggcgtagttaattttctaggaagattggggtttcagctcaaacccccatgctcgatgctgaggacgaccctggcgggagatgacgaggatcttcgtgcagcgcgggaccgccggctcctcgtccagctccggccgctcgggctcgcagtcagcgcagcagccggcagcagctgcccgggaggagttgccgttgcaacctcagccacagctaccagaactattggctatagatgatatagctgagcatttaaatgagggcaacgagaacaacagtagcagaattaagtttttgaggacagatgacaccatttcagagagctcgagctacgcagaggagagggctgccagggagaagcctcctaacgatgactctaatgtaatcaaccccacttccttggtagaggaaccgatagtgctccatacccctgatcagattgaacatggaaattctgtgccgtcaggaactaattcatcacagatggtgggtgcagcatcgcacccgccgccaccgccagctccgcctccaaaaccattgttggggaatagtgggttgtggagaatgggacctggaagttccaacagtgtgcggattggatctccaagaagaccggtagcttggccaccagtggcagctcggacatctgcttcaggttctcgtccttcttcgcctaggtcactcattgatggtgaaggttacaatagtgctgatgaacagggtccctgttacgcctcgagttatgatgattcggaaagagagcgtatgtttgagcatgacctaaggcgagtgaaagggttggaaatcagaaagacggccgaagatgggaactgtctattcagagctgttgctgatcaagtttatggagatgcagaagcttatgacatggctaggcagatgtgtgttgattatatggaaagggaacgggatcatttctctcagtttataactgaaagttttacattatactgcaagaggaaaaggagagacaaggtttatggcaacaatgttgagatccaagcatttgcagagatgtacaatcgtcccattcacatatattcctacagtacagagccaattaacatttttcaaggaagctacaacacagacactcctccaattaggttaagttaccatcatggtaatcattacaattcagtggttgatccccgccgacagactattggggcaggccttggatttagctcttttagagggactaatgttgacagggatcaggtgaaggctgcaataaaagctcagcaagaccagcaaattgataatgcactgatggcagaagggcgattctactctgatctggagttaacagagagggaaatagaacggatggtgatggaagcctcgcgttcagaatatctggccaaggagaaaaagcttaacataagggaatcatcgacatcaggggcagaaccatcttcatccgctgcaattagtggttcctctcgatcagttgctggagcggacagaagcagcgaggactactttgtgcttccagacaccgtacttactcgcagcatgcagctgcttctcgcaatgggcttcggctacaaccaggtcatggaggcctacagcatattcggcgaggatgtggactcgatggtctgctacctggtggagaccggaggagcctcggcaggtggtagcaatcgccggaaaggaaaggctgctgagtgatgtgtgcaccttcattgctgtgaatgtaattgatggaaaacgttgggcacagctcataccagataatgacagccttatgagttgagatgtcgatatacctgctaccttatgggtgatgaataaatggaactcacaactcttctcgatgccttctggtgatcaagttaaataattaatgacaaaaaaaaaaaa

SEQ ID NO: 870 - protein, 536 aa, Zea mays
  misc_feature: Ceres CLONE ID no. 377736
  misc_feature: Ceres CDNA ID no. 40350946
  misc_feature (245)..(356): Pfam Name: OTU PFAM Desc: OTU
MTRIFVQRGTAGSSSSSGRSGSQSAQQPAAAAREELPLQPQPQLPELLAIDDIAEHLNEGNENNSSRIKFLRTDDTISESSSYAEERAAREKPPNDDSNVINPTSLVEEPIVLHTPDQIEHGNSVPSGTNSSQMVGAASHPPPPPAPPPKPLLGNSGLWRMGPGSSNSVRIGSPRRPVAWPPVAARTSASGSRPSSPRSLIDGEGYNSADEQGPCYASSYDDSERERMFEHDLRRVKGLEIRKTAEDGNCLFRAVADQVYGDAEAYDMARQMCVDYMERERDHFSQFITESFTLYCKRKRRDKVYGNNVEIQAFAEMYNRPIHIYSYSTEPINIFQGSYNTDTPPIRLSYHHGNHYNSVVDPRRQTIGAGLGFSSFRGTNVDRDQVKAAIKAQQDQQIDNALMAEGRFYSDLELTEREIERMVMEASRSEYLAKEKKLNIRESSTSGAEPSSSAAISGSSRSVAGADRSSEDYFVLPDTVLTRSMQLLLAMGFGYNQVMEAYSIFGEDVDSMVCYLVETGGASAGGSNRRKGKAAE

SEQ ID NO: 871 - DNA, 1110 bp, Zea mays
  misc_feature: Ceres CLONE ID no. 377784
  misc_feature: Ceres CDNA ID no. 25445550
  CDS (244)..(885): REFERENCED BY SEQ ID NO: 872
aaggccagtctgagtgtgcgttcgattcgcttgtgctgcagctagggtttagaggttttctgggcgcggagcgggaggcggcggcggctatggctgcggcggaggaggagatcgcggtgaaggagccgctggatctgatacgcctcagcctcgacgagcgcatctacgtcaagctccgatccgaccgcgagctgcgcggcaagctccatgcgtatgatcaacatttaaacatgatacttggagatgttgatcatacgcagtgagctagcctcccgagccctatctatccttttctcggcacctcgcgggtctcccgtccgccccgtcccgcattcgtatcctctcctcactctcgccgccgccgcttcccctgcgccccgagccaagatgaatgttgaaaagctcaagaagatggcaggtgctgtgcgcactggggggaagggtagcatgcgcaggaagaagaaggcagtccacaagactacgaccacagatgataaaaggcttcagagcaccctgaaaagaataggagtgaacaccattcctggtattgaagaggtcaacatctttaaggatgatgttgttattcagtttgtgaatcctaaagtgcaagcttcaattggtgctaatacatgggtggtcagtggaactccacagacaaagaagctgcaagatctgcttccgtccattatcaaccagctcggccctgacaacctagacaacctgcggaggcttgcggagcaattccagaagcaggcccctggtgcttcaggtgcagaggctggcgccagcgctggtgctgctcaggacgatgacgatgacgttcctgagctcgtccctggagagacatttgaggaggctgcggaagagaaaaaggagtcgtcatgattttgccacatgcccgcccttttgaagggcttataagtaaatccttgcgtagaagggacatgttgaactctgacctaccttatttgtgcctgcttacggttatgtcatgaacgagaatttggtagtccagcgctggtccccctttttcacccatatccccgtgcttgtgtggtaaaagtcttgttaatgttaaaggccacacttaaaccaaaaaaaaaaaaaaaa

SEQ ID NO: 872 - protein, 165 aa, Zea mays
  misc_feature: Ceres CLONE ID no. 377784
  misc_feature: Ceres CDNA ID no. 25445550
  misc_feature: The plant is abnormally large.
  misc_feature: Useful for making plants with modulated growth and phenotype characteristics
  misc_feature: The sequence is a functional homolog of  SEQ ID NO 1614 in the  11/479,226 US patent application
  misc_feature: The sequence is a functional homolog of  SEQ ID NO 1617 in the  11/479,226 US patent application
  misc_feature: The sequence is a functional homolog of  SEQ ID NO 784 in the  10/412,699 US patent application
  misc_feature: The sequence is a functional homolog of  SEQ ID NO 786 in the  10/412,699 US patent application
  misc_feature: Useful for making plants with modulated biomass
  misc_feature (35)..(92): Pfam Name: NAC PFAM Desc: NAC domain
  misc_feature: Homolog of GI Number: 31432723 NR Desc: putative transcription factor
  misc_feature: Homolog of GI Number: 50916214 NR Desc: Putative transcription factor
  misc_feature: Homolog of GI Number: 29367567 NR Desc: putative transcription factor BTF3
  misc_feature: Homolog of GI Number: 82623431 NR Desc: putative transcription factor BTF3
  misc_feature: Homolog of GI Number: 83584406 NR Desc: BTF3
  misc_feature: Homolog of GI Number: 49616929 NR Desc: BTF3b
  misc_feature: Homolog of GI Number: 33945882 NR Desc: transcription factor homolog BTF3
  misc_feature: Homolog of GI Number: 17104709 NR Desc: putative RNA polymerase B transcription factor 3
  misc_feature: Homolog of GI Number: 12083222 NR Desc: putative transcription factor
  misc_feature: Homolog of GI Number: 16323127 NR Desc: At1g17880/F2H15_10
MNVEKLKKMAGAVRTGGKGSMRRKKKAVHKTTTTDDKRLQSTLKRIGVNTIPGIEEVNIFKDDVVIQFVNPKVQASIGANTWVVSGTPQTKKLQDLLPSIINQLGPDNLDNLRRLAEQFQKQAPGASGAEAGASAGAAQDDDDDVPELVPGETFEEAAEEKKESS

SEQ ID NO: 873 - DNA, 740 bp, Zea mays
  misc_feature: Ceres CLONE ID no. 377942
  misc_feature: Ceres CDNA ID no. 40350947
  CDS (3)..(437): REFERENCED BY SEQ ID NO: 874
ctcttcagtctctccccttcgcggctcccacccaccgcgtgccgccgccctacgccaggtgccccctacgtacgtcgtcatcgtgcccgtggccgccggcgacgaacgcccagcaggtaacgccaccccccctactccctccttaccccttcccgccgtgcgaaaccgagcgcataaaccctaacgtaagcgctctttgtgcccggaagggggaaagggagagggaggaggaggatgggcgagttcgacgactactgggcgcgggcgtacaggggcgaccccgcggtcccgcactccgacccgcagcggctcatctccacctggaccggcgcctttgccctcggcgcggccgcctgcgtccaccaccacgcctccgcgctcgcatcccacctcaagtccctaccggcgactttgcaagacatgacattggcccttgatcaaaagcgatggaagaaagcttttgagaaaaagcggcagcaaccttaagctcattgttctttccaacttcttgggccagttggatgagcactgtgtctggtcatcaattgtggcgcatgaagcttcaaaattctctctatatacatatgatgtattgactgaggttctacttttggttttcttgtttagcgttacaactttctcagtttgtgtatttgctccatctcagatcatcagatgacattcagaatgatttgtctattcttaaattctctattatctttttaaaaaaaaaaaaaaaa

SEQ ID NO: 874 - protein, 83 aa, Zea mays
  misc_feature: Ceres CLONE ID no. 377942
  misc_feature: Ceres CDNA ID no. 40350947
MGEFDDYWARAYRGDPAVPHSDPQRLISTWTGAFALGAAACVHHHASALASHLKSLPATLQDMTLALDQKRWKKAFEKKRQQP

SEQ ID NO: 875 - DNA, 734 bp, Zea mays
  misc_feature: Ceres CLONE ID no. 378310
  misc_feature: Ceres CDNA ID no. 25445988
  CDS (128)..(544): REFERENCED BY SEQ ID NO: 876
gttcgcgccttttccattttcaccccccgattccgatcgcttttcaccgccgcctctgttccttcgctagtcgacaggccccgcttccgctctcctcttccaccggccaccgccgcgcgccgagaagatggggaagcggtggatcccactggaggccaacccggatgtcatgaaccagttcatatggggtctgggagtctccgagagggctgtgcagttctgcgacgtctacggcctggaggagtggagcatccagatcgaggaggccaacagcgccaagaagctcgtggtgattgacttcactgcaacatggtgtcctccgtgccgcgccatggctccaatttttgctgatatggccaagaagtccccaaatgttgttttcctgaaagttgatgtcgatgaaatgaagaccattgctgagcaattcagcgtagaggccatgccaacattcctgttcatgagggagggcgacgtcaaggacagggtcgttggcgcagcaaaggaagagctagcaaggaagcttgaactacacatggcctcgtagatcagtgatgccgtaatgtagtattcgcctaaataagaggacgcctcgcctcaactctgagaaaactagtgcttctgtgatggtaattcgtatgagagagtgccccctttggtggtacttcttcgtatgtagtattaactcctgtcttaatatgttgccctgcttgtgcttttcaaaaaaaaaaaaaaaa

SEQ ID NO: 876 - protein, 124 aa, Zea mays
  misc_feature: Ceres CLONE ID no. 378310
  misc_feature: Ceres CDNA ID no. 25445988
  misc_feature (24)..(123): Pfam Name: Thioredoxin PFAM Desc: Thioredoxin
  misc_feature: Homolog of GI Number: 66841002 NR Desc: thioredoxin h1 protein
  misc_feature: Homolog of GI Number: 50932277 NR Desc: putative thioredoxin H
  misc_feature: Homolog of GI Number: 12082335 NR Desc: thioredoxin h
  misc_feature: Homolog of GI Number: 32186042 NR Desc: thioredoxin h isoform 2
  misc_feature: Homolog of GI Number: 8980491 NR Desc: thioredoxin h
  misc_feature: Homolog of GI Number: 2995380 NR Desc: thioredoxin H
  misc_feature: Homolog of GI Number: 21537330 NR Desc: thioredoxin
  misc_feature: Homolog of GI Number: 14532808 NR Desc: putative thioredoxin
  misc_feature: Homolog of GI Number: 1388084 NR Desc: thioredoxin h
  misc_feature: Homolog of GI Number: 27466894 NR Desc: thioredoxin h
  misc_feature: Useful for making larger plants
  misc_feature: Useful for sterility
MNQFIWGLGVSERAVQFCDVYGLEEWSIQIEEANSAKKLVVIDFTATWCPPCRAMAPIFADMAKKSPNVVFLKVDVDEMKTIAEQFSVEAMPTFLFMREGDVKDRVVGAAKEELARKLELHMAS

SEQ ID NO: 877 - DNA, 836 bp, Zea mays
  misc_feature: Ceres CLONE ID no. 378702
  misc_feature: Ceres CDNA ID no. 36587659
  CDS (236)..(676): REFERENCED BY SEQ ID NO: 878
tcattgagctacgagacacgggctcatcatgggctaacataccagcccgcaccttaccctttctttattctcttcactcaaaagcggctaggcgacggggcttgccctttccccgccccaagggtacacggtcgccgccacctgccctaggccgcaggagggagcgttcgccgccccgccctccgtctcccgtcgcctcgcccccgcgctctgtctgccgcccctctccggagaaatgtctgagcatctctttgaggacaccttcgtcgtcactagactcgaccctgatggcaaaaagtttgatagagtttctcgtgttgaagctcgcagcgagcagttagatatgtatatgcagctagatgttgccacagatgtttatcctatgcatgctggcgagaaatttaacatggttatagcgcctactctgaatttggatggcacccctgacactggctactatactcaggctggcagaaaaactctggcagacaattatgagtacgtcatgcaagggaaactttacaaaatctcagaagacacatcatccagccaaaacgctaaagtggagatgtatgcatcgttcggcgggcttcttatgctgctcaggggtgacccttccactgccgctagctttgagcttgatcagaggctctttctgctcatccgcaaggtgtaaaactgtggttgctgaccacttaggtgtttgccttgctcgccacttatttaatttccatccgtgggtgaagctgttatatactgttgtaagtactgttttctgtatcgccatggatttatggtaacgagttcatgtttcttgctaaaaaaaaaaaaaaaaa

SEQ ID NO: 878 - protein, 146 aa, Zea mays
  misc_feature: Ceres CLONE ID no. 378702
  misc_feature: Ceres CDNA ID no. 36587659
  misc_feature (7)..(145): Pfam Name: RNA_pol_Rpb8 PFAM Desc: RNA polymerase Rpb8
  misc_feature: Homolog of GI Number: 53793231 NR Desc: putative RNA polymerase I
  misc_feature: Homolog of GI Number: 50920087 NR Desc: putative  RNA polymerase
  misc_feature: Homolog of GI Number: 4585968 NR Desc: RNA polymerase I
  misc_feature: Homolog of GI Number: 13094965 NR Desc: RNA polymerase I
  misc_feature: Homolog of GI Number: 60470212 NR Desc: RNA polymerase II core subunit
  misc_feature: Homolog of GI Number: 62657461 NR Desc:  similar to polymerase
  misc_feature: Homolog of GI Number: 21358365 NR Desc: CG11246
  misc_feature: Homolog of GI Number: 68127429 NR Desc: RNA polymerase B subunit RPB8
MSEHLFEDTFVVTRLDPDGKKFDRVSRVEARSEQLDMYMQLDVATDVYPMHAGEKFNMVIAPTLNLDGTPDTGYYTQAGRKTLADNYEYVMQGKLYKISEDTSSSQNAKVEMYASFGGLLMLLRGDPSTAASFELDQRLFLLIRKV

SEQ ID NO: 879 - DNA, 680 bp, Zea mays
  misc_feature: Ceres CLONE ID no. 378713
  misc_feature: Ceres CDNA ID no. 40350948
  CDS (84)..(476): REFERENCED BY SEQ ID NO: 880
attcttacgcgattccttcaggaccctgcggcgcggcttcttcgtggagaagaggttgctgccgaagccaccgccaggtagccatgtcgtcctccgtgctgagggctgcggccgacagggccattcgcaggcaggccctcacgctgacgaacgccgcggcgtccaggatccggcagctactcagcctaaggcaacggccatacctgcggctgggtgtcaaagcgcgaggttgcaacggcctctcctacaccctcaactatgccgatgaaaaggggaagttcgatgagcttgtcgaggagaaaggagttaaagtactgatcgaccccaaggctttgatgcatgttataggcaccaagatggactatgttgatgatccattaaagtccgagtttgtgttcataaacccaaattccaaagggcagtgtggctgcggtgagtctttcatgactacaggcagcaaagggtcgacgtcatgaggcgtttttcagtgtaaatgcttagccaagtgtctgcaggctccagggtacagattttcttgtgtctgttgcgtcgcagttcattcatatataataacacagcagtgggtttgtactggatatgcaactaactcgcatttacttgtaatgtaagttcacctcaaatgttgttattaaaaaaaaaataaaaaaaaaaaaaaaaaa

SEQ ID NO: 880 - protein, 130 aa, Zea mays
  misc_feature: Ceres CLONE ID no. 378713
  misc_feature: Ceres CDNA ID no. 40350948
  misc_feature (18)..(121): Pfam Name: HesB PFAM Desc: HesB
MSSSVLRAAADRAIRRQALTLTNAAASRIRQLLSLRQRPYLRLGVKARGCNGLSYTLNYADEKGKFDELVEEKGVKVLIDPKALMHVIGTKMDYVDDPLKSEFVFINPNSKGQCGCGESFMTTGSKGSTS

SEQ ID NO: 881 - DNA, 913 bp, Zea mays
  misc_feature: Ceres CLONE ID no. 378836
  misc_feature: Ceres CDNA ID no. 40041199
  CDS (160)..(630): REFERENCED BY SEQ ID NO: 882
actctcctctcctcacggccgggagcgagtagatggaagcaggtggcggcagaggaagcgtccacggccacgaccggcagcagcagcagacagcagagggtgaggatccgccgatctgaccagttacaaggcgcgcgcgagccgggagctctggagggcatggccatgggaagggagccggtcgaagaggaagaggaagaggtggcgtgccactgctgcgggttcacggaggagtgcacggcgccgtacatcgcgggcgtgcgcgcgcggtatggcgggcggtggatctgcgggctgtgcggggacgcgacgggcgaggagctcgggcgcgcgtccccgcccatctccgccaccgaggcgctggaccggcacgcccgcgtctgtcgcggggcgtccacgccgccggcgtcgcccgcgggcagcgccgacgacctcatcgccgcgctgcgcctgctcctgcgccgcaggctcgggtccccgccgccggcgccgaggaaggcgcactccacgccgagcagcccgaggcgcgacgccacccctggcatctccgccgtcgcggccgtggcatcgagcggcgccgggagctcgctggcgcgcacggggagctgcttcgccgctctcgtcgaatgaggaaggaatccgagatgcttttgtgcgtgatggagagggagaacaggctagaatctctctcttgtgcgtttctcttgcactagcagttgctgccaggattaagcaagtaagatgaataaacatgtgtacatatggggtgggggtggggaagatcgacgaactatatattattagaccagcgaatgtatatcatatcacttgctggtttctggccttgtactgattctgcttcgcatgagctcggtaattaattaaataaaacgccaaaaaaaaaaaaaaaaaa

SEQ ID NO: 882 - protein, 156 aa, Zea mays
  misc_feature: Ceres CLONE ID no. 378836
  misc_feature: Ceres CDNA ID no. 40041199
  misc_feature: Homolog of GI Number: 34903640 NR Desc: B1015E06.3
  misc_feature: Homolog of GI Number: 66776813 NR Desc: Phosphoribosylaminoimidazole
MAMGREPVEEEEEEVACHCCGFTEECTAPYIAGVRARYGGRWICGLCGDATGEELGRASPPISATEALDRHARVCRGASTPPASPAGSADDLIAALRLLLRRRLGSPPPAPRKAHSTPSSPRRDATPGISAVAAVASSGAGSSLARTGSCFAALVE

SEQ ID NO: 883 - DNA, 624 bp, Zea mays
  misc_feature: Ceres CLONE ID no. 379148
  misc_feature: Ceres CDNA ID no. 25447096
  CDS (186)..(431): REFERENCED BY SEQ ID NO: 884
atatttacctttcgcgtcgcagcgccggatcgcccaatcagagcgcgcgttgcacgtcattcgggtacgatatcgaggcagacggcgtacacggatctcgctcggccattggactgtacaaggacgagagcgagaacagcggattcatcaccgccaggcgtcaggtcagagtgtgttaagacaagatggtggcgaatggtgatgcacctgctagagggagtgcggcggcagctgcaagcctgcgcaggcgtaggaccacaagcggtgctgctggtggtggaggcggtgccagctcgatgctccagttctacactgatgaggctgcgggccgcaaaatgtcaccaaacaccgttctgatcatgagcattgggttcatcgccgttgtcgctatgctccatgtttttgggaagctgtaccgcacctccaactaggttggtattaccataaccaagaaaacataggccaccaagacaggagccttatagagcgatttcaatggatagcaagtgactatcagagaggaaccttgtagagcgatttcaatggatagctgtgaactgttgttatagaagtttatctacacaacttgcaatgcggagggctatgataaaaaaaaaaaaaaaa

SEQ ID NO: 884 - protein, 81 aa, Zea mays; identical to SEQ ID NO: 586
  misc_feature: Ceres CLONE ID no. 379148
  misc_feature: Ceres CDNA ID no. 25447096
  misc_feature (32)..(77): Pfam Name: Sec61_beta PFAM Desc: Sec61beta family
  misc_feature: Homolog of GI Number: 34914212 NR Desc: P0697C12.13
  misc_feature: Homolog of GI Number: 77553785 NR Desc: Sec61beta family
  misc_feature: Homolog of GI Number: 24030258 NR Desc: putative transport protein SEC61 beta
  misc_feature: Homolog of GI Number: 7288002 NR Desc: transport protein subunit
  misc_feature: Homolog of GI Number: 26450635 NR Desc: putative transport protein subunit
  misc_feature: Homolog of GI Number: 77548256 NR Desc: protein transport protein subunit
  misc_feature: Homolog of GI Number: 77552788 NR Desc: protein transport protein subunit
  misc_feature: Homolog of GI Number: 54635780 NR Desc: GA10096
  misc_feature: Homolog of GI Number: 38048293 NR Desc: similar to Drosophila melanogaster Sec61beta
  misc_feature: Homolog of GI Number: 58390541 NR Desc: ENSANGP00000014901

SEQ ID NO: 885 - DNA, 622 bp, Zea mays
  misc_feature: Ceres CLONE ID no. 380213
  misc_feature: Ceres CDNA ID no. 29191854
  CDS (101)..(319): REFERENCED BY SEQ ID NO: 886
aaaaaatcgagaggacgccagggccgattctctgcgtgacttggggcgtcgtcgccgagttttctccggccgagggcggcgcgaccggacaaccggcgacatgactcgcggcaaccagcgtgacctcgaccgtgagcgcgcggcggcgcggaagcccaacgccaagaactcccaggacgggctcaccccggagcagcgccgcgagagggacaagaaagctctggaggagaaggcggccaagaaggcgcagcaggcagcggccggcggcaccggtacctccacggacaacaacaagaacaaggcaggtggcaagaagtaggaggcagtggcgcgccgccacctctgtacgattaatcgatgccttgagcttgtaacttgttcgcatccttgtaggtgcgatgcttgttgggtcataaactctgatgatatcgagatttggtgatcagaataatgcgtggttttctggctttctgttctgtcccattccttgaatggctgaatcatctagagttaggatgtggaggaacttttgcttgctgtcaacacatgtatgctgtcagttaacttttttttagattaaatagtgaatcatgccaattgccaatcaaaaaaaaaaaaaaaa

SEQ ID NO: 886 - protein, 72 aa, Zea mays
  misc_feature: Ceres CLONE ID no. 380213
  misc_feature: Ceres CDNA ID no. 29191854
  misc_feature (1)..(56): Pfam Name: 4F5 PFAM Desc: 4F5 protein family
  misc_feature: Homolog of GI Number: 15229580 NR Desc: four F5 family protein / 4F5 family protein
  misc_feature: Homolog of GI Number: 50902194 NR Desc: B1065E10.19
MTRGNQRDLDRERAAARKPNAKNSQDGLTPEQRRERDKKALEEKAAKKAQQAAAGGTGTSTDNNKNKAGGKK

SEQ ID NO: 887 - DNA, 678 bp, Zea mays
  misc_feature: Ceres CLONE ID no. 380259
  misc_feature: Ceres CDNA ID no. 40350949
  CDS (92)..(355): REFERENCED BY SEQ ID NO: 888
tcggccgttttacgcatccacggagccaggcgaccgccgccgcttccctactcacccttggccggcgacgacgagcgcccaccacggcaggatgacgacgctgaggaacctcaagatcaagacgtcgacgtgcaagaggatcgtgaaggagctgcgctcgtacgagaaggaggtggagaaggaggcggccaagaccgccgacatgaaggagaagggcgctgatccctacgacctcaaacagcaggagaatgttttggctgagtcaaggatgatggtcccagactgccacaaacgacttgaaactgcactggctgacgatgtgaacttggaagagtttgttatgaccaaagattagttctcgggcgctgatattaaggccatctgcacggaggctggattgctcgccttaagagaacgtagaatgaaggtgacccatgcagatttcaagaaagcaaaggagaaggtgatgtacaagaagaaggaaggtgttccggatggtctctacatgtagtagacgtctcctgccttgtcagaacaagttatcctcgtctctctcgtcatgggagatttgattgccacggcacttgttgcacacctataagtggtctgagaacgtgtattatgctttgattgtttcaagtaaaatttctctttggagaacgaaaaaaaaaaaaaaaa

SEQ ID NO: 888 - protein, 87 aa, Zea mays
  misc_feature: Ceres CLONE ID no. 380259
  misc_feature: Ceres CDNA ID no. 40350949
  misc_feature (6)..(75): Pfam Name: TBCA PFAM Desc: Tubulin binding cofactor A
MTTLRNLKIKTSTCKRIVKELRSYEKEVEKEAAKTADMKEKGADPYDLKQQENVLAESRMMVPDCHKRLETALADDVNLEEFVMTKD

SEQ ID NO: 889 - DNA, 1232 bp, Zea mays
  misc_feature: Ceres CLONE ID no. 380392
  misc_feature: Ceres CDNA ID no. 29191808
  CDS (388)..(957): REFERENCED BY SEQ ID NO: 890
atccctgcgctgccattgctcgtccgcatcctccttggatttccctcccaggtacgcctactccatgcgcacgcattcctattccgattcctgcacattccgtggaccgatttggaaaagctgaactggtacatagcgtatctttctctcaccagtctgctgacggtgatgtttataagcgaatctgtactcatatagatttcttgtcttcttacatcgtcaactgtccagctagagatttctgttttcttagatatcttctgtcttcttaaggggagacgaggagggcgcataaaattcacaagaactgtttttgatagattcacaatttgccgtctgagcatgcgaaggctgatgtgagctgtgcaggaaggttagggttttctgatgcgctcatacatggggcagcaagaagatgggatgtctgatggcttgtacacttacaagcatcaccgcgagcgaggagctgatatccacaccatctttgtgaagaagagcaaattcaggattctgctgtcatttatcggcacaacgttccttcttgtgtctgtttgctgcgccctgttatcgaaggatggtttatgtctttgttccctttggagcatttcatttgccagtgtaattgcgaaatgcctgcgatgtgaccctgtgaagaaagagtcattggtgatcatgccgacttttggaattcaattagagcaacacttttggagtggaagagttcatcgcaaatttgtgcccattggcaagattctaagaccagtgctgaatgagcatgtgacccctgtctcatgctactggagcttggccttgcttgtacgcgaagaatatgagctcatgcttgttttcaagagcttgaatccaccagtcaagatgttggttccaatctggaaagcgttatgtgcattcgtagactccaattctctgggcaattctgcattgcctcaacccacatgaacatgcttaaacaagttggtgggtggctgtgtgcagccccgatgataattcgaacatatggttcgctgaagactttgctgactgacaacataatgttgagtttcgatacaaatgatgatggaaggtacggaatgttaccgacactggggctcttacgtcgggtgtgaattgtgaaaggatcgtgatgcttaagagtgcactctgatcgctacccgatgccgatcacaaagagtaataaacacaaactctcgcttactccaaaaaaaaaaaaaaaa

SEQ ID NO: 890 - protein, 189 aa, Zea mays
  misc_feature: Ceres CLONE ID no. 380392
  misc_feature: Ceres CDNA ID no. 29191808
MRSYMGQQEDGMSDGLYTYKHHRERGADIHTIFVKKSKFRILLSFIGTTFLLVSVCCALLSKDGLCLCSLWSISFASVIAKCLRCDPVKKESLVIMPTFGIQLEQHFWSGRVHRKFVPIGKILRPVLNEHVTPVSCYWSLALLVREEYELMLVFKSLNPPVKMLVPIWKALCAFVDSNSLGNSALPQPT

SEQ ID NO: 891 - DNA, 683 bp, Zea mays
  misc_feature: Ceres CLONE ID no. 380416
  misc_feature: Ceres CDNA ID no. 25446346
  CDS (117)..(521): REFERENCED BY SEQ ID NO: 892
gaaagctgtccagatcgtgtgattttgcatcccatccgcgagcgcgacacgcgctgacctactcgacggcctccacctccgtcttgaggcgaagcgtaggtgcttaggagtctgccatggccagcgagaataaggtatttaggttcgaggaagtcgccaagcacaacgtcaccaaggactgctggatcatcatcgccggcaaggtgtatgatgtcactccttttatggatgagcatcctggtggagatgaggttttgctagctgtaactgggaaagatgctacagctgattttgaagatattggccacagtgattccgcaagggacatgatggagaagtaccacatcgggcagatagatgcttcaacaatcccagcaaagcgaacttatgtgcacccccagcaagcgcccagccactcagacaagaataatgatctcctcatcaatatcctgcagttccttgtgcccattatgatcctgggccttgcatttggtatacgtcagtacaccaaatcagagtagtactgttcttgaagacttgcctttggagtctgttttatggtaatggtttggatgagaacagttcagtaattgcttagtgtatttgtcaggtggatgttatctcattggtcatatactatgtattatggacatccatgtgtttacaaaaaaaaaaaaaaaaaa

SEQ ID NO: 892 - protein, 134 aa, Zea mays
  misc_feature: Ceres CLONE ID no. 380416
  misc_feature: Ceres CDNA ID no. 25446346
  misc_feature (7)..(81): Pfam Name: Cyt PFAM Desc: Cytochrome b5
  misc_feature: Homolog of GI Number: 37536104 NR Desc: putative cytochrome
  misc_feature: Homolog of GI Number: 25044825 NR Desc: cytochrome b5
  misc_feature: Homolog of GI Number: 729252 NR Desc: Cytochrome b5
  misc_feature: Homolog of GI Number: 2695711 NR Desc: cytochome b5
  misc_feature: Homolog of GI Number: 21281008 NR Desc: putative cytochrome b5 protein
  misc_feature: Homolog of GI Number: 50844673 NR Desc: cytochrome b5 isoform Cb5
  misc_feature: Homolog of GI Number: 50844675 NR Desc: cytochrome b5 isoform Cb5
  misc_feature: Homolog of GI Number: 78708914 NR Desc: cytochrome
  misc_feature: Homolog of GI Number: 1345882 NR Desc: Cytochrome b5
  misc_feature: Homolog of GI Number: 296386 NR Desc: cytochrome b5
  misc_feature: Utility: PEG Useful for making plants with increased tolerance to drought
MASENKVFRFEEVAKHNVTKDCWIIIAGKVYDVTPFMDEHPGGDEVLLAVTGKDATADFEDIGHSDSARDMMEKYHIGQIDASTIPAKRTYVHPQQAPSHSDKNNDLLINILQFLVPIMILGLAFGIRQYTKSE

SEQ ID NO: 893 - DNA, 494 bp, Zea mays
  misc_feature: Ceres CLONE ID no. 381151
  misc_feature: Ceres CDNA ID no. 25446347
  CDS (63)..(293): REFERENCED BY SEQ ID NO: 894
gttccacgggctccggcggcggcaggaacgcctcccgatttcgacggcagagcgagagagcgatggcgctgactaacttcatcgtgacggtggccgtggttggcgcgggggtgcttctcttcaccaccgacatccgcaggtctggcgccctcttccgccgcaacgcgcgccagctccggcagtggctcgaggaggacacggcctccgccgcgtccaagtctgcaaaagaagcagctcaaaagaaactcgactcgacggtccccaaggagaaaccaaaggaagatagccattgactggagctgtttatatgaacggtataacccctatttgaagtattgcaagtcctgttttctacaattactgcaatagaaacttgtagctctcaagtaggtgcacggcaagattatgtttccgcttgaacatcggcctctgtggaacagctagctgaatgttggtattatgtcgtgtgcttataaagaaaaaaaaaaaaaaaa

SEQ ID NO: 894 - protein, 76 aa, Zea mays
  misc_feature: Ceres CLONE ID no. 381151
  misc_feature: Ceres CDNA ID no. 25446347
MALTNFIVTVAVVGAGVLLFTTDIRRSGALFRRNARQLRQWLEEDTASAASKSAKEAAQKKLDSTVPKEKPKEDSH

SEQ ID NO: 895 - DNA, 613 bp, Zea mays
  misc_feature: Ceres CLONE ID no. 381202
  misc_feature: Ceres CDNA ID no. 40350950
  CDS (163)..(375): REFERENCED BY SEQ ID NO: 896
ccggttccgggtaggggaggaaggtaagcgaagaagcatccggactctctcgctcgagggtagggcagggcagggcagggcaggcggcgatccgaatccaatcgccggagggaggaagccaccggtggccgcagtgagggcggcggaggtagaggcaaagggatgacgcgcgggaagcagaagatcgacgcgcagcggcgtaacgcggagcgaaaccagaaatccaaggggtctcagctcgaggcccgcgccgtcggcctcaagatcgtctgctccatctgcaaggtacaattggcaaatgaaaaacagctgaccgatcactatggatcaaagcatccaaaggagaaacctccgagcacatcgagcaccgaataaccatggctggtcgtgacgcagaaatatagatcctgcttggctggtttgaggatctttaagtccgtctgatccatgccttggacctcaacgtcagttatatactctctagtgtgttcatttcctcttgtttcaggtattgtgttgtcgtgctgccaatgtgtctccaaactgtatgtggtcaccatggcattgggatgatgcgaaaaaattatgagcgtatccaaaaaaaaaaaaaaaa

SEQ ID NO: 896 - protein, 70 aa, Zea mays
  misc_feature: Ceres CLONE ID no. 381202
  misc_feature: Ceres CDNA ID no. 40350950
MTRGKQKIDAQRRNAERNQKSKGSQLEARAVGLKIVCSICKVQLANEKQLTDHYGSKHPKEKPPSTSSTE

SEQ ID NO: 897 - DNA, 742 bp, Zea mays
  misc_feature: Ceres CLONE ID no. 381389
  misc_feature: Ceres CDNA ID no. 25446348
  CDS (1)..(471): REFERENCED BY SEQ ID NO: 898
atcctcgggctgtccgctgtccccttcccgcgtcgaaaccctagctcgtcacctcgccgccgtgctgtccgctgtcctagtccgcggctccgcgccccatctctcttgccgtcgcatctgatgttcttctcccgcaacgcattccgcgacctggaccccatcgactcgccggcctccatggcgtcctcgaagaaggttgcgacccgtgacgagtgggagcggaagcttcgcgacgtcaagatacgcaaggaggacatgaaccgcctcgtcatgaacttcctcgtcactgagggcttcgtcgacgccgccgacaagttccgcatcgagtccggcacccagccggagattgacctagcgatcatcgcggatcgaatggaggttaagagagcagtacagtcgggtaatgttcaggaagcgatcgagaagatcaacgatcttaaccccacggttcgattctgtctatgttcctagcaaaattagttcgaataacggccgagacgtactttgttgtggaagatctccaagtaggttgtggttgctgggttgtacagatctggttttcatcctcctgtaagtctgaaatagatgtggtcaagtagagaagcactcagttctgcaatgtggttaacttggatgtactgtcaccacgtttgtctttgtcagcaatttagagccacaactagtttataatacaggaaggggatcctttcccaatctaatttgatcaaaaaaaaaaaaaaaa

SEQ ID NO: 898 - protein, 97 aa, Zea mays
  misc_feature: Ceres CLONE ID no. 381389
  misc_feature: Ceres CDNA ID no. 25446348
  misc_feature: Homolog of GI Number: 55832256 NR Desc: pg4
  misc_feature: Homolog of GI Number: 31296710 NR Desc: PG4
  misc_feature: Homolog of GI Number: 27808548 NR Desc: At1g61150
  misc_feature: Homolog of GI Number: 68373943 NR Desc:  similar to BWK
  misc_feature: Homolog of GI Number: 37748147 NR Desc: 2310003C23Rik protein
  misc_feature: Homolog of GI Number: 55653381 NR Desc:  similar to Protein C20orf11
  misc_feature: Homolog of GI Number: 21594655 NR Desc: Chromosome 20 open reading frame 11
  misc_feature: Homolog of GI Number: 50603716 NR Desc: MGC83062 protein
  misc_feature: Homolog of GI Number: 61860644 NR Desc:  similar to BWK
MASSKKVATRDEWERKLRDVKIRKEDMNRLVMNFLVTEGFVDAADKFRIESGTQPEIDLAIIADRMEVKRAVQSGNVQEAIEKINDLNPTVRFCLCS

SEQ ID NO: 899 - DNA, 1489 bp, Zea mays
  misc_feature: Ceres CLONE ID no. 381453
  misc_feature: Ceres CDNA ID no. 40041200
  CDS (19)..(1185): REFERENCED BY SEQ ID NO: 900
acacacaccccgcttcccatggcgctcgcgctgcgctgccctcccgccgccacctcgtcccggagccccttcctaccgtcgacctccccagcccctgcggggaaggtcccgaggaggccgcccgccagctggaggtgcctcgcctactacggcgacggcggattccgcaagaactacgaccacatccccaagcagttccgcgaggagaacctcaaggatggactgatggataattacaagcatgttcctcaattcctttatggattaagtgctgctcagatggaaatgtttatgaatgacgataacccttataatcggcaatcccagaaagttacagaggaaagcgtttctgctgcgaggagctacgatgagtttggtatgtacaccttgtcaggcatgcatgagggccctgcaagttacagcatgggtatgggcatggggggcagcatgagcatgagcatgggcagaggagggagaggatatagaagaatgagaagctctgctccagatcttccgtcattgctactggactctcgaattatatttcttggaatgcctattgttccagcagtaactgagcttattgctgctcaatttctatggctagactatgacgaccgcacaaaacccatttatctgtatataaactccactggaactatggacgaaaataacgagcttgttgcatctgaaactgatgcttatgcaattgctgattttatcaatcgaagtaaatccaaggtttacacaatcaatcttagcatggcatatggtcaggctgcgatgcttctttcccttggtgtcaagggcaaaagaggagtgctgccgaattcaatcactaaattgcacctgcctaaggtgcacaaatctggtggagctgccattgatatgtggattaaggcaaaagagttagatacaaacacagattactacctcgaactcttgtctaaaggagttggtaaaccaaaggaagagcttgctgaattccttaggggcccgaggtacttccgagcacaagaggctcttgattatggacttgccgatacgatattacactcgctggatggttctttcaaaccaaaggacctgaccgcgcagctagccaaggcacaggcgatgcgccagtcaggcaagcgtgcagctgctggagctgggagatggtcaactccaaccgcacccaggtagagactagaatggtagagcaggacaatatatgttcatctggatggtcttgtggctctgctatacaaagaggccagccttttgtatacttgtgttggaaatccatggagcttggaattagacgcacggctggatagtgaaatgttgtgtactgtagtgtagtgtcagttgtgacgtacgtgtatcatctgtgtgcaatctttgctacgctcgacccacatacattgcattcagatagattaatttcaccagtgaaaacgatagcctgtatggcaacagatgttctgcaccaaaaaaaaaaaaaaaa

SEQ ID NO: 900 - protein, 388 aa, Zea mays
  misc_feature: Ceres CLONE ID no. 381453
  misc_feature: Ceres CDNA ID no. 40041200
  misc_feature (160)..(348): Pfam Name: CLP_protease PFAM Desc: Clp protease
  misc_feature: Homolog of GI Number: 23308343 NR Desc: At1g49970/F2J10_5
  misc_feature: Homolog of GI Number: 51970012 NR Desc: ClpP protease complex subunit ClpR3
  misc_feature: Homolog of GI Number: 51971563 NR Desc: ClpP protease complex subunit ClpR3
  misc_feature: Homolog of GI Number: 79317437 NR Desc: endopeptidase Clp
  misc_feature: Homolog of GI Number: 13794458 NR Desc: ATP
  misc_feature: Homolog of GI Number: 22299302 NR Desc: ATP
  misc_feature: Homolog of GI Number: 21593086 NR Desc: ATP
  misc_feature: Homolog of GI Number: 33861869 NR Desc: Clp protease proteolytic subunit
  misc_feature: Homolog of GI Number: 56783783 NR Desc: putative ATP
  misc_feature: Homolog of GI Number: 55792477 NR Desc: plastid catalytic subunit of ClpP5 protease
  misc_feature: Useful for making lethal plants for genetic confinement systems
  misc_feature: Useful for making lethal plants for genetic confinement systems
  misc_feature: Useful for making plants with increased biomass and foliage
  misc_feature: Useful for making plants with increased biomass and foliage
MALALRCPPAATSSRSPFLPSTSPAPAGKVPRRPPASWRCLAYYGDGGFRKNYDHIPKQFREENLKDGLMDNYKHVPQFLYGLSAAQMEMFMNDDNPYNRQSQKVTEESVSAARSYDEFGMYTLSGMHEGPASYSMGMGMGGSMSMSMGRGGRGYRRMRSSAPDLPSLLLDSRIIFLGMPIVPAVTELIAAQFLWLDYDDRTKPIYLYINSTGTMDENNELVASETDAYAIADFINRSKSKVYTINLSMAYGQAAMLLSLGVKGKRGVLPNSITKLHLPKVHKSGGAAIDMWIKAKELDTNTDYYLELLSKGVGKPKEELAEFLRGPRYFRAQEALDYGLADTILHSLDGSFKPKDLTAQLAKAQAMRQSGKRAAAGAGRWSTPTAPR

SEQ ID NO: 901 - DNA, 442 bp, Zea mays
  misc_feature: Ceres CLONE ID no. 381844
  misc_feature: Ceres CDNA ID no. 36707094
  CDS (3)..(299): REFERENCED BY SEQ ID NO: 902
aggtggctatggcggttatggttacaaccaaggtggatatggaggatatgaaaatggaggctggaactacaaccggaacagaggcggtggcggccgaggacgaggcaattggggctatggtggtcctggatatgaccgtggtggcagaggcgcaggtggccctggcggcaggggctatgttcgaggccgtggacgaatgggtggcggccgtggacggggcaaccaaaactactattagagcaagggcattttccacggccgtattgctgtatgtttcctctagtcctcccagattttagtataatcgccaatggtgcctgtaccattgcatcaattccgtgggattttgacattagtccttcagttttccctgggacatctttcctgtatttaagagtgcatttttgatagttcatcagcatccagaaaaaaaaaaaaaaaa

SEQ ID NO: 902 - protein, 96 aa, Zea mays
  misc_feature: Ceres CLONE ID no. 381844
  misc_feature: Ceres CDNA ID no. 36707094
  misc_feature: Homolog of GI Number: 50582717 NR Desc: putative macronuclear development protein
  misc_feature: Homolog of GI Number: 17819 NR Desc: glycine
  misc_feature: Homolog of GI Number: 21625 NR Desc: glycine
  misc_feature: Homolog of GI Number: 929566 NR Desc: fibrillarin
  misc_feature: Homolog of GI Number: 289123 NR Desc: corA gene product
  misc_feature: Homolog of GI Number: 10799202 NR Desc: glycine
  misc_feature: Homolog of GI Number: 34851124 NR Desc: putative glycine
  misc_feature: Homolog of GI Number: 320976 NR Desc: eggshell protein precursor
  misc_feature: Homolog of GI Number: 19547 NR Desc: environmental stress and abscisic acid inducible protein
  misc_feature: Homolog of GI Number: 17647425 NR Desc: CG9888
MAVMVTTKVDMEDMKMEAGTTTGTEAVAAEDEAIGAMVVLDMTVVAEAQVALAAGAMFEAVDEWVAAVDGATKTTIRARAFSTAVLLYVSSSPPRF

SEQ ID NO: 903 - DNA, 1222 bp, Zea mays
  misc_feature: Ceres CLONE ID no. 382080
  misc_feature: Ceres CDNA ID no. 25445989
  CDS (236)..(808): REFERENCED BY SEQ ID NO: 904
gttgacatcggttcaccgtccgcccgggtacattccgtacgtacaagaggcggtcgcgacgctctagcttgcattgcaccagcgcgcagagcggaaggaggtggaaagcgcccagagagatctcgagagagagagagaggctggtcggcacatactagttcattccgtttggatagagacgcacgcaacgcaggccaccacaacgtgaggagcgggaggaggagggagagggaggatgcaggcgcatcaccgtcagtcgtactacgcggtgctcggcgtgcagccgggcgccaccgccgccgagatccgcgccgcctaccaccgcctcgccatgaggtggcacccggacaagatcgccagcggcggcggcggcgccgatccggcgcgcgcggaggaggccaagagcaggttccagcagatacacgaggcgtaccaagtgctgtcggatgacaagaggagggcgctgtacgacgccggcatgtacgacccgctggacgacgacgacgaccaggaggacgtcgagggattccacgacttcgtgcaggagatggtctcgctcatggccagagaggagcccgtgtacagcttggccgagctgcaatccatgctggacgggatgatcaaggatttcaccgcgccacagccttggcctagcggcttctacactggtggcggtggcggtggggcgtcgtcgccgtcgccgctcggcaaaccaagcagccaagagcagagtacggcttcgtcacgcttgcatccctacgggttcggggacgcgccgtgcttcagccgcacggcgttctcacaatgatggcgatgatgaataaataaatttatacatggatcgagcttttatccttctggcagcaatgggggttttctcgctcgtggaggtggagggagagtaagaacccgtgaaagccatcgtccgccagggtcagactctgattggcagttgcaattgctttggactgcggctgcagggatgaaagaaggtgaggtgggaagatagaccacaaggggcacgtagtcgcctagaatctccacccacaaggggtgtttgtttgtttgtactgtttggtttggtttggttttcgtctcttgcctggcatggtagagatgagttatgccagagcatttgtatacaagggtatgccattgccatcaagaataagttacgtcaatacaatttgtacataaataagagctaaaaaaaaaaaaaaaa

SEQ ID NO: 904 - protein, 190 aa, Zea mays
  misc_feature: Ceres CLONE ID no. 382080
  misc_feature: Ceres CDNA ID no. 25445989
  misc_feature (8)..(82): Pfam Name: DnaJ PFAM Desc: DnaJ domain
  misc_feature: Homolog of GI Number: 53793391 NR Desc: heat shock
  misc_feature: Homolog of GI Number: 34912486 NR Desc: heat shock protein
  misc_feature: Homolog of GI Number: 21554587 NR Desc: DnaJ protein
  misc_feature: Homolog of GI Number: 30102878 NR Desc: At1g56300
  misc_feature: Homolog of GI Number: 23428796 NR Desc: DnaJ
  misc_feature: Homolog of GI Number: 1350548 NR Desc: heat shock
  misc_feature: Homolog of GI Number: 12321759 NR Desc: DnaJ protein
  misc_feature: Homolog of GI Number: 76649543 NR Desc:  similar to DnaJ homolog
  misc_feature: Homolog of GI Number: 73984943 NR Desc:  similar to DnaJ homolog
  misc_feature: Homolog of GI Number: 9910416 NR Desc: DnaJ homolog
MQAHHRQSYYAVLGVQPGATAAEIRAAYHRLAMRWHPDKIASGGGGADPARAEEAKSRFQQIHEAYQVLSDDKRRALYDAGMYDPLDDDDDQEDVEGFHDFVQEMVSLMAREEPVYSLAELQSMLDGMIKDFTAPQPWPSGFYTGGGGGGASSPSPLGKPSSQEQSTASSRLHPYGFGDAPCFSRTAFSQ

SEQ ID NO: 905 - DNA, 468 bp, Zea mays
  misc_feature: Ceres CLONE ID no. 383044
  misc_feature: Ceres CDNA ID no. 36707095
  CDS (68)..(316): REFERENCED BY SEQ ID NO: 906
actgcgactgtgagcttcgttcgttcagttcatccgtgttcttgtttgcgaggtcgagagagagaggatgtcgtgctgcggaggcaactgtgggtgcggctccggctgcaagtgcggcaacggctgcggagggtgcagcaagatgtacccggacatggctgagcaggtgaccaccaccacccaggctctcatcatgggtgtcgcaccatccaaggggcacgccgagggcgggttcgaggcggccgccggagctgagaacggcgggtgcaagtgcggcggcaactgccagtgcgacccctgcaactgcggcaagtgagctaggtgctccaccctgcaggccggccggaggaagctagctaattattataagctaaataaagtatagcggcgtcgctgtgtgtgtttgttactctgtcttgctgacttttcttcgggaacatcgattatcttaaaaaaaaaaaaaaaaaa

SEQ ID NO: 906 - protein, 82 aa, Zea mays
  misc_feature: Ceres CLONE ID no. 383044
  misc_feature: Ceres CDNA ID no. 36707095
  misc_feature (1)..(80): Pfam Name: Metallothio_2 PFAM Desc: Metallothionein
  misc_feature: Homolog of GI Number: 55416162 NR Desc: metallothionein
  misc_feature: Homolog of GI Number: 46358913 NR Desc: metallothionein
  misc_feature: Homolog of GI Number: 34895842 NR Desc: putative metallothionein
  misc_feature: Homolog of GI Number: 13491970 NR Desc: metallothionein
  misc_feature: Homolog of GI Number: 15825501 NR Desc: type 2 metallothionein
  misc_feature: Homolog of GI Number: 3901014 NR Desc: metallothionein
  misc_feature: Homolog of GI Number: 32400768 NR Desc: metallothionein
  misc_feature: Homolog of GI Number: 46850185 NR Desc: metallothionein 2a
  misc_feature: Homolog of GI Number: 23954357 NR Desc: metallothioneine type2
  misc_feature: Homolog of GI Number: 169713 NR Desc: metallothionein
MSCCGGNCGCGSGCKCGNGCGGCSKMYPDMAEQVTTTTQALIMGVAPSKGHAEGGFEAAAGAENGGCKCGGNCQCDPCNCGK

SEQ ID NO: 907 - DNA, 657 bp, Zea mays
  misc_feature: Ceres CLONE ID no. 383438
  misc_feature: Ceres CDNA ID no. 25446064
  CDS (95)..(460): REFERENCED BY SEQ ID NO: 908
atctcagactcagggagagacgagagaagtggacacctcgcctgcctggactcgtctactctagtatacagaaaaaagcagaagagatacggggatgtctaagacggcgggcgtcggcagactcggaggagccagggcggcggacgcggcgcagcagcagcagctggcggcgggtgatgctgcggtggcgcgggcggcgcggcccatcgagacgctgctgcgcgcggcgccgctggtgctgtgcgtggccgccatgaccctcatgctccgtgaccagcagagcaatgagtacggcaccgtcgcctactccgacctggggggcttcaaatacctcgtctacgccaacggcctgtgcgccgcctactcgctggcgtccgcgttttacacggccgtgccgaggcccgccaccgtgtcgcgctcctgggtcgtcttcctcctcgaccaggtaccctcagactaaagtcggcattgcagcagatcggaacaatacgaagcttgatacagagccgaaggagttgagcaggaaagcttcggcgtaacaccaaagagtggaaccgacttaaagatgaaaaggctattcagacatcgatagattgctatagagttattgtcaaatgtaaagggtatgaatgtaattttgtaaaaaaaaaaaaaaaa

SEQ ID NO: 908 - protein, 121 aa, Zea mays
  misc_feature: Ceres CLONE ID no. 383438
  misc_feature: Ceres CDNA ID no. 25446064
  misc_feature: Homolog of GI Number: 50922337 NR Desc: OSJNBa0071G03.1
  misc_feature: Homolog of GI Number: 14030504 NR Desc: salicylic acid
  misc_feature: Homolog of GI Number: 50906387 NR Desc: integral membrane family protein
MSKTAGVGRLGGARAADAAQQQQLAAGDAAVARAARPIETLLRAAPLVLCVAAMTLMLRDQQSNEYGTVAYSDLGGFKYLVYANGLCAAYSLASAFYTAVPRPATVSRSWVVFLLDQVPSD

SEQ ID NO: 909 - DNA, 726 bp, Zea mays
  misc_feature: Ceres CLONE ID no. 383829
  misc_feature: Ceres CDNA ID no. 36498306
  CDS (113)..(544): REFERENCED BY SEQ ID NO: 910
atcaacatcctcctccacccgaaccaatcttgtagcatttccttccgctgcgaacacccaaacggcagctttctactaggggaagagaaacgttttcttgtctcaacgatcgatgcgtcgaccgcacgagcagctgcctagattggcgtcaggtctcgctctactggcctgcctcgccgtgctcgctcgttctcgcgttgccggcgctggtggcatgccggcgaccttcatcttcggcgactcgctcgtggacgccggcaacaacaactacatcgtctccctgtcgaaggccaacttccccccgaacggcatcgacttcttgggccaccagcccaccggccggtacacgaacggccggaccatcgtcgacattctagggcaagagatgggactgggagggttcgtgccgccgtacatggccccggagaccacgggcgacgccgtgatgagaggcgtcaactacgcttccggcggcggagggatcctcaacgaaaccggcagtatcttcgtcagtacatggccttccactggaactgttgtgtgaaatcctcgtgctagtctagcagcagtactacgtaccacaaacatgtgttttaccccccaacgcttagctagcttgttcccgcgtaacttcggatcatcgcgtctgcgtgagttagttcttctcttttgcgtgaaacacagagctatcaattaagtaacgaatctccaaaaaaaaaaaaaaaa

SEQ ID NO: 910 - protein, 143 aa, Zea mays
  misc_feature: Ceres CLONE ID no. 383829
  misc_feature: Ceres CDNA ID no. 36498306
  misc_feature (39)..(131): Pfam Name: Lipase_GDSL PFAM Desc: GDSL
  misc_feature: Homolog of GI Number: 22136366 NR Desc: putative GDSL
  misc_feature: Homolog of GI Number: 50928155 NR Desc: OSJNBa0020J04.12
  misc_feature: Homolog of GI Number: 34910808 NR Desc: GDSL
  misc_feature: Homolog of GI Number: 10177373 NR Desc: GDSL
  misc_feature: Homolog of GI Number: 50912461 NR Desc: GDSL
  misc_feature: Homolog of GI Number: 21537293 NR Desc: GDSL
  misc_feature: Homolog of GI Number: 9757979 NR Desc: GDSL
  misc_feature: Homolog of GI Number: 9759340 NR Desc: GDSL
  misc_feature: Homolog of GI Number: 31432540 NR Desc: putative early nodulin gene
MRRPHEQLPRLASGLALLACLAVLARSRVAGAGGMPATFIFGDSLVDAGNNNYIVSLSKANFPPNGIDFLGHQPTGRYTNGRTIVDILGQEMGLGGFVPPYMAPETTGDAVMRGVNYASGGGGILNETGSIFVSTWPSTGTVV

SEQ ID NO: 911 - DNA, 703 bp, Zea mays
  misc_feature: Ceres CLONE ID no. 384607
  misc_feature: Ceres CDNA ID no. 36588296
  CDS (108)..(521): REFERENCED BY SEQ ID NO: 912
acaccaagcagaaaaaaaatctctctccgctccccgctccgagtcgcgtcgcgtgaggagaaaggaagggaagccggaaagggttctcgccgaggcggaaggaggagatggccgggaagggaggcaagggcctgctcgcggccaagacgacggccgccaagaccgccgagaaggacaaggggaagaaggcccccatctcccgctcgtcccgcgcggggctgcagttccctgtgggccgtatccatcgtcagctgaagcaaaggactcaggccaatggccgtgttggtgctactgcggcggtctactctgctgctatcctggagtacctgacagctgaggttctggagctggctgggaacgccagcaaggatctcaaggtcaagcgtatcacccctcgtcacctccaactggccatccgtggagacgaggagctcgacaccctcatcaagggcaccattgctggtggaggtgtgatcccgcacatccacaagtccctgatcaacaagtcctccaaagagtgaacagaaaaaatagcaaaggagcatctctagcttgaactggacattttctcagtcgtctgtcagataagtttatcgtcgtgtcatttagtgtttagctgtgctccttccagatcgaagtcgttgtctgtctgtgtaatgtttacctggtactgattcagtcatttgtaaaaaaaaaaaaaaaa

SEQ ID NO: 912 - protein, 137 aa, Zea mays
  misc_feature: Ceres CLONE ID no. 384607
  misc_feature: Ceres CDNA ID no. 36588296
  misc_feature (32)..(108): Pfam Name: Histone PFAM Desc: Core histone H2A/H2B/H3/H4
  misc_feature: Homolog of GI Number: 50918585 NR Desc: putative histone H2A protein
  misc_feature: Homolog of GI Number: 34902610 NR Desc: Putative histone H2A
  misc_feature: Homolog of GI Number: 31432099 NR Desc: putative histone H2A
  misc_feature: Homolog of GI Number: 6319146 NR Desc: H2A protein
  misc_feature: Homolog of GI Number: 21592838 NR Desc: histone H2A.F/Z
  misc_feature: Homolog of GI Number: 62319094 NR Desc: histone H2A
  misc_feature: Homolog of GI Number: 21536635 NR Desc: putative histone H2A
  misc_feature: Homolog of GI Number: 30024110 NR Desc: putative histone H2A
  misc_feature: Homolog of GI Number: 62087582 NR Desc: H2A histone family
  misc_feature: Homolog of GI Number: 76615576 NR Desc:  similar to H2A histone family
MAGKGGKGLLAAKTTAAKTAEKDKGKKAPISRSSRAGLQFPVGRIHRQLKQRTQANGRVGATAAVYSAAILEYLTAEVLELAGNASKDLKVKRITPRHLQLAIRGDEELDTLIKGTIAGGGVIPHIHKSLINKSSKE

SEQ ID NO: 913 - DNA, 916 bp, Zea mays
  misc_feature: Ceres CLONE ID no. 384643
  misc_feature: Ceres CDNA ID no. 25446349
  CDS (3)..(299): REFERENCED BY SEQ ID NO: 914
atgccatgccatggtccgccatttactttgagagtgggagaacagccattgttgagggttggtcctcttcgccattggcccgagaaaattggtctaggaagatcagcatcgaatgtaggacgtcttcgggggctcagccatgtgagaaatcatgtgggcgactggtaattcattgccggattccgactcttgcggccaaatcgccgcgcgacgagaacaagcctcctcgggatctaatcaccggagaagaacatatggttcaagtggagccacacatcgaggatttcgattcaatctaggtggcgtctcctagttaacttgcgccaaggatgatccatagttcgttttctatttaccttttacttttgtaagacttccgctatgtaataagtactctgattttattgtacatttatctctatacactctgttattatatatgttgtcttctttggcatgtatgagatgcacccggctttgtcccttaaaacccggtgtgtcatttagtgggcggaaagttttactccgatgtttgagtgaacggtggccgagaattggccaacaaaatcataaagaaaaatgaaaaagaaacccacgatgctcaagaagaagctaaacaagccgaagaagatgccgagcgcgcaaggcgtatagctgaactctcaccgctgctcgagccgtacgaccccctggccgatcccatcatgaaagaagcgctggatgtaatgagcgtcgctaactccatcgtcgacgaagtcgtcgataggctgctgaatgaagccgccgagaagattcttaaagaagattaagcttttattgtaatgatacaatgtaacatttggtgtatgaaacaattaatcagacatgtaaattaatgtaatatatttccttgcaatgcagaaaaaaaaaaaaaaaa

SEQ ID NO: 914 - protein, 97 aa, Zea mays
  misc_feature: Ceres CLONE ID no. 384643
  misc_feature: Ceres CDNA ID no. 25446349
  misc_feature: Homolog of GI Number: 33113968 NR Desc: Cinful1 polyprotein
MPWSAIYFESGRTAIVEGWSSSPLARENWSRKISIECRTSSGAQPCEKSCGRLVIHCRIPTLAAKSPRDENKPPRDLITGEEHMVQVEPHIEDFDSI

SEQ ID NO: 915 - DNA, 498 bp, Zea mays
  misc_feature: Ceres CLONE ID no. 384872
  misc_feature: Ceres CDNA ID no. 36707391
  CDS (76)..(282): REFERENCED BY SEQ ID NO: 916
gtgattctggataggggcgctggcaccgattggctccggatatcgcagcgtggcggtcgctcagttcagtccgccatggaaggtgcagccggccaaatgctcgtcccgatcctcggcatcgttgccgtggccgccgtgaccttctacaccgtcagcttcatggagatgcgagacaaatccttcgaggagctcgacgagaagtactcggacttcgacgagtcaggcgggcggcagcggcggtctcgccgcagggccgagcgcgacaggaagaagtccaaatgattggccacgccgccatttgtgtccctgctggtttgagaggggactgacgggggatgaagacgcagctgctacttacaaatttttgggtttcaagtcatgggtgagtgtgagtgtgtgtggttatgaacatctgcctatttcctagctattagccactgaagcagctaaaacgatggatttatttaaaagatcgactccgtaaaaaaaaaaaaaaaa

SEQ ID NO: 916 - protein, 68 aa, Zea mays
  misc_feature: Ceres CLONE ID no. 384872
  misc_feature: Ceres CDNA ID no. 36707391
  misc_feature: Homolog of GI Number: 17266309 NR Desc: fortune
MEGAAGQMLVPILGIVAVAAVTFYTVSFMEMRDKSFEELDEKYSDFDESGGRQRRSRRRAERDRKKSK

SEQ ID NO: 917 - DNA, 802 bp, Zea mays
  misc_feature: Ceres CLONE ID no. 385182
  misc_feature: Ceres CDNA ID no. 25446350
  CDS (133)..(591): REFERENCED BY SEQ ID NO: 918
gcaaaatttagggtttctttgcatctctcccgtcggctcctcccctcccaagtctcacctcacctctcctcctcgcgaagtatcggcggcggcgagcgcggcaggctagagcctcgttgctgaggaggggagatggcgggtatgggcgatatgccgatgaggccggcgcggccgggcccgccgatgcagcaccgtggtccgcccccgatggcgcgcctccgccccgaaccaatcgaccgcgagaagacctgtcctctgctgctcagggttttcacaagggttgctggtcaccaccaaaatgaagagtttgcagtgagagggaaggaaccaaaggatgaagttcagatttacacatggaaggatgcgaccctccgcgagctcactgatcttgtgaaagaggttgctcttccagcaagaaaaaggaatgcaaggctttcttttgcatttgtatacccagacaagaatggtcgttttgttgtcagacaggtgggttcgaccttcgcttacggtcatggaagaggcgacgatgccaaaactcttgcagagctcggattccagatcggtgattacttgagcgttgcaatcatgtagacggtgcctgcaccggatgtaattgctgtgatgtcaaaagggctctggttgcaacagtaaggcatgattctctgttagcactaggaactgcaaccagaattgtctgtaataccggtagtatcaaatttacctagacacttcgaacgagcaaggcgtctgtaataccggtacttacatgtggtgcctggagcttccaaaaaaaaaaaaaaaa

SEQ ID NO: 918 - protein, 152 aa, Zea mays
  misc_feature: Ceres CLONE ID no. 385182
  misc_feature: Ceres CDNA ID no. 25446350
  misc_feature (30)..(151): Pfam Name: SAP18 PFAM Desc: Sin3 associated polypeptide p18
  misc_feature: Homolog of GI Number: 50904867 NR Desc: putative P18
  misc_feature: Homolog of GI Number: 33667908 NR Desc: P18
  misc_feature: Homolog of GI Number: 21618189 NR Desc: sin3 associated polypeptide p18
  misc_feature: Homolog of GI Number: 62859207 NR Desc: LOC548920
  misc_feature: Homolog of GI Number: 57104930 NR Desc:  similar to sin3 associated polypeptide p18
  misc_feature: Homolog of GI Number: 73993530 NR Desc:  similar to sin3 associated polypeptide p18
  misc_feature: Homolog of GI Number: 62661560 NR Desc:  similar to SAP18
  misc_feature: Homolog of GI Number: 57095274 NR Desc:  similar to sin3 associated polypeptide p18
  misc_feature: Homolog of GI Number: 61866860 NR Desc:  similar to sin3 associated polypeptide p18
MAGMGDMPMRPARPGPPMQHRGPPPMARLRPEPIDREKTCPLLLRVFTRVAGHHQNEEFAVRGKEPKDEVQIYTWKDATLRELTDLVKEVALPARKRNARLSFAFVYPDKNGRFVVRQVGSTFAYGHGRGDDAKTLAELGFQIGDYLSVAIM

SEQ ID NO: 919 - DNA, 1427 bp, Zea mays
  misc_feature: Ceres CLONE ID no. 386068
  misc_feature: Ceres CDNA ID no. 25446065
  CDS (172)..(1290): REFERENCED BY SEQ ID NO: 920
acggacgtgtaggaggggacacgccgccgggcctcactaaccgcaggttcgggagtactccggaacccgccgccgcatccacacgacgccacgactgacgacggagagccccggtctccttccacggctccaccgccaccaccccgcataaaacagcagaagaacaagggtatggcgaaggatgggggtcccgactggaacggcctgctcaagtggagcctcgcccacggcgacagcaccaacccgccgcgtgctctcagcgaggaagacagaaaatggttcatggatgctatgcaagccaacacggtagatgttgtgaagaggatgaaggagatcactcaggtgatgaaaacaccagaagatgtcttgcagtctcagggtgtgaccccggagaacattgaagatatgttggatgagctacaggagcatgttgaatccattgacatggcaaatgatctacattctattggtgggctggatcctctacttagttacttgaaaaattcaaatgctggcatccgagcaaaggcagcagaagttgttagtacaattgtgcagaataatcccaagagtcagcaacttgtcatggaatccaatggactagagccactgttgacgaacttcaaatcagatccaagtacaaatgcacgcacaaaagctttaggagccatatcttctctaattcgtcataaccagcctggagtttccgcatttcgattgggaaatggctatgctggattgaaggatgctcttggttccgatgatgccagactccaaaggaaagctctcaatctcatacaatacttgctgcacaactacaaggcagacaggagtgttgccacagagcttggtcttccgaagctgatgatgcaccttgtgtccagcgatgattccttagtgcgtgaagctgctctaggcggcctccttgagttggcgcgggacaagacatctggtaacgcgctacctgaccaagaaaagctgaaagacatgctcaagagccgaatagaagggatcagcgcaatggacactgacgatctccacgctgctcgcgaggagcggcagctggtggattcactctggaaggagtgctacaacgaaccttcgtctctcagggagaagggcctcgtcgtgcttccgggagaggatgctccccaacagccgccaccagacgttgcagggaagatgtttgagccaccgcttcgtgcgtgggcggctgcaagacctgctcaggaagatgactctgactctggcagcggaaagaaggatccgccattgctgcttaagttttgacggccttcttatgccgatactagttcttaggctccaccatgggtgttgaaagctgaaagatcagatctgatggatgcctgaccttcttcgaacctcagttgtggttcttgtaatttgcaccgaaaaaaaaaaaaaaa

SEQ ID NO: 920 - protein, 372 aa, Zea mays
  misc_feature: Ceres CLONE ID no. 386068
  misc_feature: Ceres CDNA ID no. 25446065
  misc_feature (131)..(172): Pfam Name: Arm PFAM Desc: Armadillo/beta
  misc_feature (231)..(258): Pfam Name: HEAT PFAM Desc: HEAT repeat
  misc_feature: Homolog of GI Number: 34897412 NR Desc: putative Hsp70 binding protein
  misc_feature: Homolog of GI Number: 29436427 NR Desc: Zgc:55259 protein
  misc_feature: Homolog of GI Number: 62859553 NR Desc: LOC548823
  misc_feature: Homolog of GI Number: 42415537 NR Desc: Similar to RIKEN cDNA 1500019G21 gene
  misc_feature: Homolog of GI Number: 47939891 NR Desc: Hsp70
  misc_feature: Homolog of GI Number: 48105781 NR Desc: similar to ENSANGP00000019732
  misc_feature: Homolog of GI Number: 55649935 NR Desc:  similar to hsp70
  misc_feature: Homolog of GI Number: 1906769 NR Desc: Le.MFB2
MAKDGGPDWNGLLKWSLAHGDSTNPPRALSEEDRKWFMDAMQANTVDVVKRMKEITQVMKTPEDVLQSQGVTPENIEDMLDELQEHVESIDMANDLHSIGGLDPLLSYLKNSNAGIRAKAAEVVSTIVQNNPKSQQLVMESNGLEPLLTNFKSDPSTNARTKALGAISSLIRHNQPGVSAFRLGNGYAGLKDALGSDDARLQRKALNLIQYLLHNYKADRSVATELGLPKLMMHLVSSDDSLVREAALGGLLELARDKTSGNALPDQEKLKDMLKSRIEGISAMDTDDLHAAREERQLVDSLWKECYNEPSSLREKGLVVLPGEDAPQQPPPDVAGKMFEPPLRAWAAARPAQEDDSDSGSGKKDPPLLLKF

SEQ ID NO: 921 - DNA, 532 bp, Zea mays
  misc_feature: Ceres CLONE ID no. 386240
  misc_feature: Ceres CDNA ID no. 25445990
  CDS (73)..(315): REFERENCED BY SEQ ID NO: 922
taaattccaccactccccttcgccgcttcctgtcgcgccgccgctcctctcacaacccagtcgctcaagtccatgaagttcaaggatggctacatgatctcatctggtcagccagtgaacgagtacattgactcggctgtgagacacgttcttctcagacagggtgttctcggtatcaaggtgaagatcatgcttgactgggacccgaagggcaaggttggcccgatcactcctcttccggacctggtgaccatccacaccccgaaggacgaggacgagccgcgccctccggtcttggcacctcctgaggtgtaaggtcccaactgtgtccttgaaatggcagtttgatcgggtcctagataggtttctatcttacgataaggacaatgctaagacagttggttaccttaatctttatggacagatgctatgtgttgcttctgtggcacttttgtttaagctaagttttgcggagacaagatacttatatatgttccggatgaaattatggttcaaaaaaaaaaaaaaaaaa

SEQ ID NO: 922 - protein, 80 aa, Zea mays
  misc_feature: Ceres CLONE ID no. 386240
  misc_feature: Ceres CDNA ID no. 25445990
  misc_feature (1)..(39): Pfam Name: Ribosomal_S3_C PFAM Desc: Ribosomal protein S3
  misc_feature: Homolog of GI Number: 38093738 NR Desc: putative ribosomal protein
  misc_feature: Homolog of GI Number: 22204124 NR Desc: putative 40S ribosomal protein S3
  misc_feature: Homolog of GI Number: 32400841 NR Desc: 40S ribosomal protein
  misc_feature: Homolog of GI Number: 50939157 NR Desc: putative 40S ribosomal protein
  misc_feature: Homolog of GI Number: 83283961 NR Desc: 40S ribosomal protein
  misc_feature: Homolog of GI Number: 20466075 NR Desc: AT5g35530/MOK9_14
  misc_feature: Homolog of GI Number: 16323404 NR Desc: putative ribosomal protein S3a homolog
  misc_feature: Homolog of GI Number: 20258907 NR Desc: putative 40S ribosomal protein
  misc_feature: Homolog of GI Number: 22759729 NR Desc: putative ribosomal protein S3
  misc_feature: Useful for making lethal plants for genetic confinement systems
  misc_feature: Useful for making ornamental plants with modified flowers
  misc_feature: Useful for making ornamental plants with modified leaves
  misc_feature: Useful for making plants with altered leaf shape eg curled leaves
  misc_feature: Useful for making plants with altered leaf shape eg curled leaves
  misc_feature: Useful for making plants with increased biomass
  misc_feature: Useful for making plants with increased biomass and foliage
  misc_feature: Useful for making plants with modified flowers
  misc_feature: Useful for making shorter plants
  misc_feature: Useful for modifying plant architecture
MKFKDGYMISSGQPVNEYIDSAVRHVLLRQGVLGIKVKIMLDWDPKGKVGPITPLPDLVTIHTPKDEDEPRPPVLAPPEV

SEQ ID NO: 923 - DNA, 835 bp, Zea mays
  misc_feature: Ceres CLONE ID no. 386572
  misc_feature: Ceres CDNA ID no. 25445807
  CDS (264)..(692): REFERENCED BY SEQ ID NO: 924
ctcattgaattagtacgtactcaccgtttgtcctagcattttgccaaaccaacgagcctccaagagaaaagaaggcgccgcaccaatcgccgccccagtcccaggctccggcgctcgtgttccaaacggccgtgctcccgttccacccacccccatccctcctccactcacccgacctccgtccgatccgcccacgcagccgtgtcggcctcgtgcgcaacgaagaccggccggccggcccacccgccctcccgcccgccgccatgcctggctcgcccaaggtcttcttcgcttcctccgcctcgcgccgctccggggcactgcgccggctgctctcctcgccggccttctctgcggcctgcctcttcttcggcctcgccggctttctcaccgccgcgctcaccctgtcgcgctccccgtccatcactcacagccgctgccccgactcctcgcgcccgctctccgtctccgtcgcgtgggaccgccgcccaggggatggctccgccgcgggctccgcggagctcccggcctcgctcgccaccggatcgcgcggccgtcacaaggtcatggccttcgtcgggatcttcaccgggtttggctccatcggccgccgccgcgcgctgcgccggacgtggctccccgcggatcgccagggtctacttcggtcagtcgctggtatcacggcttgctagttcgttttcgcttctgcctgtcgagatctagctggactttcagagttcggactgttaatgtattttcgtcgttatttgctacccttagtttagtaacataataatatggtgagactggttgcaaaccaaaaaaaaaaaaaaaa

SEQ ID NO: 924 - protein, 142 aa, Zea mays
  misc_feature: Ceres CLONE ID no. 386572
  misc_feature: Ceres CDNA ID no. 25445807
  misc_feature: Homolog of GI Number: 55296705 NR Desc: putative Avr9 elicitor response protein
  misc_feature: Homolog of GI Number: 25405979 NR Desc: protein F12M16.19
  misc_feature: Homolog of GI Number: 6523547 NR Desc: hydroxyproline
  misc_feature: Homolog of GI Number: 66779249 NR Desc: similar to ATP
  misc_feature: Homolog of GI Number: 67987177 NR Desc: 4Fe
  misc_feature: Homolog of GI Number: 41400384 NR Desc: plus agglutinin
  misc_feature: Homolog of GI Number: 21355745 NR Desc: CG15021
  misc_feature: Homolog of GI Number: 60678627 NR Desc: plus agglutinin
MPGSPKVFFASSASRRSGALRRLLSSPAFSAACLFFGLAGFLTAALTLSRSPSITHSRCPDSSRPLSVSVAWDRRPGDGSAAGSAELPASLATGSRGRHKVMAFVGIFTGFGSIGRRRALRRTWLPADRQGLLRSVAGITAC

SEQ ID NO: 925 - DNA, 527 bp, Zea mays
  misc_feature: Ceres CLONE ID no. 386631
  misc_feature: Ceres CDNA ID no. 25446351
  CDS (86)..(301): REFERENCED BY SEQ ID NO: 926
gtagctaccagtagtttgttagttttcgtttaacgccatcatcgattgatttgcagtttcggttcgccatcggcagccgagcaccatgagctccacaggcggcggcgacgatggcgccaagaagtcttggccggaagtggtcgggctcagcctggaagaagccaagagggtgatcctgtgcgacaagcccgacgccgacatcgtcgtgctgcccgtcggcacgccggtgaccatggatttccgccccaaccgcgtccgcatcttcgtcgacaccgtcgcggaggcaccccacatcggctgaggtttaaatctacaaaatgaatgactcggacatgccatgcgtacctgtccgtcgccgaataatggatgtgtgtgtgcttcgatcgttcctataagttgctagtaaaaataatggcatcgtcgttatgcatgaataaaaagtatcagaataatgttcaccctttcacgattggatatatgaaaatgtgctcgatcagttgtttggtttccgaaaaaaaaaaaaaaaa

SEQ ID NO: 926 - protein, 71 aa, Zea mays
  misc_feature: Ceres CLONE ID no. 386631
  misc_feature: Ceres CDNA ID no. 25446351
  misc_feature (12)..(71): Pfam Name: potato_inhibit PFAM Desc: Potato inhibitor I family
  misc_feature: Homolog of GI Number: 48093414 NR Desc: MPI
  misc_feature: Homolog of GI Number: 475253 NR Desc: proteinase inhibitor
  misc_feature: Homolog of GI Number: 75994169 NR Desc: maize protease inhibitor
  misc_feature: Homolog of GI Number: 48093402 NR Desc: MPI
  misc_feature: Homolog of GI Number: 48093416 NR Desc: MPI
  misc_feature: Homolog of GI Number: 75994145 NR Desc: maize protease inhibitor
  misc_feature: Homolog of GI Number: 48093370 NR Desc: MPI
  misc_feature: Homolog of GI Number: 75994153 NR Desc: maize protease inhibitor
  misc_feature: Homolog of GI Number: 75994157 NR Desc: maize protease inhibitor
  misc_feature: Homolog of GI Number: 75994143 NR Desc: maize protease inhibitor
MSSTGGGDDGAKKSWPEVVGLSLEEAKRVILCDKPDADIVVLPVGTPVTMDFRPNRVRIFVDTVAEAPHIG

SEQ ID NO: 927 - DNA, 745 bp, Zea mays
  misc_feature: Ceres CLONE ID no. 386787
  misc_feature: Ceres CDNA ID no. 40041201
  CDS (87)..(503): REFERENCED BY SEQ ID NO: 928
acgccaccaccaaacgcctctctctctctctctctctctctctctctctcggccgccggccctccgtcgcattcaacacgtacgccatggcgcgcctgctccgcgccgccgccgtcctggcgctcctggccgtctccaccgccgcgctgtcggcgccggcgtgggcgggcggcgtgtccgccggcgacctggcccatctgggcgccgccgtcgtgattcggcgcggcggcgggcgggcgtgccgcggcggtacgacggtgggcgagtgcatggagtacctggacgtggacgccgagggcgaggccgacgtcgccggcatggccacgggcggcagcaagcgccgggtgctgcagggcggctccggctacatcggctacgacgcgctgcgccgggacaacgtgccctgctcgcagcgcggcgcgtcctactacaactgccagcccggcgccgaggccaacccctactcccgcggctgcagcgccatcacccagtgcaggggctgatcgatgcatgcatggtttcgcattccattctccggcagcagggtaaatcggttgctgctagcttcattcatgcatgtgtgtggtgcttgattttcctttttggggtctttaattgtcgtccgtcgattattgtggtgcagtggagatgtgtctgtgctgttgctagcatccttttcaggatgaatctaaaagtaataataataattatatatgatgatcctgtaacaaaaaaaaaaaaaaaa

SEQ ID NO: 928 - protein, 138 aa, Zea mays
  misc_feature: Ceres CLONE ID no. 386787
  misc_feature: Ceres CDNA ID no. 40041201
  misc_feature (72)..(138): Pfam Name: RALF PFAM Desc: Rapid ALkalinization Factor
  misc_feature: Homolog of GI Number: 77556664 NR Desc: Rapid ALkalinization Factor
  misc_feature: Homolog of GI Number: 34907152 NR Desc: P0506E04.27
  misc_feature: Homolog of GI Number: 16566316 NR Desc: RALF precursor
  misc_feature: Homolog of GI Number: 42374767 NR Desc: rapid alkalinization factor preproprotein
  misc_feature: Homolog of GI Number: 28628205 NR Desc: rapid alkalinization factor 2 precursor
  misc_feature: Homolog of GI Number: 77556666 NR Desc: Rapid ALkalinization Factor
  misc_feature: Homolog of GI Number: 66777243 NR Desc: Ribonuclease PH
  misc_feature: Homolog of GI Number: 18958209 NR Desc: subtilisin
MARLLRAAAVLALLAVSTAALSAPAWAGGVSAGDLAHLGAAVVIRRGGGRACRGGTTVGECMEYLDVDAEGEADVAGMATGGSKRRVLQGGSGYIGYDALRRDNVPCSQRGASYYNCQPGAEANPYSRGCSAITQCRG

SEQ ID NO: 929 - DNA, 1283 bp, Zea mays
  misc_feature: Ceres CLONE ID no. 386966
  misc_feature: Ceres CDNA ID no. 25446625
  CDS (432)..(1139): REFERENCED BY SEQ ID NO: 930
gagaaagggagaaaaatagcaggccgccttgagctggcataggatgcgacggtccggcaggggcagggctcggcggtcgacggaggccaattctttaacttccttcctccgtcgatcatccagcaccagcaggagaatcccgtcgaatccccctccccaacccaagggagcgcgcgcgtatgcctcctccagatccaaagcaacaagcaacagacagcgaggggcaccggggtccgccgcatgtgtgtggttcatggaggatcatgctttcctgcttactgcattagctcctgacgcgccaccctcccctcgcgttcattgatttctgttataattactcacattattattggtaaagaaagatagggcaccgcttctaatttgatgggcattccgttaccgtctcaacgtcaacaacagttgatgctactatggttggaaatcgggcatggtttgcaggtcttttcagcggctcgggcaaaaggcgacaagtcagtgcagagaagatagtgtttgatctaaccccactacaggaacagaggctgcaaagtctgaaggaaaggctaaatgtgccatatgacgaaactcggacagatcatcaagaatcgcttagggctctatggaatgcctcctttcccgatacggagctcactagcttagtttcagaacagtggaaagacatggggtggcagggcgtgaacccagcaactgatttcaggggctgtgggtttgtttcgctcgagaaccttttgttttttgcaagaacatacccggcttctttcaagaggctgatgctgaagcagcaaggaatgcgaactacatgggagtacccatttgcggtcgcgggtgtaaacatctcatacatgctgattcaactgctggagctcaactcagggcgcccgaagtctttgccagggattaacttcatcaaagtgttgacagaacacgaggatgcgttcgacgtgctgtactgcatagcgttcgagatgatggacgcccagtggctagcaatgcgagcctcgtacatgcagttcaaagaggtgctggaggccacaaggcagcagctcgagagggagctctccctggaggatctcaatggcatccatgacctccctgcctgcaacctcttgtacaaatagtgctactggtagttagattatattactgggatgcagtcaaaggaaaatttgatcaggttacatcgtaaccagcatcatcagcctgtaaaaaagaaaaaggaaaagaaaaggagagaagggagacactcaaaaaaaaaaaaaaaa

SEQ ID NO: 930 - protein, 235 aa, Zea mays
  misc_feature: Ceres CLONE ID no. 386966
  misc_feature: Ceres CDNA ID no. 25446625
  misc_feature (54)..(215): Pfam Name: ELMO_CED12 PFAM Desc: ELMO/CED
  misc_feature: Homolog of GI Number: 38344760 NR Desc: OSJNBa0068L06.3
  misc_feature: Homolog of GI Number: 15218859 NR Desc: phagocytosis and cell motility protein ELMO1
  misc_feature: Homolog of GI Number: 50921173 NR Desc: B1160F02.16
  misc_feature: Homolog of GI Number: 25363286 NR Desc: protein F21B7.23
  misc_feature: Homolog of GI Number: 17981659 NR Desc: At2g44770/F16B22.26
  misc_feature: Homolog of GI Number: 50927384 NR Desc: OSJNBb0038F03.14
  misc_feature: Homolog of GI Number: 18408759 NR Desc: phagocytosis and cell motility protein ELMO1
  misc_feature: Homolog of GI Number: 21358221 NR Desc: CG10068
  misc_feature: Homolog of GI Number: 54639490 NR Desc: GA10046
MVGNRAWFAGLFSGSGKRRQVSAEKIVFDLTPLQEQRLQSLKERLNVPYDETRTDHQESLRALWNASFPDTELTSLVSEQWKDMGWQGVNPATDFRGCGFVSLENLLFFARTYPASFKRLMLKQQGMRTTWEYPFAVAGVNISYMLIQLLELNSGRPKSLPGINFIKVLTEHEDAFDVLYCIAFEMMDAQWLAMRASYMQFKEVLEATRQQLERELSLEDLNGIHDLPACNLLYK

SEQ ID NO: 931 - DNA, 657 bp, Zea mays
  misc_feature: Ceres CLONE ID no. 387144
  misc_feature: Ceres CDNA ID no. 40350951
  CDS (1)..(354): REFERENCED BY SEQ ID NO: 932
ccagttctccacacacacgtgaacgctaaccctaagcccattccctcggtggctgcctggctggacgcctggacacctccaatccccagaccccatgcttcaccgcttcagccccgccggcgccgagcggccgactcgccgacggccgactccaatccccaggcttcagccccgccgagcggccgactcgtcgacggccaactcgcacgtgcttccgccggcagcctggcacagcaagcaggaagcagcaagcaagaatcagcggtcggtcgggcgtacgacagcaagcaggaagcagcacaggcgtctccatcctacaggaacatgaccgggatagtgattcctaattcatgaatgaagatggcgagctgtgaagaaatcttacaaatgtgtgtttgatgtcatgaagacattgaagaatgaagaccttatattgtgtccatatgtgtgtgtcggtgtgtgagtgtgactataagtctattactctattaattgttattgtgtatggactgaatttatgtgggcagagtgagtgtaagtttacttgttggatacttggatttggaattgtgttatgtgctcatgtactattgtggacttattttcatgttgttcaatggctatgtggtcaaaaaaaagaaaaaaaaaaaaaaaaaa

SEQ ID NO: 932 - protein, 77 aa, Zea mays
  misc_feature: Ceres CLONE ID no. 387144
  misc_feature: Ceres CDNA ID no. 40350951
MLHRFSPAGAERPTRRRPTPIPRLQPRRAADSSTANSHVLPPAAWHSKQEAASKNQRSVGRTTASRKQHRRLHPTGT

SEQ ID NO: 933 - DNA, 1107 bp, Zea mays
  misc_feature: Ceres CLONE ID no. 387294
  misc_feature: Ceres CDNA ID no. 25447028
  CDS (1)..(345): REFERENCED BY SEQ ID NO: 934
attttttggaagtcatcctcgcccagtcgccccaccaccgcctccgtcgacgtcgtcctcgcctccgccgcgctcgcctcaccgccaccgccaccacggccttcctcgtctcatctccgccgtggcctcgccctcgatacgctactgacggggtgcccctcgccgtcgacacgtgacctccgtcatttgcatctcagctccaagatctactccagctgctggcctgtagctggcagtggtgactggcaggctgatctggttggacatggagagcgggctgctcttggcaccaggattggcaccatcaccggcacgcttgtctccaatctccatcgatataattgactgcattcggcttgggtgaagacaagaagtgacccagcaatttccattttcttgttcaggatggcaatggccacatcatcatcttaccctccaccacctcccttttaccgactgtacaaaaattttgagcaggatccttcatccgcaccagaacctccaccaccaattgatggaccattcaaagctttgggtgttgattacacaggagatgttgtgattccaagcttggagagtcataatgtccgtcagctttatccaaagggccccaatattggtgcgttggttcttgagaaatagatatgtttattgtgtatgcatacatactcaattctttgtgattgttaaatgttaaagctgtttataagtaggcactagctagacttgtgccaaaagaaaggcgaaaggggctgaaatcgttaatcattttaacgacctgggagatttggaagcatagaaattcatgtgtttttgaacttgcaaggccttgcattcctgacatccttagacagatcatggaggaatgcaggatatggtggtgggctgatgcttcaaatctgcaagattttattatttggtcgttgtccaggacgtgatgatcttcaccaaattagtttgcctttgccttatcttttggtcatgttttagaaatggtttgtacagttagggtgctgtgtgagtgggtgtgggtcttgtaagtctggccttagctggacaaatttgtctctttccttaatgaaatttcacacaaaaaaaaaaaaaaaa

SEQ ID NO: 934 - protein, 76 aa, Zea mays
  misc_feature: Ceres CLONE ID no. 387294
  misc_feature: Ceres CDNA ID no. 25447028
  misc_feature (2)..(65): Pfam Name: MED7 PFAM Desc: MED7 protein
  misc_feature: Homolog of GI Number: 50929385 NR Desc: OSJNBa0084K01.4
  misc_feature: Homolog of GI Number: 21618057 NR Desc: transcription co
  misc_feature: Homolog of GI Number: 20453355 NR Desc: At5g03505/C320EPL23M
  misc_feature: Homolog of GI Number: 15242771 NR Desc: transcriptional co
MATSSSYPPPPPFYRLYKNFEQDPSSAPEPPPPIDGPFKALGVDYTGDVVIPSLESHNVRQLYPKGPNIGALVLEK

SEQ ID NO: 935 - DNA, 767 bp, Zea mays
  misc_feature: Ceres CLONE ID no. 387434
  misc_feature: Ceres CDNA ID no. 25446352
  CDS (236)..(490): REFERENCED BY SEQ ID NO: 936
agtttaactgggcccccgtgtggcactggacttggtggggcccgtgtccatggtcgtctcccttgtccatcgtctatcttctcccccaaatcgcattctcatcgcaccgcacgagctacggatctgcggcccgacgactacgacgacggggaggtaggggacgaatcgttgcaagcaacgaggtcagaactaaggaggccgatccatcctccagcctccgatcccatccgacgacatggtctgcgtcgcgtgcctgctgccgctcttcctgatcccggtggtcaacgccctcccttacctcatcgacctcatcatcagcaaggtgtatcggctatttggatgggagtaccggagacctgaaagagtcccacctgcatgtccatacaagcctgcagctcagaagaacgatgagggtgcgagtgaatcaaaacccctggccgaaccgcacggtgctggtgctgcggcggcagaagataagaaagtggaatgatgcagcaggcgcttaaaatggtggccacggctctgtgtggttagctaagaaacaataattgttgtggatggttatgtacttggttgatgggttgaacttgttatgacactccggatccttaccagttgcattactaatcactgctgctggtctggtctgtctgaatagaagggagttgaacttgcagtcgcaaatgtaatagcgagagtgaatcttgttgtccaaggctttcgtatagaatataatgcttgaataatgagcaaaaaaaaaaaaaaaa

SEQ ID NO: 936 - protein, 84 aa, Zea mays
  misc_feature: Ceres CLONE ID no. 387434
  misc_feature: Ceres CDNA ID no. 25446352
  misc_feature: Homolog of GI Number: 42565409 NR Desc: F12E4.230
MVCVACLLPLFLIPVVNALPYLIDLIISKVYRLFGWEYRRPERVPPACPYKPAAQKNDEGASESKPLAEPHGAGAAAAEDKKVE

SEQ ID NO: 937 - DNA, 950 bp, Zea mays
  misc_feature: Ceres CLONE ID no. 387436
  misc_feature: Ceres CDNA ID no. 25445553
  CDS (136)..(591): REFERENCED BY SEQ ID NO: 938
agctaggatcagatcatttcaacttcccgactctcgcatcccggattgttccgccgcccgcacacgtctctcctcttccgttcctctcctgcctccagctctccacggtctctgacccgcacaactgaacccgcgatggcgcgccgcctcctcgtcgccctcctcgccgcgtcgctcctgctcccgctcgcccgcgcggactcctcctcgtccccgcccgacaccaccgcgtacgacgagctccgcctccggggcttcccgcgcggcctgctcccggccaacgtgcgggcctacacgctcgactccggctccggggacttcgccgtcgacctccgctccagctgccggatcgtgctgcccgcggggagctacctcgccgccttcagcgaccgcctcacgggccgcctcgacgaccgccgcatctcgggcctcgacggcatccgcgtcagggccttcttccgctggtggtccatcacggggatccgcgccgatggggaccagctcgtcttcgaggtcggctccgtctccgccaagttccccgcgcgggacttcaacgccagcctcgactgccccgcccaggcggcgtcctaagtcaaggaggtatcctgtcgcatgttccatgacatgtgacattctaaaggggcagttggaagccaagcacatcaatgtttttaatttcatctgtctttattgtaattgtataagtttacaatagatgcatagaacagactggatcgataaaagcgccttcacagaccaaaaacccggtatcacggtagtggttcgtgcatttcgttagaaatgccctacgtcttattttgaaaagttgtgcttgtatatcttacttattgacaatagctgtacttataagactacttgcataaagaagaaaagtgatgtgcaaggccgaaaggcccctatgcgctaaatacaaaaaaaaaaaaaaaaaa

SEQ ID NO: 938 - protein, 151 aa, Zea mays
  misc_feature: Ceres CLONE ID no. 387436
  misc_feature: Ceres CDNA ID no. 25445553
  misc_feature: Homolog of GI Number: 50924540 NR Desc: P0041A24.4
  misc_feature: Homolog of GI Number: 55239156 NR Desc: ENSANGP00000028192
  misc_feature: Homolog of GI Number: 72547018 NR Desc: proteophosphoglycan ppg3
  misc_feature: Homolog of GI Number: 11359723 NR Desc: proteophosphoglycan
  misc_feature: Homolog of GI Number: 5420387 NR Desc: proteophosphoglycan
  misc_feature: Homolog of GI Number: 13592175 NR Desc: ppg3
MARRLLVALLAASLLLPLARADSSSSPPDTTAYDELRLRGFPRGLLPANVRAYTLDSGSGDFAVDLRSSCRIVLPAGSYLAAFSDRLTGRLDDRRISGLDGIRVRAFFRWWSITGIRADGDQLVFEVGSVSAKFPARDFNASLDCPAQAAS

SEQ ID NO: 939 - DNA, 1104 bp, Zea mays
  misc_feature: Ceres CLONE ID no. 387446
  misc_feature: Ceres CDNA ID no. 25445513
  CDS (259)..(813): REFERENCED BY SEQ ID NO: 940
gcgcgtcttcattctttctccctgccctcccctgctgaaggaagccgcctttttggagtttggacgcgggaggacagcctccgcactttccgtccgtcgcgaggaattcctgcccgggcgggcgtagagcagggcgaagcattcgttggggacgaacgtttagggccggggatcggggaacacgaggctgcgcgttggcgcaagcaagcaaattttgggtcctagcttgaaggactgccatctttttttttggttgggatggctggaaaaggaagctatgtacctccacaatatattcccttatacagcctagataccgaagaggatcgtgtccctgccgtggaagagaaccatgctacgcgccctaaactaaaccaggatccaacacaatggtcatctggcatctgtgcctgttttgatgacccccagagctgttgtattggtgcgacttgcccctgtttcctttttggaaagaatgcacaattcttgggatctggaactcttgctggatcatgcactacacattgcatgttgtggggccttctcacaagtctatgctgtgtatttactggaggtctagtattagcagttccaggatctgccgttgcttgttatgcttgcggatatcgcagtgcactaagaacaaagtacaatcttccggaagcaccctgtggcgatttgacgacacacttattctgtcacttgtgtgctatatgccaggagtacagggagatccgtgagagaacaggcagtggctcctcaccagctcctaatgtgactccacctccagttcagacgatggatgagctttgatctttaactgatatgaatgtatgttatctgacaaactttggtgtgtggcctggtggctagtgctgcctttgcctgttggcattttgacatatttttgttcttgggctctcacaacgctgctatgttgtttgtagagttgtaaacacgggttttgaactagtgaaccactgacagttcacggaagttgtaaacacagttgtaccatggaactgtagtagaattattaagtgtatttttttttggctatttatattggtgagaggatgggaagggaaaaaaaaaaaaaaaaaa

SEQ ID NO: 940 - protein, 184 aa, Zea mays
  misc_feature: Ceres CLONE ID no. 387446
  misc_feature: Ceres CDNA ID no. 25445513
  misc_feature (45)..(159): Pfam Name: PLAC8 PFAM Desc: PLAC8 family
  misc_feature: Homolog of GI Number: 8272628 NR Desc: ORFX
  misc_feature: Homolog of GI Number: 27414001 NR Desc: fw2.2
  misc_feature: Homolog of GI Number: 27414015 NR Desc: fw2.2
  misc_feature: Homolog of GI Number: 27414017 NR Desc: fw2.2
  misc_feature: Homolog of GI Number: 27414003 NR Desc: fw2.2
  misc_feature: Homolog of GI Number: 4105794 NR Desc: PGPS/D12
  misc_feature: Homolog of GI Number: 38603922 NR Desc: At1g49030
MAGKGSYVPPQYIPLYSLDTEEDRVPAVEENHATRPKLNQDPTQWSSGICACFDDPQSCCIGATCPCFLFGKNAQFLGSGTLAGSCTTHCMLWGLLTSLCCVFTGGLVLAVPGSAVACYACGYRSALRTKYNLPEAPCGDLTTHLFCHLCAICQEYREIRERTGSGSSPAPNVTPPPVQTMDEL

SEQ ID NO: 941 - DNA, 667 bp, Zea mays
  misc_feature: Ceres CLONE ID no. 388152
  misc_feature: Ceres CDNA ID no. 25446355
  CDS (200)..(496): REFERENCED BY SEQ ID NO: 942
gagcctggcctaaaagcgacgggaaagcctatcagccagtgaagcccactacggtccgaccgatgtctcgctgacgtcacctcgtgttcaccagttaccaccggagtccggagtgaagcgcaggtcgggttcgcttttttcctcggcttcttctctctcgtccatcaacccagggggaaggagcgggagggagcgagccatggtagtcagcacgttcaatggacccgggattgggatcgggttcggtgtcggctgcgggttcggcgtcgggtgggggttcggaggaatgcctcttaacatgttcggcttgggtatcggtgggggttgtggatttggtcttggactaggatggggctttggaaatgcttttggttgtcagtatcgatcttcaagagttcagttccaaggcattgaatttcagaagaaggcggaaggagatgatgcaccaaaagttgtttcaccggagcttgctcaaaagtctcgtccttatggctagtatgcctgctaccataaaaattcagagactgttttgtgtgatgaatcacagtttaattacatacctacgtgttccttgttagtaatgttatgctacacttattttcgtttctgttgtaaccaggatgaagttaatcgatgggattttcaattaggaaaaaaaaaaaaaaaa

SEQ ID NO: 942 - protein, 98 aa, Zea mays
  misc_feature: Ceres CLONE ID no. 388152
  misc_feature: Ceres CDNA ID no. 25446355
  misc_feature: Homolog of GI Number: 18252889 NR Desc: putative lipase
  misc_feature: Homolog of GI Number: 18700012 NR Desc: keratin associated protein 16
  misc_feature: Homolog of GI Number: 6754496 NR Desc: keratin associated protein 6
  misc_feature: Homolog of GI Number: 67759087 NR Desc: COG2378: Predicted transcriptional regulator
  misc_feature: Homolog of GI Number: 1800037 NR Desc: PERIOD CLOCK PROTEIN
  misc_feature: Homolog of GI Number: 58380709 NR Desc: ENSANGP00000007494
  misc_feature: Homolog of GI Number: 7461238 NR Desc: glycine tyrosine
MVVSTFNGPGIGIGFGVGCGFGVGWGFGGMPLNMFGLGIGGGCGFGLGLGWGFGNAFGCQYRSSRVQFQGIEFQKKAEGDDAPKVVSPELAQKSRPYG

SEQ ID NO: 943 - DNA, 974 bp, Zea mays
  misc_feature: Ceres CLONE ID no. 388717
  misc_feature: Ceres CDNA ID no. 40350952
  CDS (146)..(823): REFERENCED BY SEQ ID NO: 944
acaatgatcaggaactgggagtggcaagcgccaaggagtagttagagctcagtagggatacagcagtttctgagtcacttcgtctctgacatccacgagttgaaagagataggagtgagaggcagttcccttccctactctcacaatgcccatggagcaagcatccaggcactgcgataaagacacgctgaagatggccatgctgaaacacgaagagactttcagacagcaagttcacgagctccatcgcttatacaggatccagaagctcctgatgcgagacctcacacgggagctcaagctcaagagccagaggagcctgcccaccacctcgccgaacggcagctgcgccgagtacagcagaggggctctcggcatgtgcgcctacgagcgcctctacgccgctctcggccgcggcggacacgtagcagcagcagcgacgccgacgccgacgccgcgcaccgctctcggcctcgacgtcgtggcgccagtcgtcgagtacgtgcggagcgcggaggaggaggacgacgacgacagggcggaggaaaccgacgaagacgcggagctggagctcacgctcgcggtgggcggaggcggggccaagaagcggtacgacgagtacccgtccggtggggagagtctgtcttcgtcgtccacggagtccgacgtgctcaccgtctccggccgtgagtggcgtcgggcgcgcggcacgccgtatcacaagatgaggccggcgaccgggctggacgtggtgcaggtggaggacgacgtcggggtgccgccgccgctgctgttccactggctcagcctcaagatggcatgacgcgatgcgaggaagcaagagcacattgcatgtgtgttcgttgctgcttgctgtgtcagggtgttgacttgctactgttcttcagttgaatgcttttgtgtgttaggttttagtggtggatcaagtctagaaatcaaaaaaaaaaaaaaaa

SEQ ID NO: 944 - protein, 225 aa, Zea mays
  misc_feature: Ceres CLONE ID no. 388717
  misc_feature: Ceres CDNA ID no. 40350952
MPMEQASRHCDKDTLKMAMLKHEETFRQQVHELHRLYRIQKLLMRDLTRELKLKSQRSLPTTSPNGSCAEYSRGALGMCAYERLYAALGRGGHVAAAATPTPTPRTALGLDVVAPVVEYVRSAEEEDDDDRAEETDEDAELELTLAVGGGGAKKRYDEYPSGGESLSSSSTESDVLTVSGREWRRARGTPYHKMRPATGLDVVQVEDDVGVPPPLLFHWLSLKMA

SEQ ID NO: 945 - DNA, 526 bp, Zea mays
  misc_feature: Ceres CLONE ID no. 388896
  misc_feature: Ceres CDNA ID no. 25446357
  CDS (162)..(470): REFERENCED BY SEQ ID NO: 946
actccaaagccaacaaacagagctccaactcagaaagcatccgtcccttggcagcagcaacaagctactagctatgtgtttagagcgagcgaggggaaaaaaaagaaaacatctaagatatactccatcatcttcgtttgattaacccgcccagtaaagccatgggtactaatgatagagcggtcatttctctagtactcctcgtgtgcatcgctagccgctcgtccttgggtgccgctgaaactgacgttgagcagaagcgctcgtcagtcccgttgatgtttgtgttcggtgattcgctggtcgatgtcggaaacaataacttcctgccgccgcctgcaccccgtgctgcatctccgtacggcatcgacttccctgctggcacccccggcgccgtctcaggacggttcacgaatggctacaaccttgccgatttagtcggtatatacatatatatatttactacatgaatttatatatctatatgcatgcgcatgtttcttttttgccaaaaaaaaaaaaaaaa

SEQ ID NO: 946 - protein, 102 aa, Zea mays
  misc_feature: Ceres CLONE ID no. 388896
  misc_feature: Ceres CDNA ID no. 25446357
  misc_feature (40)..(86): Pfam Name: Lipase_GDSL PFAM Desc: GDSL
  misc_feature: Homolog of GI Number: 77556793 NR Desc: GDSL
  misc_feature: Homolog of GI Number: 77556792 NR Desc: GDSL
  misc_feature: Homolog of GI Number: 50907113 NR Desc: putative GDSL
  misc_feature: Homolog of GI Number: 51964352 NR Desc: PREDICTED P0516G10.12
  misc_feature: Homolog of GI Number: 50927935 NR Desc: OSJNBa0084K11.17
  misc_feature: Homolog of GI Number: 21592773 NR Desc: Proline
  misc_feature: Homolog of GI Number: 50907099 NR Desc: putative GDSL
  misc_feature: Homolog of GI Number: 50926328 NR Desc: OSJNBb0002J11.20
  misc_feature: Homolog of GI Number: 50907101 NR Desc: GDSL
  misc_feature: Homolog of GI Number: 45649132 NR Desc: GSDL
MGTNDRAVISLVLLVCIASRSSLGAAETDVEQKRSSVPLMFVFGDSLVDVGNNNFLPPPAPRAASPYGIDFPAGTPGAVSGRFTNGYNLADLVGIYIYIFTT

SEQ ID NO: 947 - DNA, 639 bp, Zea mays
  misc_feature: Ceres CLONE ID no. 388922
  misc_feature: Ceres CDNA ID no. 40350953
  CDS (63)..(380): REFERENCED BY SEQ ID NO: 948
agtcgtcgtcgttaaaaccgagaagagaccaggccgaaggaaaacaatcctgaaaccaagccatgggtctgcaggaggaatttgaggagcttcttcactggagagtggagagctccggtagcgaggcgaaggaaggaagagggaggaggggaatcagagaggtctccccgatggcggactggggccccgtgatcgtagcgacggtgctgttcgtggtcctcacgccggggctgctctgcacgctgccgggccggggccgcgtcgcagagttcggcagcatgcacaccagcggcctggccatcctcgtccacgccgtcctctacttcgcgctcatcaccatcttcctcatcgccatcggcatccacgtttacgcgggctagtagccgcccggagcaggatgcgatatacggagtagtaggttgcgccgccgccgtgatccagatcaagatgtgttttttttctttgttccttttcgctctctctctctctctgccctcctcctcggatttgctgccagtatggacgaaatcattgattatggtctggacgtctgcttgtaatcaatcatgacttgtgtaatcttgcttgcagccatcagtatcgatcaaatatcaatcgcgctcaaaaaaaaaaaaaaaa

SEQ ID NO: 948 - protein, 69 aa, Zea mays
  misc_feature: Ceres CLONE ID no. 388922
  misc_feature: Ceres CDNA ID no. 40350953
MADWGPVIVATVLFVVLTPGLLCTLPGRGRVAEFGSMHTSGLAILVHAVLYFALITIFLIAIGIHVYAG

SEQ ID NO: 949 - DNA, 1000 bp, Zea mays
  misc_feature: Ceres CLONE ID no. 389038
  misc_feature: Ceres CDNA ID no. 40350954
  CDS (2)..(688): REFERENCED BY SEQ ID NO: 950
agtcgcctccttccggcggcggaggccggtcggtatgattcaactgctgttcctcgtgctgttcgcggagggcgcggtggcgctgctcctcatggtgaaggtcgggccgctgcgggagctcgcgatgcgcggcgtggaccaggtgaagacgggcaagggcccggccacggtcaagacgctggcgtgcacgctctccgtcatcctcatgtccagcgtcgccagcatcctcaagatccagaacagggggctcaagctcggcaccgtcagccccatggaccaggtgctctggaggacgcacctcctcgaggcatccctcataggatacacgctattccttgcatttgtaatcgaccggctgcaccactacctgcgaaagctgatgacactgaggaaaacatccagcacatccagagaggaggtggagaaacttcagatggagaaccggtcgctccgcgaaaaggaggagaagtcctccagtgagacgaagaggcttcagcgagagattgcgaggctgaatgagggcatgaagaagctgaaatctgagaccgaagagcacgagaggaaggcgtcggtggcagaggcccatgtcgacgcgctgcagaagcagtcggaggagctgctcctggagtacgaccggttgctggaagacaaccagattctgcagactcagctacttagcagaggctaagctaaggagcttggtttgttagcaagactcctttaccaggtagtgtcgtagagccaaggacttgcccgattctgaatgcttacatgccgcggttctaaatttcggcatgtccattgtggttcttggcgtccatgctgttcctaacttgtgatcttgttgatgtatggatgcagcgtgtatttttagagttcatgtttcttccatttccgatagatggaggtacatgatgtaaggtccaggaacgacgggacgtccttgaggaattcggtagtcaaggctctcagaatgtgcttgaaaaaaaaaaaaaaaaaa

SEQ ID NO: 950 - protein, 217 aa, Zea mays
  misc_feature: Ceres CLONE ID no. 389038
  misc_feature: Ceres CDNA ID no. 40350954
  misc_feature (4)..(200): Pfam Name: Bap31 PFAM Desc: B
MIQLLFLVLFAEGAVALLLMVKVGPLRELAMRGVDQVKTGKGPATVKTLACTLSVILMSSVASILKIQNRGLKLGTVSPMDQVLWRTHLLEASLIGYTLFLAFVIDRLHHYLRKLMTLRKTSSTSREEVEKLQMENRSLREKEEKSSSETKRLQREIARLNEGMKKLKSETEEHERKASVAEAHVDALQKQSEELLLEYDRLLEDNQILQTQLLSRG

SEQ ID NO: 951 - DNA, 1214 bp, Zea mays
  misc_feature: Ceres CLONE ID no. 389309
  misc_feature: Ceres CDNA ID no. 40041202
  CDS (129)..(689): REFERENCED BY SEQ ID NO: 952
gaaatgttcattcctacccgtcggcaatggcctctcactcgccgtctcactcctctcgcactagcgctcgcttctcccaaaccctagctcctcctccgtagctctcagctccagctccagctccggcgatggcctccgtcccgcactcgccgccggtgatccgcaagtcgggcaacctaatggtgttcgtcacgccaccggcggagcccgagagcccgaggtccgagttctctacgcccccgacgagtccccgcgccgaggaatcccctgaatcgccgccggcgcagatggcccctccgcccacgcctatttattcggcttcggtctccacgccgccacttgtcaagacggtctctccgccacttcatgcggagaagctctcccgaccctcgctggtccaggcaccaaacctctcttccggctccttgccatcggttcaggtgccgccgttgcagttcgcgaaggtgtcggcagggtcggacggatcgctgctagcgttcttctgggacgcggttgcacacgtgcaaaaagcacactcgaggttggacaagcacatctcgagatggttcgggctggaccagtccaagtaccagtgggcgctcaacgactattttgagaggaccggacaggagatagattcgagcacgctggagcacagttgtaaaaattcagaaagcatgacaaagtgaattatttatacctttatgtgtgtaactaagctgatgccgtgtcaagctgcatataccttttggtttcatgaagattgaggcctccttttctgcatacggaaacgcttggttgtaacaaatccatctgttagcagcttcactgtagctccgttgttgataaagaaaaaaaacctagttcctacttttttaatcgctttcacaacagctactctgccacgttgaaattactgtcttttcctcctggaccatccactggtgcatcgacagatttccatgggataaattcctcgacaacgacggggatggaagaaaaagtttcaccgacatgactagtttggtagtgaggagagaaaaatcctttggaaaccaatccatggattttagatgtcaccttatttttggatagaatctctcctcttcggtgtactctcctcttcggtgtactctcctctcggtgtacttatttaacattgtttgggaagcaataagctaaatacccctcttgagctaaaaaaaaaaaaaaaa

SEQ ID NO: 952 - protein, 186 aa, Zea mays
  misc_feature: Ceres CLONE ID no. 389309
  misc_feature: Ceres CDNA ID no. 40041202
  misc_feature: Homolog of GI Number: 50908007 NR Desc: hydroxyproline
  misc_feature: Homolog of GI Number: 50922385 NR Desc: OSJNBa0019J05.14
MASVPHSPPVIRKSGNLMVFVTPPAEPESPRSEFSTPPTSPRAEESPESPPAQMAPPPTPIYSASVSTPPLVKTVSPPLHAEKLSRPSLVQAPNLSSGSLPSVQVPPLQFAKVSAGSDGSLLAFFWDAVAHVQKAHSRLDKHISRWFGLDQSKYQWALNDYFERTGQEIDSSTLEHSCKNSESMTK

SEQ ID NO: 953 - DNA, 704 bp, Zea mays
  misc_feature: Ceres CLONE ID no. 389407
  misc_feature: Ceres CDNA ID no. 40350955
  CDS (3)..(533): REFERENCED BY SEQ ID NO: 954
atctcgtccaactcgcgaccgagagaagagagggcaagggagaagattgccgccgctaccgagctggtggttggtcaccgctgggacctcggctggctgctcgtgtgtgcgctggggtggagtcgtcagcgttcgcttcatctattgacggtgtgcggtccctgggccatcacgattgctcgccgtcgtgccatctccgcctcagcacaacactctccccagctcgagtaaccacagcgagaaccaatcgccaagcaaaaagcccgagaaagaaagaacaaacaggagacacagatggcggctgcagcgaaggcgtcgtggatggtggcgatgagcgtcggggccgtggaggcgctcaaggaccaggcgggcctgtgccgctggaactacgcgctgcgctccgtccaccgcgccgccaaggccaacgctcccagcttcgcgcaggccaggaagctggcgccgcccgccgcggacaaggccgccgcggaggaggggatgaggaccgtcatgtacctcagctgctggggccctaactagctagggcctctgctagtttcggcttcctgcaaccgtaccgagctcggcttcaaatctgatccatgactggttgccttgccgacccactgtaacataggagtatagcaccacgatgatgatgatgaaaagttctgccacttgatttcagtccaaaaaaaaaaaaaaaa

SEQ ID NO: 954 - protein, 80 aa, Zea mays
  misc_feature: Ceres CLONE ID no. 389407
  misc_feature: Ceres CDNA ID no. 40350955
MAAAAKASWMVAMSVGAVEALKDQAGLCRWNYALRSVHRAAKANAPSFAQARKLAPPAADKAAAEEGMRTVMYLSCWGPN

SEQ ID NO: 955 - DNA, 865 bp, Zea mays
  misc_feature: Ceres CLONE ID no. 389690
  misc_feature: Ceres CDNA ID no. 36707263
  CDS (171)..(509): REFERENCED BY SEQ ID NO: 956
agactcatcaattcaatccaatccaatccaaattccaatcccaccccgcccccttccaagaactctagtatcaaccaaccgtccaacaaaagcaggagtcgcatcccagatcccccgcgcatcagagacaggcagggagggaaccgagatccgtccgtccgtccgtgtcgatggagtcaacggtggagcggataagctcgtcggtgcagtcctgggtgaaggaccacgagctcgcagccatcggaggcgtgtgggctgcggcggtgggcgcttcggtggcgtacagccggaggaaggcgccgcagcggggcacgggcctgcgcctcatccacgccaggatgcacgcgcaggcgctcacgctcgccgtcctcggcggcgccgccctcttccactgctacggcgacagcggccgcaggaagagggccgacgacatcgacctcgacttctactcgcagctgccgccggccaccgacgctgacggcaacgagaaccagcggtggagctggtaggaggaggagccgaggaggaggaactgtagcagactagcagtgggtgcttcttgcagcaataataattgaggtggggcctatgacgtggcggcgggcgggagggagggattagtctgtgctaatcctaatccatccagctcagataagacgacgggcggcccgtttactttacattatcgatccatgctgtcatggccggcaccacatccatatctactagtcatctaggagcagccgcccatagtttgctgctgctgcttctctcctgtatcacagtactaccaccaccaccatttgtttatctgatgaatgaacggtgacgatgatgacgatattgtctaaaaaaaaaaaaaaaa

SEQ ID NO: 956 - protein, 112 aa, Zea mays
  misc_feature: Ceres CLONE ID no. 389690
  misc_feature: Ceres CDNA ID no. 36707263
  misc_feature (2)..(72): Pfam Name: HIG_1_N PFAM Desc: Hypoxia induced protein conserved region
  misc_feature: Homolog of GI Number: 77553422 NR Desc: Hypoxia induced protein conserved region
  misc_feature: Homolog of GI Number: 77548353 NR Desc: anaerobically inducible early gene 2
  misc_feature: Homolog of GI Number: 3282394 NR Desc: anaerobically inducible early gene 2
  misc_feature: Homolog of GI Number: 51964126 NR Desc: PREDICTED OSJNBa0016G10.13 gene product
MESTVERISSSVQSWVKDHELAAIGGVWAAAVGASVAYSRRKAPQRGTGLRLIHARMHAQALTLAVLGGAALFHCYGDSGRRKRADDIDLDFYSQLPPATDADGNENQRWSW

SEQ ID NO: 957 - DNA, 706 bp, Zea mays
  misc_feature: Ceres CLONE ID no. 390278
  misc_feature: Ceres CDNA ID no. 25447514
  CDS (58)..(408): REFERENCED BY SEQ ID NO: 958
ctccccacctttggtcaggcaggctcaggcaaagggggcggccaacaaggacgagcgatggcgaccaaggtcatctgcttccttgtgctcgcatccctgctcctcgccgtcgcctttcccgtgtctgctctgcggcagcaggtgaagaagggcggcggcggcggtggtggcggaggcagtgttagcggaagcggaggcggcaacctgaatccctgggagtgctcgcccaagtgcgggtcgcggtgctccaagacgcagtacaggaaggcctgcctcaccttatgcaacaagtgctgcgccaagtgcctctgcgtgccaccggggttctacggcaacaagggcgcctgcccctgctacaacaactggaaaaccaaggaaggaggctcaagaggaagcgcagaaagatgaggcagagatccaagtaggcagatcgagatggattgtggacctgatgacatgcgtgggtacatacatttcttcggatgcgttggtgtgcctgtggagagatgtcaacctgccatggtgtcacggtccgccatcagttgaacgtcttgcctgcacttcagtaggccatttttcatggttctaattgtatttgaatccagcgtttgccactaagataaatcagacattcgttttgtgaacctattatgatggagctttatttgctgataatatctacctacctacaaaaaaaaaaaaaaaa

SEQ ID NO: 958 - protein, 116 aa, Zea mays
  misc_feature: Ceres CLONE ID no. 390278
  misc_feature: Ceres CDNA ID no. 25447514
  misc_feature (2)..(113): Pfam Name: GASA PFAM Desc: Gibberellin regulated protein
  misc_feature: Homolog of GI Number: 48375076 NR Desc: gibberellin
  misc_feature: Homolog of GI Number: 53793182 NR Desc: putative gibberellin induced protein 3
  misc_feature: Homolog of GI Number: 59042581 NR Desc: GASA2
  misc_feature: Homolog of GI Number: 16516823 NR Desc: Gip1
  misc_feature: Homolog of GI Number: 56236466 NR Desc: Gip1
  misc_feature: Homolog of GI Number: 55584076 NR Desc: Gasa4
  misc_feature: Homolog of GI Number: 16516825 NR Desc: Gip1
  misc_feature: Homolog of GI Number: 50251529 NR Desc: putative gibberellin
  misc_feature: Homolog of GI Number: 16516819 NR Desc: putative gibberellin induced protein 2
  misc_feature: Homolog of GI Number: 16516821 NR Desc: gibberellin induced protein 3
MATKVICFLVLASLLLAVAFPVSALRQQVKKGGGGGGGGGSVSGSGGGNLNPWECSPKCGSRCSKTQYRKACLTLCNKCCAKCLCVPPGFYGNKGACPCYNNWKTKEGGSRGSAER

SEQ ID NO: 959 - DNA, 994 bp, Zea mays
  misc_feature: Ceres CLONE ID no. 390297
  misc_feature: Ceres CDNA ID no. 40041203
  CDS (82)..(831): REFERENCED BY SEQ ID NO: 960
acatcaccagcgcacagctctcctcatcggcgcacccgagctcgccctctccttcctcatcgaggcccgagtcctgctctgatggcgaccgacgtggctgagactcccgcgccgttggtggatgcggcccctgaggcgcccgcggacaccccggcggcgcctgctgttgacgcgaagccggccaaggccaagaaggccacagcgccgaagaagcgcgccagcccgacccatccgccgtacgccgagatggtctcggaggcgatcgcgtcgctcaaggagaggacggggtccagcagctttgctattgccaagttcttggaggacaagcacaaggacaagctcccgcccaacttccgcaagcttctgaacgttcagctcaagaagctcgtcgccggcggcaagctgaccaagccaaaggccgccccgaagaagaccaagaccggcgtgaagaagcccaaggccgctgccaaaccgaaggccaagtcccccgcgaagcccaagcccgccacaaagcccaaggcggccgcgaagcccgcttccaagccgaaagcagcagcaaaacccaaggcaccagccaagcccaaggccaagcctgctgccaaggcgaagcccaaggctgccggcgctaagccgaagccagctgccaagaaggccggccgccccgccaaggcggccaagacgtcggccaaggccacgccaggaaagaaggcgccggtggccaagaagcccgcggccgccgcgaagaaggcgccggtagccaagaaggccgctccggcgaagaaggcggctgcccctgcccgaaaagcgccgtctcggaaggcgaagaagtagaggaggggtaggcgtcggagaaatgtagggtttggttctcgtattacgctagatgtttgctctccctttagcctaggtggtgtctgtgtgtgcaatgttgtaaatttgatatcggatgctgggaacactaagtcaatctttcagtaaaaaaaaaaaaaaaaaa

SEQ ID NO: 960 - protein, 249 aa, Zea mays
  misc_feature: Ceres CLONE ID no. 390297
  misc_feature: Ceres CDNA ID no. 40041203
  misc_feature (49)..(119): Pfam Name: Linker_histone PFAM Desc: linker histone H1 and H5 family
  misc_feature: Homolog of GI Number: 22321 NR Desc: H1 histone
  misc_feature: Homolog of GI Number: 5230785 NR Desc: histone H1 WH1B.1
  misc_feature: Homolog of GI Number: 2980891 NR Desc: histone H1
  misc_feature: Homolog of GI Number: 34897182 NR Desc: histone
  misc_feature: Homolog of GI Number: 5230781 NR Desc: histone H1 WH1A.1
  misc_feature: Homolog of GI Number: 11558848 NR Desc: histone H1
  misc_feature: Homolog of GI Number: 5230790 NR Desc: histone H1 WH1A.4
  misc_feature: Homolog of GI Number: 5230783 NR Desc: histone H1 WH1A.2
  misc_feature: Homolog of GI Number: 14916992 NR Desc: Histone H1
  misc_feature: Homolog of GI Number: 5230788 NR Desc: histone H1 WH1A.3
  misc_feature: Useful for making bigger plants
  misc_feature: Useful for making ornamental plants with modified leaves
  misc_feature: Useful for making plants with increased biomass
  misc_feature: Useful for making plants with increased biomass and foliage
MATDVAETPAPLVDAAPEAPADTPAAPAVDAKPAKAKKATAPKKRASPTHPPYAEMVSEAIASLKERTGSSSFAIAKFLEDKHKDKLPPNFRKLLNVQLKKLVAGGKLTKPKAAPKKTKTGVKKPKAAAKPKAKSPAKPKPATKPKAAAKPASKPKAAAKPKAPAKPKAKPAAKAKPKAAGAKPKPAAKKAGRPAKAAKTSAKATPGKKAPVAKKPAAAAKKAPVAKKAAPAKKAAAPARKAPSRKAKK

SEQ ID NO: 961 - DNA, 854 bp, Zea mays
  misc_feature: Ceres CLONE ID no. 390354
  misc_feature: Ceres CDNA ID no. 40041204
  CDS (102)..(620): REFERENCED BY SEQ ID NO: 962
atcttgcggcatcccaccacggcaccaccgccacagaagagcggccgagcggtgcagagaaccagccagccgagctgagcggccgcgcttccggtgggaggatggagaaggctctcaccaaactgggcagcttcaccatctcccgcaaggccaagcaggagctctccgccatcggcgacgacatctctcgtttctcgagcacggtggaggagaaggcaaaatgggtcttcgaaaagctcaaaggacacaagaagtccctctctgatctactgcgcgagcacaacctccctccaggtctcttcccttgtaacataatctgctatgagtacgacgaatcgacatcgaagctgatggtgcacctgtcgaagccctgcgaggtgagcttcaaggattcctccgcgatacggtatgctcctcgcgtcaaggcgactctgtcccgaggcaagctttctggggttgaaggcatgaagaccaaggtggtggtgtgggtgaaggtggctagcgttagcatcgacagctacaagtccgacaagatatgcttcctcgccggtgtgaagaagctgaggcagaaggatgcttatgaggtccctcgtgaagccgtctctgttgatgagttctgagctcgattgatttcccttatccgtagtatgatagtatcattcgttcgtagcattttttgggtcccatgtcatcggcaattgatgtgctgcggttttgtagatttggaatcacatggatctgttgtgcctggcagaagacaacccgttcatgttatctgacgagacattcacatgtgtgatgtttcagtaatgtgaacatttagcatgtgttctggttcaaaacaaaaaaaaaaa

SEQ ID NO: 962 - protein, 172 aa, Zea mays
  misc_feature: Ceres CLONE ID no. 390354
  misc_feature: Ceres CDNA ID no. 40041204
  misc_feature: Homolog of GI Number: 28466909 NR Desc: At5g01610
  misc_feature: Homolog of GI Number: 40642817 NR Desc: cp protein
MEKALTKLGSFTISRKAKQELSAIGDDISRFSSTVEEKAKWVFEKLKGHKKSLSDLLREHNLPPGLFPCNIICYEYDESTSKLMVHLSKPCEVSFKDSSAIRYAPRVKATLSRGKLSGVEGMKTKVVVWVKVASVSIDSYKSDKICFLAGVKKLRQKDAYEVPREAVSVDEF

SEQ ID NO: 963 - DNA, 2153 bp, Zea mays
  misc_feature: Ceres CLONE ID no. 390399
  misc_feature: Ceres CDNA ID no. 40041205
  CDS (101)..(1846): REFERENCED BY SEQ ID NO: 964
atcaaacccccggacatttctggtcgcaccctcctccggccctcccagccgctaagccctctggaaccttcgagagctcgatcggatcggagcccctgccatggccgacgaggcgaaggcgaagggtaatgcggcgttctcagccggccgcttcgaggaggcggcgcggcacttcacggacgccatcgcgctcgccccgggcaaccacgtcctctactccaaccggtcggcggcgctcgcctcactccaccgctactccgacgctctcgccgacgcgcagaagaccgtcgagctcaagcctgactgggccaagggctactcccgcctcggcgcggcgcacctcggcctcggcgacgccgccagcgccgtcgccgcatacgagaagggccttgcgctcgaccccagcaacgaaggtctcaaggcggggctcgaggacgccaagaaggccgccgccgccccgccgcgtcgcgggccgtccggccccgacgccatcggccagatgttccagggccccgaactgtggagcaagatcgcgtccgaccccaccacacgcgcctaccttaacgagcccgactttatgcagatgctgcgcgaagtgcagaggaacccaagcagcatcagcatgtacctctccgatccccgcatgatgcaggtgctcagcctcatgcttaatgtcaagatccagagacccgaggcctccgagccatcgcagtctaccccaccgccgccgccgcagcagcagcagcagcagacatctcctcttcagacgaaagccagagaggtggagccggagcccgagccagagccgatggatttcactgatgaggaaaaggagcgcaaggagaggaaagctgctgctcagaaggagaaggagttaggtaacacagcttacaagaagaaggacttcgaggcggcgatccagcattacaccaaagccttggaacttgacgacgaggatatttcttatttgactaaccgagcagcagtctatattgaaatgggaaagtacgatgaatgcatcaaggactgtgataaggctgtggagaggggaagggaacttcgtgctgatttcaagatgatctcaagggcactgacaagaaaaggaacagctctagtcaagcttgctaagacctctaaggattttgatattgccatcgagacctaccagaaggctctaactgagcatcggaacccagacactcttaaaaagttgaatgaggctgagagagcgaaaaaggagttggagcaacaagagtactatgatccaaaattagcagatgaggagagagagaaaggcaatgagttcttcaaggagcaaaaatacccagaagcaataaaacactacacggaggctctcaagagaaacccaaaggatcctagggtttacagcaatagggctgcctgctacaccaagttaggagccatgcctgaaggtcttaaagatgcagagaagtgtcttgaactagaccccaccttcactaaagggtacacaaggaaaggtgcaattcaattcttcatgaaagaatatgacaaggccatggaaacctatcaggctggcctgaagcatgacccgaaaaaccaggaactgcttgatggtgttaggaggtgcattgaacaaattaacaaggctaacagaggtgaaataagtcaggacgaattgcaagaaagacagaacaaagctatgcaagacccagagatccagaacattcttaccgaccctatcatgagacaggtgctaaatgatttccaggagaacccaagggcggcccaggagcacctgaagaaccctggagttatgcaaaagattcagaagcttgtaagtgctgggatagtccaaatgagatgatcaggcacacgatgcgattgtacctgcttgttcgtcccttgtgcttggctttgttagttaacgtgccctttaacaagcagcgacggcaaaagaatctttttcccaattggattgtaagtgcagttaacattggattattcatgtttgtggcactgagtctgagtataggcgccgtcttgctttattgatgctggactttgcgtgcttgtgggtgggggttggttccctagctaaagtttagttcatgtcccattaaatatttgaatataatatatgtttaattaggtttctaaaaaaaaaaaaaaaa

SEQ ID NO: 964 - protein, 581 aa, Zea mays
  misc_feature: Ceres CLONE ID no. 390399
  misc_feature: Ceres CDNA ID no. 40041205
  misc_feature (287)..(320): Pfam Name: TPR_2 PFAM Desc: Tetratricopeptide repeat
  misc_feature (36)..(68): Pfam Name: TPR_1 PFAM Desc: Tetratricopeptide repeat
  misc_feature: Homolog of GI Number: 23308495 NR Desc: At1g12270/F5O11_1
  misc_feature: Homolog of GI Number: 53850567 NR Desc: At1g62740
  misc_feature: Homolog of GI Number: 6630450 NR Desc: F23N19.10
  misc_feature: Homolog of GI Number: 50926876 NR Desc: OSJNBa0091D06.14
  misc_feature: Homolog of GI Number: 31324052 NR Desc: TPR1
  misc_feature: Homolog of GI Number: 28973653 NR Desc: putative TPR
  misc_feature: Homolog of GI Number: 50911160 NR Desc: putative stress
  misc_feature: Homolog of GI Number: 872116 NR Desc: stress inducible protein
  misc_feature: Homolog of GI Number: 30682109 NR Desc: stress
  misc_feature: Homolog of GI Number: 3037137 NR Desc: Hsp70/Hsp90 organizing protein homolog
MADEAKAKGNAAFSAGRFEEAARHFTDAIALAPGNHVLYSNRSAALASLHRYSDALADAQKTVELKPDWAKGYSRLGAAHLGLGDAASAVAAYEKGLALDPSNEGLKAGLEDAKKAAAAPPRRGPSGPDAIGQMFQGPELWSKIASDPTTRAYLNEPDFMQMLREVQRNPSSISMYLSDPRMMQVLSLMLNVKIQRPEASEPSQSTPPPPPQQQQQQTSPLQTKAREVEPEPEPEPMDFTDEEKERKERKAAAQKEKELGNTAYKKKDFEAAIQHYTKALELDDEDISYLTNRAAVYIEMGKYDECIKDCDKAVERGRELRADFKMISRALTRKGTALVKLAKTSKDFDIAIETYQKALTEHRNPDTLKKLNEAERAKKELEQQEYYDPKLADEEREKGNEFFKEQKYPEAIKHYTEALKRNPKDPRVYSNRAACYTKLGAMPEGLKDAEKCLELDPTFTKGYTRKGAIQFFMKEYDKAMETYQAGLKHDPKNQELLDGVRRCIEQINKANRGEISQDELQERQNKAMQDPEIQNILTDPIMRQVLNDFQENPRAAQEHLKNPGVMQKIQKLVSAGIVQMR

SEQ ID NO: 965 - DNA, 1008 bp, Zea mays
  misc_feature: Ceres CLONE ID no. 390400
  misc_feature: Ceres CDNA ID no. 25446359
  CDS (169)..(831): REFERENCED BY SEQ ID NO: 966
aaaatcgaatgcccctccgtcttcctcccttttgttctcccacaacgaactcggggctcgcacccagaagggagagaactcgtcgcgacgaggagagaagaacctgaggtggtcccgaatcagacgcagaagagggtgggttcaggagcaagccagcctgccgccaccatgaggcgcgcctcgaagaaatccttgtcgtctgccgcgaccgctagcgctggccctactaaagcagtttccaaggaagtagaacggattgatcaatttttctatacttatgccgataactcatctgtcatgattgacccagaaggcattgaaacactctgttctcaccttgaagttccccacaccgacgttaggattctaatgttagcatggaaaatgggctgtgagaagcaaggttattttaccttggatgaatggagagctggtttgaaagctcttcgagcagacagcatcagtaaactgaagaaagcatttcctgaactggttcaagaggttacaaggccgtcaaatttccaggatttctacatatatgcatttcgttattgcctcacagaggataagaagaagtgtatagaaataccagttgcttgtgagttgctgaatctagtattaggcttgcagttccgccctcaggttgacaagcttagtaattacctcaagtaccaaaatgactacaaggtgataaacatggatcagtggatgggatttatgcggttctgtaatgagataaacttcccatcacttgacaattatgattcataccttgcttggcctttgattctagacaattttgttgagtggctaagagaaaataaaagctagatcttctattcatgtggtggtgaagttgtcattcaaaatgtaatattcaagaatgtaggtgactatatatatcattgtttacatttgtaagaccattttttgcccacctacttgtatatactgtcagtaatgcaaacttaggctccaataaacctactaagaaaaaaaaaaaaaaaa

SEQ ID NO: 966 - protein, 220 aa, Zea mays
  misc_feature: Ceres CLONE ID no. 390400
  misc_feature: Ceres CDNA ID no. 25446359
  misc_feature: Homolog of GI Number: 32815875 NR Desc: At1g15860
  misc_feature: Homolog of GI Number: 25518040 NR Desc: F7H2.19 protein
  misc_feature: Homolog of GI Number: 78099237 NR Desc: DCN1
  misc_feature: Homolog of GI Number: 76663321 NR Desc:  similar to CG6597
  misc_feature: Homolog of GI Number: 73975268 NR Desc:  similar to CG6597
  misc_feature: Homolog of GI Number: 50747005 NR Desc:  similar to expressed sequence AI836376
  misc_feature: Homolog of GI Number: 48097739 NR Desc: similar to ENSANGP00000022112
  misc_feature: Homolog of GI Number: 66521752 NR Desc:  similar to ENSANGP00000024291
  misc_feature: Homolog of GI Number: 55622780 NR Desc:  similar to expressed sequence AI836376
  misc_feature: Homolog of GI Number: 55962799 NR Desc: novel protein
  misc_feature: Useful for making plants with increased biomass and foliage
MRRASKKSLSSAATASAGPTKAVSKEVERIDQFFYTYADNSSVMIDPEGIETLCSHLEVPHTDVRILMLAWKMGCEKQGYFTLDEWRAGLKALRADSISKLKKAFPELVQEVTRPSNFQDFYIYAFRYCLTEDKKKCIEIPVACELLNLVLGLQFRPQVDKLSNYLKYQNDYKVINMDQWMGFMRFCNEINFPSLDNYDSYLAWPLILDNFVEWLRENKS

SEQ ID NO: 967 - DNA, 601 bp, Zea mays
  misc_feature: Ceres CLONE ID no. 390438
  misc_feature: Ceres CDNA ID no. 25446360
  CDS (84)..(425): REFERENCED BY SEQ ID NO: 968
actccattaatttccagggatgcacgcaggcaagtttaatttggaggatcaatagtagctagctagagctactagagacatacatggcggatcctctggtgcgagcgcgacccaaaaggaagaaggtcttagcggactacttggtgcgactccgatggattcctgccctcttcgtggcccttccaatatctgcgctgatctacctgagcgtcttcctggtgaacacgtggtccgccatgaaatccgagaagcgtcgacagaaggaacaccaggagaacgtagagagggtcgtgaagcgtctcaaggagagggatccgaagagggacgtgtcagcatccctcggctgggtgagcacaagggagagtgttagcacgtcaagcagtaccgaggaagcagcggttcgcacgtcgcggcggaaaatgtgagactgtttggcacagaaggggccatgtaagagtacgtgggccgtaggcgcgtgtgggctaacaccgtgaacgagagtatattactgaacctttgtcgctgagaagggacatgcaaaaacagaattgttatccaagtaataaattcttcgttctccttcacaaaaaaaaaaaaaaaa

SEQ ID NO: 968 - protein, 113 aa, Zea mays
  misc_feature: Ceres CLONE ID no. 390438
  misc_feature: Ceres CDNA ID no. 25446360
  misc_feature: Homolog of GI Number: 31431903 NR Desc: putative Cell elongation protein DIMINUTO
  misc_feature: Homolog of GI Number: 46391568 NR Desc: brassinosteroid biosynthesis
  misc_feature: Homolog of GI Number: 21326148 NR Desc: ovule/fiber cell elongation protein Ghfe1
  misc_feature: Homolog of GI Number: 602302 NR Desc: diminuto
  misc_feature: Homolog of GI Number: 20465919 NR Desc: putative cell elongation protein Dwarf1
  misc_feature: Homolog of GI Number: 71834078 NR Desc: sterol C
  misc_feature: Homolog of GI Number: 50952901 NR Desc: DWARF1/DIMINUTO
  misc_feature: Homolog of GI Number: 13194621 NR Desc: brassinosteroid biosynthetic protein LKB
  misc_feature: Homolog of GI Number: 7488800 NR Desc: dwarf protein homolog
MADPLVRARPKRKKVLADYLVRLRWIPALFVALPISALIYLSVFLVNTWSAMKSEKRRQKEHQENVERVVKRLKERDPKRDVSASLGWVSTRESVSTSSSTEEAAVRTSRRKM

SEQ ID NO: 969 - DNA, 626 bp, Zea mays
  misc_feature: Ceres CLONE ID no. 390928
  misc_feature: Ceres CDNA ID no. 25446361
  CDS (29)..(430): REFERENCED BY SEQ ID NO: 970
atcgacctcctcgatccaggcagcagccatgtccaaggtcttcaccctcgacgcggtcgccaagcacaactccaaggaggattgctggctcatcatcggcggcaaggtgtatgatgtgacgaagtttttggtagaccacccaggaggtgatgatgttctgttgtcctcaactggcaaggatgcgactgatgatttcgaggatgtcggtcacagcaacactgcccgcgcgatgatggatgagtacttggtgggtgaaatcgacgcgtcgacgatcccttccaggacgaagtatgtccccccgaaacaaccgcactacaaccaggacaagactcccgagtttgtcatcaagatcctccagtttttggttcccctggcaatcctgggcttggctgttgccgttaggatgtacaccaagtcggagtctgcttagctttgttgcccacttgcccttgcccccctcgcgattgtacgagtcgaacttgtcgaataagctagcaagagttttgtgaggttttattacatgtgtaacttgtcacgaaattcatcgaatgttctgagctgctgtgggttctgtggtttttagtgtgatcggaatgcatcttactggacgaaaaaaaaaaaaaaaa

SEQ ID NO: 970 - protein, 133 aa, Zea mays
  misc_feature: Ceres CLONE ID no. 390928
  misc_feature: Ceres CDNA ID no. 25446361
  misc_feature (4)..(78): Pfam Name: Cyt PFAM Desc: Cytochrome b5
  misc_feature: Homolog of GI Number: 52353573 NR Desc: cytochrome b5
  misc_feature: Homolog of GI Number: 414705 NR Desc: cytochrome b5
  misc_feature: Homolog of GI Number: 34905998 NR Desc: putative cytochrome B5
  misc_feature: Homolog of GI Number: 50844677 NR Desc: cytochrome b5 isoform Cb5
  misc_feature: Homolog of GI Number: 1345882 NR Desc: Cytochrome b5
  misc_feature: Homolog of GI Number: 296386 NR Desc: cytochrome b5
  misc_feature: Homolog of GI Number: 2647949 NR Desc: cytochrome b5
  misc_feature: Homolog of GI Number: 23197754 NR Desc: putative cytochrome b5
  misc_feature: Homolog of GI Number: 50844675 NR Desc: cytochrome b5 isoform Cb5
  misc_feature: Homolog of GI Number: 12229735 NR Desc: Cytochrome b5
  misc_feature: Utility: PEG Useful for making plants with increased tolerance to drought
MSKVFTLDAVAKHNSKEDCWLIIGGKVYDVTKFLVDHPGGDDVLLSSTGKDATDDFEDVGHSNTARAMMDEYLVGEIDASTIPSRTKYVPPKQPHYNQDKTPEFVIKILQFLVPLAILGLAVAVRMYTKSESA

SEQ ID NO: 971 - DNA, 587 bp, Zea mays
  misc_feature: Ceres CLONE ID no. 391823
  misc_feature: Ceres CDNA ID no. 25445843
  CDS (1)..(288): REFERENCED BY SEQ ID NO: 972
gaaggaaaaaaacttgtccgggctcgcgtttctgattcccgtggatctctcatctcgcttgtctcctccatagcagccaggcagccagcatggcggcggctagggtttgcatcgccggtgcatcttgagatccgctgctgctcacgtgtccacgttgcatcgcctttaatccccacatgctccatccatacgctgctggtgctcgtcgctattctcttcatcgccgggacttgtcggcactactaccatcgccatctgaaccgagctcatgtgcatttacagcggtgaccgagcttggatcctagcgaggcctaatctacattctgtctgctgatggtacttacaaggtggacatattgtactggatttacactagcctgcttgcaggtcgtcatccattttttggacattgttgtgaagattggcatgagaaccacctgtatgaactttggaatcgttaactttggagtgccttctgccttgtggcaatttatgtaatttgaatttgtatggaatgttttgttcgattcacgtatttataccgaacaaagtttatccttgctaccaaaataaaaaaaaaaaaaaaa

SEQ ID NO: 972 - protein, 54 aa, Zea mays
  misc_feature: Ceres CLONE ID no. 391823
  misc_feature: Ceres CDNA ID no. 25445843
MVLTRWTYCTGFTLACLQVVIHFLDIVVKIGMRTTCMNFGIVNFGVPSALWQFM

SEQ ID NO: 973 - DNA, 474 bp, Zea mays
  misc_feature: Ceres CLONE ID no. 392109
  misc_feature: Ceres CDNA ID no. 36707295
  CDS (70)..(258): REFERENCED BY SEQ ID NO: 974
cttttttacagccaccgcatctcccaggctccccgcgcttccttccgtcgccgccgccgcttcgcagccatgggtaaggtgcacggatcgctggcccgcgccgggaaggtccgcgggcagacgcccaaggtggcgaagcaggacaagaagaagaagccccgcggccgcgcgtacaagaggatgcagtacaaccgccgcttcgtcaccgccgtcgtcggcttcggcaagaagcgcgggcccaactcgtccgagaagtaggcgcgacgccgttgggctcgcatgcctatgcctatgctcttgctcttcctggtagtagttttcgtttgtgcaagctgaagaagatctttttttgttgttgttccagtctcagtttcgtgcggtgagatgagagcttgagattatatgacaacctccttattaatcgaggatgaatttttgagatatgatgatacgtggctaaaaaaaaaaaaaaaa

SEQ ID NO: 974 - protein, 62 aa, Zea mays
  misc_feature: Ceres CLONE ID no. 392109
  misc_feature: Ceres CDNA ID no. 36707295
  misc_feature (3)..(61): Pfam Name: Ribosomal_S30 PFAM Desc: Ribosomal protein S30
  misc_feature: Homolog of GI Number: 55773694 NR Desc: 40S ribosomal protein S30
  misc_feature: Homolog of GI Number: 30102786 NR Desc: At5g56670
  misc_feature: Homolog of GI Number: 25295582 NR Desc: 40S ribosomal protein S30
  misc_feature: Homolog of GI Number: 6679753 NR Desc: Finkel
  misc_feature: Homolog of GI Number: 15822932 NR Desc: Finkel
  misc_feature: Homolog of GI Number: 36968262 NR Desc: Finkel
  misc_feature: Homolog of GI Number: 60678256 NR Desc: Finkel
  misc_feature: Homolog of GI Number: 47682823 NR Desc: MGC80045 protein
  misc_feature: Homolog of GI Number: 50603825 NR Desc: MGC89853 protein
  misc_feature: Homolog of GI Number: 63694872 NR Desc:  similar to Finkel
MGKVHGSLARAGKVRGQTPKVAKQDKKKKPRGRAYKRMQYNRRFVTAVVGFGKKRGPNSSEK

SEQ ID NO: 975 - DNA, 714 bp, Zea mays
  misc_feature: Ceres CLONE ID no. 392437
  misc_feature: Ceres CDNA ID no. 40350956
  CDS (181)..(621): REFERENCED BY SEQ ID NO: 976
aacgccaaggagagtcgcacgcgccacacgagaggagacgatgacctgtggcccctcgcagcagtggcaaacaaggggttaataggccgtagctcgtggggattgcagccgatttcgtgtccctgcagccacggccaccgcccaatctccacttctttatcttctccgagtaggtcgaggatgccccgcagcggcttctcggggtccttcaggtcgcccaagatcgacgtcgtcatcgacatgggaaaccccttcctcaaccgcaccgtcgacggcttcctcaagatcggcgccgtcggcgcctgcaaggtggctgccgaggagaccttcgagtgcctccacaggggggatgtttcgaagcacaaggttgagcatgccctgaggaagatgtgcaaggagggcgcatattggggcactgttgctggagtttatgtgggcatggtgtacggcgtggaaagggtccgtggccgcagtgactggaagaacgcgatgatcgggggcgccttgtccggcgccctgatctccggcgccagcaacagcgacagaggcaaggtcgtcaaggacgccatcaccgccggcgcggtcgccacagccgtcgagttcatcaactgcattacctagccgagcaaggagcaactgcatttgcagtgccattgtcgtgcaaaaatatgaataaagtacttcgtcatgtccagttcaaaaaaaaaaaaaaaa

SEQ ID NO: 976 - protein, 146 aa, Zea mays
  misc_feature: Ceres CLONE ID no. 392437
  misc_feature: Ceres CDNA ID no. 40350956
  misc_feature (18)..(146): Pfam Name: Tim17 PFAM Desc: Tim17/Tim22/Tim23 family
MPRSGFSGSFRSPKIDVVIDMGNPFLNRTVDGFLKIGAVGACKVAAEETFECLHRGDVSKHKVEHALRKMCKEGAYWGTVAGVYVGMVYGVERVRGRSDWKNAMIGGALSGALISGASNSDRGKVVKDAITAGAVATAVEFINCIT

SEQ ID NO: 977 - DNA, 1255 bp, Zea mays
  misc_feature: Ceres CLONE ID no. 392675
  misc_feature: Ceres CDNA ID no. 36584760
  CDS (318)..(956): REFERENCED BY SEQ ID NO: 978
ctctttcctcatcctcatccgagtggctctctccttgtgctgtggcggcggcggcgcccggctctgctcggacggactccaccgaaggcgctcggctcccctcgggctgcacctgcgacggccggccctctgactgcaccgacggtgcccgccccccctcggcatccaccagcggtgcccggctccaagagccagtgtccagcctgccagctcagcccggcgccaaccgcccagcggctggctcgggcagcggccagtggccaacagccgacaaccatacctcgtttcgtcggcgtcctccgccactgcccccaactatgcaccctgttccagtcccctcccagccctttaccgcaactcctgcaaaaaaacttgtttcaaggagcactgctgtgaggaaggccatccattttgtcaacctgcggacagctggaaggtctagtggaaacctggctatgaactccgtaccgaaaccagcacttgggtccgaaacatcttggagggaggattttgctgtgggggataaggatgctgtggtcattgttgatcatgggtcaagacgccaagaatccaatctcatgctaaatgactttgttgagatgttccgggcgaagactagctatagtattgttgaggctgctcatatggagctagcggagcctactataaaggatgcttttggaaaatgtgtgcaacaaggagcatcacgagttattgtcagtccatatttcctttcccctggacgacactggaagcaagacattcctgctttagcagcagaggcatcaaaggagcactcaaatataccctatattgtcactgcccctcttgggctgcatgagcttatggtggatatcatgaatgatcgcatcaagtactgcctgcgacatgttgcgggtgatgtcgatgagtgtacagtgtgtgctggaaccggaaagtgccgcctgtactcctgatggagcatacctgggaggcacatcgatactgttaccatttattatgagatctggagaatacgagatctgaccatattctgagcagatcgtcagaattagacaagtgccaaattagttatgctgtgcatgcttgcgaacatcaataatggtagagattcattagctaatcttgagtttatttacataacgaacaaactcagtcaagtgctctgatatttccattcacatgtaatctatattcctgctaccttgtagttgaatgaattaacatggatcaaatgacaaaaaaaaaaaaaaaa

SEQ ID NO: 978 - protein, 212 aa, Zea mays
  misc_feature: Ceres CLONE ID no. 392675
  misc_feature: Ceres CDNA ID no. 36584760
  misc_feature (78)..(183): Pfam Name: CbiX PFAM Desc: CbiX
  misc_feature: Homolog of GI Number: 56418947 NR Desc: hypothetical conserved protein
  misc_feature: Homolog of GI Number: 71839682 NR Desc: Cobalamin
  misc_feature: Homolog of GI Number: 39998091 NR Desc: cbiX protein
  misc_feature: Homolog of GI Number: 67992855 NR Desc: Cobalamin
  misc_feature: Homolog of GI Number: 65319448 NR Desc: COG2138: Uncharacterized conserved protein
  misc_feature: Homolog of GI Number: 45357727 NR Desc: Sirohydrochlorin cobaltochelatase
  misc_feature: Homolog of GI Number: 29895818 NR Desc: CbiX protein
  misc_feature: Homolog of GI Number: 47566912 NR Desc: transcriptional regulator NirR
  misc_feature: Homolog of GI Number: 40642725 NR Desc: ferrochelatase
MHPVPVPSQPFTATPAKKLVSRSTAVRKAIHFVNLRTAGRSSGNLAMNSVPKPALGSETSWREDFAVGDKDAVVIVDHGSRRQESNLMLNDFVEMFRAKTSYSIVEAAHMELAEPTIKDAFGKCVQQGASRVIVSPYFLSPGRHWKQDIPALAAEASKEHSNIPYIVTAPLGLHELMVDIMNDRIKYCLRHVAGDVDECTVCAGTGKCRLYS

SEQ ID NO: 979 - DNA, 521 bp, Zea mays
  misc_feature: Ceres CLONE ID no. 393022
  misc_feature: Ceres CDNA ID no. 25445741
  CDS (1)..(282): REFERENCED BY SEQ ID NO: 980
attgctgattcttcccgcaccggcctcagcctgccctctctctctctctctctctctctcccccttccttcctcgagcagctccacgcgcgacgccatcccaatgctctccacgcctcattggaccccaggaagcaatcgcgctgatcggggccgccgcctagcggtgccgtgcgggttagggcgcgaggctggcgctagctcgagctcgcggctgccgcaaggtcggtggctgggtccaggcgcctcccgtccggtggccgcatccctaatcgctgcctaggtgctggaaaggtgaggagtatgtcctcgatacgatttggatttgttagaagccagctcctctgttctggcaccatttgctaggattttgttatggtgtttattaggcagccatgaaaagtctgatatgcttcggtaattaagtctaaccttgtatactaattaagtcttaaccttgcatacatgaaatggaagtttgaacattgttaattacttgttttgataaaaaaaaaaaaaaaa

SEQ ID NO: 980 - protein, 59 aa, Zea mays
  misc_feature: Ceres CLONE ID no. 393022
  misc_feature: Ceres CDNA ID no. 25445741
MLSTPHWTPGSNRADRGRRLAVPCGLGREAGASSSSRLPQGRWLGPGASRPVAASLIAA

SEQ ID NO: 981 - DNA, 616 bp, Zea mays
  misc_feature: Ceres CLONE ID no. 393073
  misc_feature: Ceres CDNA ID no. 25447097
  CDS (150)..(446): REFERENCED BY SEQ ID NO: 982
atcaactatcccggccgccggtcgtcgtacgtccaagctacatatatatacggggggcaaaaatccgttctcccggcgattttgggctctcgggaacagacaggaggatccgcgggaaggattcggctgcgtcctagtgtagtgtcgacatggctgggcgcaaggagaccgcactcgacctggcgaagttcgtcgacaagggcgtccaggtgaagctcaccggcggccgccaagtgacaggaactttaaagggatatgaccagctactcaacctagtgctagatgaagcagttgaatatgaaagagagcaagatgacccattgaagctatcagggaaaaccagacagcttggcctcattgtgtgcagaggcacggcagtcatgctggtctcaccgactgatggaactgatgagatcgccaacccttttcttgcggaaggagcataagcttgcagttggtcgattatttagaaccgtgctctcatgtcaccctcagaacgatgtgtcccagtgggaaaaagaactctattctcgtaccggttggtgatgaactctgtaatattcaccgtgcaagtgcaacttaaaacatctgtgatacgaaaaaaaaaaaaaaaaaa

SEQ ID NO: 982 - protein, 98 aa, Zea mays
  misc_feature: Ceres CLONE ID no. 393073
  misc_feature: Ceres CDNA ID no. 25447097
  misc_feature: The plant flowers significantly late compared to wild-type.
  misc_feature: The plant senesces significantly late copared to wild-type.
  misc_feature: Useful for making plants with modulated flowering time
  misc_feature: Useful for making plants with modulated time to senescence
  misc_feature (9)..(82): Pfam Name: LSM PFAM Desc: LSM domain
  misc_feature: Homolog of GI Number: 50941651 NR Desc: putative snRNP splicing factor
  misc_feature: Homolog of GI Number: 4582434 NR Desc: putative snRNP splicing factor
  misc_feature: Homolog of GI Number: 20129565 NR Desc: CG13277
  misc_feature: Homolog of GI Number: 72131952 NR Desc:  similar to LSM7 homolog
  misc_feature: Homolog of GI Number: 54644863 NR Desc: GA12164
  misc_feature: Homolog of GI Number: 48123817 NR Desc: similar to U6 snRNA
  misc_feature: Homolog of GI Number: 73987505 NR Desc:  similar to U6 snRNA
  misc_feature: Homolog of GI Number: 49522817 NR Desc: MGC83430 protein
  misc_feature: Homolog of GI Number: 7706423 NR Desc: U6 snRNA
  misc_feature: Homolog of GI Number: 34862278 NR Desc: similar to RIKEN cDNA 0910001B06
  misc_feature: Useful for delaying flowering time
  misc_feature: Useful for delaying senescence
MAGRKETALDLAKFVDKGVQVKLTGGRQVTGTLKGYDQLLNLVLDEAVEYEREQDDPLKLSGKTRQLGLIVCRGTAVMLVSPTDGTDEIANPFLAEGA

SEQ ID NO: 983 - DNA, 876 bp, Zea mays
  misc_feature: Ceres CLONE ID no. 393137
  misc_feature: Ceres CDNA ID no. 40041206
  CDS (100)..(492): REFERENCED BY SEQ ID NO: 984
cccactgtatattcccgcacgcgcgacgcacggaccagggcggcggggcgggcgacctcacctcgcttcacttcacttgacgacgttcacgtctgtgtgatggcgcagcgggaggcgcgtgcggcggataaggcggtagctgccggcggcggggagacgagggacgccggccacgtcgcgctggagatgggcggcggcgtgggggagctgcgggcggggcagagtgcgacggcgacgacgacgacgacgacgacggcgtgggcgtgcggggcggccgcggcgggcgtggggctggcgggggccggcgcgctggtgtggtgggcgctggcgttccgcccggcgcgccagcagatgtggatggtgcccgtgggcctcgtcctgctcggcacgccgctcctcgcctggctctccctgtccgcctccggcgcgtgccgctggctcgcccgcctccgcggccaccagccgcccgtccgcccggccccggagcgatgatcacgcatggcggcgacgatggtccgtggctggcacgcaggatcgcagatccagtgtaggctggcggggccttcgccctgccttgccttgccttgggtgtacattttttcttcttcttcttcttccccccggcgggcggtctcttctttccgttcccctgttcttgtgtgaaccggaacggacagcagcttcttgctagtagtagcacaactaggcacggcacggcacgagtgttgttgtagatttgcaagaggcttcggttgcgtggatttttgtttgttttgtttagttggcatgcgatgcgaacatgcatctcggggtcagcattcgaatacgaaattcagatgcagtagaaatttacacaacaaaaaaaaaaaaaaaaaa

SEQ ID NO: 984 - protein, 130 aa, Zea mays
  misc_feature: Ceres CLONE ID no. 393137
  misc_feature: Ceres CDNA ID no. 40041206
MAQREARAADKAVAAGGGETRDAGHVALEMGGGVGELRAGQSATATTTTTTTAWACGAAAAGVGLAGAGALVWWALAFRPARQQMWMVPVGLVLLGTPLLAWLSLSASGACRWLARLRGHQPPVRPAPER

SEQ ID NO: 985 - DNA, 1330 bp, Zea mays
  misc_feature: Ceres CLONE ID no. 393332
  misc_feature: Ceres CDNA ID no. 40350957
  CDS (71)..(1096): REFERENCED BY SEQ ID NO: 986
ttcggtctaaacatttcgtcgaacgccagcggcgagtcgagctcgagctcgagccccagtcaccgcagccatgctcctcacgaaaccctacctctccaactcgctccttccagtcccatccccgccgccgtcgggccctactctcagctccaaccatgcaagcccccttgccgcccctacttgccgtcgcatctccgccacatccacggctgcgccgtctccttcgtcggctgccgctgccaccgcgtcgctgagtcgagtggacgtgctctcggaggcgctcccttttattcagcgattcaaaggcaagacggtggtggtcaagtacggcggtgcggcgatgaagtccccggagctgcaggcgtccgtgatccgcgatctcgtgctgctctcctgcgtcggcctccgccccgtgcttgttcacggcggcggtccggagattaattcctggctgctgcgcgtcggcgtcgagccgcagttccgcgacggcctccgcgtcacggacgcgctcaccatggaggtcgtcgagatggtgctagtcgggaaggtcaacaaaaaccttgtttccctcatcaacatcgcgggaggcaccgccattggtctgtgcggcaaggacgcgcgccttatcaccgctcgcccgtctccaaatgcagcggcgctgggattcgtcggcgaggtttcgcgcgtggacgccaccgtcctccatcccatcatcgccgcgggccatatcccggttatcgccaccgttgccgccgacgagactgggcaagcctataacatcaatgctgatacggcggctggcgagattgccgctgccgtgggcgccgagaagctgctgttgctcacagatgtgtctggcattttggcggaccgtaatgaccctgggagcctggtgaaggtggtcgacattgctggggtgcggaagatggtggctgacgggaaggtagctggtgggatgatacccaaggtggagtgttgtgttcacgcccttgcacaaggtgtacacaccgcaagtatcattgatgggcgtgttccacactctcttctgcttgagattctcacagacgagggcacaggcaccatgatcactggctgagctgcttcatgccttcatgaaacgggctgagaagcgaagcgtttggtggccagaaaccgattctgacggccagaagccgatccaaacaggcccgatgttggattgaataatattttttgaaatgcttgatcgtgaacatcagttgtccttcaggcaaggtttttgcacattaatgagaattgtccaagttatgtgccatcctactttggttactgctcaaaaaaaaaaaaaaaa

SEQ ID NO: 986 - protein, 341 aa, Zea mays
  misc_feature: Ceres CLONE ID no. 393332
  misc_feature: Ceres CDNA ID no. 40350957
  misc_feature (80)..(318): Pfam Name: AA_kinase PFAM Desc: Amino acid kinase family
MLLTKPYLSNSLLPVPSPPPSGPTLSSNHASPLAAPTCRRISATSTAAPSPSSAAAATASLSRVDVLSEALPFIQRFKGKTVVVKYGGAAMKSPELQASVIRDLVLLSCVGLRPVLVHGGGPEINSWLLRVGVEPQFRDGLRVTDALTMEVVEMVLVGKVNKNLVSLINIAGGTAIGLCGKDARLITARPSPNAAALGFVGEVSRVDATVLHPIIAAGHIPVIATVAADETGQAYNINADTAAGEIAAAVGAEKLLLLTDVSGILADRNDPGSLVKVVDIAGVRKMVADGKVAGGMIPKVECCVHALAQGVHTASIIDGRVPHSLLLEILTDEGTGTMITG

SEQ ID NO: 987 - DNA, 880 bp, Zea mays
  misc_feature: Ceres CLONE ID no. 394129
  misc_feature: Ceres CDNA ID no. 35383173
  CDS (240)..(626): REFERENCED BY SEQ ID NO: 988
agcttcttcttcttcttccaaccgcgctacgctctcttgtccccggtgctcgcttggattcttctctcttcataggaaggaaggattggctaccgagatattcctactagtccagggctgtagtgcatcctgcgcgcttggtttattctgcagccataaccagtaccagtaccccagctgagccggtgaggagaggagatagagagagcgagcgggagcgggagcagaggaggagggccatggaaggcgacagcttctccggcggcgccatggccaacggcggcggcggcggcggcagcggcggcgggcaggtggtggacgggaagctgatccacacgttccacaggagcttcgtgcaggtgcagagcctgctggaccagaaccggatgctcatcagcgagatcaaccagaaccacgagtcccgcgcgcccgacaacctcacccgcaacgtcggcctcatccgcgagctcaacaacaacatccgccgcgtcgtcggcctctacgccgacctctccgcctccttcgcgcgcaccatggaccacgcgtcctccgagggcgactcctcgggcaccggcaccggcaacggccgcgccggcgccggccacaagcgcgtccgccccgcctagctagctagcttttagtttttcttttgctgggtcttggcgtggcaatcctaggtgctgccattgccattgccactaggaggcgtatttaatttagtctttttctcttgcggttcttcttgttcgccttcttcctttgtgctcgctagctgcgacgaacgcttctgcgtcggtgattaattagtgtatggtaatttagtgacaaacagagagctgccatgtggatgttgctcctatgatcaaaaaaaaaaaaaaaa

SEQ ID NO: 988 - protein, 128 aa, Zea mays
  misc_feature: Ceres CLONE ID no. 394129
  misc_feature: Ceres CDNA ID no. 35383173
  misc_feature: Homolog of GI Number: 2078483 NR Desc: antifreeze glycopeptide AFGP polyprotein precursor
  misc_feature: Homolog of GI Number: 68562465 NR Desc: Heavy metal translocating P
  misc_feature: Homolog of GI Number: 62132411 NR Desc: arabinogalactan protein
  misc_feature: Homolog of GI Number: 5001993 NR Desc: chimeric AFGP/trypsinogen
  misc_feature: Homolog of GI Number: 67987580 NR Desc: ABC transporter
  misc_feature: Homolog of GI Number: 1582641 NR Desc: mucin
MEGDSFSGGAMANGGGGGGSGGGQVVDGKLIHTFHRSFVQVQSLLDQNRMLISEINQNHESRAPDNLTRNVGLIRELNNNIRRVVGLYADLSASFARTMDHASSEGDSSGTGTGNGRAGAGHKRVRPA

SEQ ID NO: 989 - DNA, 624 bp, Zea mays
  misc_feature: Ceres CLONE ID no. 394175
  misc_feature: Ceres CDNA ID no. 36707392
  CDS (80)..(424): REFERENCED BY SEQ ID NO: 990
agaagggagaaagaaaagcagtcgagcagcggtagccggtaggcgagagagtcaggattcaggacgcggcgaggccaccatgagcactctcaagttctgccgggaatgcaacaacatgctgtacccgcgggaggacaaggagacgcgcaccctcctgtacgcgtgccaaacgtgcgagcatgaggagattgccactgatacttgtgtgtacaaaagggttatccgtaagcctggtggtgagcccaaagatgtcctgaaggatgcagcaactgatcctagcctgcctcgcaccagaagcgtcagatgttacaactgcaaccatccagaagctgccttttttcaggccccgactaagggagaacaagccatgacgctgtacttcatctgctgcaacccaatctgcgggcacaggtggagggactgagaaggatctggcttggtcttcgctgcaaacctgccgtattgttagcctaggtacaagttgtgccgtcaactgacgtttgctgcaagcttataagctactataacctcgtaacaaaacgatggtttggctggagacgaaatctgttgttcctcatgataagaaacagaaacagctatgaactatcaaaaaaaaaaaaaaaa

SEQ ID NO: 990 - protein, 114 aa, Zea mays
  misc_feature: Ceres CLONE ID no. 394175
  misc_feature: Ceres CDNA ID no. 36707392
  misc_feature (4)..(48): Pfam Name: RNA_POL_M_15KD PFAM Desc: RNA polymerases M/15 Kd subunit
  misc_feature: Homolog of GI Number: 50939271 NR Desc: putative RNA Polymerase II subunit 14.5 kD
  misc_feature: Homolog of GI Number: 77556133 NR Desc: RNA Polymerase II subunit 14.5 kD
  misc_feature: Homolog of GI Number: 46359779 NR Desc: At3g16980
  misc_feature: Homolog of GI Number: 21537166 NR Desc: RNA Polymerase II subunit 14.5 kD
  misc_feature: Homolog of GI Number: 50797497 NR Desc:  similar to DNA
  misc_feature: Homolog of GI Number: 68390787 NR Desc:  similar to DNA
  misc_feature: Homolog of GI Number: 53734145 NR Desc: Zgc:103515
  misc_feature: Homolog of GI Number: 34855683 NR Desc: similar to DNA directed RNA polymerase II polypeptide I
MSTLKFCRECNNMLYPREDKETRTLLYACQTCEHEEIATDTCVYKRVIRKPGGEPKDVLKDAATDPSLPRTRSVRCYNCNHPEAAFFQAPTKGEQAMTLYFICCNPICGHRWRD

SEQ ID NO: 991 - DNA, 1466 bp, Zea mays
  misc_feature: Ceres CLONE ID no. 394222
  misc_feature: Ceres CDNA ID no. 25445514
  CDS (148)..(1251): REFERENCED BY SEQ ID NO: 992
acccagaaagatcgcactacccggcgctcgcgcggctttctttcccaactccgacgaaggctagctacaccacctggtgcgggctcgtctccatcgcccgccacccgctccgtcgtcgtcgtccccgccgcgccgatcccgaatcgaatggggagcctggcgtccgagaggaaggtggtcgggtgggccgccagggacgccaccggacacctctccccctactcctacaccctcaggaacacaggccctgaagatgtggtggtgaaggtgctctactgcgggatctgccacacggacatccaccaggccaagaaccacctcggggcttcaaagtatcctatggtccctgggcacgaggtggtcggcgaggtggtggaggtcgggcccgaggtggccaagtacggcgtcggcgacgtggtaggcgtcggggtgatcgttgggtgctgccgcgagtgcagcccctgcaaggccaacgttgagcagtactgcaacaagaagatctggtcatacaacgacgtctacactgatggacggcccacgcagggtggattcgcctccaccatggtcgtcgaccagaagtttgtggtgaagatcccggcgggtctggctccggagcaagcggcgccgctgctgtgcgctggcgtgacggtgtacagcccgctgaagcactttgggctgacgaccccgggcctccgtggcggcatcctgggcctcggcggcgtgggccacatgggcgtcaaggtagccaaggccatgggccaccacgtgacggtgatcagctcgtcgtccaagaagcgcgcggaggcaatggaccacctcggcgcggacgcgtacctagtgagctcggacgccgcggccatggcggcggccgccgactcgctggactacatcatcgacacggtgcccgtgcaccacccgctggagccgtacctggcgctgctgaagctggacggcaagctcgtgctgctgggcgtcatcggcgagcccctgagcttcgtgtcgcccatggtgatgctggggcggaaggccatcacggggagcttcatcggcagcatcgacgagaccgctgaggtgcttcagttctgcgtcgacaaggggctcacctcccagatcgaggtggtcaagatggggtacgtgaacgaggcgctggagcggctggagcgcaacgacgtccgctaccgcttcgtcgtcgacgtcgccggtagcaacgtcgaggcggaggcggcggcggcggatgcggccagcaactgatggcaccgcgtcgtcgagtcgaaccacgtctgtgcgccgcgtgcaacgttcgttcgggtcgagtctgcgtgcaacgttctgcttcctttactagttgttgtctttccgccttcttgccgttctgttctgggctttgagatgagacgatggatggtcagtttttaatgtcagactgaataactacgtatagtactgtagcaaaaaaaaaaaaaaaa

SEQ ID NO: 992 - protein, 367 aa, Zea mays
  misc_feature: Ceres CLONE ID no. 394222
  misc_feature: Ceres CDNA ID no. 25445514
  misc_feature: null
  misc_feature: Useful for making plants with altered cell wall content and/or composition
  misc_feature (180)..(315): Pfam Name: ADH_zinc_N PFAM Desc: Zinc
  misc_feature: Homolog of GI Number: 3913181 NR Desc: Cinnamyl
  misc_feature: Homolog of GI Number: 15428276 NR Desc: cinnamyl alcohol dehydrogenase 1a
  misc_feature: Homolog of GI Number: 15428278 NR Desc: cinnamyl alcohol dehydrogenase 1b
  misc_feature: Homolog of GI Number: 15428280 NR Desc: cinnamyl alcohol dehydrogenase 2a
  misc_feature: Homolog of GI Number: 15428282 NR Desc: cinnamyl alcohol dehydrogenase 2b
  misc_feature: Homolog of GI Number: 474300 NR Desc: cinnamyl alcohol dehydrogenase
  misc_feature: Homolog of GI Number: 3341513 NR Desc: cinnamyl alcohol dehydrogenase
  misc_feature: Homolog of GI Number: 2239258 NR Desc: cinnamyl alcohol dehydrogenase
  misc_feature: Homolog of GI Number: 3097281 NR Desc: cinnamyl alcohol dehydrogenase
  misc_feature: Homolog of GI Number: 50905799 NR Desc: putative cinnamyl
MGSLASERKVVGWAARDATGHLSPYSYTLRNTGPEDVVVKVLYCGICHTDIHQAKNHLGASKYPMVPGHEVVGEVVEVGPEVAKYGVGDVVGVGVIVGCCRECSPCKANVEQYCNKKIWSYNDVYTDGRPTQGGFASTMVVDQKFVVKIPAGLAPEQAAPLLCAGVTVYSPLKHFGLTTPGLRGGILGLGGVGHMGVKVAKAMGHHVTVISSSSKKRAEAMDHLGADAYLVSSDAAAMAAAADSLDYIIDTVPVHHPLEPYLALLKLDGKLVLLGVIGEPLSFVSPMVMLGRKAITGSFIGSIDETAEVLQFCVDKGLTSQIEVVKMGYVNEALERLERNDVRYRFVVDVAGSNVEAEAAAADAASN

SEQ ID NO: 993 - DNA, 549 bp, Zea mays
  misc_feature: Ceres CLONE ID no. 394276
  misc_feature: Ceres CDNA ID no. 4615831
  CDS (88)..(331): REFERENCED BY SEQ ID NO: 994
gaagagggaaggggggatatcggggaaaaaaacacaaggtaccagcagcgcaaagagccgggtgttggcacagatcaggcggccgccatggcggatcagttcgcggattcggcgaacaacgtgatcatcgaggaggtgaacaagggcctgaacccaggaatggtggttctgctcgtggttgccagcttcctgctgctcttcttcgccgggaactacgcgctgtatgtgtacgcgcagaagacgctcccgccgaagaagaagaagccggtctccaagaagaagctgaagagggaaaagctgaagcagggggtctcggcgccaggggagtgaacagacagggatgccgccgatcggcccgtcctgagcccgccccctatttacatgattgtcgaagaaaaaagatacacctgctggagccgcggtgttcgtagtaattttgttctgtagatgctttttgttgtcttcgatggtagtgcatttgtattggacaccttgtttcagcaactgatgaatctttagcctaaaccgagcaaaaaaaaaaaaaaaaaa

SEQ ID NO: 994 - protein, 80 aa, Zea mays
  misc_feature: Ceres CLONE ID no. 394276
  misc_feature: Ceres CDNA ID no. 4615831
  misc_feature: Useful for making plants with modulated growth and phenotype characteristics
  misc_feature: The sequence is a functional homolog of  SEQ ID NO 1769 in the  11/479,226 US patent application
  misc_feature: The sequence is a functional homolog of  SEQ ID NO 2604 in the  10/374,780 US patent application
  misc_feature: The sequence is a functional homolog of  SEQ ID NO 960 in the  10/225,066 US patent application
  misc_feature (10)..(80): Pfam Name: S1FA PFAM Desc: DNA binding protein S1FA
MADQFADSANNVIIEEVNKGLNPGMVVLLVVASFLLLFFAGNYALYVYAQKTLPPKKKKPVSKKKLKREKLKQGVSAPGE

SEQ ID NO: 995 - DNA, 1426 bp, Zea mays
  misc_feature: Ceres CLONE ID no. 394569
  misc_feature: Ceres CDNA ID no. 25446066
  CDS (213)..(1157): REFERENCED BY SEQ ID NO: 996
gattttttacttcttgccgtgggccgtgtccagtgggtgaccctgtctctgacggtctgacccgtcgcctccctctccccttgacgtgcgggtgcggctcctcctcgccgacggcgccagcgccgcctccctcgccctctcggcatagaccggcgacggtagctgcatcttcgagtccgcagtgaaaactagaagggaagaacagcctcctaatggataggaacaacgaactggaagaggtggtcccaaatgactcggaccctcttattgggagggataacagggagtcagagtcatcagtagagatgtcaccgccacagccagcaactgtgaacctgctggagattgaggatgaagagaccgacggctcttctgctgcgtgttgccgcatttgccttgaggctgagtctgagataggtgatgagctaatatcaccttgcatgtgcaagggaactcagcagtttgttcaccgttcttgtcttgaccactggcgatctgttaaggaaggatttgcattttcacactgcacaacttgcaaagctcagtttcatcttcgagtggaaacctgggaggataactcatggcgtaaaatgaagttcaggatccttgttgcaagggatgttctactcgtatttcttgctgtacagcttactattgctatcatcggtgcgattgcatactttttagacagggatggaagtttccggaacagttttagcgatggttgggaccgcttcttgtcaaagcacccaatacccttctactattgcataggtgttgtgattttctttgtgctgcttggattcttcgggctgatagtacactgctcatccttcaacgacaaccaggatccatgcctagctgggtgccggaactgctgctatggttggggcatcctagactgcctgcctgcttccctggaggcatgctttgccctggttttggttttcgtcgttgtgtttgccatccttggcatcgcctatggcttcctcgctgcaaccatggcggtccagaggatttggcagaggcactatcacatcctgaccaaaagggagttgacaaaggaatacgtggtggaagaccttcacggcaactacacagcgccgaagcttgatccggagcatgaggaacggctgaagatgctgaagcttctttagagagagaaagaggtgcacgccttcctgtatccgtggcaagtgcatcaacatggggcaaccctctctgcgtgccagattagggaatggccatcccataacactgtacaaaatgatgaaatcctgcttggacttgtatgaaatctctatccgacgaaacaaacagaagttctcagttttaccttctcggtaaccttcctcgacaacttgtctccgaaagtgtactgttcgtctttaatctttcccttttttttttaaaaaaaaaaaaaaaa

SEQ ID NO: 996 - protein, 314 aa, Zea mays
  misc_feature: Ceres CLONE ID no. 394569
  misc_feature: Ceres CDNA ID no. 25446066
  misc_feature (58)..(108): Pfam Name: zf PFAM Desc: Zinc finger
  misc_feature: Homolog of GI Number: 50945231 NR Desc: zinc finger
  misc_feature: Homolog of GI Number: 53791481 NR Desc: zinc finger
  misc_feature: Homolog of GI Number: 34912564 NR Desc: P0410E03.20
  misc_feature: Homolog of GI Number: 77551826 NR Desc: Zinc finger
  misc_feature: Homolog of GI Number: 77551825 NR Desc: Zinc finger
  misc_feature: Homolog of GI Number: 77551824 NR Desc: Zinc finger
  misc_feature: Homolog of GI Number: 51979126 NR Desc: PREDICTED OJ1007_D04.30 gene product
  misc_feature: Homolog of GI Number: 42734483 NR Desc: RIKEN cDNA 2900024D24
MDRNNELEEVVPNDSDPLIGRDNRESESSVEMSPPQPATVNLLEIEDEETDGSSAACCRICLEAESEIGDELISPCMCKGTQQFVHRSCLDHWRSVKEGFAFSHCTTCKAQFHLRVETWEDNSWRKMKFRILVARDVLLVFLAVQLTIAIIGAIAYFLDRDGSFRNSFSDGWDRFLSKHPIPFYYCIGVVIFFVLLGFFGLIVHCSSFNDNQDPCLAGCRNCCYGWGILDCLPASLEACFALVLVFVVVFAILGIAYGFLAATMAVQRIWQRHYHILTKRELTKEYVVEDLHGNYTAPKLDPEHEERLKMLKLL

SEQ ID NO: 997 - DNA, 963 bp, Zea mays
  misc_feature: Ceres CLONE ID no. 395109
  misc_feature: Ceres CDNA ID no. 36586845
  CDS (88)..(654): REFERENCED BY SEQ ID NO: 998
aattaattccgtccaaggaagctgttcctggtcaggtaattctctcgtagttcagttgtagccgttgagacttgggaggcaggcgacatgggtggcgggaaggacgacggccacgatccctcgaaggcggacaagggattccacggaggagggtacccggccgccggtggatactacggcggccagtaccccgccggcggctaccctgctccaccgggcggcggtgcgtaccctcccgggcctgggtacccggtaccacctggtgggtacccgcctccgggtggctaccctcagcctggcggatacccgccgtcgcacggggcgtacccggcgccgggtgcaggcgcgtatcctcccagcgggtacccccatcaaccggtctacccacagcctggctatccatcgatgcccggtcatggtggcatgtacggaggagggcacggcgcagggggttctgcaggccacggggcgatgctggccggaggtgccgcggcggcgtacggagctcacacggtatcccactcccacgggatgtacggccacggccacggtcacggcaagttcaagcatggcaagttcaagcacggcaagtttggcaagcacaagaagatgtttggcaagcacaagaatatgttcggtcgcaagtggaagtgattaacgtacagctttaatccgattctggacgagcagacgtatatatatacaccggagtccagaatgctaagttatgctattttgattgtgattcgaatacgggaggttgttagggttttcgaagtacgtactgacggctgcctgtaagctttgttggagctgttcttgccgtgttggcagtccgaattaatttaaccatcgattgtgtcgaacagcatctccagctgccgacaaatagacgagtgatcaaagttttttttaaaaaaaaaatcaacatcgtcgtatatttggaaaaaaaaaaaaaaaaaa

SEQ ID NO: 998 - protein, 188 aa, Zea mays
  misc_feature: Ceres CLONE ID no. 395109
  misc_feature: Ceres CDNA ID no. 36586845
  misc_feature: Homolog of GI Number: 33668156 NR Desc: GPRP
  misc_feature: Homolog of GI Number: 9755790 NR Desc: glycine/proline
  misc_feature: Homolog of GI Number: 6478148 NR Desc: putative glycine and proline
  misc_feature: Homolog of GI Number: 63146672 NR Desc: PrP
  misc_feature: Homolog of GI Number: 61651806 NR Desc: prion protein
  misc_feature: Homolog of GI Number: 3288572 NR Desc: annexin max4
  misc_feature: Homolog of GI Number: 27762276 NR Desc: annexin 11b
  misc_feature: Homolog of GI Number: 38641282 NR Desc: prion protein long isoform
MGGGKDDGHDPSKADKGFHGGGYPAAGGYYGGQYPAGGYPAPPGGGAYPPGPGYPVPPGGYPPPGGYPQPGGYPPSHGAYPAPGAGAYPPSGYPHQPVYPQPGYPSMPGHGGMYGGGHGAGGSAGHGAMLAGGAAAAYGAHTVSHSHGMYGHGHGHGKFKHGKFKHGKFGKHKKMFGKHKNMFGRKWK

SEQ ID NO: 999 - DNA, 894 bp, Zea mays
  misc_feature: Ceres CLONE ID no. 395601
  misc_feature: Ceres CDNA ID no. 25447029
  CDS (3)..(449): REFERENCED BY SEQ ID NO: 1000
gttgcatcacacttagcgccaccccatgccatgagaagaagctcttagaagaccagcgttgtcgctcgccaggagaggaggaggaggaggccgctctacggaagaagaagacgacgctgcgctgcgcggcgacggacgactggtcggtgggtgtcatgagaaggtcggccgtgtccgtgaggcgggcggcgccagcggcattggccatcttgttcggagcgctccttctggtgtcgttcgtcgtggacggcgtcaggaaagcggctccgccggcggcgatcggcgggaggaggatgatgctgggcggaggcgccggagggctgaggaccctggaggatttcaaggctcatgatcccttccaggacagcaagagaagggtgcccaatggccctgatcctatccacaacagaggaaccggcaagtcaggacgatcgccgggacgagcatgacgtcgggagcgcgcatgccgaggcgtggaagcttccgaacccgaagaggccggcgatagcgacgtgttgggagcggcggctagcaaacagaagatgcgttgcgttgcatacttgcattgcatggaggaagaggaacagacaagaggtgcatcgtggggtggtgggtctggctgggatgctgggtgtaactagggggaggtggcctgccctatcttcttctaagcactgctatttaagacggttttaagcatgatgagaactttagctttttgggggaggggaaacaaaggctattctattctattcaattctattctgccagtgggggtttgtttgttttgttttgttttgtttttttgtaaagagagcagtaagtaccaagcttccctgtcacatggaaacaagcaagcatcagagattcttcttgacaaaaaaaaaaaaaaaa

SEQ ID NO: 1000 - protein, 97 aa, Zea mays
  misc_feature: Ceres CLONE ID no. 395601
  misc_feature: Ceres CDNA ID no. 25447029
MRRSAVSVRRAAPAALAILFGALLLVSFVVDGVRKAAPPAAIGGRRMMLGGGAGGLRTLEDFKAHDPFQDSKRRVPNGPDPIHNRGTGKSGRSPGRA

SEQ ID NO: 1001 - DNA, 1292 bp, Zea mays
  misc_feature: Ceres CLONE ID no. 395650
  misc_feature: Ceres CDNA ID no. 25446067
  CDS (2)..(1015): REFERENCED BY SEQ ID NO: 1002
cacaccttcccccggtcccgcctccgtctctgtccagcgggcctccgctctcctcgccgcccgcctgtccccctctctctccccctccctcctcgccgccatgaacaacctcctcacggattcctttgagctccctcggcgggactcctcaagagacgcagatattgaaatgggaatgcatcaggctgatgcttcagacaacttgaaagatttcttgaagaaggtcgatgcaattgagagtataattgcaaagctgtcaaatctattgaataagctccagactacaaatgaggaatccaaagcagttacaaaagcaagttccatgaaagcaattaagcagcggatggagaaagatattgatgaagtggggaaaattgctcgtcaggcaaagacaaaagttgatgaactggaaagagataacctatcgaataggcaaaaacctggatgtggaaagggttctgccgtggaccgatcaagagagcaaactactggagcagtgaaaaagaaattgaaggaacggatggatgattttcagaccttgagagaagcaatcaggcaagagtatcgagaggttgtcgaaagaagggtttttactgtaactggtaatcgtcctgatgaagagacaattgatgacttgatagagaccggaaaaagtgagcaaatattcaaagatgctatccaacatcagggaagaggccagatactggacacagttgctgaaatacaggagcgacatgatgctgtaagggatctagagaggaagcttttggagttgcaacagatatttatggacatggcagttcttgtcgaggctcaaggagacatgatcaacaacatcgagacacatgtctcgaacgccaccaaccacatacaacaaggcgtgagcgcgctccagaacgcgaagaagctgcagaagaactcgaggaagtggatgtgctacgccatcatcctgctgctggtgatagtggcggtcattgtcgtcgcggtcatccagccatggaagaagggagcctagggtggctctaaacagggaggagggcgtgggagatacgttttttttgtctgtctgtgtaatatctgtgcagttgttgtgggtggttctgtgatttatggttgtacttatggacggcaccagagaagctttggtatttcgattctttctgtttgggatagttcgtgcagtccattgaccatagctctcagaaatgttattgtggtgaccatatattcatatgtcggtcagctgatgaaaagaatggtgcttctgaatctttccaaaaaaaaaaaaaaaa

SEQ ID NO: 1002 - protein, 304 aa, Zea mays
  misc_feature: Ceres CLONE ID no. 395650
  misc_feature: Ceres CDNA ID no. 25446067
  misc_feature (210)..(272): Pfam Name: SNARE PFAM Desc: SNARE domain
  misc_feature (34)..(141): Pfam Name: Syntaxin PFAM Desc: Syntaxin
  misc_feature: Homolog of GI Number: 51963280 NR Desc: PREDICTED P0039H02.103 gene product
  misc_feature: Homolog of GI Number: 21436145 NR Desc: putative syntaxin
  misc_feature: Homolog of GI Number: 8346545 NR Desc: syntaxin
  misc_feature: Homolog of GI Number: 6006872 NR Desc: s
  misc_feature: Homolog of GI Number: 55741416 NR Desc: putative syntaxin
  misc_feature: Homolog of GI Number: 6671938 NR Desc: putative syntaxin
  misc_feature: Homolog of GI Number: 4206787 NR Desc: syntaxin
  misc_feature: Homolog of GI Number: 42572385 NR Desc: syntaxin 121
  misc_feature: Homolog of GI Number: 5912543 NR Desc: Knolle
  misc_feature: Homolog of GI Number: 21593223 NR Desc: syntaxin
  misc_feature: Useful for increasing seed/fruit yield or modifying fruit content
  misc_feature: Useful for making ornamental plants with modified flowers
MNNLLTDSFELPRRDSSRDADIEMGMHQADASDNLKDFLKKVDAIESIIAKLSNLLNKLQTTNEESKAVTKASSMKAIKQRMEKDIDEVGKIARQAKTKVDELERDNLSNRQKPGCGKGSAVDRSREQTTGAVKKKLKERMDDFQTLREAIRQEYREVVERRVFTVTGNRPDEETIDDLIETGKSEQIFKDAIQHQGRGQILDTVAEIQERHDAVRDLERKLLELQQIFMDMAVLVEAQGDMINNIETHVSNATNHIQQGVSALQNAKKLQKNSRKWMCYAIILLLVIVAVIVVAVIQPWKKGA

SEQ ID NO: 1003 - DNA, 794 bp, Zea mays
  misc_feature: Ceres CLONE ID no. 395932
  misc_feature: Ceres CDNA ID no. 25445515
  CDS (61)..(345): REFERENCED BY SEQ ID NO: 1004
ttttttttcgttcccctttccgccgtgcctcccactaaaccctagatctctctctctagaatgccgacgccttcggctctcagcaagcgcggcggcgacggcggggacggcatcctggccgccctctcccgttcgcaggtggcggcgcacgggcgagaggcggcggccgtggcgaagaagctgctgcggagcacggggaaggcggcgtggatcgcggggacaaccttcctggtgctggtggtgccgctgatcatcgagatggaccgggagcagcagctcaacgacctcgagctgcagcagcagacgcttctgggcggggccccgccgccgccgccgaccaagtagatagatccgtgcatcgaccctttcgtccccccccccctctccctctctagaggtatctgttactatcaagttcatcattcgagttactatcaagttcatcattcgagttactatcaagttcatcattcgagtcgagttgaggctaagggagttaccgagtcgacctgttgtcggttggtcgtaatcaaagaggtcaaaactgctttgttgatgttcgttctcgatgcaacactagtttagtttcccttccatcaattgaaacggattgatcagataagttgagctcgttcgctgctgctgctgctgctgccaggcgctgcgatccgctgcctgcgtttttgcacgctgcagcttgttcttcctatacctgcctgtgttagcgtttttaatgaataaatatacttcttgctgttattcagcttatggctttcaaaaaaaaaaaaaaaaaa

SEQ ID NO: 1004 - protein, 94 aa, Zea mays
  misc_feature: Ceres CLONE ID no. 395932
  misc_feature: Ceres CDNA ID no. 25445515
MPTPSALSKRGGDGGDGILAALSRSQVAAHGREAAAVAKKLLRSTGKAAWIAGTTFLVLVVPLIIEMDREQQLNDLELQQQTLLGGAPPPPPTK

SEQ ID NO: 1005 - DNA, 1581 bp, Zea mays
  misc_feature: Ceres CLONE ID no. 396372
  misc_feature: Ceres CDNA ID no. 40041207
  CDS (913)..(1341): REFERENCED BY SEQ ID NO: 1006
cccttttccccttctctcgactcgcctctctaggtttccttgcagccgcatgctgtcccgctgcactgcaagctagcgactagcagcagttgccaacgaccaccaccgccgccgccctcacctcacctaccacacactgccgtgatccccggcccttttgcctgcagaccgcctgtgccttttgttccctgtgccctgggaggttctgttctgtccccggtcgatcgaccttctcttctcgtcggagttattagcaactgcctgttgtccagccaaactaaaacccttttgccgtcacaaaccagcttagctttactgatcagagcaaggctctgccggattttttacaagaagaacctagctagcttttcaggccgtcactctgccgaaatttttcgccagaaacgctgctgtctagggcgtcactctgccgaaatttccagctccaaaacctgcttgtacgtccagggcgcgcggcaccctgtcaaaagatttcaccttgcctgttcaagggaaaactctgctggattttttttcttgccgtgatttgctttgcatgcgttttgtgcaaccaagcaacagcctaggctttatttgatggtgccgctgctgtcgtgtttatgataacatccactgtgctcgtccagtccttctccgtcgtcttcctctactggttctacgtcttctcataattaattaaaccaccccccgtgttcatcgactgctcgctagcttttccagatccaagttctgaatccctgtcggcaacttagcttgtagctatagctatagtccgccttagtagtaaaacacatcaacaaactagctgctccatctcgatcgatcgttaaccaggtaattaatcgtcgtcgagacgcataaaaagaaaagaaaaaagaacagtgtgtgcatatgatggcctctcctcccactcccagcacggtgtctacgaccgtgaccacgtcgccgtcgtcgaccggcgggtccgagctggggcccgacccgcagctggccgccgagaggaagcgcaagcgcaaggagtcgaaccggctgtccgcgcagcggtcccgcgcgcgcaagcagcggcagctggacgacctcacggcgcaggtggccgcgctgcgcgcccgcaacggcgccatggacgcggccgcccgcgacgccgcgcgccggtgcgtcgccgtgcaggccgagaacgcgatgctgcacgcccggaccgtggagctcagcgcgcgcctccagtccctcgtcgacctcatccagtgcatgcaagcaggcgacgccatgtaccagtaccagcagttgccgctggtggacgccaccatctacaactactactagctagtgtccatcgtgctatagctatgcctgctagctgtgtgtctgctgctttgtctactctactcccggtcgggtcgtgttgttattggttgggcacattggaaagcaggccaaagtagggtttagttttgtggtggtgtcatggtgtgtcactttatatataatagcgtgacatggacggccaaaaaaaaaaaaaaaaaaaaaaaaaaaaaaaaaaaaaaaagaaaaaaaaaaaaaaaa

SEQ ID NO: 1006 - protein, 141 aa, Zea mays
  misc_feature: Ceres CLONE ID no. 396372
  misc_feature: Ceres CDNA ID no. 40041207
  misc_feature (33)..(96): Pfam Name: bZIP_1 PFAM Desc: bZIP transcription factor
  misc_feature: Homolog of GI Number: 34913702 NR Desc: OSJNBa0062A24.22
  misc_feature: Homolog of GI Number: 28466851 NR Desc: At1g75390
  misc_feature: Homolog of GI Number: 42563231 NR Desc: bZIP transcription factor family protein
  misc_feature: Homolog of GI Number: 23397120 NR Desc: putative bZIP transcription factor
  misc_feature: Homolog of GI Number: 51091704 NR Desc: putative bZIP transcription factor
  misc_feature: Homolog of GI Number: 10443481 NR Desc: transcription factor GBF5
  misc_feature: Homolog of GI Number: 14289165 NR Desc: glip19
  misc_feature: Homolog of GI Number: 51854369 NR Desc: putative bZIP protein
  misc_feature: Homolog of GI Number: 4457221 NR Desc: putative bZIP DNA
  misc_feature: Homolog of GI Number: 20465863 NR Desc: putative bZIP transcription factor ATB2
MASPPTPSTVSTTVTTSPSSTGGSELGPDPQLAAERKRKRKESNRLSAQRSRARKQRQLDDLTAQVAALRARNGAMDAAARDAARRCVAVQAENAMLHARTVELSARLQSLVDLIQCMQAGDAMYQYQQLPLVDATIYNYY

SEQ ID NO: 1007 - DNA, 2777 bp, Zea mays
  misc_feature: Ceres CLONE ID no. 396788
  misc_feature: Ceres CDNA ID no. 40041208
  CDS (130)..(2472): REFERENCED BY SEQ ID NO: 1008
ccgcacacctctgacctccctccgtccatctcatcatcatctttgtccctctcgcgcaattcgccgaacacaccgcgcgcgcctcgcctcccagcgacggccgcctcgacggccaatgctggcggcgggatgagcgtggaggaggaggtggagcgcggggaggaggacctgttctacgagtcgctcgaccgcatcctctcctcgtcgggctcctccacctctgcctcggacgacgatggcgccgaccgcccgcgccaccgccgcagctgcgatgcgccagccgcagcggccctcgacctgtggacctcccagccggcgcccgtccatgagcggcggcgccggctgctccatctcatggggctcaccggcgatccttccctcgccggatttgagattgcccggtccgcctccggagaagccgcgggaccgcccccggcctctcccgtctcgtggtccaggtcaggcggggccgccctgggctccgccgggaagccgccgctcgggggcggccgtctgcgcttctccttgtccgacgggtccgatgccgccgacgaggaccccaggtgcctgatcaggaacctcgacgacggcagagagtacgtggtgagggaagaattcgctctccgcgaggtcggcacggggcgccaccttaccgttgaggagttggcccgttcacccatcgttcaggagcttatgcgccgccaagctttcagtactcccaactccaactgcacctcaaattcccaaagcggcacctccacgccgatcgagagatcgagctcaggttccagcaacggtggggggcgcgccaagcggcgtagcagctggctccgcagcatccgctgcgtagctggctccttcgcgtcccactcacgtgaccgccgcagcagcgacgagaaggacgcgtctccagagaaaggcgggcaccactccagctccacgacggatgacagccaggacagtgttccacgccatggtccggcccgtgtcaaggtgcggcagtatgggaagtcatataaggagctcagtggcctgtttatgacacaggagatacaggcacacagtggttccatatggagcatcaaatttagtcctgatggccgttaccttgcgactgctggggaggattgcgtaattcatgtttgggaggtgttggagtttgagagggcaaggaaggagaatgaggtgtgcaatccgcttgttgctatggtgtgcaatgagtcatcagagacaacggtgggatcagctgctccaagtgagagccattgggagaagaagctgagatcaaaggtactgcacggtgggggatcggtgagctcagacaggttgatggtgcctgagtatgtgtttgcactgtccgagaagcccgtgataacctttgcagggcattcagaggatgtgcttgatctcagctggtccaaatctcagtatttgctttcatcatcaatggataaaaccgtacggttgtggcacatgtcaagcacttattgtttgaaaaccttctcacacactgactatgtgacttgcatccagttcaatcctgttgatgatagatacttcattagtggttccctggatgagaaggttcgcatttggagtattccaaagcgtgaaatagttgattgggtcgaccttcatgaaatggttactgctgcctgctatactccagatggaaagggcgctctggttgggtcccacaagggcagctgccatctgtatgatacatctgatgacatgctttgctacaaaacacagatcgacctacaaaacaagagaaggaaatctagccagaagaaaataacaggatttcagtttgtcccaggggattcttcaatggtcataatcacatctgcagattcacggatcagagttcttgatggttttgagctagcgcataggtttaaaggattccgaaacacaagcagccaaatctcagcttgtttagctggaaatgggcggtatattatctcggcaagtgaggattcccatgtatatatctggagaaacaatgatggtccgaaaccaagtagaaagaagggcattgtttctgtcacagatagccatgaatacttccactgccagagtgtgacagttgctgttacctggccttttgccagcaccgcaatgacttgtttaatgaaccccgggaagcaagaagagcttgagcgtgggtctgagccgcaagatctgcaaaccaaacttgccaaggcacaggagatgccagatgttgagtaccggagcacaaatatcacgagtaacaactcgaatcataataatggtgaccggacatctccgacttggcctgaaaaacttaacacaccaccaaatcaaagtctcagggctactacctgccatgccaacgagggagatcaagctctgaatcggtcggcctggggcctagtgattgtcacagcaggccgtggaggtcaaatcagaacatttcaaaactttggttttcctgtaagagtatagcatgaatatgaatacgtaagataatagtcactgccattcaggagtgtagtttgtgtatagataggagatagtgggtgagtttcacactattcagggattgggtctgattgttccttggcgtgcatgctagagatcagaatcttcatctgacatacactgtgtactgcgaaacttggtatttatttaccctgaggcctaaattgtacacgaaagagaaagccctagagagcaacactatcagctgactgcagataatttatctgtccgctaaaacccctcctttcgctacaaaaaaaaaaaaaaaa

SEQ ID NO: 1008 - protein, 780 aa, Zea mays
  misc_feature: Ceres CLONE ID no. 396788
  misc_feature: Ceres CDNA ID no. 40041208
  misc_feature (586)..(625): Pfam Name: WD40 PFAM Desc: WD domain
  misc_feature: Homolog of GI Number: 50929661 NR Desc: OSJNBa0064G10.23
  misc_feature: Homolog of GI Number: 50926632 NR Desc: OSJNBa0074L08.11
  misc_feature: Homolog of GI Number: 50911056 NR Desc: WD
  misc_feature: Homolog of GI Number: 3236249 NR Desc: putative WD
  misc_feature: Homolog of GI Number: 50911058 NR Desc: WD
  misc_feature: Homolog of GI Number: 50928019 NR Desc: OSJNBb0032E06.1
  misc_feature: Homolog of GI Number: 30689405 NR Desc: WD
  misc_feature: Homolog of GI Number: 6633828 NR Desc: F1N19.18
  misc_feature: Homolog of GI Number: 50924157 NR Desc: OSJNBa0033G16.13
  misc_feature: Homolog of GI Number: 27807499 NR Desc: rab11 binding protein
MSVEEEVERGEEDLFYESLDRILSSSGSSTSASDDDGADRPRHRRSCDAPAAAALDLWTSQPAPVHERRRRLLHLMGLTGDPSLAGFEIARSASGEAAGPPPASPVSWSRSGGAALGSAGKPPLGGGRLRFSLSDGSDAADEDPRCLIRNLDDGREYVVREEFALREVGTGRHLTVEELARSPIVQELMRRQAFSTPNSNCTSNSQSGTSTPIERSSSGSSNGGGRAKRRSSWLRSIRCVAGSFASHSRDRRSSDEKDASPEKGGHHSSSTTDDSQDSVPRHGPARVKVRQYGKSYKELSGLFMTQEIQAHSGSIWSIKFSPDGRYLATAGEDCVIHVWEVLEFERARKENEVCNPLVAMVCNESSETTVGSAAPSESHWEKKLRSKVLHGGGSVSSDRLMVPEYVFALSEKPVITFAGHSEDVLDLSWSKSQYLLSSSMDKTVRLWHMSSTYCLKTFSHTDYVTCIQFNPVDDRYFISGSLDEKVRIWSIPKREIVDWVDLHEMVTAACYTPDGKGALVGSHKGSCHLYDTSDDMLCYKTQIDLQNKRRKSSQKKITGFQFVPGDSSMVIITSADSRIRVLDGFELAHRFKGFRNTSSQISACLAGNGRYIISASEDSHVYIWRNNDGPKPSRKKGIVSVTDSHEYFHCQSVTVAVTWPFASTAMTCLMNPGKQEELERGSEPQDLQTKLAKAQEMPDVEYRSTNITSNNSNHNNGDRTSPTWPEKLNTPPNQSLRATTCHANEGDQALNRSAWGLVIVTAGRGGQIRTFQNFGFPVRV

SEQ ID NO: 1009 - DNA, 2089 bp, Zea mays
  misc_feature: Ceres CLONE ID no. 396939
  misc_feature: Ceres CDNA ID no. 40041209
  CDS (3)..(1919): REFERENCED BY SEQ ID NO: 1010
gcaacgtgcggggagcgcaatacgccgggccgccggctaagcgggaggcaaaggcgaggatgttggggtcgcgccggtggcagtctccggctgatgctcctgcggccaccgatgacttggaggaggacactggtggcgtcggcggcccgtccaggcggcctctgcgccacgggctgcaccgcgcgtcgccctacggtggtgccccccgccggtggctctccaagctccccgtgacttcgaggatattccccaccatgccacgcgaccgcacggcctcaggcaataatcaagaggttcattgtgaaccactagaagttattcgtgaaagacactccacagaaccaaacatcaatgctgcagctattctaccatcaagacctgtgagcaatacatttaacctgcttctggaaggtgacatgaatccaagtcatggcaatgggcttgctgaaatagagaacataatcaaccagagatatttttctagggatgagacactacgtcttatagagatcatgcggtcaaggacttctgattttactgttgaagaccagagacctccagtatctactgcaaaaggttttgtaacaacattttttacacctgctaaactgatcgaggctcagccatcttggaggactgatatcgttccatcatccaatgtgcatgatattggttcttcgccagttgaaattgccaaagcttttatggaagcgcagacctcagcttctgtacacgagtccaaaaagcggaaattcagagctttgagtcatggagttgcggttgacaattcgacatcagaagttttccctacaataactactgattcttctgtaagatggcctggttcagttgttcaaggtggtcccaattatcttacaccacaaagtaataaaggaaggactctgtctcagcctctttctcgcacaccatacaatagctcagttattcgaagatatattaagaacagcaggcatggtgatatacacaataatggacagacacaatttcccactccattttctattggaagtaagagaatactagaggataaacaggtagcaagtggtggtatagcgcagccatcatcttccaggggacagatagatgtttttggttctattccaagagaaggttcgactgcaataaacaatgttgcattcaacctgcaagagtcagatggtaaaagcatgacagaaagcagaacaacttttggacgtgcttcaggtgtagacaatatctcaagggttgcttcagtatctgttcatcccaagtcaagcgaaacagcattcaaaatacttaagcaacttgacagaactattccttcccctacatcaaagccactagggctgagacagacattagccaagaaaaatactttttctgttgctaccaacagacagattaaagagcctgatatcattatcggtaatgataataaacagagcagcattaatgagagtggtagtgctagctcggagactacatatggaaaaaaggttcagcaacctcaaagcagtcctatttcaggagagtcaagtgaaaaagtccagagaagcggagctaactcagatgtttatgaagcaggcacttctcagcgtcctctgaaatcaaatctaacacccacttcagtcgccgaggtcttggataataaaaacaccagcaaaggtttcagcttcacatttcctattcctaaagctccaagctctctacttgaaccgcctcctacaccaaccatggcctcaccaccaaggaccttgccaatcactaacgaggatgttcccaagttcacctttggctcatccagcacggccaacaaactcgttttctccttcaactctacaagcagttctcctggtgctggtggaacagacccaaccttcaaatttggatctgataataagcgagagcttgtgttttgatacagttttttttttgatagacaccatgcccgcggatctgaactgtaccactctatctattcttggtgtaagacgtcttaagagagttggagtgtgctacttgagctacacaacatgacattcttttcattcattagcatattcaaacattacgaaaaaaaaaaaaaaaa

SEQ ID NO: 1010 - protein, 619 aa, Zea mays
  misc_feature: Ceres CLONE ID no. 396939
  misc_feature: Ceres CDNA ID no. 40041209
MLGSRRWQSPADAPAATDDLEEDTGGVGGPSRRPLRHGLHRASPYGGAPRRWLSKLPVTSRIFPTMPRDRTASGNNQEVHCEPLEVIRERHSTEPNINAAAILPSRPVSNTFNLLLEGDMNPSHGNGLAEIENIINQRYFSRDETLRLIEIMRSRTSDFTVEDQRPPVSTAKGFVTTFFTPAKLIEAQPSWRTDIVPSSNVHDIGSSPVEIAKAFMEAQTSASVHESKKRKFRALSHGVAVDNSTSEVFPTITTDSSVRWPGSVVQGGPNYLTPQSNKGRTLSQPLSRTPYNSSVIRRYIKNSRHGDIHNNGQTQFPTPFSIGSKRILEDKQVASGGIAQPSSSRGQIDVFGSIPREGSTAINNVAFNLQESDGKSMTESRTTFGRASGVDNISRVASVSVHPKSSETAFKILKQLDRTIPSPTSKPLGLRQTLAKKNTFSVATNRQIKEPDIIIGNDNKQSSINESGSASSETTYGKKVQQPQSSPISGESSEKVQRSGANSDVYEAGTSQRPLKSNLTPTSVAEVLDNKNTSKGFSFTFPIPKAPSSLLEPPPTPTMASPPRTLPITNEDVPKFTFGSSSTANKLVFSFNSTSSSPGAGGTDPTFKFGSDNKRELVF

SEQ ID NO: 1011 - DNA, 921 bp, Zea mays
  misc_feature: Ceres CLONE ID no. 397203
  misc_feature: Ceres CDNA ID no. 25446366
  CDS (158)..(682): REFERENCED BY SEQ ID NO: 1012
gatgcaccaaagccctagctcggctcacttgctttcctggccgccgtctcctccgcggctcttaacgccgcatccactcgccggttcttaacgccgcccgccgcctcctccgcggctctgccctcccgccgctgccgccgcctacccaggaatcaggatgcgggtgaagggcctcgccaggcccgagccccggtggctcaaggccttggaacgggctccgccagtgacatttcctcgcccagaggggaagatcaagactctggtgcttcctgaggatgtgtatgtcacgaagttcaacagaatacatccagattcgctttaccatgatgcaatcaagataagtggatttgatccaccgccagctcgagtgtttgcttggcgtgtcctggagttgaaagagcaaggagtcgatgaagatgttgcaatggctgtagcagataacgagtaccggacagagaagaaggcaaagaagaaagcgtacaaggagctgaaagaaatcgcccgcagtgaagggaggaagccacctccgaatccatacccgagtgccataaaggaaatacaagcggaggaaaagaagtatgtcatggaccgtttgcataacccgaaggtaatcgagattgcgaacaagatgaaggaggagcgagacaggatgttgagggatagagcagcaggtcagcggtagtcgtagcagcaggtaatgtttggactggccgactgggtgttgttgttcacgacatgggccaactggcgtcataaataatggttgttggagattgatatggcaaatatgaaactcttgtttttgttattcgtatttctgggatttagatggcctctggaacgcaatgttatttgggatgtgtttttgccagcaagctggtaaattgagatgtgttttgcttgcccaaaaaaaaaaaaaaa

SEQ ID NO: 1012 - protein, 174 aa, Zea mays
  misc_feature: Ceres CLONE ID no. 397203
  misc_feature: Ceres CDNA ID no. 25446366
  misc_feature: Useful for making ornamental plants with modified flowers
  misc_feature: Useful for sterility
MRVKGLARPEPRWLKALERAPPVTFPRPEGKIKTLVLPEDVYVTKFNRIHPDSLYHDAIKISGFDPPPARVFAWRVLELKEQGVDEDVAMAVADNEYRTEKKAKKKAYKELKEIARSEGRKPPPNPYPSAIKEIQAEEKKYVMDRLHNPKVIEIANKMKEERDRMLRDRAAGQR

SEQ ID NO: 1013 - DNA, 1107 bp, Zea mays
  misc_feature: Ceres CLONE ID no. 397931
  misc_feature: Ceres CDNA ID no. 35388081
  CDS (305)..(991): REFERENCED BY SEQ ID NO: 1014
cattcccctggctggacccgcgctagctcgcggccgcggcagctagatagtagtagctctccagcccatagcttaggtcggtcgccttgtttcgtagggtctggttcggccgttggtcgataagtcggcgggcgatgggggaagcgccgcagcccaagtcgccgccgaggtacccggacctgtgcggccgccgccgcctgcagctcgaggtgcagatcctcaaccgggaggtcggcttcctcgagcgtcaacgagtttgtcagtgcaaagaccgacccaatgataccagtaagcaaaaggagacatggatcttgcagcttctcgcggtggatcagatcaaaattgcgcacatgcttttcatgcctgtgctgctggtgccactgcttgccgaagcccaatgcgccaagctgcttcagctgttcttgttgcacctgccgcgacacgcagtgctgtactccgatctgccgctgttcaaagaccccttcgtgcagccccggctgctgcacctgcagccttcccagctgcagctgcaagacgccaccaggctgcggccattgccgaccccagtgcagcagctgctgctctagtggttgcagctgcgcggactgcccgtgctcctgctcctgccccccgtgctgcagctgccccggcttcttctcctgtgaggggtgctcggctggctgcctcggcgctctcaaccggtgtctcggcggcctgtcgtcgtgctgcagtgagatgcgaccttcctgctgcaagtgccagtcgtcgtgctgcgaggggggttcgtcctgccgcggcaccggcacgggagcgtgctgccgcggttcgtgcctcggtgccccggcgtcgtcgtgcccggagtgctcctgcggctgcgtgtgctcctgctccaggtgcaaaggaggatgccgctgcccgtcctgtggtagtaatccctgctgtcccagtggatgcttgtgctagatcagagtattatattactactagctagtgtgtctgttgctcttcttttcctgttgtggatgatttggcgtttgatttggatggaacctcgctagtgcataatattcactgtcatgaattaactttgtaaaaaaaaaaaaaaaa

SEQ ID NO: 1014 - protein, 228 aa, Zea mays
  misc_feature: Ceres CLONE ID no. 397931
  misc_feature: Ceres CDNA ID no. 35388081
  misc_feature: Homolog of GI Number: 51535990 NR Desc: putative keratin associated protein
  misc_feature: Homolog of GI Number: 73965961 NR Desc:  similar to keratin associated protein 4
  misc_feature: Homolog of GI Number: 7657285 NR Desc: keratin associated protein 5
  misc_feature: Homolog of GI Number: 73965959 NR Desc:  similar to keratin associated protein 4
  misc_feature: Homolog of GI Number: 63563023 NR Desc:  RIKEN cDNA A030001H12
  misc_feature: Homolog of GI Number: 73965953 NR Desc:  similar to keratin associated protein 4
  misc_feature: Homolog of GI Number: 57091541 NR Desc:  similar to keratin associated protein 9
  misc_feature: Homolog of GI Number: 51766622 NR Desc: similar to keratin associated protein 9.3
  misc_feature: Homolog of GI Number: 34223444 NR Desc: UHS KERB
  misc_feature: Homolog of GI Number: 55243135 NR Desc: ENSANGP00000001657
MDLAASRGGSDQNCAHAFHACAAGATACRSPMRQAASAVLVAPAATRSAVLRSAAVQRPLRAAPAAAPAAFPAAAARRHQAAAIADPSAAAAALVVAAARTARAPAPAPRAAAAPASSPVRGARLAASALSTGVSAACRRAAVRCDLPAASASRRAARGVRPAAAPARERAAAVRASVPRRRRARSAPAAACAPAPGAKEDAAARPVVVIPAVPVDACARSEYYITTS

SEQ ID NO: 1015 - DNA, 993 bp, Zea mays
  misc_feature: Ceres CLONE ID no. 398084
  misc_feature: Ceres CDNA ID no. 36593600
  CDS (179)..(511): REFERENCED BY SEQ ID NO: 1016
agcggatcgattcccgagacacgagcgccagcggatcgatcattcgatccccaccactgcccgaggccccctcctcgctgacttggctcctccgtcgtggccggaggcgaagcaagtggggaccacagacgcattagctgggtgaactctttcaaaaggggcaggtgcgctagtttgaatggctgctacaaagcttcaggccttttggaaccaccctgctggccccaaaaccattcatttctgggcgccaacattcaaatggggtatcaccattgccaacatagccgactttgcaaagccgcctgaaaagatatcttaccctcagcaagttgctgttgcatgcactggaatcatttggtcaaggtacagcttggttatcacaccgaaaaactggaaccttttcagtgttaacgttgcaatggcgggtacaggcctgtatcagctttcacggaagattaggcaagattacttgtctggtgagaaggatgctgctccacaactgcaagaatagataatgacaacacacaaagaataactgattgagaagtctgcggcctagggatcttactcttgatttttctgggcaggcaaggatatgtctcgatccaggacgggtcatgtttgttttcttgttcttctgaaatcatgagcaggttaatgtgaaaatctcctgccaaaaaaagaagcccatgaagtaatattttgtgcatttttgtgggaaaaaagtcatgccaggacatgattcgtatattgtccttttgttcactctatctcgtatttgtgaactctaaattgtttgccaatttgattgatcatagcccagtgttcagagatgtcagtgcccttcaccgtcctcattttgttatgatcgtggtgaagctgaattgttatccctggagaatgagggcattcaataagaagtgtttggtttaagaaaatcactccctccaagatagagtggtgtatgtctattccttaaaaaaaaaaaaaaaa

SEQ ID NO: 1016 - protein, 110 aa, Zea mays
  misc_feature: Ceres CLONE ID no. 398084
  misc_feature: Ceres CDNA ID no. 36593600
  misc_feature: The plant flowers significantly late compared to wild-type.
  misc_feature: Useful for making plants with modulated flowering time
  misc_feature (1)..(91): Pfam Name: UPF0041 PFAM Desc: Uncharacterised protein family
  misc_feature: Homolog of GI Number: 50936751 NR Desc: light induced protein like protein
  misc_feature: Homolog of GI Number: 50944531 NR Desc: light induced protein like
  misc_feature: Homolog of GI Number: 32401369 NR Desc: probable light
  misc_feature: Homolog of GI Number: 21593026 NR Desc: light induced protein like
  misc_feature: Homolog of GI Number: 7268175 NR Desc: light induced protein like
  misc_feature: Homolog of GI Number: 66504665 NR Desc:  similar to GA21761
  misc_feature: Homolog of GI Number: 65303572 NR Desc: wd40
  misc_feature: Homolog of GI Number: 24645423 NR Desc: CG9399
  misc_feature: Homolog of GI Number: 27882199 NR Desc: MGC53394 protein
  misc_feature: Homolog of GI Number: 54639317 NR Desc: GA14151
MAATKLQAFWNHPAGPKTIHFWAPTFKWGITIANIADFAKPPEKISYPQQVAVACTGIIWSRYSLVITPKNWNLFSVNVAMAGTGLYQLSRKIRQDYLSGEKDAAPQLQE

SEQ ID NO: 1017 - DNA, 1488 bp, Zea mays
  misc_feature: Ceres CLONE ID no. 399111
  misc_feature: Ceres CDNA ID no. 40041210
  CDS (297)..(1187): REFERENCED BY SEQ ID NO: 1018
gcatctgatcgatcactctcaatcccctgcagctcccgcccacccacccacaggcgtcgctctcgccggagcagcagcgccgacgcgggcctcggcgcagcgggatctcccaccctccgcccaccgtcgccgcctcgccggccgacccaggcagcgcagcgcaacgatcggtcacaaacaagaacgaccaaggcgcgcccctcaagcggcgtcctcgtcctcgtcctcgtcctcgtcctcgtctccccgaccccgaggcggaggaaaaaagtcaacccggatccatccacgagaagatggggtcgttcaaggggcacgtgctcccgggcacgctgttcctggcggtggggctgtggcgggtgtggtcgtcggcggcgcggcacgccgcggacccgtcgtcgttccgggtgcgcgcgtggagccccgcgccggcgcccgggccggcgcggctgctggagctctacgtcgtggcgggcggcgcgctggcggacatgtgcgtggaggtgctctactccacgcacctccggatattcgccggcggcgaggtcaacccggcgcacctcaacgacctcgagcacggcggcatgctgctcatgttcttcctcttcggcgcgctcgctctggcgtcccagctctggcccaggcacttcccgctgacggacggcgcgctgtgcctggtggcggcgacggcgttcacggcggagctggtgctcttctacttccactccacgacgcacatggggctggaggggtactaccactacctggtggtgctgctggtgggcctgtgcgtggccgccgccgtcctcggcgcgctcctgccggacagcttcccggccgacctggcctcgggcgtcctcgtcgcgctgcaggggctctggttctaccagacggcgctggcgctgtacgggcccatgctgcccgcgggctgcgcccgcgacgccgacgcccacgtcgagtgccgctcgcgcgccgcgcaggagcgcgccgagcagctcgccatctcccagctcttcgccctcgtgctcctcgccttcctctacgcgctcgggtgctacgccgtcgctgccgccaggtacgggcaacccccggagctggccgcggttcgtcataggcacgccgcggccgtcgagctggagtgccggcagggtgatgacgctggcgcgatggaggagtgcgcgatctagtggtgctggctgctctggatggagtctgctggactctgccttttgggtttatttggtgtagtagccgtataggaaattcagagtacgtgcatggtcagaactcagaagtagttatcttcaggctttcgatatcagggagggcaggcagggagtgtacatgttcgggttaactatcaccaaagcttttgggtttcatttcacgagttgcttaacttatgctgtaactgttactcatgtcagaggagcgatacatagaatgaaaggaatatatttgttcgttcgtgcaaaaaaaaaaaaaaaa

SEQ ID NO: 1018 - protein, 296 aa, Zea mays
  misc_feature: Ceres CLONE ID no. 399111
  misc_feature: Ceres CDNA ID no. 40041210
  misc_feature: Homolog of GI Number: 66778899 NR Desc: UvrD/REP helicase
  misc_feature: Homolog of GI Number: 66778264 NR Desc: LigA
  misc_feature: Homolog of GI Number: 66776365 NR Desc: PE
  misc_feature: Homolog of GI Number: 66775827 NR Desc: OsmC
  misc_feature: Homolog of GI Number: 66779654 NR Desc: Acyl
  misc_feature: Homolog of GI Number: 67984658 NR Desc: type II secretion system protein E
  misc_feature: Homolog of GI Number: 66779698 NR Desc: Oxidoreductase
  misc_feature: Homolog of GI Number: 71369907 NR Desc: Phosphoglycerate/bisphosphoglycerate mutase:RNase H
MGSFKGHVLPGTLFLAVGLWRVWSSAARHAADPSSFRVRAWSPAPAPGPARLLELYVVAGGALADMCVEVLYSTHLRIFAGGEVNPAHLNDLEHGGMLLMFFLFGALALASQLWPRHFPLTDGALCLVAATAFTAELVLFYFHSTTHMGLEGYYHYLVVLLVGLCVAAAVLGALLPDSFPADLASGVLVALQGLWFYQTALALYGPMLPAGCARDADAHVECRSRAAQERAEQLAISQLFALVLLAFLYALGCYAVAAARYGQPPELAAVRHRHAAAVELECRQGDDAGAMEECAI

SEQ ID NO: 1019 - DNA, 835 bp, Zea mays
  misc_feature: Ceres CLONE ID no. 399642
  misc_feature: Ceres CDNA ID no. 25446368
  CDS (199)..(606): REFERENCED BY SEQ ID NO: 1020
aaacatgttcttcttccgctgcaagatagcaacacaggcgaggatcccaagacccgagccgtgtaggctgctacagtctcttcctccccgtcaagccgcggcggtcgttgccccggccctcatataatatagtcgccgcctccttgtcaccgccgattcgattaggttgatacagggaggagtcgcgaggggacgtagatgccgacgctgacaaagctgtacagcatgaaggaggctgccctccacaacacgcccgacgactgctgggtcgtcgtcgacggcaagatttatgatgtgaccaagtatttggaggaccatcctgggggcgccgatgttctgctcgaagcaaccggtaaggatgctacagaagaatttgacgatgcagggcacagcaagagtgccaaggagctaatgcaggactacttcattggggagttggactcggacccaactcctgagattcctgagatggaggttttcaggaaggaacaggacacgggatttgccaggaagcttatggacgacgtggtgcaatattggtcgatcccagccgctgtaatcgggatatcagctgttgttgccatattgtatgcgcgaaggaagtgaaagctgatgtccatgtgccgagcttgggcagatgaccccttttagagggatcagcccatggtgcatggatatatcatatatcatatctcctgtccagaaccaaattacattatgatgttcgattcttaaacacttaacggcaaacatttgccagattgatgacattattttgtcgacacgacaatcaattgatggatttattactcttggaacaaaaaaaaaaaaaaaa

SEQ ID NO: 1020 - protein, 135 aa, Zea mays
  misc_feature: Ceres CLONE ID no. 399642
  misc_feature: Ceres CDNA ID no. 25446368
  misc_feature (7)..(81): Pfam Name: Cyt PFAM Desc: Cytochrome b5
  misc_feature: Homolog of GI Number: 30090027 NR Desc: cytochrome b5
  misc_feature: Homolog of GI Number: 30090033 NR Desc: cytochrome B5
  misc_feature: Homolog of GI Number: 12083238 NR Desc: putative cytochrome b5 protein
  misc_feature: Homolog of GI Number: 50844679 NR Desc: cytochrome b5 isoform Cb5
  misc_feature: Homolog of GI Number: 12229735 NR Desc: Cytochrome b5
  misc_feature: Homolog of GI Number: 23197754 NR Desc: putative cytochrome b5
  misc_feature: Homolog of GI Number: 50844677 NR Desc: cytochrome b5 isoform Cb5
  misc_feature: Homolog of GI Number: 50844675 NR Desc: cytochrome b5 isoform Cb5
  misc_feature: Homolog of GI Number: 52353573 NR Desc: cytochrome b5
  misc_feature: Homolog of GI Number: 2647949 NR Desc: cytochrome b5
MPTLTKLYSMKEAALHNTPDDCWVVVDGKIYDVTKYLEDHPGGADVLLEATGKDATEEFDDAGHSKSAKELMQDYFIGELDSDPTPEIPEMEVFRKEQDTGFARKLMDDVVQYWSIPAAVIGISAVVAILYARRK

SEQ ID NO: 1021 - DNA, 963 bp, Zea mays
  misc_feature: Ceres CLONE ID no. 400289
  misc_feature: Ceres CDNA ID no. 25445554
  CDS (64)..(744): REFERENCED BY SEQ ID NO: 1022
atcacccctcgttgtcatctcatatcctgagccagagatcaaagaaaccagagggagcgaggcatggcagcaggcttgcaggtgtttggccagccggcgtctactgatgtctccagggttctgacatgcctgtttgagaagaaactggagttcgatcttgtccgcatcgatacgttcaagacgcatcacaagcttcccgagttcatcaggcttcgggatcctaatgggcaagtgaccttgaagcacggcgacaaaactctcgttgattcgagggacatctgccggtacgtctgcacccagtttccaaacgatggaaacaagagcctttacggatccggcgctctagaacgggcgtcgatagaacagtggcttcaggcggaggctcagaacttcgggccccccagctccgcgctcgtcttccagctggcgttcgtccctcacctcactcacctgggcgttcgtcaggaccctgccgtgatcgccgagaacgaggataagctgaagcaggtccttgatgtctacgacgagatactctcgaggaacgagtacctggctggcgacgagttcaccctggccgacctctcccacctcccgaactcgcactacatcgtgaacaccgagagaggaaggaagctcttcactaacaagaagaacgtggccaagtggtacgagaagctctcgaagcgcgagacgtggaagcaggtcgctaagatgcagaaggaacatcctggtgcgttcgagtgattgcttgtcttggggggagctgcgagtgcaccatcatgaatggcttcatcgtctgtgtcggtctggctctacagttcattttgttttgagtgatccattgtttaattcctcctatcagtgttgtcgtgtgcaccaaaaataatgtgaagcccagctgtgatgtatatgatccttttgctctaatctatcatgacgtataagctaaaaaaaaaaaaaaaa

SEQ ID NO: 1022 - protein, 226 aa, Zea mays
  misc_feature: Ceres CLONE ID no. 400289
  misc_feature: Ceres CDNA ID no. 25445554
  misc_feature (5)..(78): Pfam Name: GST_N PFAM Desc: Glutathione S
  misc_feature (97)..(209): Pfam Name: GST_C PFAM Desc: Glutathione S
  misc_feature: Homolog of GI Number: 11385469 NR Desc: glutathione S
  misc_feature: Homolog of GI Number: 11385475 NR Desc: glutathione S
  misc_feature: Homolog of GI Number: 11385477 NR Desc: glutathione S
  misc_feature: Homolog of GI Number: 50919661 NR Desc: Putative glutathione S
  misc_feature: Homolog of GI Number: 50919663 NR Desc: Putative glutathione S
  misc_feature: Homolog of GI Number: 37536564 NR Desc: putative glutathione S
  misc_feature: Homolog of GI Number: 11177845 NR Desc: putative glutathione S
  misc_feature: Homolog of GI Number: 50919665 NR Desc: Putative glutathione S
  misc_feature: Homolog of GI Number: 11385479 NR Desc: glutathione S
  misc_feature: Homolog of GI Number: 46276327 NR Desc: glutathione S
MAAGLQVFGQPASTDVSRVLTCLFEKKLEFDLVRIDTFKTHHKLPEFIRLRDPNGQVTLKHGDKTLVDSRDICRYVCTQFPNDGNKSLYGSGALERASIEQWLQAEAQNFGPPSSALVFQLAFVPHLTHLGVRQDPAVIAENEDKLKQVLDVYDEILSRNEYLAGDEFTLADLSHLPNSHYIVNTERGRKLFTNKKNVAKWYEKLSKRETWKQVAKMQKEHPGAFE

SEQ ID NO: 1023 - DNA, 1067 bp, Zea mays
  misc_feature: Ceres CLONE ID no. 400441
  misc_feature: Ceres CDNA ID no. 36707096
  CDS (127)..(813): REFERENCED BY SEQ ID NO: 1024
ctagtcctaggctactttctccgagtcgcctgtcatctctctctaccagattagattggggatctcatctcatccgaatccttcatagtattacacaaccagcaaggccgcccgcttgccggcaacatgaagaagatcttcggcgccaagaagaacaaggatccgccgcccacaatccaggacgcaaccgacagaatcaccaagcgcggcgacaccgtcgatgaaaagatcaagaagctcgacgccgagctcgcgcgctacaaggagcagatcaagaagacgcgcccaggccccgctcaggaggccgtcaaggcacgagccatgagggtcctcaagcagcgcaggatgtacgaagggcagcgtgacatgctctacaaccaaacatataaccttgaccaagttgcttttgcggcagagggacttaaagatgctcagcaaactatgactgcgatgaaggctgccaataaagagctcaaagggatgatgaaaactgtcaagctcgaagatattgatagtatgcaagatgagatgatggatcttatggatgtgagcactgaaatacaagaaactcttggcagaagctacaacgtcccagatgacatcgatgaggaagaacttatgggggagctcgatgctttggaagccgacatggacttcgaatcagagtcagtcccatcttacctccaaccagaccaagaacctgaactcagcttacctgctgcaccaactggccatgcagcagtcccagcaaaccagcagcaggaggatgagctaggattgcctacagtgccacaagcatccattcgtacataatcaagcagaatcacgtttcttgcagtcaacgatataaaggaagtcgtattatatatctacagctgggtgtaaaaatgctgttatgtaccgcaccacttcgattttttttgtcactccacttgtggatggtgtaaatctgattgaattgaattagttgggagttgggacataataagatcctcttgtatttgctgtatggttgtacagaaagcagcaaggccagagcagcacgtttatacaaaaaaaaaaaaaaa

SEQ ID NO: 1024 - protein, 228 aa, Zea mays; identical to SEQ ID NO: 654
  misc_feature: Ceres CLONE ID no. 400441
  misc_feature: Ceres CDNA ID no. 36707096
  misc_feature (12)..(204): Pfam Name: SNF7 PFAM Desc: SNF7
  misc_feature: Homolog of GI Number: 55769667 NR Desc: putative CGI
  misc_feature: Homolog of GI Number: 34894040 NR Desc: P0672D08.33
  misc_feature: Homolog of GI Number: 42572355 NR Desc: SNF7 family protein
  misc_feature: Homolog of GI Number: 50736119 NR Desc:  similar to HSPC177
  misc_feature: Homolog of GI Number: 48257063 NR Desc: C14orf123 protein
  misc_feature: Homolog of GI Number: 73971124 NR Desc:  similar to chromatin modifying protein 5 isoform 4
  misc_feature: Homolog of GI Number: 55630930 NR Desc:  similar to Snf7 homologue associated with Alix 3

SEQ ID NO: 1025 - DNA, 674 bp, Zea mays
  misc_feature: Ceres CLONE ID no. 400704
  misc_feature: Ceres CDNA ID no. 29191809
  CDS (250)..(495): REFERENCED BY SEQ ID NO: 1026
cggtccagctccagtcccaccttccagaaactgctcgtacgatctcaagaacgccgcctccccggttcccgcaccccgtcgccgcgccggtagtctgcccgtcgccgtctcctcctccagatctgacccgcctgtcaacgtagtctgccgtgagccgggagtccatcactgtgccggggcgttactcctcaccgctgctgtgttgcctcttctgcggggttgaggtgaagccgaaggtgaagcagcaggatgggtcggaaggccggtgctttgtacataaacccaaagaagtttggtgctatggcgaagccctgcatgccagaaatggtggccttcctcaactgtctggccttaaacaaacagaacgatgacaagtgtatcaagcagaaagatcttttggttgcatgctctcaggctcagaatgggaggccaaagaacgcagccaagaccatcaattaccatctccagcgacttgggcgaggcaagttcctctagtcgctgtgtgagatcatttcctcatccagctttatgccttgtaccgaagtagaattgctgaaatggggcattaatgtgtttgcttagattggacaatggtcagcaaataattttatgtcaaacagtaatgtatgagcagtatattgatactgttttcttctgcaaaaaaaaaaaaaaaa

SEQ ID NO: 1026 - protein, 81 aa, Zea mays
  misc_feature: Ceres CLONE ID no. 400704
  misc_feature: Ceres CDNA ID no. 29191809
MGRKAGALYINPKKFGAMAKPCMPEMVAFLNCLALNKQNDDKCIKQKDLLVACSQAQNGRPKNAAKTINYHLQRLGRGKFL

SEQ ID NO: 1027 - DNA, 769 bp, Zea mays
  misc_feature: Ceres CLONE ID no. 400892
  misc_feature: Ceres CDNA ID no. 40041211
  CDS (80)..(529): REFERENCED BY SEQ ID NO: 1028
aacacagcaagacccaaccttgccacctactgcagcagcaagccgtttcgagagacagctttaggctactgctagcagtatggcttccgctgcgcgcttcctggccgtggccgtggtcgtggcgtgcgcactcctggccagcaacaactgccacgcggcacgccacttggccgacacggccgcggctcccgctgctgctgccatcgtccctggactccccgccgtgccgaccttgccaacggtgcagccagtgccacaggtggcgttgccacccatgtcggccgtgcccgcggtcaccgtacctcagatgacgctgccgcccatgccagcggctcccaaggtggccgtgccgctgccgctgccgctgccgccaatgcccgccatcccgtccgtgctgcccaagctgaccctgccaccgatgcccgctgtcgttccatccgtcgtccccaaggtggccttgccgccgatgccgtcggtcccccccgtcaacgtgcccatgccttttgcggcaccgccttcgtcggcgtagacgctcgcggcgcgctcttgcaggtttgcgttcgtcgtgcccaccatgcacagcaggtggtggtgaccggtgtacgtgagagtgatgccattgtttgtcaatacttttgcacctgtgtgtctcgtgctttcttgttgtgtgtagcgttgtaccgttgtacgtatatcctttgtatttgtaccacattcatttatgctgtatatgtctggtcaaaaaaaaaaaagaaaaaaaaaaaaaaaa

SEQ ID NO: 1028 - protein, 149 aa, Zea mays
  misc_feature: Ceres CLONE ID no. 400892
  misc_feature: Ceres CDNA ID no. 40041211
  misc_feature: Homolog of GI Number: 34899598 NR Desc: early nodulin 75 precursor
  misc_feature: Homolog of GI Number: 50934163 NR Desc: early nodulin 75 precursor
  misc_feature: Homolog of GI Number: 34899594 NR Desc: proline
  misc_feature: Homolog of GI Number: 50946869 NR Desc: early nodulin 75 precursor
  misc_feature: Homolog of GI Number: 34894166 NR Desc: P0439B06.4
  misc_feature: Homolog of GI Number: 55769769 NR Desc: putative extensin
  misc_feature: Homolog of GI Number: 62132409 NR Desc: arabinogalactan protein
  misc_feature: Homolog of GI Number: 37360080 NR Desc: mKIAA0765 protein
  misc_feature: Homolog of GI Number: 25952128 NR Desc: RNA binding motif protein 12
  misc_feature: Homolog of GI Number: 30173327 NR Desc: RNA
MASAARFLAVAVVVACALLASNNCHAARHLADTAAAPAAAAIVPGLPAVPTLPTVQPVPQVALPPMSAVPAVTVPQMTLPPMPAAPKVAVPLPLPLPPMPAIPSVLPKLTLPPMPAVVPSVVPKVALPPMPSVPPVNVPMPFAAPPSSA

SEQ ID NO: 1029 - DNA, 767 bp, Zea mays
  misc_feature: Ceres CLONE ID no. 400957
  misc_feature: Ceres CDNA ID no. 40350959
  CDS (40)..(267): REFERENCED BY SEQ ID NO: 1030
tctcccggcacgcgacacgcgaggtagggcgcagcgtttatggcggcgacaccggcggacgcgaagaccgaggccgccaagatggacctcctcgaggacgacgacgagttcgaagagttcgagatcgaccaagaatgggatgagaaggaagaaggcaatgaagctgtccagcagtgggaggatgattgggatgacgatgatgtgaatgatgatttctcgctgcagctgaggaaagaactggagggaagcaacgcccagaagagctgaattattatttctccagtttacaaatgatccttctatgccccttggctgttcgacggaatacccgtgagaaataatgtgttgtgcacagccccgtccgctatgccgtcgaccctcgctagtggtcgacgccgcgcttcgcgcttggcccattcgacgaaacgccaagccttgtggacagcccatgttactagcctcgattcgtccaggttgttcacttggtattttgtggattaatctatttaagccttggtcgatgttgtgcatgcgtgtatatgtgtaagaaaatgtattggtatggattgaagttcgtggcgaaagaaaaagaagtagaaaagaactcaaatgtttttatatttcgataggaatttatgcgatgtggttggatgtgtgcgatttgtagtttgtacaattatattttttgtcgatgtggtgtacattggtgttggagtgtgtgtgggtataaaatgttttggttatatgtcgcaaaaaaaaaaaaaaaa

SEQ ID NO: 1030 - protein, 75 aa, Zea mays
  misc_feature: Ceres CLONE ID no. 400957
  misc_feature: Ceres CDNA ID no. 40350959
  misc_feature (8)..(70): Pfam Name: DSS1_SEM1 PFAM Desc: DSS1/SEM1 family
MAATPADAKTEAAKMDLLEDDDEFEEFEIDQEWDEKEEGNEAVQQWEDDWDDDDVNDDFSLQLRKELEGSNAQKS

SEQ ID NO: 1031 - DNA, 736 bp, Zea mays
  misc_feature: Ceres CLONE ID no. 400966
  misc_feature: Ceres CDNA ID no. 25446369
  CDS (3)..(734): REFERENCED BY SEQ ID NO: 1032
atcggccatcgcagtttcacagacagcatccattccacagtcaccagagcactagagcagagcaacaactgacaagagcagagcgagatcgtcgtcagcgagctcagcagagagccagatacgagagagaggatggcggacatcgcgttgctggtggcggagcagttcgagaagacggcaaggcgaggcgcccccggcggggacagcggcagcggcagcgggaccggcggcgagacgaggaacttcggggccgtggccaaggtgtggagctcgtgggtggagtccgcctccgccgccgcgtccggggtcagattcaccgtcgcggtgcagctggagcccaagaccgggctcgcgctggccgccgccgacggcctcttctccgcctagcttcctgcctgcatgcttccatgtcttcctcctgcaccccgtactatgcttgcgcgacctgtacatttcgttcgtcgatgcgcctgcgctctaatccggaacaaagtactattcatatttgctccagtctccattcatggatatgcatatgtctgctcgactggtttccttttttttttttttgggtgttcgactgctccagtctccagtaccagctgaattgtttttataggaaccagcaggctattcacgctgtcttatgggccggccgtgtctccagtttccgtttccgagcaggccggcagcccacaggcccaccaccttcgcgctgtcaaaaaaaaaaaaaaaa

SEQ ID NO: 1032 - protein, 84 aa, Zea mays
  misc_feature: Ceres CLONE ID no. 400966
  misc_feature: Ceres CDNA ID no. 25446369
  misc_feature: Homolog of GI Number: 7638400 NR Desc: OSE3
  misc_feature: Homolog of GI Number: 7249267 NR Desc: leucine zipper protein
  misc_feature: Homolog of GI Number: 7489465 NR Desc: DNA binding protein
MADIALLVAEQFEKTARRGAPGGDSGSGSGTGGETRNFGAVAKVWSSWVESASAAASGVRFTVAVQLEPKTGLALAAADGLFSA

SEQ ID NO: 1033 - DNA, 690 bp, Zea mays
  misc_feature: Ceres CLONE ID no. 400986
  misc_feature: Ceres CDNA ID no. 35388092
  CDS (93)..(431): REFERENCED BY SEQ ID NO: 1034
gtggccgtctcgcttcgccccttcctctctccttcggttctcctccagatctctaagaccaggagcccggtgaatccacctcgcccgcagcgatgtcggcgagcagcacccccgtagacgcctcgggggagccgatcccgacttcgtcggtgctgatggcggcgtcgaagcacatcgcggtccggtgccgcccggagaacgttgccttcctcaactgcaagaagaaggaccctaaccccgagaagtgcctcgagaagggccgccaggtcacacgctgcgtcctcagcctgttaaagaacttcaccaaaagtgtcccaaggaaatggatgaatatgctggttgcatgtattactacaccaacgaattcgacttctgccgtaaggagcagcaagcttttgaggaagcctgccccatttccgagtagatcttgagagttttacttgcagtggtcttcgcaaataagggaaaaaaggcagaaaaacagcgttcatgatatcccatgtttgttgtcctcatggaatttgtactggtgaatgaatagcacagcctggagctattcaccccatttgccgcccctcaggattttagagcaggcgaatgctctaaaatggtgatgatggtgttttctctttatggttcacaaattacatttggcggactcgctgttatttcaaaaaaaaaaaaaaaaaa

SEQ ID NO: 1034 - protein, 112 aa, Zea mays
  misc_feature: Ceres CLONE ID no. 400986
  misc_feature: Ceres CDNA ID no. 35388092
  misc_feature: Homolog of GI Number: 21536569 NR Desc: NADH:ubiquinone oxidoreductase
MSASSTPVDASGEPIPTSSVLMAASKHIAVRCRPENVAFLNCKKKDPNPEKCLEKGRQVTRCVLSLLKNFTKSVPRKWMNMLVACITTPTNSTSAVRSSKLLRKPAPFPSRS

SEQ ID NO: 1035 - DNA, 547 bp, Zea mays
  misc_feature: Ceres CLONE ID no. 401195
  misc_feature: Ceres CDNA ID no. 25446069
  CDS (133)..(360): REFERENCED BY SEQ ID NO: 1036
accaattgattttcttcacccgtccacctcgtcttgcgctcctctgtctcggcgacgactgtgctaccgccgccgccgccgcaagacttcgtcgggcactttgccggcgacgatttcccaccagaggaggtgatggcgaggagtgacagctgcctggcgcgcgtgggtgccggaattgctatcggtggcgcggtcggcggagccgtcggtgcttgctatggaacttttgaggcgttcagatacaagatccctggattgctaaagatcagatacattgggcaaaccaccgttggcagcgctgcgatttttgggcttttcttgggggctgggagcttgattcactgtggaaaatcctactagtttgtttccctttttttttctgaagtctgaacacacctttgtcgatgggcttcagtgaaaactattcaatgcctgtttcatgtaacagctaatagctcagggttggaaaagaacaatcaagttatgtcctagttttggtgtggatggaaatagaatcaacgttcatctgctaaaaaaaaaaaaaaaa

SEQ ID NO: 1036 - protein, 75 aa, Zea mays
  misc_feature: Ceres CLONE ID no. 401195
  misc_feature: Ceres CDNA ID no. 25446069
MARSDSCLARVGAGIAIGGAVGGAVGACYGTFEAFRYKIPGLLKIRYIGQTTVGSAAIFGLFLGAGSLIHCGKSY

SEQ ID NO: 1037 - DNA, 690 bp, Zea mays
  misc_feature: Ceres CLONE ID no. 402921
  misc_feature: Ceres CDNA ID no. 40350960
  CDS (1)..(273): REFERENCED BY SEQ ID NO: 1038
aaccctagcttctcatgtctccgcgcctccacctccagtctccagccccaaggagtggcggcggcgcatcgtcagttagcttcgtcaccgttagagcccgaaggactctccctcggccctcgccgcctcgccggctcactgtcattggctgcatccgaagccggcagctcacaacgcctcttgtcaaacttcgacgactgctatctatctggtactagagttttcttcccaaagaccaatcctcttgtgaaacttcgagtctttgatgaataatgtctaatgcgttgctgcctctgcctgagtgcctgctgtagtgctgctcatcgccttgttcgttgccgttgccggcgtgccccacggccacgcgccccacttcccggagtcctgagtgcctgttgaagttgcgtgtttgcgtagcgctcaaaatctgaaaggtcctagctcgcaatcgcaacggagtcttgccgatgaacaggatgtgttgactgctgttattgtgcttcaaacttcagagaatttgctgctgtgcagcctgctatgtcttaccgaagacttatgtccttgttaactctgtgaagactatgttgttagctcgtcagtctatgtctaattgtcaatcatacacttgtatattgtgaactgttctatttaaatttgtattattgcttgtgtcgaaaaaaaaaaaaaaaa

SEQ ID NO: 1038 - protein, 67 aa, Zea mays
  misc_feature: Ceres CLONE ID no. 402921
  misc_feature: Ceres CDNA ID no. 40350960
MSPRLHLQSPAPRSGGGASSVSFVTVRARRTLPRPSPPRRLTVIGCIRSRQLTTPLVKLRRLLSIWY

SEQ ID NO: 1039 - DNA, 514 bp, Zea mays
  misc_feature: Ceres CLONE ID no. 403437
  misc_feature: Ceres CDNA ID no. 25446370
  CDS (69)..(404): REFERENCED BY SEQ ID NO: 1040
atcgtcgtccaacgaacggcggcgcgagtgggcgtgcagaagccgagagaaggcactcggcagggcagatggaggggctgacgtccagtgagatcgccggattcgtggtgggtgccctgctgctcggcgccaccatcgctgcccccaaggtcgacggcttcatcgcctcctcccagagaaggtcactagggatgtgtaagaggtgcggtgaccttcggattgtagcatgctcgcagtgcaagggaacaggatcagctcggagcggagggatgctcagtttgggcgtgctggatgacctctacgagtctcttggagccgaagccaagactgagaatctggttccctgcacaaagtgcagttcgagaggccgtctcatgtgtccagaatgctccaaggtcgcatgaccctggcctggagccgtgtactcggtcagaacacatgtacggctctgacaaacacaaatcactgctgtcactgtttgtgtttgaacattatcaaaaaaaaaaaaaaaaaa

SEQ ID NO: 1040 - protein, 111 aa, Zea mays
  misc_feature: Ceres CLONE ID no. 403437
  misc_feature: Ceres CDNA ID no. 25446370
MEGLTSSEIAGFVVGALLLGATIAAPKVDGFIASSQRRSLGMCKRCGDLRIVACSQCKGTGSARSGGMLSLGVLDDLYESLGAEAKTENLVPCTKCSSRGRLMCPECSKVA

SEQ ID NO: 1041 - DNA, 705 bp, Zea mays
  misc_feature: Ceres CLONE ID no. 403545
  misc_feature: Ceres CDNA ID no. 25446371
  CDS (193)..(537): REFERENCED BY SEQ ID NO: 1042
tatgatgatactacggctcagcccaacgatttccttttgcaaaccctgctccaactccgattcgtcactccaccctcgtcgcgccgccgccgccgccgccgcctgccgcgtccccggccagcctcgcggcccggtggtctgctagccacaggtcgggcgcctcctcctcttcttgcggagagaccaggagtcatggtgatccctccaccagcaagggcagctagagtcacccgtttcctcaagccctacctattgaggatgcatttctcaaacaagtatgtatctgctcaggtcgtccacaccccaacagcaactgttgcatgttctgcaagctcgcaggagaagctgttgagaccaaacatggagtcgacccgtgacgtcgcagcagctgcgaagattggaaagttgctcggcgagcgcctgctcctcaagggaatacctgcagtgtccatccacatgaagagagaacaaaagtaccatgggaaagtgaaggccgttatagattcagtcagagaagctggagtcaagctgttgtgattgcgatgttgaaaacattggacttagcatttgtgcaatggctgagctgtaatctttaagtgtttatcaatgcaaaatggctggacgttgctgttttgaaaaccaatgtactgtacccccttgatgtcaaaattttagcacaatttgtggtcaaaaaaaaaaaaaaaa

SEQ ID NO: 1042 - protein, 114 aa, Zea mays
  misc_feature: Ceres CLONE ID no. 403545
  misc_feature: Ceres CDNA ID no. 25446371
  misc_feature (24)..(113): Pfam Name: Ribosomal_L18p PFAM Desc: Ribosomal L18p/L5e family
  misc_feature: Homolog of GI Number: 50917923 NR Desc: putative ribosomal protein L18
  misc_feature: Homolog of GI Number: 27904926 NR Desc: 50S ribosomal protein L18
  misc_feature: Homolog of GI Number: 68548618 NR Desc: Ribosomal protein L18
  misc_feature: Homolog of GI Number: 1208546 NR Desc: ribosomal protein L18
  misc_feature: Homolog of GI Number: 69954421 NR Desc: Ribosomal protein L18
  misc_feature: Homolog of GI Number: 27360316 NR Desc: Ribosomal protein L18
  misc_feature: Homolog of GI Number: 28897047 NR Desc: ribosomal protein L18
  misc_feature: Homolog of GI Number: 32475074 NR Desc: 50S ribosomal protein L18
MVIPPPARAARVTRFLKPYLLRMHFSNKYVSAQVVHTPTATVACSASSQEKLLRPNMESTRDVAAAAKIGKLLGERLLLKGIPAVSIHMKREQKYHGKVKAVIDSVREAGVKLL

SEQ ID NO: 1043 - DNA, 1123 bp, Zea mays
  misc_feature: Ceres CLONE ID no. 403637
  misc_feature: Ceres CDNA ID no. 40041212
  CDS (54)..(1046): REFERENCED BY SEQ ID NO: 1044
atttggcaactcaatgcccagctctcatcaggagctcaacaaagtctgttaggatgctgagagcaacgcacctcgctttcaggagggacaagggtacggctgcgggagccgccttgcgtggcgtcgtcggtggtttctcgacggcgtcagactcccagtcccaaaggctagccggcaaggtcgccgtcatcaccggcgcggccagcggcatcggcagggcgacggccgccgagttcgtccggaacggcgccaaggtcatcctcgcggacgtgcaggacggcgccggccgcgccgtggccgccgagctcggcccggccgcggcctacgcccgctgcgacgtcacggacgaggcccagatcgccgcggcggtggacctcgccgtggcgcgccacggccgcctggacgtgctgtacagcaacgcgggcgcgccgggcgcctcggcgcccgcgccgctgccgtcgctcgacctcgccgacttcgaccgcgtcatggcggtcaacgcgcggtccgcggtggcgtgcctcaagcacgccgcgcgcgtcatggtgccccagggcgccggctgcgtcctgtacacggggagcactacgggtatgctcggcggcctcgccgcgctgccctacagcctgtccaaggccacggtcatctccgtggtgcgggccgccgcggacgagctggcgcggtcgggggtgcgcgtcaacgccatctcgccgcacgccatcgccacgccgctgctgctccgctccctcgccaggctgcacccaggcgtccccgacgagcagctgaagcgcctggtggagactggcatgagcgacctccgtggtgcggtgctgcaggtccaggacgtcgcaagggcggccgtctacctggcctccgacgaggccaagttaccgggcataatctcgtggttgacggtgggttcacggccagcaagcggatcggcacgccggcggcaagctcaaccgctagctgaccattctcctggacaggtcctgcgaataattataaatcaatgtacttggttgatcgtgagttgtgagttgtgaccggattgatatgaaacctagcattctaaagtatcaaccagcgttacattatcagtactaaaaaaaaaaaaaaaaaa

SEQ ID NO: 1044 - protein, 330 aa, Zea mays
  misc_feature: Ceres CLONE ID no. 403637
  misc_feature: Ceres CDNA ID no. 40041212
  misc_feature (44)..(289): Pfam Name: Epimerase PFAM Desc: NAD dependent epimerase/dehydratase family
  misc_feature: Homolog of GI Number: 50938889 NR Desc: putative short
  misc_feature: Homolog of GI Number: 34899230 NR Desc: putative sex determination protein tasselseed 2
  misc_feature: Homolog of GI Number: 34899216 NR Desc: putative sex determination protein tasselseed 2
  misc_feature: Homolog of GI Number: 34899220 NR Desc: putative sex determination protein tasselseed 2
  misc_feature: Homolog of GI Number: 34899218 NR Desc: putative sex determination protein tasselseed 2
  misc_feature: Homolog of GI Number: 34899228 NR Desc: putative sex determination protein tasselseed 2
  misc_feature: Homolog of GI Number: 50508362 NR Desc: putative sex determination protein tasselseed 2
  misc_feature: Homolog of GI Number: 50939805 NR Desc: putative sex determination protein tasselseed 2
  misc_feature: Homolog of GI Number: 50939815 NR Desc: putative sex determination protein tasselseed 2
  misc_feature: Homolog of GI Number: 50939803 NR Desc: putative sex determination protein tasselseed 2
  misc_feature: Useful for decreasing plant size
  misc_feature: Useful for delaying flowering time
  misc_feature: Useful for increasing chlorophyll and photosynthetic capacity
  misc_feature: Useful for making bigger plants
  misc_feature: Useful for making larger plants
  misc_feature: Useful for making plants with increased biomass and foliage
  misc_feature: Useful for making plants with increased biomass and foliage
  misc_feature: Useful for making plants with increased biomass and foliage
  misc_feature: Useful for sterility
  misc_feature: Utility: ABA Useful for making plants with enhanced tolerance to drought
MLRATHLAFRRDKGTAAGAALRGVVGGFSTASDSQSQRLAGKVAVITGAASGIGRATAAEFVRNGAKVILADVQDGAGRAVAAELGPAAAYARCDVTDEAQIAAAVDLAVARHGRLDVLYSNAGAPGASAPAPLPSLDLADFDRVMAVNARSAVACLKHAARVMVPQGAGCVLYTGSTTGMLGGLAALPYSLSKATVISVVRAAADELARSGVRVNAISPHAIATPLLLRSLARLHPGVPDEQLKRLVETGMSDLRGAVLQVQDVARAAVYLASDEAKLPGIISWLTVGSRPASGSARRRQAQPLADHSPGQVLRIIINQCTWLIVSCEL

SEQ ID NO: 1045 - DNA, 2054 bp, Zea mays
  misc_feature: Ceres CLONE ID no. 403849
  misc_feature: Ceres CDNA ID no. 40041213
  CDS (192)..(1274): REFERENCED BY SEQ ID NO: 1046
aacccgacggagcactccccgctccactgcgcgccccaagacctggatcccctgcgctgcctttctcttctgcatcattcgcaatctcaggtcacggaactctatccactcgtcagcaccaagctagctatcctcgtgcccttcggacgagaggcgcatgtgactcggaggaggagggaggagatcaggagatggaattcaagaactgcgggtcgtcgtcgcagccccggccggcggtggtagtgggcgaggaggcggcgttggcgagacagggatcagtctactcgttgacgttcgacgaattccagagcgcgctcggcggggccgccaccggcggtggcggtggcggcagcatccccaaggatttcggttccatgaacatggacgaactgctccggagcatctggaccgcggaggagacccaggccatggcctccgcttctggcgctggagcgggtgcggggatgccgccaacgtcgctgcagcggcaagggtcgtcgctcacactgccccgcacgctcagcaccaagacggtcgacgaggtgtggcgcaatctcgtgcgcgacgagccgctgcagggggcggacggcggcgggcaccagcagcaccaccgccagtcgacgctcggggagatgactctggaggagttcttggtcagagctggcgtggtcagggagaaccccgctccggctcctccagcaccaccacccatgatcccgccgcggccggtacctgtcgcccctaaaagctccgcctttttcgggaatttaccgggtgccgacgccgacaccgccgtagctgcggcatcgctggggtttgcaccgttcggcatgggggatctggcccaaataccgcccagggcagcaggcatgggaggcggcgccatggctgtgcaagcagcggtgaaccagcttgattctggcgggaaggggtacagcgacctgtcgtcgccgacggagccgctcccgttttcgtttgaggggatgattcgagggaggaggcatgggggcggagtagagaaagtggtggagaggcggcagaggaggatgatcaagaacagggagtccgccgccaggtcccgagcgcgcaaacaggcttatactatggagttagaagctgaagttcagaaactcaaggagcagaatcaggaactggagaggaaacaggcagagattatggaaatgcagaagaacgagctaccagaaatgttgaaggatccattcggacggaagaagcgtctgtgcttgcgaagaacattgactgggccttggtgatgactatctgaaacagcagacgagtcgctgcatacctgcagtggtgcctgggatctgtacacaatttgtctcctatagactagcgatggacgtaacgtagtggggatgattgtactgttaccgcttatagtggagtcgggaaactgacacatgtagattatgttagtagagaaccaaatggagtgaagccggccgcgcaagactcggcggcttcggccatcctccagagcttgtgtagagttgcctagctttgcatcttgccggaagcagcacatcgtgtagagattggacggttttaaaggatcggtggctgggtgtaagtaggttggtgggattacaagcatgggcatggcgacgttcaggatgcttctggaaggatgaagcagaaaaaggcctagtctcactcacatctctacatctctacagggtgcgtttaaccttgaagattcttttagtggcgatcgtacaagttaattggagatgctaattgtaatggatgaattccacaccgattaatttgcacaaaatgtggatggtataattcagcacatcgttcacttcgtgtctcagttgaactttactgcaaagcagctaaccaagactaacagcatagaaaaattgtaagcatcacgcaaagacttatggaagcaggtttgtctaggaacacacaaataagtttaggttttgaggttttataaaaaaacatgtaaaaagctaatatatttacgagttccctgataaattaacctgtctgtgtcctatcgaaaaaaaaaaaaaaaa

SEQ ID NO: 1046 - protein, 360 aa, Zea mays
  misc_feature: Ceres CLONE ID no. 403849
  misc_feature: Ceres CDNA ID no. 40041213
  misc_feature (277)..(334): Pfam Name: bZIP_2 PFAM Desc: Basic region leucine zipper
  misc_feature: Homolog of GI Number: 51536298 NR Desc: putative bZIP transcription factor ABI5
  misc_feature: Homolog of GI Number: 62898533 NR Desc: bZIP transcription factor
  misc_feature: Homolog of GI Number: 27469352 NR Desc: bZIP transcription factor ABI5
  misc_feature: Homolog of GI Number: 50946743 NR Desc: TRAB1
  misc_feature: Homolog of GI Number: 33087069 NR Desc: bZIP transcription factor
  misc_feature: Homolog of GI Number: 20259043 NR Desc: putative abscisic acid responsive elements
  misc_feature: Homolog of GI Number: 50913109 NR Desc: putative bZIP transcription factor ABI5
  misc_feature: Homolog of GI Number: 13775111 NR Desc: bZIP transcription factor 6
  misc_feature: Homolog of GI Number: 42561991 NR Desc: AREB
  misc_feature: Homolog of GI Number: 6739278 NR Desc: abscisic acid responsive elements
MEFKNCGSSSQPRPAVVVGEEAALARQGSVYSLTFDEFQSALGGAATGGGGGGSIPKDFGSMNMDELLRSIWTAEETQAMASASGAGAGAGMPPTSLQRQGSSLTLPRTLSTKTVDEVWRNLVRDEPLQGADGGGHQQHHRQSTLGEMTLEEFLVRAGVVRENPAPAPPAPPPMIPPRPVPVAPKSSAFFGNLPGADADTAVAAASLGFAPFGMGDLAQIPPRAAGMGGGAMAVQAAVNQLDSGGKGYSDLSSPTEPLPFSFEGMIRGRRHGGGVEKVVERRQRRMIKNRESAARSRARKQAYTMELEAEVQKLKEQNQELERKQAEIMEMQKNELPEMLKDPFGRKKRLCLRRTLTGPW

SEQ ID NO: 1047 - DNA, 931 bp, Zea mays
  misc_feature: Ceres CLONE ID no. 403976
  misc_feature: Ceres CDNA ID no. 25446711
  CDS (73)..(570): REFERENCED BY SEQ ID NO: 1048
acaccacagagcctgaaatcggctacacacacgcgaattgaaccagccgctagccccgcgccttttgcggccatgatcaagctgagctactccaagaggctcttcaagaggatctcctccacgtccaataagcagcaggcggccgcttccggcggcggcggtgacaatggcagcgcggccgcggccggcggaggaggcgcccgggagatcgagtgggaggtgcggccgggagggatgctggtgcagaagagggacgggaggggcggccgggagacggtcgccgtcagggtttccaccggcttctcctggcatgatgtgtccatcggagccacctccacttttggggagctgaaggtgatgctgtccatggtaacagggctagagccacgggagcagaggctgctgttcaggggcaaagagaggaacgacaccgaccacctccacatggttggggtgagggacaaggacaaggtcctcctactagaggacccggccctcaaggacatgaagctccgggctctgtcggctcgagtcgtgccgaggccgtgccagtcttttatccaagtgtaacttcccgctaccatgctaactgttaccactatacttgttagttgtgtaatatcctactgctgttttagtcccaccaccaaggtacttttagtttctggaaatcctttttaaatatccggaatccgaggggtttgctctctaaaccactctgtctttagtgccactccatggaagggtccctgaagacgagagtcagccatggtggctgtgatgtgatttggagcctagtgtttgggatgttttttatggtccctactactactaccgtggtcacttctcattcctacctactacatgcatgggtcatgagtaggcatgagtgataaaaattgtatgtacgtacgcaaaaaaaaaaaaaaaa

SEQ ID NO: 1048 - protein, 165 aa, Zea mays
  misc_feature: Ceres CLONE ID no. 403976
  misc_feature: Ceres CDNA ID no. 25446711
  misc_feature (67)..(141): Pfam Name: ubiquitin PFAM Desc: Ubiquitin family
  misc_feature: Homolog of GI Number: 50910119 NR Desc: ubiquitin
  misc_feature: Homolog of GI Number: 50925249 NR Desc: OSJNBb0011N17.22
  misc_feature: Homolog of GI Number: 50902288 NR Desc: P0497A05.5
  misc_feature: Homolog of GI Number: 56785103 NR Desc: ubiquitin
  misc_feature: Homolog of GI Number: 56785178 NR Desc: BAG domain containing protein
  misc_feature: Homolog of GI Number: 56797970 NR Desc: BCL
  misc_feature: Homolog of GI Number: 34907972 NR Desc: P0446G04.18
  misc_feature: Homolog of GI Number: 34898024 NR Desc: BAG domain containing protein
  misc_feature: Homolog of GI Number: 50948201 NR Desc: putative BAG domain containing protein
MIKLSYSKRLFKRISSTSNKQQAAASGGGGDNGSAAAAGGGGAREIEWEVRPGGMLVQKRDGRGGRETVAVRVSTGFSWHDVSIGATSTFGELKVMLSMVTGLEPREQRLLFRGKERNDTDHLHMVGVRDKDKVLLLEDPALKDMKLRALSARVVPRPCQSFIQV

SEQ ID NO: 1049 - DNA, 868 bp, Zea mays
  misc_feature: Ceres CLONE ID no. 404237
  misc_feature: Ceres CDNA ID no. 25446372
  CDS (100)..(549): REFERENCED BY SEQ ID NO: 1050
tactcattccttcaccctctcccatctctcgcctcgcctccccacgcgagcgagcccaacacgcaaacggaacgcttccgcgcccctccgccttatccgatggcgtccctcaccaccaccgcccccgcggcttcgtccatatctccccacgccggatcgaagcggccgctcctcgcgggcgacgacgcgccctggcgggccaccgcggccacctccgcggggcaggggatccgacccgtcccgcgcatcaaccacgcctccgtcctccgcgtttccacgcaggaagactccgccgcctacgccctcgccatcatgaagcatccggatccgattggcgaggggctggctatggaggcgttcgcggaggcagccgggccggagtgcatcgtgcccggacagcaagcgcctctaaggcttatggggctcaaggtctggcccgttgatatagatatgaagttcctagagccatttggacgggaactacattcaatgaaaaaattcatggacaaatcgtgcagtgttatggactcatctatggcaaacaagtaggcacatggcacatcagttccgcccaatacagctgttgttgtatccacctgcttcctgaagttacaagacctgaaaaatagaagagacattggagagaagccacattcttttgcgtatcttgctcaccgtcacctgacgaacaaaatatgacatcgggagtgcagtaacgattagtgagtggtcctgtattgagcctgggtgcagcctctgccagtataagtgctctacgtgttatacatttttttatgtccatgaaacattgatccactgagaaaatatatcttcaggtgccaatctacgactaaaaaaaaaaaaaaaa

SEQ ID NO: 1050 - protein, 149 aa, Zea mays
  misc_feature: Ceres CLONE ID no. 404237
  misc_feature: Ceres CDNA ID no. 25446372
MASLTTTAPAASSISPHAGSKRPLLAGDDAPWRATAATSAGQGIRPVPRINHASVLRVSTQEDSAAYALAIMKHPDPIGEGLAMEAFAEAAGPECIVPGQQAPLRLMGLKVWPVDIDMKFLEPFGRELHSMKKFMDKSCSVMDSSMANK

SEQ ID NO: 1051 - DNA, 630 bp, Zea mays
  misc_feature: Ceres CLONE ID no. 406900
  misc_feature: Ceres CDNA ID no. 25446373
  CDS (1)..(438): REFERENCED BY SEQ ID NO: 1052
gcaccagaccccatagctgacgacaccaccgtggtcgacaaaataaaaaggagagagagagatggccctgtcgtctcgccgtatggccgccgcaccattcttcgtcgtcgtccttctcgtcctcgtggcggcagagaggacgatgggcagggtggtggtggaagagacgctctgcctgtcgcagagccatgccttcaaaggcgtgtgcctcagcaacaccaactgcgacaacgtatgcaagacggagaagttcacaggcggcgagtgcaagatggacggcgtcatgcgcaagtgctactgcaagaaggtctgctagggcggcagcaagccccagccgtacggctggttgatccggttgcactgcacagctcgtttgggcacgcggtcatgttccggcttctcggctttattttatttcttctttgttataataaatagactctgttagtcacgtgcgttttagtctgggttgtacgttattaattctctagtgtattgtatttgcgcaacgccctgtacttaacgtagccatgtattcgcgttgcgtggtggagaggccaacgatttaccttgattgtacaaaaaaattatatatatttgtgatggttatctttaaaaaaaaaaaaaaaa

SEQ ID NO: 1052 - protein, 84 aa, Zea mays
  misc_feature: Ceres CLONE ID no. 406900
  misc_feature: Ceres CDNA ID no. 25446373
  misc_feature (36)..(84): Pfam Name: Gamma PFAM Desc: Gamma
  misc_feature: Homolog of GI Number: 22324363 NR Desc: defensin
  misc_feature: Homolog of GI Number: 50910773 NR Desc: putative defensin
  misc_feature: Homolog of GI Number: 50926554 NR Desc: OSJNBa0019D11.21
  misc_feature: Homolog of GI Number: 533692 NR Desc: protease inhibitor
  misc_feature: Homolog of GI Number: 8099184 NR Desc: defensin SD2
  misc_feature: Homolog of GI Number: 51493743 NR Desc: defensin precursor
  misc_feature: Homolog of GI Number: 17066707 NR Desc: defensin protein precursor
  misc_feature: Homolog of GI Number: 24306004 NR Desc: defensin EGAD1
  misc_feature: Homolog of GI Number: 16225423 NR Desc: putative gamma
  misc_feature: Homolog of GI Number: 28416725 NR Desc: At2g02120
MALSSRRMAAAPFFVVVLLVLVAAERTMGRVVVEETLCLSQSHAFKGVCLSNTNCDNVCKTEKFTGGECKMDGVMRKCYCKKVC

SEQ ID NO: 1053 - DNA, 533 bp, Zea mays
  misc_feature: Ceres CLONE ID no. 407538
  misc_feature: Ceres CDNA ID no. 25445874
  CDS (69)..(431): REFERENCED BY SEQ ID NO: 1054
ctcgtctgacttcgtttcggacctccccagtttttcccctccggccgccgcacggagaagcagaagccatgcaggccgccgccgcgcgcgcccgccgcctcctcgccttaccggcggcctcggggatccccggaatactctccggaccgatcccagggcgcgcatcatacgccgagggcgttctcctttaccgtctcaatggcgctcccgcttcgccgtcttctccgcagcataccaggggcttctcctcctcctgcttcgcctcccgatcacactgtaacctcccatcgcctaccatagcttctcaatggttgaatgagaaatcagtacactatcacatgacgacagcacacttctcaacggaagcaagtgacatggaccaccctacagaagctatggtgtgcaaggggttccagtgtgtgtccgggtgatggtgatcggttgtgtacagtagtacagtgtttgtggagagctgaggatggattcaatgcaaattgcctatttcgattgattgaccaaaaaaaaaaaaaaaa

SEQ ID NO: 1054 - protein, 120 aa, Zea mays
  misc_feature: Ceres CLONE ID no. 407538
  misc_feature: Ceres CDNA ID no. 25445874
  misc_feature: Homolog of GI Number: 50939827 NR Desc: putative adenyl cyclase
MQAAAARARRLLALPAASGIPGILSGPIPGRASYAEGVLLYRLNGAPASPSSPQHTRGFSSSCFASRSHCNLPSPTIASQWLNEKSVHYHMTTAHFSTEASDMDHPTEAMVCKGFQCVSG

SEQ ID NO: 1055 - DNA, 2053 bp, Zea mays
  misc_feature: Ceres CLONE ID no. 407698
  misc_feature: Ceres CDNA ID no. 40041214
  CDS (85)..(1683): REFERENCED BY SEQ ID NO: 1056
aaagccacgggccgacagactggggtcgtggcgggagagagagatcgccctctcgctccgcgctcactcgctcggccgccggcgatgctgaggaccaagaccccgcggccgcgcggcggcaaggcgcgccgcgcgcccggggttgcctccgcggtcaagccagccaaggccgacgggaggtcgccgtcgggagagctctcgctgcagctggagcacgtctccctcacctccttgctctccgaccgccgccccgccgccgggctcacgcgcttcgaggtgctcctagaggaagaggagtcgggctgctaccgcgccgacccgaccccgcagccgccgcgacttcctgagccacaatctatgcccccgccgccgccgccgccgacgacgacgacgatctcgcaggcgtcgccggtggacgcagacgagaccatggaggagaagaattgctgcatcctcagccaggatttcttctgcaccccggactacatcacgccggagatgccgcaggtggccaacgagttcgacgacgacgataaggagaacatcccctgcccaaaatctccggagaagtcagcgaaccctcgtagcaagcggtacagaaccgattgttctcccaaagctcgggaggttacggacttctctttcgaccatcagattacgccggttctgtttgacagcttgactcgagatgattcggaagaagagcagccgaagcagcctgcgctggaaaagaggggtggttatgtctcccagtcagcagtggctctgcgttgccgggtgatgcctccgccatgcgtcaagaatccatacctcaataccgatccatgcatagatgctgctgtttacggtgggaggcagtgcaactcagcagtattctctccttcaattggtggtaatggtctttcacgctatcgaactgatttccatgaaatagagaaaattggttatggcaacttcagtgttgtgttcaaagttctgaataggatagacgggtgcttgtatgctgttaaacggagcatcaagcaattgcataatgatatggaaaggaggcaagcagtgaaagaagtccaagctatggcagccttaggttctcacgagaacatagttcgatatttcacctcttggtttgagaatgagcaactttatattcagatggaactctgcgaccgctctctatctatgaatcggaaccagccagtgaagcgtggggaagccctagaactgttgtatcagatctgcaaaggcttggatttcatgcacgaacgtggcatagcacaccttgatgtgaagcctgataacatatatgtcagaaatggtatttataagctcggggattttggctgtgctacacttgttaaccggagtctagcaattgaagatggagattcacgctatatgcctccggaaatgctgaatgataagtatgagcatcttgacaaggttgatatcttttctcttggggcagccgtctatgagctaataagaggcaccccgcttcctgagtctggatctcactttacaagcattagagagggtaagatcgcattgcttccagggtgcccgatgcagtttcaaagtttaatcaagtctatgatggaccctgatccggtgaggcggccttcagcaaaggagatcctgagacacccttcctttgacaagctccacaaggcctcatcgaagtagaagtgctgccgcgcccccatcagatcagagcagccggcaaagggaattccgcagctgcgtcacattcaccatcagctgctcccaatttttgtgtatctatctatctatatgcgtgtgccatgtgccctgttctgatactgtagaagatggttggaaacgaagcagggatctgattttaactccaggaactggagcacgagcagcgtctgtaaaggactaaaaggctgtggctgctgttgtgttaaggttgtgcctctcttttggtttctgatgcacgcttggaaccatcaaccctgtgcctttttttggggtgcttgttatcagttgcatttgggcagcgaatgctaatttggcaaaaaaaaaaaaaaaa

SEQ ID NO: 1056 - protein, 532 aa, Zea mays
  misc_feature: Ceres CLONE ID no. 407698
  misc_feature: Ceres CDNA ID no. 40041214
  misc_feature (490)..(523): Pfam Name: Pkinase_Tyr PFAM Desc: Protein tyrosine kinase
  misc_feature: Homolog of GI Number: 5821717 NR Desc: Wee1
  misc_feature: Homolog of GI Number: 50905103 NR Desc: putative tyrosine kinase Wee1
  misc_feature: Homolog of GI Number: 55859438 NR Desc: protein kinase WEE1
  misc_feature: Homolog of GI Number: 42362341 NR Desc: wee1
  misc_feature: Homolog of GI Number: 6056405 NR Desc: Similar to Wee1 protein kinase
  misc_feature: Homolog of GI Number: 22761819 NR Desc: Wee1 kinase
  misc_feature: Homolog of GI Number: 21070391 NR Desc: putative cell cycle regulatory protein kinase  Wee1
  misc_feature: Homolog of GI Number: 82775180 NR Desc: putative cell cycle protein
  misc_feature: Homolog of GI Number: 56712933 NR Desc: protein kinase WEE1
  misc_feature: Homolog of GI Number: 42733902 NR Desc: similar to Macaca fascicularis
MLRTKTPRPRGGKARRAPGVASAVKPAKADGRSPSGELSLQLEHVSLTSLLSDRRPAAGLTRFEVLLEEEESGCYRADPTPQPPRLPEPQSMPPPPPPPTTTTISQASPVDADETMEEKNCCILSQDFFCTPDYITPEMPQVANEFDDDDKENIPCPKSPEKSANPRSKRYRTDCSPKAREVTDFSFDHQITPVLFDSLTRDDSEEEQPKQPALEKRGGYVSQSAVALRCRVMPPPCVKNPYLNTDPCIDAAVYGGRQCNSAVFSPSIGGNGLSRYRTDFHEIEKIGYGNFSVVFKVLNRIDGCLYAVKRSIKQLHNDMERRQAVKEVQAMAALGSHENIVRYFTSWFENEQLYIQMELCDRSLSMNRNQPVKRGEALELLYQICKGLDFMHERGIAHLDVKPDNIYVRNGIYKLGDFGCATLVNRSLAIEDGDSRYMPPEMLNDKYEHLDKVDIFSLGAAVYELIRGTPLPESGSHFTSIREGKIALLPGCPMQFQSLIKSMMDPDPVRRPSAKEILRHPSFDKLHKASSK

SEQ ID NO: 1057 - DNA, 784 bp, Zea mays
  misc_feature: Ceres CLONE ID no. 408712
  misc_feature: Ceres CDNA ID no. 25446374
  CDS (241)..(510): REFERENCED BY SEQ ID NO: 1058
agaaagtcagatccgtgttccgtgtccgcgtccagtgtgtccgctactccgctccccctcagtcctcagttcctcacctagcggtagcgtgcgcgcgggagacgtagatggcggcttcggaggcggcagcggcggcggcaacaccggtgacgccgacagaggggacggtgatcgcgatccacagcctggaggagtggagcatccagatcgaggaggccaacagcgccaagaagctggaccatggggaagagaaagtcagctgctaagccacctcctaagaagcggatggacaagcttgacactgtcttttcctgcccattctgcaaccacgggagtagtgttgagtgccgaattgacatgaagaatctgattggcgaagcatcttgtagaatctgtcaggaaaacttcagcacaactgttaatgcactcactgagcctattgatatatatagtgaatggattgacgagtgtgagcgtgtcaacactgttgaaggcgacgatgatgcgtgagcttgccccatgcgatgaaactgttacctaccatcgtaatgtaatgtgctagtattctcgaatgccatagcccatagtcagccatggcttggaataacgtagtggctgactgatatgccagtaggcaccttatctagtacttacagaactacaaaaagtttgtattatacatatatggacaaccttataagtggctatgtgtgtacctatcctaacgcttatcccagatggtgtatcagcgtttttctgtgagattgttttcaaaaaaaaaaaa

SEQ ID NO: 1058 - protein, 89 aa, Zea mays; identical to SEQ ID NO: 390
  misc_feature: Ceres CLONE ID no. 408712
  misc_feature: Ceres CDNA ID no. 25446374
  misc_feature (8)..(68): Pfam Name: DUF701 PFAM Desc: Putative zinc binding domain
  misc_feature: Homolog of GI Number: 51771084 NR Desc: similar to RIKEN cDNA 1110011K10
  misc_feature: Homolog of GI Number: 51771080 NR Desc: similar to RIKEN cDNA 1110011K10
  misc_feature: Homolog of GI Number: 51771364 NR Desc: similar to RIKEN cDNA 1110011K10
  misc_feature: Homolog of GI Number: 51771082 NR Desc: similar to RIKEN cDNA 1110011K10
  misc_feature: Homolog of GI Number: 45190840 NR Desc: AER237Wp
  misc_feature: Homolog of GI Number: 48141171 NR Desc: similar to ENSANGP00000010721
  misc_feature: Homolog of GI Number: 34860564 NR Desc: similar to RIKEN cDNA 1110011K10
  misc_feature: Homolog of GI Number: 62653408 NR Desc:  similar to RIKEN cDNA 1110011K10
  misc_feature: Homolog of GI Number: 46227109 NR Desc: protein with conserved N
  misc_feature: Homolog of GI Number: 66841002 NR Desc: thioredoxin h1 protein

SEQ ID NO: 1059 - DNA, 631 bp, Zea mays
  misc_feature: Ceres CLONE ID no. 409020
  misc_feature: Ceres CDNA ID no. 25445614
  CDS (1)..(387): REFERENCED BY SEQ ID NO: 1060
gttgcctctcgcatttgcccacgcccgcagcgcctcgcctcggctgctctacctctatcccgcgacccgcgagatcggaatcgcggcgccccgccgccctcctccaaaatggcaccgtctctgctcggggggttcaccaagtcgttggccatgacggtgctctccgagatcggggacaagaccttcttcgccgccgcgattctggctatgcgccatcccaggaaactcgtattggcaggctgtttaactgcactaatagtcatgacagctctatcggcttctctaggttgggttgcaccaaatctgatttcacgtaaatggactcatcatttgaccactctattgttctttctatttggcatttggtcattgtgggagaggcaatgactctcagagagccgtccagcttctccgcgagaagggattcacctccgcgaaggatatcatcggtgggctgcaggcgtggggacgagacgtcgatcctgatttccctgtgtactagcgagatggaaatggatgcactacaccttgtaacagtttgaatgccgccagagattctggtggtgttgcaagaacgagaactctgatactatgatttgagtactaattttgccgaaaaaaaaaaaaaaaa

SEQ ID NO: 1060 - protein, 92 aa, Zea mays
  misc_feature: Ceres CLONE ID no. 409020
  misc_feature: Ceres CDNA ID no. 25445614
  misc_feature (9)..(84): Pfam Name: UPF0016 PFAM Desc: Uncharacterized protein family UPF0016
  misc_feature: Homolog of GI Number: 50946033 NR Desc: putative transmembrane protein
  misc_feature: Homolog of GI Number: 26452502 NR Desc: putative transmembrane protein
  misc_feature: Homolog of GI Number: 28394045 NR Desc: putative transmembrane protein
  misc_feature: Homolog of GI Number: 21593636 NR Desc: transmembrane protein
  misc_feature: Homolog of GI Number: 72074908 NR Desc:  similar to TPA regulated locus
  misc_feature: Homolog of GI Number: 72071062 NR Desc:  similar to TPA regulated locus
  misc_feature: Homolog of GI Number: 50947853 NR Desc: putative transmembrane protein
  misc_feature: Homolog of GI Number: 77550856 NR Desc: Uncharacterized protein family UPF0016
  misc_feature: Homolog of GI Number: 9759042 NR Desc: transmembrane protein FT27/PFT27
MAPSLLGGFTKSLAMTVLSEIGDKTFFAAAILAMRHPRKLVLAGCLTALIVMTALSASLGWVAPNLISRKWTHHLTTLLFFLFGIWSLWERQ

SEQ ID NO: 1061 - DNA, 598 bp, Zea mays
  misc_feature: Ceres CLONE ID no. 409255
  misc_feature: Ceres CDNA ID no. 35383174
  CDS (2)..(397): REFERENCED BY SEQ ID NO: 1062
agtctctgttcctccgcttcctgctctcttggcttgctgcttgccctcggagcagtgccttccgccgccgccgccgccgcctgttgtgagaaggagaggccggggctgggaggagatgagcgtgaccaagttcatcaagtgcgtcacggtgggggacggcgcggtggacaaggtttgtgaaattgtgaagaagcagcttgctcttcctgaccacactgaagtttgtggtgaatcgaaattctctgaacttggtgcggattcgctggacacggttgagattgtgatgggccttgaggagcacttcgacattagcgtggaggagtccagcgcgcagacaattgccaccgttgaagacgccgctgacctcattgacaagcttgttgctgtgaaggcataggccgcatctcttctatcattgtcttaccactctaggtttctatggtctgaagacttgtgattttctccgcactgctgttgctattcccgtgtcgtaataatacgagatgttttaagcggctgaacacacggtggtgtaatctgttactggtaaggtgcattgttgtatgaattgtttctcacacaaaaaaaaaaaaaaaaa

SEQ ID NO: 1062 - protein, 93 aa, Zea mays
  misc_feature: Ceres CLONE ID no. 409255
  misc_feature: Ceres CDNA ID no. 35383174
  misc_feature (18)..(85): Pfam Name: PP PFAM Desc: Phosphopantetheine attachment site
  misc_feature: Homolog of GI Number: 453189 NR Desc: acyl carrier protein
  misc_feature: Homolog of GI Number: 1870199 NR Desc: acyl
  misc_feature: Homolog of GI Number: 113172 NR Desc: Acyl carrier protein III
  misc_feature: Homolog of GI Number: 166975 NR Desc: acyl carrier protein III precursor
  misc_feature: Homolog of GI Number: 50948281 NR Desc: putative acyl carrier protein III
  misc_feature: Homolog of GI Number: 2465010 NR Desc: acyl carrier protein
  misc_feature: Homolog of GI Number: 1838961 NR Desc: acyl carrier protein
  misc_feature: Homolog of GI Number: 77556020 NR Desc: acyl carrier protein
  misc_feature: Homolog of GI Number: 3293271 NR Desc: acyl carrier protein
  misc_feature: Homolog of GI Number: 113169 NR Desc: Acyl carrier protein II
MSVTKFIKCVTVGDGAVDKVCEIVKKQLALPDHTEVCGESKFSELGADSLDTVEIVMGLEEHFDISVEESSAQTIATVEDAADLIDKLVAVKA

SEQ ID NO: 1063 - DNA, 748 bp, Zea mays
  misc_feature: Ceres CLONE ID no. 409389
  misc_feature: Ceres CDNA ID no. 40350961
  CDS (72)..(461): REFERENCED BY SEQ ID NO: 1064
ttttcctcggagagggagaagccgccgccgcagcaatcacagcagcccggagaaagcccaggtccgacaagatgcagatcttcgtgaagacgctgacagggaagaccatcaccctcgaggtcgagagcagcgacaccatcgacaatgtcaaggccaagatccaggacaaggaagggatcccgccggaccagcagcggctgatctttgccgggaagcagctggaggatggccgcacccttgcggactataacatccaaaaggagtctacgcttcacctcgtgcttaggctccgcggtggcatcattgagccctcgctgcaggcgctcgctcgcaagtacaaccaggacaagatgatctgccgcaaatgctatgcacgactgcaccctagggctgtcaactgccgcaagaagaagtgtggtcacagcaaccagctgagggccaagaagaagatcaagaactgaggtgctgctcctagtcagtttcatggacaatgttgggctgtattgctgtgtggttgttgaaccgtgtttgtttacccaacatttgggccttctgttatgttttaccttgttgtcgatgacacaatactatatgacaatagcaactctgttattgtagttttggtcactgttcacctgatatgtgccatatttcggtaagtatcgttagtgggcaaccggaactgtgtcctttctacttattccattttaaattattgaacttttatttaacaaaaaaaaaaaaaaaa

SEQ ID NO: 1064 - protein, 129 aa, Zea mays; identical to SEQ ID NO: 434
  misc_feature: Ceres CLONE ID no. 409389
  misc_feature: Ceres CDNA ID no. 40350961
  misc_feature (1)..(74): Pfam Name: ubiquitin PFAM Desc: Ubiquitin family
  misc_feature (77)..(128): Pfam Name: Ribosomal_L40e PFAM Desc: Ribosomal L40e family

SEQ ID NO: 1065 - DNA, 1157 bp, Zea mays
  misc_feature: Ceres CLONE ID no. 409421
  misc_feature: Ceres CDNA ID no. 36583538
  CDS (425)..(844): REFERENCED BY SEQ ID NO: 1066
cttttatttattattcatatctattcattattttcccaggatgctcattccgaaatctctctcgcggagaagaaagatcacgaaagatcgcgcatcggcggccgtccatctcgacatccgacgaccgcggaagctcgcagtgggccgctccgttccgtcgcggggcagctaccgcctaccacacccccgctccccgcaccgcacggaccggggtggtaaaacccggcgaccacatcaaaacacgaggcgtccccgactccgcagtccgcaggaccggtcactcggcagtcggcacgcaggctagcagcacagcagcagccagagccatcccctctcctcgctacgcttcgcttcctcggcgccgattcctcctcctcctcctccaccctcgtccgtcccgttccggcgcgcgagctcgcccgagatggcgaacgcgagatcgggtgtcgctgtgaacgatgagtgcatgctgaagtttggcgagctgcagtcgaagaggctgcaccgcttcataactttcaagatggacgacaagttcaaggagatagttgtggaccaggtcggggatcgcgctaccagctacgatgacttcacaaacagcctccctgagaatgactgccgatacgcgatctatgatttcgactttgttactgcagaggatgtccagaagagcaggatcttctatatcctatggtccccatcctccgccaaggtgaagagcaagatgctttatgcaagctcaaaccagaaattcaagagtggcctcaatggcattcaggttgaactccaggccacagatgcgagtgaaatcagcctcgatgagatcaaggatcgggcacgctaggcgcaccgccatcgtgagtttcatgatcacgcatcatggactcgcctactactgtggatttgtacgccattatagacttggtgctgcgaaagactgctttggtgatttgtgggtttgttgctgtgtaaaaagatcctcatggcttccagaagaccatgaaggtttggatctatcatgtaattccttgttatctgccaattatgtatgaactatggacatgtgttgcgctgttcaactcactacaaataagtaatcgatatattccctacccatgaatcggtgacaattgtctaagaaaaaaaaaaaaaaaaaa

SEQ ID NO: 1066 - protein, 139 aa, Zea mays
  misc_feature: Ceres CLONE ID no. 409421
  misc_feature: Ceres CDNA ID no. 36583538
  misc_feature (12)..(139): Pfam Name: Cofilin_ADF PFAM Desc: Cofilin/tropomyosin
  misc_feature: Homolog of GI Number: 1419370 NR Desc: actin depolymerizing factor
  misc_feature: Homolog of GI Number: 50919483 NR Desc: putative actin depolymerizing factor
  misc_feature: Homolog of GI Number: 48374972 NR Desc: putative actin depolymerizing factor
  misc_feature: Homolog of GI Number: 38564721 NR Desc: putative actin
  misc_feature: Homolog of GI Number: 50927855 NR Desc: OSJNBb0012E24.5
  misc_feature: Homolog of GI Number: 14906219 NR Desc: actin
  misc_feature: Homolog of GI Number: 68166241 NR Desc: actin depolymerizing factor
  misc_feature: Homolog of GI Number: 18423381 NR Desc: actin
  misc_feature: Homolog of GI Number: 21536985 NR Desc: actin depolymerizing factor 4
  misc_feature: Homolog of GI Number: 21593877 NR Desc: Actin
MANARSGVAVNDECMLKFGELQSKRLHRFITFKMDDKFKEIVVDQVGDRATSYDDFTNSLPENDCRYAIYDFDFVTAEDVQKSRIFYILWSPSSAKVKSKMLYASSNQKFKSGLNGIQVELQATDASEISLDEIKDRAR

SEQ ID NO: 1067 - DNA, 1481 bp, Zea mays
  misc_feature: Ceres CLONE ID no. 409560
  misc_feature: Ceres CDNA ID no. 25447031
  CDS (468)..(1217): REFERENCED BY SEQ ID NO: 1068
attctaaactctactgccgtacagtctatgcaacgcctgaagagcacggcgctgcccggagaaggatgcgtgtaaggtgtaactatcgcctactgcagctcaggttgtttctgatagtcttctcttctgccgtccatccggcctgcgcgctcgctctcctgctcttctgcgccaactgggcgaccgccgacgccaacgccgacgacctacgccaggtgctgggatttttgtcggttccttcggcagctttcgtcgcgtccttcgccggcgacgagcactcaccaggtccgctcctgaagaagactgggatattttgcatacacagaggatcatctttccgtttgatgaactcacgggaatggtgatgctcattttctaaaggaccggtcccctttttgtttaatttccaaaggtgtagaggacattcagttttctccagttctccagttcctggatagcaatggcaaatgagtttcctgatgaagtttcttaagtctgttttcccattgctggatggtaaagatctagtattctgcatgcttgtatgccgtcaatggcatgaaatcgcaagggatgattacttctggaaatgcatttgctcacggaagtggccgtccatttgcaaacagcccccttctggcgcaaactacaaaaagctttacttaaccttctctaagccacgggagatgcagaacctccctgtgccaaggcttacattcgaggatattgttttctacattgatatgtggctcgaaggatcgctcatcttttctcaagcagtttcaggccgcactctccgagcaggcctacagggcgctccccctcctggcattccagatatacttgcagcacatttgagttcccaagactgcatcttgatgctggaagtagagcccaagttggcagttcccatggggccagccatcactgtatctgtccttgccaaccgcaaggattcaaacaagatggcttgcatcataaacaagtcaacgtttgattacatcgatagtaatgcagcgcgggctctggcttatgagtatcttaggttttcgcccagacaccctttcacatccgacatccgggcatggatgtcgttacttttcctgtgcaaaggggcgaacaccattgaggtgtttggtatcgagctagatttctgtgacgccgcgaagtcagagaaagaaatcttgtggctcctagacatgcttgattggaaatagaagctccttatcccctttggggtttgacacatgtaaagcctgttcatggttagtcgttcctttcctgttggaccatgtacgctactactccctccgtttctttttagttgtcgctggatagttcaattttgcactattcagcgacaactaaaatgaaacggagggagtactgaactacataatctcctgagaaaatgtaataaatgtcacctgctactccatgtgctaacaaggcgaggttattttgtaaaaaaaaaaaaaaaa

SEQ ID NO: 1068 - protein, 249 aa, Zea mays
  misc_feature: Ceres CLONE ID no. 409560
  misc_feature: Ceres CDNA ID no. 25447031
  misc_feature (15)..(45): Pfam Name: F PFAM Desc: F
  misc_feature: Homolog of GI Number: 78191450 NR Desc: F
  misc_feature: Homolog of GI Number: 81075563 NR Desc: F
MSFLMKFLKSVFPLLDGKDLVFCMLVCRQWHEIARDDYFWKCICSRKWPSICKQPPSGANYKKLYLTFSKPREMQNLPVPRLTFEDIVFYIDMWLEGSLIFSQAVSGRTLRAGLQGAPPPGIPDILAAHLSSQDCILMLEVEPKLAVPMGPAITVSVLANRKDSNKMACIINKSTFDYIDSNAARALAYEYLRFSPRHPFTSDIRAWMSLLFLCKGANTIEVFGIELDFCDAAKSEKEILWLLDMLDWK

SEQ ID NO: 1069 - DNA, 611 bp, Zea mays
  misc_feature: Ceres CLONE ID no. 409928
  misc_feature: Ceres CDNA ID no. 25446375
  CDS (147)..(452): REFERENCED BY SEQ ID NO: 1070
actcgaaaatcctccgaacagaacgcaggcaggcggcggcggagacaggatcaggttcctcgcagccggcgttaagtagggcggccgccctacatcgtcccacctgtaggtacgacactgcgccgcttgaaggaggctttgcggcgatggaccgggtcggcggcggcgaaaagcaactggaggattgcacagtagccaatgctctaggaacttggttcttctcagttgcgggtgctcttgttgctattcctgtgggcataaagaagaaatccttagccccactcgtcttcttcggcactactggaaccatgctggacattatcatgggcattacccagtgtgagcgagagcatgctgagcgggaaatgaagattttggaagcccagaaattttcggtcgatgcttcagctcagaacgaaagctctgattcctttggcagtgctgacaagtgaaacacttctcctgttttccctcacttgtgacctggcttcacctctgttaattagagttgttgctcagatgccaatttgacacctttaaatttctgaatacactattcctactccctcaataacgtgcaattgtgcatttgatcaaaaaaaaaaaaaaaa

SEQ ID NO: 1070 - protein, 101 aa, Zea mays
  misc_feature: Ceres CLONE ID no. 409928
  misc_feature: Ceres CDNA ID no. 25446375
MDRVGGGEKQLEDCTVANALGTWFFSVAGALVAIPVGIKKKSLAPLVFFGTTGTMLDIIMGITQCEREHAEREMKILEAQKFSVDASAQNESSDSFGSADK

SEQ ID NO: 1071 - DNA, 628 bp, Zea mays
  misc_feature: Ceres CLONE ID no. 410144
  misc_feature: Ceres CDNA ID no. 36699331
  CDS (76)..(444): REFERENCED BY SEQ ID NO: 1072
aggccaccaaaggtaccttgcaatcacaacgaacagaagctctcgatctcaccgacaccgaggaagaagagatcaatggcgtccgagcagggagtcgtgatcgcgtgccacagcaaggctgagttcgacgcccacatgaccaaggcccaggaagccggcaagctggtggtcatcgacttcactgccgcctggtgcggtccatgccgcgccatcgccccactgttcgtcgaacacgccaagaagttcactcaggtcgtcttcctgaaggtggacgtggacgaagtgaaggaagtcaccgcggcctacgaggtcgaggcgatgccgaccttccacttcgtcaagaacggcaagacggtcgcgaccatcgtgggtgccaggaaggacgagctcctggcccagatcgagaagcatgccgcgcctgcgcctgcgtctgcgtctgcctaaaggagatcagtcgtcgccgtcaataagggccagcacgtatggctgtaaatgttgtcgttatcagttctggctttgtcgtttgtgggcgattgtgaactagtagtatgtttgtttctatccgagccggaggcgatacttaaccatggatacttgttgtgagttcgttccaaaaaaaaaaaaaaaa

SEQ ID NO: 1072 - protein, 122 aa, Zea mays
  misc_feature: Ceres CLONE ID no. 410144
  misc_feature: Ceres CDNA ID no. 36699331
  misc_feature (8)..(114): Pfam Name: Thioredoxin PFAM Desc: Thioredoxin
  misc_feature: Homolog of GI Number: 66841004 NR Desc: thioredoxin h2 protein
  misc_feature: Homolog of GI Number: 82407383 NR Desc: Chain A
  misc_feature: Homolog of GI Number: 50934769 NR Desc: Thioredoxin H
  misc_feature: Homolog of GI Number: 27461140 NR Desc: thioredoxin H
  misc_feature: Homolog of GI Number: 32186040 NR Desc: thioredoxin h isoform 1
  misc_feature: Homolog of GI Number: 20047 NR Desc: thioredoxin
  misc_feature: Homolog of GI Number: 53748515 NR Desc: thioredoxin 1
  misc_feature: Homolog of GI Number: 40287476 NR Desc: thioredoxin
  misc_feature: Homolog of GI Number: 55670844 NR Desc: Chain A
  misc_feature: Homolog of GI Number: 21617958 NR Desc: thioredoxin h
MASEQGVVIACHSKAEFDAHMTKAQEAGKLVVIDFTAAWCGPCRAIAPLFVEHAKKFTQVVFLKVDVDEVKEVTAAYEVEAMPTFHFVKNGKTVATIVGARKDELLAQIEKHAAPAPASASA

SEQ ID NO: 1073 - DNA, 674 bp, Zea mays
  misc_feature: Ceres CLONE ID no. 410376
  misc_feature: Ceres CDNA ID no. 36593274
  CDS (92)..(484): REFERENCED BY SEQ ID NO: 1074
gcaaaaaccctaatcgcatctgcttccagagccccccgccgccgctgcgccctcctctcggtcctgccgtccgtcgaggtaaaaggacagcatggtgagggtcagcgtgctcaatgatgctctcaagtccatgtacaatgctgaaaagatagggaaacgtcaggtcatgatcaggccgtcatccaaggtgatcatcaagttcctgacggtcatgcagcgccatggctacattggcgagttcgagtacgtggatgaccacagagctgggaagatcgtggtggagctgaatggaagactgaataaatgtggtgttattagcccacgttttgatgtaggtgttaaggagatcgagggatggacggcgaggcttcttccatctcgccagtttggctacatcgtcctaacaacttctgctggaattatggaccatgaggaggcccgccgtaagaatgttggtggcaaggttctaggtttcttttattgaaaatgtgtttttttgagccacagatgcgtccaagaactcgtctgatgttttgaggtttgttaagactgggtgtctgagcctttgcggtttgttaagacagcgatgtgtcatgtatttcagaaattgggatttttatgagatgtacctgctagagccctgtctgtttcgattttcaaaaaaaaaaaaaaaa

SEQ ID NO: 1074 - protein, 130 aa, Zea mays
  misc_feature: Ceres CLONE ID no. 410376
  misc_feature: Ceres CDNA ID no. 36593274
  misc_feature (5)..(130): Pfam Name: Ribosomal_S8 PFAM Desc: Ribosomal protein S8
  misc_feature: Homolog of GI Number: 23397065 NR Desc: putative cytoplasmic ribosomal protein S15a
  misc_feature: Homolog of GI Number: 17863 NR Desc: r
  misc_feature: Homolog of GI Number: 6683481 NR Desc: wrp15a
  misc_feature: Homolog of GI Number: 20259193 NR Desc: putative cytoplasmic ribosomal protein S15a
  misc_feature: Homolog of GI Number: 13560779 NR Desc: cytoplasmic ribosomal protein S15a
  misc_feature: Homolog of GI Number: 50908303 NR Desc: putative ribosomal protein S15
  misc_feature: Homolog of GI Number: 50935123 NR Desc: ribosomal protein S15
  misc_feature: Homolog of GI Number: 2130985 NR Desc: r
  misc_feature: Homolog of GI Number: 3355488 NR Desc: 40S ribosomal protein S15A
MVRVSVLNDALKSMYNAEKIGKRQVMIRPSSKVIIKFLTVMQRHGYIGEFEYVDDHRAGKIVVELNGRLNKCGVISPRFDVGVKEIEGWTARLLPSRQFGYIVLTTSAGIMDHEEARRKNVGGKVLGFFY

SEQ ID NO: 1075 - DNA, 1413 bp, Zea mays
  misc_feature: Ceres CLONE ID no. 410704
  misc_feature: Ceres CDNA ID no. 25447320
  CDS (394)..(1149): REFERENCED BY SEQ ID NO: 1076
gcgtgtaaggtgtaactatcgcctactgcagctcaggttgtttctgatagtcttctcttctgccgtccatccggcctgcgcgctcgctctcctgctcttctgcgccaactgggcgaccgccgacgccaacgccgacgacctacgccaggtgctgggatttttgtcggttccttcggcagctttcgtcgcgtccttcgccggcgacgagcactcaccaggtccgctcctgaagaagactgggatattttgcatacacagaggatcatctttccgtttgatgaactcacgggaatggtgatgctcattttctaaaggaccggtcccctttttgtttaatttccaaaggtgtagaggacattcagttttctccagttctccagttcctggatagcaatggcaaatgagtttcctgatgaagttcttaagtctgttttcccattgctggatggtaaagatctagtattctgcatgcttgtatgccgtcaatggcatgaaatcgcaagggatgattacttctggaaatgcatttgctcacggaagtggccgtccatttgcaaacagcccccttctggcgcaaactacaaaaagctttacttaaccttctctaagccacgggagatgcagaacctccctgtgccaaggcttacattcgaggatattgttttctacattgatatgtggctcgaaggatcgctcatcttttctcaagcagtttcaggccgcactctccgagcaggcctacagggcgctccccctcctggcattccagatatacttgcagcacatttgagttcccaagactgcatcttgatgctggaagtagagcccaagttggcagttcccatggggccagccatcactgtatctgtccttgccaaccgcaaggattcaaacaagatggcttgcatcataaacaagtcaacgtttgattacatcgatagtaatgcagcgcgggctctggcttatgagtatcttaggttttcgcccagacaccctttcacatccgacatccgggcatggatgtcgttacttttcctgtgcaaaggggcgaacaccattgaggtgtttggtatcgagctagatttctgtgacgccgcgaagtcagagaaagaaatcttgtgtctcctagacatgcttgattggaaatagaagctccttatcccctttggggtttgacacatgtaaagcctgttcatggttagtcgttcctttcctgttggaccatgtacgctactactccctccgtttctttttagttgtcgctggatagttcaattttgcactattcagcgacaactaaaatgaaacggagggagtactgaactacataatctcctgagaaaatgtaataaatgtcacctgctactccatgtgctaacaaggcgaggttattttgcaaaaaaaaaaaaaaaa

SEQ ID NO: 1076 - protein, 251 aa, Zea mays
  misc_feature: Ceres CLONE ID no. 410704
  misc_feature: Ceres CDNA ID no. 25447320
  misc_feature (2)..(47): Pfam Name: F PFAM Desc: F
  misc_feature: Homolog of GI Number: 78191450 NR Desc: F
  misc_feature: Homolog of GI Number: 81075563 NR Desc: F
MANEFPDEVLKSVFPLLDGKDLVFCMLVCRQWHEIARDDYFWKCICSRKWPSICKQPPSGANYKKLYLTFSKPREMQNLPVPRLTFEDIVFYIDMWLEGSLIFSQAVSGRTLRAGLQGAPPPGIPDILAAHLSSQDCILMLEVEPKLAVPMGPAITVSVLANRKDSNKMACIINKSTFDYIDSNAARALAYEYLRFSPRHPFTSDIRAWMSLLFLCKGANTIEVFGIELDFCDAAKSEKEILCLLDMLDWK

SEQ ID NO: 1077 - DNA, 852 bp, Zea mays
  misc_feature: Ceres CLONE ID no. 412346
  misc_feature: Ceres CDNA ID no. 25447032
  CDS (101)..(472): REFERENCED BY SEQ ID NO: 1078
atcacacactaatcaacaagcaggaccagctagctagctcctcccactgctatcacccgggccccggccagccatctcgctgaaagagaaaagcgcagccatgaagactactagctcgggcattgcagtcgtcctcctggtggcgatgctggcagtccagtccgcggtggccgacatctcgtgctccgacgtgctcaacgacctgtcgccgtgcctgcccttcctgcagggcaaggcagccaaacccagcgagagcaacaaccagtgctgcgacggcgtgaggaccctgtacgcggcggcggacaccaggcccgacaggcaggccacgtgccggtgcctcaaggcggcctacgttcaggtccacgctgtgctctccgcggcgcaggagctgcccggcgactgcggcctctcgctgtcctacaacatcacccccgacatcgactgcgacaatttcctgctgcacgggcgttaaaggcgaatgtagcatctcttgtgaggaagccaccgtcttggagcccaaatcagcgtcaagattccgtgctgcagcgcgccgcattgccttttctgtcatatcaatatctgataggatcgaatgaagggatactgttcccttaccagaatccatacgacgggatggtgatgttcagtgccctgctagcagtaggctgcatctgcactgagtgactagaataaaggatttggtgatgtttgtgctgattggtgtgttcgcctgtaatcgtgtgatgccgtcgttggcttcttatatccgtgtctaatctcgcaagtgctcgtgtttgcaactataccatttataatgtcaacttatcatgcttgtcaaaaaaaaaaaaaaaa

SEQ ID NO: 1078 - protein, 123 aa, Zea mays
  misc_feature: Ceres CLONE ID no. 412346
  misc_feature: Ceres CDNA ID no. 25447032
  misc_feature (28)..(115): Pfam Name: Tryp_alpha_amyl PFAM Desc: Protease inhibitor/seed storage/LTP family
  misc_feature: Homolog of GI Number: 66271047 NR Desc: FSLTP3
  misc_feature: Homolog of GI Number: 31324341 NR Desc: putative lipid transfer protein
  misc_feature: Homolog of GI Number: 66271045 NR Desc: FSLTP2
  misc_feature: Homolog of GI Number: 56713111 NR Desc: type 1 non
  misc_feature: Homolog of GI Number: 11095210 NR Desc: lipid transfer protein 3 precursor
  misc_feature: Homolog of GI Number: 16903206 NR Desc: lipid transfer protein precursor
  misc_feature: Homolog of GI Number: 7012722 NR Desc: lipid transfer protein precursor
  misc_feature: Homolog of GI Number: 37625029 NR Desc: lipid transfer protein
  misc_feature: Homolog of GI Number: 12659322 NR Desc: lipid transfer protein
  misc_feature: Homolog of GI Number: 28194086 NR Desc: lipid transfer protein isoform 4
MKTTSSGIAVVLLVAMLAVQSAVADISCSDVLNDLSPCLPFLQGKAAKPSESNNQCCDGVRTLYAAADTRPDRQATCRCLKAAYVQVHAVLSAAQELPGDCGLSLSYNITPDIDCDNFLLHGR

SEQ ID NO: 1079 - DNA, 673 bp, Zea mays
  misc_feature: Ceres CLONE ID no. 413991
  misc_feature: Ceres CDNA ID no. 29191483
  CDS (104)..(448): REFERENCED BY SEQ ID NO: 1080
aatatatcccccatctcttcgactcctttctggagcagctagggttccgtcctcgatccgatccgccgagtgcacaccacctttccccactccgatcgaatcgatggccgccgagggcgagaagaagatgataaccctcaaaagctccgatggcgaggagttcgaggtggaagaggcggtggcgatggagtcgcagaccatccgccacatgatcgaggatgactgcgccgacaacggcatccctcttcctaacgtcaactccaagatcctatccaaggtaatcgagtactgcaacaagcacgtacatgccgccgcagccgcagccgccgcctcgaaggccggttccgacgacgtgggtgccgcctccgccaacagcaccgccgcctccggtgaggacctcaagaactgggatgcggacttcgtcaaggtcgaccagggcaaggcgtagctgcctgtgctgtgcatatgcatgtgtggttaattagctggagtgctccggtcgcttaatctgttggatttgatggtttgttggttgtgtgcgcgtgtgtttcagtgatttgctcctttttttttctttctcgtggatctatcgatggatgaacatgaatgaatgaaccgaactgcacagctccgttgtgagctgatgcatgcatgcaaaaaaaaaaaaaaaaaa

SEQ ID NO: 1080 - protein, 114 aa, Zea mays
  misc_feature: Ceres CLONE ID no. 413991
  misc_feature: Ceres CDNA ID no. 29191483
  misc_feature (8)..(68): Pfam Name: Skp1_POZ PFAM Desc: Skp1 family
  misc_feature: Homolog of GI Number: 47054182 NR Desc: skp1 protein
  misc_feature: Homolog of GI Number: 77550711 NR Desc: Skp1 family
  misc_feature: Homolog of GI Number: 32330695 NR Desc: SKP1/ASK1
  misc_feature: Homolog of GI Number: 7378764 NR Desc: putative kinetochore protein
  misc_feature: Homolog of GI Number: 40644754 NR Desc: putative SKP1 protein
  misc_feature: Homolog of GI Number: 28466911 NR Desc: At5g42190
  misc_feature: Homolog of GI Number: 3719211 NR Desc: UIP2
  misc_feature: Homolog of GI Number: 52076056 NR Desc: putative UIP2
  misc_feature: Homolog of GI Number: 20466137 NR Desc: At1g20140/T20H2_8
  misc_feature: Homolog of GI Number: 21281127 NR Desc: putative SKP1/ASK1 protein At1
MAAEGEKKMITLKSSDGEEFEVEEAVAMESQTIRHMIEDDCADNGIPLPNVNSKILSKVIEYCNKHVHAAAAAAAASKAGSDDVGAASANSTAASGEDLKNWDADFVKVDQGKA

SEQ ID NO: 1081 - DNA, 619 bp, Zea mays
  misc_feature: Ceres CLONE ID no. 414436
  misc_feature: Ceres CDNA ID no. 40350962
  CDS (142)..(438): REFERENCED BY SEQ ID NO: 1082
atttttccactgccatcgcacccattcataaaaccctaaacccaggacccaggtttatcggtgaggcgagccgcgagtggaactgtggaagcgtcgagcttttttttcttcaagaagaagggaaacgagaggagggcggcgatggcgaagaggctgctcccgtcgctgaaccgggtgctggtggagaagctggtgcagcccaagaagaccgccggcggcatcctcctcccggaaacatccaagcagctgaatgctgctaaagtggtggctgttggccctggtgagcgcgacaaggcaggcaatctgatcccagttgctctgaaggaaggcgacactgttcttctgcccgagtatggtggatctgaagtcaagcttgcggctgataaagagtacctcctcttcagagaggatgacattttgggcacacttgtggactgattcagatcgcgggcaagcgggtggtgagatgcgtaggatttgaagctgggaacaaactccagaaagaactgtgccctgtcgtgatgtcataaatttgtggtgaaacatcatatcatgaggataaaacttgttgcttttttgtgatgcaattgagaaaactttcgaaaaaaaaaaaaaaaaa

SEQ ID NO: 1082 - protein, 98 aa, Zea mays
  misc_feature: Ceres CLONE ID no. 414436
  misc_feature: Ceres CDNA ID no. 40350962
  misc_feature (4)..(96): Pfam Name: Cpn10 PFAM Desc: Chaperonin 10 Kd subunit
MAKRLLPSLNRVLVEKLVQPKKTAGGILLPETSKQLNAAKVVAVGPGERDKAGNLIPVALKEGDTVLLPEYGGSEVKLAADKEYLLFREDDILGTLVD

SEQ ID NO: 1083 - DNA, 538 bp, Zea mays
  misc_feature: Ceres CLONE ID no. 415791
  misc_feature: Ceres CDNA ID no. 40350963
  CDS (66)..(293): REFERENCED BY SEQ ID NO: 1084
aacaacaacaacccgcacaacggcacgattctcctcctccgtccgcgtagctctcggtttcggcgatgtcggggcgcggcaagggcggcaaggggctgggcaagggcggcgtcaagcgcatttctgggctcatctacgaggagacccgcggcgtgctcaagatcttcctcgagaacgtcatccgcgacgccgtcacctacaccgagcacgcccgccgcaagaccgtcaccgccatggatgtcgtctacgcgctcaagcgccagggccgcacgctctacggcttcggcggctaggccgcctccccttctgatgctttgatgtgacggccgtggtcggttgtgtgtctagttggccggtctactgtagtttgttctgtatcttcgtttcgaggtgttccagtttctagcccatttggtgtaatattttcactgctattatcaatggaaagccctcggttctatccccattgttctggatcaagataatccgtttgatatggatacagtacccctcatgcttttaaaaaaaaaaaaaaaaa

SEQ ID NO: 1084 - protein, 75 aa, Zea mays
  misc_feature: Ceres CLONE ID no. 415791
  misc_feature: Ceres CDNA ID no. 40350963
  misc_feature (38)..(64): Pfam Name: TAF PFAM Desc: TATA box binding protein associated factor
MSGRGKGGKGLGKGGVKRISGLIYEETRGVLKIFLENVIRDAVTYTEHARRKTVTAMDVVYALKRQGRTLYGFGG

SEQ ID NO: 1085 - DNA, 608 bp, Zea mays
  misc_feature: Ceres CLONE ID no. 416008
  misc_feature: Ceres CDNA ID no. 25446376
  CDS (38)..(415): REFERENCED BY SEQ ID NO: 1086
accgaagcatcacccaatcagatccgatttcgtagagatgaagccggcagtagaggcggacgacgacgacgacgatgacggggatgacgacgacgacgacgacgaggactcagacgacgaggaagaggtcgacggtgaagacgatcaggaggaggagctgggaaccgagtatctggttcagcctcttgggcgggctgaagacgaagagcactcgagcgactttgaaccggaagaaaacggtgagggtgccgacgatgaggagatcgatgaagaggacgatgacggtgaggactctgtgaaggcgcagacctctacgaagaggaagaggtcaggcgacgaagaagaagaagacgacgacgatggggatgatgatggtgacgatgatgacgatgggaggccaccatcaaagcgatagtatggttagctctagttttgtagctgtgtatgcatgtggtgaagcaagtgctcgtcggtgtgtagtgttcgctcttctgatccattgtctgtgctctgtactgtagtgatcagcgtcaaaataaagaaatgcatgtccttgtttaaaataaattgatcgctctgtcttttggtacccaaaaaaaaaaaaaaaa

SEQ ID NO: 1086 - protein, 125 aa, Zea mays
  misc_feature: Ceres CLONE ID no. 416008
  misc_feature: Ceres CDNA ID no. 25446376
  misc_feature: Homolog of GI Number: 34894890 NR Desc: B1140D12.10
  misc_feature: Homolog of GI Number: 35210494 NR Desc: aspartic acid
  misc_feature: Homolog of GI Number: 35210492 NR Desc: aspartic acid
  misc_feature: Homolog of GI Number: 33284873 NR Desc: novel protein similar to human calsequestrin 1
  misc_feature: Homolog of GI Number: 134789 NR Desc: Prostatic spermine
  misc_feature: Homolog of GI Number: 6981502 NR Desc: spermine binding protein
  misc_feature: Homolog of GI Number: 50929027 NR Desc: OSJNBb0034I13.8
  misc_feature: Homolog of GI Number: 23487174 NR Desc: MIF4G domain
  misc_feature: Homolog of GI Number: 23613862 NR Desc: vesicle transport protein
  misc_feature: Homolog of GI Number: 50939143 NR Desc: acidic nuclear phosphoprotein
MKPAVEADDDDDDDGDDDDDDDEDSDDEEEVDGEDDQEEELGTEYLVQPLGRAEDEEHSSDFEPEENGEGADDEEIDEEDDDGEDSVKAQTSTKRKRSGDEEEEDDDDGDDDGDDDDDGRPPSKR

SEQ ID NO: 1087 - DNA, 847 bp, Zea mays
  misc_feature: Ceres CLONE ID no. 417765
  misc_feature: Ceres CDNA ID no. 29191484
  CDS (348)..(617): REFERENCED BY SEQ ID NO: 1088
attttccccattcccaatctcgtcttgtgttgttcggagcgggcagcagcacacagccccatcccaatcctagtcgatcttcttcccctcctcaagccggttccttcgtccacacgaccgcgcgctcggaaaactccgcggagggcgaaggaggcgaaccaagggcgacgtatccgccgctggagaaggtagccctcgatccgccgtctcccgcgattcgtttgtcttgcgacagctgggcgaccgtcgtcgccgccgcccttctccaggtgcccaggtcttcgccggtccctttgccgcctccttgccgccgacgagcaccagccaggaagaaaagaagctgaaccatggggaagagaaagtcagctgctaagccacctcctaagaagcggatggacaagcttgacactgtcttttcctgcccattctgcaaccacgggagtagtgttgagtgccgaattgacatgaagaatctgattggcgaagcatcttgtagaatctgtcaggaaaacttcagcacaactgttaatgcactcactgagcctattgatatatatagtgaatggattgatgagtgtgagcgtgtcaacactgttgaaggcgacgatgatgcgtgagcttgccccatgtgatgaaactgttacctacaatcgtaatgtaatgtgctggtattctcgaatgccatagcccatagtcagccatggcttggaataacgtagtggctgactgatatgccagtaggcaccttatctagtacttacagaactacaaaaagtttgtactatacatatatggacaaccttataagtggctatgtgtgtacctatccttaaaaaaaaaaaaaaaa

SEQ ID NO: 1088 - protein, 89 aa, Zea mays; identical to SEQ ID NO: 390
  misc_feature: Ceres CLONE ID no. 417765
  misc_feature: Ceres CDNA ID no. 29191484
  misc_feature (8)..(68): Pfam Name: DUF701 PFAM Desc: Putative zinc binding domain
  misc_feature: Homolog of GI Number: 51771080 NR Desc: similar to RIKEN cDNA 1110011K10
  misc_feature: Homolog of GI Number: 51771082 NR Desc: similar to RIKEN cDNA 1110011K10
  misc_feature: Homolog of GI Number: 51771364 NR Desc: similar to RIKEN cDNA 1110011K10
  misc_feature: Homolog of GI Number: 45190840 NR Desc: AER237Wp
  misc_feature: Homolog of GI Number: 51771084 NR Desc: similar to RIKEN cDNA 1110011K10
  misc_feature: Homolog of GI Number: 62653408 NR Desc:  similar to RIKEN cDNA 1110011K10

SEQ ID NO: 1089 - DNA, 671 bp, Zea mays
  misc_feature: Ceres CLONE ID no. 417809
  misc_feature: Ceres CDNA ID no. 40041215
  CDS (153)..(443): REFERENCED BY SEQ ID NO: 1090
accggtcactcggcagtcggcacgcaggctagcagcacagcagcagccagagccatcccctctcctcgctacgcttcgcttcctcggcgccgattcctcctcctcctcctccaccctcgtccgtcccgttccggcgcgcgagctcgcccgagatggcgaacgcgagatcgggtgtcgctgtgaacgatgagtgcatgctgaggagcccgcggcggctgagccggccgctgaggagcccgagaaggccgagccggccgctgaggtggccgagaaggccagcgagtgaggccgtgcgccgtacgcgcactgcggcggcggacagcgggtcgggagatcgatgtctcagcgtgcgcgcgtggcgtgccagtcgcgtcgcgcgcgctggcgcctactgttcagtacaacgcgaacgcgacggtttctctccatctctccgtgtgtgacagtgtgtgtgtcgtagctatagcagtgcccggtgcggactgcgagtgacatgggctaaataaagtgtgcgtcgtctggtctggtggtggtagtggggcgcggtgccccatgtgtgccgctgcagcttgtgtctctgtgttgcttcatgttctctgtctatctactctcatgtatggcagtttgggtacgggtatatcaagcatgttcagtcaaaaaaaaaaaaaaaa

SEQ ID NO: 1090 - protein, 96 aa, Zea mays
  misc_feature: Ceres CLONE ID no. 417809
  misc_feature: Ceres CDNA ID no. 40041215
MANARSGVAVNDECMLRSPRRLSRPLRSPRRPSRPLRWPRRPASEAVRRTRTAAADSGSGDRCLSVRAWRASRVARAGAYCSVQRERDGFSPSLRV

SEQ ID NO: 1091 - DNA, 660 bp, Zea mays
  misc_feature: Ceres CLONE ID no. 417971
  misc_feature: Ceres CDNA ID no. 25447098
  CDS (96)..(497): REFERENCED BY SEQ ID NO: 1092
atacgccgccatattcgcaagccaccgcaaccgaagcgcgccttcgccgccgcccccgcccccgccgcctctgcgatccccgcaaggtcgcaaacatgtctaccgtgctccagcgcccgacccccggcacggtccagtgcttcggccgcaagaagacggggtcggtttccttcacgatcgactgcaccaagccagtggaggacaagatcatggaggtcgcctcgctcgagaagttcctgcaggagcgcatcaaggtcgccggcggcaaggctggcaacctcggcgactccgtcaccatctctcgcgagaagaccaaggtcaccgtcacctctgacggacccttctccaagaggtacctgaagtacttgaccaagaagtacttgaagaagcacaacgtgcgggattggctacgcgtggttgctgccaacaaggaccgaaacgtctatgagctccgctacttcaacattgctgagaacgagggcgaggaagaagattagattgcactacgcttatattttagtattgaactcgttgcattttgatacctgtacccgtagtttcgcaaatgtcccatgttatggtgtggtatggttaatttgaagaatccttatgtactgaatctctgcaaaaagctatgttgtggacaaaaaaaaaaaaaaa

SEQ ID NO: 1092 - protein, 133 aa, Zea mays
  misc_feature: Ceres CLONE ID no. 417971
  misc_feature: Ceres CDNA ID no. 25447098
  misc_feature (17)..(133): Pfam Name: Ribosomal_L22e PFAM Desc: Ribosomal L22e protein family
  misc_feature: Homolog of GI Number: 50939919 NR Desc: putative 60S ribosomal protein L22
  misc_feature: Homolog of GI Number: 42733478 NR Desc: BRI1
  misc_feature: Homolog of GI Number: 6714454 NR Desc: putative 60S ribosomal protein  L22
  misc_feature: Homolog of GI Number: 12642842 NR Desc: putative 60S ribosomal protein L22
  misc_feature: Homolog of GI Number: 13592059 NR Desc: ribosomal protein L22
  misc_feature: Homolog of GI Number: 57086899 NR Desc:  similar to ribosomal protein L22
  misc_feature: Homolog of GI Number: 55590474 NR Desc:  similar to ribosomal protein L22
  misc_feature: Homolog of GI Number: 33150766 NR Desc: heparin
  misc_feature: Homolog of GI Number: 6677775 NR Desc: ribosomal protein L22
  misc_feature: Homolog of GI Number: 73956651 NR Desc:  similar to 60S ribosomal protein L22
MSTVLQRPTPGTVQCFGRKKTGSVSFTIDCTKPVEDKIMEVASLEKFLQERIKVAGGKAGNLGDSVTISREKTKVTVTSDGPFSKRYLKYLTKKYLKKHNVRDWLRVVAANKDRNVYELRYFNIAENEGEEED

SEQ ID NO: 1093 - DNA, 732 bp, Zea mays
  misc_feature: Ceres CLONE ID no. 418216
  misc_feature: Ceres CDNA ID no. 40350964
  CDS (59)..(487): REFERENCED BY SEQ ID NO: 1094
gttcccttcgttgcgtcttgaaaggggagagagagagagagaagagagagagaagaggatggccgggatcggaccgatcaggcaggactgggagccggtcgttgtgcggaagaaggcacccaccgccgccgccaagaaggatgagaaggccgtcaacgccgcgcgccgcgccggtgcggagatcgataccatgaagaagtacaacgctggtacgaacaaggcggcatccagcggtacatccctcaacaccaagcgcctcgacgacgacaccgaaaacctcgcccatgagcgagttccaagtgatctgaagaagaatctcatgcaagcaaggctcgataagaagctgacacaggcacaacttgctcagatgataaatgagaagccacaggtgattcaggagtatgaatcaggcaaggcaatccccaaccagcagatcattagcaagctcgagagggccctgggaaccaagttgcgtggcaagaaatagctttcctacgagtttgtgtcccggagcatcataatagggggaagacaaggcaagctgtctgcttatttgtctatgtttggtatctcaagtcctgcggactgtttctgttggcacaagagggaataaatgtgttcacggacctgtaatgcttgctccttgtcatatgaccttgctctaaacatttgtgatgaagctgtcaaggtaaatatattttctctaaatatttagcctaaaaaaaaaaaaaa

SEQ ID NO: 1094 - protein, 142 aa, Zea mays
  misc_feature: Ceres CLONE ID no. 418216
  misc_feature: Ceres CDNA ID no. 40350964
  misc_feature: null
  misc_feature: Useful for making plants with altered Lignin content
  misc_feature: Useful for making plants with modulated heat sensitivity
  misc_feature (87)..(141): Pfam Name: HTH_3 PFAM Desc: Helix
MAGIGPIRQDWEPVVVRKKAPTAAAKKDEKAVNAARRAGAEIDTMKKYNAGTNKAASSGTSLNTKRLDDDTENLAHERVPSDLKKNLMQARLDKKLTQAQLAQMINEKPQVIQEYESGKAIPNQQIISKLERALGTKLRGKK

SEQ ID NO: 1095 - DNA, 648 bp, Zea mays
  misc_feature: Ceres CLONE ID no. 418854
  misc_feature: Ceres CDNA ID no. 40041216
  CDS (79)..(423): REFERENCED BY SEQ ID NO: 1096
aacagcgaacacatctcctcgcatttcttcccatccgatccccccttcgcaaccaaaaccccaactcgccccgcatcgatggcgcccaaggccgagaagaaacccgcggcgaagaagccggcggaggaggagcccgcggccgagaaggcgcccgccgggaagaagccgaaggcggagaagcgggtccccgctggcaagtccgctgccaaggaaggcggcgagggcaagaggggcaagaagaagggcaagaagagcgtggagacctacaagatctacatcttcaaggtgctgaagcaggtgcacccggacattggcatctcccgtgagatccagacctccgtgcgcctcgtccttcccggggagctcgccaagcacgccgtctccgagggcaccaaggccgtcaccaagttcacctcggcctaggctgcgcggccgccgcttgcaggattctctcctgtgttcacgtctcttgctgtagttaggtgctgctgcctgctggcttctatgtatgttatctatctgtctgtagcaactgtgttatctgataggaccgtaatggtgcttattcaacccagctatatgtttctatgtgaatcaaaaaaaaaaaaaaaaaaaaaaaaaaaaaaaaaaaaaaaaaaaaaaaaaaaa

SEQ ID NO: 1096 - protein, 114 aa, Zea mays
  misc_feature: Ceres CLONE ID no. 418854
  misc_feature: Ceres CDNA ID no. 40041216
  misc_feature (57)..(81): Pfam Name: Histone PFAM Desc: Core histone H2A/H2B/H3/H4
  misc_feature: Homolog of GI Number: 22325 NR Desc: H2B histone
  misc_feature: Homolog of GI Number: 1848210 NR Desc: histone H2B1
  misc_feature: Homolog of GI Number: 577825 NR Desc: H2B histone
  misc_feature: Homolog of GI Number: 21801 NR Desc: histone H2B
  misc_feature: Homolog of GI Number: 22323 NR Desc: H2B histone
  misc_feature: Homolog of GI Number: 50932769 NR Desc: putative histone H2B
  misc_feature: Homolog of GI Number: 1708107 NR Desc: Histone H2B
  misc_feature: Homolog of GI Number: 34895904 NR Desc: putative histone H2B
  misc_feature: Homolog of GI Number: 34895900 NR Desc: putative histone H2B
  misc_feature: Homolog of GI Number: 34895838 NR Desc: putative histone H2B
MAPKAEKKPAAKKPAEEEPAAEKAPAGKKPKAEKRVPAGKSAAKEGGEGKRGKKKGKKSVETYKIYIFKVLKQVHPDIGISREIQTSVRLVLPGELAKHAVSEGTKAVTKFTSA

SEQ ID NO: 1097 - DNA, 736 bp, Zea mays
  misc_feature: Ceres CLONE ID no. 419523
  misc_feature: Ceres CDNA ID no. 25445836
  CDS (107)..(466): REFERENCED BY SEQ ID NO: 1098
agaagcatcacacactaatcaacaagcaggaccagctagctagctcctcccactgctatcacccgggccccggccagccatctcgctgaaagagaaaagcgcagccatgaagactactagctcgggcattgcagtcgtcctcctggtggcgatgctggcagtccagtccgcggtggccgacatctcgtgctccgacgtgctcaacgacctgtcgccgtgcctgcccttcctgcagggcaaggcagccaaacccagcgagagcaacaaccagtgctgcgacggcgtgaggaccctgtacgcggcggcggacaccaggcccgacaggcaggccacgtgccggtgcctcaaggcggcctacgttcaggtccacgctgtgctctccgcggcgcaggagctgcccggcgactgcggcctctcgctgtcctacaacatcacccccgacatcgactgcgacaagatcgaatgaagggatactgttcccttaccagaatccatacgacgggatggtgatgatcagtgccctgctagcagtaggctgcatctgcactgagtgactagaataaaggatttggtgatgtttgtgctgattggtgtgttcgcctgtaatcgtgtgatgccgtcgttggcttcttatatccgtgtctaatctcgcaagtgctcgtgtttgcaactataccatttataatgtcaacttatcatgcttgtcaaaaaaaaaaagaaaaaaaaaaaaaaaaaa

SEQ ID NO: 1098 - protein, 119 aa, Zea mays; identical to SEQ ID NO: 98
  misc_feature: Ceres CLONE ID no. 419523
  misc_feature: Ceres CDNA ID no. 25445836
  misc_feature (28)..(115): Pfam Name: Tryp_alpha_amyl PFAM Desc: Protease inhibitor/seed storage/LTP family
  misc_feature: Homolog of GI Number: 31324341 NR Desc: putative lipid transfer protein
  misc_feature: Homolog of GI Number: 16903206 NR Desc: lipid transfer protein precursor
  misc_feature: Homolog of GI Number: 11095210 NR Desc: lipid transfer protein 3 precursor
  misc_feature: Homolog of GI Number: 37625029 NR Desc: lipid transfer protein
  misc_feature: Homolog of GI Number: 66271047 NR Desc: FSLTP3
  misc_feature: Homolog of GI Number: 7012722 NR Desc: lipid transfer protein precursor
  misc_feature: Homolog of GI Number: 66271045 NR Desc: FSLTP2
  misc_feature: Homolog of GI Number: 12659322 NR Desc: lipid transfer protein
  misc_feature: Homolog of GI Number: 28194086 NR Desc: lipid transfer protein isoform 4
  misc_feature: Homolog of GI Number: 1098266 NR Desc: lipid transfer protein

SEQ ID NO: 1099 - DNA, 1236 bp, Zea mays
  misc_feature: Ceres CLONE ID no. 420891
  misc_feature: Ceres CDNA ID no. 25445477
  CDS (132)..(959): REFERENCED BY SEQ ID NO: 1100
ctgaaaaccaaaaggtaaaagaagcaagatctgccgcggctccattttctggtcgcctcctccgccactgccatctccctcctctgtcctccgtaccactcgtcttcgtctagccgccgaccgccaccaccatggcacccggcctctacaccgacatcggcaagaagaccagagatctgctgtacaaggactacaacacgcaccagaagttctgcctcaccacctcctcccccaatggcgtcgcaatcacagccgcaggaacaaggaaaaatgagtccatctttggtgagcttcacacccagattaagaacaagaaattgacagttgatgtcaaagcaaactcagaatcagatcttttaacaacaatcactgttgatgagttcggtactccagggctaaaatcaattatcaatttggttgttccagaccagaggtcagggaagcttgaattccaatacctacatgaatatgctggtgtgaatgcaagcgtcgggcttaattccaatcctatggttaacctttctggtgcctttggaagcaaagcactctcagtcggcgttgatgtctcatttgatacggcgactagcgatttcaccaagtacaacgctgccctgagcctcaccagtccagatcttattgcttcccttcatctgaataaccacggtgataccctggttgcgtcctactaccacctggtaaagaaccattcaggcactgctgttggagctgagttgtctcacagcatgtcgagaaatgagagcacgctaatcttcgggtcccagcactcgctggatccccacacgactatcaagacacgtttcaacaactacggcatggccagtgcccttgtccagcatgaatggcgtcccaagtccttcgtcaccatctctggtgacgttgacaccaaggcgattgagaagagcacgaaagttggcctatccttggtgctcaagcactgaagtgccgagtgtttttgggctctaggaatttattttcgattcagttggattggaataaacatggtctggagtcatctttgcggcaccattttgatcttgaactatatatttttttcactctctgcatgatcaatttcataggaaaatattaggattaattgactttatgtttcaattctcagcgccctgttaataattctgttgattgagaccaattgttaaacttgtgaaatatataatggtgattactttggggtttaaaaaaaaaaaaaaaaaa

SEQ ID NO: 1100 - protein, 275 aa, Zea mays
  misc_feature: Ceres CLONE ID no. 420891
  misc_feature: Ceres CDNA ID no. 25445477
  misc_feature (2)..(268): Pfam Name: Porin_3 PFAM Desc: Eukaryotic porin
  misc_feature: Homolog of GI Number: 313136 NR Desc: porin
  misc_feature: Homolog of GI Number: 34912192 NR Desc: voltage
  misc_feature: Homolog of GI Number: 558652 NR Desc: Voltage dependent anion channel
  misc_feature: Homolog of GI Number: 5929928 NR Desc: voltage
  misc_feature: Homolog of GI Number: 5929930 NR Desc: voltage
  misc_feature: Homolog of GI Number: 50899632 NR Desc: voltage
  misc_feature: Homolog of GI Number: 5929932 NR Desc: voltage
  misc_feature: Homolog of GI Number: 50932487 NR Desc: voltage
  misc_feature: Homolog of GI Number: 456672 NR Desc: voltage dependent anion channel
  misc_feature: Homolog of GI Number: 625990 NR Desc: porin
  misc_feature: Useful for making plants with altered leaf shape eg curled leaves
  misc_feature: Useful for making plants with increased biomass
  misc_feature: Useful for making plants with increased biomass and foliage
  misc_feature: Useful for making plants with increased biomass and foliage
MAPGLYTDIGKKTRDLLYKDYNTHQKFCLTTSSPNGVAITAAGTRKNESIFGELHTQIKNKKLTVDVKANSESDLLTTITVDEFGTPGLKSIINLVVPDQRSGKLEFQYLHEYAGVNASVGLNSNPMVNLSGAFGSKALSVGVDVSFDTATSDFTKYNAALSLTSPDLIASLHLNNHGDTLVASYYHLVKNHSGTAVGAELSHSMSRNESTLIFGSQHSLDPHTTIKTRFNNYGMASALVQHEWRPKSFVTISGDVDTKAIEKSTKVGLSLVLKH

SEQ ID NO: 1101 - DNA, 729 bp, Zea mays
  misc_feature: Ceres CLONE ID no. 420994
  misc_feature: Ceres CDNA ID no. 25446378
  CDS (227)..(523): REFERENCED BY SEQ ID NO: 1102
aggaacgttctagagggcacccgagaggccggcgcacgttgcgttggcgcggcgaacgatctcaaaggggcaggctcgtaatttttccgctgcgccggcgtctgtccataaaaccctaaaacctccggctgatcggttggtgttgaggcgagtggaagcttcgagttttttttttcttccttttggcttactgcgcaagaagaagggtaacaagaggacggcggcgatggcgaagaggctgctcccatctctgaaccgggtgctggttgagaagctggtgcagcccaagaagaccgccggcggcatcctcctcccggaaacatccaagcagctgaatgctgctaaagtggtggctgttggccctggtgagcgcgacaaggcaggcaatctgatcccagttgctctgaaggaaggtgacactgttctcctgccagagtatggtggaactgaagttaagcttgcagctgataaagagtacctcctcttcagagagcacgacattttgggcacacttgtggactaattcagagcatcagcaagcctgtcactagtcgttggttctagacttctagtgtgagatgcgtagtatcagatcctgggatcaaaatccctgagaaagaactctgaactgtcgtgatgtcatagattttgtgatgaaacatcataattgcctgcttgttgcaagcgaacttttgcgtttaaaatggttcccgaaaaaaaaaaaaaaaa

SEQ ID NO: 1102 - protein, 98 aa, Zea mays
  misc_feature: Ceres CLONE ID no. 420994
  misc_feature: Ceres CDNA ID no. 25446378
  misc_feature (4)..(96): Pfam Name: Cpn10 PFAM Desc: Chaperonin 10 Kd subunit
  misc_feature: Homolog of GI Number: 2267597 NR Desc: 10 kDa chaperonin
  misc_feature: Homolog of GI Number: 50939543 NR Desc: 10 kDa chaperonin
  misc_feature: Homolog of GI Number: 21554204 NR Desc: putative 10kd chaperonin
  misc_feature: Homolog of GI Number: 20258951 NR Desc: putative chaperonin CPN10 protein
  misc_feature: Homolog of GI Number: 1519241 NR Desc: 10 kDa chaperonin
  misc_feature: Homolog of GI Number: 25300327 NR Desc: probable 10kd chaperonin
  misc_feature: Homolog of GI Number: 51011554 NR Desc: heat shock protein 10
  misc_feature: Homolog of GI Number: 47938870 NR Desc: Heat shock 10kD protein 1
  misc_feature: Homolog of GI Number: 46249459 NR Desc: MGC79030 protein
  misc_feature: Homolog of GI Number: 68366462 NR Desc:  similar to Heat shock 10kD protein 1
MAKRLLPSLNRVLVEKLVQPKKTAGGILLPETSKQLNAAKVVAVGPGERDKAGNLIPVALKEGDTVLLPEYGGTEVKLAADKEYLLFREHDILGTLVD

SEQ ID NO: 1103 - DNA, 1048 bp, Zea mays
  misc_feature: Ceres CLONE ID no. 421461
  misc_feature: Ceres CDNA ID no. 25445478
  CDS (106)..(909): REFERENCED BY SEQ ID NO: 1104
atctctgccttatatagcttgaaatttggccaagaagccgtatgccagccaaaatatttcactgaaaacaaaacaaaacaaaaacaatgctggtgtcctctttgcatgcaggccttttgggactggacatgggaccagcttgctgactatgatcttcctgctgtgcttgagttcgtctataacagaacaggaggcatgaaagtccactacgttggtcactctctggggaccttgattattcttgcggccttctcggagaacaggttaacagacatcgtgcgatcagcagcgttgctctgcccaatcgcttatctcaacagcatggaatcgaggctcatcctgcttgccactcgcatcttcctcgcagaaacgattcacatgctaggttatcacgagttcaaccctgttgggccagtggcaaaggaagtgttgggaaaagtctgcgtcgacccagaggtcgattgctatgatttattttcagctgtagcaggaccggactgctgcctcaacacctcgaccacatgcatcttcttgcagcacggtccacagtcaagctccatcaagaacatgatccacatgtcgcagctggtcaggaaagagacgatcaggaagtacgactacggaagcgagaaggagaacacgaagcgctacaaccagacgcggcccccaacctacaacctctcgtccatcccaagccacgtccccctgttcctcacccacggcggccaggacttcctcggcgacgtcgccgacaccaggcacctcctgcggacgctgctcagccagcacgacagcgacgacatcgaggtgctgtacatgcctgactacgcgcacggcgacttcatcatgggctacaacgccccgcagctcatatacaagcccatggtggagtttttcaagcgccactaagaacttgctagcaataagctgctgctgctatatgcagcaacaattgtttcatgaagccgatttgattggtgtattattgccgtaagtaagtaaaaaaagaatttcatgggttgaaaaaaaaataaaaaaaaaaaaaaaa

SEQ ID NO: 1104 - protein, 267 aa, Zea mays
  misc_feature: Ceres CLONE ID no. 421461
  misc_feature: Ceres CDNA ID no. 25445478
  misc_feature: Homolog of GI Number: 51535902 NR Desc: putative triacylglycerol lipase
  misc_feature: Homolog of GI Number: 35395931 NR Desc: lysosomal acid lipase
  misc_feature: Homolog of GI Number: 50900564 NR Desc: OSJNBa0079F16.20
  misc_feature: Homolog of GI Number: 38344633 NR Desc: OSJNBa0094P09.4
  misc_feature: Homolog of GI Number: 39636476 NR Desc: triacylglycerol/steryl ester lipase
  misc_feature: Homolog of GI Number: 50947883 NR Desc: putative gastric lipase precursor
  misc_feature: Homolog of GI Number: 30679362 NR Desc: lipase family protein
  misc_feature: Homolog of GI Number: 4585908 NR Desc: putative lysosomal acid lipase
  misc_feature: Homolog of GI Number: 51091881 NR Desc: lingual lipase
  misc_feature: Homolog of GI Number: 20150726 NR Desc: Chain B
MQAFWDWTWDQLADYDLPAVLEFVYNRTGGMKVHYVGHSLGTLIILAAFSENRLTDIVRSAALLCPIAYLNSMESRLILLATRIFLAETIHMLGYHEFNPVGPVAKEVLGKVCVDPEVDCYDLFSAVAGPDCCLNTSTTCIFLQHGPQSSSIKNMIHMSQLVRKETIRKYDYGSEKENTKRYNQTRPPTYNLSSIPSHVPLFLTHGGQDFLGDVADTRHLLRTLLSQHDSDDIEVLYMPDYAHGDFIMGYNAPQLIYKPMVEFFKRH

SEQ ID NO: 1105 - DNA, 782 bp, Zea mays
  misc_feature: Ceres CLONE ID no. 421878
  misc_feature: Ceres CDNA ID no. 29191362
  CDS (3)..(545): REFERENCED BY SEQ ID NO: 1106
aagaattgcgtgctgtgtttatctctgtggccctgcgcccctgcgtgcctgcgttgtgtgctctcgctctctcggcggaagttggcgacgactgggcgaccgccgccgccgtacgccaggtgctcaggtctccgtcagacccttcgccaggtcttcttccgcggcgagcaccgccaggtgtgcatccaatcttcttcactgggtcctccgctgcttctagtcacgcatctaaatccggagttgccagcattcgcttgaggtgcctgacaaagcacaccatcatgcaggctagcgataggttcaacataaactctcagcttgagcatcttcaagccaaatatgttggtacagggcatgctgatttgtctagatttgaatgggctgtaaacatccagagagacagctatgcctcttatattgggcactatccaatgctagcatattttgccattgctgagaacgaatcgatcggaagagaacgttacaatttcatgcagaaaatgctgcttccttgtggccttcctcccgagagagatgaagattgaagagctagctggtgctgcatagtttctgtgtttccagtggttcctgtagtgtttgcttttagctaccatcgtactatgtgcgagcatgcctttcacgtttcttccattagtctcttttgtgatacatagaacccgtatgtattgttaaccaaatgctggcctgccccattgttgtgtttttgtggtgtgttcagccaatgtgaaagaaaaaaaaatagcccaaaaaaaaaaaaaaaa

SEQ ID NO: 1106 - protein, 87 aa, Zea mays
  misc_feature: Ceres CLONE ID no. 421878
  misc_feature: Ceres CDNA ID no. 29191362
  misc_feature (5)..(87): Pfam Name: SF3b10 PFAM Desc: Splicing factor 3B subunit 10
  misc_feature: Homolog of GI Number: 50946241 NR Desc: splicing factor 3B subunit 5
  misc_feature: Homolog of GI Number: 58394255 NR Desc: ENSANGP00000021330
  misc_feature: Homolog of GI Number: 67083873 NR Desc: pre
  misc_feature: Homolog of GI Number: 68051667 NR Desc: IP03424p
  misc_feature: Homolog of GI Number: 24645240 NR Desc: CG11985
  misc_feature: Homolog of GI Number: 50540016 NR Desc: splicing factor 3b
  misc_feature: Homolog of GI Number: 62858321 NR Desc: SF3B5
  misc_feature: Homolog of GI Number: 58760344 NR Desc: SF3b10
MQASDRFNINSQLEHLQAKYVGTGHADLSRFEWAVNIQRDSYASYIGHYPMLAYFAIAENESIGRERYNFMQKMLLPCGLPPERDED

SEQ ID NO: 1107 - DNA, 992 bp, Zea mays
  misc_feature: Ceres CLONE ID no. 422163
  misc_feature: Ceres CDNA ID no. 29191363
  CDS (119)..(700): REFERENCED BY SEQ ID NO: 1108
gaaagacggagagaggaaaagggacaagggcaaggcaagagagaggcgtcgtcgtttgatctgctgccggagtgcgaagaggaagaggaagaggaagaggagcgccggagttgtaaagatgttcctggtggactggttctatggggtgctggcatcgcttgggctgtggcagaaggaggctaagatcctcttccttggcctcgacaacgccggcaagaccaccctcctccacatgctgaaggacgagcggctcgtacagcaccagccaacgcagtaccccacgtcagaagagttgagcatcggcaggatcaagttcaaggcgttcgaccttgggggccaccagatcgcccgccgcgtctggaaggactactacgccaaggttgatgctgttgtgtacttggtggatgctgttgacaaggaacgttttgccgagtcgaagaaggagctcgatgcgcttcttgcagatgactcccttgcaaacgttcctttcctcatactgggcaacaagattgacatcccatacgcggcttcagaggaggagctgaggtactacctcggcctgagcaacttcacaaccgggaagggcaacgtgaacttggccgactccaacgtccgccccctggagatcttcatgtgcagtgtggtgcgcaagatgggctatggcgaaggcttcaaatggatgtctcagtacatcaagtgagtcgctgctgtcctcttttgtccatggcgctgctgctttcgcaggagggttgaaatcaagtctggtcgtgacatggcagctgcatggaaaggtttatggtagctagtgataggcaaagcttgtaagtcggtgttaatcctagatatgtgatgtggggtctactttctcttctgattgtttcttggggtggtctaaacggttcaaaaaaaaatgcgacttcttcgggtcagctagaagttatgtaatcacgttacatgaagcagcgcattgttcgccaaaaaaaaaaaaaaaa

SEQ ID NO: 1108 - protein, 193 aa, Zea mays
  misc_feature: Ceres CLONE ID no. 422163
  misc_feature: Ceres CDNA ID no. 29191363
  misc_feature: Homolog of GI Number: 46946656 NR Desc: putative ras
  misc_feature: Homolog of GI Number: 20465729 NR Desc: putative SAR1/GTP
  misc_feature: Homolog of GI Number: 77556132 NR Desc: ADP
  misc_feature: Homolog of GI Number: 3450893 NR Desc: ras
  misc_feature: Homolog of GI Number: 34894960 NR Desc: putative GTP
  misc_feature: Homolog of GI Number: 2108345 NR Desc: small GTP
  misc_feature: Homolog of GI Number: 21436475 NR Desc: putative Sar1 GTP binding protein
  misc_feature: Homolog of GI Number: 76573331 NR Desc: small GTP
  misc_feature: Homolog of GI Number: 6563322 NR Desc: small GTP
  misc_feature: Homolog of GI Number: 77416955 NR Desc: NtSar1 protein
MFLVDWFYGVLASLGLWQKEAKILFLGLDNAGKTTLLHMLKDERLVQHQPTQYPTSEELSIGRIKFKAFDLGGHQIARRVWKDYYAKVDAVVYLVDAVDKERFAESKKELDALLADDSLANVPFLILGNKIDIPYAASEEELRYYLGLSNFTTGKGNVNLADSNVRPLEIFMCSVVRKMGYGEGFKWMSQYIK

SEQ ID NO: 1109 - DNA, 1345 bp, Zea mays
  misc_feature: Ceres CLONE ID no. 422689
  misc_feature: Ceres CDNA ID no. 25445991
  CDS (254)..(952): REFERENCED BY SEQ ID NO: 1110
aacaccgattcgtttccccttggcacctggcgccctgtcgccttcgaaaaacagccgccgccgtcgcccgtcccggatccgacggcccccgctccttcgtctagtatttatactagtgccttgccggcgctgctcctgttgcctctcgcatttgccccgctgcccacgcccgcagcgcctcgcctcggctgctctacctctatcccgcgacccgcgagatcggaatcgcggcgccccgtcgccctcctccaaaatggcgccgtctctgctcggggggttcaccaagtcgttggccatgacggtgctctccgagatcggggacaagaccttcttcgccgccgctattctggctatgcgccatcccaggaaactcgtattggcaggctgtttaactgcactaatagtcatgacagctctatcggcttctctaggttgggttgcaccaaatctgatttcacgtaaatggactcatcatttgaccactctattgttctttctatttggcatttggtcattgtgggaaggcttcaaggaagatggagattcggaagaattggctgaagttgaagcagagctggatgctgcctttaagagtaataaaggtgaatctaaaaataaatttaaggcgaatgatgatatgaagaaacagcaaagaccatttctcatgcagttcttctcaccaatttttctgaaggcattttctattacattctttggtgagtggggtgacaagagccagattgctacaattggcttggctgctgatgaaaacccgttcggtgttgtcctgggtggaatcatagcgcaagcactctgcactactgctgccgttcttggtggaaagagcctagcgtcccagatatctgagaagatggttgaactgtcaagcggagtgctcttcctgctcttcggtatcatgtccttactctctggaccagaaggagaattgtaatccctgcttgagcctttttcagctagctgattaacatggctttctcttcttagacctatcttatttcagtacatgaatgatggcaacgaaagccatccatccatggcgaacaggatgttgatttaacagtttagccgacacgctgtaaacatttcagtcgcccttcaaaaattactacatgttacagaagtctgtagcgattgtattctgttgtgcccagcacgtgaaagtcaacctttagcaatagctgcctacaatatgatgtaagattcttgtcactgaaattttgttatcgcaattacatgcgttaacaaagctttgttcgtgaaccaagtattcaggcaattaatatggggcttatagcaggcctttgtctaaaaaaaaaaaaaaaaa

SEQ ID NO: 1110 - protein, 232 aa, Zea mays
  misc_feature: Ceres CLONE ID no. 422689
  misc_feature: Ceres CDNA ID no. 25445991
  misc_feature (9)..(84): Pfam Name: UPF0016 PFAM Desc: Uncharacterized protein family UPF0016
  misc_feature: Homolog of GI Number: 26452502 NR Desc: putative transmembrane protein
  misc_feature: Homolog of GI Number: 28394045 NR Desc: putative transmembrane protein
  misc_feature: Homolog of GI Number: 21593636 NR Desc: transmembrane protein
  misc_feature: Homolog of GI Number: 50946033 NR Desc: putative transmembrane protein
  misc_feature: Homolog of GI Number: 72074908 NR Desc:  similar to TPA regulated locus
  misc_feature: Homolog of GI Number: 77550856 NR Desc: Uncharacterized protein family UPF0016
  misc_feature: Homolog of GI Number: 32189371 NR Desc: TPA regulated locus
  misc_feature: Homolog of GI Number: 7689027 NR Desc: uncharacterized hypothalamus protein HTMP
  misc_feature: Homolog of GI Number: 76619924 NR Desc:  similar to TPA regulated locus
  misc_feature: Homolog of GI Number: 6755853 NR Desc: TPA regulated locus
MAPSLLGGFTKSLAMTVLSEIGDKTFFAAAILAMRHPRKLVLAGCLTALIVMTALSASLGWVAPNLISRKWTHHLTTLLFFLFGIWSLWEGFKEDGDSEELAEVEAELDAAFKSNKGESKNKFKANDDMKKQQRPFLMQFFSPIFLKAFSITFFGEWGDKSQIATIGLAADENPFGVVLGGIIAQALCTTAAVLGGKSLASQISEKMVELSSGVLFLLFGIMSLLSGPEGEL

SEQ ID NO: 1111 - DNA, 544 bp, Zea mays
  misc_feature: Ceres CLONE ID no. 422917
  misc_feature: Ceres CDNA ID no. 25445479
  CDS (88)..(315): REFERENCED BY SEQ ID NO: 1112
aaacagcctccaggtctagctagggtttcgtctccgccgcttgctctaatcctctcccggcacgcgacacgtgagggcgcagcgtttatggcggcgacaccggcggacgcgaagaccgaggccgccaagatggacctcctcgaggacgacgacgagttcgaagagttcgagatcgaccaagaatgggatgagaaggaagaaggcaatgaagctgtccagcagtgggaggatgattgggatgacgatgatgtgaatgatgatttctcgctgcagctgaggaaagaactggagggaagcaacgcccagaagagctgaagtaaataacagcttattctggttagtttggctatgtgaatacacatgtggtttgcgagtgaggatgcttggttggttactaacgtagtgtcagttgagagtaaggcttaagatttgggtggtaatgacgataatgctggtttgtagctatgtacaggatgctagggtatgcttgctttgtcttgtcaagttatgggggaacgttggattgccaaaaaaaaaaaaaaaa

SEQ ID NO: 1112 - protein, 75 aa, Zea mays; identical to SEQ ID NO: 1030
  misc_feature: Ceres CLONE ID no. 422917
  misc_feature: Ceres CDNA ID no. 25445479
  misc_feature (8)..(70): Pfam Name: DSS1_SEM1 PFAM Desc: DSS1/SEM1 family
  misc_feature: Homolog of GI Number: 66509809 NR Desc:  similar to ENSANGP00000017966
  misc_feature: Homolog of GI Number: 37050895 NR Desc: deleted in split hand/splt foot protein 1
  misc_feature: Homolog of GI Number: 32416282 NR Desc: predicted protein
  misc_feature: Homolog of GI Number: 60465541 NR Desc: DSS1/SEM1 family protein
  misc_feature: Homolog of GI Number: 55628924 NR Desc:  similar to 26 proteasome complex subunit DSS1

SEQ ID NO: 1113 - DNA, 1187 bp, Zea mays
  misc_feature: Ceres CLONE ID no. 423076
  misc_feature: Ceres CDNA ID no. 25445480
  CDS (257)..(1054): REFERENCED BY SEQ ID NO: 1114
gtccaaaaccctagccctcgcgccgccgccgccgtgcccagcgctcgagctcctcgcctgccgcgagctcgcgccgcaacgccaccatgaagttcaacatcgcgaacccgtctaccgggtgccagaagaagctggaaatcgatgacgggttcgcgatgttgaacttcttggcggctgcggcggagcacggaggcgaaggaggagcagcagcagcaggcggcgccgaggagcggcatcccactcagtgcttgcaaccatggctaggggattgaagaagcacttgaagaggctcaatgcgcccaagcattggatgctcgacaagcttggcggagcttttgctcccaagccatcttctggacctcacaagtccagggagtgccttcctctgatcctcatcatcaggaacaggctcaagtatgctctgaactaccgtgaggtcatttctatcctgatgcaacgccatgtacttgttgatggcaaggtcaggactgacaagacctaccctgctgggttcatggatgtcatttccatccccaagacaatggagaactacaggctgctttatgacaccaagggccgcttccgtcttcacccaatcagggatgaggatgccaagttcaagctctgcaaggtgaggtctgttcagtttggccagaagggcatcccctacctgaacacctacgacggccgcaccatccgctaccccgacccgctcatcaaggccaacgacaccatcaagatcgatctggagaccaacaagatcatggacttcatcaagtttgacgtcggcaacgtggtcatggtgaccggcgggaggaacaccgggcgtgtaggtgtgatcaagaacagggagaagcacaagggcggcttcgataccatccacgtcgaggactccatgggccaccagttcgccacccgcatgggcaacgtgttcaccatcggcaagggcaacaagccgtgggtgagcctgcccaagggcaagggtatcaagctcagcatcatcgaggagcagaggaggcgcgactttgctgcccaggctgctgccaaggcataagttctctgaatgtgctgcttggagctttttgctatgtctagtttaatttttatctgcaaggatatagagctaccttcccaagactttatcatcatgttttgttgcttttggttctcgaaaaaaaaaaaaaaaa

SEQ ID NO: 1114 - protein, 265 aa, Zea mays
  misc_feature: Ceres CLONE ID no. 423076
  misc_feature: Ceres CDNA ID no. 25445480
  misc_feature (175)..(211): Pfam Name: KOW PFAM Desc: KOW motif
  misc_feature (3)..(40): Pfam Name: RS4NT PFAM Desc: RS4NT
  misc_feature (42)..(90): Pfam Name: S4 PFAM Desc: S4 domain
  misc_feature (94)..(170): Pfam Name: Ribosomal_S4e PFAM Desc: Ribosomal family S4e
  misc_feature: Homolog of GI Number: 53791616 NR Desc: putative 40S ribosomal protein S4
  misc_feature: Homolog of GI Number: 50252099 NR Desc: putative ribosomal protein S4
  misc_feature: Homolog of GI Number: 44894458 NR Desc: ribosomal protein S4
  misc_feature: Homolog of GI Number: 2331301 NR Desc: ribosomal protein S4 type I
  misc_feature: Homolog of GI Number: 2345154 NR Desc: ribsomal protein S4
  misc_feature: Homolog of GI Number: 48596901 NR Desc: ribosomal protein
  misc_feature: Homolog of GI Number: 22138108 NR Desc: 40S ribosomal S4 protein
  misc_feature: Homolog of GI Number: 73759787 NR Desc: ribosomal protein S4
  misc_feature: Homolog of GI Number: 457803 NR Desc: ribosomal protein S4
  misc_feature: Homolog of GI Number: 82400118 NR Desc: 40S ribosomal protein S4
  misc_feature: Useful for increasing chlorophyll and photosynthetic capacity
MARGLKKHLKRLNAPKHWMLDKLGGAFAPKPSSGPHKSRECLPLILIIRNRLKYALNYREVISILMQRHVLVDGKVRTDKTYPAGFMDVISIPKTMENYRLLYDTKGRFRLHPIRDEDAKFKLCKVRSVQFGQKGIPYLNTYDGRTIRYPDPLIKANDTIKIDLETNKIMDFIKFDVGNVVMVTGGRNTGRVGVIKNREKHKGGFDTIHVEDSMGHQFATRMGNVFTIGKGNKPWVSLPKGKGIKLSIIEEQRRRDFAAQAAAKA

SEQ ID NO: 1115 - DNA, 1207 bp, Zea mays
  misc_feature: Ceres CLONE ID no. 423103
  misc_feature: Ceres CDNA ID no. 29191389
  CDS (176)..(823): REFERENCED BY SEQ ID NO: 1116
aaaaaaattcggtcccttcgtcctctactcctctagtcctctcggctcctcgcagtcgctcactgcgtgcgccaaaagcagcagcagctccagccgtcgccgtctccactctccagtctccaccactgctccgcccgcgccggatcgagggagggcaggcggacgaggaggagggatgagtctcttcgggcttggacgaaaccagaagacattccgccccaagaagagcgctccatcaggtagcaagggagcacagctccgaaagcacatagatgccactctcggcagtggaaaccttagggaagctgtgaggttgcctcctggagaggatatcaatgaatggcttgcggtgaatactgtggatttctttaaccaagttaatatgctgtatggcacactcacagaattttgcacacctgagagctgtccgacaatgacagctggcccaaagtacgagtacagatgggctgatggtgtgcagataaagaaacccatagaggtatcagcaccaaaatatgtggagtatctgatggattggattgaaggccagcttgacgatgaatccatatttcctcaaaaacttggcacgccatttccaccgaacttcaaggaagtagtaaagacaatattcaagcgcttgtttcgggtctatgcccatacttaccactcccatttccagaagattgttagccttaaagaggaggcccatctcaatacctgttttaagcacttcattctgtttacaaatgagtttggcctgattgacaagaaggagctggctccacttcaggagctcatcgaatccatcatcgttccttactgagaacacggtttgctaaacatggatacagagctcttaatgctgatgctgtgaaattcagtctgtttatgacagcactttactgcatagagcttattgttcccgttattagacacaaggacatgtcacatatgcgtgtatctgtgttgtttcttcctgatcatgctgaccatgtaagtactgtcatatcagctatagaacggcgatgataatgtactgcagaaagaaaaaaaacacgagaaagctgagttggggctataaattgcatattggcacttatcgagtatagaatagatctccttctctttcttcttacaaacagaattgacttgttatttttaatggaatgaaataaatattcacgctttttgaaaaaaaaaaaaaaaa

SEQ ID NO: 1116 - protein, 215 aa, Zea mays
  misc_feature: Ceres CLONE ID no. 423103
  misc_feature: Ceres CDNA ID no. 29191389
  misc_feature (29)..(205): Pfam Name: Mob1_phocein PFAM Desc: Mob1/phocein family
  misc_feature: Homolog of GI Number: 38093736 NR Desc: putative Mob1
  misc_feature: Homolog of GI Number: 32470635 NR Desc: putative Mob1/phocein family protein
  misc_feature: Homolog of GI Number: 19309913 NR Desc: Mob1
  misc_feature: Homolog of GI Number: 82734181 NR Desc: Mob1
  misc_feature: Homolog of GI Number: 50399985 NR Desc: putative  Mob1/phocein family  protein
  misc_feature: Homolog of GI Number: 62147661 NR Desc: Mob1
  misc_feature: Homolog of GI Number: 31431893 NR Desc: putative F
  misc_feature: Homolog of GI Number: 73975379 NR Desc:  similar to Mps one binder kinase activator
  misc_feature: Homolog of GI Number: 57095868 NR Desc:  similar to MOB1
MSLFGLGRNQKTFRPKKSAPSGSKGAQLRKHIDATLGSGNLREAVRLPPGEDINEWLAVNTVDFFNQVNMLYGTLTEFCTPESCPTMTAGPKYEYRWADGVQIKKPIEVSAPKYVEYLMDWIEGQLDDESIFPQKLGTPFPPNFKEVVKTIFKRLFRVYAHTYHSHFQKIVSLKEEAHLNTCFKHFILFTNEFGLIDKKELAPLQELIESIIVPY

SEQ ID NO: 1117 - DNA, 691 bp, Zea mays
  misc_feature: Ceres CLONE ID no. 423421
  misc_feature: Ceres CDNA ID no. 25446379
  CDS (85)..(384): REFERENCED BY SEQ ID NO: 1118
gtggcttcccacccagctagtccactcgcagctagtctgtccgacctatatatccagtgacaccatctatcgtctgtcgggacgatgaggccggccgcgctcttcctcgccgcggtgctggccagcgtcctcctcctcctcgccggccgcgccgcgggcgacttctcggccctggcgccgtgcgacgtgacgcagctgagcccctgcgccagcgcgttcgcggggaaggcgtcgcccacggccgcctgctgcgccaagctcatgtcccacgggcccggctgcctgtgccggtacaaggacgacgccagcctgaagcgcctcgtcgacgccaggcacaagcgcagggtgttcaccgcgtgcaaggtgcccgtcccgagttgctagccgtaatcctagtagctcatccgtcggccgtcggcgcaagcagagccacgcacggcgaagaaataagatggacggaagagagagggggagttgttcgccgtggtctgtggtgcccggccaaggatttggctggttagatttgtttgcttctttactgtctcgcacaaaaaccagctcgtgggaggtagtgtgttgcattgcgtttgaactcatgtcgccagttttccaatgcattgcgaaataaaaatcaccaccatcgtcggtaaagaaaacataccgacgtcatgctaaaaaaaaaaaaaaaaaa

SEQ ID NO: 1118 - protein, 99 aa, Zea mays
  misc_feature: Ceres CLONE ID no. 423421
  misc_feature: Ceres CDNA ID no. 25446379
  misc_feature (33)..(99): Pfam Name: Tryp_alpha_amyl PFAM Desc: Protease inhibitor/seed storage/LTP family
  misc_feature: Homolog of GI Number: 34911370 NR Desc: P0034C09.16
  misc_feature: Homolog of GI Number: 50932651 NR Desc: putative lipid transfer protein
  misc_feature: Homolog of GI Number: 50932655 NR Desc: putative lipid transfer protein
  misc_feature: Homolog of GI Number: 7489428 NR Desc: probable lipid transfer protein
  misc_feature: Homolog of GI Number: 493721 NR Desc: TED4
  misc_feature: Homolog of GI Number: 498036 NR Desc: lipid transfer protein
  misc_feature: Homolog of GI Number: 543650 NR Desc: P48h
  misc_feature: Homolog of GI Number: 9279661 NR Desc: lipid transfer protein
  misc_feature: Homolog of GI Number: 7488524 NR Desc: lipid transfer like protein
  misc_feature: Homolog of GI Number: 47155245 NR Desc: lipid transfer protein
MRPAALFLAAVLASVLLLLAGRAAGDFSALAPCDVTQLSPCASAFAGKASPTAACCAKLMSHGPGCLCRYKDDASLKRLVDARHKRRVFTACKVPVPSC

SEQ ID NO: 1119 - DNA, 913 bp, Zea mays
  misc_feature: Ceres CLONE ID no. 423481
  misc_feature: Ceres CDNA ID no. 25446598
  CDS (71)..(451): REFERENCED BY SEQ ID NO: 1120
gttcccacacccctcaccgcgtccgcctcccctaccatctagggtttctagggttttcgaggaggaggaaatggcgtctgatagggtgctcgggactgtgaagtggttcaacggaaccaagggcttcggtttcatcacccccgacgacggtagcgaggacctattcgtccaccagtcctccatcaagtccgacggctaccgcagtcttaacgacggcgatgccgtcgaatacaccgtcggcagcggcaacgacggccgcgccaaggccctcgatgtcaccgcgcccggcggcggcccgcttgccggcggggaacgtcccgacggcggcaacggcggtgggcgaggcggatacggcggcggcgaccgcggttacggcggcggcggtgaccgcggctacgggggagttttttttttttttttttctttttttttttttttttttttggagtagcaagccaaaacctgttttttctttcattatcacaatcagaagcaacaccgaatcataaggttgtatatcagtagaaacacatgatcaattcacaatagtgaataaaatcagcccaattctgtccgatggttgtgctgggaattctatgatttaacatgtccaccatttcgcagctgttaggaatcctgaattcatacaaatttctgaatgggagattgggatcccagtcccatctccagcaaatgtccaagtctaaaatttttaagttcagccatcagatgttttgcccattcggtctgtcatttggccgcctgctctatcactgttactttgctccacctctccggctcctcatctagttgctctgcccggatctgtctgtcatgaactatctatattatatcattatcaatgttatgcaatgagtctttggcattgagttaaggaaaaaaaaaaaaaaaa

SEQ ID NO: 1120 - protein, 126 aa, Zea mays
  misc_feature: Ceres CLONE ID no. 423481
  misc_feature: Ceres CDNA ID no. 25446598
  misc_feature: Useful for making plants with modulated growth and phenotype characteristics
  misc_feature: The sequence is a functional homolog of  SEQ ID NO 1041 in the  10/374,780 US patent application
  misc_feature: The sequence is a functional homolog of  SEQ ID NO 851 in the  10/666,642 US patent application
  misc_feature (5)..(72): Pfam Name: CSD PFAM Desc: 'Cold
  misc_feature: Homolog of GI Number: 50940785 NR Desc: putative cold shock protein
  misc_feature: Homolog of GI Number: 42391858 NR Desc: cold shock domain protein 3
  misc_feature: Homolog of GI Number: 21322752 NR Desc: cold shock protein
  misc_feature: Homolog of GI Number: 42391853 NR Desc: cold shock domain protein 2
  misc_feature: Homolog of GI Number: 19743 NR Desc: nsGRP
  misc_feature: Homolog of GI Number: 50904847 NR Desc: putative Glycine
  misc_feature: Homolog of GI Number: 76577745 NR Desc: putative glycine
  misc_feature: Homolog of GI Number: 14532850 NR Desc: putative glycine
  misc_feature: Homolog of GI Number: 4803937 NR Desc: glycine
  misc_feature: Homolog of GI Number: 34913774 NR Desc: cold shock protein
MASDRVLGTVKWFNGTKGFGFITPDDGSEDLFVHQSSIKSDGYRSLNDGDAVEYTVGSGNDGRAKALDVTAPGGGPLAGGERPDGGNGGGRGGYGGGDRGYGGGGDRGYGGVFFFFFSFFFFFFLE

SEQ ID NO: 1121 - DNA, 613 bp, Zea mays
  misc_feature: Ceres CLONE ID no. 423853
  misc_feature: Ceres CDNA ID no. 25446380
  CDS (90)..(461): REFERENCED BY SEQ ID NO: 1122
tactcgaaactacctaacccaagcacactcaaacagacaggaagtccgccgaacatcacaggctgcgaacctcctagaagctcgaggagatgctctccaagctgtcggcgtggttcgtgaacccgcggcggaatccgctcgcgcgcctccaccggaacgccgtcgcctcccgcctccgcaaatacgggctcaggtatgacgacctctacgacccgtaccacgacctagacatcaaggaggcgctggcgcggctgccgcgggaggtggtggacgcccgtaaccagcgcctcaagcgggccatggacctctccatgaagcaccagtacctacccgacgacgtccaggctatacagacgccattcaggagctacctttttgacatgcttgctcttgtgaaaaaggagagcgcagagcgtgaagcattgggagcgcttccactctaccagagaaccatcccataaagtgcctctttgcatgatccaatcaatagtgcacgcgatgatcagcagaggctgatactgtaatgtgttttgtgttttttcgaggaaatctctactacttattaagacgataagggtagcctgtcattctgccgttaaaaaaaaaaaaaaaa

SEQ ID NO: 1122 - protein, 123 aa, Zea mays; identical to SEQ ID NO: 416
  misc_feature: Ceres CLONE ID no. 423853
  misc_feature: Ceres CDNA ID no. 25446380
  misc_feature (8)..(111): Pfam Name: UCR_14kD PFAM Desc: Ubiquinol
  misc_feature: Homolog of GI Number: 50919263 NR Desc: putative ubiquinol
  misc_feature: Homolog of GI Number: 633681 NR Desc: ubiquinol
  misc_feature: Homolog of GI Number: 15239430 NR Desc: ubiquinol
  misc_feature: Homolog of GI Number: 12642870 NR Desc: putative ubiquinol
  misc_feature: Homolog of GI Number: 30689398 NR Desc: ubiquinol
  misc_feature: Homolog of GI Number: 50731732 NR Desc:  similar to Ubiquinol
  misc_feature: Homolog of GI Number: 54643425 NR Desc: GA17519
  misc_feature: Homolog of GI Number: 56199556 NR Desc: ubiquinol
  misc_feature: Homolog of GI Number: 19075864 NR Desc: ubiquinol

SEQ ID NO: 1123 - DNA, 634 bp, Zea mays
  misc_feature: Ceres CLONE ID no. 424225
  misc_feature: Ceres CDNA ID no. 40350965
  CDS (90)..(464): REFERENCED BY SEQ ID NO: 1124
ctctcctttctcacacctcgacgcctctctctctttccccgagctctcgaaaccctaggtgcgtgccgaccggcggcggcggcgaggtgatggcgatggacccggacgcggtggcgaaagccttcgtggagcactactaccggacgttcgacaccaaccgcgcggcgctggtggggctgtatcaggagacctccatgctcaccttcgagggccagaagttccagggcccatccgccattgccggcaagctcggatctcttcccttccaggcctgcgagcaccagatcgtcaccgtcgactgccagccgtcggggccccagggaggcatgctcgtcttcgtctccggttccatccgcaccggccccgaggagcaccccatcaagttctctcaggcattccatttgctgccggcagctgggtccttcttcgtgcagaatgacatgttccgcctgaactatggctaaaagacagccgaaaactcttgtgatgaacgaatttgttaagggcttcatgttgagacgatgaataccgactgtcgccgctactctcatctcctttgtatctcctctgttggctgattaactgttattacaagaaattgctggacttgttttttccaaaaaaaaaaaaaaaa

SEQ ID NO: 1124 - protein, 122 aa, Zea mays; identical to SEQ ID NO: 214
  misc_feature: Ceres CLONE ID no. 424225
  misc_feature: Ceres CDNA ID no. 40350965
  misc_feature (6)..(119): Pfam Name: NTF2 PFAM Desc: Nuclear transport factor 2

SEQ ID NO: 1125 - DNA, 599 bp, Zea mays
  misc_feature: Ceres CLONE ID no. 424433
  misc_feature: Ceres CDNA ID no. 40350966
  CDS (103)..(315): REFERENCED BY SEQ ID NO: 1126
atattccttcgcttccgtcaggtcgggtccgcagcctccccctctcgcagatccccacctgctccgccgccggccaccgcgttgctcccctcggcagccaggatgacagaagtaccatttctgccacgtgagaggctcttcaagcagcaacattacttccagaacttgaccaagcacacctacctgaaagggcgctacgacgtgatcacctccgtcgccatcccccttgcactcgctgcctccagcatgttcatgattgggcgtggagtttacaacatgtctcatggggttgggaagaagtggttaggaccctagctgtgagaaactaagtcttgtagctctctacacagtagaattggtctggcaggtgagggtgcagatgagactctgctttattacctgagtccatgtgcgcggtggctcttgggttggagattgccaaaaggccagcaattggctttgcattatctggtcattcatttttttggtcattggagggtgcaatgtaaatgttcagggtcaatcatttatgaatttttctagctagtaatgaaacagtaaagaaaatgttggttcagattacaaaaaaaaaaaaaaaa

SEQ ID NO: 1126 - protein, 70 aa, Zea mays
  misc_feature: Ceres CLONE ID no. 424433
  misc_feature: Ceres CDNA ID no. 40350966
MTEVPFLPRERLFKQQHYFQNLTKHTYLKGRYDVITSVAIPLALAASSMFMIGRGVYNMSHGVGKKWLGP

SEQ ID NO: 1127 - DNA, 1331 bp, Zea mays
  misc_feature: Ceres CLONE ID no. 424537
  misc_feature: Ceres CDNA ID no. 25446834
  CDS (122)..(1114): REFERENCED BY SEQ ID NO: 1128
gccaatcacccgataagtagcaggggtgcagggagagcgacgacgacgacaccccacccgtaagtgagccgagagcccgcgagaccagctagctagctgtagataaccagccagcgcgagcatggcggcggcggcggtggtccggcaccggacggtggaggcgaacggcatctcgatgcacgtggcggagtccggccccgacggcgacggcgcgcccgcggtggtgttcctgcacggcttcccggagctctggtactcgtggcgccaccagatggcgcacctggccgcgcggggctaccgctgcgtggcgccggacctccgcggctacggcggcaccgccgcgccgcccgacgtcgcgtcctactccgccttccacgtcgtcggcgacgtcgtcgccctgctcgacgcgctcggcatccacaacaaggtgttcgtggtgggtcacgactggggcgccatcatcgcgtggtacctctgcctgttccggccggaccgggtggcggcgcttgtcaacaccagcgtcgccttcatgcgccacatcttcgtccgcgccgccgccgccgccgtcacgcccaccgactacttccaccgcacctacgggcccacctactacatctgccgcttccaggagcctggtgtcgcagagaaggagttctcgccggccaacgccgggtacctgatgaagcggatcctgtgcaaccgcttcacctcctcggcggccggcgacgagaagccggcggcggcggacgccgccgaggaggagccgctgccgccgtggctgacggaggaggacgtgggccacttcgcgtcggagttcgagcggacgggcttcacggggcccatcaactactaccgcaacatggaccgcaactgggagctggcggcggcgtgggcggacgccaaggtgcgggtgcccaccaggttcatcgtcggcgacggcgacctcacctaccactacccgggcatccaggactacatccacaagggcgggttcgaggccgacgtcccggggctcgagagcgtcgtcgtcatccccggcgccggccacttcgtccagcaggagaaggccgacgaggtcagccagcacatctacgacttcatctccaagttctgatacatgtgcatggatcgaccatcagcttgcttgcttacctgctaaagcctgtaatctcaacctcgatatccgtgctgccaacttgttttgtttgacgaactaagagtaataagtgttcgcatatatgtctggtttaatttgtgacttggacatggtatatatgttcgatgtgaaatggataaaccatgcgtttcgtaattcaaaaaaaaaaaaaaaa

SEQ ID NO: 1128 - protein, 330 aa, Zea mays
  misc_feature: Ceres CLONE ID no. 424537
  misc_feature: Ceres CDNA ID no. 25446834
  misc_feature (229)..(325): Pfam Name: Abhydrolase_1 PFAM Desc: alpha/beta hydrolase fold
  misc_feature: Homolog of GI Number: 50919595 NR Desc: putative hydrolase
  misc_feature: Homolog of GI Number: 50919593 NR Desc: putative hydrolase
  misc_feature: Homolog of GI Number: 25044843 NR Desc: epoxide hydrolase
  misc_feature: Homolog of GI Number: 46090793 NR Desc: soluble epoxide hydrolase
  misc_feature: Homolog of GI Number: 12642902 NR Desc: putative epoxide hydrolase ATsEH
  misc_feature: Homolog of GI Number: 2764804 NR Desc: epoxide hydrolase
  misc_feature: Homolog of GI Number: 2764806 NR Desc: epoxide hydrolase
  misc_feature: Homolog of GI Number: 56783662 NR Desc: putative epoxide hydrolase
  misc_feature: Homolog of GI Number: 407944 NR Desc: epoxide hydrolase
  misc_feature: Homolog of GI Number: 15891281 NR Desc: AGR_L_2342p
  misc_feature: Useful for making plants with altered leaf shape eg curled leaves
MAAAAVVRHRTVEANGISMHVAESGPDGDGAPAVVFLHGFPELWYSWRHQMAHLAARGYRCVAPDLRGYGGTAAPPDVASYSAFHVVGDVVALLDALGIHNKVFVVGHDWGAIIAWYLCLFRPDRVAALVNTSVAFMRHIFVRAAAAAVTPTDYFHRTYGPTYYICRFQEPGVAEKEFSPANAGYLMKRILCNRFTSSAAGDEKPAAADAAEEEPLPPWLTEEDVGHFASEFERTGFTGPINYYRNMDRNWELAAAWADAKVRVPTRFIVGDGDLTYHYPGIQDYIHKGGFEADVPGLESVVVIPGAGHFVQQEKADEVSQHIYDFISKF

SEQ ID NO: 1129 - DNA, 848 bp, Zea mays
  misc_feature: Ceres CLONE ID no. 424973
  misc_feature: Ceres CDNA ID no. 25446070
  CDS (78)..(365): REFERENCED BY SEQ ID NO: 1130
atcgatcgggtaaggctcagctcagctagcatatttgagtttctctcgtgctctagctactagcaacctcgacatcaatggcttctggtgccgccgccccggttaagatgtccactgcagtgactgcctgcatcctgctggcggtcctgctgcccatggcgcccaagctagtaatgggtgattgttccggcagttgtgttaccctttgcgacacctttgctgatgggttctgcacgggcaacgccgaccccgccatttgtccaccggaagtgcaggagctatgccatcccacggttttcacagggtgtatcactgaatgcaatacactctgcgctacaagcggattcgctccttgcgctgcttgatgagaaagtatcgtttgcggcagaataaaggtgagtgcaagagcaaccagcaggcctcttccccatgcatacgcacactgcagcgcgacctgagggaggaagcatgcaataagcttccacgatgatctacctactatatcccacatttccttactatattttcctttgtttaattcagtcaagattgtgtcgttcagagtccagagcatgcatggggtgcgtacgtattactagtattattgtacttctccatatgcatatggaaaagtgcactgtgctagcttgtgtacgtgtgccttttctgtgcatgcatgtgtggtctttcagtgtctactctagctattagtaggcatatgtcattgtcatgtaatcgatctctcgcggccgggcttactaccatcagcacagctgagggaatttctattgaaataaaatcatattaaaaacaataaaaaaaaaaaaaaaaaaaaaaaaaaaaaaaaa

SEQ ID NO: 1130 - protein, 95 aa, Zea mays
  misc_feature: Ceres CLONE ID no. 424973
  misc_feature: Ceres CDNA ID no. 25446070
MASGAAAPVKMSTAVTACILLAVLLPMAPKLVMGDCSGSCVTLCDTFADGFCTGNADPAICPPEVQELCHPTVFTGCITECNTLCATSGFAPCAA

SEQ ID NO: 1131 - DNA, 848 bp, Zea mays
  misc_feature: Ceres CLONE ID no. 425017
  misc_feature: Ceres CDNA ID no. 40350967
  CDS (498)..(695): REFERENCED BY SEQ ID NO: 1132
aaggcaggcagccacagcacctgaccaccacaacccatcgagcttcccatccggaccggaccccatcaggagcagaggcagagtcgagagtctctcagcgaagccaccgtccgacgccatgtgctaccaggtgaggtgcggcacctgcggcaagaccacgtgggccgggtgcccgccacgtcgcgtcggtgcacgcgcagatctcggagggccagcactgcgcctgccgcgactggcccggcgtcgaccccgccaccgccccggccggcgtcaagaaggccgccagcgccgctgacgacgctgggaaggactccggcaccgccgcctccactcccgcgcagggcggcgctgcgcagtgaggtcaaaaggtaaccagctccgccggcctcggagacatcgtccacatcgacccagatttcttcagataccttcgcttcgacttcgagtcgagggggaagcttcagctagaggggcgaagccagcgggagccatcagccatgtgctaccaggtgaagtgcgggtcgtgcggcaagtccacgtgggcgggctgcggccgccacgtcgcctccgtgcaccgccagattccccagggccagcactgcgcctgccgcgattggccgggcgttgccccggccggcgacaaggcggccgccgcggaggggccttcgtccacgtctgtctgcaccatcctgtgatttgagcccgcgcatgttacctctggtgtaggggatgtgcgattgtgtacggttatatttgtctctcttttttttgctcttttttcctaatctctaaatacaatacttctcttgcgagctcgaaaaaaatacttaccaaaaaaaaaaaaaaaa

SEQ ID NO: 1132 - protein, 65 aa, Zea mays; identical to SEQ ID NO: 564
  misc_feature: Ceres CLONE ID no. 425017
  misc_feature: Ceres CDNA ID no. 40350967

SEQ ID NO: 1133 - DNA, 1413 bp, Zea mays
  misc_feature: Ceres CLONE ID no. 425096
  misc_feature: Ceres CDNA ID no. 35383175
  CDS (168)..(1136): REFERENCED BY SEQ ID NO: 1134
acgaacatgtctagcggtctagcccatactccgcatgcaaacaacctctcggcctcatcaggcccgctgccctccgcctccgcctccgccgatcccctccgctgaatcgaatagaagaatcgagcgccgctactggcgaggggctagcggtcggcgcacagcgcggtatggcgagcggcagcagcaacggggagccaagcacggcaccgcaggcgaaccggtggtacgacctccggctgggctcttcctgccgtgacccctcccccaccgccaagttctgcaccctccgttatgaatttaagccagcatcaattgacaagacacaagctgggtctctgcaaagcaccaaagataaccgggttactgtggaattccataataatcagcctggcaagccaaaggtgacatttgagggaagccaagaagagtacaaggataatgatggtgtcttattttttgatggtgagacctttcgcttagagaggttgcatagggctgtcaagaggttaaggcatgtccgagttccaggagagtctgcagcacttaatttggctggtacaactactggagtgggtgcagaatcacagtctcctccattacctaaagtcagcaagtcacagaccatgagcaaacctgctgttcactcagttccagttgaggttgagcgtattgacattggtgaaccagaaaatccaggcccgaaatacaacagcaggagtacatatcaacctgttagcatagacccatttgccctttcacctgatccaaatgagcaagagaaccttgacatatttggtgatgatgatggcaatgcttcaccgaataacttggcctccggagaaggggcacctactcgtggttttgacgtcaacttaccaaatcaagacaatatggatgatgaaattgctgatgtagatgtaaatgatgaggcagatgaggggctcaatgcagccgatacgctgcgagctcaagtgaacgcagaggggcagcaggggcaggacagctcaagctctagtggaaccagcagtagcagcagcagcggaagtgggagcggcagtggaagtgggagcagcagcagtgacagcgatggtagtgatgctgattcagcaagctccggaggtgatgttgatatatgagcttgataatgcaagcttttgttttgacagatgccttgcttcacaatttttggttcacaagggaggtgtagggtatgtatatgttcagctaatattgttccggtcagtgagtgcattaaatttccgcaattcatggcgggcttggtctgttttatgtttgttaaaacctgggctggaagaatagaatctgtaaacatatctgtacaactgtctatgtgttcatgtggcattgctgttaccttggatgatggatgttacaacaaaaaaaaaaaaaaaa

SEQ ID NO: 1134 - protein, 322 aa, Zea mays
  misc_feature: Ceres CLONE ID no. 425096
  misc_feature: Ceres CDNA ID no. 35383175
  misc_feature: Homolog of GI Number: 49118576 NR Desc: MGC82880 protein
  misc_feature: Homolog of GI Number: 50344980 NR Desc: zgc:86600
  misc_feature: Homolog of GI Number: 27370592 NR Desc: ELL associated factor 1
  misc_feature: Homolog of GI Number: 45552497 NR Desc: CG11166
  misc_feature: Homolog of GI Number: 72038512 NR Desc:  similar to ELL associated factor 2
  misc_feature: Homolog of GI Number: 57529709 NR Desc: similar to ELL associated factor 2 uncharacterized bone marrow protein BM040 testosterone regulated apoptosis inducer and tumor suppressor
  misc_feature: Homolog of GI Number: 73990544 NR Desc:  similar to ELL associated factor 1
  misc_feature: Homolog of GI Number: 37725365 NR Desc: DSPP593
  misc_feature: Homolog of GI Number: 67920999 NR Desc: LPXTG
MASGSSNGEPSTAPQANRWYDLRLGSSCRDPSPTAKFCTLRYEFKPASIDKTQAGSLQSTKDNRVTVEFHNNQPGKPKVTFEGSQEEYKDNDGVLFFDGETFRLERLHRAVKRLRHVRVPGESAALNLAGTTTGVGAESQSPPLPKVSKSQTMSKPAVHSVPVEVERIDIGEPENPGPKYNSRSTYQPVSIDPFALSPDPNEQENLDIFGDDDGNASPNNLASGEGAPTRGFDVNLPNQDNMDDEIADVDVNDEADEGLNAADTLRAQVNAEGQQGQDSSSSSGTSSSSSSGSGSGSGSGSSSSDSDGSDADSASSGGDVDI

SEQ ID NO: 1135 - DNA, 835 bp, Zea mays
  misc_feature: Ceres CLONE ID no. 425212
  misc_feature: Ceres CDNA ID no. 25446071
  CDS (170)..(571): REFERENCED BY SEQ ID NO: 1136
acgatcgtggttggtgttggttacacgcgcctatatcgccggttcggccgcacgtccgcctcctcctctcctcctccctcttctcagctcaccagtgctcgctcacctttccccttcctttcctttcctttcctatcctcgtgccctcgaatcggaaacccagccagccatgtcgtactacggcgaccggcgcgcggagtcgtcgatcgtggaggcgttcacgctgtcgccgctgccgtacccggtgatcctggtgctgctgatggtgacgctgctgctgggcgcctcgtggttcttcacgtacgacgacttcatcgaggaggcgtcgcagcagctgagctgggcgctgctgggcgtgcccatcgcgctcgtcctcctcatccgctggatctcctccgtcgactccttcgagggctacctgggcttctacccgacggagagccgctggaagggccgctacgagcggggccccgccgagggcagctcgccctggggcgtcgccttgctcgtcctcctcctcctcgtgctcgccagcttccactccaccatccacgacatgtggggcccgtgaacggatgtagtgattgtagtcctgctcctgttcggttccacgcgcgcacgtatgcgcttgtgctactggttgctgcttgatcgatcgatggatcgatgattccatgtacatatttgttagggggatgctgcggctaggctattagctgcaggctatagagtttgagggtgatatacttatcagtttgctgcctgtaagactggttttggttttgctataatcgtgatatattccgatgtacagtatacaaaaaaaaaaaaaaaa

SEQ ID NO: 1136 - protein, 133 aa, Zea mays
  misc_feature: Ceres CLONE ID no. 425212
  misc_feature: Ceres CDNA ID no. 25446071
  misc_feature: null
  misc_feature: Useful for making plants with modulated nitrogen use efficiency
MSYYGDRRAESSIVEAFTLSPLPYPVILVLLMVTLLLGASWFFTYDDFIEEASQQLSWALLGVPIALVLLIRWISSVDSFEGYLGFYPTESRWKGRYERGPAEGSSPWGVALLVLLLLVLASFHSTIHDMWGP

SEQ ID NO: 1137 - DNA, 841 bp, Zea mays
  misc_feature: Ceres CLONE ID no. 425287
  misc_feature: Ceres CDNA ID no. 25402806
  CDS (2)..(574): REFERENCED BY SEQ ID NO: 1138
gatgctcttcgtcccgcgccaagtcgtactcgccgcctcatcacagccccgcgccgccgcctcttccgccatggccaaggaggaatccaagaaggagaagaagaaggccaaggccaaggtggccaatggagccgccgccgccgccgccgccccggtccctggcgcgagggccgcggtggtcgcctccgtcgccgccttcctcgagtccgctgggctctcgcgcacgctcgtcgccctccaatccgaggccggcctcggatctgacggcggcggcggcggcggcggcggcactccgagcttccgcaacatggcgacgcggttggctgcggccgcggccgccacgttcatgcggcgcctggccccagcgcgcccaccagtacctatcctggcggcagcatctacggcggaggcggtgacgtgcgggcgcggggacaagaaaaccaagcgcgggaagcggttcaagggctcctacggcaacgcccgaccgaagcgtgagaagaagattgagcgcatcaaggaccgcgtcgaggtgccccgttccactccctggcccctccccttcaagcttatctgagcgcctcccctcggtccgccgggggtaccttgggtttgctgcgacagttgctgctacttcgccgtttccaaatagctgcacgcgctgcacgggcgtgtgtttcctttgtttttaattgtttctcaattgtgtggcgtcagatatgtactgccgccgaactgctgtggttcaagcaatatccttttggatggaagtgaagagatgtgtttctgtccaaaaaaaaaaaaaaaaaaaaaaaaaaaaaaaaaaaaaaaaaaaaaaaaaaaa

SEQ ID NO: 1138 - protein, 88 aa, Zea mays
  misc_feature: Ceres CLONE ID no. 425287
  misc_feature: Ceres CDNA ID no. 25402806
  misc_feature: Homolog of GI Number: 1350889 NR Desc: Putative 30S ribosomal protein S31
  misc_feature: Homolog of GI Number: 77556600 NR Desc: SRP40
  misc_feature: Homolog of GI Number: 77556601 NR Desc: SRP40
  misc_feature: Homolog of GI Number: 66779249 NR Desc: similar to ATP
  misc_feature: Homolog of GI Number: 539030 NR Desc: cysteine
  misc_feature: Homolog of GI Number: 21992 NR Desc: extensin
  misc_feature: Homolog of GI Number: 66776896 NR Desc: LigA
  misc_feature: Homolog of GI Number: 19919 NR Desc: Pistil extensin like protein
  misc_feature: Homolog of GI Number: 50902298 NR Desc: P0497A05.11
  misc_feature: Homolog of GI Number: 50945947 NR Desc: putative high mobility group I/Y
MATRLAAAAAATFMRRLAPARPPVPILAAASTAEAVTCGRGDKKTKRGKRFKGSYGNARPKREKKIERIKDRVEVPRSTPWPLPFKLI

SEQ ID NO: 1139 - DNA, 695 bp, Zea mays
  misc_feature: Ceres CLONE ID no. 425335
  misc_feature: Ceres CDNA ID no. 36583540
  CDS (33)..(479): REFERENCED BY SEQ ID NO: 1140
atactattttttagaagcccagtcttgtcttgatgatacctggttcaaaaagctcgtcgggaagaggagcaaaacaaaccctatctaaaccgcggcggactcttcgtccagcaaggtttcccatccagatccggccacgccacttgctcctcttctccgccacaccgatggtgtacgtggattcctgggacgagttcgtggagcggtccgtgcagctcttccgcggcgaccccaacgccacccgctacgtgatgaagtaccggcactgcgaggggaagctcgtgctcaaggtcaccgacgaccgcgagtgcttgaagttcaagacagatcaagctcaagacgcaaagaagatggagaagctcaacaacatcttttttgctctcatgacacgtgggcctgatgttgatatcagtgaagtttcagggaaggaacaggcagagcaacagcaagcgaagaaaggtcggggaaggaggcaataatgcggtctgatccttatttgttacagaaaattcacaactggaatgatggattaacatttcattgactttttgtactctgaagaaagtttttccagtacagaaccgagaacaaactaaatgcactctatcatgaatgaatgcatgattgagaaacgcccaaggcttcaaccctgcttcgttttaatgcacgtgaagcgttttcatcgaaaaaaaaaa

SEQ ID NO: 1140 - protein, 103 aa, Zea mays
  misc_feature: Ceres CLONE ID no. 425335
  misc_feature: Ceres CDNA ID no. 36583540
  misc_feature (2)..(78): Pfam Name: SRP9 PFAM Desc: Signal recognition particle 9 kDa protein
  misc_feature: Homolog of GI Number: 2208988 NR Desc: signal recognition particle subunit 9
  misc_feature: Homolog of GI Number: 21553473 NR Desc: signal recognition particle 9 kDa protein SRP9
  misc_feature: Homolog of GI Number: 52077269 NR Desc: putative signal recognition particle 9 kDa protein
  misc_feature: Homolog of GI Number: 41055367 NR Desc: similar to signal recognition particle 9kDa
  misc_feature: Homolog of GI Number: 50603659 NR Desc: MGC81742 protein
  misc_feature: Homolog of GI Number: 62857637 NR Desc: Srp9
  misc_feature: Homolog of GI Number: 61831100 NR Desc:  similar to signal recognition particle 9K chain
  misc_feature: Homolog of GI Number: 5107800 NR Desc: Signal Recognition Particle Alu Rna Binding Heterodimer
MVYVDSWDEFVERSVQLFRGDPNATRYVMKYRHCEGKLVLKVTDDRECLKFKTDQAQDAKKMEKLNNIFFALMTRGPDVDISEVSGKEQAEQQQAKKGRGRRQ

SEQ ID NO: 1141 - DNA, 595 bp, Zea mays
  misc_feature: Ceres CLONE ID no. 425629
  misc_feature: Ceres CDNA ID no. 25446381
  CDS (35)..(376): REFERENCED BY SEQ ID NO: 1142
aaacaaatccccccgcacgcctccgcagccgacgatgaccaccgccgcagacgactaccaccactccgacggattcgtcatgcccgacgtcctcgccaagggccgggaggcctgctacaaggcacgggatgccttctacgcgtgcatagagaagcacgcggacaaaaagcccaccgagatcgccaccatgggtctcctctaccccgccgactgcaaaaagtcccgcgccgacttcgtcagcaactgccgccccacctgggtcaagcacttcgaccggcagtactccgccaagaagcgggtgcagaggctgctcgacggcgatggggaccgccggggccccatgtcgctgccccagccctacaccttcaagcaataggtagtcttcctgtggttcagatcttggtattgagctcaattggatcagtgctacgctggtgtctagatgctatagtattggtttcaggctttgtgtcatttagctggatgcatatgtgatgtgtaccagtacattgctctgaatgctaatggatgagcgaatctgtatgtggatttatcaatatcaggatatccctcattggcaaaaaaaaaaaaaaaa

SEQ ID NO: 1142 - protein, 113 aa, Zea mays
  misc_feature: Ceres CLONE ID no. 425629
  misc_feature: Ceres CDNA ID no. 25446381
  misc_feature: Homolog of GI Number: 67987177 NR Desc: 4Fe
  misc_feature: Homolog of GI Number: 68125004 NR Desc: surface antigen protein 2
  misc_feature: Homolog of GI Number: 46226738 NR Desc: uncharacterized secreted protein with thr rich regions
  misc_feature: Homolog of GI Number: 1076237 NR Desc: arabinogalactan
  misc_feature: Homolog of GI Number: 186396 NR Desc: mucin
  misc_feature: Homolog of GI Number: 68124986 NR Desc: surface antigen protein 2
  misc_feature: Homolog of GI Number: 7494070 NR Desc: promastigote surface antigen P2
  misc_feature: Homolog of GI Number: 4505285 NR Desc: mucin 2
MTTAADDYHHSDGFVMPDVLAKGREACYKARDAFYACIEKHADKKPTEIATMGLLYPADCKKSRADFVSNCRPTWVKHFDRQYSAKKRVQRLLDGDGDRRGPMSLPQPYTFKQ

SEQ ID NO: 1143 - DNA, 1171 bp, Zea mays
  misc_feature: Ceres CLONE ID no. 425678
  misc_feature: Ceres CDNA ID no. 40041217
  CDS (79)..(960): REFERENCED BY SEQ ID NO: 1144
caccgacacgcaccgtccggtccgccgctgcgttgcctttgccccctcctcgaggctagccccgcctcgcgggaggagatggactgctgccggcacgtgaacccgttccgcgcctgctcggggctgcgcgggctgggctacctcatggtggcgctcgtcgccgccatcgtcgccgtgtcctactacgccgtcgtcgtctacgcatggggccccatgctcctcgccgggggagcagccgcggcaggtgctgccgccgtgatcgccgccttccacatactccttgcaatgattctttggtgctatttgatggctgttttcactgatcctggtgctgtacctgaaaactggagacatgatgctgaagatagcgggaacccttcattttcctcttcagatgagcaagaaagtgctcctagatattgttctcgctgtcaaaatggcaaacctccccgatgtcatcattgttctgtttgtaacagatgtgtgcttaaaatggaccatcactgcatttgggtagttaattgtgttggagcaaggaactacaagtattttctcctttttctggtgtatacatttattgagactgtgctggataccttggtactacttccaaacttcattgaattttttcaagatgaacataggcgttcaagctctcctggggatattgctattctatttcttgcttttgttctcaatttagcatttgcgctgagcctcctctgtttcattggcatgcacgcgtctcttgttacacgtaacacgacttctatagaggtctacgaacggaagaagtcggtttcatggaaatacgacctaggatggaaacgaaacttggagcaggtctttggtaccaaaaagttgctctggtttgttcccttatactccacagaggatctgcacaacatccccgcgcttcgaggcatggagttccctactcgctccgacgcaatcgtctaattgcatgtgatgcctagcagagtgttctatgccatagggtttgtctcacgtttacactataggatttctatacggagatctgttaattcttttctgtacagaaatgcacacgcagttctttcgtgtaccagctgtaaggaccagacatgtatttacacaattctgttaattctttggttggtttatattttagacaaaaaaaaaaaaaaaa

SEQ ID NO: 1144 - protein, 293 aa, Zea mays
  misc_feature: Ceres CLONE ID no. 425678
  misc_feature: Ceres CDNA ID no. 40041217
  misc_feature (104)..(168): Pfam Name: zf PFAM Desc: DHHC zinc finger domain
  misc_feature: Homolog of GI Number: 79458493 NR Desc: metal ion binding
  misc_feature: Homolog of GI Number: 50919203 NR Desc: putative zinc finger protein
  misc_feature: Homolog of GI Number: 7267423 NR Desc: AT4g00840
  misc_feature: Homolog of GI Number: 7269121 NR Desc: predicted protein
  misc_feature: Homolog of GI Number: 56784690 NR Desc: Zinc finger DHHC domain containing protein 2
  misc_feature: Homolog of GI Number: 70950449 NR Desc: cell cycle regulator with zn
  misc_feature: Homolog of GI Number: 68372370 NR Desc:  similar to zinc finger
  misc_feature: Homolog of GI Number: 82593019 NR Desc: Palmitoyltransferase pfa3
  misc_feature: Homolog of GI Number: 47682572 NR Desc: MGC81318 protein
MDCCRHVNPFRACSGLRGLGYLMVALVAAIVAVSYYAVVVYAWGPMLLAGGAAAAGAAAVIAAFHILLAMILWCYLMAVFTDPGAVPENWRHDAEDSGNPSFSSSDEQESAPRYCSRCQNGKPPRCHHCSVCNRCVLKMDHHCIWVVNCVGARNYKYFLLFLVYTFIETVLDTLVLLPNFIEFFQDEHRRSSSPGDIAILFLAFVLNLAFALSLLCFIGMHASLVTRNTTSIEVYERKKSVSWKYDLGWKRNLEQVFGTKKLLWFVPLYSTEDLHNIPALRGMEFPTRSDAIV

SEQ ID NO: 1145 - DNA, 1181 bp, Zea mays
  misc_feature: Ceres CLONE ID no. 425724
  misc_feature: Ceres CDNA ID no. 25445992
  CDS (154)..(906): REFERENCED BY SEQ ID NO: 1146
gtccttgcaaccctccgccctttcggttgtcgcaatataaacttgccggggagcgtggcgaccatttgcccccagcagatcttgtgaccctccctcagccgcgtcgcgtcgcatcctacgatccaaagctctctctggtcgcaggtcgcagccatggcgaagaactacccgaccgtgagcgccgagtacagcgaggctgtggacaaggccaggcgcaagctccgagccctcatcgccgagaagagctgcgccccgctcatgctccgcctcgcgtggcactccgcggggacgttcgacgtgtcgtcgaggaccggcggtccattcggcacgatgaagcatcagtcggaattggctcacggcgctaacgcggggctggacatcgcggtgcggctgctcgagcccatcaaggaggagttcccaatcctctcttacgccgatttctaccagctcgcgggagttgtggccgtggaggtcaccggtgggcctgagattcccttccaccccggtagggaggacaagcctcagcccccacctgagggccgccttcctgatgccactaagggttctgaccacctgaggcaagtttttggcaagcagatgggcttgagcgatcaggacattgttgccctctctggtggccacaccttgggaaggtgccacaaagagcggtctggtttcgagggggcctggactacaaaccctttggtctttgacaactcttacttcaaggaacttctgagtggtgataaggagggccttcttcagctcccaagtgacaaagccctgctgagtgaccctgtcttccgccctcttgtcgagaaatatgctgcggatgagaaggctttctttgatgactacaaagaggcccacctcaagctctccgaactggggtttgctgatgcttaaatagaccctatcctggagtgatacattctgctgcatgtggtcttttgcatctggagtcaatgtgaacaagcagattgtcgtattgtctttctcgtaataaatttgtcaatgttgagcccttaggcttgaattgtgggaccctttgttcgttttcctagactctgatgctgtatgcaactgaaacgagtaaatctatgatcttaaggctgcagtatgttcttgtgttactgtgcgtttatctagtttccgttggttcggcaaaaaaaaaaaaaaaa

SEQ ID NO: 1146 - protein, 250 aa, Zea mays
  misc_feature: Ceres CLONE ID no. 425724
  misc_feature: Ceres CDNA ID no. 25445992
  misc_feature (19)..(227): Pfam Name: peroxidase PFAM Desc: Peroxidase
  misc_feature: Homolog of GI Number: 50920595 NR Desc: Putative ascorbate peroxidase
  misc_feature: Homolog of GI Number: 3688398 NR Desc: ascorbate peroxidase
  misc_feature: Homolog of GI Number: 2997688 NR Desc: ascorbate peroxidase
  misc_feature: Homolog of GI Number: 1420938 NR Desc: cytosolic ascorbate peroxidase
  misc_feature: Homolog of GI Number: 37196687 NR Desc: cytosolic ascorbate peroxidase 2
  misc_feature: Homolog of GI Number: 4406539 NR Desc: ascorbate peroxidase
  misc_feature: Homolog of GI Number: 1336082 NR Desc: ascorbate peroxidase 2
  misc_feature: Homolog of GI Number: 15808779 NR Desc: ascorbate peroxidase
  misc_feature: Homolog of GI Number: 600116 NR Desc: cytosolic ascorbate peroxidase
  misc_feature: Homolog of GI Number: 62910196 NR Desc: cytosolic ascorbate peroxidase
  misc_feature: Useful for delaying flowering time
MAKNYPTVSAEYSEAVDKARRKLRALIAEKSCAPLMLRLAWHSAGTFDVSSRTGGPFGTMKHQSELAHGANAGLDIAVRLLEPIKEEFPILSYADFYQLAGVVAVEVTGGPEIPFHPGREDKPQPPPEGRLPDATKGSDHLRQVFGKQMGLSDQDIVALSGGHTLGRCHKERSGFEGAWTTNPLVFDNSYFKELLSGDKEGLLQLPSDKALLSDPVFRPLVEKYAADEKAFFDDYKEAHLKLSELGFADA

SEQ ID NO: 1147 - DNA, 829 bp, Glycine max
  misc_feature: Ceres CLONE ID no. 437701
  misc_feature: Ceres CDNA ID no. 40350968
  CDS (9)..(578): REFERENCED BY SEQ ID NO: 1148
cctaaaaaatgtcccgattgctgtcgaaaaccctaattccccacgggagattcttcctccgtcgcttcaacgacgcggcttcgaagaaaacggcggcgccgagcctcgtctgtttcaaccgccgtccctattcatcgaaacctcatctgatcgagatcgacctggactcttcctcgtcagcgacttccaaggccgaagccgaagccgcggttctcaagaagctgaacgagttcgtacggaggatcgtcgttcagaactcgactcccgattggctccctttctccccaggatcctccttctgggtccctccgcaccaaaacaccgccgccaagatcgctaatttggtcgaccaggtgacgcatcctttgacggaggaggaggttctctccctgtcttctccttctggctggccttgctcctctttcttcactcctcctccagatgatgattcttcatctaaacaaagggtggaaggtagcacggagttgaacgttccggggaatgagatgctggaagtcaagctagcgcagtttcccgatccaatctacttgttggaacacggagatgatgatgagtgattttacatttccagctcacgtggaaggccagtcctgatgcatggtttgcgttgacaggctttggagaaaaaaagacagatgattctcgagactgatgaggttgtgtttgtatatacagttgcaagccgtggaattatatcgatgttttggctgtcttaacgctgtttgtgaactataaattatacagcttgatattaattaattaaaaccgtagcagacggtgcaacttcagattaaaaaaaaaaaaaaaa

SEQ ID NO: 1148 - protein, 189 aa, Glycine max
  misc_feature: Ceres CLONE ID no. 437701
  misc_feature: Ceres CDNA ID no. 40350968
MSRLLSKTLIPHGRFFLRRFNDAASKKTAAPSLVCFNRRPYSSKPHLIEIDLDSSSSATSKAEAEAAVLKKLNEFVRRIVVQNSTPDWLPFSPGSSFWVPPHQNTAAKIANLVDQVTHPLTEEEVLSLSSPSGWPCSSFFTPPPDDDSSSKQRVEGSTELNVPGNEMLEVKLAQFPDPIYLLEHGDDDE

SEQ ID NO: 1149 - DNA, 627 bp, Glycine max
  misc_feature: Ceres CLONE ID no. 437729
  misc_feature: Ceres CDNA ID no. 25891096
  CDS (64)..(402): REFERENCED BY SEQ ID NO: 1150
agttctagtctagggttacgccgtcgtcgctgtttgtgtgtgtatcaggtgcagctaccaacgatggtgaagggtcgtcaaggagagcgcgtcagactctacgtgaggggtacaatccttggatacaaaaggtccaagtccaaccagtacccaaacacatccctgatccaaattgagggagtgaacaccaaagaagaagtaggatggtatgctggcaagaaaatggcctatatctacaaggctaaggtgaaaaaggatggaagccattaccgctgcatatggggcaaggttacgaggcctcacggcaacagtggtgttgtccgtgcaaaattcaagtcaaaccttccacccagatcgatgggagctcgagtaagagtattcatgtatccaagtaatatatgagattcaggtgataagacgctcagaattcgcagcttaatagtaggcacaaggatttttgtttcagctttgataattttgttgtctgtcaactttttgagaattttccttacggtttagacgttcatttgaacgaatgtttttctccgttattatagctattgtctatgaagattatatattcattactatgaagcgtgtggatttggcaaaaaaaaaaaaaaaaaa

SEQ ID NO: 1150 - protein, 112 aa, Glycine max
  misc_feature: Ceres CLONE ID no. 437729
  misc_feature: Ceres CDNA ID no. 25891096
  misc_feature (12)..(106): Pfam Name: Ribosomal_L35Ae PFAM Desc: Ribosomal protein L35Ae
  misc_feature: Homolog of GI Number: 13430186 NR Desc: ribosomal protein L33
  misc_feature: Homolog of GI Number: 17104787 NR Desc: putative ribosomal protein
  misc_feature: Homolog of GI Number: 30102814 NR Desc: At1g41880
  misc_feature: Homolog of GI Number: 21593235 NR Desc: ribosomal protein L35a
  misc_feature: Homolog of GI Number: 50915390 NR Desc: putative ribosomal protein L35A
  misc_feature: Homolog of GI Number: 18092339 NR Desc: ribosomal protein L35A
  misc_feature: Homolog of GI Number: 14719290 NR Desc: ribosomal protein L35A
  misc_feature: Homolog of GI Number: 50932737 NR Desc: putative ribosomal protein L35A
  misc_feature: Homolog of GI Number: 55741076 NR Desc: rpl35A
  misc_feature: Homolog of GI Number: 57227764 NR Desc: 60s ribosomal protein l33
  misc_feature: Useful for making ornamental plants with modified flowers
  misc_feature: Useful for making stronger plants
  misc_feature: Useful for sterility
MVKGRQGERVRLYVRGTILGYKRSKSNQYPNTSLIQIEGVNTKEEVGWYAGKKMAYIYKAKVKKDGSHYRCIWGKVTRPHGNSGVVRAKFKSNLPPRSMGARVRVFMYPSNI

SEQ ID NO: 1151 - DNA, 1141 bp, Zea mays
  misc_feature: Ceres CLONE ID no. 437853
  misc_feature: Ceres CDNA ID no. 36592361
  CDS (200)..(781): REFERENCED BY SEQ ID NO: 1152
ctccatcaaaagaaggcagggaaagatctgatctggggggtgagagagcaggaggagaaagccaagccattgccctcccctcttgaaggcttggagcttggttctacatcctcttctcttcccctccgtctttctctctctctctctctatttggtttgcttgcttgcctctactagactctagtcgtcgggtccggccatggccaccatcctggagaacatccagaaggcgaggttcctgccgaccaggccgctcaaggacgagctgcccaccttccagggcggcggcggcggcaagggcaaggaggagagccacctcatgggcctgaggaagcggctgtccagcttctccggcaagatccagcccatctcctccgcgtcggccgccgagtgggcgttccgccgctccaagtcggcgccctccctcggcgccgccttcgccgcggggggcggctccctgaggcagtggtggcagtggggcgtcggctggctcctgtccaagaagcccgggttcgcgggcgacctcgagatgaacgaggaggaggtcgccgcgctgggccgccagagcaggggcacctgggcccacgtcctcttcaagatgcggtccggcgtccgccgcctcgtcgcgtccgcgcactcgctccccaccacgcacaagcagcagtccctgccgtcgtcgtcggcctcggcggcgcacagcgtccagtgcaagccggcggcgtcgttcgcctacgcgcagcggcagagcttccaccacaccggccacgccatggcgcactaggcagcgtctcgcggttgccggtgccgtctgcggccggtctcctccagatccacggatggagagcgctgagaggcgcgagaagaagaagaagaagaagatccaggttacaggtgcgtgagatcgacggtgaagatgtcgttgaattgatgatgaatgaaatggaatgtaggattaccgttctgtggtctgtgtagatctagtgcccctgtagaggtgaacacgtgttatactacatgctcgttctttatattattcctttgggttcgttcgttggacgatgtaaatgtaaaatgttttgttgatcttgtactgttaaataaaactgatgcaaattgtgcccctcgaaaaaaaaaaaaaaaa

SEQ ID NO: 1152 - protein, 193 aa, Zea mays
  misc_feature: Ceres CLONE ID no. 437853
  misc_feature: Ceres CDNA ID no. 36592361
  misc_feature: Homolog of GI Number: 67987177 NR Desc: 4Fe
  misc_feature: Homolog of GI Number: 66777231 NR Desc: Ferric
  misc_feature: Homolog of GI Number: 57226056 NR Desc: RNA binding protein
  misc_feature: Homolog of GI Number: 66776813 NR Desc: Phosphoribosylaminoimidazole
  misc_feature: Homolog of GI Number: 67985765 NR Desc: Pantoate
  misc_feature: Homolog of GI Number: 73950203 NR Desc:  similar to serine/arginine repetitive matrix 1 isoform 1
  misc_feature: Homolog of GI Number: 50933659 NR Desc: putative high
  misc_feature: Homolog of GI Number: 5821145 NR Desc: RNA binding protein
  misc_feature: Homolog of GI Number: 71367849 NR Desc: similar to Methylase involved in ubiquinone/menaquinone biosynthesis
MATILENIQKARFLPTRPLKDELPTFQGGGGGKGKEESHLMGLRKRLSSFSGKIQPISSASAAEWAFRRSKSAPSLGAAFAAGGGSLRQWWQWGVGWLLSKKPGFAGDLEMNEEEVAALGRQSRGTWAHVLFKMRSGVRRLVASAHSLPTTHKQQSLPSSSASAAHSVQCKPAASFAYAQRQSFHHTGHAMAH

SEQ ID NO: 1153 - DNA, 463 bp, Zea mays
  misc_feature: Ceres CLONE ID no. 438000
  misc_feature: Ceres CDNA ID no. 25446382
  CDS (57)..(380): REFERENCED BY SEQ ID NO: 1154
atccacggaatggaatcgaatcgtccaggaaaggggaggaccggagcgagagcgagatggtagtggtggccgccgcggccgcacgcggccgcgctgtaaagcccctgttcctcgtcctcgtccaccacagccgccccgcgccccgcctcccccgccgaaccgcccgcgcccggccgctgcgcttcctctcctgctcgacctcagcgccgccgctgttcgcagccgtcgcatccatggactcgccgccccagggttaccgcaccaacgtcggcatctgcctcgccgacccatccctcaccaagattttctcggcttctaggatcgacattcctagcgcgtggcagatgcctcagggtggtatagatgcaggtgtagtgtaatctatctgtagctgacccgattgtagcgatgcagcaattaatctcaaaagggttgcagacttgagcaaaaaaaaaaaaaaaaa

SEQ ID NO: 1154 - protein, 48 aa, Zea mays
  misc_feature: Ceres CLONE ID no. 438000
  misc_feature: Ceres CDNA ID no. 25446382
  misc_feature: Homolog of GI Number: 2564253 NR Desc: diadenosine 5'
  misc_feature: Homolog of GI Number: 50929793 NR Desc: OSJNBa0088H09.20
  misc_feature: Homolog of GI Number: 16323514 NR Desc: putative diadenosine 5'
  misc_feature: Homolog of GI Number: 1888557 NR Desc: diadenosine 5'
  misc_feature: Homolog of GI Number: 14488439 NR Desc: Chain A
  misc_feature: Homolog of GI Number: 21360539 NR Desc: At1g79500/T8K14_8
  misc_feature: Homolog of GI Number: 8567796 NR Desc: diadenosine 5'
  misc_feature: Homolog of GI Number: 21593042 NR Desc: diadenosine 5
MDSPPQGYRTNVGICLADPSLTKIFSASRIDIPSAWQMPQGGIDAGVV

SEQ ID NO: 1155 - DNA, 1601 bp, Zea mays
  misc_feature: Ceres CLONE ID no. 438077
  misc_feature: Ceres CDNA ID no. 40350969
  CDS (41)..(1456): REFERENCED BY SEQ ID NO: 1156
cctcccccctgttcccctcgtcttgtcgccgcctacgaaaatggctgcgctcgcgacactcctccgccacagccgccgcagccatgcccacgtcctccccatctcccgtgcgctctccaccaccaccccgaccaccggcggcaccgatcccgttgccatcacgttgtcggacgccaagagacaactcctccgcgagcgcgatccggaccgcgtggtctccatcctcgacgccatcgacacggcgtccatctccgctgcttccacccggcacgcgctctccctcgccgcgcgccgcctttctcgctcccgccgcttcgctgacgcggaggccctcctctcctcccatctcaccgcgtccaccaccgaggcccacctcgccgccgtcctgtgctcctacgcctccgccaacctccccgagaaggccatcgacgcgttccgctccgctgcgccgtcccttccaacccccaactccccgctccccttcaacgccctcctctccaccttcatacgatgtcgccgctacagacgcgtccctgtcctcttcgctgagctctccaaggagttttccatcacccccaatgccacatcctatggcatccttgtcaaggcctactgcatggcccgcgatgatgctaaggccaagcaggccttggatctaatgcgcgagcaaggtatctcgccgaccaacaggatctacaccacgttgatcgattccatgtataagaggaagatgaccaatgaggctgagtctttgtggaaagagatggtagaaagtgaatgtgagcccgatgtggcaacttataatgtgaaggccatgtactacgcgctccatggaaagccagaagaggttatggaggtgatgacagagatggaagcggctggtgtgaagccggacaccaccacctacaatttcctcatgactagctattgcaagagtggcaaattggaggatgctaaggttctttaccactccctagctgagaaggggtgctcggcagatgctgccacgtacaagcacatgttagcagaactctgtgcctatggagactttgatgctggtttgggcatcttcaaggatagcttaaagaggcgtaaggtgccagattttagaacaatgaaagggttggttgagggattggcaaagggaggcagggtggctgatgccaaagaggttgttgcagaggtaaaaaagatgttcccagagaatttgctgtctggttggaagaaggttgagaaagagcttgggttggactcagatagtggagaaactcctctgttggaagttacatctggagaaactgttgctgaggttaggcccgatgctgcagaggtagaggcacttgagctcgaaggatctgccgctgaggaagttactgtatcagaagaatccagtgatgatgaagcttatgtgcctgaagcatcatctagtgaagaagtgccacaaggtcgtgcctaagtggtattgccatgttattcaagtttcatgggtggtgtttgcattgatcacattctctacacaaaagaattgttaatgctgccctgtaatggtaaacattagattttcaatacatgctcctgagctgccaaaaaaaaaaaaaaaa

SEQ ID NO: 1156 - protein, 471 aa, Zea mays
  misc_feature: Ceres CLONE ID no. 438077
  misc_feature: Ceres CDNA ID no. 40350969
  misc_feature (322)..(356): Pfam Name: PPR PFAM Desc: PPR repeat
MAALATLLRHSRRSHAHVLPISRALSTTTPTTGGTDPVAITLSDAKRQLLRERDPDRVVSILDAIDTASISAASTRHALSLAARRLSRSRRFADAEALLSSHLTASTTEAHLAAVLCSYASANLPEKAIDAFRSAAPSLPTPNSPLPFNALLSTFIRCRRYRRVPVLFAELSKEFSITPNATSYGILVKAYCMARDDAKAKQALDLMREQGISPTNRIYTTLIDSMYKRKMTNEAESLWKEMVESECEPDVATYNVKAMYYALHGKPEEVMEVMTEMEAAGVKPDTTTYNFLMTSYCKSGKLEDAKVLYHSLAEKGCSADAATYKHMLAELCAYGDFDAGLGIFKDSLKRRKVPDFRTMKGLVEGLAKGGRVADAKEVVAEVKKMFPENLLSGWKKVEKELGLDSDSGETPLLEVTSGETVAEVRPDAAEVEALELEGSAAEEVTVSEESSDDEAYVPEASSSEEVPQGRA

SEQ ID NO: 1157 - DNA, 1558 bp, Zea mays
  misc_feature: Ceres CLONE ID no. 438256
  misc_feature: Ceres CDNA ID no. 25446835
  CDS (331)..(906): REFERENCED BY SEQ ID NO: 1158
gccgcacacggcacatctcagcgcctcgcctccaccagtccacctccacaacgtcaccttcacctcctcgccgccagacgcgcccgccgccaccccgtgagccggcaacctcccaccatctagcctctgcgcccggccggccaccgggcactggccacgtccggccgacggccgcctgaggcagtgaggcctgaccacgccctcccttctccactttgtgtctgtgccctgtcttggattcgtggttgtctccgccactgatctcctcctagcacggcagcaccccagagccctagcgcaagcctggcgctccagatctccaccctgaccatgtcggggcggagacaggcctggcagtttgcggccgcgctggtcttcttccacggctccgagtacgtcctcgctgccgctttccacggccgccagaacgtcaccgctacttcacttcttattagcaagcagtatgtattggcaatgggttttgcaatgctggaacacctgacagaaattcttattctcccggaagtaaaggagttctggtttgtcagtaatattggccttctaatggttattatcggtgaaattatccgtaaacttgctgtagtgacagctggacgtgccttcacacacgttataagaacttattatgaagatcaacatcaattgatcacgtatggactgtataggtttatgcgccaccctgggtattctggctttcttatatgggcagtaggaacccaggttatgctgtgtaatccattatcaacagttgcattcacattggtcttgtggcgattcttttcaaaacggataccgtatgaagaatttttcttgaagcagttctttggctctgaatacgatgaatatgcacagagagtacactctggaataccatttattaaatgaaagtatggcacttgcaaaaaagaggatgtaaagggaatgcaggtagtgctaatggcccaagctaaaagaatggatcatgattatcatttggccaatgattcgaggcaattcctttatcatatttcatctgctgtattctccaagtgacattttcactgatgtatgctcgataactccaataaaggcaaaagcgagagatgctacagctttgttgaatgcaaacaggtttgctcgtgttgaattattgtaaggccgcgcatagcagagcgtgcatatgttgaattattgttgaatgcaaacattgttttgtactgtagactatactgtttacagagtagagtttgaaatagagtagagttgaaatagagtagagattgaaatagagtaaagtttgaaatagagtagagtttgaaatagtaagataggaaatgagagagagaggctgctggagatagcctaatatattacaagtgcacaaacctgctccagcttgcttgggacaaaaggatctgatgccatttttgttcttaggtttttttttatctggttataagctgttgttttgtactgagatttcattgttcacttgaagaaacccttgctgggagagcagaatgcatggtgctgtttgagtaaaaaaaaaaaaaaaaaa

SEQ ID NO: 1158 - protein, 191 aa, Zea mays
  misc_feature: Ceres CLONE ID no. 438256
  misc_feature: Ceres CDNA ID no. 25446835
  misc_feature (74)..(170): Pfam Name: ICMT PFAM Desc: Isoprenylcysteine carboxyl methyltransferase
  misc_feature: Homolog of GI Number: 50928505 NR Desc: OSJNBa0041A02.18
  misc_feature: Homolog of GI Number: 10177821 NR Desc: farnesyl cysteine carboxyl methyltransferase
  misc_feature: Homolog of GI Number: 57529416 NR Desc: similar to Protein
  misc_feature: Homolog of GI Number: 48735059 NR Desc: LOC397717 protein
  misc_feature: Homolog of GI Number: 1906804 NR Desc: farnesyl cysteine carboxyl methyltransferase
  misc_feature: Homolog of GI Number: 55590505 NR Desc:  similar to Protein
  misc_feature: Homolog of GI Number: 60832128 NR Desc: isoprenylcysteine carboxyl methyltransferase
  misc_feature: Homolog of GI Number: 6912430 NR Desc: isoprenylcysteine carboxyl methyltransferase isoform 1
  misc_feature: Homolog of GI Number: 57087005 NR Desc:  similar to Protein
MSGRRQAWQFAAALVFFHGSEYVLAAAFHGRQNVTATSLLISKQYVLAMGFAMLEHLTEILILPEVKEFWFVSNIGLLMVIIGEIIRKLAVVTAGRAFTHVIRTYYEDQHQLITYGLYRFMRHPGYSGFLIWAVGTQVMLCNPLSTVAFTLVLWRFFSKRIPYEEFFLKQFFGSEYDEYAQRVHSGIPFIK

SEQ ID NO: 1159 - DNA, 1296 bp, Zea mays
  misc_feature: Ceres CLONE ID no. 438642
  misc_feature: Ceres CDNA ID no. 25447321
  CDS (3)..(971): REFERENCED BY SEQ ID NO: 1160
ccccacccatctctctctcccagccggctctctctctctcctctcttctccctgcttcagccgattccaagccgctggacaccaggacgccgagcaagccaggctgcccagccgcgaccccgagcgcccctgcccgaccgcgccaagcgcgcgaccctgcgcgacgacccgccgcccagcgcacgacgccctgcaacccgcgcgcctcaagccgaccgaagccaggaaccgaccaagccgccaagatccgaagcgcccgtgaccgttcttcttcgcgagtaaaggagcatttagtcatccggcagcgacgatcctacagggggcaaacacgatctctgcccctccttccccaaaatcatctctctcccgatcttggcctccccagattcaccacctgctctcctctccggctacgaccttggctcatcctgattcggacacgcaacatggttcaccactctagtttcgctgatgatgatgggatcacaaaagcttgcagctgtcctttgcttccactgaaaactcatatcaagggcccggcaccagcctctgaccctgataaagcggacattgttgatgaagccataactttctttcgagccaatgttttcttcaaaaatttccatgtgaaatgctcagcagacaagttattgatctatctgacgttttatatcaatattgccttaaaaagactagaaggttgccggacactagctgttgggactaaagcaatcattaatctgggattggagaaagttcctgtacctggggaaccagggtttcctttccctggacttttcactcttccccagtcccaggaggaagcagaattgttgaggaattatttgaagcagataagggaggaaacaagtggaagattgctcaactgtgcatacagagctaatggctttccaaacaagtggtggttggcttttgctaagaggaagttcatgaacattgtcatcctttagacttgggctttttgtaccaactggttcaagctgttttttcactcatgatcgtgtgaagtatccacacacaacaaagatagttatcctacatcccaaagtaacaagccaaagacttcgatgataggatagatgaatgacataagataaattatttgttcccaatttgcgatgtataaccgtgggaacaataattatcatgttgtattgccttttgtaattctcaccctgctatatcagagagacgaaacctcatacgggggtatatttgtatgagtatattctacaatgatgtctaaaacgagacagttcaaaaaaaaaaaaaaaa

SEQ ID NO: 1160 - protein, 174 aa, Zea mays
  misc_feature: Ceres CLONE ID no. 438642
  misc_feature: Ceres CDNA ID no. 25447321
  misc_feature (1)..(173): Pfam Name: P21 PFAM Desc: P21
  misc_feature: Homolog of GI Number: 50251225 NR Desc: putative actin related protein 2/3 complex
  misc_feature: Homolog of GI Number: 18406746 NR Desc: ARP2/3 complex 21 kDa subunit family
  misc_feature: Homolog of GI Number: 21536845 NR Desc: Contains similarity to 21 KD subunit of the Arp2/3 protein complex
  misc_feature: Homolog of GI Number: 57105594 NR Desc:  similar to ARP2/3 complex 21 kDa subunit (Actin-related protein 2/3 complex subunit 3)
  misc_feature: Homolog of GI Number: 48126067 NR Desc: similar to ENSANGP00000008511
  misc_feature: Homolog of GI Number: 40642998 NR Desc: actin related protein 2/3 complex
  misc_feature: Homolog of GI Number: 9790141 NR Desc: actin related protein 2/3 complex
  misc_feature: Homolog of GI Number: 5031597 NR Desc: actin related protein 2/3 complex subunit 3
  misc_feature: Homolog of GI Number: 62901838 NR Desc: p21
  misc_feature: Homolog of GI Number: 2209347 NR Desc: p21
MVHHSSFADDDGITKACSCPLLPLKTHIKGPAPASDPDKADIVDEAITFFRANVFFKNFHVKCSADKLLIYLTFYINIALKRLEGCRTLAVGTKAIINLGLEKVPVPGEPGFPFPGLFTLPQSQEEAELLRNYLKQIREETSGRLLNCAYRANGFPNKWWLAFAKRKFMNIVIL

SEQ ID NO: 1161 - DNA, 1767 bp, Zea mays
  misc_feature: Ceres CLONE ID no. 439141
  misc_feature: Ceres CDNA ID no. 25446626
  CDS (481)..(1422): REFERENCED BY SEQ ID NO: 1162
atgattattttgtttccacgagcattctagctagggttcagacgaatttctaggaggaggtcgcgcgacaccgtccatccacggcgaaagcaggctcgccccacaacagctttgttccattgcatcctccccaactcatgttgtgctgtgcctggtggtcaggaaagaggctcctccctttccctctccacctcgccgtgcttctccagtccacctcccccctcgtcgttgcttcttccctccccttccctcgtcgtcgcgctatcccgccggtgcgcgggcgtggggccaagcgccgccgaaaggtagcagcagaggagaagacggacacggacgcaatagcgtccacccccgtaggcaccccccgcccaaagactggtggcaggcctcctacaggcagatgctagagccatgtgactccctaccaaagaatatcctggcaaaaggtgcttctcgctgaccatcgaaacacagagcttcatgtctgtccagtccaaggtggttgcgcttggtgcactgatcttccttgtctcgtatggctcttgcactaggattgtcaactttaatgcctcccacatcaccaccgacccctactgggtggctgccagggccacttggtacggtgcgccaaccggcgctggcccctatgacaacggtggtgcttgtgggttcaagaatgtgaacctacctcctttctcggccatgacatcgtgcggcaaccagcccctgttcaaggatggcaagggctgtggctcgtgctaccagatacgttgtgtcaaccacccggcatgctctggcaacccggagactgtgatgatcaccgacatgaattactacccagtcgccaagtaccactttgatctcagtggcacggcgtttggtggcatggcacagcccggccgcgacaatgagctccgccacgccggcatcatcgacatccagtttaggagggtgccctgcatctaccccgggcagacagtgaccttccacatcgagcacggctcaaaccccaactacttagcagtgctcgtcgagttcgaagatggcgatggcgatgtggtccaggtggacataatggaggccaactctgggtggtggatgccgatgcgggagtcgtggggatccatctggaggatggactccaagcgccggctgcaggggcccttctcgctgcgcatcactaacgagtcaggcgagacattggtggcttaccaggtcatcccggcaaactgggcgcccaacagctactaccgctccaacatccagtacgaggcttttggctctgctgctggacaggctactggctctgctgttggactggtcattagctctgctgctcgactgcacacgttaattaccaggatcattggcttgatctgtttggtattattgtatcatttgcaagggattgaggtgccttagttttaattagcacttgacatgttgggtgtcctacgctgtaggtggtgttgtgtgtttgctggaggcgtcgtcggtccagagtttcatcttttcgaaaaagttttgaaaccaaataattttcctatgaatttcgttgattcctgcgtgacaggtagctgatgtagctctgtgggagatgtacacatgtatttggtgctagatagctgggctgtcctgtcttgttctggctgttgtaaggggctcactgctttcaactgttctataaatcttactagtcggttgcccgtgcgttacgacgcttacaataatacccacgtaaactatccaccaaataaaaaaaaaaaa

SEQ ID NO: 1162 - protein, 313 aa, Zea mays
  misc_feature: Ceres CLONE ID no. 439141
  misc_feature: Ceres CDNA ID no. 25446626
  misc_feature (167)..(248): Pfam Name: Pollen_allerg_1 PFAM Desc: Pollen allergen
  misc_feature (76)..(155): Pfam Name: DPBB_1 PFAM Desc: Rare lipoprotein A
  misc_feature: Homolog of GI Number: 14193773 NR Desc: beta
  misc_feature: Homolog of GI Number: 14330330 NR Desc: beta expansin B3
  misc_feature: Homolog of GI Number: 37536760 NR Desc: beta
  misc_feature: Homolog of GI Number: 51242711 NR Desc: beta
  misc_feature: Homolog of GI Number: 44894800 NR Desc: expansin EXPB3
  misc_feature: Homolog of GI Number: 44894796 NR Desc: expansin EXPB1
  misc_feature: Homolog of GI Number: 37536756 NR Desc: beta
  misc_feature: Homolog of GI Number: 8118432 NR Desc: beta
  misc_feature: Homolog of GI Number: 51242715 NR Desc: beta
  misc_feature: Homolog of GI Number: 14330328 NR Desc: beta expansin B2
  misc_feature: Useful for making plants with increased biomass
MSVQSKVVALGALIFLVSYGSCTRIVNFNASHITTDPYWVAARATWYGAPTGAGPYDNGGACGFKNVNLPPFSAMTSCGNQPLFKDGKGCGSCYQIRCVNHPACSGNPETVMITDMNYYPVAKYHFDLSGTAFGGMAQPGRDNELRHAGIIDIQFRRVPCIYPGQTVTFHIEHGSNPNYLAVLVEFEDGDGDVVQVDIMEANSGWWMPMRESWGSIWRMDSKRRLQGPFSLRITNESGETLVAYQVIPANWAPNSYYRSNIQYEAFGSAAGQATGSAVGLVISSAARLHTLITRIIGLICLVLLYHLQGIEVP

SEQ ID NO: 1163 - DNA, 461 bp, Zea mays
  misc_feature: Ceres CLONE ID no. 439563
  misc_feature: Ceres CDNA ID no. 40350970
  CDS (1)..(273): REFERENCED BY SEQ ID NO: 1164
aggacggagatgacgcagaagcagaccctgttcaaggggcagagcaagaagaagactatccctcccaaccgccacggcaaggcgcctcatgttcgtaaaggaaagagagccgtcaagcccaccaagttcacaaaggacatggacgccgagaaggaactcaccaagttcatcaaccagtgcaacgaaataaaagctgcgaatcttgctagcaaagagggcggtgacctcaacatagtgaaggcggatggtgaggaatctaaatcaaagaaataggaagccagaaactgaaaacgagtgtgtgaaacgtgatgcgtggtaaactgttaatgcgatgtattctgctgaagaaaattcagttccgtatggctgggtagatgaacatgtttagcgcaaagtgacggtgtaactgcaaccggggtaatggcttgcaagttttgttctgtgccaaaaaaaaaaaaaaa

SEQ ID NO: 1164 - protein, 87 aa, Zea mays
  misc_feature: Ceres CLONE ID no. 439563
  misc_feature: Ceres CDNA ID no. 40350970
MTQKQTLFKGQSKKKTIPPNRHGKAPHVRKGKRAVKPTKFTKDMDAEKELTKFINQCNEIKAANLASKEGGDLNIVKADGEESKSKK

SEQ ID NO: 1165 - DNA, 1612 bp, Zea mays
  misc_feature: Ceres CLONE ID no. 440600
  misc_feature: Ceres CDNA ID no. 36588211
  CDS (111)..(1298): REFERENCED BY SEQ ID NO: 1166
ctcttcagcgccctgcgcccaagctccagctccgatccgtaacccaaacaaacgacaccttgggcttggagcctactgtgccaccggcccgcccacgagaccccgcggccatgtccatcccgcggctcctcctcctcgccgtcctcgccgccgccgctgcgtgcgcgcccgcgcacgccgccggcgccggcgcctgcgcggcggagaagttctcgggcaaccgcgcgttcgcggcgtgcgccgacctggcccgcctgggcgcgtcgctgcactggtcctacgacgccgcggcggcgtccctgtccgtggcgttcctggcggccccgccgtccgcgggcggctgggtcgcctggggcctcaaccccagggcgcagagcatggacggcacgcaggcgctggtcgccgtccccagctccggcggcggcggcgcgtacgaggtgcagacctacagcatctccgggacctcgctcggcgccccgggtccgctctccgcctaccggacttccggcctcgccgccgaggtcggcggcgacggccgcgtccgggtgttcgcgaccctcgtgctccccaacggcacgggcgccgaggtcaaccacgtctggcaggtcgggccctactccggcgggatccagatacgcgacaccaagggcgacaacatgaacgccaaggggacgctcaaccttctaaccggcgccactgccgccgccagcggaggggacagcatcatcaggaagaaaaatactcatgggatcctgaatgcggtgagctgggggcttctgctgcccatgggagccatcttcgcgagatacctcaagacgttcaggtcggctgacccggcgtggttctaccttcacgtcgcttgccagctgctcgggtacggcgtcggggtgtccggctgggcgaccggcatccatctcggaaacctgtccaaggggatcacctactcgctccacaggaacatcgggatcacagtcttcgctctcggcactctgcagatcttcgcgctcttcctgaggccgaagaaggaccacaagtaccgggtgtactggaacgcctaccaccactcggtcggctacaccgtcatcgtgctgggcgtcgtcaacatcttcaagggcatggccatcctcgacgtggagcagaggtggaagacgggctacatcgccgccatctccgtcctcggcgccgtcgccgtggccctggaggccgtcacgtggggcgtcgttctgaggcggaggaaggaggaaagcaagagctacaacggcacctctaacggcggccgcttgccgctgtctatgtagctcgtcgccatgtatctccatcatctggagaggcagcaaacagccgtgcgactggctggcgctggcgcgcttctttcccatcgtgttttcgttacacatacatgcatgctaatctagaccggtagtagttcacatagtacttcgttacatgtatacagtttacttcaagatttagggcatgtttggtttcaattagttctaggactaaactttagtcctaggactaaactttagtccctatatgtttggttctagggactaaatagattctaaagtcattaaataaaaaaaaaaaaagaaaaaaaaaaaaaaaa

SEQ ID NO: 1166 - protein, 395 aa, Zea mays
  misc_feature: Ceres CLONE ID no. 440600
  misc_feature: Ceres CDNA ID no. 36588211
  misc_feature: Homolog of GI Number: 50947767 NR Desc: putative auxin
  misc_feature: Homolog of GI Number: 27363428 NR Desc: At4g17280/dl4675c
  misc_feature: Homolog of GI Number: 21592781 NR Desc: putative membrane protein
  misc_feature: Homolog of GI Number: 50920439 NR Desc: Putative membrane protein
  misc_feature: Homolog of GI Number: 13785209 NR Desc: putative membrane protein
  misc_feature: Homolog of GI Number: 50947771 NR Desc: putative auxin
  misc_feature: Homolog of GI Number: 56202296 NR Desc: membrane protein
  misc_feature: Homolog of GI Number: 34907602 NR Desc: B1078G07.42
  misc_feature: Homolog of GI Number: 50925949 NR Desc: OSJNBb0091E11.23
MSIPRLLLLAVLAAAAACAPAHAAGAGACAAEKFSGNRAFAACADLARLGASLHWSYDAAAASLSVAFLAAPPSAGGWVAWGLNPRAQSMDGTQALVAVPSSGGGGAYEVQTYSISGTSLGAPGPLSAYRTSGLAAEVGGDGRVRVFATLVLPNGTGAEVNHVWQVGPYSGGIQIRDTKGDNMNAKGTLNLLTGATAAASGGDSIIRKKNTHGILNAVSWGLLLPMGAIFARYLKTFRSADPAWFYLHVACQLLGYGVGVSGWATGIHLGNLSKGITYSLHRNIGITVFALGTLQIFALFLRPKKDHKYRVYWNAYHHSVGYTVIVLGVVNIFKGMAILDVEQRWKTGYIAAISVLGAVAVALEAVTWGVVLRRRKEESKSYNGTSNGGRLPLSM

SEQ ID NO: 1167 - DNA, 1342 bp, Zea mays
  misc_feature: Ceres CLONE ID no. 440710
  misc_feature: Ceres CDNA ID no. 40350971
  CDS (121)..(1053): REFERENCED BY SEQ ID NO: 1168
ctctctctctctctgcctcttagcttgtttcacgcattctggtaggagacgaggatcgaggaggcaccgatccgtagcggcgatatcgtagagccgctggtctcacgccgcaccgagacaatggcagaccagttagggtcttacactattagatcccatggaatgatattggcaaggttgcacatgtatgactggataatacttctcctccttgctgtcatagacgggctgttgaatataattgaaccatttcaccgttttgttgggaaagacatgatgactgacttgagatatcctatgaagggcaatacagtgccattttgggctgttccactgattggaattatactgccttgggccatctttgttgggatttacttcaaaaagaagaatttttatgatttgcaccatggcatactggggattctatactcagtgctgataactgcagtgattactgatgcaattaaggatggtgttggacggcctcgtccagattttttctggcgctgtttccctaatggaaatgatgtttatgataacattactactggtgttatatgcaatggagtgaagagcgtaatcaaggaaggccacaagagctttcccagtggacacagttcatggtcttttgctggtctaggcttccttgcatggtacttagctgggaaactcacagcctttgaccgcaaagggcatattgcgaagctatgcattgtgttcctgcctctccttactgccgcacttgtggctgtttctcgagtggacgactactggcatcattggcaagatgtatttgcagggggtcttataggtcttacagttgcttcgttttgctacctacagtttttcccatatcctttcgatggcgatgctttgtggcctcacgcatacgcggtccggttagccgaggaggggaacagcagaaatgcgaactcgtacagcgtgagaccaaccgagatcgaaacagtcgatattcctgggcacggtgcgatcatcaccctaagagagactctaaacgatgtggagtctggcagtgccaggagattgtgagatgggtctgcaggtgtggagattgatgtctcagataccatgggagttgcttgcatatgtgtacaggtagatctattgtagagctgttgactgctgccaccgtgataggggagggttgcttagacgggcctggcagtaaatttacttggtaggggtgctgtttcttctgagaacctttggcttttgtttgtatatatactcttatcaaagtgtttgctgacacttttgtaaccaaaaaaaaaaaaaaaaaaaaaaaaaaaaaaaaaaaaataaaaaaaaaaaaaaaaaa

SEQ ID NO: 1168 - protein, 310 aa, Zea mays
  misc_feature: Ceres CLONE ID no. 440710
  misc_feature: Ceres CDNA ID no. 40350971
  misc_feature (98)..(248): Pfam Name: PAP2 PFAM Desc: PAP2 superfamily
MADQLGSYTIRSHGMILARLHMYDWIILLLLAVIDGLLNIIEPFHRFVGKDMMTDLRYPMKGNTVPFWAVPLIGIILPWAIFVGIYFKKKNFYDLHHGILGILYSVLITAVITDAIKDGVGRPRPDFFWRCFPNGNDVYDNITTGVICNGVKSVIKEGHKSFPSGHSSWSFAGLGFLAWYLAGKLTAFDRKGHIAKLCIVFLPLLTAALVAVSRVDDYWHHWQDVFAGGLIGLTVASFCYLQFFPYPFDGDALWPHAYAVRLAEEGNSRNANSYSVRPTEIETVDIPGHGAIITLRETLNDVESGSARRL

SEQ ID NO: 1169 - DNA, 1520 bp, Zea mays
  misc_feature: Ceres CLONE ID no. 440782
  misc_feature: Ceres CDNA ID no. 36588128
  CDS (77)..(1339): REFERENCED BY SEQ ID NO: 1170
aaaaaaaaaacgaattcgccttcttcaaaaacctcttcgacgtcgcacccgcaacgcacgctggcgggcggcggccatggcgtacctccctccccacaagcgccaacccagcaccacagcctccacgcccatccccgcacccaacccgccacctccgtccctctcctcctccctccgctccctctccctctcctccccgcgcggccgcggccgcggccgcggcgcagtcggacgccacccgctcgcttctacaaagattttccgcgctgccggctgcatctcacgttggttccctctacctcccttctcccctgccggcgacggcgaggagtacatcctacgcctcgagcccttcccttgtccccccatcgagcacaggaccggtgccaaaccccttgcccttgtcgtcgcctccaccccaggacaaggctcttccggctccactgcggcggcagtcacctccatcgccgagcagtttcttcccgatctccttgccgccgcggagagggtcaaggcagaaggcgcgcctaaggatgagttggtgaaactgagtctcgttgcaagactgggaacggtgctcttcgagtgccagcccggtggatcgcccgtttcactggacgaactccgtcaggccgctaaagcaggggaagatggttccaggagccagttgcgtaaaacgttctacaccagtttgtctagtgagtgtctggatgatatggagcgaaccatggtaaagaggattgggctggattttgattcgtccaagaagcactatcatgtgaaggtttctgacaagaatcgaagtgattctacaatatcttgcaaatgcaccgtggaggaagatgggagtcttgctatccataaggttgaattgaatcaggtacggcacttggtggaagacatatcctgtcttttcaaaggtcttgatctaaggttgatgttgagtaagaaaaggatcctgaaaaacctagattctgaagtggaaaatgcagtaaagagcttggtgtctactgctattattgatcctaatgtgaaagggggagttagatggccacttggaaaggaatcaattggcgagaggttcagcatagttggggtgtggcacacggactacaaagctttcagaaacgagaccatgaggctcaagctaaggcatgctgacagattcgatcaccgtacctcgactgggggagtttctgatgaagttacattcaaactaactgctatatcttgcaaactggaggaagatgatctggcggagagcgctgtgaaagagatgctggagtctgcggtccaaatgctatgggacaatgcgctcaactaccgggtcgtgccttgagctccggttatgcagacaatagttcttccttgaagatgcaaagcgacatgatttctttgagcccctcctgtcctgtactagtactgaacaagagaactcctaaacacaactgacgctggggctgcccacgcacgccatcaaaaaaataaaaataaagtagcgttgggaaaaaaaaaaaaaa

SEQ ID NO: 1170 - protein, 420 aa, Zea mays
  misc_feature: Ceres CLONE ID no. 440782
  misc_feature: Ceres CDNA ID no. 36588128
  misc_feature: Homolog of GI Number: 55740439 NR Desc: hydroxyproline
  misc_feature: Homolog of GI Number: 41400384 NR Desc: plus agglutinin
  misc_feature: Homolog of GI Number: 22333 NR Desc: hydroxyproline
  misc_feature: Homolog of GI Number: 12018147 NR Desc: vegetative cell wall protein gp1
  misc_feature: Homolog of GI Number: 60678627 NR Desc: plus agglutinin
  misc_feature: Homolog of GI Number: 22092 NR Desc: hydroxyproline
  misc_feature: Homolog of GI Number: 12018149 NR Desc: gamete
  misc_feature: Homolog of GI Number: 41400381 NR Desc: minus agglutinin
  misc_feature: Homolog of GI Number: 6523547 NR Desc: hydroxyproline
MAYLPPHKRQPSTTASTPIPAPNPPPPSLSSSLRSLSLSSPRGRGRGRGAVGRHPLASTKIFRAAGCISRWFPLPPFSPAGDGEEYILRLEPFPCPPIEHRTGAKPLALVVASTPGQGSSGSTAAAVTSIAEQFLPDLLAAAERVKAEGAPKDELVKLSLVARLGTVLFECQPGGSPVSLDELRQAAKAGEDGSRSQLRKTFYTSLSSECLDDMERTMVKRIGLDFDSSKKHYHVKVSDKNRSDSTISCKCTVEEDGSLAIHKVELNQVRHLVEDISCLFKGLDLRLMLSKKRILKNLDSEVENAVKSLVSTAIIDPNVKGGVRWPLGKESIGERFSIVGVWHTDYKAFRNETMRLKLRHADRFDHRTSTGGVSDEVTFKLTAISCKLEEDDLAESAVKEMLESAVQMLWDNALNYRVVP

SEQ ID NO: 1171 - DNA, 733 bp, Zea mays
  misc_feature: Ceres CLONE ID no. 441164
  misc_feature: Ceres CDNA ID no. 25446072
  CDS (52)..(561): REFERENCED BY SEQ ID NO: 1172
ctctctcgtgctcaccagccatttagcaaagaaagccaccaagaagcggccatggagcagaagccgtcgtccctcgtgctcatcggcctcctcgccacgctctgcgccggtccgggtcacgccctgcgccttctgaacggcggcctggagttctccttcggctccaaggcggccacggcaggcgcggagaccgagccgctggacccgtccctgggcgacgattacgaaaacgagatcagccacgtggagttcgagccggagctcggcagcgcggcgccgtacgccgcggccgcagcggggccggccacggggcctgtgagggcccggaacaccgcggccgggcgccacagcatgaaatggtggctgccgccgtcgaccatgccgtcgttcccgctgctcccgaaccccgtcggcatgcccgggcccggcatcccggggctcccgctgcccggcatgccgttccaccccatcggcggttggggggcgcccgcacctcctaccacagagaccacgagcacgaacgtcaacgaccccaacgcgagcggaggcggcgttaactgacctgcttgcgtatactgattactgagacggtgctagagctcacagttcattttttttttgttcagctcttacaactatttattcactagtactagtatccgtgtcatcgcgtgaatggaagcatgaaaacgtaatcgtattttgctccaatacatgcaaaaaaaaaaaaaaa

SEQ ID NO: 1172 - protein, 169 aa, Zea mays
  misc_feature: Ceres CLONE ID no. 441164
  misc_feature: Ceres CDNA ID no. 25446072
  misc_feature: Homolog of GI Number: 67986808 NR Desc: Aldo/keto reductase
MEQKPSSLVLIGLLATLCAGPGHALRLLNGGLEFSFGSKAATAGAETEPLDPSLGDDYENEISHVEFEPELGSAAPYAAAAAGPATGPVRARNTAAGRHSMKWWLPPSTMPSFPLLPNPVGMPGPGIPGLPLPGMPFHPIGGWGAPAPPTTETTSTNVNDPNASGGGVN

SEQ ID NO: 1173 - DNA, 633 bp, Zea mays
  misc_feature: Ceres CLONE ID no. 441620
  misc_feature: Ceres CDNA ID no. 25446385
  CDS (182)..(475): REFERENCED BY SEQ ID NO: 1174
gctttcctctctgctagctagctcttgtcttgtcactgagtgagcagaaggagtgtgtggtggagtgcaaaccaaatcaaacgaagaaaagtgggagcgaggaggaagaaaagaagaagaagaagacgacgacgacacccaccaccagcagcaagcagcaatcagcaaccagcataacgaaatgtcgatcaagtactgcgaccagcacaaggactgcgagcggcagcgtctgtaccgtcgcttctgcgccgccctggtgggcgtcatcgtgctcgtcctcctcatcgtgctcatcgtctggctcgtcctccgccccaccaagcctcgcttcttcctcaacgacgtgagcatcgtgtgcatcaacgtcagctccgcctcctacctcaccgtcaccatgcaggccacgctggcgcggaggaccctgctctgggtcgtcggaggccggcagcagagccgagtcggcagctgttcgtgatcagcgcacggttgctcgaagatttaaaaaaaaaagaaggcagagaaatacttttgtgctctttcggcagattggtagtagcgagtagcggttgcaatagctagagatttgcagaacccgaaagctctgaaaaattctttctaaaaaaaaaaaaaaaa

SEQ ID NO: 1174 - protein, 97 aa, Zea mays
  misc_feature: Ceres CLONE ID no. 441620
  misc_feature: Ceres CDNA ID no. 25446385
  misc_feature (40)..(76): Pfam Name: Hin1 PFAM Desc: Harpin
  misc_feature: Homolog of GI Number: 50940265 NR Desc: harpin
  misc_feature: Homolog of GI Number: 50929785 NR Desc: OSJNBa0088H09.16
  misc_feature: Homolog of GI Number: 13374879 NR Desc: NDR1/HIN1
  misc_feature: Homolog of GI Number: 21554028 NR Desc: putative harpin
  misc_feature: Homolog of GI Number: 5420387 NR Desc: proteophosphoglycan
  misc_feature: Homolog of GI Number: 34809533 NR Desc: Epa5p
  misc_feature: Homolog of GI Number: 28828093 NR Desc: similar to Dictyostelium discoideum
  misc_feature: Homolog of GI Number: 54641351 NR Desc: GA14093
  misc_feature: Homolog of GI Number: 13592175 NR Desc: ppg3
  misc_feature: Homolog of GI Number: 11359723 NR Desc: proteophosphoglycan
MSIKYCDQHKDCERQRLYRRFCAALVGVIVLVLLIVLIVWLVLRPTKPRFFLNDVSIVCINVSSASYLTVTMQATLARRTLLWVVGGRQQSRVGSCS

SEQ ID NO: 1175 - DNA, 610 bp, Zea mays
  misc_feature: Ceres CLONE ID no. 442877
  misc_feature: Ceres CDNA ID no. 29191485
  CDS (2)..(280): REFERENCED BY SEQ ID NO: 1176
aaaccaaaggaaccgatcagagagagagagagagcgcatagtcgatcatgaagggtggcaagaaggaagtggccggtgcggtggtggccatactgctggttctgcagctcatggcagctccaccgacggccatggccgcccgctcgccgcacggagccgtgccggatggctccctcgccacgacgcccaaggtgacgatgctgtcggccacgctgtgctacacgggggagacatgcaaatacactccctgcttcactcctgcttgctcctgcagctttagtgatcgcctctgctacgtcatatttactcctgttgcttgagttgaggccattccgcgaagccacaactcttacatgcatgcgccggccgacgacgacgacgctgcctctcgtgagcttctgttcaagtgatgcatgtttcaaggcatccatggatgctttacgtatatgcgtattaattagccgtgtcagggaaccggacagaagggggtgttgttttatttacgtcttctggtgatcaaataaaggggaaatatatgttggatgtgtgcaatgcatagaattttattgctcgctctgcatgcgagggttgcttaaaaaaaaaaaaaaaa

SEQ ID NO: 1176 - protein, 90 aa, Zea mays
  misc_feature: Ceres CLONE ID no. 442877
  misc_feature: Ceres CDNA ID no. 29191485
  misc_feature: Homolog of GI Number: 56713913 NR Desc: putative cyclotide family protein
MKGGKKEVAGAVVAILLVLQLMAAPPTAMAARSPHGAVPDGSLATTPKVTMLSATLCYTGETCKYTPCFTPACSCSFSDRLCYVIFTPVA

SEQ ID NO: 1177 - DNA, 761 bp, Zea mays
  misc_feature: Ceres CLONE ID no. 443169
  misc_feature: Ceres CDNA ID no. 25446388
  CDS (125)..(400): REFERENCED BY SEQ ID NO: 1178
atgtgggcggtctctgcacccggcgtcccaccgccaccgctactgtcgtagtcctagatccgaccgcctcacgagctacattccctcgaggccggccttcctggtgtctcagcagcggcggcgcatggcgatggctgcggggcgtgggctcttggccctcttctcggtcgtcgtagtggctgggctcacctctgcggcgaatggtcctttcctgtccgatagcgtcttccagccgagcgccggatctacagggaggagcttactgcaggccaagaacagttgccccgtgaactttgagttccaaaactacacaatcatcacaagcaagtgcaaagggccaaagtttccagccggcccatgctgtgccgcactcaaggagttcgcgaagaagcgaccatgagggccaagtggaagaagaagcgcatgaggaggctcaagaggaagcgcagaaagatgaggcagagatccaagtaggcagatcgagatggattgtggacctgatgacatgcgtgggtacatacatttcttcggatgcgttggtgtgcctgtggagagatgtcaacctgccatggtgtcacggtccgccatcagttgaacgtcttgcctgcacttcagtaggccatttttcatggttctagttgtatttgaatccagcgtttgccactaagataaatcagacattcgttttgtgaacctattatgatggagctttatttgctgataatatctacctacctatttgagcaaaaaaaaaaaaaaaa

SEQ ID NO: 1178 - protein, 89 aa, Zea mays
  misc_feature: Ceres CLONE ID no. 443169
  misc_feature: Ceres CDNA ID no. 25446388
  misc_feature: Homolog of GI Number: 3868853 NR Desc: GPI
  misc_feature: Homolog of GI Number: 50725513 NR Desc: putative GPI
  misc_feature: Homolog of GI Number: 54291507 NR Desc: putative GPI
  misc_feature: Homolog of GI Number: 54291508 NR Desc: putative GPI
  misc_feature: Homolog of GI Number: 38603910 NR Desc: At4g28280
MAAGRGLLALFSVVVVAGLTSAANGPFLSDSVFQPSAGSTGRSLLQAKNSCPVNFEFQNYTIITSKCKGPKFPAGPCCAALKEFAKKRP

SEQ ID NO: 1179 - DNA, 1654 bp, Zea mays
  misc_feature: Ceres CLONE ID no. 443209
  misc_feature: Ceres CDNA ID no. 40350972
  CDS (330)..(1301): REFERENCED BY SEQ ID NO: 1180
ccacgcagcacgcacggacgccatcgaggaaccctagaccagagcacatcacacggccggcgactggcgccccctcttcggtccccagcgcggcgacgccctcctgcttgagcaggtgtcctcttctgtctgcttgagcaggtgacttcctgggctttaggtactcgctttcgcttccaaccagcgcgtcctcagccagcgctggaggccgcccagccgcgcctgcgaccgcagaccgcgcgtcctcactcagccagcgctggagatctcctgtccgcccagccgcgcctgcgacagtgcgaccgccctcctgcccccagcactgcaagatgatactgctccagtccccatcgaggttcctgctccagatcctgcaagaccgtgttctcagtggcgagaagggcatggacattgactgtcacacggtagagttcgatgatgtccggtatcatatccagttttctatgaggaatccaaaggtaatggtgttgtcagttgctttgcctctgccacctcctgaagcgattctgtatgatgggctaccactaggtgccattgaagctataaaagcagcatatgggccagttgtgcagattcttgatcctccaaaggacgggtttgatctcacaatgaagataaatttgacaaaacttccgctagatgaagagcaaaggaatactatcttgacacaaattgcatctattagagaggttgtgttgggtgcaccactgaagctcctgctgaaacatttagcctcaaagacagttgcacctaatgttaacaaccttgttgctcttgttcaccgccctaatgaatcatttttccttgctccccaggcagataaagttactattgtgtatccaatgagattccaggactccattgatattgttttagcaacttccttcctgcaggaatttgtggaggcaagacgaacagctgcacttaataatgttccttcttgtatgtggtctccggtaccacctcttgagttaaaaggagtatctgctgatgcactaaatgcaaatgctggctttgttactttcgttgtttaccctcggcatgttgagggtaaaaagctagatagaacagtttggaatttgttgacatttcatgcttatgtaagctatcatgtaaagtgttctgaaggattcatgcataccaggatgaggcgcagggttgagtcgctgatccaggcgttggaccgggcgaagtctgatgctgagaagttgaagaagttggtacacggtggatctttcaaaagactgagcctgaagaacgagggggactcgcgtttctgaagggaattggcaaatgttgttgttttccatttggctaatgacttctgttgtgggaagcttacttccgttcagttttgggagcgaaggctcggaaccggttaaatccatgccattgaattttaatgtaaattcgcgttgcttttacatatttactagcctgaaatctctcggcgtatcagttccatgacacatcgcctttgcaaccggagagcctgctgcctgcatcttggtgcaagtagtttgtttttgccatgagatgtctgagtctgatcttttttggcattaaaaaaaaaaaaaaaaaaaaaaaaaaaaaaaaaaaaaaaaaaaaaaaaaagaaaaaaaaaaaaaaaaaa

SEQ ID NO: 1180 - protein, 323 aa, Zea mays
  misc_feature: Ceres CLONE ID no. 443209
  misc_feature: Ceres CDNA ID no. 40350972
  misc_feature (53)..(300): Pfam Name: P34 PFAM Desc: Arp2/3 complex
MILLQSPSRFLLQILQDRVLSGEKGMDIDCHTVEFDDVRYHIQFSMRNPKVMVLSVALPLPPPEAILYDGLPLGAIEAIKAAYGPVVQILDPPKDGFDLTMKINLTKLPLDEEQRNTILTQIASIREVVLGAPLKLLLKHLASKTVAPNVNNLVALVHRPNESFFLAPQADKVTIVYPMRFQDSIDIVLATSFLQEFVEARRTAALNNVPSCMWSPVPPLELKGVSADALNANAGFVTFVVYPRHVEGKKLDRTVWNLLTFHAYVSYHVKCSEGFMHTRMRRRVESLIQALDRAKSDAEKLKKLVHGGSFKRLSLKNEGDSRF

SEQ ID NO: 1181 - DNA, 900 bp, Zea mays
  misc_feature: Ceres CLONE ID no. 443265
  misc_feature: Ceres CDNA ID no. 40350973
  CDS (154)..(636): REFERENCED BY SEQ ID NO: 1182
ataaataacttatgaggccaaactaaagagggcagggcaggcgaatcgaaggaaaagtagtcaggagaggcgtttccctcgcaatcgaccatcacagatcaaatcgctgcaactagctagggtttcgtcgcctcatctctcgtcgatccatcgatggcgtccgagggcgaaaacaagaggatgatcacgctcaggagctccgacttagaggagttcgaggtggaggaagcggtggccatggagtcgcagactctccgccacatgatcgaggacgactgcgccgacaacggcatcccgctccccaacgtcaactccaggatcctctctaaggtcatctacagtcacgtccacgccgccgccaaacccgctgactccgctgcctccgagggcggcgaggacctcaagagctgggacgcgaagttcgtcaaggtggaccaggctacgctcttcgacctcatcctggctgccaactatctgaacatcaagggattgctggacctgacctgccagacggttgctgacatgatcaagggcaagactccggaggagatccgcaagacattcagcatcaagaacgacttcacccaagaggaggaggatgagatccgcatggagaaccagtgggccttcgagtgattgttgtcttcctttccctggtgatggtggtggttcttttacaagaacagatggatgtctgcactgcactctacaatgctagtctatctacttacgaaatagtagtgaaatagtagtataatggtcgtgatggttgtatccttttttggattggatgtatgtcaagctggtgggtgctagttcgtctgtctggacttgttactagttaatatctcataatacatatataaaagtggatcttatgataaaaaaaaaaaaaaaaaa

SEQ ID NO: 1182 - protein, 160 aa, Zea mays
  misc_feature: Ceres CLONE ID no. 443265
  misc_feature: Ceres CDNA ID no. 40350973
  misc_feature (83)..(160): Pfam Name: Skp1 PFAM Desc: Skp1 family
  misc_feature (9)..(61): Pfam Name: Skp1_POZ PFAM Desc: Skp1 family
MASEGENKRMITLRSSDLEEFEVEEAVAMESQTLRHMIEDDCADNGIPLPNVNSRILSKVIYSHVHAAAKPADSAASEGGEDLKSWDAKFVKVDQATLFDLILAANYLNIKGLLDLTCQTVADMIKGKTPEEIRKTFSIKNDFTQEEEDEIRMENQWAFE

SEQ ID NO: 1183 - DNA, 1879 bp, Zea mays
  misc_feature: Ceres CLONE ID no. 445108
  misc_feature: Ceres CDNA ID no. 40350974
  CDS (220)..(1608): REFERENCED BY SEQ ID NO: 1184
aaatcccgtgtgctactgctggcgtgctcgagcccacatcccaaccatatacgagacgagccgacgttcccccggggcccccaaggaaaaccatgtgctgcgctcgccaggtgccactaaatcggtagcgcctggccgcacggagacggagctcctagtaacggcaacaagcagcagcagcaccagcacccagtagtaacacagtaaccggcagaggccatggcgagatcaaggcggcgggaaggggaggccggaggagaggagcggaagctggtcctgggcaagtacgagttgggccgcctgctggggcagggcaccttcgccaaggtgtactacgcgcgggacctgagcgccgccgccggcacgggcagcaccagcgtggccatcaaggtgatcgacaaggcgcggctgcggcgcatggaggggatgatggagcagctgcgccgggagatctccatcatgcggatggtgcgccaccccaacgtggtgggcatccgggaggtgctcgccagccgctcccgcgtcttcgtcgtcatggagtacgcgcgcggcggggagctcttcgccaaggtggcccggggccgcctcaccgaggaccacgcgcggcgctacttccagcagctcgtggccgccgtcggcttctgccaccgccgcggcgtcgcgcaccgggacctcaagcccgagaacctgctgctcgacgaggacggccgcctcaaggtcaccgacttcgggctcgccgcgctgcccgagcagctgcgccacgacggcctgctccacacgcagtgcggcacccccgcgtacgtcgcgcccgaggtgctcaggaagcgcggctacgacggcgcccgcgctgacctctggtcctgcggcgtcgtgctctacgtcctgctctgcggcttcctcccgttccagcacgacaactgcgccaagatgtaccagaggatcttcaaggccgagtaccaggtgccgccctgggtgtccggcgacgcgcgccgcctcatcgcgcgcctgctcgtcgtcgaccccgccaagcgcgcctctatcccggaggtcatgtgcacgccgtggttcaggaagggcttcgtgccgcccgtcctttcagtttcacccccgatgacgcccaagaaacggctggacggagatgacggcggcggcggtgcgctcttcgacagcagcagcaactctggcgccacctctcctcggtcgtgcaacgcgttccagctcatctcctccatgtcctccgggctcgacctgtcggggctgttcgagaacgaacacaaggccgcgaccgtgttcacggcccgcgcgccggcggccaccgtggtggagaagctcgagtccgcagcgcgcgccctgggattcgagaccaccagggggaagggctggaaggtgaggatggaggctaaggccgggggcacaaacggacggctcgctgtcaccgccgaggtgctcgaggtggccgtggacgtggccgtcgtcgagttcgcgcacgacgccggggacgcgctggacttcaacaagttctgcgctgtggacgtccgtccggggctcgcggaaatcgtctgggcgtggcagggcgacagcccggccgccgtcgttgggaccgcgtgaacctacggccgcccgttcgtcctggcgtccacgcctgttggagccagccttacacggctgcatcggcaccatgtaaagtttccgttgttgcttcgagacagccatggctagttcgttatgagtcgtatgttgtacaggaagagaacaagtgcaaaactgaagagaggtttctgtcgacacgagagccgaatcgagccgggagtgttcgatcggcttgcaaagttttgtagatcatataatcgctattttgtggacaaaaaaaaaaaaaaaa

SEQ ID NO: 1184 - protein, 462 aa, Zea mays
  misc_feature: Ceres CLONE ID no. 445108
  misc_feature: Ceres CDNA ID no. 40350974
  misc_feature (156)..(173): Pfam Name: Pkinase_Tyr PFAM Desc: Protein tyrosine kinase
  misc_feature (325)..(384): Pfam Name: NAF PFAM Desc: NAF domain
MARSRRREGEAGGEERKLVLGKYELGRLLGQGTFAKVYYARDLSAAAGTGSTSVAIKVIDKARLRRMEGMMEQLRREISIMRMVRHPNVVGIREVLASRSRVFVVMEYARGGELFAKVARGRLTEDHARRYFQQLVAAVGFCHRRGVAHRDLKPENLLLDEDGRLKVTDFGLAALPEQLRHDGLLHTQCGTPAYVAPEVLRKRGYDGARADLWSCGVVLYVLLCGFLPFQHDNCAKMYQRIFKAEYQVPPWVSGDARRLIARLLVVDPAKRASIPEVMCTPWFRKGFVPPVLSVSPPMTPKKRLDGDDGGGGALFDSSSNSGATSPRSCNAFQLISSMSSGLDLSGLFENEHKAATVFTARAPAATVVEKLESAARALGFETTRGKGWKVRMEAKAGGTNGRLAVTAEVLEVAVDVAVVEFAHDAGDALDFNKFCAVDVRPGLAEIVWAWQGDSPAAVVGTA

SEQ ID NO: 1185 - DNA, 703 bp, Zea mays
  misc_feature: Ceres CLONE ID no. 445112
  misc_feature: Ceres CDNA ID no. 25446713
  CDS (78)..(359): REFERENCED BY SEQ ID NO: 1186
gtcacagcgagtaccgagtaggagcaaccgcttgcgtcagacgcacactgacggagagtgatcactgatttctggtcatggcaaccgtaactgaggaagttgctccggtcgtcaccgtctccgaggagccggcgccggaagcggcgaaggaggtggtggagaagccggaggaggggaagaagcccgacgaggagggtgacgagaggaagaaggccgaccccgccgccgagaaggagaagaaggcgaggaagccgcggagcaggaagcccgagtccgccgggctgcaccacccgccctatttcgagatgatcaaggaggcgatcctgtcgcaggacggcgggaaggtcggggcggagtgacggcctccttcccaatcatcccccccacttgtcttcttcggcgagacgagccggcgccggtcgtccggccggccggcgtgcgcgtgtaaataccaagcacagcgtgtttgcgtccgccagcgagtgtacagtttcctcaagcgagatgtcgtccggacgatcgaagaagtatctagtctccttgtaatttcttccacccaaaccttccgtttgctccccttccgcctccactttccacccactttgggtgtgtgtgtgtctgcagcgaaacttcgaaaaaaaagcttcgaattaaaaaaaaaaaaaaaaaaaaaaaaaaaaaaaacaaaaaaaaaaaaaaaaaa

SEQ ID NO: 1186 - protein, 93 aa, Zea mays
  misc_feature: Ceres CLONE ID no. 445112
  misc_feature: Ceres CDNA ID no. 25446713
  misc_feature (70)..(82): Pfam Name: Linker_histone PFAM Desc: linker histone H1 and H5 family
  misc_feature: Homolog of GI Number: 50948685 NR Desc: putative histone H1
  misc_feature: Homolog of GI Number: 7439658 NR Desc: histone H1
MATVTEEVAPVVTVSEEPAPEAAKEVVEKPEEGKKPDEEGDERKKADPAAEKEKKARKPRSRKPESAGLHHPPYFEMIKEAILSQDGGKVGAE

SEQ ID NO: 1187 - DNA, 988 bp, Zea mays
  misc_feature: Ceres CLONE ID no. 445387
  misc_feature: Ceres CDNA ID no. 36592352
  CDS (135)..(740): REFERENCED BY SEQ ID NO: 1188
agtcaaccccccaactccgttcattgcggcagccaaatcgagatctcgcccgtgctcaatcccaccactctcgccgactcatccggccgcagcaagcgcagcgcatcgacaggagccgaagaaccgaagaggagatggcgtcggcgctgtcctccctgcgctacggcgacagcctctcggtggtgggcatctccgccgcgacggccgtgctctgcgaggccatgtcctggctcctcatctaccgcaccgccacctacaactccctccgcgcctccatcgagcgccactcccgcaagctagacgccatgaagtccggctccacctccgcctcctccggcaccgccgcctcctccgcgcagcccgcatcgtcgcgggctaagaagatggaccgcgtcgagaccagcctcaaggacgctgcgcgggagctctcgctcgccaagctcaagtcgggcgccgtcgtcgctgtcatgctcttcgtcgtcttcggcctgctcaactccctcttcgagggccgcaccgttgccaagctgcccttcgcgcccatcccgctcgtccagcggatgagccaccgcggactgcccgggaacgatcccaccgactgctccatggttttcctctacttcctctgctccatgagcatccgaaccaacctgcagaaactgcttggcttcgcgccgccacgcgcggctgctgcagccggcggtggtctcttccccatgcccgatccgaaagttaattgaggctgatttccaagacgagtgaatccgaaccaaagatagcaatagtcgcccgggaaagactctgtgggatgtggatgtggcctgtgagtgagctgtgtattcgtgggcgggcgtgaggctttggctttcgaattggttgggggtgacgggcgagtcgtgtacgccgcacacattgcgcagcgtacgttgggttgggatgtttgcgtctgggtaataacagtgatgcattcttaaaaaaaaaaaaaaaa

SEQ ID NO: 1188 - protein, 201 aa, Zea mays
  misc_feature: Ceres CLONE ID no. 445387
  misc_feature: Ceres CDNA ID no. 36592352
  misc_feature: Homolog of GI Number: 66271035 NR Desc: Fb27
  misc_feature: Homolog of GI Number: 35187454 NR Desc: fiber protein Fb27
  misc_feature: Homolog of GI Number: 57863757 NR Desc: putative membrane protein
  misc_feature: Homolog of GI Number: 67987177 NR Desc: 4Fe
  misc_feature: Homolog of GI Number: 12018147 NR Desc: vegetative cell wall protein gp1
  misc_feature: Homolog of GI Number: 68231257 NR Desc: Forkhead
  misc_feature: Homolog of GI Number: 53793516 NR Desc: putative beta
MASALSSLRYGDSLSVVGISAATAVLCEAMSWLLIYRTATYNSLRASIERHSRKLDAMKSGSTSASSGTAASSAQPASSRAKKMDRVETSLKDAARELSLAKLKSGAVVAVMLFVVFGLLNSLFEGRTVAKLPFAPIPLVQRMSHRGLPGNDPTDCSMVFLYFLCSMSIRTNLQKLLGFAPPRAAAAAGGGLFPMPDPKVN

SEQ ID NO: 1189 - DNA, 1907 bp, Zea mays
  misc_feature: Ceres CLONE ID no. 445462
  misc_feature: Ceres CDNA ID no. 25446838
  CDS (407)..(1624): REFERENCED BY SEQ ID NO: 1190
ggctgtgtcctgtagctgctctcttttatggttgatggttacgacctgaacagatcgatcgtccttcctgtcgtttcgtttcctcgccggcagggcactgggtacgccgccgccgcctcaacgccaccacgctgccgccgcgccagttcgtcatcgcgagacacaagacacgtgcctcgcttccccccgggccggttggccgtcgctgttctgttcctatttcttggcaactccgcccgtttcacctccggaggaccgacagcgacggcgccagtagatagatgcactactgacgccactggccacctcgagctcgagtgccaagggacgccacgagaccaaccgtgaggacaggacagcggtcgcctttgcccgcggatccgcggatttcgtcttcttgggtgccatggatccagtcgccggcacggcggagcatcggggcccgttggaagtgcgcgcccgcgcgcccggcaagatcatcctcgcgggcgagcacgccgtcgtccacggctccgccgccgtcgccgctgccatcgatctctacaccaactcctccctcctcctccgccccacaggcccaggagagggtggcggcgctggctccggcgcggtggagctggacctcagggactcgggcctcaccttctcgtggccgtgctcgcgcctccgcggggcgctgggggaggagatcagcgccaaccccggggctccggcgccgtgctcccctgaccagctggccgccattgccaggctcttgcaggaccaggagatccctgaggccaagatctggctctccgccggcctctccgccttcctttttctctacgcctccattttgggatgcaggcctggcaaggcagtggtgtcctcggacctgcccatgggcgcagggctcggctcatcagcggcattttgtgtttccatgtcgggggcgctattgactgctgctggtgcagtaagtgttggagcacgcaggggtgctgagggttgggaggtgttggagaagggtgctcttgagctggtcaaccaatgggcgttccaaggggaaaagattattcatggcaagccttctggcattgacaattccgtcagcacttttgggaaaatgatcaaattcaagaagggggaactgacaaaccttgagtcctggaacccagtcaaaatgcttattactgatacaagagttggtaggaacacaaaggcattggttgctggtgtgtctgaaagggcgtctaggcatccagatgctatggcttctgtcttccatgcagtgaactctattagtgaagagctttcaagcattgttgagttagcagccgaggatgagatagccatcacctctaaggaggataagctagcagagcttatggagatgaaccaaggtttgcttcagtgtatgggagtcagccattcttctatagaaactgtgttgcggaccactctgaaatatagcttggtctcaaagctaactggagctggtggtggaggctgtgtgttgactctaataccgacgttatcggccaatactgttctggagaaagtcaccacagagctcgaatctcacggttatcgctgcttcaaagttgaggttggtgggcgaggtctccaagtattccgtggatagcactcatcctatttcaaggagatgttgtaccaaacttagatggcttacctgcattgaagctgtttagattctcttcttgagttattccaagatcatgataggatattcttctcctaagcctagcaggttcttgtatccagtactttgctccaggattaggacattcttatgctatccctagcgatcttgtatcaaataagctcatagatgcatgatcattgctggtgtgattgttgtattaagtaaacagacttttaattgctccaaaaaaaaaaaaaaaaaa

SEQ ID NO: 1190 - protein, 405 aa, Zea mays
  misc_feature: Ceres CLONE ID no. 445462
  misc_feature: Ceres CDNA ID no. 25446838
  misc_feature (148)..(369): Pfam Name: GHMP_kinases PFAM Desc: GHMP kinases putative ATP
  misc_feature: Homolog of GI Number: 78708201 NR Desc: mevalonate kinase
  misc_feature: Homolog of GI Number: 31431195 NR Desc: putative mevalonate kinase
  misc_feature: Homolog of GI Number: 16417946 NR Desc: mevalonate kinase
  misc_feature: Homolog of GI Number: 21536584 NR Desc: mevalonate kinase
  misc_feature: Homolog of GI Number: 5578718 NR Desc: mevalonate kinase
  misc_feature: Homolog of GI Number: 55250855 NR Desc: Zgc:103473
  misc_feature: Homolog of GI Number: 73995337 NR Desc:  similar to Mevalonate kinase
  misc_feature: Homolog of GI Number: 13592007 NR Desc: mevalonate kinase
  misc_feature: Homolog of GI Number: 12963731 NR Desc: mevalonate kinase
  misc_feature: Homolog of GI Number: 62089024 NR Desc: mevalonate kinase variant
  misc_feature: Useful for making taller plants and plants with longer inflorescences
  misc_feature: Useful for sterility
MDPVAGTAEHRGPLEVRARAPGKIILAGEHAVVHGSAAVAAAIDLYTNSSLLLRPTGPGEGGGAGSGAVELDLRDSGLTFSWPCSRLRGALGEEISANPGAPAPCSPDQLAAIARLLQDQEIPEAKIWLSAGLSAFLFLYASILGCRPGKAVVSSDLPMGAGLGSSAAFCVSMSGALLTAAGAVSVGARRGAEGWEVLEKGALELVNQWAFQGEKIIHGKPSGIDNSVSTFGKMIKFKKGELTNLESWNPVKMLITDTRVGRNTKALVAGVSERASRHPDAMASVFHAVNSISEELSSIVELAAEDEIAITSKEDKLAELMEMNQGLLQCMGVSHSSIETVLRTTLKYSLVSKLTGAGGGGCVLTLIPTLSANTVLEKVTTELESHGYRCFKVEVGGRGLQVFRG

SEQ ID NO: 1191 - DNA, 1013 bp, Zea mays
  misc_feature: Ceres CLONE ID no. 445555
  misc_feature: Ceres CDNA ID no. 25446389
  CDS (180)..(782): REFERENCED BY SEQ ID NO: 1192
ctccgaaatctctccatctaccggcggcgcaagcccgaccgcgctgcctctctttatctctccctctccccagtctccgcgcgaagttctcttctctcgcgtgctcgcatagtcgcatcgttagggcgcgtcctgggagagggaggccttcgctacctccgtggcaacgacagacaaccatgaaggcgctgctggtgacggtgcttctcctcctctcttccaccctcgccgcgtcacagtggtgcgtgtgcaggcaggacgcgtctcaggccgcgctgcagaagacgatcgactacgcctgcgggtcgggggcggactgcaactccatccacgagacgggggcgtgctacaaccccaacaccgtcgcggcgcactgctcctgggcggccaacagctactaccagaacaacaaggccaagggcgccacctgcgacttcaccggcaccgccgccctcaccaccagcgacccaagttcttcaggctgctcttaccctaccggtgcaagcgccgttggaaccatgaccccgaccactgcaggcaccatgggaggaggaaccccagggacctccacaggcacaggcacaggcacaggcacagccggcgctggcatggggacaggcactgccaccggaactgcgggtactgggttcggcggcctaggaccaggcacggacgctagcatggacaccgcggcggcggcgggcttgctcgtccccccaagagctggtgggctggccgccgccctcgtcgcgcttctcctctccgccatggtgctcgcgtgacgcttggtatggcctcggaaacaaggcctgccttgttgctagtagaaagcactgcccttttggtaagggcgtttcaggagtactgtggtggactattgagagaaaggctcctcctctgtgactgtgactgtgaccacctcacgttctgcgtactctgtaatctggtaggatgcctgtctctatcatgattcatgaaggacgattggtctgtcttcaaaaaaaaaaaaaaaa

SEQ ID NO: 1192 - protein, 200 aa, Zea mays
  misc_feature: Ceres CLONE ID no. 445555
  misc_feature: Ceres CDNA ID no. 25446389
  misc_feature: null
  misc_feature: Useful for making plants with altered alkaloid content
  misc_feature (20)..(104): Pfam Name: X8 PFAM Desc: X8 domain
  misc_feature: Homolog of GI Number: 50939031 NR Desc: glycosyl hydrolase family 17
  misc_feature: Homolog of GI Number: 57899559 NR Desc: glycosyl hydrolase family protein 17
  misc_feature: Homolog of GI Number: 34912962 NR Desc: beta
  misc_feature: Homolog of GI Number: 22329437 NR Desc: glucan endo
  misc_feature: Homolog of GI Number: 8778409 NR Desc: F16A14.5
  misc_feature: Homolog of GI Number: 31249724 NR Desc: putative glucanase
  misc_feature: Homolog of GI Number: 50919911 NR Desc: putative glucanase
  misc_feature: Homolog of GI Number: 11071974 NR Desc: elicitor inducible beta
  misc_feature: Useful for making taller plants and plants with longer inflorescences
  misc_feature: Useful for sterility
MKALLVTVLLLLSSTLAASQWCVCRQDASQAALQKTIDYACGSGADCNSIHETGACYNPNTVAAHCSWAANSYYQNNKAKGATCDFTGTAALTTSDPSSSGCSYPTGASAVGTMTPTTAGTMGGGTPGTSTGTGTGTGTAGAGMGTGTATGTAGTGFGGLGPGTDASMDTAAAAGLLVPPRAGGLAAALVALLLSAMVLA

SEQ ID NO: 1193 - DNA, 861 bp, Zea mays
  misc_feature: Ceres CLONE ID no. 446135
  misc_feature: Ceres CDNA ID no. 25401395
  CDS (133)..(672): REFERENCED BY SEQ ID NO: 1194
ctcctcactcggtcactcactccacagtccacaccaccaggcactcggctcaactctcaagacagcaaagccaccacccaccgagctctatcgccggaacagcgccggttatccagcagaggtacgagaccaatgagaccttccacggctggcgctctggccgccgcggccctcgtcgcgacgctcgcgctgagcgtcggcgccaccccggagacgacgtgcgcggcggcggcggcccacgaccggcgcgtggactacggcttctgcgtgtcgaggctgagccaccaccacgacagccccgacgcggacacctggggcctggccaaggtggccgccgacgtgggcgtcgccaccgccggggacgccgtctacgacatcaaggccctgctggccaagccgccggccgacgcccaggcgcgggcggcgctggagcagtgccagaggctgtacgacgcggcggagatggcgttcgcggaggcgtacgacgggatcaaccggcgcgactacgcggcgggcaagggcaaggccacggaggcggctgcgctggcccgccggtgcgacgacgccttcgcgcgggccgccgtgcgcccgccgccgcaggtcgcgcggtggggcgaggagtcctcgaagattgccgtcgtctgcacggccatcaccgacctcatcggctgagcgatgggtaccggtcagggccaggtgatgcgctggctgcgtcgtcgtgatccgcgggcgtgttgtcttgtcatccgttggttacacgccacgccagccagagccagacaaaacgcggacgaacttgtgaattgttatgctggaataaaagcgttttatttctgcgcgctgttaaaaaaaaaaaaaaaa

SEQ ID NO: 1194 - protein, 179 aa, Zea mays
  misc_feature: Ceres CLONE ID no. 446135
  misc_feature: Ceres CDNA ID no. 25401395
  misc_feature (20)..(125): Pfam Name: PMEI PFAM Desc: Plant invertase/pectin methylesterase inhibitor
  misc_feature: Homolog of GI Number: 67987666 NR Desc: Protein
  misc_feature: Homolog of GI Number: 67986189 NR Desc: UDP
  misc_feature: Homolog of GI Number: 71367849 NR Desc: similar to Methylase involved in ubiquinone/menaquinone biosynthesis
  misc_feature: Homolog of GI Number: 66776365 NR Desc: PE
  misc_feature: Homolog of GI Number: 66780099 NR Desc: PE
  misc_feature: Homolog of GI Number: 66776103 NR Desc: LigA
  misc_feature: Homolog of GI Number: 67984658 NR Desc: type II secretion system protein E
  misc_feature: Homolog of GI Number: 67986982 NR Desc: Acetylornithine and succinylornithine aminotransferase
  misc_feature: Homolog of GI Number: 66777243 NR Desc: Ribonuclease PH
  misc_feature: Homolog of GI Number: 152683 NR Desc: ORF homologous to Escherichia coli and Salmonella typhimurium dnaEgene
MRPSTAGALAAAALVATLALSVGATPETTCAAAAAHDRRVDYGFCVSRLSHHHDSPDADTWGLAKVAADVGVATAGDAVYDIKALLAKPPADAQARAALEQCQRLYDAAEMAFAEAYDGINRRDYAAGKGKATEAAALARRCDDAFARAAVRPPPQVARWGEESSKIAVVCTAITDLIG

SEQ ID NO: 1195 - DNA, 1269 bp, Zea mays
  misc_feature: Ceres CLONE ID no. 446580
  misc_feature: Ceres CDNA ID no. 36582920
  CDS (2)..(940): REFERENCED BY SEQ ID NO: 1196
gaccatgtcccactcccctctccctcctccagtcttccaaaatatctccctgcgcttttccgagtccttttccctccaaggaacagaaacaaccggagcttttaccccacccgctttcccctccccgccaagaacaacagggctcctcgcaataattcgtgcatccatggcgaagctcgtcaacaagctggtcgattcattcgaccacgacgaggcgccggcgccggacgtcggctgcgtgcgcgccgtgctggccgagctcgtcctcaccttcctcttcgtcttcaccggcgtctccgcctccatggccgccgggtccggcgggaagcccggggaggctatgccgatggcgacgctggcggcggtggctatcgcgcacgcgctggccgctggcgtcctggtgacggccggcttccacgtctccggcggccacctcaaccccgccgtgacggtggggatcttggttcgcggccacatcaccaagctccgggcgctgctgtacgtcgccgcccagctgctggcgtcctccctcgcctgcatcctcctccgctacctcagcggcggcatggtgaccccagtgcacgccctgggcgctggcatcaacccgatgcagggcttggtgatggaggtgatcctcaccttctcgctgctcttcgtcacctacgccatgatcctggacccgcggagccaggtccgcaccatcggcccgctgctgacggggctcatagtcggcgccaacagcctcgccggcggcaacttcaccggcgcgtccatgaacccggcgcggtccttcggtcccgccatggccaccggggtctggaccaaccactgggtctactggatcggcccgctgctcggcgggtccctggccggcttcgtgtacgagtcgctgttcatggtgaacaagacgcacgagccgctgctcaatggagacatctgacgaccgtcggcccccagggcagtgagcacggttcatgcttgttttctgtaaaatagttcgttacctacaagcatgatgcatatattgaccaaggtaattaattagagagggttgctgttaaatagttaccctggtgggattgtgggatgtagaaattgttgctgggctttgcttttcttttttctttttttcttttcctcccaaggaattttttaagagggctgggttctgtaaaggatttgtttaggctattagttagctatatagtagaaaactagagaatgctatacgttggacgtgattttttttcacgaaaaaaaaaaaaaaaa

SEQ ID NO: 1196 - protein, 257 aa, Zea mays
  misc_feature: Ceres CLONE ID no. 446580
  misc_feature: Ceres CDNA ID no. 36582920
  misc_feature (16)..(239): Pfam Name: MIP PFAM Desc: Major intrinsic protein
  misc_feature: Homolog of GI Number: 13447831 NR Desc: tonoplast membrane integral protein ZmTIP4
  misc_feature: Homolog of GI Number: 13447829 NR Desc: tonoplast membrane integral protein ZmTIP4
  misc_feature: Homolog of GI Number: 50933399 NR Desc: putative tonoplast membrane integral protein
  misc_feature: Homolog of GI Number: 13447835 NR Desc: tonoplast membrane integral protein ZmTIP4
  misc_feature: Homolog of GI Number: 13447833 NR Desc: tonoplast membrane integral protein ZmTIP4
  misc_feature: Homolog of GI Number: 3643602 NR Desc: putative aquaporin
  misc_feature: Homolog of GI Number: 4584429 NR Desc: aquaglyceroporin
  misc_feature: Homolog of GI Number: 21284370 NR Desc: tonoplast intrinsic protein bobTIP26
  misc_feature: Homolog of GI Number: 1622729 NR Desc: tonoplast intrinsic protein
  misc_feature: Homolog of GI Number: 50927737 NR Desc: OSJNBb0034G17.15
MAKLVNKLVDSFDHDEAPAPDVGCVRAVLAELVLTFLFVFTGVSASMAAGSGGKPGEAMPMATLAAVAIAHALAAGVLVTAGFHVSGGHLNPAVTVGILVRGHITKLRALLYVAAQLLASSLACILLRYLSGGMVTPVHALGAGINPMQGLVMEVILTFSLLFVTYAMILDPRSQVRTIGPLLTGLIVGANSLAGGNFTGASMNPARSFGPAMATGVWTNHWVYWIGPLLGGSLAGFVYESLFMVNKTHEPLLNGDI

SEQ ID NO: 1197 - DNA, 1380 bp, Zea mays
  misc_feature: Ceres CLONE ID no. 446898
  misc_feature: Ceres CDNA ID no. 25446662
  CDS (196)..(1149): REFERENCED BY SEQ ID NO: 1198
ttttttctccccttcccaccccatccctcactgcgagtggcctggtgcgcgagccgcgcgagaggaaaagaggcagagcgagccttccgcctcctcccccccttcgcgagagagaaaggagtgggggaggaaaaaaaatcttagggctttctcgtcgatcctctccgcgattaccccaccgattcgtccaatccaatgcagcgcggccccgcggtatcaaatcccccggcggcggccgccaccggcgcctccgagaacgacaaaaagtacagaaatgaagataatgtgagcctgggcgatcagtcagatggggccgtcatgccatctcccacaaagaagctgcaaatatgcaaaggcccttcagatgcaccttcaattaggaaatcaactatcagaatcctgggtgttaagggagctgctctaccacccacagggaaatctcaagttgaaactcggaaatgctttgctaatgctacagcagaagtgatttctgctagtacaaacgagatcagtgagccagataatgcagctgccccattgcttgcacagcagttgccaccagacactgcaaagaactccactgtcatcatgcatacccatgaaacaagtaaagtcaatcagttggctgctacatggccaagggcgaactttcaaactgattacaacaagaagccttccaatgtacccataatggctaaccagcccagtgggttcgctggtgcgactgctcccttggtgacaccaaagatggaaatcggaaacatgaaggacagttccaatcctctctcaaatcctgcttacgcaagggcgcttgtaataaagcagcaagagcagctccttcagcaatataaattgggcagttcaccgcagcgacagcatcatggacagcatctctacatcaaagggccagctctgtttgagaatgatgacccgccaccggtcaagccgctgggaacaaggtgccagctctgcaagcttgatgttgctttccggacacaaggggatgctggccgtgatgccaatgctccaccagtcattgcagttttggcatgccaccatgtgttccacagcaggtgcattgaatctgtttacgggctcgctgagcctgctgagtgccttgcctgcctggagtccggtgcagcgcactgattgctaaccagatacaccaggtataggataaagtttcctcttatattgcgtatagagagggtgcagtatcatctccattgatacaagtttccgatggtataacggtgcaggtcaagagtctgaagtgctccatttctgtgggcctttagatggtgtaagtaggctaccattggagttcaatagggagctgaattatgggacatgtcacatgtccgaaaaaaaaaaaaaaaa

SEQ ID NO: 1198 - protein, 317 aa, Zea mays
  misc_feature: Ceres CLONE ID no. 446898
  misc_feature: Ceres CDNA ID no. 25446662
MQRGPAVSNPPAAAATGASENDKKYRNEDNVSLGDQSDGAVMPSPTKKLQICKGPSDAPSIRKSTIRILGVKGAALPPTGKSQVETRKCFANATAEVISASTNEISEPDNAAAPLLAQQLPPDTAKNSTVIMHTHETSKVNQLAATWPRANFQTDYNKKPSNVPIMANQPSGFAGATAPLVTPKMEIGNMKDSSNPLSNPAYARALVIKQQEQLLQQYKLGSSPQRQHHGQHLYIKGPALFENDDPPPVKPLGTRCQLCKLDVAFRTQGDAGRDANAPPVIAVLACHHVFHSRCIESVYGLAEPAECLACLESGAAH

SEQ ID NO: 1199 - DNA, 920 bp, Zea mays
  misc_feature: Ceres CLONE ID no. 446914
  misc_feature: Ceres CDNA ID no. 25446839
  CDS (192)..(620): REFERENCED BY SEQ ID NO: 1200
accctgttcattcagaaaagtgcggtggtttctcgtgaacgagcaacccagaaaaagtacacctgtcgcgtaagcgtcctcaggcatcagctccccggtcgcggtctctgtctctctgaagggaaagctctgtttccccttcccggtgccggagtcggggaaggtccgaaggtcaccgcgggcgcggggcgatggacagcaacaacctcctggcggcgtggccggtcctgggaccgggcgtcgccggcgccgtattcggcgcaggctggtggttctgggtcgacgccgtcgtctgcagcgccgccgccgtgccattcctccactacctcccagggttcttcgcctcgttcgccgcgctcatgttcaactgcgtcaaccgggaggacatcggcgatggctactactcaccgtacgacgactccgagtggagggtgaagctctggcttttcatttcgtacgtggtgtcttttgtttcgctggccggggcagtgggtttcttggttcaagatgcgcttacggatacggggccatctgcgtggactggcactgctggcatcctgcagtgcgtgtttgtgttagtgagtgggttgatctactggacgtgccactctgaagattgacttaagaagtataggtatatatggccaaggaggaggaggaggaggatggaggctgcttttctcagaagcgattgcttttccgtagtacgtttctggaggcacctttggaccgtgctttccgaaacgggtggaataaagagccattttctagttgtttcaagagagatgtagataagtcgtactactattttacacgtgtttatagtcgtgtatcatgttgcttaaaactactttgtgaggtgttgttttggagcaagaaacttataggggcgctaagtagccaaaaaaaaaaaaaaaaaa

SEQ ID NO: 1200 - protein, 142 aa, Zea mays
  misc_feature: Ceres CLONE ID no. 446914
  misc_feature: Ceres CDNA ID no. 25446839
  misc_feature (1)..(142): Pfam Name: UPF0220 PFAM Desc: Uncharacterised protein family
  misc_feature: Homolog of GI Number: 8778790 NR Desc: T32E20.29
  misc_feature: Homolog of GI Number: 54641349 NR Desc: GA13431
  misc_feature: Homolog of GI Number: 24657484 NR Desc: CG15012
  misc_feature: Homolog of GI Number: 57043280 NR Desc:  similar to Small membrane protein 1
  misc_feature: Homolog of GI Number: 27732805 NR Desc: similar to Small membrane protein 1
MDSNNLLAAWPVLGPGVAGAVFGAGWWFWVDAVVCSAAAVPFLHYLPGFFASFAALMFNCVNREDIGDGYYSPYDDSEWRVKLWLFISYVVSFVSLAGAVGFLVQDALTDTGPSAWTGTAGILQCVFVLVSGLIYWTCHSED

SEQ ID NO: 1201 - DNA, 1139 bp, Zea mays
  misc_feature: Ceres CLONE ID no. 447197
  misc_feature: Ceres CDNA ID no. 29191364
  CDS (270)..(926): REFERENCED BY SEQ ID NO: 1202
atcttaacagccaggaagctggcgtcttgcttgtccttgttcttttcccacccggctacccccgtcgtcgccgccgctttccccgtggtttcagagctcaagtcggctagctaggccgcctggctaatctccctgccttctataagtacaggttcattgtgtgctgtgctcccagctccatcactgacacaatagagcacgctacttctcatcactcgccaacgtgcagagatcagggaagcggcactccatccactgactgaccgctcatggcgaaggtccgcctctacgtcgccgcggcctgcgccgttgtcctcgcgctcgccaccccggccctcgccggtgaccccgacatgctgcaggacgtctgcccggctgactacgcctccccggtgaagctgaacgggttcgcgtgcaaggcgaacttttcggcggacgacttcttcttcgacgggctgaggaacccgggcaacaccaacaacccggcgggctccgtggtgacggcggccaacgtggagaagttcccgggcgtgaacacgctgggcgtctccatggcgcgcatcgactacgcgccgggcggccagaacccgccgcacacgcacccgcgcgccaccgagatcatcttcgtcctcgagggcacgctcgaggtcggcttcatcaccaccgccaacgcgctcttcaccaagaccgtcaccaagggcgacgtcttcgtcttcccgcgcggcctcgtccacttccagcagaacagggggcacggccccgccgccgtcgtcgccgccttcaacagccagctccagggcacgcaggccatcgccatgacgctcttcggcgccgtgccgcccgtgccctccgacatcctcgccaaggccttccgcatcagcagcggcgaggtggaccacatcaaggccaacttcgcgcccaagtagagatccaacgtctgcattcccttgattttatcaataatcaatccccgcggtgtgcagttcgatttgttcgtcttcggttggtttgcttcgagacattgctgaccacgcttgtcactgctaatttgtgcggagcggaggagttgcttgtgctccgataaataagataaataatcaattctatcgtctgggttgctttcaaaaaaaaaaaaaaaa

SEQ ID NO: 1202 - protein, 218 aa, Zea mays
  misc_feature: Ceres CLONE ID no. 447197
  misc_feature: Ceres CDNA ID no. 29191364
  misc_feature (96)..(171): Pfam Name: Cupin_2 PFAM Desc: Cupin domain
  misc_feature: Homolog of GI Number: 34902528 NR Desc: probable germin protein 4
  misc_feature: Homolog of GI Number: 50933473 NR Desc: putative cupin
  misc_feature: Homolog of GI Number: 62733422 NR Desc: Putative cupin protein
  misc_feature: Homolog of GI Number: 34906612 NR Desc: germin
  misc_feature: Homolog of GI Number: 34904670 NR Desc: putative germin protein
  misc_feature: Homolog of GI Number: 57899940 NR Desc: putative Rhicadhesin receptor precursor
  misc_feature: Homolog of GI Number: 6689034 NR Desc: germin
  misc_feature: Homolog of GI Number: 15341550 NR Desc: nectarin I
  misc_feature: Homolog of GI Number: 40949663 NR Desc: germin
  misc_feature: Homolog of GI Number: 7447345 NR Desc: probable germin protein
  misc_feature: Useful for increasing chlorophyll and photosynthetic capacity
MAKVRLYVAAACAVVLALATPALAGDPDMLQDVCPADYASPVKLNGFACKANFSADDFFFDGLRNPGNTNNPAGSVVTAANVEKFPGVNTLGVSMARIDYAPGGQNPPHTHPRATEIIFVLEGTLEVGFITTANALFTKTVTKGDVFVFPRGLVHFQQNRGHGPAAVVAAFNSQLQGTQAIAMTLFGAVPPVPSDILAKAFRISSGEVDHIKANFAPK

SEQ ID NO: 1203 - DNA, 1484 bp, Zea mays
  misc_feature: Ceres CLONE ID no. 447232
  misc_feature: Ceres CDNA ID no. 40041218
  CDS (157)..(1146): REFERENCED BY SEQ ID NO: 1204
tctgctccctgctcgctcctagtccctcccgacagcggcggcgcaccttctggcgacttgagctttgggcgacgtcctcgggacgggcagaccgtaattgaaatgaaaaggataggtagatctagctaattcgataacaaggcaaggtgcgctcctatggaagtggaagaagcaggaggcgaagtggagatcgccggcaaggacgaggcggagtaccattcgcgcgatttcgaatgggaggacctcaaggaagaggtggaatctggacctgtcttctcctaccacctctccccctttctcgaccccgccgccagtaccacctcgccgccgcagccctcgtcggaggcctggagaagcttccaccgtcgccatgcgtccggaaagttctttaaggaaaggagatatttgcttaaggaatttcctgaactttgtagcagccaagatcatgccaaggttttagaagtggggtgtgggaatggaagcactgctgtttccattctacggtctagtgaaaggatcactgtctttgcttgtgactgtagcaaagacactcttgagaaggcaaatgaaattatatccaatacaaaagggattaatatcaaggataggttccacccctttttaatggatgtttctaaagaaactttcccagattggttattttgcaaagcctgtcaaacttcgctgggaaaagctgctgcatctttacttgatccaagtcaccatggaattagagaacacccagtcttccttggagacaaccgatgttgtgctggtggcatggattttattaccatgatattcacactgtcagccatacccttcgacataatgccaactaccatagaacaatgtgtttctgttctgaaaccaggcggtcttcttctgtttagggattacggtctttatgacatgacaatgcttcggtttttacctcatcaaagagtagggtttcgggaatatatgcgatcagatggtaccttttcatacttcttctcattggatactgtgagagaactctttcatgctgctgggctagtagagttggagctggaatattgctgtgtcaagtccgtgaacagaaagaatgggaagacgatgcggcgggtatgggtccatggcaaattccaaaaaccacctaggtgacaccagttaacggctttcgtgttcagctcaatccatatggattgtatagaattgtgtgggtttaaatccatagcaagtcaaaatctctactaattttttttcaatatcatccaatccacatggtgtagaaataaccaaagggcttagctgttagttttgctcggccactttgttgttgcaacaaagcgctgtaacagttttgtagccacaaacttaaatgacattgaaattatgccctcccccaaaaaaaaaaaaaaaaaaaaaaaaaaaaaaaaaaaaaaaaaaaaaaaaaaaaaaaaaaaaaaaaaaaaaaaaaaaaaaaaaaaaaaaaaaaaaaa

SEQ ID NO: 1204 - protein, 329 aa, Zea mays
  misc_feature: Ceres CLONE ID no. 447232
  misc_feature: Ceres CDNA ID no. 40041218
  misc_feature: Homolog of GI Number: 66361504 NR Desc: methylase
  misc_feature: Homolog of GI Number: 72040158 NR Desc:  similar to Methyltransferase
  misc_feature: Homolog of GI Number: 76645201 NR Desc:  similar to Methyltransferase
  misc_feature: Homolog of GI Number: 68384747 NR Desc:  similar to CG13929
  misc_feature: Homolog of GI Number: 44890548 NR Desc: Zgc:56175 protein
  misc_feature: Homolog of GI Number: 50732822 NR Desc:  similar to RIKEN cDNA 1600013P15
  misc_feature: Homolog of GI Number: 72150812 NR Desc:  similar to CG13929
  misc_feature: Homolog of GI Number: 76609616 NR Desc:  similar to Methyltransferase
  misc_feature: Homolog of GI Number: 50927076 NR Desc: Similar to RIKEN cDNA 1600013P15
MEVEEAGGEVEIAGKDEAEYHSRDFEWEDLKEEVESGPVFSYHLSPFLDPAASTTSPPQPSSEAWRSFHRRHASGKFFKERRYLLKEFPELCSSQDHAKVLEVGCGNGSTAVSILRSSERITVFACDCSKDTLEKANEIISNTKGINIKDRFHPFLMDVSKETFPDWLFCKACQTSLGKAAASLLDPSHHGIREHPVFLGDNRCCAGGMDFITMIFTLSAIPFDIMPTTIEQCVSVLKPGGLLLFRDYGLYDMTMLRFLPHQRVGFREYMRSDGTFSYFFSLDTVRELFHAAGLVELELEYCCVKSVNRKNGKTMRRVWVHGKFQKPPR

SEQ ID NO: 1205 - DNA, 905 bp, Zea mays
  misc_feature: Ceres CLONE ID no. 447386
  misc_feature: Ceres CDNA ID no. 40350975
  CDS (344)..(655): REFERENCED BY SEQ ID NO: 1206
atccaattcacaggctcaccacaccaaccaacaagcaaaaattccccaatcctctcgtctccgcggcgaagatgtcggggcgcggcaagggcggcaagggcctgggcaagggcggcgcgaagcgtcaccggaaggtgctgcgcgacaacatccaggggatcacgaagccggcgatccggaggctggcgcggcggggcggcgtgaagcgcatctcggggctcatctacgaggagacccgcggcgtgctcaagatcttctgcttctggcgaccaaattctgccgtctccaccgccgccgcagccagcgtcaccggagggatctgccgtctcccttgctccacgcgatgaacaccgacatcaccgcctcgactaagccggagtacccggtggtggatcggaacccggccttcaccaaggtggtcggcaacttctctgcgctcgactacatgcgcctctccaccatctccgccgtctccgtcaccgttggctacctctccgggatcaagccggggatccggggcccgtcgatggtcacgggcggcctcatcggggtcatgggagggttcatgtacgcctaccagaactccgccgggcgcctaatgggattctttcccaacgacgccgaggttgcgcgctacaagcacaagcttcattgaggatccagctccattccgtctctcttttcgcaaccgtttcgcctgttcctttcctgattccgtgttaacttcagtactttatctgggcactctatggccttggttaaataaaagtggtatgttgttgcacggttatgaggattcgatgatacaattcacctcatctttatgttgtttggtgagaatttcgtcgccgtttgggtgaatttatgaatactgaagtgatttctgcccaaaaaaaaaaaaaaaa

SEQ ID NO: 1206 - protein, 103 aa, Zea mays
  misc_feature: Ceres CLONE ID no. 447386
  misc_feature: Ceres CDNA ID no. 40350975
MNTDITASTKPEYPVVDRNPAFTKVVGNFSALDYMRLSTISAVSVTVGYLSGIKPGIRGPSMVTGGLIGVMGGFMYAYQNSAGRLMGFFPNDAEVARYKHKLH

SEQ ID NO: 1207 - DNA, 1553 bp, Zea mays
  misc_feature: Ceres CLONE ID no. 447445
  misc_feature: Ceres CDNA ID no. 40041219
  CDS (114)..(1013): REFERENCED BY SEQ ID NO: 1208
gagaggtggacacgacgacggtgacggtgaggtggagagcggagtggcggatcgtggctccgatccataagggacggctccacacatcgggttcctgcctctgctcagcagccatgccggtgaggcggcggcagccgcgtcggccggagacgggtgcggcggagaggtacagggagatggggatcggggctgcgctgtcgcggccctgggactatcccacggcctgcggcgagcttgcagcgctgctgcgcctcggatacgcggacctccctaaggcagcccaggcgctcgttgcctccgacgtgctactcgcgtttcgcctccttcccgatgtgcagacaggatatgcagtaagcacagctaatgttcttctccaagcagtagaagttgctctaccaaagcaaaagaaggcgcaggctgtttcagagttcaagcactctattattgcacataaaaggcgtgcaagagtccaacaaatttcaggttcaccacacataccacaagatatacttgtccatatcttcagtttcctggacatgcattctttggtagcagcaggtcttgtctgctggtcttggaattcagcggcaaatgacaacaaactgtggaagatgaattactcgattttctttggcctcagccatttgagttgcaacaacattcctgtatctggtgtgcaatacagcacgaattcggtgccaaattatccaaactttagctggaaggagtccttccacactaagtatgcagaatgcgcgtcatggaaatttgtatcaaatagagcactatgtgcgcattgcagatcagttatttggctgagcaacctcacatgtgcttctccacaccattgccctaagaatagacaccatgaagtaaaactacgacctctgttacctgatacagttgctaaatacatattgcgcgttgaagatctagcagcttcatcatctgaaagtgatgacacagatgactcagattatgagaattggcacccaagattttgggcgctataggacaatgatattcggattgtgactatttatgtcctcgattctactagtttgctgtatttagtatgtagcaactacaaacatcatacgaatggaacacattgtatattgtattgtctattgtagtcttggtacaactatatttaggagaagcaactgttgggttgatttcatttagggcgtcgagctagggagcgtggtgccgagcgaggagagggacgccgccgcgccgggagctaggcgctggggagcagggcgcaacaggaataacgacgacgatggtgtggtctacagaggttcttggtttggaaacgaccgaccaatgctaatagtgctcaacggctgatgggagactagcatgatgtgatctgcaggagctaacaggtacatatgtgctactagtgctcaatagctgaaacgaccgtgcaaactactgtgatgtggtgtgtaggagcaggcgttgccaaatagatacagttgctgctactaaaaaaaaaaaaaaaaaaaaaaaaaaaaaaaaaaaagaaaaaaaaaaaaaaaaaa

SEQ ID NO: 1208 - protein, 299 aa, Zea mays
  misc_feature: Ceres CLONE ID no. 447445
  misc_feature: Ceres CDNA ID no. 40041219
  misc_feature (125)..(170): Pfam Name: F PFAM Desc: F
MPVRRRQPRRPETGAAERYREMGIGAALSRPWDYPTACGELAALLRLGYADLPKAAQALVASDVLLAFRLLPDVQTGYAVSTANVLLQAVEVALPKQKKAQAVSEFKHSIIAHKRRARVQQISGSPHIPQDILVHIFSFLDMHSLVAAGLVCWSWNSAANDNKLWKMNYSIFFGLSHLSCNNIPVSGVQYSTNSVPNYPNFSWKESFHTKYAECASWKFVSNRALCAHCRSVIWLSNLTCASPHHCPKNRHHEVKLRPLLPDTVAKYILRVEDLAASSSESDDTDDSDYENWHPRFWAL

SEQ ID NO: 1209 - DNA, 753 bp, Zea mays
  misc_feature: Ceres CLONE ID no. 447484
  misc_feature: Ceres CDNA ID no. 29191365
  CDS (94)..(630): REFERENCED BY SEQ ID NO: 1210
gccactccactcctaccccacacagaagcggcggcggcggagcaaacgcaggcgaaggcgagggtgtgagggaaggagcaccagccagcggaaatggtggccttcaggttccatcagtaccaggtggtggggcgcgcgctgccgacgcccggcgatgagcaccccaagatctaccgcatgaagctctgggccaccaacgaggtccgcgccaagagcaagttctggtacttcttgaggaagttgaagaaggttaagaagagcaacggccaggtcctggccatcaacgagatctttgagcgtaacccgacgacaatcaagaactacggcatctggctgcgctaccagagcagaaccggataccacaacatgtacaaggagtaccgcgacacgaccctgaatggcgctgtggagcagatgtacaacgagatggcctctcgccaccgcgtgaggtccccctgcatccagatcatcaagactgcgacggtgcacttcaagctctgcaagagggacaacactaagcagttccacaacagtgagatcaagttcccgctcgtgcaccgcaaggtcaggccgccgaccaggaagctgaggaccacgttcaaggcttcgaggcccaacctgttcatgtgatttagctgtggtcagtgtatgcgatcataagagtcacaagtgtttctgttttttttttaagttttgacttcctaatagtaatacttaatcggtttgatgattcaactaaaaaaaaaaaaaaaa

SEQ ID NO: 1210 - protein, 178 aa, Zea mays
  misc_feature: Ceres CLONE ID no. 447484
  misc_feature: Ceres CDNA ID no. 29191365
  misc_feature (5)..(178): Pfam Name: Ribosomal_L18ae PFAM Desc: Ribosomal L18ae protein family
  misc_feature: Homolog of GI Number: 50511482 NR Desc: putative 60S ribosomal protein L18a
  misc_feature: Homolog of GI Number: 34909590 NR Desc: putative ribosomal protein L18a
  misc_feature: Homolog of GI Number: 34910926 NR Desc: putative 60S ribosomal protein L18A
  misc_feature: Homolog of GI Number: 30102898 NR Desc: At2g34480
  misc_feature: Homolog of GI Number: 13430184 NR Desc: ribosomal protein L18a
  misc_feature: Homolog of GI Number: 20453309 NR Desc: AT3g14600/MIE1_10
  misc_feature: Homolog of GI Number: 21593925 NR Desc: putative 60S ribosomal protein L18A
  misc_feature: Useful for making ornamental plants with modified flowers
  misc_feature: Useful for making ornamental plants with modified leaves
  misc_feature: Useful for making plants with altered leaf shape eg curled leaves
  misc_feature: Useful for making shorter plants
MVAFRFHQYQVVGRALPTPGDEHPKIYRMKLWATNEVRAKSKFWYFLRKLKKVKKSNGQVLAINEIFERNPTTIKNYGIWLRYQSRTGYHNMYKEYRDTTLNGAVEQMYNEMASRHRVRSPCIQIIKTATVHFKLCKRDNTKQFHNSEIKFPLVHRKVRPPTRKLRTTFKASRPNLFM

SEQ ID NO: 1211 - DNA, 1410 bp, Zea mays
  misc_feature: Ceres CLONE ID no. 447783
  misc_feature: Ceres CDNA ID no. 40041220
  CDS (521)..(937): REFERENCED BY SEQ ID NO: 1212
tccccgctcgccgtcggcctgtctcagcccctgaccctccaccgccaccgactccctctcttgccaccgagggaatttggatctaggagcccatgccactacagctctcccccgcccacgattagctctcggctcgggagatgctgacgcccatcgcgaccacgatttgctccctcgtgtcctcggcctcttcctccactctcatcctccctcctccccccgtcctcggttattctcgtcgcctccgccgcgcgttccgctctccccacagcctttgtccgccacatcatcctcggctgttgtcggcgcctcgctccacgcccgccctcgcccaacgaccctcgccgcacccctccctgtcctcgacaacttcccctctggccccgtccttgccggcatcggcgcctgctctctccgtcatgggggaggggaaagtgaaggaggaagaagagccaagcggctaagccagctcggccgctcgcctcccaccaaaatcccccgagacatcatcgacgaggagatggagatggagtctagccccgcagctcctcggcatcacaatcgttgcctcccgtgttgtgcccttggatccacttctcgtgcgacgcccctgatcgacaagcacgtcgtgcgtccgcaccgcctccctgaccgacaagcatgtcatggctccaggcacttgcagcctccgcgcttcttcggccagcaagcacgcgaccacgcctcccactattcagtcgtggtggttccaggtgcttcttgcctccgtgtctccctgactagcgactatgtaaggagggacctcccctgccctggctccaaacagaatcagggaatacggtcagcctcccatggttgctgccatgtaggcgatctgatagtccacaaaaacctaagattcgacaccaagtcactaaccaaaggaagatcgagatgaggaaggatgtgatttgatctcaaatatcaactacatctgtctagcgtcgagacacatgtgtggtagtgctaagttggttctgtcattcagtttctttctgtatcctatttctgtgaaaatatgttatgtgagttgtaaactgattgccagaattaatggatgttttgcagctacgccagaagctgatggttgtgggtaaaacatttttgttgctgtaatccccagcctagcaagtttcacttaaacaatggttcaggctttcgtagcttgcaaggtactataggctgtagcacaacttatatactattttgtactgactcatgcggagggcccgtgatcagaggtgctgctaaatttttagttacacaaagtctactatttagcatccgcatgttagtaattttttagcaagaatgcaatatcggtacatagtatgccatgaatctttttacctgaaaaaaaaaaaaaaaaaa

SEQ ID NO: 1212 - protein, 138 aa, Zea mays
  misc_feature: Ceres CLONE ID no. 447783
  misc_feature: Ceres CDNA ID no. 40041220
MEMESSPAAPRHHNRCLPCCALGSTSRATPLIDKHVVRPHRLPDRQACHGSRHLQPPRFFGQQARDHASHYSVVVVPGASCLRVSLTSDYVRRDLPCPGSKQNQGIRSASHGCCHVGDLIVHKNLRFDTKSLTKGRSR

SEQ ID NO: 1213 - DNA, 1130 bp, Zea mays
  misc_feature: Ceres CLONE ID no. 448440
  misc_feature: Ceres CDNA ID no. 40350976
  CDS (410)..(760): REFERENCED BY SEQ ID NO: 1214
aaaactcacagtccttgccttgccgtggcgtccgtcgtcccccacgtttgtacatatatatgcccatgtcatcgtcgtctccttcctctgctccgatcccctttgcaaccttcctcgacgtcctcgtcataggccaggcaactgcggctggcctgcttctcttgtgctcctgcgccaccgtcactgctcatctcctccatagccatagcttttagactaggttttagattgtggaagaagaacctatacacgagacagaagctagctagctttctattccatcagtaacctctcggtctagcaacaaagcttcccattgcactcgatcgatccgccccaaacatccatccatccatccatccatccatccaccccttcttcattcctggctgtaagaagagatggtctcatggccgtgagctcacctcgccgagcgctcatcgcggccgtgtccctcttcttccttctcggcgctgcgaccagcgtccgcaccgcgacgttttccccttctcagcagcagaacctggcggaggacaagtcgcggctggggtcgacgccgccgagctgccgcaaccggtgcagcgcctgcaacccctgcatgcccgtccaggtgaccaccgtgcccgggctcggccgcggcgcccgcgccaccgacgtcgacgacgacacggtggcggtggcggccggcttctcgcgctactccaactacaatccgctggggtggaaatgccgctgcgacggccgcctgtacgacccctgacgcgctgctgcttttgcttcggcgccgtgccaaccccggtgcgcgcatgcactccgctccggactccggtcggcgggagagactcactactggagaccagccagccagccaggttctccgtctcgcgtctgtcgtgtgttcttcggaacccatggcggcttgcttcatcacaagcttatttattagcgctactgtctctactagttcgagcttgccgttgcagccattgcaactcgcgtagccgtaggcccgtagccatttttttggctccctgctcaaacaaattttactcgcgtgtcggtgtgtaaaaactaaagactactaaagagtggttgtgagcagtaaaaaaaaaacaaaaaaaaaaaaaaaa

SEQ ID NO: 1214 - protein, 116 aa, Zea mays
  misc_feature: Ceres CLONE ID no. 448440
  misc_feature: Ceres CDNA ID no. 40350976
MAVSSPRRALIAAVSLFFLLGAATSVRTATFSPSQQQNLAEDKSRLGSTPPSCRNRCSACNPCMPVQVTTVPGLGRGARATDVDDDTVAVAAGFSRYSNYNPLGWKCRCDGRLYDP

SEQ ID NO: 1215 - DNA, 1800 bp, Zea mays
  misc_feature: Ceres CLONE ID no. 448888
  misc_feature: Ceres CDNA ID no. 40041221
  CDS (62)..(1597): REFERENCED BY SEQ ID NO: 1216
gccgcgcggcgtccgcgtcactccaatcccctcgccccgcggcgcctccgttcacagcgccatggcggggtggatctcctccaagctcaaagcagccgagaccctcctccaccagatcgatcagcaggcggcggaatccctcggcaagtccccatccgcttccgacctcgccacgctgcactccacaacatctcgctccgccgatgacctccttgacgtgccgctcccgcgcaggccgccgccgtccggcccgcccccctcactcggcctccgtctcgcagcgaagcgccgctccccgccttcccaagggccccgtcgctccgcatcggcggctgcgatgctcgcggtgcaggatcaagccggtggtgaaccaacggtgggggtggtggccgaggtgaaaccggaaacggatggaggggatcgcgaggacggcaagagtgtcgcgtccgagagcgggagcgatgaggactccgatgggtcagggagcgaagattcggaggattccgaggaggagaggcggagggaggaggagaggacgcggcggcgggctgagcggcttgcggccatggccgcacgcgctattgctgagcgcgaagatgctgttgcgaggctcgagggggagaaggcggggcttgagaagctgctcgccgagcgtgagaaggagcaggctcaggaggcttcagagttgcagactagtatgattgaaaccttggaagcagtggagatagagaaacagagacatcacagcactagaatggaagcccttgcacgtttggctagacttgaggttacaaacggtgagcttgcaaagtcacttgccagggaacaatggaatctggaagttcaagtagatcaagtggcgcagcttcgagaggaagttgaattgaagaaacttgctcaagataaatacagaagaaagctaacaaagatacaaaagacaagtgcccctccggttgatgaaatagaatctttgagaaggttcaagctggaggaagaaattattgatgcagaatacactctgacatgtgacagaattgtgagcttgaaggacaaggcaaggaagattgaagaaagcattgagctgactagaagagacatggttcatcctacagaggtggaaattgagctcaagaagaggcttgatcaactaactgatcggttgattcagaaacaaatgcaggtggagtccctatcttcagagaaggcagctctgttaatgagaatcgaggcagtcacgaggttgcttgacaatagcacctcatcatcagcttcctcaagctcatcaagattggacattgaagctggtgcatggcaacaatcacattcaccaacaatcacattcaccaacaatcacattcgcgacagaatacgggctggacagcagcaactgggatctgcgatccgacagctcgattcgatcttttcagccgggcatatcttcttgaggcggaatccgaaggcgcaggtttgggccttggtgtacctggtatgcctccacttatgggtactgtacatactaacatcacacccaacagtgtcggaaactcgctctggggcaaccttttctttggagacattaaacaagactagcacttgattgctttttcctggcatgttctgatgttatattctggctgtatacatgaggcatcatacctttttctggttgagaaaaatcttagcatataatgcctcgtgcattttgttttggtacctgtccctatccgcaattaaagtgtaacggtggctggttgcatacatgaaagttggaattacttttggacaaaaaaaaaaaaaaaa

SEQ ID NO: 1216 - protein, 511 aa, Zea mays
  misc_feature: Ceres CLONE ID no. 448888
  misc_feature: Ceres CDNA ID no. 40041221
  misc_feature: Homolog of GI Number: 50929239 NR Desc: OSJNBb0059K02.24
  misc_feature: Homolog of GI Number: 9719733 NR Desc: EST gbAI997943 comes from this gene.
  misc_feature: Homolog of GI Number: 8671781 NR Desc: T10O22.16
  misc_feature: Homolog of GI Number: 49115503 NR Desc: MGC80881 protein
  misc_feature: Homolog of GI Number: 76647613 NR Desc:  similar to Golgi autoantigen
  misc_feature: Homolog of GI Number: 18606388 NR Desc: Golgi autoantigen
  misc_feature: Homolog of GI Number: 30260188 NR Desc: Golgi autoantigen
  misc_feature: Homolog of GI Number: 4191344 NR Desc: golgin
  misc_feature: Homolog of GI Number: 62859015 NR Desc: LOC548986
MAGWISSKLKAAETLLHQIDQQAAESLGKSPSASDLATLHSTTSRSADDLLDVPLPRRPPPSGPPPSLGLRLAAKRRSPPSQGPRRSASAAAMLAVQDQAGGEPTVGVVAEVKPETDGGDREDGKSVASESGSDEDSDGSGSEDSEDSEEERRREEERTRRRAERLAAMAARAIAEREDAVARLEGEKAGLEKLLAEREKEQAQEASELQTSMIETLEAVEIEKQRHHSTRMEALARLARLEVTNGELAKSLAREQWNLEVQVDQVAQLREEVELKKLAQDKYRRKLTKIQKTSAPPVDEIESLRRFKLEEEIIDAEYTLTCDRIVSLKDKARKIEESIELTRRDMVHPTEVEIELKKRLDQLTDRLIQKQMQVESLSSEKAALLMRIEAVTRLLDNSTSSSASSSSSRLDIEAGAWQQSHSPTITFTNNHIRDRIRAGQQQLGSAIRQLDSIFSAGHIFLRRNPKAQVWALVYLVCLHLWVLYILTSHPTVSETRSGATFSLETLNKTST

SEQ ID NO: 1217 - DNA, 523 bp, Zea mays
  misc_feature: Ceres CLONE ID no. 449834
  misc_feature: Ceres CDNA ID no. 25446392
  CDS (53)..(322): REFERENCED BY SEQ ID NO: 1218
gttaaaaccgagaagagaccaggccgaaggaaaacaatcctgaaaccaagccatgggtctgcaggaggaatttgaggagcatgctgagaaggcaaagaccttgcctgagaacacgagcaatgagaacaagctgatcctatacgggctctacaagcaagccacggttggagatgtgaataccgatcgtccgggcatattctaccaaaaggacagggccaagtgggatgcctggaaggctgttgaaggcaaatcgaaggatgaggcgatgaatgactacatcaccaaggtgaagcagctccaggaggaggctgccgcctcttaaaagtctctatttgtcagatgagctttgtgccatttcctcattagaagtatatcattcgatccattggggatctgtgaaccatgtacctgtttatgtaactggttaccagtgttatccatctatctatctatctgtgaagacttgagtcttctaaattatgatatctgtctgtgtgaaaaaaacaaaaaaaaaaaaaaaaaa

SEQ ID NO: 1218 - protein, 89 aa, Zea mays
  misc_feature: Ceres CLONE ID no. 449834
  misc_feature: Ceres CDNA ID no. 25446392
  misc_feature (3)..(87): Pfam Name: ACBP PFAM Desc: Acyl CoA binding protein
  misc_feature: Homolog of GI Number: 38093741 NR Desc: putative Acyl
  misc_feature: Homolog of GI Number: 34905304 NR Desc: putative Acyl
  misc_feature: Homolog of GI Number: 19352190 NR Desc: Acyl
  misc_feature: Homolog of GI Number: 6002102 NR Desc: Acyl
  misc_feature: Homolog of GI Number: 32454286 NR Desc: acyl
  misc_feature: Homolog of GI Number: 1938236 NR Desc: acyl
  misc_feature: Homolog of GI Number: 6002104 NR Desc: Acyl
  misc_feature: Homolog of GI Number: 55775158 NR Desc: putative Acyl
  misc_feature: Homolog of GI Number: 5902717 NR Desc: Acyl
  misc_feature: Homolog of GI Number: 35187458 NR Desc: acyl
MGLQEEFEEHAEKAKTLPENTSNENKLILYGLYKQATVGDVNTDRPGIFYQKDRAKWDAWKAVEGKSKDEAMNDYITKVKQLQEEAAAS

SEQ ID NO: 1219 - DNA, 1440 bp, Zea mays
  misc_feature: Ceres CLONE ID no. 450079
  misc_feature: Ceres CDNA ID no. 25446841
  CDS (234)..(1274): REFERENCED BY SEQ ID NO: 1220
atctttgcgcttggggcaatgacgcagcttatgaggtcataccgaggcgcgtcaattgctggttgaaaactatttccaaaccccctctttggcccactgggccactgagaatttctggaagggctccttttcctcggagaagcaatcttgagtcctggcctgggtcttcgctgccagcacgcttgtggccaagaaacgttgggggcagtttggacctcggagcagcagcatccatggcgggagaggaggccgggaggaggggcgttccctctctgctgaacccgccgtccgcttccagcgaggggcagcaggagcacatcgcctctgatgtcacacagctcatcggatggacacctctggtcgagctcaagcgaatcgccgccaaggaaggggtatgcgcgcgcatcgtcggcaaggtggaggcgtaccagcctctgtgctccgtcaaggatcgcagcgctctgagaatgatcgaagacgcagaggagagggggctgatctcgcccggcaccacgacgctcgtggagccgacgagcggcaacctggggctgggcctggtcctcgtcgccctccgcaagggctacaggttcgtcgcggtcatgccaggccagtactcgctcgacaagcagatcctgctgacatacatgggcgcagagctgtacgtaacagatccatccctggggttcccgggcataaccgccaaggtcgaggagctcaagaaggagctgcccaacgtgcacgtcctcgaccagttctccaacagagcgaatcctgaagcgcatgttagatggactgggcctgagatctggaaggacaccgccggtaaggtggacatattcgtggccggttcaggctcgggaggcacggtgtctggcgtcggcaagtacctcaagacgcagaaccccagcgtcaaggtcatctgcgttgagcctgccgagagcccagttgtttcaggcggggaaccaggcagccacaagatccagggaatagggccgggattcataccggaagtgctggacacctcggtcatcgacgaggccgtcacggtgaccaccgaggaggcgatggcgggcgcccggaggctggccagggaggagggcctgctcgtcggcatctcttccggggccaacctggcggcctgcttgaaggtcgcggcgcgagaagagagcaaggggaagatgattgtcaccgtgtttccgagcgggggcgagaggtacatgacctccgacctgttcgccgccgccagagaggagtgtattgccatgacgttttgatctttttttaccccctccccccagaaaaaaggggaaaacaaatacgcgtgtatctttatcttcacatggtattggtttaccatgcatgtacatttaaaaatatttttccccgaaacggaatagaacagctgcgtgcttgtttacacatcgaaaaaaaaaaaaaaaa

SEQ ID NO: 1220 - protein, 346 aa, Zea mays
  misc_feature: Ceres CLONE ID no. 450079
  misc_feature: Ceres CDNA ID no. 25446841
  misc_feature (33)..(324): Pfam Name: PALP PFAM Desc: Pyridoxal
  misc_feature: Homolog of GI Number: 53791820 NR Desc: cysteine synthase
  misc_feature: Homolog of GI Number: 55297257 NR Desc: cysteine synthase
  misc_feature: Homolog of GI Number: 55297258 NR Desc: putative cysteine synthase
  misc_feature: Homolog of GI Number: 53793259 NR Desc: putative cysteine synthase
  misc_feature: Homolog of GI Number: 53791819 NR Desc: putative cysteine synthase
  misc_feature: Homolog of GI Number: 59799347 NR Desc: putative S
  misc_feature: Homolog of GI Number: 12644209 NR Desc: Cysteine synthase
  misc_feature: Homolog of GI Number: 303902 NR Desc: cysteine synthase
  misc_feature: Homolog of GI Number: 312944 NR Desc: cysteine synthase
  misc_feature: Homolog of GI Number: 3290022 NR Desc: cysteine synthase
MAGEEAGRRGVPSLLNPPSASSEGQQEHIASDVTQLIGWTPLVELKRIAAKEGVCARIVGKVEAYQPLCSVKDRSALRMIEDAEERGLISPGTTTLVEPTSGNLGLGLVLVALRKGYRFVAVMPGQYSLDKQILLTYMGAELYVTDPSLGFPGITAKVEELKKELPNVHVLDQFSNRANPEAHVRWTGPEIWKDTAGKVDIFVAGSGSGGTVSGVGKYLKTQNPSVKVICVEPAESPVVSGGEPGSHKIQGIGPGFIPEVLDTSVIDEAVTVTTEEAMAGARRLAREEGLLVGISSGANLAACLKVAAREESKGKMIVTVFPSGGERYMTSDLFAAAREECIAMTF

SEQ ID NO: 1221 - DNA, 694 bp, Zea mays
  misc_feature: Ceres CLONE ID no. 450192
  misc_feature: Ceres CDNA ID no. 36707394
  CDS (203)..(487): REFERENCED BY SEQ ID NO: 1222
aatagcccaatgcgctgaatagcgcagcatcctttcccttctcccccaccctcggcctcgcttccagccatccgccgcggctcgtctccgtctcccggctcctcggcgtctagctcgtcaacgcgcgcgtccgccgtcggctcctccgaccggcgtcccaccacaggggaatacagatcgacgatccgctgggcttgcaaacatgtatatccgagtgaagcgcaacaagagtacctacttcattcaatgtgaaccaacagagacagctttgagcatcaaacagaagttgcactcgctgatagatcaacctcctagtagtcagcagttggtcttgtggcctagcagtgatgtgcttgaagactcaaagactttggcagatcaaaaggtggataacgattccattgttgcattggcactaagaaaagatgacggtgagtttgaggaagttttcatcgctaggccggaggatttcatgtcatcatcatgataaagattagtccatcatttctacaaagggaccactgcgcgttcttggagtggaccgtcgctctatgctggttcttctagaatctgggatgtggcttgcttgtccctttgggaggaaaaagaaaatcttttatgtgagatcccaaacaaccgttgtggatgatattaagctttgatttgacgctccaaaagaaaaaaaaaaaaaaaa

SEQ ID NO: 1222 - protein, 94 aa, Zea mays
  misc_feature: Ceres CLONE ID no. 450192
  misc_feature: Ceres CDNA ID no. 36707394
  misc_feature (1)..(75): Pfam Name: ubiquitin PFAM Desc: Ubiquitin family
  misc_feature: Homolog of GI Number: 17154771 NR Desc: ubiquitin
  misc_feature: Homolog of GI Number: 21618108 NR Desc: ubiquitin
MYIRVKRNKSTYFIQCEPTETALSIKQKLHSLIDQPPSSQQLVLWPSSDVLEDSKTLADQKVDNDSIVALALRKDDGEFEEVFIARPEDFMSSS

SEQ ID NO: 1223 - DNA, 1240 bp, Zea mays
  misc_feature: Ceres CLONE ID no. 450546
  misc_feature: Ceres CDNA ID no. 25445994
  CDS (194)..(946): REFERENCED BY SEQ ID NO: 1224
agattgacggacatgatgcaccctacgagaagcttccctttctccttgtccttgcaaccctccgccctttcggttgtcgcaatataaacttgccggggagcgtggcggccatttgcccccagcagatcttgtgaccctccctcagccgcgtcgcgtcccatcctacgatccaaaggtctctctgctcgcagccatggcgaagaactacccgaccgtgagcgccgagtacagcgaggctgtcgagaaggccaggcgcaagctccgagccctcatcgccgagaagagctgcgccccgctcatgctccgcctcgcgtggcactccgcggggacgttcgacgtgtcgtcgaggaccggcggtccattcggcacgatgaagcatcagtcggaattggctcacggcgctaacgcggggctggacatcgcggtgcggctgctcgagcccatcaaggaggagttcccaatcctctcttacgccgatttctaccagctcgcgggagttgtggccgtggaggtcaccggtgggcctgagattcccttccaccccggtagggaggacaagcctcaacccccacctgagggccgccttcctgacgccactaagggttctgaccacctgaggcaagtttttggcaagcagatgggcttgagcgatcaggacattgttgccctctctggtggccacaccttgggaaggtgccacaaagagcggtctggtttcgagggggcctggactacaaaccctttggtctttgacaactcttacttcaaggaacttctgagtggtgataaggagggccttcttcagctcccaagtgacaaagccctgctgagcgaccctgttttccgccctcttgtcgagaaatatgctgcggatgagaaggctttctttgatgactacaaagaggcccacctcaagctctccgaactggggtttgctgatgcttaaatagaccctatcttggagtgatacattctgctgcctgtatggaatcatgtggtcttttgcatctggagtcaatgtgaacaagcagattgtcgtattgtctttctcgtaataaatttgtcgatgttgagcccttaggctgttgttggtacattggtacttcgtcgatgcttgaattgggaccctttgtccgttttcctagactctgatgctgtatgcaactgaaacaagtaaatctatgatcttaaggctgcagtatgttcttgttactctgcttttagaaaaaaaaaaaaaaaa

SEQ ID NO: 1224 - protein, 250 aa, Zea mays
  misc_feature: Ceres CLONE ID no. 450546
  misc_feature: Ceres CDNA ID no. 25445994
  misc_feature (19)..(227): Pfam Name: peroxidase PFAM Desc: Peroxidase
  misc_feature: Homolog of GI Number: 50920595 NR Desc: Putative ascorbate peroxidase
  misc_feature: Homolog of GI Number: 3688398 NR Desc: ascorbate peroxidase
  misc_feature: Homolog of GI Number: 2997688 NR Desc: ascorbate peroxidase
  misc_feature: Homolog of GI Number: 1420938 NR Desc: cytosolic ascorbate peroxidase
  misc_feature: Homolog of GI Number: 37196687 NR Desc: cytosolic ascorbate peroxidase 2
  misc_feature: Homolog of GI Number: 4406539 NR Desc: ascorbate peroxidase
  misc_feature: Homolog of GI Number: 1336082 NR Desc: ascorbate peroxidase 2
  misc_feature: Homolog of GI Number: 15808779 NR Desc: ascorbate peroxidase
  misc_feature: Homolog of GI Number: 310587 NR Desc: ascorbate peroxidase
  misc_feature: Homolog of GI Number: 600116 NR Desc: cytosolic ascorbate peroxidase
  misc_feature: Useful for delaying flowering time
MAKNYPTVSAEYSEAVEKARRKLRALIAEKSCAPLMLRLAWHSAGTFDVSSRTGGPFGTMKHQSELAHGANAGLDIAVRLLEPIKEEFPILSYADFYQLAGVVAVEVTGGPEIPFHPGREDKPQPPPEGRLPDATKGSDHLRQVFGKQMGLSDQDIVALSGGHTLGRCHKERSGFEGAWTTNPLVFDNSYFKELLSGDKEGLLQLPSDKALLSDPVFRPLVEKYAADEKAFFDDYKEAHLKLSELGFADA

SEQ ID NO: 1225 - DNA, 1113 bp, Zea mays
  misc_feature: Ceres CLONE ID no. 450638
  misc_feature: Ceres CDNA ID no. 40350977
  CDS (274)..(546): REFERENCED BY SEQ ID NO: 1226
aatttttcacctacccccctagccgccacaagccattttccctgccttcttctcctctcacgcgcagcttccttcttctctgttcatggcacacggcagcagcacctcccatggcaccggcgaagctccagctccaagctccctgcaccctcctccccacgtgcaacacctctgctcccctttccatggcgcctagcagggagcacaaccggcgtcgttttcctcccatggcgctcccctgttgaagccccttgccgacgacctgctcaaaggatgaagcccaacaccccagccatggcgcccttccccagcgacgcccctctacagctcgcccctctctgtccatggccgaactcccctgtagaagctccccacggcgcctttcatctccaagtacagcaagcaggcacccctccctgtccccatgctgtgagcccctccccatgcgtctccctccttgctccccaccctcaggctcctagcgcgcagcgcattttctgggtccgagctcgagcagcgcctagagcgaacccctgccgcgcctgagatccaagcagccatggagggcagccgcaccctttctctgtggtcaccaatcgtcctgctccttttcccctggtgtgctcaacgcctggtgcttcgacctcggcgagttcccctgcgagcgacacctcggctcgactccctctcccggctgtgagctcctctgtttgcgccggtccaccgcagcagcctcaacatcccctctgcgttgcgccctcgacgtgctcgacaaaatgccgcagcgagcagcggtcatgagatcccctccgtgttgcttgcatcggcccgatctgcgcagtccctgtcgcgacgccaaaattcttcgcaccttgtcgttgtcacgcttcgcgcgtcgtttctcgacagaaagccaaaccgacatgcacgcatgcgcaactccactcgggtttcggccaggttgttcgccttgaatgattcgcgatctgttttatttacgtatttggtcgatgatgtgtgtgtgtgaatatgtgcgtgaaattataattgtataaatgaacacgtatatagaagaaaatgaagtagaacaagaactcaaaaaaaaaaaaaaaa

SEQ ID NO: 1226 - protein, 90 aa, Zea mays
  misc_feature: Ceres CLONE ID no. 450638
  misc_feature: Ceres CDNA ID no. 40350977
MKPNTPAMAPFPSDAPLQLAPLCPWPNSPVEAPHGAFHLQVQQAGTPPCPHAVSPSPCVSLLAPHPQAPSAQRIFWVRARAAPRANPCRA

SEQ ID NO: 1227 - DNA, 1619 bp, Zea mays
  misc_feature: Ceres CLONE ID no. 450648
  misc_feature: Ceres CDNA ID no. 36592217
  CDS (158)..(1348): REFERENCED BY SEQ ID NO: 1228
gtgcgctgcggccgggtcggatctgagacgagacgagttaccatctcatcccaactccggaacgaacaagttaccatctcatcccaactccgcctcgaccggatctcgtcggactcggatccgcccgaccaccccgcgccgccgcagatcaaagaagatggcagctgtcgacacattcctcttcacctcggagtctgtgaacgagggacaccctgacaagctctgtgaccaggtctcagatgccgttcttgacgcttgccttgctgaggaccctgacagcaaggttgcttgtgagatctgcaccaagaccaacatggtcatggtctttggtgagatcaccaccaaggccaatgttgactacgagaagattgtcagggagacctgccgcaacattggttttgtgtcaaacgatgttgggcttgacgccgaccactgcaaggtgctcgtgaacattgagcagcagtcccctgatattgctcagggtgtgcatggccacttcaccaagcgccccgaggagattggagctggtgaccagggacacatgttcgggtatgcgaccgatgagacccctgagttgatgcccctcagccatgtccttgccaccaagctaggtgctcgtctcaccgaggtccgcaagaacggaacctgcccctggctcaggcctgatgggaagacccaggtgacagtcgagtaccgcaatgagggtggtgccatggtccccatccgtgtccacaccgtcctcatctccacccagcacgacgagacagtgaccaatgatgagatcgctgctgacctgaaggagcatgtcatcaagcctgtcatccctgagcagtaccttgacgagaagaccatcttccaccttaacccatctggccgctttgtcattggtggacctcacggcgatgctggcctcactggccgcaagatcatcattgacacctacggtggctggggagcccatggtggtggcgctttctccggcaaggacccaaccaaggttgaccgcagcggagcctatgtcgcaaggcaggctgccaagagcatcgtcgccagcggccttgctcgccgcgccatcgtccaggtgtcttacgccatcggcgtgcccgagcctctctccgtgttcgtcgacacgtacggcaccggcgcgatccccgacaaggagatcctcaagattgtcaaggagaacttcgatttcaggcctggcatgatcatcatcaaccttgacctcaagaaaggcggcaacgggcgctacctcaagacggcggcctacggccactttggaagggacgaccctgacttcacctgggaggtggtgaagccactcaagtcggagaaaccttctgcctaaggcggccttttttttcagtaagaagcttttggtggtctgctgtgcttaatcatgcttttatatggcttctacatgttgtggttctttcttgatctgcaccgcgcttatcgtttgtgttgtactgccctaataagtggtgcttatgaggactgtttctggttttgctgcttatgttgtaatgctttgaaacaatgaaagaagctacaggccacagctattttgagaagtaatggaacctcgtgccgttttgatcaaaaaaaaaaaaaaaaaa

SEQ ID NO: 1228 - protein, 396 aa, Zea mays
  misc_feature: Ceres CLONE ID no. 450648
  misc_feature: Ceres CDNA ID no. 36592217
  misc_feature: The plant flowers significantly earllier than wild-type.
  misc_feature: The plant is abnormally small.
  misc_feature: The plant produces a reduced number of seeds.
  misc_feature: Useful for biocontainment applications
  misc_feature: Useful for making plants with modulated biomass
  misc_feature: Useful for making plants with modulated flowering time
  misc_feature (119)..(241): Pfam Name: S PFAM Desc: S
  misc_feature (243)..(385): Pfam Name: S PFAM Desc: S
  misc_feature (5)..(105): Pfam Name: S PFAM Desc: S
  misc_feature: Homolog of GI Number: 50284517 NR Desc: S
  misc_feature: Homolog of GI Number: 1655578 NR Desc: S
  misc_feature: Homolog of GI Number: 16226059 NR Desc: S
  misc_feature: Homolog of GI Number: 13540316 NR Desc: S
  misc_feature: Homolog of GI Number: 13540318 NR Desc: S
  misc_feature: Homolog of GI Number: 2305014 NR Desc: S
  misc_feature: Homolog of GI Number: 51038250 NR Desc: S
  misc_feature: Homolog of GI Number: 17529621 NR Desc: S
  misc_feature: Homolog of GI Number: 68655451 NR Desc: putative AdoMet synthase 4
  misc_feature: Homolog of GI Number: 76629498 NR Desc:  similar to methionine adenosyltransferase II
MAAVDTFLFTSESVNEGHPDKLCDQVSDAVLDACLAEDPDSKVACEICTKTNMVMVFGEITTKANVDYEKIVRETCRNIGFVSNDVGLDADHCKVLVNIEQQSPDIAQGVHGHFTKRPEEIGAGDQGHMFGYATDETPELMPLSHVLATKLGARLTEVRKNGTCPWLRPDGKTQVTVEYRNEGGAMVPIRVHTVLISTQHDETVTNDEIAADLKEHVIKPVIPEQYLDEKTIFHLNPSGRFVIGGPHGDAGLTGRKIIIDTYGGWGAHGGGAFSGKDPTKVDRSGAYVARQAAKSIVASGLARRAIVQVSYAIGVPEPLSVFVDTYGTGAIPDKEILKIVKENFDFRPGMIIINLDLKKGGNGRYLKTAAYGHFGRDDPDFTWEVVKPLKSEKPSA

SEQ ID NO: 1229 - DNA, 1105 bp, Zea mays
  misc_feature: Ceres CLONE ID no. 450895
  misc_feature: Ceres CDNA ID no. 25446393
  CDS (160)..(846): REFERENCED BY SEQ ID NO: 1230
agattttcccgcgttcgtggtctccactctccactctccagttctccgtttcccaaccccaacctagcatccttgcatcccggggctcagttagcgttgccgccgcaccgtactacacctccggtggccggtgcgcccatttcccgccgatcaagcgcgatggcctcgacgagggatctagccatagcttctctctcagctgcgaccggcgccgttgttgccgccgctgcactgcgcctcttgtcttcccgcagaacatcctccgtcagaccccagaacctccccgccgccgctaacggatctgcctccgagcgcccgctggctcagtcccccttcgatcctgtcaagcgggaaggatatatttcctgggacgactacttcatggcgatcgccttcctttcggctgagcggtctaaggatcctaaccgacaggttggagcatgcttggttagccaagagggaataatcctaggaattggctacaatggcttccctagaggttgttccgatgacaagcttccttgggcaaagaaatctgcaagtggagatccattagagacaaaattcccctacgttgtccatgctgaggttaatgcaattctaaataccaaccatgcttcagcggctggacagaaattatatgtcaccatgttcccatgcaatgaatgtgccaagattattattcagtcaggcgtatctgaggtcatatatttcgttgaaaaaaagattgacaactcagctcacgtttatgttgcctctcacaagctattgtcgatggctggtgtcaaggtcaggaagcatcagccccagatggcgcaaataccgatcaagttccaggagccatgaagacggtactagttccagccttccaggagcactagcgagcgaataaacagtgcaaggtacctgttgaccgcggcacctgtgacaatcgacaatggccgacccgcagcggtctcggtatgcggcgtcgatccctctccctcagtccctccctcagaggctgttgtaaaactatagctagaattcgtactggtaataatgtaaatacatttcaattctcctctgataccagcttatcttttatacaaaaaaaaaaaaaaaa

SEQ ID NO: 1230 - protein, 228 aa, Zea mays
  misc_feature: Ceres CLONE ID no. 450895
  misc_feature: Ceres CDNA ID no. 25446393
  misc_feature (69)..(186): Pfam Name: dCMP_cyt_deam PFAM Desc: Cytidine and deoxycytidylate deaminase zinc
  misc_feature: Homolog of GI Number: 57899567 NR Desc: deoxycytidylate deaminase
  misc_feature: Homolog of GI Number: 42565719 NR Desc: cytidine/deoxycytidylate deaminase family protein
  misc_feature: Homolog of GI Number: 34909822 NR Desc: P0403C05.19
  misc_feature: Homolog of GI Number: 24667302 NR Desc: CG6951
  misc_feature: Homolog of GI Number: 73979520 NR Desc:  similar to Deoxycytidylate deaminase
  misc_feature: Homolog of GI Number: 51246123 NR Desc: probable deoxycytidylate deaminase
  misc_feature: Homolog of GI Number: 56789514 NR Desc: DCMP deaminase
  misc_feature: Homolog of GI Number: 55623552 NR Desc:  similar to Deoxycytidylate deaminase
  misc_feature: Homolog of GI Number: 61742821 NR Desc: dCMP deaminase isoform a
MASTRDLAIASLSAATGAVVAAAALRLLSSRRTSSVRPQNLPAAANGSASERPLAQSPFDPVKREGYISWDDYFMAIAFLSAERSKDPNRQVGACLVSQEGIILGIGYNGFPRGCSDDKLPWAKKSASGDPLETKFPYVVHAEVNAILNTNHASAAGQKLYVTMFPCNECAKIIIQSGVSEVIYFVEKKIDNSAHVYVASHKLLSMAGVKVRKHQPQMAQIPIKFQEP

SEQ ID NO: 1231 - DNA, 1059 bp, Zea mays
  misc_feature: Ceres CLONE ID no. 451069
  misc_feature: Ceres CDNA ID no. 12781339
  CDS (84)..(843): REFERENCED BY SEQ ID NO: 1232
aagcttcactcgcgtccgcccccgccgccgcctttcgtcccagcccctaaaccattctccattcctctcatcagtttagcacaatggcactggctaataagcttggtggtctgctcaagaaagccacaagttcaaatctgtctgtctaccaagcaatcagatgcatgtcatccaagctctttgttggagggatttcttatcaaactgatgatcacagtctcagggacgagtttgccaaatatgggcaagtcattgaagctaggattatcattgaccgtgaatctgggaggtctagaggttttggctttgtaacttacacgtcttctgaggaggcttcagctgccattactgccttggatggaaagactctcgatggacggagcatacgtgttaatcatgctaacgagaagacaggtggctttcgtggcggcggtggctatggtggcggcggctacggtggtggtggaggatatggtggtggtggcggtggctatggtggtggtggaggctatggtggtggtggcggcggcggtggatacggtggcggcgactatggtggcaaccgcaacaggggtggtggtggtgattatggagttgctggtggaggtggaggcacctttactgctggaggtagcgacagctttgccaacagtaactttggttctgacagtagttttggtggaaacggtgctggtggctttgatgcaaccggcggttccacaggcgatgatgggttctctggcacacctgatgataactttggtggtaacaagaatgaagaaaccatggatgatatcttcaaggacgatgagccggacagctacgccgacaagaggagctagtttgtgccctctccaaagagtgctcatcaatacgattccagaacgatatgtattggctagtgtttgctgttaacatcatagcggcctgtatgttcaaataatggagcgagtatttctgatgagtttgagttgtcgggggctgtggaactttcaaacatggcgatacgttataatgtcgttttgctagatgctatgctttcgaaaaaaaaaaaaaaaa

SEQ ID NO: 1232 - protein, 252 aa, Zea mays
  misc_feature: Ceres CLONE ID no. 451069
  misc_feature: Ceres CDNA ID no. 12781339
  misc_feature (32)..(103): Pfam Name: RRM_1 PFAM Desc: RNA recognition motif.
MALANKLGGLLKKATSSNLSVYQAIRCMSSKLFVGGISYQTDDHSLRDEFAKYGQVIEARIIIDRESGRSRGFGFVTYTSSEEASAAITALDGKTLDGRSIRVNHANEKTGGFRGGGGYGGGGYGGGGGYGGGGGGYGGGGGYGGGGGGGGYGGGDYGGNRNRGGGGDYGVAGGGGGTFTAGGSDSFANSNFGSDSSFGGNGAGGFDATGGSTGDDGFSGTPDDNFGGNKNEETMDDIFKDDEPDSYADKRS

SEQ ID NO: 1233 - DNA, 727 bp, Zea mays
  misc_feature: Ceres CLONE ID no. 451114
  misc_feature: Ceres CDNA ID no. 35383177
  CDS (85)..(480): REFERENCED BY SEQ ID NO: 1234
atcaacacaataatgtaacaagcatcagcccagcccagccagcttccattcccaaggaaaccctccgctcctcccacgtctcccatggccgccgccggctcagccgcagcgccgctccgccggctgctcctccgcctccgtgacccgccgccgctgccctttaacacgctcctatcccgcctcgcgccacatctgcagcaaggccccaccctagccccagcaccagccccggctcttgcactcccgacctcgacgccggcccaaacgccatccgggattctccgcgacgcgctcttctccttccacccgggcctccaggcacacccgggcctagatccgattgggggtgcccccgcaagggacgaggccggcgcaggggcggcggaggtgtgggcggacagcgtgaagaagaagcgcaagcgtaagatgaacaagcacaagctccgcaagctccggaagcgacttcgccgccagacatgagggctctctcctctccggttagacaccttgtcattgagttgcgtccagtgatttcatctctccttcggttgatccgtagagcaagacagaaaggagatacgggtgaatgacaagagggctgtgtaatgaataactggttttgatcacattttctgtagcccgctcactgtgttagaagattttggttggtttcgacaaggatcatgttccacaacgagacaaacgtttgtcaaaaaaaaaaaaaaaa

SEQ ID NO: 1234 - protein, 131 aa, Zea mays
  misc_feature: Ceres CLONE ID no. 451114
  misc_feature: Ceres CDNA ID no. 35383177
MAAAGSAAAPLRRLLLRLRDPPPLPFNTLLSRLAPHLQQGPTLAPAPAPALALPTSTPAQTPSGILRDALFSFHPGLQAHPGLDPIGGAPARDEAGAGAAEVWADSVKKKRKRKMNKHKLRKLRKRLRRQT

SEQ ID NO: 1235 - DNA, 1369 bp, Zea mays
  misc_feature: Ceres CLONE ID no. 451265
  misc_feature: Ceres CDNA ID no. 40350979
  CDS (71)..(1117): REFERENCED BY SEQ ID NO: 1236
agagcccagcgtccgtctcttgctcatcagcatcagctagccacccgaccaggcttcagaaaacaaaaaaatgaagctctctgcggcagtcctctgcgcgcttgtggctgttcaggcggcggtgcttctcgccaccgtgccgacggcgcaggccagcgagctggaggtcgggtactacagcaagaaatgcaagggcgtggagaacgtggtgaagtggcacgtcatcaaggcgatcaaggccaaccgccgcaccggcgccgctctcgtccgccttatcttccatgactgcttcgtcaggggttgcgacggttctgtccttctggacgcttcctacgacaaccctcacccggagaaggaggcgccggtgaacatcgggctcgcagccttcgacgtactggaggagatcaaggccgctgtcgagaagaggtgccccggcgtggtctcctgctccgacatcctcatctacgccgcccgcgacgccgccagcatcctcagcaacggccacgtccacttcgccgtccccgcaggccgcctggacggcttcgtctccaaggccgaggaggcccaggcggagctcccggactccacccacgacgtgcagcagctcatcgacaacttcgccaggaagaacttcaccgtggaggagctcgtcatcctcaccggggcgcactccatcggccagggccactgctcgtccttcactggccgcctctccgagccacccagccagatcaacccggcgtaccgcgacctgctcaactacaagtgcccccaggggtccaaccctcccgtggccaacaacgtccgcgacgaggactacggcgtggtggcgaggtacatgccggggttcaccagccgggtgcgcaagatccccgacttcctggacaactccttctaccacaacaacctcgccaagatcgtcaccttccactccgactggacgctgctcaccaacaaggaggcgttcggccacgtcgtggagtacgccgagaacgccacactgtgggacgaggacttctccgactcgctgctcaagctcagcaagctgcccatgccagcgggaagcacgggcgagatcaggaacaagtgcagcgtcgtcaacccccgcctatactaagccagctcccgtacctgcaacaatggaaatcgaagaaagaggtcgatcgtgtccgcacaaccacatatcaaacattgtaaatcaaaatgagccataagatttttgttgtttttgtttcatccattcttttgattctcattcgttttactacacactcatctttttttttgtgtatctctcgtatctgtcaaactgcaataaaactttgttactgaaaaaaaaaaaaaaaaaaaaataaaaaaaaaaaaaaaa

SEQ ID NO: 1236 - protein, 348 aa, Zea mays
  misc_feature: Ceres CLONE ID no. 451265
  misc_feature: Ceres CDNA ID no. 40350979
  misc_feature (47)..(308): Pfam Name: peroxidase PFAM Desc: Peroxidase
MKLSAAVLCALVAVQAAVLLATVPTAQASELEVGYYSKKCKGVENVVKWHVIKAIKANRRTGAALVRLIFHDCFVRGCDGSVLLDASYDNPHPEKEAPVNIGLAAFDVLEEIKAAVEKRCPGVVSCSDILIYAARDAASILSNGHVHFAVPAGRLDGFVSKAEEAQAELPDSTHDVQQLIDNFARKNFTVEELVILTGAHSIGQGHCSSFTGRLSEPPSQINPAYRDLLNYKCPQGSNPPVANNVRDEDYGVVARYMPGFTSRVRKIPDFLDNSFYHNNLAKIVTFHSDWTLLTNKEAFGHVVEYAENATLWDEDFSDSLLKLSKLPMPAGSTGEIRNKCSVVNPRLY

SEQ ID NO: 1237 - DNA, 622 bp, Zea mays
  misc_feature: Ceres CLONE ID no. 451470
  misc_feature: Ceres CDNA ID no. 40350980
  CDS (87)..(449): REFERENCED BY SEQ ID NO: 1238
aacccagcagcctcccaaatccccaaagcctccgacccccttcctctctccctccgccgccgctgcgcacgcagggaacaagcgacatgggcgtctacacctttgtgtgccgcaacaacggcggcgagtggaccgccaagcagcactccggcgagatcgaggcttccgccgctaccccatacgagctgcagcgccgcctcgtcgctgccgcctccgcggccgactctgcctacggcgtccagtcgtccttctccatggtcacccccagctccgccgtgttccaggtgatcgtcggtgctgtcggtggtggtgcaatgatggtgagcggaggtggcggcggcggtgctgctgcatctggtggtgctgctgccgaggctcccaaggaggagaagaaggaagaggagaaggaagagagcgacgacgacatgggattctccctgttcgactagagttgtgtgtgtcatctggatctcagaagtggtggtttggtcctgttgccgtagttaattttgctgtcctgtctgtgaacctgaagaactcttggtaattgttacaagcgacctgttccagtttatgtgagaatttgatatgttgtttggaatcatcaaaaaaaaaaaaaaaa

SEQ ID NO: 1238 - protein, 120 aa, Zea mays; identical to SEQ ID NO: 212
  misc_feature: Ceres CLONE ID no. 451470
  misc_feature: Ceres CDNA ID no. 40350980
  misc_feature (25)..(119): Pfam Name: Ribosomal_60s PFAM Desc: 60s Acidic ribosomal protein

SEQ ID NO: 1239 - DNA, 1483 bp, Zea mays
  misc_feature: Ceres CLONE ID no. 451693
  misc_feature: Ceres CDNA ID no. 40041222
  CDS (103)..(1242): REFERENCED BY SEQ ID NO: 1240
acttcctttccgggtttcccgcgtccatccaacgccctcgcttcgccttttcacgcattcccccgctgctgcagctaccagcaccaagccacgccggccgccatggggcgcgcgatgaggtggctcaagaaggtgctcaccggcagcagcaagaaggaagcgtcggacggggttcgcaaggcgcgcgatgccgcgtgcgccggcgccggcggtggcggtgaccacgggctgggcccgccggcatcggagaagaggcggtggagcttcgccaagccgaggagcagcgtgtctggctccgcccggaggccctccgtcgccgccggggagctgtcgcaggtgcgcccgtgcagctgcggccttgagcgcgaggtggaggccgccgccgtcatccagaaggccttcagaggctacttggctcggaaggcgctccgcgccctcaagtcgctcgtgaagctgcaagccctggtgcgaggctacctcgtgaggaagcagacggccatgacgctgcgcaggctgcaggccctcatgcggctccaggccaacacggcggcgtcccggagatccactgaacaagagcgtatcgttgcgcgggtgaggccactggccgtgcctgctgctgcggtgcaccgccggcggctgtccgacggcggggacgccgctggcggcttcgaccgcagcccgaggatcgtggagatggacacgtgcgagctccgctgccggtcgtcccggatcacgagccggtccgccggcggcgacccgccgggcgcctcaccgctcctcctgtgctgccacgagccggcgtggtgtctccaggggcgagagctcgagcctccgcctccgcctccgcaccccaagacgacgcacaacacgccccgcctcggcgcgttcgcgggctacctcggctcgccggcgaagcgcgcggccgcgtgccgggacgccgggagcagcccgcggtacatggcgggcacggcgtcgtccgtggcgcgcgcccggtggcagagcgcgcccaggcagcggcgcggcgagcagcagcagcagcaggcgcccgcgggggatgcagacggggcgaggcccagccccagcgtcggccgcggcgggtcgaggatgcacgcgcggccgcaggagctgcaggcgccggacagcttcagcctcaagagctcggaggccagccgcgtggaggtggagggctcggagctgagcgacgaggtcaccagagactactacctggaccggctctggtgattccgcctggtgtaggagaagaggaggaagaggaagcttagcaattcggtacatagtattagtgaaatgtcatgactacgactaatctcaactgccttggaggtcgagtatcagagtaggtatggtatcatagagaaggaaataaatggtgttctactgctacctgtgaccatttgaaaaaaaaaaaaaaaaatggaaaagaatgcagcttcgacgccgatacaaaaaaaaaaaaaaaaaa

SEQ ID NO: 1240 - protein, 375 aa, Zea mays
  misc_feature: Ceres CLONE ID no. 451693
  misc_feature: Ceres CDNA ID no. 40041222
  misc_feature (108)..(128): Pfam Name: IQ PFAM Desc: IQ calmodulin
  misc_feature: Homolog of GI Number: 34909400 NR Desc: P0439E07.14
  misc_feature: Homolog of GI Number: 57899968 NR Desc: calmodulin
  misc_feature: Homolog of GI Number: 77557025 NR Desc: IQ calmodulin
  misc_feature: Homolog of GI Number: 4220443 NR Desc: Similar to gbX74772 SF16 protein from Helianthus annuus
  misc_feature: Homolog of GI Number: 50940489 NR Desc: calmodulin
  misc_feature: Homolog of GI Number: 6715635 NR Desc: T25K16.10
  misc_feature: Homolog of GI Number: 50355734 NR Desc: putative calmodulin
  misc_feature: Homolog of GI Number: 50907219 NR Desc: calmodulin
  misc_feature: Homolog of GI Number: 15233296 NR Desc: calmodulin
MRWLKKVLTGSSKKEASDGVRKARDAACAGAGGGGDHGLGPPASEKRRWSFAKPRSSVSGSARRPSVAAGELSQVRPCSCGLEREVEAAAVIQKAFRGYLARKALRALKSLVKLQALVRGYLVRKQTAMTLRRLQALMRLQANTAASRRSTEQERIVARVRPLAVPAAAVHRRRLSDGGDAAGGFDRSPRIVEMDTCELRCRSSRITSRSAGGDPPGASPLLLCCHEPAWCLQGRELEPPPPPPHPKTTHNTPRLGAFAGYLGSPAKRAAACRDAGSSPRYMAGTASSVARARWQSAPRQRRGEQQQQQAPAGDADGARPSPSVGRGGSRMHARPQELQAPDSFSLKSSEASRVEVEGSELSDEVTRDYYLDRLW

SEQ ID NO: 1241 - DNA, 1770 bp, Zea mays
  misc_feature: Ceres CLONE ID no. 451866
  misc_feature: Ceres CDNA ID no. 25446842
  CDS (165)..(1433): REFERENCED BY SEQ ID NO: 1242
aatccagtccttctccagtctgcccgctcattctgtcgaacacctcgtcctctacatcctcatcgacgtcttcccaattcaaaactcctaaaccctagcccttcttcccgacaccaccatccatccaaaatcactgggtgatgcggaagaggtagcctccgccgatggcctgctgcttcgtccgcgtcgctgcggcgccccgcctcctcatctaccgcgccgccgctccgcggcagctcccgtcgccgctcaacgtattcaggaagggtttttccgagcagtcagttctgccagtcacagattcgattgagtgtttccaaggaccatcagtgccgaatactccacggattccactgtatgatgacagcgtatcctcaagcatattggatacattgtcgaatccgactgggggtgtccctcatgctgatccttcaaagagcagaataatgctagttgatggaacgtcgatgatgtatagatcctactacaagatattagcacagctgcagcacggccagttggagcatgctgatggaaatggggattgggttttaactatattcaaagctctatccctgcttcttgacatgctggagttcattccatctcatgctgcggttgtgtttgaccacgatggagtcccatatggtcattatactgccatgccatctaaagaatgtcacatggcaaaaggaatgacctttcgtcatatgttgtaccctgcttacaagagcaaccgcactccaacacctgacaccgttgttcagggcatgcaatacttgaaggcatccattaaggcaatgtcaataaaagtaattgaggttccaggcgttgaagctgatgatgttattggcaccctggccataaacagtgtttcggctggttacaaggtacggattgtctctcctgataaagacttcttccaaattttatcaccttctttgcgtctgctcaggattgctccacgtggatcagggatggtttcatttggagttgaagacttcgtcaagcgatatggaccattgaaaccctcgcagtttgtggatgttgttgcactttcaggagacaaagctgacaatatacctggagttgaggggattggagatattaatgcagtaaagctgatatctaagtttggttccttggataatctactgaaatccgtggacgaagttgaggatgaacgaattaaacaggctttgatttctcactcggaacaggcaatcctttgcaaaaacctggccacgctgcgttctgatcttcctcattatatggttcctttcaagacagccgaccttgtatttaagaagccacaggatgatggagagaaattcataaaactcttacgagcattggaagcatatgcagaaggttcctcagtaaatccaatcatcagaagagcagcctatctttggaacaaacttaaatcatgatgacactgatgttttcagcgttgaataaaaaggaattttgtcaaggctgagagtttgggttcaaagcttggtgtcgtagtgctcaatactggcggcattgacttctgtggactcggcggccagctacactcacatcgcaacgcaaaatcaaattgttgctggcagaagtgcataaattgaaggtgccgatgcttaagcaaagcagctcagtgtttatacctcggaacttagctctgtagataagaaatgcacaacattgcccatgtattccgccttttttgagaggaaagctcgtggaatctatttgattttttttcccaaaaaaaaaaaaaaaaaa

SEQ ID NO: 1242 - protein, 422 aa, Zea mays
  misc_feature: Ceres CLONE ID no. 451866
  misc_feature: Ceres CDNA ID no. 25446842
  misc_feature (287)..(367): Pfam Name: 5_3_exonuc PFAM Desc: 5'
  misc_feature (92)..(108): Pfam Name: 5_3_exonuc_N PFAM Desc: 5'
  misc_feature: Homolog of GI Number: 42565846 NR Desc: 5'
  misc_feature: Homolog of GI Number: 42572637 NR Desc: 5'
  misc_feature: Homolog of GI Number: 4090935 NR Desc: DNA polymerase type I
  misc_feature: Homolog of GI Number: 4731571 NR Desc: DNA polymerase I
  misc_feature: Homolog of GI Number: 38146965 NR Desc: DNA polymerase I
  misc_feature: Homolog of GI Number: 56421265 NR Desc: DNA
  misc_feature: Homolog of GI Number: 416913 NR Desc: DNA polymerase I
  misc_feature: Homolog of GI Number: 15644367 NR Desc: DNA
  misc_feature: Homolog of GI Number: 806281 NR Desc: DNA polymerase I
  misc_feature: Homolog of GI Number: 3041672 NR Desc: DNA polymerase I
MACCFVRVAAAPRLLIYRAAAPRQLPSPLNVFRKGFSEQSVLPVTDSIECFQGPSVPNTPRIPLYDDSVSSSILDTLSNPTGGVPHADPSKSRIMLVDGTSMMYRSYYKILAQLQHGQLEHADGNGDWVLTIFKALSLLLDMLEFIPSHAAVVFDHDGVPYGHYTAMPSKECHMAKGMTFRHMLYPAYKSNRTPTPDTVVQGMQYLKASIKAMSIKVIEVPGVEADDVIGTLAINSVSAGYKVRIVSPDKDFFQILSPSLRLLRIAPRGSGMVSFGVEDFVKRYGPLKPSQFVDVVALSGDKADNIPGVEGIGDINAVKLISKFGSLDNLLKSVDEVEDERIKQALISHSEQAILCKNLATLRSDLPHYMVPFKTADLVFKKPQDDGEKFIKLLRALEAYAEGSSVNPIIRRAAYLWNKLKS

SEQ ID NO: 1243 - DNA, 1626 bp, Zea mays
  misc_feature: Ceres CLONE ID no. 452261
  misc_feature: Ceres CDNA ID no. 40350981
  CDS (261)..(1469): REFERENCED BY SEQ ID NO: 1244
gtttagagagagagaagccagggagaaggaggaagagccgccgcggtgatctcaggggagtcgtcaggacacgggcaagctttgtacgctaccaattcagcgaataaccgacgggggtgcgtggaattgctcaccggagcaaaccctccgccgccgaaccaccatccgctgtgagcgaataaccggcatccccagggcgccgtcgatcccggtcggccatctcccggtgcgtacgtggtaactgatcgttaatttcatcgatgggtgccatggaggaccgcagctccaagcaggcaggcgtggccgtggtggccgacctccacgacgacctccttgtggagatcctctcccgcgtccccgccaagtccatctgccggttcaagtgcgtgtccaaggcctggctcgacctcattgccggtcccgaccaccgtaagaagctccgccaacccatgcagggactcatcttcatgaatccagagaaggaccgccacagcttcagcttcctggacctgccactgacagtaggatccgtgcctcaggacgttgtcgaccctgcaggcttcatctccttcctgacggaacagcctgagatccatcgcctcgtcttactggattcctgcaatggtctgatcctattccagcaccttatggagctgccgcactacaacagtttgggctatgtcgtgtgcaacccgaccacgaagcaatggcgagccgtgcccgagcccgactgcagctcccatgtaccaatgaactacacatatttggcttttgatccgactgtatcctcccacttccacttggtccggttcaaaaagaatcgcgagtacatggagcccatgtcggtgcatgcttactcgtctaaaactgggatatggacctatagccaaactgagaaagaagaagaagaatggcagaatcaggtctacttatctataagtaatcgatgcgcctttgttaatggcttcctgcatttgctagtttggggctcgaacaaaatgcagatactcattgtagatgtacaaggacgtccaagaaggatgatcagactgccagacgtggctgctggtaattgtgagggatgctactgtgtttactttggccaatcccaggggcatctgcactgcattactaaacaactattcgacttcaacgaagagaaatacgagctgtccatctgggctcttctggattacgatgcacaagagtgggtgctgaaggacactgtgagctccctccagctctttggaggaaattgccccacaagtgtcgcattggagttgtacagcgaggtggccagcatgcatctggatcgcaatgtggtcttcttcttttcacactgtgaacgtagattcatagcatatgacatggacagcaaggaagtgagtgttttcagcagttccaaagctatacacaggtggaaggttggttgctatgttccttgtttctcaccggcgcctctcaaataagcacgacaagcatttcgtccatgagtgtttggtctaattagttccgcaagcctgttgaggcatttatatatatatgtgtagtctatatttatggatgctagttaaattaatggatacgttgcatgatttatgtttttggctaaaaaaaaaaaaaaaa

SEQ ID NO: 1244 - protein, 399 aa, Zea mays
  misc_feature: Ceres CLONE ID no. 452261
  misc_feature: Ceres CDNA ID no. 40350981
  misc_feature (14)..(59): Pfam Name: F PFAM Desc: F
MEDRSSKQAGVAVVADLHDDLLVEILSRVPAKSICRFKCVSKAWLDLIAGPDHRKKLRQPMQGLIFMNPEKDRHSFSFLDLPLTVGSVPQDVVDPAGFISFLTEQPEIHRLVLLDSCNGLILFQHLMELPHYNSLGYVVCNPTTKQWRAVPEPDCSSHVPMNYTYLAFDPTVSSHFHLVRFKKNREYMEPMSVHAYSSKTGIWTYSQTEKEEEEWQNQVYLSISNRCAFVNGFLHLLVWGSNKMQILIVDVQGRPRRMIRLPDVAAGNCEGCYCVYFGQSQGHLHCITKQLFDFNEEKYELSIWALLDYDAQEWVLKDTVSSLQLFGGNCPTSVALELYSEVASMHLDRNVVFFFSHCERRFIAYDMDSKEVSVFSSSKAIHRWKVGCYVPCFSPAPLK

SEQ ID NO: 1245 - DNA, 1508 bp, Zea mays
  misc_feature: Ceres CLONE ID no. 452686
  misc_feature: Ceres CDNA ID no. 40350982
  CDS (2)..(1039): REFERENCED BY SEQ ID NO: 1246
gaaacaaattgcgcattttcttctcctgcggtccttccttcgcttccccgttcttccagaatcctgtcgagacctgaatccaccctcacccagcggtccccatggcctccggcgaaggtgtagctaccagctgcacgatctaagcgaggtggagatcccacccacgctggaggaggtcgacctcaccgccaaccgcctctcttctgttgatcctcgcatcggccaactcccccatctccgcaagctctcattccgccagaacctcctcgacgatgacgccgtcgcgccactcacgtcctgggaggctattgccgggttgaaggagttcgtccttagagataacaaacttacaaggattcctgatgctggcatattcaaggatcttctggtgttcgatgtatctttcaatgagatatcttctttgactggtctgtccaaggtttccatcaaattgaaggaactttatgtttcaaaaaatgaagttgcaaagatggaagagcttgaacatttccatgcgctggaaattcttgaacttggtagcaacagattacgggtaatggaaaatcttgaaaccttgacaaatctacaagaactgtggttgggaagaaatcgaattcgagctgtcaacttgtgtggtttgaagctaattaagaaaataagtttgcaaagcaacagactgacttcaatgcatgggtttcaggaatgtgctgcattagaggagttatacctcagccataatggaatccaaaagatggaaggcctctctactttgcataacctccgcattttggatgtttcagctaacaagctaacgactatagaaaatatcgaaaccttaaccaggctggaggacctgtggttgaatgacaaccaaataccatctctagagggtatagagacagctttggctggttcgcgggagaagttgacgacaatctatctcgaacgaaatccctgtgcaaaaactccagattactcgtcgacgttgaggaaaatatttccaaatctcgaacaaattgattcagatatcatagcatgataactagctaatccttgcccagatactaaggcaaagaaggctttggggttccccggagaagtcattaacagcaatcaacttgtgaggcgaacaatagacagtaatttgatccttaaagtcttcattgccaactctgctcgtgttgtggaagacattggttcggagtttgtagccttgagccgttacgggcttaatatagtgattggtaaccaaataattagaggtgtacgaggattgtcacaggatccatatccgtgttactagttttaagatgtttcatttcagttctctagattagtgttgatttttttttctctccaaatgaggctaggaacagccagcagttcatttctgtaagttgaatgcagacatctctgtgttgcatatcaacttgcaaggatgtgtcagcctgttgagaacccgaaattatcttttatttgaattttatttattaaaaaaaaaaaaaaaa

SEQ ID NO: 1246 - protein, 182 aa, Zea mays
  misc_feature: Ceres CLONE ID no. 452686
  misc_feature: Ceres CDNA ID no. 40350982
  misc_feature (96)..(117): Pfam Name: LRR_1 PFAM Desc: Leucine Rich Repeat
MEELEHFHALEILELGSNRLRVMENLETLTNLQELWLGRNRIRAVNLCGLKLIKKISLQSNRLTSMHGFQECAALEELYLSHNGIQKMEGLSTLHNLRILDVSANKLTTIENIETLTRLEDLWLNDNQIPSLEGIETALAGSREKLTTIYLERNPCAKTPDYSSTLRKIFPNLEQIDSDIIA

SEQ ID NO: 1247 - DNA, 767 bp, Zea mays
  misc_feature: Ceres CLONE ID no. 452890
  misc_feature: Ceres CDNA ID no. 40350983
  CDS (83)..(562): REFERENCED BY SEQ ID NO: 1248
gcgccgccacttcccctccgagcctcagttcgcatccacgcgcgccgccgccgcctcgccggtcgacgctcaccgcgcagccatggcggaacagactgagaaggctttcctcaagcagccaaaggttttcctcagctcaaagaaatctggcaagggtaagaagcctggcaagggcggcaaccgattctggaagagcattggccttggcttcaagactcccagggaagcaatcgaagggacctacattgacaagaaatgcccattcactggaactgtttctatcagaggcagaattattgctgggacatgccacagtgctaagatgaacagaactatcattgttcgcaggaactacctccactttgtaaagaaataccagaggtatgagaagaggcactccaacattcctgctcacatctctccatgcttccgtgtgaaggaaggtgaccatgtcatcattggccagtgcaggcccctgtcaaaaactgtgaggttcaatgtcgttaaagtcattccagctggatccgcagctgctggaaagaaggccttcacagcagcctgagtttatagactatgttccatgagtagtctatagaatgatgtctttttaattcaaaagaaatctctcttctaggctggtgcttttcgactataatttggagattgttccaatgtccgtgcaatcatctgaacatgttactacttattgtaccttgtcgtgcaaagttttgctaagatctctattgtttcgaaaaaaaaaaaaaaaa

SEQ ID NO: 1248 - protein, 159 aa, Zea mays
  misc_feature: Ceres CLONE ID no. 452890
  misc_feature: Ceres CDNA ID no. 40350983
  misc_feature (74)..(143): Pfam Name: Ribosomal_S17 PFAM Desc: Ribosomal protein S17
MAEQTEKAFLKQPKVFLSSKKSGKGKKPGKGGNRFWKSIGLGFKTPREAIEGTYIDKKCPFTGTVSIRGRIIAGTCHSAKMNRTIIVRRNYLHFVKKYQRYEKRHSNIPAHISPCFRVKEGDHVIIGQCRPLSKTVRFNVVKVIPAGSAAAGKKAFTAA

SEQ ID NO: 1249 - DNA, 501 bp, Zea mays
  misc_feature: Ceres CLONE ID no. 453399
  misc_feature: Ceres CDNA ID no. 25446394
  CDS (75)..(284): REFERENCED BY SEQ ID NO: 1250
gataaccaagaacaaaccattgttggacgcgttcccctcctgcacgcaacctcatctcgtcctccagatcctggatggccgtcctccttgataccttgcctcgcgagtgctctcgagctaggactgggagaaaacaacaaacccgcgttggatcctgtatcgatctggagaaatttctaagtcgtcgtcgtcgtcgtcgttcggttcggagcggatctgaggcgacgatggctggaggcggcgggatctcttggtctgcagtcctgcttcacctcgatggatgatgtctctgcgctgataattattggatcaatttcgataattattagtagatctatgagatatgccgcctggaagaggcgaggtaagctgcagcatgtaaaagtctgcgtgcgtcgacagcaaaaaagagaaaaaaagatgtgacatcctagaggaggcctttgccatgatgggtgcgctcgcatggcaggccaggtattaataaaaaaaaaaaaaaaa

SEQ ID NO: 1250 - protein, 69 aa, Zea mays
  misc_feature: Ceres CLONE ID no. 453399
  misc_feature: Ceres CDNA ID no. 25446394
MAVLLDTLPRECSRARTGRKQQTRVGSCIDLEKFLSRRRRRRSVRSGSEATMAGGGGISWSAVLLHLDG

SEQ ID NO: 1251 - DNA, 1340 bp, Zea mays
  misc_feature: Ceres CLONE ID no. 453408
  misc_feature: Ceres CDNA ID no. 25446843
  CDS (208)..(1125): REFERENCED BY SEQ ID NO: 1252
aagctcggtttgatgggcttgatccaaaagcccgcataggctgagcaccgtctagtcgtcgccagtttcgttccgctgcagcagcggcagcgctcccctcctcgacgccgcggcttctcctcatcctcgcccgctccgtccgctgactggaagtggtctacacagaaggttaccatattgttaagttaaagttggatcattggaacaatgccgccccataagattgagactgggcatcaagatgtggtccatgatattgccatggattactacgggaagcgcctagctacagcctcctctgataacacaataaagatcattggcgtaagtggaacctcacaccagcagcttgcaaccttgagtggacaccagggcccagtatggcaagtcgcatgggctcatcccaagtttggttccatgcttgcatcctgcagctacgacggccgggtgatcatctggaaggaaggaagcaagcctgatgaatgggcactagcacacacctttgctgagcacaagtcctccgtgaactccattgcatgggcgcctcatgagctgggtctatgcttggcttgtggttcatcagacgggaacatttcagtcttcgctgctcgttctgatggaggttgggacaccacacgtatcgaccaggcacatccagttggtgtgacctcagtttcctgggctccagcaatggcaccaggagctctaatcagcgcaggatcttctggccagtttgagtatgttcagaaactcgcttctggtggctgcgacaacacggttaaggtgtggaagctcaacaatgggagttggcggatggactgtttccctgccctacagatgcacaaggactgggtgagagatgtcgcgtgggccccaaacctgggccttccaaagtccaccatcgccagcgcctctcaggacggaacggtcgtcatctggacagcagcaaaagaaggtgagcagtgggacggccgggtgctgtatgatttcagaacccccgtttggaggctgtcgtggtcactgactgggaacatactggcggtttccgacggcaacaacaatgtgaccctgtggaaggaagctgtggatggcgaatggcagcaagtgacgactgttgagccataggtcctctcgagttattcctcgcctgtattttctaaataataattgtagttttcgtgtaaggtaaagttatgcccctgtgggtagcatgtgggactgtttgtggttcacagctgttggcgaggcacagtgcacgagacatggtttcaggctcgggcaaaagtgaacaattaacttgttatacagtccattctgtttattcaaaaaaaaaaaaaaaa

SEQ ID NO: 1252 - protein, 305 aa, Zea mays
  misc_feature: Ceres CLONE ID no. 453408
  misc_feature: Ceres CDNA ID no. 25446843
  misc_feature (2)..(39): Pfam Name: WD40 PFAM Desc: WD domain
  misc_feature: Homolog of GI Number: 51963858 NR Desc: PREDICTED OSJNBa0081C13.10 gene product
  misc_feature: Homolog of GI Number: 83283979 NR Desc: protein transport SEC13
  misc_feature: Homolog of GI Number: 21593236 NR Desc: transport protein SEC13
  misc_feature: Homolog of GI Number: 50935451 NR Desc: putative Sec13p
  misc_feature: Homolog of GI Number: 50754630 NR Desc:  similar to Sec13l1 protein
  misc_feature: Homolog of GI Number: 47086987 NR Desc: zgc:63980
  misc_feature: Homolog of GI Number: 55619799 NR Desc:  similar to SEC13
  misc_feature: Homolog of GI Number: 57100900 NR Desc:  similar to Plasma membrane calcium
  misc_feature: Homolog of GI Number: 66849849 NR Desc: nuclear pore complex subunit
  misc_feature: Homolog of GI Number: 46441998 NR Desc: likely COPII vesicle coat component
  misc_feature: Useful for making bigger plants
MPPHKIETGHQDVVHDIAMDYYGKRLATASSDNTIKIIGVSGTSHQQLATLSGHQGPVWQVAWAHPKFGSMLASCSYDGRVIIWKEGSKPDEWALAHTFAEHKSSVNSIAWAPHELGLCLACGSSDGNISVFAARSDGGWDTTRIDQAHPVGVTSVSWAPAMAPGALISAGSSGQFEYVQKLASGGCDNTVKVWKLNNGSWRMDCFPALQMHKDWVRDVAWAPNLGLPKSTIASASQDGTVVIWTAAKEGEQWDGRVLYDFRTPVWRLSWSLTGNILAVSDGNNNVTLWKEAVDGEWQQVTTVEP

SEQ ID NO: 1253 - DNA, 746 bp, Zea mays
  misc_feature: Ceres CLONE ID no. 453775
  misc_feature: Ceres CDNA ID no. 25445742
  CDS (2)..(403): REFERENCED BY SEQ ID NO: 1254
cttttcctttccttccctcctcgggtttccccgatctcttcctccccctctatctctccctctccctctccctcttcctctctcctaccacatctccagccctcttctcggcccgacggcgttccaccccctaccctcttttcccgccagcgccgttccttcctctgcggtagccctgcgtgaagcacacggcggtggtcctcgtcaaccaaatcgtcgccacatcgcgttctccccggcgaggatctgtaggcgaggacacgcgacgactgacaaggcgaggggagcagtcggcgggcgatggtcggcggcggcgcacatggcggcaccacctacaaaggctacaccatcccacacaacaagcgctggcacaccgtcgccggcaagggcctgtgcgctgtgatgtggttctgggtcttctacagggctaagcaggatggtgctacgctcttgggtttgcgtcatccttgggatgggcatgatgaccactctcatggtcatggacatgggaatgaggcatcgtgacattaagttgcctactctcggcggacggtgatttgatgctttgcatgtcacaacaactaaagattgagttaataaattctaccacccttcatggtactcatgttgtatgtactcatgttgtatgcaactggtttagcacaaactggtttcgttacgattgtgcttatgtatttgatttgaagcatcggttaatatatgttgtggtaaaaaaaaaaaaaaaa

SEQ ID NO: 1254 - protein, 74 aa, Zea mays
  misc_feature: Ceres CLONE ID no. 453775
  misc_feature: Ceres CDNA ID no. 25445742
  misc_feature: Homolog of GI Number: 19912029 NR Desc: BLE1 protein
  misc_feature: Homolog of GI Number: 54291023 NR Desc: putative BLE1 protein
MVGGGAHGGTTYKGYTIPHNKRWHTVAGKGLCAVMWFWVFYRAKQDGATLLGLRHPWDGHDDHSHGHGHGNEAS

SEQ ID NO: 1255 - DNA, 1456 bp, Zea mays
  misc_feature: Ceres CLONE ID no. 453818
  misc_feature: Ceres CDNA ID no. 40350984
  CDS (1)..(1143): REFERENCED BY SEQ ID NO: 1256
acaattctcagaaaaaatccctccctcctcgaggccactcgcctcctttccaccccgcgcccgccccgccgcagcctccacacccacctcctcaggaccccgcgcctctccgctctccgcgctcacctccaccgttccgcaactctcgacgcgcaggagccgacggcgaggcctggcgcgctcctggtcctcgacgcgctcaggaggtccgtggtcgactccctcgcggcgctcaagcggcccgcgctcgcgctcctgctggccggcgcgctgctcgccgcggcgtcaatgggcgggccgcacgccgcggcgctggccgcttcgggcgggcgcgtcggcgggtccgccttctcctcccgctcctcctcacctccgtcctacggctacagcgcgccggcgcccaggggcgggtacacggccgcgccctactactcgccttcgcccttcgtgtccttcggcccggccgtcggcatcggcttcgggggatcgggtttcctcgtgaccctcattggcttcgcggcattcctctatctcgccgggttcctgtccgactcgtcaggcggtaccagtgtgcttacagagacggataagaccaccgtcctcaagctacaggttggcttgctgggcatggcacgatcatttcagaaggagcttgaccaaatagctgagaaagcagatacatctactccggctggcttgagctatgtgttgacagagacaacattagcattacttcggcatccggattgttgtatctcagcttactcttcggtggatgtgaaacgtagcgtggatgatggtgagaaacgtttcaatcagctttcaattgaggagaggggcaagtttgatgaagagacacttgtcaacgtgaacagcatcaagaggaataaaggaggcagccaaagatcaagtggttttagcaacgagtacattgtgataaccatattggttgctgctgagggagtacataagctgccggttataaatagcagcaatgacttaaagacagctctacaaaagatgggtgccataccatcaagcaaaatactggcagtcgaggtcctgtggactccgcaaaatgagaatgacacattgtccgagcgagagctccttgaagattacccgctcttaaggcctctgtagaaagataaaagttacagattgcccgtgcaaaggaagaacacgccgtagattcagttttggcggttttcttattagttatagcacagatcctgcgtttgtataataatttgtaattggcgtctctgatagccttcatttcagaacatggaacgtgcaaatctgcaattgtctgtcagtagtcttgttcaatcttcctgacacaataacacaaaattgtaaatagattgttcagagaaaaaataaaacaggacatgctgcaaaaaaaaaaaaaaaaaaaaaaaaaaaaaaaaaaaaaagaaaaaaaaaaaaaaaa

SEQ ID NO: 1256 - protein, 284 aa, Zea mays
  misc_feature: Ceres CLONE ID no. 453818
  misc_feature: Ceres CDNA ID no. 40350984
MGGPHAAALAASGGRVGGSAFSSRSSSPPSYGYSAPAPRGGYTAAPYYSPSPFVSFGPAVGIGFGGSGFLVTLIGFAAFLYLAGFLSDSSGGTSVLTETDKTTVLKLQVGLLGMARSFQKELDQIAEKADTSTPAGLSYVLTETTLALLRHPDCCISAYSSVDVKRSVDDGEKRFNQLSIEERGKFDEETLVNVNSIKRNKGGSQRSSGFSNEYIVITILVAAEGVHKLPVINSSNDLKTALQKMGAIPSSKILAVEVLWTPQNENDTLSERELLEDYPLLRPL

SEQ ID NO: 1257 - DNA, 503 bp, Zea mays
  misc_feature: Ceres CLONE ID no. 453903
  misc_feature: Ceres CDNA ID no. 40350985
  CDS (57)..(302): REFERENCED BY SEQ ID NO: 1258
aactttcagaaccgccaaagaagcaaacatatattcttctagttccgtggtaggacatggcagagagcatggtgaaagacggtggtgatggtgagctcaagctgctggggctgtgggcgagcccgttcgtcgcgagagcgaagctcgcgctccagatcaagggcctaagctacgagtacgtcgaggaggatctcggcaacaagagcgagctgctgctcagctccaacccggtgcacaagacggtgccggtgctgatccacaacgggacgcccgtctgcgtccgttcctttggatctgaataagatggtggtgatctgagtggtggtcttagtttatcatgtatcgctcgcagtttaatttagcggtttaggtgtggatctgtgaaccccatggcgcctctgcttgattcgtgtttcacctgttatgttctgagattcatgataatgctatgagaactgaaattcccgtttcatgcttctttaaataaaaaaaaaaaaaaaaaa

SEQ ID NO: 1258 - protein, 77 aa, Zea mays
  misc_feature: Ceres CLONE ID no. 453903
  misc_feature: Ceres CDNA ID no. 40350985
  misc_feature (10)..(72): Pfam Name: GST_N PFAM Desc: Glutathione S
MVKDGGDGELKLLGLWASPFVARAKLALQIKGLSYEYVEEDLGNKSELLLSSNPVHKTVPVLIHNGTPVCVRSFGSE

SEQ ID NO: 1259 - DNA, 644 bp, Zea mays
  misc_feature: Ceres CLONE ID no. 454620
  misc_feature: Ceres CDNA ID no. 25446395
  CDS (87)..(563): REFERENCED BY SEQ ID NO: 1260
atccaagaaggcaaagtaccactaccacatcaaaaccaagaagtcaagactcaagaaccagcacggcaccgccgccagtccgctacatggaagccgcagcctccgcccttctcctccttggcctcagcgccagcctcgctcccttcgcctcggccgcggctccgtacgacccgccgacggtgccggagctcatggaccagttaggcctcccgcgcgcgctgctcccggagacagcccggcggtacctcctacacgacgatggcacctttgagctcttcctcgacgacggttgcgtggtagaggcggggggctaccgcgtcggctacgacatcaagctctccggcaccgtgtcccctgggtcggtcacggggctcgagggcgtccgcgtccgcgtgctgttcgcctgggtgcccatcaccggcgtcgaggcggccgacggagaggtcactgtccacatcgggccaatcaggaagtcgttccccgccgttgggttcaaatccagcccccggtgcatcatcggattggcggcggcagatatcttgcctcctttggtagaacagtagtcaggctgcctgatttgttaggatttagtcgaaatttgcggtgtcaacaagattataatttccttaaaaaaaaaaaaaaaa

SEQ ID NO: 1260 - protein, 158 aa, Zea mays
  misc_feature: Ceres CLONE ID no. 454620
  misc_feature: Ceres CDNA ID no. 25446395
  misc_feature: Homolog of GI Number: 50924540 NR Desc: P0041A24.4
MEAAASALLLLGLSASLAPFASAAAPYDPPTVPELMDQLGLPRALLPETARRYLLHDDGTFELFLDDGCVVEAGGYRVGYDIKLSGTVSPGSVTGLEGVRVRVLFAWVPITGVEAADGEVTVHIGPIRKSFPAVGFKSSPRCIIGLAAADILPPLVEQ

SEQ ID NO: 1261 - DNA, 486 bp, Zea mays
  misc_feature: Ceres CLONE ID no. 454705
  misc_feature: Ceres CDNA ID no. 35383178
  CDS (3)..(392): REFERENCED BY SEQ ID NO: 1262
atcaaggaacagtgcaaactagaagaaacctccgtcatcagcgacctctccccaacggcgccgacgatggcgcaacagcagacgcagctaaccactggctcgggcatcctggatgccgtcccgctcttcgtcgtcatcctcctcgcggcccacgtcctggccctcgtgttctggatgtacaagctggcttccgagaagcaaccaccccggaggaagacacagtgacggcgccgatctacgccatcggcgatccttcgctagcctctttatcggttccattttcatgtgaaccagtaccctccagaacattcaggccgtcaattattcagagatatccatatagtctttcaatttgttttatttatacttattgcattttgggtattgtttgataacaacttagcgatattctatgaatcactatccgtttgggtgataaataaatgttcctagttttaaaaaaaaaaaataaaaaaaaaaaaaaaa

SEQ ID NO: 1262 - protein, 58 aa, Zea mays
  misc_feature: Ceres CLONE ID no. 454705
  misc_feature: Ceres CDNA ID no. 35383178
MPSRSSSSSSSRPTSWPSCSGCTSWLPRSNHPGGRHSDGADLRHRRSFASLFIGSIFM

SEQ ID NO: 1263 - DNA, 850 bp, Zea mays
  misc_feature: Ceres CLONE ID no. 454877
  misc_feature: Ceres CDNA ID no. 35385339
  CDS (183)..(623): REFERENCED BY SEQ ID NO: 1264
aggcacacagccgccgcatgtttctgcatctcccatcttcatcttcccgcagttccatcttccgctccctcccttcatcgcgctcggcacacaggcgacggcggcggagctcatgctcgggctctcagcgaaggtcttgtcattcgtgatttcatacttcaggtatctgcatctcaggggaaatggcaagcaaagcaggtggtgaaggcaaagaagccataaacgagcaagtaattgccaacacttatgccatcatgcgtactgaaatgaaccagctctacaccaagatcacagagctggagatggaagtcagtgagcactcccttgtgattggtgcgatcgagccgctggacccctcgaggcgctgttacaggatgattggtggggtcctggtcgaaaggaccatcaaggaagtcctgcctgctgtgaagcgcaacaaggagggccttgaagaagtgattgctcgcatgcacgaggcactggagaggaagaagaaagagatcaccgagtttgagcttaagtacaagatcaggatccggaaggctgacaatgacgcagaggacgaaggcggcaagaaggaaggcactgcacagggagtccttgttgggcctgctggacagtaacacttaattagatggattttgtgtaaaagatgaggaccgatgtgaactgaagtagtttctttgtcacctcttcgggtgctgcagcaatccaagtttttgtttgttattgatgacacatcgcaaatctcccaggactagaatctctgttcgtgattccttttactatcttctcaaaataattgtggattagtcatctgcatgacttcatttcaaaaaaaaaaaaaaaa

SEQ ID NO: 1264 - protein, 146 aa, Zea mays
  misc_feature: Ceres CLONE ID no. 454877
  misc_feature: Ceres CDNA ID no. 35385339
  misc_feature (16)..(121): Pfam Name: KE2 PFAM Desc: KE2 family protein
  misc_feature: Homolog of GI Number: 77551518 NR Desc: prefoldin subunit 2
  misc_feature: Homolog of GI Number: 77555734 NR Desc: prefoldin subunit 2
  misc_feature: Homolog of GI Number: 21281273 NR Desc: putative prefoldin protein
  misc_feature: Homolog of GI Number: 74006277 NR Desc:  similar to prefoldin 2
  misc_feature: Homolog of GI Number: 55588600 NR Desc:  similar to prefoldin 2
  misc_feature: Homolog of GI Number: 31981577 NR Desc: prefoldin 2
  misc_feature: Homolog of GI Number: 60811895 NR Desc: prefoldin 2
  misc_feature: Homolog of GI Number: 62901934 NR Desc: prefoldin subunit 2
  misc_feature: Homolog of GI Number: 68362860 NR Desc:  similar to prefoldin 2
  misc_feature: Useful for increasing chlorophyll and photosynthetic capacity
  misc_feature: Useful for making ornamental plants with modified leaves
MASKAGGEGKEAINEQVIANTYAIMRTEMNQLYTKITELEMEVSEHSLVIGAIEPLDPSRRCYRMIGGVLVERTIKEVLPAVKRNKEGLEEVIARMHEALERKKKEITEFELKYKIRIRKADNDAEDEGGKKEGTAQGVLVGPAGQ

SEQ ID NO: 1265 - DNA, 648 bp, Zea mays
  misc_feature: Ceres CLONE ID no. 455179
  misc_feature: Ceres CDNA ID no. 29191383
  CDS (2)..(334): REFERENCED BY SEQ ID NO: 1266
agggtttagtggttcacgatccactcacgtacggcacgggcacaggcgaccgcggctcccggcgagttgccgcgccagcggccacctccctcacggcctccctcattcgcaagggggcagaggcaccgacgccggcacgccgcagccagcaggcagccgccacccgcgacccgctcctccaggtcgccgccggtccgccgcccctccaggtcgccggcgccgccctacagagaggaaggagcgccgcccctcctcggctcccccaccgcaacgccggctcgccacgcctccaggttcaagattgaagcaagatacaagagcatggcagaactaaggttcaagattatgggaaatggtgagtcagtggcacttttttggagagcaaggtgcaagagtacaagtctgcgaggatatcaatgggcaaaggcacatttgtatttttttgactccaaagcgatttcagttgtaatagaaataacttattgtgtgagatcttagaaactcatgctgatagtattcaaaattgctggtcttatattgtgacaatgagagattattagtcactatatttttgtggtcttatattgtgacaatgagagattatcagtcagtcactatatttttatggtctcaaaaaaaaaaaaaaaa

SEQ ID NO: 1266 - protein, 58 aa, Zea mays
  misc_feature: Ceres CLONE ID no. 455179
  misc_feature: Ceres CDNA ID no. 29191383
MAELRFKIMGNGESVALFWRARCKSTSLRGYQWAKAHLYFFDSKAISVVIEITYCVRS

SEQ ID NO: 1267 - DNA, 979 bp, Zea mays
  misc_feature: Ceres CLONE ID no. 455469
  misc_feature: Ceres CDNA ID no. 25445842
  CDS (393)..(602): REFERENCED BY SEQ ID NO: 1268
acaaagcaaagcagcttctctctctctgtctctctctctcgcctccctctcgacgacgatctcaggcgctcgcggggagtcgagtcgagaccagcctcgttccttcataaaaagctcacttagttgttgtccccgcatctttttttagctgttcttgtttgattacatcatcttattttgtgcttgaatctaacctgccattaagtttttatcgcttcgttatttctctgttgtgcttgtcttgttcttttgttgctctaaccatggacgcaggctcccgctcgatctcctcggcgaagaaccgcgccgccgccgccgccgatctcgccgttctcgtctccttccgttggattagggctcttcatctgttcgccgcacttcgttagtcgcccatggcggatgaggaggtcactgatccaaaggcgctcctagaggatcgttcaaaggctaagtgtgtgtcgcagtggtatgattatcagaaatgtgttaaaaggattgaggacgatgagactgggcacaagcactgtaccggtcagtactttgattactggaaatgtgttgacaagaatgttgcagagaaactctttgagatgttaaaatgacaatttttccctccatttatccacttaaagttggtaataattgtatcacttgtgaggcctatagactattaaggcacttaatatttgtcagagaacttttgcctcttgggtaacacaaattttccactgccagtttgcatttcatttctgctactagtattgaaccagcaaggtttcctccattgctggataaaaatcaatggaatattcccaagattgtggctgagcgttaaatgctataatgtaccttaattgcttttatggtgtattttgacgaggacatagctaatcattcaggtccataacttggatgagatggaataacatgtgtacattacttctagctggtggtaatgatttatcatgaaaaaaaaaaa

SEQ ID NO: 1268 - protein, 69 aa, Zea mays
  misc_feature: Ceres CLONE ID no. 455469
  misc_feature: Ceres CDNA ID no. 25445842
  misc_feature (7)..(69): Pfam Name: UCR_hinge PFAM Desc: Ubiquinol
  misc_feature: Homolog of GI Number: 50252217 NR Desc: putative ubiquinol
  misc_feature: Homolog of GI Number: 62732974 NR Desc: ubiquinol
  misc_feature: Homolog of GI Number: 488712 NR Desc: ubiquinol
  misc_feature: Homolog of GI Number: 21554004 NR Desc: putative ubiquinol
  misc_feature: Homolog of GI Number: 15218058 NR Desc: ubiquinol
  misc_feature: Homolog of GI Number: 5103810 NR Desc: Similar to gbX79273 cytochrome c reductase hinge protein subunit from Solanum tuberosum.
  misc_feature: Homolog of GI Number: 14532878 NR Desc: putative ubiquinol
MADEEVTDPKALLEDRSKAKCVSQWYDYQKCVKRIEDDETGHKHCTGQYFDYWKCVDKNVAEKLFEMLK

SEQ ID NO: 1269 - DNA, 775 bp, Zea mays
  misc_feature: Ceres CLONE ID no. 455773
  misc_feature: Ceres CDNA ID no. 25446396
  CDS (329)..(550): REFERENCED BY SEQ ID NO: 1270
agtaccacttttctatctaggttatctctttacatgctaaatttcatctgtatttctttctgcatcggtttgtcttgtggttcggcctatagttgctgctagctgcacgaacgagagatctcgtctgcattttctccctttgaggctgtgcttcaagttcctgaaaatatttcgaatcataattttattactcaaatttctaattacctgaattaccctacccggaaatatcagctaaccccagaccgcccaacaccatctccaccctcgccaccaaccgcccccgcaccacggccagaaccctagtcacttctccgccgcccactccatggaggacgacgccatctcgacgctcatggacatcgacgactcgccgctcagcgctgcgggggccgggttcctcgacgaggaggacggggaaggcgagatgttcttcgccccgcaccgcgcggcccgcggcggcgctggcgatgcccgcgggcccctccccttttccgggttcttcaacagcttcgacggcgccgattttgacgacgacgacctcgcctgagggaactcccacccggttcggtaacggatgttgttcgtggatcgcgaatcgtgttatgtcgataccgtgatggggtctcttaattagcgcatcgattcagactcgtttgggcaatctgaagatgtttagggatcaacattacctttgtgtacctttgtggcctatggttcgtggatgcacagggatcaatataagtacctttgtgccccaaaaaaaaaaaaaaaa

SEQ ID NO: 1270 - protein, 73 aa, Zea mays
  misc_feature: Ceres CLONE ID no. 455773
  misc_feature: Ceres CDNA ID no. 25446396
MEDDAISTLMDIDDSPLSAAGAGFLDEEDGEGEMFFAPHRAARGGAGDARGPLPFSGFFNSFDGADFDDDDLA

SEQ ID NO: 1271 - DNA, 500 bp, Zea mays
  misc_feature: Ceres CLONE ID no. 456063
  misc_feature: Ceres CDNA ID no. 25446599
  CDS (87)..(425): REFERENCED BY SEQ ID NO: 1272
ctagcagttcctcagacgcaaagaagatcgagtctgcagcccacaccatagtgcgagcagattgcgtccaataggcgcaaagggagatgggggtggccgctggacgagcggcggccatggtggctgcggctgcggcggcggcggcggtgctgctgctgctcgcgggcggcgcgcacgcggactgctacgacgactgcttcaaggactgcatggccaggttcaagtccatgagagactactgcagctacgcgtgcgagaaggtctgcgatccggacgccacgctccagcgccccctcgccgttgtggggccagcagcagcgttggccgaccaccacccgttggacaagaagcatggtgctgtctggccggcggcgttgcccgaccatcctttccacgagacgcacggcgacgtcgagccggattgaggatgcatcatcgttatcatcatttattctattctaattctattcagattgaaaaaaaaaaaaaaaaaaaaaaaa

SEQ ID NO: 1272 - protein, 112 aa, Zea mays
  misc_feature: Ceres CLONE ID no. 456063
  misc_feature: Ceres CDNA ID no. 25446599
MGVAAGRAAAMVAAAAAAAAVLLLLAGGAHADCYDDCFKDCMARFKSMRDYCSYACEKVCDPDATLQRPLAVVGPAAALADHHPLDKKHGAVWPAALPDHPFHETHGDVEPD

SEQ ID NO: 1273 - DNA, 680 bp, Zea mays
  misc_feature: Ceres CLONE ID no. 456363
  misc_feature: Ceres CDNA ID no. 29191384
  CDS (134)..(436): REFERENCED BY SEQ ID NO: 1274
cactcgcgcgtccgttccgcctccactgaacatctccttttaacacccggctccggcgactcgccccttcctccactggtgcatccaccattccacctaccccacccccacaacccgctcgcgcggctgtccaatggcgggaggcggggcgccgtcagcgtggggcccgagcccggcgctggtgaccgcactggtggcgctgcttgggctcggcctcgccgcctacatcgtcggcccgcagctctactggcacgccgcggaggtgctcacggcggcggccgcgtgccccgcctgcgactgcaactgcgacgcgcgcccgctcctcgaccttccggaagattgtgctaaacacttcaaaggggtcaagagtcgcgcatctggtgaagagacagaaaagagtttcacagagctgcatgtacactcctgtctaccgtaactaccgatagtgctgctgggatcaattctgcagtaataaaatatgtcgacgcagatgatcctgcaatgttgtagtttattgtttcatttgttggccctgctgctgaccacctttgtggctggtagacactgtacttgtctgcatatatgatactggaacatttggcgcgctgtgggcgtccctgtcatgagatcaattgcagaaataaaatgcaatttagatttgagcaaaaaaaaaaaaaaaa

SEQ ID NO: 1274 - protein, 100 aa, Zea mays
  misc_feature: Ceres CLONE ID no. 456363
  misc_feature: Ceres CDNA ID no. 29191384
MAGGGAPSAWGPSPALVTALVALLGLGLAAYIVGPQLYWHAAEVLTAAAACPACDCNCDARPLLDLPEDCAKHFKGVKSRASGEETEKSFTELHVHSCLP

SEQ ID NO: 1275 - DNA, 638 bp, Zea mays
  misc_feature: Ceres CLONE ID no. 456365
  misc_feature: Ceres CDNA ID no. 25446397
  CDS (43)..(414): REFERENCED BY SEQ ID NO: 1276
actgacccgcagtcccgcacaaccaccaccaccaccaccaccatggccgccgcgccaacaagctccggcgactcgccgccgcctgcgcagccggagtacggttccatctcctccatggtagcctcgtctgcctcctccgctgcagccgcggtcgcggacttcacccgctgggccgagaccttcggcaccgagaaggccgacgccgccaaggctgccctaacctccgccaccaccttggccacctcatctgcctccgaggcggcttctgcttcctccaaggccgcgtcctccgcatatgcggccgcctccgacctcaccctcgtcgccaaggaggagctggaatggttcaagacggagtactctgctcacgagcagattgtgttcggcaagatcaaagagggtgacgagtactagagaagtttgctgatgacgcagcatcaggccagtgtgctgcccttatcccgtgatctgccgtgagttgctcctgctatcgtgttatgtgtgtctgttctgaagtattgtgtggtttacaacacctgatgttgtaagagttgttaattcccctgcattgctaccgggttattgagaataattatggctgtttacgttgttgcttcatctcaaaaaaaaaaaaaaaa

SEQ ID NO: 1276 - protein, 123 aa, Zea mays
  misc_feature: Ceres CLONE ID no. 456365
  misc_feature: Ceres CDNA ID no. 25446397
  misc_feature: Homolog of GI Number: 6523547 NR Desc: hydroxyproline
  misc_feature: Homolog of GI Number: 76262498 NR Desc: pherophorin
  misc_feature: Homolog of GI Number: 76262500 NR Desc: pherophorin
  misc_feature: Homolog of GI Number: 488731 NR Desc: chitinase
  misc_feature: Homolog of GI Number: 14253163 NR Desc: VMP4 protein
  misc_feature: Homolog of GI Number: 21322711 NR Desc: pherophorin
MAAAPTSSGDSPPPAQPEYGSISSMVASSASSAAAAVADFTRWAETFGTEKADAAKAALTSATTLATSSASEAASASSKAASSAYAAASDLTLVAKEELEWFKTEYSAHEQIVFGKIKEGDEY

SEQ ID NO: 1277 - DNA, 562 bp, Zea mays
  misc_feature: Ceres CLONE ID no. 456461
  misc_feature: Ceres CDNA ID no. 25446398
  CDS (62)..(385): REFERENCED BY SEQ ID NO: 1278
acagagaaccggaggactgaggaggaggaggagacgtcacgcctgcgcggctgcgcccaccatggacgaggaggagttccggcgcatgctcgacctcttcccggtcgtccgctcccgagactactgctgctccgatcttggaacatccagcagaggaaccagacagcgatcacgagttcaggaggcaactaagggcgataataaggactcgtccggtggacgagatatgtttatgcagaaattgaagatggctgcggagaataagattggagcgacaaaggcagagttcttctgcaagacattcgaagaagttcatgagaaacttgttcacagagagctgaatttggatgctgctaagaagttcctgagcgcatatgagagctgatgatgaacaataggtagatgctgttgagcgcatactgataccgcctgattggttcaccgatcgcccgtagccagctcgtatgcagccaggctgtccagagactgttatttgggccgtagaagtggatgcactcaaaataaatgttgcgtttactcgtccaaaaaaaaaaaaaaaaaa

SEQ ID NO: 1278 - protein, 107 aa, Zea mays
  misc_feature: Ceres CLONE ID no. 456461
  misc_feature: Ceres CDNA ID no. 25446398
MDEEEFRRMLDLFPVVRSRDYCCSDLGTSSRGTRQRSRVQEATKGDNKDSSGGRDMFMQKLKMAAENKIGATKAEFFCKTFEEVHEKLVHRELNLDAAKKFLSAYES

SEQ ID NO: 1279 - DNA, 933 bp, Zea mays
  misc_feature: Ceres CLONE ID no. 456635
  misc_feature: Ceres CDNA ID no. 36701580
  CDS (1)..(909): REFERENCED BY SEQ ID NO: 1280
acaaaactgggcgctgcccaactccctgcccaagctgctggattaaaccccccttgtcgtcgcttcggttcaagcgaggaagagagagagagcgagagttgtacaaggggcgccggcggccgcattgtagagtacgttgagcttgttcactgccgtcgcggcctcaaagcaagccacatcatcgatggcggacgcagctcacgtcttcctgctggtagcggtggccgccgcgctcgccggccgctcagacggcgcgtggtgcgtgtgccgcccggagctggcggacagcgcgctgcagaaggcgctggactacgcgtgcggcgccggcgccgactgcaagcccatcctgcagagcggcgcctgcttcgccccggacaccgtcaaggcccactgctcctacgccgtcaacagcttctaccagcgcaacagccagaacccgcaggcctgcgtcttctccggcaccgccacgctcagcaacagcgacccgagcggcaatggctgcacgtaccctgcgaccccaagtgctgctgcgacgacgagcaacagcggttcgcccggcgtgtacagccctcccacgatgggtccgtcagccctcaacgacaacagcgctgctgccagcgtcctcccggtggctggactcaccaccgtgcggctgctgatcctggcctgctgctcgctcgtcgctctctgcatcggcgcgtgactcatgaggacgagacgcccctcggctgctgctgttgtgggtgtgtcttgttcgttccttgcctttttcttctagtggcaggcagagggaaccttccggtggtggagcgcgagaaccccgaggcctcacaaatgccattctcgttgctgcgatttccgttcacattctctgatgtaaatcttagggttctagccttctcgttctaaaaaaagaaaaaaaaaaaaaaaaaa

SEQ ID NO: 1280 - protein, 172 aa, Zea mays
  misc_feature: Ceres CLONE ID no. 456635
  misc_feature: Ceres CDNA ID no. 36701580
  misc_feature (24)..(108): Pfam Name: X8 PFAM Desc: X8 domain
  misc_feature: Homolog of GI Number: 57899559 NR Desc: glycosyl hydrolase family protein 17
  misc_feature: Homolog of GI Number: 34909796 NR Desc: P0403C05.4
  misc_feature: Homolog of GI Number: 50939031 NR Desc: glycosyl hydrolase family 17
  misc_feature: Homolog of GI Number: 34912962 NR Desc: beta
  misc_feature: Homolog of GI Number: 22329437 NR Desc: glucan endo
  misc_feature: Homolog of GI Number: 8778409 NR Desc: F16A14.5
  misc_feature: Homolog of GI Number: 14279169 NR Desc: beta
  misc_feature: Homolog of GI Number: 57899486 NR Desc: putative elicitor inducible beta
MADAAHVFLLVAVAAALAGRSDGAWCVCRPELADSALQKALDYACGAGADCKPILQSGACFAPDTVKAHCSYAVNSFYQRNSQNPQACVFSGTATLSNSDPSGNGCTYPATPSAAATTSNSGSPGVYSPPTMGPSALNDNSAAASVLPVAGLTTVRLLILACCSLVALCIGA

SEQ ID NO: 1281 - DNA, 1108 bp, Zea mays
  misc_feature: Ceres CLONE ID no. 456844
  misc_feature: Ceres CDNA ID no. 35388128
  CDS (103)..(840): REFERENCED BY SEQ ID NO: 1282
agctagcagctgaaactgaaacagcccgtcacctaccattcgacccgccgcgacgctccctgctcggaacagcctgcgttgctcgcccacacgacgccacgcatgcaggaggagccagggcgtcgtcccgtgccgccgttcgcgggcgtggacctccgccgccccaagggctaccccgtggcggttgccaaggaggagaggccggcgccgggcggcgacccgtgcccgcggtgcgggtcgcgggacaccaagttctgctactacaacaactacaacacgtcgcagccgcgccacttgtgcaagtcgtgccgccgctactggaccaagggcgggtccctccgcaacgtccccgtcgggggcggcacccgcaagagcagcagcagctcctcatcatcctcggcggcggcggcggcgacgacgacgacgacgtcaacctcgcccggcgccgcgcccaaggccacgaagcggtcgaagaactccaagcgccgccgcgtcgcgcctgccccggaccccgcggcgcccggcacggacgcctccaccgccgacgtcgcgagcacggcaccttcgacggtggctgcctcggagaagccgagcgcgacggagcacgcagcggcggctgtcgccactgagaagccgccggccgcgcctccggtgtccgtcggcgctttcgcggacacgtccccggcgccagatgctgggagcggcggcgttagggagctgctgccgcacccgagccgcttcgagtggccgtcgggctgcaacctggggccgccctactggggctggggcaccagcgtgttcgccgacaccgacccggcgctgttcctcaacctgccgtgagtgacccgtgacaacgccatggcgcccatggttaactaatcaaccatgatcacacggtcgacgagatgagaggaacagagcacgcagtgcgtcgggctcttgaagctaggcgctgtagtagtctcctaagcttactgttgtctagaccgatagtctcgcgtacttgtgtagttgtgttgatggtttttaatcgccgctttgtactgcaattctagtaaaaaggctaacatatgggatagccgggctctgcataaaaaaaaaaaaaaaa

SEQ ID NO: 1282 - protein, 245 aa, Zea mays
  misc_feature: Ceres CLONE ID no. 456844
  misc_feature: Ceres CDNA ID no. 35388128
  misc_feature (34)..(96): Pfam Name: zf PFAM Desc: Dof domain
  misc_feature: Homolog of GI Number: 1061306 NR Desc: Dof2
  misc_feature: Homolog of GI Number: 52077334 NR Desc: putative DNA
  misc_feature: Homolog of GI Number: 517258 NR Desc: DNA
  misc_feature: Homolog of GI Number: 50947117 NR Desc: putative DNA
  misc_feature: Homolog of GI Number: 51979356 NR Desc: PREDICTED B1121A12.10 gene product
  misc_feature: Homolog of GI Number: 67523403 NR Desc: Dof1
  misc_feature: Homolog of GI Number: 20372847 NR Desc: dof zinc finger protein
  misc_feature: Homolog of GI Number: 20372895 NR Desc: dof zinc finger protein
  misc_feature: Homolog of GI Number: 55297232 NR Desc: putative dof zinc finger protein
  misc_feature: Homolog of GI Number: 4996642 NR Desc: Dof zinc finger protein
  misc_feature: Useful for making plants with increased biomass and foliage
  misc_feature: Useful for making shorter plants
MQEEPGRRPVPPFAGVDLRRPKGYPVAVAKEERPAPGGDPCPRCGSRDTKFCYYNNYNTSQPRHLCKSCRRYWTKGGSLRNVPVGGGTRKSSSSSSSSSAAAAATTTTTSTSPGAAPKATKRSKNSKRRRVAPAPDPAAPGTDASTADVASTAPSTVAASEKPSATEHAAAAVATEKPPAAPPVSVGAFADTSPAPDAGSGGVRELLPHPSRFEWPSGCNLGPPYWGWGTSVFADTDPALFLNLP

SEQ ID NO: 1283 - DNA, 809 bp, Zea mays
  misc_feature: Ceres CLONE ID no. 457152
  misc_feature: Ceres CDNA ID no. 36691821
  CDS (100)..(585): REFERENCED BY SEQ ID NO: 1284
atttgtctgccgagcgcacatcacaaccagtcaaccacacacaacacaacacaaccgatacgaagaagcttcttgtctagctagccgcgcccgcgcgccatgtcctccatgaagagaagcattgcgtctagcgtcatcgtcgtcctactggtgctctcccttgaagccaccttcgctgacgctgtccgcgtcatacccgacgccccggccggcggcgccatcgtccgccttccgagcgacggcgaaagaggagtgactacttcggcggcggcggcggacgacaagaagcagctccggtggtgcgagcacccaatctgcttccctgagtccgacatctgcttctgcccctacacccgcgccgaccggacgacgacggagagcggccgcggcgccaaggacgagctagtgcatgacagtctcgtagtgccgccgcgcgcaccagcaccaccatgcgagcacccgttctgcatttttatcaggggagagccggtgtgcaggtgcctcgacggaacccggccggcccccagcagcagcgtcgaaatgaggatgatgatgcacgcagacatggagagagccagcagctagcgtgccactgagccactgatgtacgtggttttggtttgtttgttcttggtccagcagtaacagtgatagtgtcgtgaatgagctagcacactgtcgagtctgtcaggatgatgctcattctcagtgtcaggtcgtctgtccgtgtcgagaccgatcgtacttacgtctttgttttggtataataaagcgtcgtgcaaacgagttctgttacgaaaaaaaaaaaa

SEQ ID NO: 1284 - protein, 161 aa, Zea mays
  misc_feature: Ceres CLONE ID no. 457152
  misc_feature: Ceres CDNA ID no. 36691821
MSSMKRSIASSVIVVLLVLSLEATFADAVRVIPDAPAGGAIVRLPSDGERGVTTSAAAADDKKQLRWCEHPICFPESDICFCPYTRADRTTTESGRGAKDELVHDSLVVPPRAPAPPCEHPFCIFIRGEPVCRCLDGTRPAPSSSVEMRMMMHADMERASS

SEQ ID NO: 1285 - DNA, 959 bp, Zea mays
  misc_feature: Ceres CLONE ID no. 457282
  misc_feature: Ceres CDNA ID no. 29191882
  CDS (127)..(618): REFERENCED BY SEQ ID NO: 1286
acagcacacaactcgtcctcggtcctccgtacccttccgcgctccgccccagcacgaaacgccgaaaccctaccctttggcttctccgtcctcgtcctcgcccccgcccatccgcgcaccagccgaatgtcgtcgggaggcggtggggggcagcagttccgctacacgcagacgccgtccaaggtgctgcacctgcggaaccttccgtgggagtgcgcggaagaggagctcgtcgagctctgcaagcctttcggccgcatcgtcaacaccaagagcggcgtcggcgccaaccacaaccaggcctttgtcgagttcactgacgttaatcaggcaatctcgatggtttcttatttcgcatcatcttcagaaccagcacaaatacgaggcaagactgtttatattcagtattcaaataggcaagaaataattaacaacaagagtcctggagagactgctggaaatgtcttgcttgttaccatagagggtgttcaatctagtgatgtcaccattgatgtgatccatatggttttctcggcttttgggtatgttcataaaatagccacctttgaaaaggctgcaggttttcaggcattgatccagtacactgatgcgaaataagaaacaggacgatttgcccagacttggtgtttttggtgctgttgaaatctccgatccctttggggtgtgacccactggacatggccaatttgtcacaatttattattttgacccatgtcatgtgaaactcctttcgttgaagtctggtatctagattgacttgtatcagagctgtggtttacgcagactggattctggagtactggactgtgtgtgtgtttttcggaactgtgcatctgacttttagctgttcgttgactttgtttttcttttttcagataaagagctgtttcttgatttgatgcaagtaggcttggtactcttcaaaaaaaaaaaaaaaa

SEQ ID NO: 1286 - protein, 163 aa, Zea mays
  misc_feature: Ceres CLONE ID no. 457282
  misc_feature: Ceres CDNA ID no. 29191882
  misc_feature (21)..(69): Pfam Name: RRM_1 PFAM Desc: RNA recognition motif.
  misc_feature: Homolog of GI Number: 50920711 NR Desc: putative polypyrimidine tract
  misc_feature: Homolog of GI Number: 50946093 NR Desc: putative polypyrimidine tract
  misc_feature: Homolog of GI Number: 81076794 NR Desc: polypyrimidine tract
  misc_feature: Homolog of GI Number: 77745463 NR Desc: polypyrimidine tract
  misc_feature: Homolog of GI Number: 3395938 NR Desc: polypyrimidine tract
  misc_feature: Homolog of GI Number: 6714473 NR Desc: putative polypyrimidine tract
  misc_feature: Homolog of GI Number: 55733737 NR Desc: At5g53180
  misc_feature: Homolog of GI Number: 54290862 NR Desc: polypyrimidine tract
  misc_feature: Homolog of GI Number: 34912728 NR Desc: putative polypyrimidine tract
  misc_feature: Homolog of GI Number: 28949889 NR Desc: polypyrimidine track
MSSGGGGGQQFRYTQTPSKVLHLRNLPWECAEEELVELCKPFGRIVNTKSGVGANHNQAFVEFTDVNQAISMVSYFASSSEPAQIRGKTVYIQYSNRQEIINNKSPGETAGNVLLVTIEGVQSSDVTIDVIHMVFSAFGYVHKIATFEKAAGFQALIQYTDAK

SEQ ID NO: 1287 - DNA, 1197 bp, Zea mays
  misc_feature: Ceres CLONE ID no. 457404
  misc_feature: Ceres CDNA ID no. 25446655
  CDS (298)..(978): REFERENCED BY SEQ ID NO: 1288
gcacttcactgtcgcaggaactactaatttctgttatgtttgagagcaagcaagtccatttcatttcgctcgatcggttccaattttctttgatgcttggttccctgctaatctaatctaatccatccatctatccttggttcgattaggttctcgttcttcagtgcgtgatatcaatccactgaggcgctgggcgcagttaatttcccaaactatatttgggggtgttcagcaaaaaccgcgtccaactgcgcccgtgcgggtgagggatcactagaggctggactcgcgctagagatggtgaaggcaaaagcaagggtccgctatgagcctggaccggcttttgaggaggtcaaagaagaagccatgcttgatatatcaccaacagactcgacagagttttggttaattcagtggcctaaggaccagatagatgttttggattttcatggcaaagaggtttctctcaagctgcatagtgatggaaacttgggcaacttggaaaattcctcagggaaatcttatgagattgcgagctttgcagctcagaaaccagatgcaaccgtcttcctgccttcaggctcagaaacaaaacctgtggggaagatttcacggcgagtatccttagttcgttatcctaaacctgaggaatttacaaaaccaagttttgggagtcttactcctagcataaagaaatctgcaggttctaagaagaccatgtctcggttcaccggtgcatcaaagaatcccagtagccaaggttcggcgctttcactgggccaaaggagcgcagagccaacacccaaacacaaggggaagagaaaggatgaaagcagcctggggcactcaaatgtgtcgggcaaggccacagaaggatctgaggctcgaggcgcggggagcaacacggcttcagagatgccacagtcgccaccggaaaaatcaaagaagaggaggaagaaggataagatcgttgagtagtagtgtcaccttggcagatttttttgctggagtgtccggtgttgtttgacctgggagcaacctgttgcgtggtgctgaaactgaaataccgatatgtatcgttctgtttttggtatgtgaaaggttatctttgttgcgctgttcctgttggtgtgctaagctgaacgaagggtagatgatataatgttatcgctgcttgcttcaaaaaaaaaaaaaaaa

SEQ ID NO: 1288 - protein, 226 aa, Zea mays
  misc_feature: Ceres CLONE ID no. 457404
  misc_feature: Ceres CDNA ID no. 25446655
MVKAKARVRYEPGPAFEEVKEEAMLDISPTDSTEFWLIQWPKDQIDVLDFHGKEVSLKLHSDGNLGNLENSSGKSYEIASFAAQKPDATVFLPSGSETKPVGKISRRVSLVRYPKPEEFTKPSFGSLTPSIKKSAGSKKTMSRFTGASKNPSSQGSALSLGQRSAEPTPKHKGKRKDESSLGHSNVSGKATEGSEARGAGSNTASEMPQSPPEKSKKRRKKDKIVE

SEQ ID NO: 1289 - DNA, 824 bp, Zea mays
  misc_feature: Ceres CLONE ID no. 457729
  misc_feature: Ceres CDNA ID no. 25445919
  CDS (142)..(537): REFERENCED BY SEQ ID NO: 1290
agacggcagcgcacacattcacttggccttggcttttgcctttgtgctgtgacttgcaaggaacgtcggcgagagggccgggcaggcaggcaggcgcacatcacagactcctcctcgcccaccggccggccggcgctcccgatggcgtccaggtgcttcttccccagggacgctgccgccgccgaccacccgcagtccaaggcggcggcggcccaggccctcgagcggctgcaccacggcgggcgcctcctgtccagggaggacgtcgggggcgcggtgcgcgtcaagatcgtcgtcagcaagcgcgagctcaagcagatggtcgcggcgctcggcgacggcggtctggtggccgcggccagcagcgagcgccaccggcagcgcgcggcggcagcggcagggccgggcgccgagcagaggctgcagtcgctgcggcggcgcagcgtgcggcgggcggccgaggctgccgcgcggcggatgcaggcgggcggggagtgggagcccggcctgcagagcatccccgaggaggtttgctgatgactaccgctctctaccactaccagaccagtagatgatgatggcgtggcgtccttctctttcatggctagtagtagtagtagcagtaatctcttgactaattgtggcttgggtacgttttgatccatcacttgcctcgctgctgctaaaagcgcgctaggagatgtatggtgttgtacagcgctgttctcgttctgctctgggctatccttatcatcggcccagtacggctgcttcttgatgtagtttctgcgtacgttttgccctaaataaaaaaaaaaaaaaaa

SEQ ID NO: 1290 - protein, 131 aa, Zea mays
  misc_feature: Ceres CLONE ID no. 457729
  misc_feature: Ceres CDNA ID no. 25445919
  misc_feature: Homolog of GI Number: 66776103 NR Desc: LigA
  misc_feature: Homolog of GI Number: 66780099 NR Desc: PE
  misc_feature: Homolog of GI Number: 66776365 NR Desc: PE
MASRCFFPRDAAAADHPQSKAAAAQALERLHHGGRLLSREDVGGAVRVKIVVSKRELKQMVAALGDGGLVAAASSERHRQRAAAAAGPGAEQRLQSLRRRSVRRAAEAAARRMQAGGEWEPGLQSIPEEVC

SEQ ID NO: 1291 - DNA, 795 bp, Zea mays
  misc_feature: Ceres CLONE ID no. 457774
  misc_feature: Ceres CDNA ID no. 29191486
  CDS (72)..(452): REFERENCED BY SEQ ID NO: 1292
gagaaggacaatcgcgtcccaccgccgctgcacaagacgaggaagaggttcccggtcccggcgccgccactatgtcgtcgatgatgaacgcgctgtcaaactggctggtgaacccgcgccgcaacccgctcgcgcgcctccacatgcacaccgtctcctcgcgcctcaggaaatacgggctgaggtacgatgacctgtacgacccctacttcgacctggacatcaaggaggcgctcgggaggctgcctagggaggtggtcgacgcccgcatccagcgcctcaagcgcgccatggacctctccatgaagcatcagtacctccccgaggacctccaggcacagcaggtcccattcagaggatatttgagtgacatgttggctctggtgaaaaaggaaaacgctgagcgtgaagcactgggagcccttccactctaccagagaacgcttccctaaatcgctggctaaacatggttgcaagtcttctctttacggcaaatcagaatgcatgcaataaaatgcagtgggtgttttttttggttccaaccaaagttacattttacttgtccacgcagtggtgcattgaccatgcgctctacctgtttttttttcttccgattaatgggagcaaattattgtaacactataattaacttgtgaatcttcagctgcgggtggctgacgtagtgttctttgatcgtgattttttgtatccattgagctttttttcgaggttgacactggctctacggccttgtattaagaactagctcagttgaacaaaaaaaaaaaaaaaaaa

SEQ ID NO: 1292 - protein, 126 aa, Zea mays
  misc_feature: Ceres CLONE ID no. 457774
  misc_feature: Ceres CDNA ID no. 29191486
  misc_feature (11)..(114): Pfam Name: UCR_14kD PFAM Desc: Ubiquinol
  misc_feature: Homolog of GI Number: 50919263 NR Desc: putative ubiquinol
  misc_feature: Homolog of GI Number: 633681 NR Desc: ubiquinol
  misc_feature: Homolog of GI Number: 15239430 NR Desc: ubiquinol
  misc_feature: Homolog of GI Number: 12642870 NR Desc: putative ubiquinol
  misc_feature: Homolog of GI Number: 30689398 NR Desc: ubiquinol
  misc_feature: Homolog of GI Number: 19075864 NR Desc: ubiquinol
  misc_feature: Homolog of GI Number: 50731732 NR Desc:  similar to Ubiquinol
  misc_feature: Homolog of GI Number: 190804 NR Desc: ubiquinone
MSSMMNALSNWLVNPRRNPLARLHMHTVSSRLRKYGLRYDDLYDPYFDLDIKEALGRLPREVVDARIQRLKRAMDLSMKHQYLPEDLQAQQVPFRGYLSDMLALVKKENAEREALGALPLYQRTLP

SEQ ID NO: 1293 - DNA, 835 bp, Zea mays
  misc_feature: Ceres CLONE ID no. 458119
  misc_feature: Ceres CDNA ID no. 40350986
  CDS (167)..(733): REFERENCED BY SEQ ID NO: 1294
gggcccggcagtcccacaagatcacagcacatacgcttcctccattccactcggccgcgaccgcgaccgcgacggcgagcgaggggccgaggtgggacgccgcgccgcttctgcagaaagaaaaaggccaggactcttgatttgctcctcgcgggggttcggtcccatggcggcagctgcgctggcaatggcagagcaggtggtggccgagctccgagtgaggtgtgagacgccgccgtcgatgctgcgcgaggtggccgtggagatggcccgcgagatgggcgcggggctggagaaggacggcgggagcagggtcaagatgctcctctcctacgtcgataagctccccacagggagagaggaaggattattctatggattggacctaggaggaacgaatttccgcgtcttgaaagtgcaactaggtgggaatgcgaagcatgtcgttgaccgtgactccagagaagtcggcattccgccacatctgatgtcagggagctcctcggagctttttggtttcattgcttctgaattggccaagtttgttgacgatgatgagaagtgcgctaacatttcgaatggcaagaagcgagaaatagggttcacgttttcgttcccagtgaagcagcgttctgtagcttccggtacgcttgtcaagtggacaaaggcattttccattaatgatgctgtaggcgaagatgtggtggctgaactgcaaacacgacggttttaggtccaatttgtgaaggtctcaagaattcccggatgtatggttttctgaaagccaatggcccaaggaaacgttgccactttatttccaaaaaaaaaaaaaaaa

SEQ ID NO: 1294 - protein, 155 aa, Zea mays
  misc_feature: Ceres CLONE ID no. 458119
  misc_feature: Ceres CDNA ID no. 40350986
  misc_feature (1)..(155): Pfam Name: Hexokinase_1 PFAM Desc: Hexokinase
MAREMGAGLEKDGGSRVKMLLSYVDKLPTGREEGLFYGLDLGGTNFRVLKVQLGGNAKHVVDRDSREVGIPPHLMSGSSSELFGFIASELAKFVDDDEKCANISNGKKREIGFTFSFPVKQRSVASGTLVKWTKAFSINDAVGEDVVAELQTRRF

SEQ ID NO: 1295 - DNA, 2373 bp, Zea mays
  misc_feature: Ceres CLONE ID no. 458166
  misc_feature: Ceres CDNA ID no. 40041223
  CDS (249)..(2249): REFERENCED BY SEQ ID NO: 1296
agattgaatgatcatttcatcctcgcagtcgcagacatacattgtcccgttctctcgcggcgggcgcctgacgatctcgtcctccgcgtccgccctcctcgttgcccacgcacgcctgaaggcgacggcggcgctggctgcgcggaggaagcccgagcggacattccgtttgctcgcaggccggattgcaaggccccctctcccaaattgcaaggatagtcaggaagctaattaacagtgttcgaaagatggtccaccgcgagccggccgaggcggcggcggcggcagcagcaggaggcgagaccagcatctctacgcagcctccctcatcatcccagcaggctgcgccaccaccggccgtgttagtgtacaaggtcgggtatcctccccggaggagcctggccacggagttcaccagcacgctgagggagaccttcttccacgacagcccgctgaagcagtgcaaggaccagtccgtgtccacgaagctccagatgggcctgcagctcttgttcccggtcttgggttggggcaggacctacagcctgagcatgttcaagggcgatctcgttgccgggctgacaattgcgagcctctgcattccccaggatattggctactcgaagctcgcgtatttggatccggagtacgggctctactctagcttcgtccccccgttgatatacgctgcgatgggtagctccaaggacatagcgatcgggccagtcgcagtggtctctcttctgctaggttcgcttctgcagaaggaggctgaccacgacaaggacagggaggaatacctgcgccttgcgtttacggcaaccttcttcgctggcatcactcaagcagctctgggattcctgaggctaggtttcctcatcgacttcctgtcgcacgccgccatcgttgggttcatggggggagcggccgtcactattgccctgcatcagctcaagtatgtgctcggcatcaggagcttcaccaaggaaaccgatatagtctccgtcatggagtctgtctggggttcagttcgtcatggatggaactggcagacagttgcgattgccttcacgttccttgcttttcttctgcttgccaagtacattgggaaaaggaacaagaagtatttctgggtgcctgctatcgctcctgtaacttcggttattcttgccacccttttcgtgtacctctttcgcgctgacaagcaaggtgttcagattgtgaacaagatcaaaaagggcgtcaacccgtcatctgtgcacaagatctacttcaccggtccattcgtcgcgaaagggttcaagatcggcgctgtttgcggcatgatcggcttaacagaagccgttgccatcggaaggacgttcgccgccatgaaggactaccagctagatgggaacaaggagatggtagcacttgggacgatgaacatcgtaggctcaatgacgtcttgctacatcgcaacaggctctttctctcgctcggcggtcaacttcatggccgggtgccggacgccagtgtccaacgtggtcatgtccacggttgtgctcctcaccttgctgctcatcacgccgctgttcaagtacaccccgaacgcgatcctgggctcgatcatcatctctgccgtcatcggcctcgtcgactacgaggcggcgatcctcatctggaaagtcgacaagatggacttcgtcgcctgcatgggggccttcttcggcgtggttttcaagtctgtcgagataggcctcttgattgctgtgtcaatctcgtttgccaaaatacttgtccaagtaacaagacccaggactgtgctgctgggaaaccttccaggcaccacgatctacaggaacacggagcagtatccgcatgcgaggcatgttcctggggtggtcatagtcagggtggattctgccatttacttctccaactccaactatgtccgagagcgaatccttaggtggttgacggacgaagaagatagagtcagcgcagaggggctccctagaatcagtttcttggtagtagagatgtcacctgttatagatatcgatacgagtggtatccatgcccttgaagacctgtacaagaatctccaaaagcgaggcattcagcttctcttatcaaaccctggctctgccgtgattgaaaagctccagtcgtccaaactcaccgagcacatcggaaatggtcatatcttcctcacggtcgcagacgccgtgcgtttctgcacttccaagtcgatgcaggagccttgaactgaaatggatttgtttgcgtccacattctgttctctaatctctactgtatacgttatgtatcatgtattcatgtaatcagaataatatacatatgcaagtttacaaaaaaaaaaaaaaaaaa

SEQ ID NO: 1296 - protein, 666 aa, Zea mays
  misc_feature: Ceres CLONE ID no. 458166
  misc_feature: Ceres CDNA ID no. 40041223
  misc_feature (202)..(513): Pfam Name: Sulfate_transp PFAM Desc: Sulfate transporter family
  misc_feature (536)..(654): Pfam Name: STAS PFAM Desc: STAS domain
  misc_feature: Homolog of GI Number: 72384417 NR Desc: 4D11_19
  misc_feature: Homolog of GI Number: 50920451 NR Desc: Putative sulfate transporter
  misc_feature: Homolog of GI Number: 50920445 NR Desc: Putative sulfate transporter
  misc_feature: Homolog of GI Number: 14484936 NR Desc: high affinity sulfate transporter
  misc_feature: Homolog of GI Number: 607186 NR Desc: high affinity sulphate transporter
  misc_feature: Homolog of GI Number: 45720461 NR Desc: plasma membrane sulphate transporter
  misc_feature: Homolog of GI Number: 4850271 NR Desc: putative high affinity sulfate transporter
  misc_feature: Homolog of GI Number: 50945579 NR Desc: putative high affinity sulfate transporter
  misc_feature: Homolog of GI Number: 55296351 NR Desc: putative sulfate transporter Sultr3
  misc_feature: Homolog of GI Number: 20162449 NR Desc: putative sulphate transporter
MVHREPAEAAAAAAAGGETSISTQPPSSSQQAAPPPAVLVYKVGYPPRRSLATEFTSTLRETFFHDSPLKQCKDQSVSTKLQMGLQLLFPVLGWGRTYSLSMFKGDLVAGLTIASLCIPQDIGYSKLAYLDPEYGLYSSFVPPLIYAAMGSSKDIAIGPVAVVSLLLGSLLQKEADHDKDREEYLRLAFTATFFAGITQAALGFLRLGFLIDFLSHAAIVGFMGGAAVTIALHQLKYVLGIRSFTKETDIVSVMESVWGSVRHGWNWQTVAIAFTFLAFLLLAKYIGKRNKKYFWVPAIAPVTSVILATLFVYLFRADKQGVQIVNKIKKGVNPSSVHKIYFTGPFVAKGFKIGAVCGMIGLTEAVAIGRTFAAMKDYQLDGNKEMVALGTMNIVGSMTSCYIATGSFSRSAVNFMAGCRTPVSNVVMSTVVLLTLLLITPLFKYTPNAILGSIIISAVIGLVDYEAAILIWKVDKMDFVACMGAFFGVVFKSVEIGLLIAVSISFAKILVQVTRPRTVLLGNLPGTTIYRNTEQYPHARHVPGVVIVRVDSAIYFSNSNYVRERILRWLTDEEDRVSAEGLPRISFLVVEMSPVIDIDTSGIHALEDLYKNLQKRGIQLLLSNPGSAVIEKLQSSKLTEHIGNGHIFLTVADAVRFCTSKSMQEP

SEQ ID NO: 1297 - DNA, 786 bp, Zea mays
  misc_feature: Ceres CLONE ID no. 458213
  misc_feature: Ceres CDNA ID no. 29191390
  CDS (157)..(576): REFERENCED BY SEQ ID NO: 1298
aatgttcttcttccctggttagtactagctagtagtcatcgtggtcgtccctctctctctccccttccctccactactatatataccaaacaaattcgttcggaggggagaccggcaggccatggctcgacgccgcccttgagtcctgcccccaagatgacgatgatccccctcgccggcttcaccgccctatctgccgccggcctcctgctcatcttctcctccttcctgctgcaaactcaagcaggaggagccagaagcagcgaggaggagcggtacgtgccggtgcgcagggtggtgtaccggtccatgacaccggcggcggcgagtgcggcgacgacggcagaggcagcggcagcggcggcatcgtacgagccgttcgaggtgtgcgaggggtgccggtgctgcgcgccgtcgtcgtcgtcgtccaacggcagcagcagctgcgtggacacgagctgctgctacgccatcgactgcgacctccccggcaagcccttcggcacctgcgccttcaccccgcaaacctgcggctgcggcggcgccagcagcaactgcacccagccctcgtcctgatgatgactcctctttcctgcaacttggctacttcttctggatcatccatcgtcttacgttacgttacgattagatcgcagattagatgactcacgtcacgtactccatcatgatggatagattatccagttaattcccagctagcgttctgcgtgaagttaataatacaatgaataataatgtgtgttcgtttcaaaaaaaaaaaaaaaa

SEQ ID NO: 1298 - protein, 139 aa, Zea mays
  misc_feature: Ceres CLONE ID no. 458213
  misc_feature: Ceres CDNA ID no. 29191390
  misc_feature: Homolog of GI Number: 34906984 NR Desc: P0413C03.15
MTMIPLAGFTALSAAGLLLIFSSFLLQTQAGGARSSEEERYVPVRRVVYRSMTPAAASAATTAEAAAAAASYEPFEVCEGCRCCAPSSSSSNGSSSCVDTSCCYAIDCDLPGKPFGTCAFTPQTCGCGGASSNCTQPSS

SEQ ID NO: 1299 - DNA, 606 bp, Zea mays
  misc_feature: Ceres CLONE ID no. 458321
  misc_feature: Ceres CDNA ID no. 40350987
  CDS (116)..(361): REFERENCED BY SEQ ID NO: 1300
ctttttcatctccgcgtgcaccaacgagcaataataccgtgtgtgaggagatcccgtgaggagagtgttaagggaggctgccattggtgattcgagttccctaggagtctcggccatgattgtgacctgggggaagtccacggaacacgacgggtgtgttcgcgaagaaatcaagggcagagcatctgggcggcgtggcggattcctcatcggcgtgcgctgctcgtcgctgggccgccattcctcgtcggtggagcatgacacttcacaatccgagcataagctattacgaggagcttcgtcttcacgatgtaagtcttttcctcatgataaaggcatacaagatgaaaatatgatctaaggataataagaataaataccgaagctatcgctagattgatagcttcggctcgtaatcgagatgaagtatgatgatgatactgaccgaagggggaaaagactacttagtccttaatgatttgttttacgatcataagtgaatattggggacataaatgtacttttatccgggctgcgtctcgtgcctataaatagatgaacagtagcaccgtactgttcacgctaatttgaaaaaaaaaaaaaaaa

SEQ ID NO: 1300 - protein, 81 aa, Zea mays
  misc_feature: Ceres CLONE ID no. 458321
  misc_feature: Ceres CDNA ID no. 40350987
MIVTWGKSTEHDGCVREEIKGRASGRRGGFLIGVRCSSLGRHSSSVEHDTSQSEHKLLRGASSSRCKSFPHDKGIQDENMI

SEQ ID NO: 1301 - DNA, 489 bp, Zea mays
  misc_feature: Ceres CLONE ID no. 458422
  misc_feature: Ceres CDNA ID no. 36707105
  CDS (3)..(392): REFERENCED BY SEQ ID NO: 1302
atcaaggaacagtgcaaactagaagaaacctccgtcatcagcgacctctccccaacggcgccgacgatggcgcaacagcagacgcagctaaccactggctcgggcatcctggatgccgtcccgctcttcgtcgtcatcctcctcgcggcccacgtcctggccctcgtgttctggatgtacaagctggcttccgagaagcaaccaccccggaggaagacacagtgacggcgccgatctacgccatcggcgatccttcgctagcctctttatcggttccattttcatgtgaaccagtaccctccagaacattcaggccgtcaattattcagagatatccatatagtctttcaatttgttttatttatacttattgcattttgggtattgtttgataacaacttagcgatattctatgaatcactatccgtttgggtgataaataaatgttcctagttttagaccaaaaaaaaaaaaaaaaaaaaaaaaaaa

SEQ ID NO: 1302 - protein, 52 aa, Zea mays
  misc_feature: Ceres CLONE ID no. 458422
  misc_feature: Ceres CDNA ID no. 36707105
MAQQQTQLTTGSGILDAVPLFVVILLAAHVLALVFWMYKLASEKQPPRRKTQ

SEQ ID NO: 1303 - DNA, 842 bp, Zea mays
  misc_feature: Ceres CLONE ID no. 458648
  misc_feature: Ceres CDNA ID no. 25446401
  CDS (114)..(290): REFERENCED BY SEQ ID NO: 1304
attaccgccgcaacgcagcgcaagaaacaacgaactcatttctagaggcgaaagagcaaaacccttcagaaacccatcggagaagaggcggagggcgatcggagagcgggatcatggcggggccagttgcggcggtgacggaggcgtgggacaagctcaccgtgttcctgtactcccagctctacgacgagaggaactgggccaaaaacaagaagttggcgaaggctcttggtgtgttcgctggatccatcctgttcatgcgcacctgtggtgatatggtggccatctagggagccttcaccaacttcttgttttaggcccagggcgagtaccaggcggagcacgcggcgcagtgcgtcaaggacaccgccggagccgcggccgacagcgcgcagctgcagcagcaccgcgccaccggcaccgttgagcaggtggcgcagacgggccagggcgtggcggcaggcgtcaaggacacggtggcgggcgcggcggttggcgtcaccaacacggtggcgggcgtggcggcgggcgtcacgaacacggtgaccggcgcggtggcgggcgtcacgaacacggtgaccggcgcggcggcgggtgtcaaggacaccgtgaccggcggccactgatcgacgacccacccaagaatgctgcatgcatggccaagtgttgagggtttgagcccaaagatggcttgaatttccgtccttttttgctttattttttgacattattgttttaacatgtttcattcacccgtctctgattgggattgtgatcacgaccgcctgcaataaaaaaaggccatctttactatgatccacattaaaaaaaaaaaaaaaaaa

SEQ ID NO: 1304 - protein, 58 aa, Zea mays
  misc_feature: Ceres CLONE ID no. 458648
  misc_feature: Ceres CDNA ID no. 25446401
  misc_feature: Homolog of GI Number: 70878897 NR Desc: nucleolar RNA
  misc_feature: Homolog of GI Number: 1345540 NR Desc: glycine
  misc_feature: Homolog of GI Number: 19236 NR Desc: glycine
  misc_feature: Homolog of GI Number: 10954052 NR Desc: ovarian fibroin
  misc_feature: Homolog of GI Number: 68124303 NR Desc: nucleolar RNA
  misc_feature: Homolog of GI Number: 24667771 NR Desc: CG11458
  misc_feature: Homolog of GI Number: 50746777 NR Desc:  similar to nucleolar protein family A
  misc_feature: Homolog of GI Number: 1934994 NR Desc: SGRP
  misc_feature: Homolog of GI Number: 799015 NR Desc: putative glycine rich RNA binding protein
MAGPVAAVTEAWDKLTVFLYSQLYDERNWAKNKKLAKALGVFAGSILFMRTCGDMVAI

SEQ ID NO: 1305 - DNA, 758 bp, Zea mays
  misc_feature: Ceres CLONE ID no. 458703
  misc_feature: Ceres CDNA ID no. 40350988
  CDS (283)..(477): REFERENCED BY SEQ ID NO: 1306
ataccacaccatgtgatgcgaggagcctcttctgcctctcatccccctacttccaagatgcaatcatgctgccccagactcctcgggccctcggccaccatgattgcctcaccgcctctcaggagtcgcctccacctacttccaagaggaagaggccggagaagctatagtccatgaggaaattatgcggaggggcggcggccggtgaacgaggggccggaggaggaggagagagaaggggaggtggcagaaaaagctagagagagagagagacagagatgcatggtgcatggcatgatgatggcgtggttgatctattcgatccagtacttctgtgatcattcgagtcaagaagccatcatcagatcggtgcagttctccctcctccttccagctcctcctcagcttctttgtaacactgcgcccgccatggctttggggaatcaagcgtcttggtccgaaatccttctttcctagctaggaactacgtacttgtacgtgcaagagtatgtatgttatccctgcatgttcttattctgtctctatatatggtttatgcagacagagcaagattcgttcgtcttgattgatttgtttccatcactctttgattcagagtttgattcatgtaatattttgttagttatgtggatttcttctttgagctttttctatagctgaggaacctcgttcagagatcagtttgacgcaatgtgttgcatgattggtctatgatccgaataaaaaaaaaaaaaaaa

SEQ ID NO: 1306 - protein, 64 aa, Zea mays
  misc_feature: Ceres CLONE ID no. 458703
  misc_feature: Ceres CDNA ID no. 40350988
MVHGMMMAWLIYSIQYFCDHSSQEAIIRSVQFSLLLPAPPQLLCNTAPAMALGNQASWSEILLS

SEQ ID NO: 1307 - DNA, 506 bp, Zea mays
  misc_feature: Ceres CLONE ID no. 459131
  misc_feature: Ceres CDNA ID no. 29191391
  CDS (81)..(341): REFERENCED BY SEQ ID NO: 1308
tttctcgtttctgccccctctgcttgcccccctttcatctcaggcgtcgaagagagagagccaggaagaggagggcgacgatggcgtccggctggggcatcaacgggaacaagggccgctgctacgacttctggctggagttcagcgagtgcatgagccgctgccgccagccctccgactgcggcctcctccgcgaggactacctcgagtgcctccaccactccaaggagttccagcgcaggaacaggatctacaaggaggagcaacgtcagatcagagctgctgctcgtaaggccaaggaggaagctgagggtgcccctgctgttgcagcacaccattagtctccctgtctattttttgtgttgttgttttctgttaactcatctttggttcagttatgatgctaagggcaaggcaataatctccagctgttggactacacagattttttcccccatgacttaaatatcaagactcattttgtgctaccaaaaaaaaaaaaaaaa

SEQ ID NO: 1308 - protein, 86 aa, Zea mays; identical to SEQ ID NO: 356
  misc_feature: Ceres CLONE ID no. 459131
  misc_feature: Ceres CDNA ID no. 29191391
  misc_feature: Homolog of GI Number: 50948425 NR Desc: putative fiber protein Fb14
  misc_feature: Homolog of GI Number: 66271051 NR Desc: Fb14

SEQ ID NO: 1309 - DNA, 558 bp, Zea mays
  misc_feature: Ceres CLONE ID no. 459243
  misc_feature: Ceres CDNA ID no. 29191366
  CDS (331)..(486): REFERENCED BY SEQ ID NO: 1310
agacgcaaagaagatcgagtctgcagcccacaccatagtgcgagcagattgcgtccaataggcgcaaagggagatgggggtggccgctggacgagcggcggccatggtggctgcggcggcggcggcggcggcggtgctgctgctgctcgcgggcggcgcgcacgcggactgctacgacgactgcttcaaggactgcatggccaggttcaagtccatgagagactactgcagctacgcgtgcgagaaggtctgcgatccggacgccacgctccagcgccccctcgccgttgtggggccagcagcagcgttggccgaccaccacctggaagtatgagtcaaccacagcgagcactctggtggcctaagtgtggtatcctccgacagcttgttctagatatgaatttgtgtaatgcttattatggctcgagccggttaaatggacaacggacctcatctttttttatgtttaccttgagaatcccgtaaaccattttgggtttctgaattgtctgttaaacgtaacatgcatatgttttgaagccaaaaaaaaaaaaaaaa

SEQ ID NO: 1310 - protein, 86 aa, Zea mays
  misc_feature: Ceres CLONE ID no. 459243
  misc_feature: Ceres CDNA ID no. 29191366
MGVAAGRAAAMVAAAAAAAAVLLLLAGGAHADCYDDCFKDCMARFKSMRDYCSYACEKVCDPDATLQRPLAVVGPAAALADHHLEV

SEQ ID NO: 1311 - DNA, 1850 bp, Zea mays
  misc_feature: Ceres CLONE ID no. 459379
  misc_feature: Ceres CDNA ID no. 40350989
  CDS (87)..(1679): REFERENCED BY SEQ ID NO: 1312
aacccagccgcccattgccggcattgctcgcagcgctagcttcttgcgctcatcactcgtctccgaccaagatcagcaaggacggcatggctctcgaagcagcgtacgactacctgcacgtcgccgtcgtccagtgcacgcccacacaagcagcagcagtcctcggcgtcctcctcctcctcgccatccggctagccgcggcggcgaggagctcgtccgcgacgtcccccaaatggaagcagcacaggctgccgccgacgcctccggggaagctccccatcatcgggcacctccacctcatcggctcccacccgcacgtctccttccgcgacctccacgccaagtacggccacaacgggctgatgctggtgcaggtcggcgccgtgcccaccatcgtggtgtccacgccgcaggccgccgaggccgtgctccgcacgcacgaccacgtgctggcgtcccgcccgcggaaccccgtcgccgacatcatccgctacaactccacggacgtggccttcgcgccgtacggcgagtactggcgcacggcgcggaaggtggtcaacacgcacctgctcagcgccaagatggtcttctccaagcggcgggagcgggaggaggaggtgcgcctggtggtggcgcggatccgcgacgctgccgaggcgtccccggggacggcgctcgacatgacggagctgctgggcggctacgccagcgacttcgtgtgccgcgccgtgctcggcgagtcccaccggaagcagggccggaacaagctgttccgggagctgacggagaccagcgccgccctcctgggcgggttcaacgtggaggactacttcccgaagctggcggacgtggacctgttcctccggatcatctgcgccaaggccaagggcgtcagcaagcggtgggacagcctcttcaacgagctgctgtccgagtacgcgctctccggcggcaagcagggcgaccacaactctgaagacttcgtgcacctcttgctgtcgctgcagaaagactacggtctcaccacggataacatcaagggcatacttgtgaacatgttcgaagcagccatcgagacatcattcctggtgctggagtactccatgagcgagctgatgaacaaccgccacgtcctggccaagctccagaaggaggtgaggacggcgacgcccgacggccgcatggtgatggaggaggacctgagccggatgccatacctgaaggccaccatcaaggagtccatgcgcatccacccgccggcgccgttcctcctgccgcacttctccacccacgactgcgagatcaacggctacaccatccccgccggcacgcgcgtcatcgtcaacgcgtgggcgctcgccagggacccgacgtgctgggacaaggccgaggagttcttcccggagcgcttcctggaacaaggccgcgacgccgaggtcgacatgtacggcaaggacatccggttcgtgccgttcggggctgggcgcaggatctgcgcgggggccacgttcgccatcgccaccgtcgagatcatgctcgcgaacctcatctaccatttcgactgggagatgcccgccgagatggagcgcaccggggccaaggtggacatgtccgatcagttcgggatgacgcttcgccggacgcagaaactttatcttgttcctagaattcccaaatgagtgtcgtcgtcgtcgtacaaatggcatgcatcttattgtaagttttggagtttgttgttgcacacgcaacgatggaccgcctgtgatatctttaataaatgtaaccgcagataataatgaaataaaaagaacgcatggctattgtattattataaaaaaaaaaaaaaaaaa

SEQ ID NO: 1312 - protein, 530 aa, Zea mays
  misc_feature: Ceres CLONE ID no. 459379
  misc_feature: Ceres CDNA ID no. 40350989
  misc_feature (56)..(526): Pfam Name: p450 PFAM Desc: Cytochrome P450
MALEAAYDYLHVAVVQCTPTQAAAVLGVLLLLAIRLAAAARSSSATSPKWKQHRLPPTPPGKLPIIGHLHLIGSHPHVSFRDLHAKYGHNGLMLVQVGAVPTIVVSTPQAAEAVLRTHDHVLASRPRNPVADIIRYNSTDVAFAPYGEYWRTARKVVNTHLLSAKMVFSKRREREEEVRLVVARIRDAAEASPGTALDMTELLGGYASDFVCRAVLGESHRKQGRNKLFRELTETSAALLGGFNVEDYFPKLADVDLFLRIICAKAKGVSKRWDSLFNELLSEYALSGGKQGDHNSEDFVHLLLSLQKDYGLTTDNIKGILVNMFEAAIETSFLVLEYSMSELMNNRHVLAKLQKEVRTATPDGRMVMEEDLSRMPYLKATIKESMRIHPPAPFLLPHFSTHDCEINGYTIPAGTRVIVNAWALARDPTCWDKAEEFFPERFLEQGRDAEVDMYGKDIRFVPFGAGRRICAGATFAIATVEIMLANLIYHFDWEMPAEMERTGAKVDMSDQFGMTLRRTQKLYLVPRIPK

SEQ ID NO: 1313 - DNA, 1007 bp, Zea mays
  misc_feature: Ceres CLONE ID no. 459382
  misc_feature: Ceres CDNA ID no. 29191392
  CDS (227)..(709): REFERENCED BY SEQ ID NO: 1314
gaaggcacacagccgccgccgtttcttctcccatcatcttcctcgcagcgccggcgctccatctcccgctcccttccttactcgcgctcggcacacaggcggcggcgctcgggctcgggctctcagggacggcgtcagcggcttaccctcgcgccctccggtcctccgcacaccggccggtgaccctgcgacaacattgcatctgaactgcattggatcctaagagatgatggatgagtcttttcttgataggatggtttcccaacttcggtcaacatgcaagtactacactggatatcccaaggacttagggcgatcaagaattataccattcacatctgagcgtcagtttgtgcagctattacatgaaggcaggcctgtagttgttgcctttactattaagtgcacatatacacagcatcttgataaagttctggaagaggccgcagctaaattttatccacatatcaagtttgtccgagttgagtgcccgaagtaccctgggttttgcctcacaaggcaaaggaacgaatatccatttgttgaagtattttacaacccagaacaggctgcaagcccaggaaagagcgtggatcctaacatcaccaagtattctgtaaaagtgctaccgttcaactatgaccaaagcgtgtatggatttcgagaatatttcaagaggcatggtttcaaatattctgaaacaaactagatctgttgttaaagatctgcctcaagagggagtcctagggacttgagtagcatgtggaggcagttgttgtatggagttgaaatggcgtgaggctctaatggggggtcttgactagttcattcgcgaatgcctgtcatgtacttattcatttgtatacgggctactgctcatgcctagagatttgattttccatacctatgaaccattggatttggacatttggtaatgttttacctctcaaagccaggagagagcaatttgcatcgtttttctccaaaaaaaaaaaaaaaaaaaaaaa

SEQ ID NO: 1314 - protein, 160 aa, Zea mays
  misc_feature: Ceres CLONE ID no. 459382
  misc_feature: Ceres CDNA ID no. 29191392
MMDESFLDRMVSQLRSTCKYYTGYPKDLGRSRIIPFTSERQFVQLLHEGRPVVVAFTIKCTYTQHLDKVLEEAAAKFYPHIKFVRVECPKYPGFCLTRQRNEYPFVEVFYNPEQAASPGKSVDPNITKYSVKVLPFNYDQSVYGFREYFKRHGFKYSETN

SEQ ID NO: 1315 - DNA, 1072 bp, Zea mays
  misc_feature: Ceres CLONE ID no. 459533
  misc_feature: Ceres CDNA ID no. 29191367
  CDS (254)..(823): REFERENCED BY SEQ ID NO: 1316
atttaacatccgaatccctgccccttcgcccttcccctccggccgcagccccttccctgccgctccggcctcctccgtcgggaccgccgacgacgcgccgcgcggaagcctgcgggtgagcgtccagatccacccgcccccttcggcattccccgccgctccagcctcctccgccgggaccgccgccgacgcgccacggggaaggcctgcggggatattgggtaagcagttgtgatcctgttctcttgctcggatgccgggttactatgacatcgatgacatcctcatggaggatgagcctatttcagttgttttccaagtaactgcaaatggtgttggcctgctagatcctggtgctgaaagtaactgtgtagacaagggcgccaaggtggacctcccattttggcttgcgcatgggctgctgtctctggaacaagctgtgtcaataaacccacctccatgcttcacacagaaaacttggaaggagatccaagctgatgcggcctgtgtggatttgagggttcgttgcccgtacttttatgagctaggatgcaagattgttcctttggtgagtgacaatagcattggcctgttcttgcgatatgcattcaccagtaggtacaaagaggttctaagtaagtcccacagttcttccatgatgacagtgcccaagttcgttccacgccttacaaaagaagaaactcgggtgtttgaatctgccagagaatcgatgactggtttcaagaaatggcgagcaggtgggatgagactgcaaaaggcttccattcttggccggaagaggaagacaaagctgcctgaatgagttttaaggtgatgtgcgctgctttgatttgctagcaccgtgagcaaagagaaaagtgaatggcagattaaatctggatgtactatgatctgctgtacattgtgcacttgtgtacagcagctctgatcagtccgtcctttgtaaggaaaatgaacaccgtcttaaatcatgatatcatgtttggagcaggtgtcatgattttcagcagggtatcttgaatgagtttgaaccaaaaaaaaaaaaaaaaaa

SEQ ID NO: 1316 - protein, 189 aa, Zea mays
  misc_feature: Ceres CLONE ID no. 459533
  misc_feature: Ceres CDNA ID no. 29191367
  misc_feature (4)..(167): Pfam Name: Psf3 PFAM Desc: Partner of SLD five
  misc_feature: Homolog of GI Number: 38566626 NR Desc: At1g19080
  misc_feature: Homolog of GI Number: 8778281 NR Desc: F14D16.22
  misc_feature: Homolog of GI Number: 72058951 NR Desc:  similar to CG2222
  misc_feature: Homolog of GI Number: 27694899 NR Desc: Flj13912
  misc_feature: Homolog of GI Number: 62859339 NR Desc: LOC548877
MPGYYDIDDILMEDEPISVVFQVTANGVGLLDPGAESNCVDKGAKVDLPFWLAHGLLSLEQAVSINPPPCFTQKTWKEIQADAACVDLRVRCPYFYELGCKIVPLVSDNSIGLFLRYAFTSRYKEVLSKSHSSSMMTVPKFVPRLTKEETRVFESARESMTGFKKWRAGGMRLQKASILGRKRKTKLPE

SEQ ID NO: 1317 - DNA, 635 bp, Zea mays
  misc_feature: Ceres CLONE ID no. 459592
  misc_feature: Ceres CDNA ID no. 36707650
  CDS (69)..(572): REFERENCED BY SEQ ID NO: 1318
acattagaaaaaagagccaaagaggagaacaccggccggcgaggtggacgaagcggcccgccgaggaaatggcgtcgatgcagagctggcgcaaggcctacggcgccatcaaggacaccaccaccgttagcctcgccaatctcaactccgacttcaaggatctggatgtggcgatcgtgaaggcgactaaccacgtggagtgcccgcctaaggagcgacacctgcgcagggttgttgcggcgacgtccatcaccaggcctcgggcagatgtcgcctactgcatccacgcgcttgcccgccgtcttgccaagacccgcaactggatcgttgctctaaaagcacttgtagtgatccatagacttcttcgcgagggtgatcctacatttcgagaagagcttctcaactttacacagaggggacggatcctgcaactttcaaactttaaggatgactccagtccaattgcttgggattgttctgcctgggtgcgcacatatggtttgtatttggaggaaaggttggggtacacatgggcattctgtaccagcggtggaaggcgccggcgacgatgacgaaccagtgtgtgttattattattagaagacaacgttgtatttctcaaaaaaaaaaaaaaaa

SEQ ID NO: 1318 - protein, 167 aa, Zea mays
  misc_feature: Ceres CLONE ID no. 459592
  misc_feature: Ceres CDNA ID no. 36707650
  misc_feature (29)..(167): Pfam Name: ANTH PFAM Desc: ANTH domain
  misc_feature: Homolog of GI Number: 34911436 NR Desc: P0431H09.18
  misc_feature: Homolog of GI Number: 56785152 NR Desc: clathrin assembly protein AP180 short form
  misc_feature: Homolog of GI Number: 4538923 NR Desc: predicted protein destination factor
  misc_feature: Homolog of GI Number: 50251206 NR Desc: synaptosomal
  misc_feature: Homolog of GI Number: 52077380 NR Desc: phosphoprotein
  misc_feature: Homolog of GI Number: 8778222 NR Desc: F10B6.32
  misc_feature: Homolog of GI Number: 53791879 NR Desc: destination factor
  misc_feature: Homolog of GI Number: 52075642 NR Desc: putative phosphoprotein
  misc_feature: Homolog of GI Number: 51090587 NR Desc: clathrin assembly protein AP180 short form
MASMQSWRKAYGAIKDTTTVSLANLNSDFKDLDVAIVKATNHVECPPKERHLRRVVAATSITRPRADVAYCIHALARRLAKTRNWIVALKALVVIHRLLREGDPTFREELLNFTQRGRILQLSNFKDDSSPIAWDCSAWVRTYGLYLEERLGYTWAFCTSGGRRRRR

SEQ ID NO: 1319 - DNA, 1269 bp, Zea mays
  misc_feature: Ceres CLONE ID no. 459715
  misc_feature: Ceres CDNA ID no. 29191856
  CDS (220)..(867): REFERENCED BY SEQ ID NO: 1320
acgccgcctctgacggacattttggctatcgcaggtcgcatagcaggccagcgccaggccccctcgtccccttcgtcctctactctcggctcctcgcagtcgctcactgcgtgcgccaaaagcagcagcagctccagccgtcgccgtctccactctccagtctccagcactgctccgcgcgcgccggatcgagggagggcaggcggacgaggaggagagatgagtctcttcgggcttggacgaaaccagaagacattccgccccaagaagagcgctccatcaggtagcaagggagcacagctccgaaagcacatagatgccactctcggcagtggaaaccttagggaagctgtgaggttgcctcctggagaggatatcaatgaatggcttgcggtgaatactgtggatttctttaaccaagttaatatgctgtatggcacactcacagaattttgcacacctgagagctgtccgacaatgacagctggcccaaagtacgagtacagatgggctgatggtgtgcagataaagaaacccatagaggtatcagcaccaaaatatgtggagtatctgatggattggattgaaggccagcttgatgatgaatccatatttcctcaaaaacttggcacgccatttccaccgaacttcaaggaagtagtaaatacaatattcaagcgattgtttcgggtctatgcccatacctaccactcccatttccagaagattgttagccttaaagaggaggcccatctcaatacctgtttcaagcacttcattctgtttacaaatgagtttggcctgattgacaagaaggagctggctccacttcaggagctcatcgaatccatcatcgttccttactgagaacacgaactgagaacacggtttgctgaacttggatacagagctcttaacgctgatgctgtgaaatttattctatttatgacagcactttactgcatagagcttattgttcccgttattagacacaaggacatgtcacatatgcgtgtatctgtgttgtttcttcctgatcatgctgaccatgcaagtactgtcatatcagctatagaacggcgatgataatgtactgcagaaagaaaaaaacacgagaaagctgagttggggctatccattgcatattggcacttatccagtatagaacagatctgcttctctttcttcttacaaacagaattaacttgttatttttaatggaatgaaataaatattcacgctttctgacatataaaaaaaaaaaaaaaa

SEQ ID NO: 1320 - protein, 215 aa, Zea mays
  misc_feature: Ceres CLONE ID no. 459715
  misc_feature: Ceres CDNA ID no. 29191856
  misc_feature (29)..(205): Pfam Name: Mob1_phocein PFAM Desc: Mob1/phocein family
  misc_feature: Homolog of GI Number: 38093736 NR Desc: putative Mob1
  misc_feature: Homolog of GI Number: 32470635 NR Desc: putative Mob1/phocein family protein
  misc_feature: Homolog of GI Number: 19309913 NR Desc: Mob1
  misc_feature: Homolog of GI Number: 82734181 NR Desc: Mob1
  misc_feature: Homolog of GI Number: 50399985 NR Desc: putative  Mob1/phocein family  protein
  misc_feature: Homolog of GI Number: 62147661 NR Desc: Mob1
  misc_feature: Homolog of GI Number: 31431893 NR Desc: putative F
  misc_feature: Homolog of GI Number: 73975379 NR Desc:  similar to Mps one binder kinase activator
  misc_feature: Homolog of GI Number: 57095868 NR Desc:  similar to MOB1
MSLFGLGRNQKTFRPKKSAPSGSKGAQLRKHIDATLGSGNLREAVRLPPGEDINEWLAVNTVDFFNQVNMLYGTLTEFCTPESCPTMTAGPKYEYRWADGVQIKKPIEVSAPKYVEYLMDWIEGQLDDESIFPQKLGTPFPPNFKEVVNTIFKRLFRVYAHTYHSHFQKIVSLKEEAHLNTCFKHFILFTNEFGLIDKKELAPLQELIESIIVPY

SEQ ID NO: 1321 - DNA, 431 bp, Zea mays
  misc_feature: Ceres CLONE ID no. 459902
  misc_feature: Ceres CDNA ID no. 29191883
  CDS (67)..(246): REFERENCED BY SEQ ID NO: 1322
agccgccgccagaccattcgtttctcgcgagccatcgcttctgtaattctcaggcatccggaagaaatggccaagtcgaagaaccacacggcgcacaaccagtcgttcaaggctcacaagaacggcattaagaaacccaagcgccaccgccagacctccaccaaggggatggaccccaagttcctgaggaacctgaggtattctaggaagggcaacaaaaagagtggtgaggctgaagctgagtagtaggaaggaaagcatggctttgtttcctctgtttttagctcagttccacctttaggacctggggttttgctaaagatggaacttaagtggtgttactgtatgatggcaaggaccttttgctgccgaaggttatgttttgaagttcatgctaccttttaaagtacggattaaaaaaaaaaaaaaaa

SEQ ID NO: 1322 - protein, 59 aa, Zea mays
  misc_feature: Ceres CLONE ID no. 459902
  misc_feature: Ceres CDNA ID no. 29191883
  misc_feature (4)..(42): Pfam Name: Ribosomal_L29e PFAM Desc: Ribosomal L29e protein family
  misc_feature: Homolog of GI Number: 34905656 NR Desc: P0475H04.11
  misc_feature: Homolog of GI Number: 30679956 NR Desc: 60S ribosomal protein L29
  misc_feature: Homolog of GI Number: 7959366 NR Desc: ribosomal protein L29
  misc_feature: Homolog of GI Number: 7549643 NR Desc: ribosomal protein L29
  misc_feature: Homolog of GI Number: 7549645 NR Desc: ribosomal protein L29
  misc_feature: Homolog of GI Number: 27764982 NR Desc: At3g06680
  misc_feature: Homolog of GI Number: 12231298 NR Desc: ripening regulated protein DDTFR19
  misc_feature: Homolog of GI Number: 72051829 NR Desc:  similar to 60S ribosomal protein L29
  misc_feature: Homolog of GI Number: 58388930 NR Desc: ENSANGP00000011508
  misc_feature: Homolog of GI Number: 61654674 NR Desc: L29
MAKSKNHTAHNQSFKAHKNGIKKPKRHRQTSTKGMDPKFLRNLRYSRKGNKKSGEAEAE

SEQ ID NO: 1323 - DNA, 825 bp, Zea mays
  misc_feature: Ceres CLONE ID no. 459929
  misc_feature: Ceres CDNA ID no. 40350990
  CDS (98)..(667): REFERENCED BY SEQ ID NO: 1324
accggttctatccctgcgctgccattgctcgtccgcatcctccttggatttccctcccaggctgatgtgagctgtgcaggaaggttagggttttctgatgcgctcatacatggggcagcaagaagatgggatgtctgatggcttgtacacttacaagcatcaccgcgagcgaggagctgatatccacaccatctttgtgaagaagagcaaattcaggattctgctgtcatttatcggcacaacgttccttcttgtgtctgtttgctgcgccctgttatcgaaggatggtttatgtctttgttccctttggagcatttcatttgccagtgtaattgcgaaatgcctgcgatgtgaccctgtgaagaaagagtcattggtgatcatgccgacttttggaattcaattagagcaacacttttggagtggaagagttcatcgcaaatttgtgcccattggcaagattctaagaccagtgctgaatgagcatgtgacccctgtctcatgctactggagcttggccttgcttgtacgcgaagaatatgagctcatgcttgttttcaagagcttgaatccaccagtcaagatgttggttccaatctggaaagcgttatgtgcattcgtagactccaattctctgggcaattctgcattgcctcaacccacatgaacatgcttaaacaagttggtgggtggctgtgtgcagccccgatgataattcgaacatatggttcgctgaagactttgctgactgacaacataatgttgagtttcgatacaaatgatgatggaaggtacggaatgttaccgacaaaaaaaaaaaaaaaa

SEQ ID NO: 1324 - protein, 189 aa, Zea mays; identical to SEQ ID NO: 890
  misc_feature: Ceres CLONE ID no. 459929
  misc_feature: Ceres CDNA ID no. 40350990

SEQ ID NO: 1325 - DNA, 683 bp, Zea mays
  misc_feature: Ceres CLONE ID no. 459997
  misc_feature: Ceres CDNA ID no. 29191380
  CDS (117)..(392): REFERENCED BY SEQ ID NO: 1326
caaaaaaatcaattctccagaccctccccggcaaccgcgtccggccgtccgcttccgtttccttggataaccacgacgcccgccggcaagcgaaagcgaagcgagccaacccagccatggagaaggcgatcgatcggcagcgggtcctcctggcgcacctcctcccctccccctccgccgcctcctcgcagcctcagcttgcggcgtcggcgtgcgcggccggggacagcgccgcctaccagaggtcctcctccttcggggacgatgtcgtcgtcgtcgctgcctacaggacgccgatatgcaaggccaagcgaggaggcttcaaggacacctacccagaggacctcctcactgttgttctcaaggctgttctggacagggcagtgatgtgagcgagctgaccaggcttcaggcagagatggccctctagctgtctagcagtgatgtgatgtgagcgagctcggcgttgcgcctgtattgtacacgtgttttgctgtaaattcatcttgttctagaagacaagacacggcatagatgagagaatctggatggctgtctcgcgtcggtatccggcggacgatgccagccggcagaagcagtttgactttgacggtctcggattgcggtccattgttccaacagatacgatgcgatccattgcgatagcaaaaaaaaaaaaaaaa

SEQ ID NO: 1326 - protein, 91 aa, Zea mays
  misc_feature: Ceres CLONE ID no. 459997
  misc_feature: Ceres CDNA ID no. 29191380
  misc_feature (48)..(89): Pfam Name: Thiolase_N PFAM Desc: Thiolase
  misc_feature: Homolog of GI Number: 50915896 NR Desc: putative 3
  misc_feature: Homolog of GI Number: 393707 NR Desc: 3
  misc_feature: Homolog of GI Number: 7433647 NR Desc: acetyl
  misc_feature: Homolog of GI Number: 34597334 NR Desc: acetoacetyl CoA thiolase
  misc_feature: Homolog of GI Number: 16648799 NR Desc: At2g33150/F25I18.11
  misc_feature: Homolog of GI Number: 2981620 NR Desc: mutated 3
  misc_feature: Homolog of GI Number: 13194830 NR Desc: putative 3
  misc_feature: Homolog of GI Number: 31432470 NR Desc: putative thiolase
  misc_feature: Homolog of GI Number: 1129145 NR Desc: 3
  misc_feature: Homolog of GI Number: 7433645 NR Desc: acetyl
MEKAIDRQRVLLAHLLPSPSAASSQPQLAASACAAGDSAAYQRSSSFGDDVVVVAAYRTPICKAKRGGFKDTYPEDLLTVVLKAVLDRAVM

SEQ ID NO: 1327 - DNA, 1023 bp, Zea mays
  misc_feature: Ceres CLONE ID no. 460063
  misc_feature: Ceres CDNA ID no. 25892052
  CDS (206)..(766): REFERENCED BY SEQ ID NO: 1328
atatttcttccgcattgacggtggggcccgacgccggccacaccgccacagagagaaacgttaggacagactgactggttgagaattgagaaccaaaagaagagagaggaagacaggaagagagagagagagcgcgcgcttccaggtttttagctgcaggggaggccgatagttctgttctactggaggaggagcagagagcaagatggggtccggatctttcctcaaggtgctggccaagaacttcgatgtccttgccgggccactcatatcacttgcttatcctctatatgcttctgttagagcaatagagacaaaaaatcctgtagatgatcagcagtggctcacttactgggtgttgtactcatttgtcactttgtttgagctaacttttgctccaattatcgagtggtttccattttggtcatatgcaaaactgttctttaactgctggttggtcttaccttggttcaatggtgctgcttatgtttacgaccattttgtgcggccaatgtttgtgaaccgccgaatagtgaacatatggtatgttccaagaaatgagaagctaggtaaatctgatgatgtgctgtcagctgcagagagatatattgaacaaaatggacctgaagcatttgagaagctcatcagcaagtctaccaagtcttcaaaatcaagaagcacaaagcggtcgatcttggaggaggcagaggctgaaagagaatcatggggtgaaaatcccttctacgacaaaaattacagacactaaacctcttcaaaatccacctagcagcttgaagacaacctttgcccacgagcctcatgcaagctttttagttgcatcagactgaagacgaccttcccaaatttctgactctcagtatactataccttgttacattcactgccagtctgtcgctggacaatgatgagttctagagcaattgtggactgtgtttgtaaatggaggcagatgctagcgttgatcatttttcactgtacgtttctacaaaaaaaaaaaaaaaa

SEQ ID NO: 1328 - protein, 186 aa, Zea mays
  misc_feature: Ceres CLONE ID no. 460063
  misc_feature: Ceres CDNA ID no. 25892052
  misc_feature (7)..(104): Pfam Name: TB2_DP1_HVA22 PFAM Desc: TB2/DP1
  misc_feature: Homolog of GI Number: 51535536 NR Desc: putative abscisic acid
  misc_feature: Homolog of GI Number: 50912755 NR Desc: putative ABA
  misc_feature: Homolog of GI Number: 77551799 NR Desc: AtHVA22a
  misc_feature: Homolog of GI Number: 57012625 NR Desc: HVA22
  misc_feature: Homolog of GI Number: 53793732 NR Desc: putative TB2/DP1
  misc_feature: Homolog of GI Number: 53689738 NR Desc: P0431G06.4
  misc_feature: Homolog of GI Number: 57012624 NR Desc: HVA22
  misc_feature: Homolog of GI Number: 4884934 NR Desc: AtHVA22b
  misc_feature: Homolog of GI Number: 57012626 NR Desc: HVA22
  misc_feature: Homolog of GI Number: 57899745 NR Desc: abscisic acid
  misc_feature: Useful for making smaller plants
MGSGSFLKVLAKNFDVLAGPLISLAYPLYASVRAIETKNPVDDQQWLTYWVLYSFVTLFELTFAPIIEWFPFWSYAKLFFNCWLVLPWFNGAAYVYDHFVRPMFVNRRIVNIWYVPRNEKLGKSDDVLSAAERYIEQNGPEAFEKLISKSTKSSKSRSTKRSILEEAEAERESWGENPFYDKNYRH

SEQ ID NO: 1329 - DNA, 548 bp, Zea mays
  misc_feature: Ceres CLONE ID no. 460088
  misc_feature: Ceres CDNA ID no. 25446403
  CDS (102)..(344): REFERENCED BY SEQ ID NO: 1330
atcaaaaacaagcctccacagaactctccccgactttgccgtccactcccccgccgcagccgcgccgttcgccgggacaggagggatagtagagcaccaggatgccggcgacgccgacgatcatcggtgccctcctggggctgggcacccagatgtactcaaacgctctccgcaagctcccctacatgcgccatccatgggagcatttgttggggatgggtctcggtgcagtgtttgtgaaccagctggtaaagtttgatgagaagctcaaggaggacctcgacaagatgcttgagcgcgccaggctagccaacgagcagcgctacattgacgatgatgaatagatgcccagatttatttgccagcgacctgtattttttttgcaacatgttgtcagtacacatggccaggactgatgatcccccatcgtcttagttctctcagctttccgcatttcaactgtgatcttgtaataagatgtcggatctcatggattaccaatgtaatacaccaattatgggttcttgaataaaaaaaaaaaaaaaaaa

SEQ ID NO: 1330 - protein, 80 aa, Zea mays
  misc_feature: Ceres CLONE ID no. 460088
  misc_feature: Ceres CDNA ID no. 25446403
MPATPTIIGALLGLGTQMYSNALRKLPYMRHPWEHLLGMGLGAVFVNQLVKFDEKLKEDLDKMLERARLANEQRYIDDDE

SEQ ID NO: 1331 - DNA, 895 bp, Zea mays
  misc_feature: Ceres CLONE ID no. 460220
  misc_feature: Ceres CDNA ID no. 25446404
  CDS (2)..(553): REFERENCED BY SEQ ID NO: 1332
ctttttggctcatatgatagtcgccttgaaggttcaagctggtggacctcggagacaaccggcccaaccccgtctcggattgcacggcaccggtacccctcgcctaggtttaggcttccgaccgccgcagcgtccccgccacgaccacgagctaaagaaggtcgccggaagagggggcgcggagatgagcgggagcgcgttcaacgcgttcaagtcgcgggttccggtggcgtggagtccccggctgtacatcacgctggtgcggggcctccccgggacgcggcgcctccaccgccgcacgctcgaggccatgcgcctccgccgctgccaccgcaccgtcgagcaccgcaccacgccgtcgctcctcgggatgctcacccaggtgaagcgcctcgtcaccgtcgagaccgaggagatgtacaacgcgcggaagcaggccgaggcggagatgcgcgcgcccagacccccgctcgtcgtctcccaccagccacagccgccggctccgaagccggcagccgccgccgcggtgggtgccgctaccactgcgcagtagcctctggtgagctgctcctcgagtcccgatttcgtcctggtgcggtctggttttccattttgtttgtttgtccattcaagcgtttgatgcaatgactcaagtcagtgcgcgtagattggcagtcaatatacacaatgaaatgtcttagtttcctggtgggttattatagttcttccttagttctccatgtaacaaaatggaaggtgcagctctaaccacattagagcaactccaagagttagtctaaaattattagcctctcttggttgttggtgtgatttgctagagtatccaagcagctgatgtggatatatcaaaaaaaacaaaaaaagaaaaaaaaaa

SEQ ID NO: 1332 - protein, 122 aa, Zea mays
  misc_feature: Ceres CLONE ID no. 460220
  misc_feature: Ceres CDNA ID no. 25446404
  misc_feature (19)..(71): Pfam Name: Ribosomal_L30 PFAM Desc: Ribosomal protein L30p/L7e
  misc_feature: Homolog of GI Number: 50940403 NR Desc: ribosomal protein L30p family
  misc_feature: Homolog of GI Number: 54291078 NR Desc: ribosomal protein L30p
MSGSAFNAFKSRVPVAWSPRLYITLVRGLPGTRRLHRRTLEAMRLRRCHRTVEHRTTPSLLGMLTQVKRLVTVETEEMYNARKQAEAEMRAPRPPLVVSHQPQPPAPKPAAAAAVGAATTAQ

SEQ ID NO: 1333 - DNA, 829 bp, Zea mays
  misc_feature: Ceres CLONE ID no. 460383
  misc_feature: Ceres CDNA ID no. 29191368
  CDS (204)..(356): REFERENCED BY SEQ ID NO: 1334
ggagcaacaagctggagtagctagcaactcgagggatgaagactacctagatgatagactttctctttctgtgccactcataaaactgcagctagctagcaccttgttgccaagcaatgcaagatctctatgctgagatcgatctgaatacctaaaatatctatccgaccagtcatcatctcgatctaaagcaggataacaagatggcagaaacgttggacctggtttcaatgcacgaccatcggttcaaaatggcgaccttcgtcttctacgcaaacaaaactatcaccaaagcttcgcacacaagcttgcatggccacagtaccatcctaacctatgaatcggtgttatcctaattgagcttttctttttgtcaaaacatccttgacccctcttccctataggttggctcttacctccgtttttctggtttctcgtgccagaattaacattcttgaccttgtaaggccctccttctatgtctacatcctcctcgcatctcatgtttctttcttttctgctacatgcgggattagtctcatcattgccatgtttgccggtctcccgcgtctacctactttatgcttccttctatccctcctgagctagttgttgatcccatgtaataataaccatgtttggttgatataaaaaatgttagttttgtttggtggtgttgaaattatttctactttatagtaagagtagttcagtttgtgttatctccctatggatgctatgtaatgcatggacacacaagtgcaaacgtttgttgctcatttattttttattaaatgtcctcaagtttttagcaaaaaaaaaaaaaaaa

SEQ ID NO: 1334 - protein, 50 aa, Zea mays
  misc_feature: Ceres CLONE ID no. 460383
  misc_feature: Ceres CDNA ID no. 29191368
MAETLDLVSMHDHRFKMATFVFYANKTITKASHTSLHGHSTILTYESVLS

SEQ ID NO: 1335 - DNA, 1056 bp, Zea mays
  misc_feature: Ceres CLONE ID no. 460472
  misc_feature: Ceres CDNA ID no. 29191393
  CDS (60)..(767): REFERENCED BY SEQ ID NO: 1336
tccggggcccagatcctgcggcgaattccttccaactccaggatcgagagcacacgcagatggcgaggcacccgcgcgcgccgctgctccggcgtctgctcctcctggcggccctcgcggcctcctgctcctactacctcctcttcctgcaggcgcaggcctccgtcccgccgcggtacgacgggttcgcctacggcggcggcgccgcgacggcctggaaggacgccgtcctcgtcgaggcctttctcgaccccgacagccgcgacgcctggcagccgctgaagctcgccgtcgagcgatacgcgcctcgggtctcactcatcgtccacccgttcccactaccataccacacatatgcattctatgcctgccgcgcgctttacatagctaacaagttgaattcatcatcgacatatccattgctggagctgttcttcaagaaccaggaaaagttctacaattctgccacatcatctctctcgggcccttccgtagctctaggaatgtcgaagatggctgcgcagactgttggtaactcagtatccgagtttctgtcgggcttcagcgatgggaagacagactcggcagcgagagtttcattcaagtacgggtgcacgaggggagtctttggcgcgccgttcttctttgtgaatggcttcctccagcctgggggcggatcgcctatcgactacagcacgtggatcggcatcctagacccccttgcttcccagaacggtgaacggatcgagatgtttacttcgatgtaagtgattgaagtggccttgctacagaggatacggtcgtacagatgtttcgctagtgccgacggcggacaagcaaacagctattatgcaattgcaaactgtgtgtaagctctgcagtggtaaatagcatcccactttgctcgttgtactgttaagctagcagttgtgtgctagctagtatatcgggtaagtatgtgaagaagctcttgcattggagcctacgatatgttaaacttcgcatgatcctatattcacattcgctcttctccctgctaaaaaaaaaaaaaaaaaa

SEQ ID NO: 1336 - protein, 235 aa, Zea mays
  misc_feature: Ceres CLONE ID no. 460472
  misc_feature: Ceres CDNA ID no. 29191393
  misc_feature (58)..(216): Pfam Name: DSBA PFAM Desc: DSBA
  misc_feature: Homolog of GI Number: 50930901 NR Desc: OSJNBb0015G09.12
  misc_feature: Homolog of GI Number: 8778978 NR Desc: Contains similarity to pigpen protein from Mus musculus gbAF224264
  misc_feature: Homolog of GI Number: 8778813 NR Desc: T4O12.23
MARHPRAPLLRRLLLLAALAASCSYYLLFLQAQASVPPRYDGFAYGGGAATAWKDAVLVEAFLDPDSRDAWQPLKLAVERYAPRVSLIVHPFPLPYHTYAFYACRALYIANKLNSSSTYPLLELFFKNQEKFYNSATSSLSGPSVALGMSKMAAQTVGNSVSEFLSGFSDGKTDSAARVSFKYGCTRGVFGAPFFFVNGFLQPGGGSPIDYSTWIGILDPLASQNGERIEMFTSM

SEQ ID NO: 1337 - DNA, 672 bp, Zea mays
  misc_feature: Ceres CLONE ID no. 460713
  misc_feature: Ceres CDNA ID no. 29191394
  CDS (119)..(472): REFERENCED BY SEQ ID NO: 1338
acggctccacgtgacctcccaaacctagacctagttgtccttcctgttcaacctgcatagcggcggcgcgtcctgccttcagagagagagggagagagagcgcttgatctccgtaggcatggcatgggaggaggaggcggtagaagaggaggattacggggaggagatgtcggcttcggagtcggaggaggacgtcgtggtggggcagatgccgacggttatggtgccaaagcatatcaataagcggtccctgaagaacaaggcgctgtctgttaccctcgacaagaaagcgctcagggatttcgtgactgggttccacaagcggaagaaaaagagaagaaaggaggcgcagaagattttgcaggagaaggagaggaagaagaaaatacaagaccgcaagaggaggaaagaatttatcttatggtcatgtgctccactagaaggttgggtgtatgtatgcaagtatgtctgaacaatcttctctgcgctgcgctaaggtgtggacacctagagtgatcaccctctgggaggcatcgctgacagtcctgcagtatggactgcttctgctccatgcgtatgcacaggataaacggtggccatttgtgtcgatcccattgtacgatcccgattcctgaatgaatgcctttttcttttacaaaaaaaaaaaaaaaa

SEQ ID NO: 1338 - protein, 117 aa, Zea mays
  misc_feature: Ceres CLONE ID no. 460713
  misc_feature: Ceres CDNA ID no. 29191394
  misc_feature: Homolog of GI Number: 50911184 NR Desc: putative magnesium/proton exchanger
  misc_feature: Homolog of GI Number: 77552398 NR Desc: magnesium/proton exchanger AtMHX
  misc_feature: Homolog of GI Number: 77552397 NR Desc: magnesium/proton exchanger AtMHX
  misc_feature: Homolog of GI Number: 7487561 NR Desc: probable Na+/Ca2+ antiporter
  misc_feature: Homolog of GI Number: 20196969 NR Desc: putative Na+/Ca2+ antiporter
MAWEEEAVEEEDYGEEMSASESEEDVVVGQMPTVMVPKHINKRSLKNKALSVTLDKKALRDFVTGFHKRKKKRRKEAQKILQEKERKKKIQDRKRRKEFILWSCAPLEGWVYVCKYV

SEQ ID NO: 1339 - DNA, 525 bp, Zea mays
  misc_feature: Ceres CLONE ID no. 461350
  misc_feature: Ceres CDNA ID no. 25446407
  CDS (128)..(364): REFERENCED BY SEQ ID NO: 1340
agagccagccgccgtgcgctctcgctctccctctgtctgcgacgagacttggtgggctaccgccgctgccttcgccaggtgctgacgccttcgccgatcacttcgccggcgatagcactcaccaggaatgggcctgtggacattgctggagggttttttgcttcttgcaaatgcgttagcgatattgaacgaagaccgcttccttggtccaaggggatggagcatgtctgaagtatcaggaaacgggcaaaccaagtcgttcaagggccagatcgtggggcttatctacgctacacagtttctgcggatgcccttaattgctctcaacgttctcatcatcgttgtcaaattggtgtctggctgagcctgatgaattggtatctgttccacctttatgtaagagctaagagatcccaaagttaattgtactcaaggttgctgtaaatatgctgtttctgtttactctaatgtggatttctgttattgttgtcgtaaattaatttggtcagaaaaaaaaaaaaaaaa

SEQ ID NO: 1340 - protein, 78 aa, Zea mays
  misc_feature: Ceres CLONE ID no. 461350
  misc_feature: Ceres CDNA ID no. 25446407
  misc_feature: Homolog of GI Number: 72054408 NR Desc:  similar to immediate early response 3 interacting protein 1
  misc_feature: Homolog of GI Number: 73961688 NR Desc:  similar to immediate early response 3 interacting protein 1
  misc_feature: Homolog of GI Number: 24662435 NR Desc: CG32069
  misc_feature: Homolog of GI Number: 7705819 NR Desc: immediate early response 3 interacting protein 1
  misc_feature: Homolog of GI Number: 62858905 NR Desc: Ier3ip1
  misc_feature: Homolog of GI Number: 55647369 NR Desc:  similar to RIKEN cDNA C230094B15
MGLWTLLEGFLLLANALAILNEDRFLGPRGWSMSEVSGNGQTKSFKGQIVGLIYATQFLRMPLIALNVLIIVVKLVSG

SEQ ID NO: 1341 - DNA, 925 bp, Zea mays
  misc_feature: Ceres CLONE ID no. 461607
  misc_feature: Ceres CDNA ID no. 29191395
  CDS (339)..(734): REFERENCED BY SEQ ID NO: 1342
aggtgcccctgtttcggctacagtgcacattgctaaacgctcccgcagtcccgccgtctcgcaagccgccgccgggtccttacgcaagtccgcgacgtgcatcgcctggagaggctcccgtctcgccgccctgcggatctcatctcatctgtgcagccgcgcgtggcccaacggagccagaagcaaaggatcattagttcaaatccggtgcttgcgcgtgcaggccatgctacccatgcgtaaataaaaaggtttcacctgttgcatctgtcactctcgatatactcgcgctctaaaatctcgccctagttgaggacgaaccttattcttcaggtgatatgtcgtctgaggagggtgcgcaggtcacttgtttcacagaggatcttcacgatgtaacacttcactttcatatagtgaggttttctaaacagatatacgtgtgggttggatgcaacacagcaaagtttggccatttatatgctgctgcaaccactagaccggataacagagtgagtgttacctctgtactaggaggaacatctgataacaccggatcaagtatggctcgccgtctagtgctgaagaccggcctgaacatagtcctggcatgcaacatcccaaaggacagccccatacttgaggctgctgcggagaggaagctggttgagaagctgaaaggtttgggctacattaaaaccccagctgtggaggctaacacttcctcggcacaatgatccgtggtgtatctagtgagctttcggtcgacgtgtagcttcatcactacatgcagcagagagcggttgtgatttttcgcgggctttgactgtgctacctgttctctcatgtggcaaaggttattgtgaacatgttcgttgtgatgtactccgtcctaaaataaacccccttcgtaaaaaaaaaaaaaaaa

SEQ ID NO: 1342 - protein, 131 aa, Zea mays
  misc_feature: Ceres CLONE ID no. 461607
  misc_feature: Ceres CDNA ID no. 29191395
  misc_feature: Homolog of GI Number: 8778531 NR Desc: F21D18.10
  misc_feature: Homolog of GI Number: 57209354 NR Desc: chromosome 6 open reading frame 86
MSSEEGAQVTCFTEDLHDVTLHFHIVRFSKQIYVWVGCNTAKFGHLYAAATTRPDNRVSVTSVLGGTSDNTGSSMARRLVLKTGLNIVLACNIPKDSPILEAAAERKLVEKLKGLGYIKTPAVEANTSSAQ

SEQ ID NO: 1343 - DNA, 1008 bp, Zea mays
  misc_feature: Ceres CLONE ID no. 461787
  misc_feature: Ceres CDNA ID no. 29191396
  CDS (116)..(856): REFERENCED BY SEQ ID NO: 1344
acagaccacgccacgttcgcaattacagagatctagagagagagagagagagagagagagggcagatctacgctagagcgatagagccacaaccaaccgagagggacagtccagtatggtggtggcgctcgggcccggccggttctacggcagcggcctgccgaggccgcgcttcttcccgggcgaccgcgtggacccgccggcgtccgtcaccgacccgctgctcgagtgggcgcgcgaagcgcactggtccatgggcggcatcagcgtgaagcgcctccgcctgcagggccgcatcgagggctccgtcgacaagctccgccgccgcgcgcaccgcgatgccagggtcaaggccaaggccaaggcccgcgccgctggccacatgccggcttcgctcgccgcgcttgggtccgacgacgacgcctccagcggcgactccgaggacgagcaggaggtggcggcgcgggagcgggccctgaagcgtgagcttgtcgacgacgacgaggactccgacgggtccggcgagtcggaggaggacgagcccctcgcggccatcgtcaccgccgccaagaagaggcgcgcgaggaagctcagcgacgagttcgaccgcatcgccgcggagcagcagcagcagctggtgttggagagcaagcagaagccgggtgccgcgacgccggtgacgacgtcaacaaagaggaaggctaccgtgccgagggcttcgccaaagaggaaggcttctgtacccgctgctggggcgccggcgagggcgtcgccaaagaggaaggctgctgcaacagccgcggcgcccttgtcggcggctgggtcaaggaggacctcgccgaggaataagcactgagtggtggtcgccgtatgtgctgctctagttcctgatctgtttcttggcgatcgtggagtcctgaaaatgtattgtgtggttgggtgtctactgctggattgaaacgatgatgaaatggaatcgaattgattatatcaaaaaaaaaaaaaaaa

SEQ ID NO: 1344 - protein, 246 aa, Zea mays
  misc_feature: Ceres CLONE ID no. 461787
  misc_feature: Ceres CDNA ID no. 29191396
  misc_feature: Homolog of GI Number: 2078483 NR Desc: antifreeze glycopeptide AFGP polyprotein precursor
  misc_feature: Homolog of GI Number: 66776365 NR Desc: PE
  misc_feature: Homolog of GI Number: 66780099 NR Desc: PE
  misc_feature: Homolog of GI Number: 62655768 NR Desc:  similar to serine/arginine repetitive matrix 2
  misc_feature: Homolog of GI Number: 66775827 NR Desc: OsmC
  misc_feature: Homolog of GI Number: 67988031 NR Desc: ROK
  misc_feature: Homolog of GI Number: 5821145 NR Desc: RNA binding protein
  misc_feature: Homolog of GI Number: 66776103 NR Desc: LigA
  misc_feature: Homolog of GI Number: 47124032 NR Desc: SRRM2 protein
  misc_feature: Homolog of GI Number: 67985322 NR Desc: Prolyl
MVVALGPGRFYGSGLPRPRFFPGDRVDPPASVTDPLLEWAREAHWSMGGISVKRLRLQGRIEGSVDKLRRRAHRDARVKAKAKARAAGHMPASLAALGSDDDASSGDSEDEQEVAARERALKRELVDDDEDSDGSGESEEDEPLAAIVTAAKKRRARKLSDEFDRIAAEQQQQLVLESKQKPGAATPVTTSTKRKATVPRASPKRKASVPAAGAPARASPKRKAAATAAAPLSAAGSRRTSPRNKH

SEQ ID NO: 1345 - DNA, 1903 bp, Zea mays
  misc_feature: Ceres CLONE ID no. 461943
  misc_feature: Ceres CDNA ID no. 40350991
  CDS (472)..(1746): REFERENCED BY SEQ ID NO: 1346
gcccatttcgccccctcccgtcttttcccttccgcgtcggtctcctcccccactcttcttgctgtcgtcgtattctctcgactccccgtccccgtcccctcccgctgcctctcccacccgccgcttccggattccgccgcccgtgccctcgccaccaggaattccactcggagtaaggagtgttttcccccgctgcttgcttcgcttctccggtcccgggaccccccccgctttcgcccgacttagattccacttctgtccgttcgctcgctcgctcgctcgtttgctcttatcccccttgctttgctcgttcgttcgattggagctagccgctgcgtggattcctcggctcgccgtccggatctggcctcgctgagctgcagctgccgcgaatcccgactcgattcggccgcgctcggatctcgccggactagcggggaccgaggcctctcgattcgcctcggggccgagatggatcatgtggtcggaggcaagttcaagctcggcaagaagatcgggagcgggtcgttcggggagctcttcctagctgtgaacgtgcagaccggagaggaggtcgccgtcaagctggaaaatgtcaagacgaagcacccgcagcttcactacgagtccaagctatacatgcttctccaaggaggaactggcattccgcacctgaagtggttcggcgttgagggggagtataacgtgatggtgatcgatcttctcggccctagccttgaggacttgttcaactattgcagtagaaagttttctctcaagaccgtgctcatgcttgctgaccaaatgattaatcgggtcgagtacatgcatcaaaaggggtttctgcaccgtgatataaagcctgataattttcttatggggcttggtaggaaagccaatcaggtatatataatagactatggactcgcaaagaaatatagggatcttcaaactcataagcacatcccatacagagagaacaagaacctcactggaactgcacgatatgcgagtgtcaatacccaccttggcgttgaacaaagcaggagagatgatttagaatctcttggttacgttcttatgtacttccttaggggcagcctaccatggcaggggctgaaagcagggaccaagaagcagaaatatgacaaaatcagcgagaaaaagatgctcactcccgtggaggtactctgcaaatcgtatccatcagaatttatctcctatttccactactgccgttcattgcggtttgaagacaagcctgattactcttacctgaagagactattccgcgatctctttattcgggaaggataccagtttgactatgtgttcgactggaccattctgaagtatcctcagataggctccaacccgcggatgagggcaggtgaaaggactagtggagctgctggaccctcgatggacaagattgagaaggccacaggagaagcaggcggtagaaggaatcttagtggtcctgtgaaccagactgacagttatgcacaacgaccgcgtgagaccgtatctatgtcattaaaggaaattatgcatagcactgaccggtctggggaaaggaccatggagagaccacgtacatcctcgcgcacaggcagtgcatcccgtagagctgttgcatcaagcagcaggcaggcctcatctgtggaaccaagtgagcagcagtatagcgggcgagggaccccgttggccccgcgcgatttgagttgttttcgccggataccgtaaccttagctggagtctgtcgtcgtcttggtgtcgtgcctgcctagtgttgatgaggcgtcttggtagcgtcccttggaacgccctctcggagccggaggtgcttcttttgcttcttttgtctatatagataattatatgtacaaaaaaaaaaaaaaaa

SEQ ID NO: 1346 - protein, 424 aa, Zea mays
  misc_feature: Ceres CLONE ID no. 461943
  misc_feature: Ceres CDNA ID no. 40350991
  misc_feature (9)..(278): Pfam Name: Pkinase PFAM Desc: Protein kinase domain
MDHVVGGKFKLGKKIGSGSFGELFLAVNVQTGEEVAVKLENVKTKHPQLHYESKLYMLLQGGTGIPHLKWFGVEGEYNVMVIDLLGPSLEDLFNYCSRKFSLKTVLMLADQMINRVEYMHQKGFLHRDIKPDNFLMGLGRKANQVYIIDYGLAKKYRDLQTHKHIPYRENKNLTGTARYASVNTHLGVEQSRRDDLESLGYVLMYFLRGSLPWQGLKAGTKKQKYDKISEKKMLTPVEVLCKSYPSEFISYFHYCRSLRFEDKPDYSYLKRLFRDLFIREGYQFDYVFDWTILKYPQIGSNPRMRAGERTSGAAGPSMDKIEKATGEAGGRRNLSGPVNQTDSYAQRPRETVSMSLKEIMHSTDRSGERTMERPRTSSRTGSASRRAVASSSRQASSVEPSEQQYSGRGTPLAPRDLSCFRRIP

SEQ ID NO: 1347 - DNA, 474 bp, Zea mays
  misc_feature: Ceres CLONE ID no. 462269
  misc_feature: Ceres CDNA ID no. 36707107
  CDS (65)..(310): REFERENCED BY SEQ ID NO: 1348
aagaaccctagtcacacggaacactcagtgcctgcacgcacgagcgaattaccaggcgtttgctatgggcggagaggccacgaatgccggcggcgggggtatccgcgcgcggatggagcactacctttacagtggcgagaagaagcacgtcgtcgccggcatcgccatcttcgctgccgtcttcggcgtcccatggtacttcatgacgcgaggggcaaagcatcaatctcaccaagattacatggaaaaggctaacaaggcgagatcagagaggctttcttctggacagtcatctgcactaaaagaatgaatgttgtattgcctattctggtccctgaccttcagagcttgtcatagatcatacactgtattgatttgcactcaacggatttgatctgttgttaaataagcaggttatctttctttctaatatcagttgtggaaacgaggtacgttccaaaaaaaaaaaaaaaa

SEQ ID NO: 1348 - protein, 81 aa, Zea mays
  misc_feature: Ceres CLONE ID no. 462269
  misc_feature: Ceres CDNA ID no. 36707107
  misc_feature: Homolog of GI Number: 38603894 NR Desc: At1g80890
MGGEATNAGGGGIRARMEHYLYSGEKKHVVAGIAIFAAVFGVPWYFMTRGAKHQSHQDYMEKANKARSERLSSGQSSALKE

SEQ ID NO: 1349 - DNA, 738 bp, Zea mays
  misc_feature: Ceres CLONE ID no. 462965
  misc_feature: Ceres CDNA ID no. 25446410
  CDS (88)..(522): REFERENCED BY SEQ ID NO: 1350
gcaattcgcaattcccagccccattccccgtcggccgactccagcgagcgacttcgccccggtcggaagcaccaccagccaccagcgatgtctggcgaggaggaggagaacgccgcggagctcaagatcggcgaagagttcctcaaggccaagtgcctgatgaactgcgaggtggcgatcatcctggagcacaagtacgagcagatccagcagcacgcgtcgtcggagtcggacccgtcgtcgcaggtgtcgcaggtgttcgagaagtcgctgcagtacgtgaagcgcttcagccgctacaagaaccccgacgccgtgcgccaggtccgcgagacgctgagccgctacggcctcgccgagttcgagctctgcacgctcggcaacctctgccccgacaccagcggcgaggccaccgcgctcgtcccctccctcaagtccggcggcaggttcgtcggcgaccccggggacgagaagatcgagaagatgctcaacgacctctccctcatcaagaagttcgagtagagcgggagccctctcttctcttatcttcttttctcttggagtagcgagcatccagagaggaggggaattcaacatcaagacgatgtactgataaaattttacttgccttacactactatcgttgaggttcacgtctgcgtattgattagaaccttgtttgatcgataatccaatatactagtagtatgtgtgtggttgacaaaaaaaaaaaaaaaa

SEQ ID NO: 1350 - protein, 144 aa, Zea mays
  misc_feature: Ceres CLONE ID no. 462965
  misc_feature: Ceres CDNA ID no. 25446410
  misc_feature: null
  misc_feature: Useful for making plants with modulated drought sensitivity
  misc_feature (19)..(143): Pfam Name: RNA_pol_Rpb4 PFAM Desc: RNA polymerase Rpb4
  misc_feature: Homolog of GI Number: 50904785 NR Desc: putative 15.9 kDa subunit of RNA polymerase II
  misc_feature: Homolog of GI Number: 72384401 NR Desc: 4D11_3
  misc_feature: Homolog of GI Number: 21554212 NR Desc: 15.9 kDa subunit of RNA polymerase II
  misc_feature: Homolog of GI Number: 72255603 NR Desc: 117M18_2
  misc_feature: Homolog of GI Number: 72384445 NR Desc: 52O08_15
  misc_feature: Homolog of GI Number: 62858949 NR Desc: POLR2D
  misc_feature: Homolog of GI Number: 51873947 NR Desc: MGC85403 protein
  misc_feature: Homolog of GI Number: 50539702 NR Desc: polymerase
  misc_feature: Homolog of GI Number: 21312246 NR Desc: polymerase
  misc_feature: Homolog of GI Number: 34878674 NR Desc: similar to RIKEN cDNA 2610028L19
MSGEEEENAAELKIGEEFLKAKCLMNCEVAIILEHKYEQIQQHASSESDPSSQVSQVFEKSLQYVKRFSRYKNPDAVRQVRETLSRYGLAEFELCTLGNLCPDTSGEATALVPSLKSGGRFVGDPGDEKIEKMLNDLSLIKKFE

SEQ ID NO: 1351 - DNA, 1296 bp, Glycine max
  misc_feature: Ceres CLONE ID no. 463407
  misc_feature: Ceres CDNA ID no. 25445802
  CDS (83)..(1081): REFERENCED BY SEQ ID NO: 1352
gagacacgtttatcatatcatcactcaaacattaagaaaagcttatgcctcagccatcgtttctactcgctagagcgtaagcatgggcactcagagaagcaaacccagttgtaccatcgttgcgatctttctagcattttgttgttttgtttcttcttcgaaagcaaagcttgagagtctccaacatgcgcccaaagctgatgggtctctaagcttcttggtggttggagactggggtagaaaaggtgcttataaccaatctcttgtcgcttttcagatgggtgtaataggagagaaattggacgttgattttgtgatctcaacgggggataacttctacgacaatggattaaccggagtgtttgatccatccttcgaagaatcattcaccaaaatctacacggcacctagcttgcagaagaagtggtacaacgttttgggaaatcatgactacaggggaaatgccaaggcacaaataagccatgtccttagatacagagacaatagatgggtgtgcttcagatcatataccctcaattcagaaaatgtagacttcttttttgtagacacaactccttttgttgataaatacttcattgaggataaaggccataactacgattggagaggcatactacccaggaagcgttatatttctaaccttctcaaggacgtggatttggcactaagacaatcaacagcaacctggaaggtagtgattggccatcatacaatcaaaagcattgggcatcatggagacacccaagaacttttaatacattttctcccacttcttaaggcaaataatgttgatttgtacataaacggacacgatcactgcttggaacatataagtagccttgacagttcagttcaatttttgacaagtggtggtggatcgaaggcatggagaggtgacacgaaacagagcgaaggagatgagatgaagttttactacgacggccaaggcttcatgtctgtgcatatttctcaaactcagcttcgaatttctttctttgatgtcttcggcaatgccatccacaaatggaacacctgcaagtttgactcctgtgacatgtaataagtttactagttaaacaatataaaaacatatgttcacatctcattggctgaatattaaattaaaaataaagccttgaaataaattaaagtttttagaattttaatttagtcatcagagcattttcaactgcgaacttaaatgagttgtttaatttaagtagtgctgtttatttttttttattcaaaaaaaaaaagaaaaaaaaaaaaaaaaaa

SEQ ID NO: 1352 - protein, 332 aa, Glycine max
  misc_feature: Ceres CLONE ID no. 463407
  misc_feature: Ceres CDNA ID no. 25445802
  misc_feature (43)..(254): Pfam Name: Metallophos PFAM Desc: Calcineurin
  misc_feature: Homolog of GI Number: 7331195 NR Desc: putative purple acid phosphatase precursor
  misc_feature: Homolog of GI Number: 30911094 NR Desc: putative purple acid phosphatase
  misc_feature: Homolog of GI Number: 24030193 NR Desc: putative purple acid phosphatase
  misc_feature: Homolog of GI Number: 47716659 NR Desc: purple acid phosphatase 1
  misc_feature: Homolog of GI Number: 8778212 NR Desc: F10B6.10
  misc_feature: Homolog of GI Number: 21436121 NR Desc: putative purple acid phosphatase
  misc_feature: Homolog of GI Number: 39918795 NR Desc: putative acid phosphatase
  misc_feature: Homolog of GI Number: 20257477 NR Desc: purple acid phosphatase
  misc_feature: Homolog of GI Number: 26452681 NR Desc: putative purple acid phosphatase
  misc_feature: Homolog of GI Number: 55982667 NR Desc: putative purple acid phosphatase
  misc_feature: Useful for increasing chlorophyll and photosynthetic capacity
  misc_feature: Useful for making ornamental plants with modified leaves
  misc_feature: Useful for making plants with increased biomass and foliage
MGTQRSKPSCTIVAIFLAFCCFVSSSKAKLESLQHAPKADGSLSFLVVGDWGRKGAYNQSLVAFQMGVIGEKLDVDFVISTGDNFYDNGLTGVFDPSFEESFTKIYTAPSLQKKWYNVLGNHDYRGNAKAQISHVLRYRDNRWVCFRSYTLNSENVDFFFVDTTPFVDKYFIEDKGHNYDWRGILPRKRYISNLLKDVDLALRQSTATWKVVIGHHTIKSIGHHGDTQELLIHFLPLLKANNVDLYINGHDHCLEHISSLDSSVQFLTSGGGSKAWRGDTKQSEGDEMKFYYDGQGFMSVHISQTQLRISFFDVFGNAIHKWNTCKFDSCDM

SEQ ID NO: 1353 - DNA, 527 bp, Glycine max
  misc_feature: Ceres CLONE ID no. 463432
  misc_feature: Ceres CDNA ID no. 36705294
  CDS (44)..(268): REFERENCED BY SEQ ID NO: 1354
acttgagttcgaactaaacaattcaattcaatctgcctcgatcatggagaggaaaacatttgggtttttgttcttgctcctccttgtcttagcttctgatgtgacggtgaagagagcagaggcgaaagattgcttgacaaggaggcacgggttccagggtagatgcttattcgacaggcaatgtgcacatgtgtgcaggagcgatggtttcatcggtggtcagtgccgaggccctcttcgcaaatgcttttgcagcaggccatgttgatcgaaattactactgccaaagaggccatgaaataaacaaacaaacaaataaataaatagctctaaccgacacatatgtacgtagtgtcggggttctagctagctaggtaggtacgtgtgtcttttgttatcgatcctagtttggtggagcaagtgtggcatcatgatctagttatatatatatgtcgtgatcatcttgctctgttcagcaataaattataatggaaattaataaattagtcaaaaaaaaaaaaaaaaaa

SEQ ID NO: 1354 - protein, 74 aa, Glycine max
  misc_feature: Ceres CLONE ID no. 463432
  misc_feature: Ceres CDNA ID no. 36705294
  misc_feature (28)..(74): Pfam Name: Gamma PFAM Desc: Gamma
  misc_feature: Homolog of GI Number: 38045975 NR Desc: plant defensin precursor
  misc_feature: Homolog of GI Number: 12007498 NR Desc: cysteine
  misc_feature: Homolog of GI Number: 509769 NR Desc: seed
  misc_feature: Homolog of GI Number: 10444372 NR Desc: Kunitz trypsin inhibitor protein
  misc_feature: Homolog of GI Number: 24306004 NR Desc: defensin EGAD1
  misc_feature: Homolog of GI Number: 18748 NR Desc: a protein similar to potato tuber protein p322 homolgous toowman
  misc_feature: Homolog of GI Number: 11596184 NR Desc: proteinase inhibitor se60
  misc_feature: Homolog of GI Number: 17066707 NR Desc: defensin protein precursor
  misc_feature: Homolog of GI Number: 4753797 NR Desc: gamma
  misc_feature: Homolog of GI Number: 7939581 NR Desc: thionin like protein
MERKTFGFLFLLLLVLASDVTVKRAEAKDCLTRRHGFQGRCLFDRQCAHVCRSDGFIGGQCRGPLRKCFCSRPC

SEQ ID NO: 1355 - DNA, 1033 bp, Glycine max
  misc_feature: Ceres CLONE ID no. 464460
  misc_feature: Ceres CDNA ID no. 25891111
  CDS (76)..(879): REFERENCED BY SEQ ID NO: 1356
aatcacccaaccaaccgcctctacaagcgcagcccagatctcggctccttcccttcctcgaaccaagcatcagcaatggcgaccacggcagccgacgccacggccgcggttcccaaggagcagcagcccgccaacggttccgcggccgccaccaccggcggcgagcaggtcacgcgccactccgaggtcggacacaagagcctgctccagagcgacgccctctaccagtacatcctggagacgagcgtgtacccgcgcgagcacgagtgcatgaaggagctccgcgagatcaccgccaaccacccatggaacctgatgacgacgtcggcggacgagggccagttcctcaacatgctgctcaagctcatcggcgccaagaagaccatggagatcggcgtctacaccggctactccctgctcgccaccgcgctcgccatccccgacgacggcaccatcttggccatggacatcaaccgcgagaactacgagctggggctgccgtgcatcgagaaggccggcgtggcgcacaagatcgacttccgcgagggcccggcgctgcccgtcctggacgcgctgctggaggacgaggccaaccacgggaccttcgacttcgtcttcgtggacgccgacaaggacaactacctcaactaccacgagcgcctcatgaagctcgtcaaggtcggcggcctcctcggctacgacaacaccctctggaacggctccgtcgtgctccccgccgacgcccccatgcgcaagtacatccgctactaccgcgacttcgtcctcgagctcaacaaggccctcgccgccgaccagcgcgtcgagatctgccagctccccgtcggcgacggcatcaccctctgccgccgcgccaagtgaaccagagaacccatctccgccgctccgccatagatgccaagaacaagaattaattaattactccccattttgtctttcctgctcgccttctgtactctacatctatcttctgcaattcgtataaagatttctccagataaaaaaaaaaaaaaaa

SEQ ID NO: 1356 - protein, 267 aa, Glycine max
  misc_feature: Ceres CLONE ID no. 464460
  misc_feature: Ceres CDNA ID no. 25891111
  misc_feature: null
  misc_feature: Useful for making plants with altered Lignin content
  misc_feature: Useful for making plants with altered cell wall composition
  misc_feature: Useful for making plants with altered cell wall content and/or composition
  misc_feature (54)..(266): Pfam Name: Methyltransf_3 PFAM Desc: O
  misc_feature: Homolog of GI Number: 49618875 NR Desc: caffeoyl
  misc_feature: Homolog of GI Number: 37221605 NR Desc: caffeoyl
  misc_feature: Homolog of GI Number: 5101868 NR Desc: Caffeoyl CoA O
  misc_feature: Homolog of GI Number: 32347451 NR Desc: caffeoyl CoA 3
  misc_feature: Homolog of GI Number: 32347473 NR Desc: caffeoyl CoA 3
  misc_feature: Homolog of GI Number: 32347447 NR Desc: caffeoyl CoA 3
  misc_feature: Homolog of GI Number: 32347487 NR Desc: caffeoyl CoA 3
  misc_feature: Homolog of GI Number: 32347437 NR Desc: caffeoyl CoA 3
  misc_feature: Homolog of GI Number: 32347489 NR Desc: caffeoyl CoA 3
  misc_feature: Homolog of GI Number: 32347439 NR Desc: caffeoyl CoA 3
MATTAADATAAVPKEQQPANGSAAATTGGEQVTRHSEVGHKSLLQSDALYQYILETSVYPREHECMKELREITANHPWNLMTTSADEGQFLNMLLKLIGAKKTMEIGVYTGYSLLATALAIPDDGTILAMDINRENYELGLPCIEKAGVAHKIDFREGPALPVLDALLEDEANHGTFDFVFVDADKDNYLNYHERLMKLVKVGGLLGYDNTLWNGSVVLPADAPMRKYIRYYRDFVLELNKALAADQRVEICQLPVGDGITLCRRAK

SEQ ID NO: 1357 - DNA, 1286 bp, Glycine max
  misc_feature: Ceres CLONE ID no. 464639
  misc_feature: Ceres CDNA ID no. 25445535
  CDS (315)..(917): REFERENCED BY SEQ ID NO: 1358
agatctatctaaaatcttgccgtcttctgctctctctatatttcttttctctctctataaataagcaacctttacctcataacctttcttaatctcatcaaatcaaaccctttttcaacgctcacatataaatttctgccaccaaatccttcccactctcctcaattctattcatctcaactcaacaatctctcagatccgtgaaacaaaaacaaaaacaaaaaattcgaaaaccctagttctatacatatattaaggaaaaaaagctttttgctggttttgaggcattgcattaaattggattttgattattcatggctgaacaagcattggaaggtagccaacctgtggatttaacaaagcacccttctggaattgtgcctacccttcaaaatattgtgtcaacggtcagtttggactgtaagttggagcttaaatcaattgcacttcaagctcgtaatgcagaatacaatcccaagcgttttgctgctgttattatgaggatcagggaaccaaaaactactgcactcatttttgcatctggcaagatggtctgtactggagctaagagcgagcaacagtctaaattggcggcaaggaagtatgctagaattatccaaaagcttggtttcccagctaaatttaaggattttaagattcagaatattgttggctcttgtgatgtaaagttccccattcgactggagggtcttgcctattcccatggtgctttctcaagttatgaaccagagttgtttcctggactaatctatcgcatgaagcaacccaagatagtcttgcttatatttgtctctggaaaaattgttctgacgggagccaaggttagagatgagacttacacagcctttgagaacatatatccagtgcttactgagttcaggaaaaaccaacaatgattactgtcaagagagcaggagcaaggtttcctggtagagaagattgcggaacaccggcttgaattgattgaactgtaaatatgaagacaagagatatctgtaatctggattgagttttaataagacatccctttttgttcttgtctttttctctctttaaaaaaaaaaggatcctgctttagtaaagtggaaggaaaaaaaactgtgtattgaatttgacactgaaaaaaaaagagatttagaagaggcagaatagaaaagaaaaagtgagaaattctaagcttgtttaggtatggttaactcaagtaagcaagatctctcaccattagtgcgatgcaaatcattaatatcaaaaaaaaaaaaaaaaaa

SEQ ID NO: 1358 - protein, 200 aa, Glycine max
  misc_feature: Ceres CLONE ID no. 464639
  misc_feature: Ceres CDNA ID no. 25445535
  misc_feature (110)..(196): Pfam Name: TBP PFAM Desc: Transcription factor TFIID
  misc_feature: Homolog of GI Number: 21581 NR Desc: TATA
  misc_feature: Homolog of GI Number: 4102725 NR Desc: TATA
  misc_feature: Homolog of GI Number: 1220522 NR Desc: TATA
  misc_feature: Homolog of GI Number: 841440 NR Desc: TATA
  misc_feature: Homolog of GI Number: 4102723 NR Desc: TATA
  misc_feature: Homolog of GI Number: 1498162 NR Desc: TATA binding protein
  misc_feature: Homolog of GI Number: 293906 NR Desc: TATA
  misc_feature: Homolog of GI Number: 50917367 NR Desc: TATA
  misc_feature: Homolog of GI Number: 293904 NR Desc: TATA
  misc_feature: Homolog of GI Number: 974216 NR Desc: TATA
  misc_feature: Useful for delaying senescence
  misc_feature: Useful for increasing seed/fruit yield or modifying fruit content
MAEQALEGSQPVDLTKHPSGIVPTLQNIVSTVSLDCKLELKSIALQARNAEYNPKRFAAVIMRIREPKTTALIFASGKMVCTGAKSEQQSKLAARKYARIIQKLGFPAKFKDFKIQNIVGSCDVKFPIRLEGLAYSHGAFSSYEPELFPGLIYRMKQPKIVLLIFVSGKIVLTGAKVRDETYTAFENIYPVLTEFRKNQQ

SEQ ID NO: 1359 - DNA, 706 bp, Glycine max
  misc_feature: Ceres CLONE ID no. 464693
  misc_feature: Ceres CDNA ID no. 40350992
  CDS (56)..(421): REFERENCED BY SEQ ID NO: 1360
aactcaataatagtcccttttctgaaattctcctaactctctctctctctcaacaatggctcgtacttttgttcttatgttggttgctgctgctgcattgttgttgagctccacgatggctcaatctccagcttcttcgccggctttatcaccgaccaacacgccggtggccactccaccgaggagggcgttgtctccgtctcctgttcctgctgcggtgccaccgtcgtcttctcctccggctccacctacttcttctccttcggagcccccaattgcagctgctactccgaacatccctccctcgaccatctcgactccaccatctgaagcaccaggaccagctgcaaacggtgccgttttcaacagagttggcggatctgctctcattctaatcatcgcttcggccatgctcgtatagaacaaattctgtgggattattcatgaatacttgagttttttgaactccagtacctttttttcctggtgtcgttgaagacgattcatttattttaattattttatttatttattcattcatatgattgatgcatacacacatatgtataatctctttgcgattataacatatatgatagatgtgcattagcatttgtcatttgtaactatttaattaattaattaattgctcgtattttaatacgatttcgaaaaaaaaaaaaaaaataaaaaaaaaaaaaaaaaa

SEQ ID NO: 1360 - protein, 121 aa, Glycine max
  misc_feature: Ceres CLONE ID no. 464693
  misc_feature: Ceres CDNA ID no. 40350992
MARTFVLMLVAAAALLLSSTMAQSPASSPALSPTNTPVATPPRRALSPSPVPAAVPPSSSPPAPPTSSPSEPPIAAATPNIPPSTISTPPSEAPGPAANGAVFNRVGGSALILIIASAMLV

SEQ ID NO: 1361 - DNA, 1514 bp, Glycine max
  misc_feature: Ceres CLONE ID no. 465074
  misc_feature: Ceres CDNA ID no. 40041224
  CDS (114)..(1223): REFERENCED BY SEQ ID NO: 1362
gctgaactcatcacttactggaagccttgttgtgagtaagagaaaaggcttcctgcaccgagcacaccaacttgatacctctgattctttctttgcttagaattccacagaatatggagactgttcttttcaatcactccccacctttggaattcaagggtttgagcaaggaggaggaagactcattgctagggcaagtggaaatatggaggtacatgacatgcttcacggactccgtggccttgaaagctgtcatagagcttcgtatagcggacatactagaccgttatggtaaaccactatccttgtcgcaaattgtggagaacatagaagacgcaccctccccagatgcctctcttctccagagagtcctgagagtgatggtgcgcagaaagatcttcagtgcacaagaatcagagacaggagaaaccctcttcggcttgacacgagcctcgaagtggatccttcgcgacacgaaaatgaccctagcacccatgttgctgctggagaaccacccaattcacctgaaccctgcgcactacatcagtgagattattagagaaggcacaaaaaatggcactgctttctttaagtgccatggacatgagcaatttgagatgacgggtttggatcctgagtataataggttgttcaatgagggcatggtgtgcactgctagggttgtgtccaaggctgtgatcactggctacaaagatgggttcaaccagattaagtccttggttgatgttggaggtggcattggagggtctctttcggagattgttagggcttatcctcatatcaatgccatcaactttgacttgcctcatgtggttgccactgctcctaagttcgatgggatcacccatgttggaggtgacatgttcgtgtccattcctagtgctgatgctatttacatgaagtggattctgcatgactggagcgacgagcactgcatcaagatcttgaagaactgcaggaaggcaataccagagaagacaggaaaagtcataatcgtggatcacgttcttcgacccgaaggcaacgaactcttcacagacgttggcatcgcattcgacatgatgcttctcgctcacaacgccggtggcaaagagaggaccgaagagaactggaagtggctgttcaaggaaaccggtttcgcgcgttacaacatcatcaagatcaacgctctcccttccatcattgaggcgtttccaatctgaagaagatgccactaccacaactgcatgtggtttttatgttgcatgtgttgttgttattattaacagctatatgatcttcgttttaattttgtggttttccttcctgcccttgttatgtttgtgcattaaataaaagtaagaaatgccccaccactaagtaatgctatatggattatgtatgtgttccatatatgtcaagtgagtggtgtgtggttgtgaagaatctattgcttttaatgaatcagatcctttggtgtgaaaaccttgctttcgaaaaaaaaaaaaaaaaaa

SEQ ID NO: 1362 - protein, 369 aa, Glycine max
  misc_feature: Ceres CLONE ID no. 465074
  misc_feature: Ceres CDNA ID no. 40041224
  misc_feature (100)..(345): Pfam Name: Methyltransf_2 PFAM Desc: O
  misc_feature (42)..(96): Pfam Name: Dimerisation PFAM Desc: Dimerisation domain
  misc_feature: Homolog of GI Number: 32440935 NR Desc: caffeic acid O
  misc_feature: Homolog of GI Number: 33286372 NR Desc:
  misc_feature: Homolog of GI Number: 1777386 NR Desc: caffeic acid O
  misc_feature: Homolog of GI Number: 4574324 NR Desc: caffeic acid ortho
  misc_feature: Homolog of GI Number: 1568664 NR Desc: O
  misc_feature: Homolog of GI Number: 56605372 NR Desc: caffeate O
  misc_feature: Homolog of GI Number: 51980202 NR Desc:
  misc_feature: Homolog of GI Number: 17366954 NR Desc:
  misc_feature: Homolog of GI Number: 17366950 NR Desc: 3'
  misc_feature: Homolog of GI Number: 1582580 NR Desc: caffeic acid O
  misc_feature: Useful for making ornamental plants with modified leaves
METVLFNHSPPLEFKGLSKEEEDSLLGQVEIWRYMTCFTDSVALKAVIELRIADILDRYGKPLSLSQIVENIEDAPSPDASLLQRVLRVMVRRKIFSAQESETGETLFGLTRASKWILRDTKMTLAPMLLLENHPIHLNPAHYISEIIREGTKNGTAFFKCHGHEQFEMTGLDPEYNRLFNEGMVCTARVVSKAVITGYKDGFNQIKSLVDVGGGIGGSLSEIVRAYPHINAINFDLPHVVATAPKFDGITHVGGDMFVSIPSADAIYMKWILHDWSDEHCIKILKNCRKAIPEKTGKVIIVDHVLRPEGNELFTDVGIAFDMMLLAHNAGGKERTEENWKWLFKETGFARYNIIKINALPSIIEAFPI

SEQ ID NO: 1363 - DNA, 1129 bp, Zea mays
  misc_feature: Ceres CLONE ID no. 465143
  misc_feature: Ceres CDNA ID no. 25447421
  CDS (341)..(631): REFERENCED BY SEQ ID NO: 1364
gacggcccggacccaggaggcccggatcctggtatgcgcttacctgccccctctctctgtctcgtggttctactgaacgagcactcgcctgcgctcttctctctctcgtggcgacgactgggtgaccgccggcgccccaggcctgaggcctccatcttcgggcccttcactggctacgagcaccaccaggtacgcatacccctcctcttccgttccttctgtacgagcaccctaaccctagtttaagatacttgtaatcggatctgatccaatttcaggtgtactgggtccgatccatctgagtctgatcttttgtttctcgggttcctggcagaggattatggattggctggggcagaagcgcgcggagatgctgatgcaggtgctgctggtggcgtctgctgtggcggcgttcctggtgggctacgtgcgcgcggacttccagctcatgctgctcgtctacgccggcggcgtcgtgctcacagcgctcgtcaccgtccccaactggcccttcttcaaccgtaacccgctcaagtggctcgacgctgccgaggccgagcgccacccgcgcccccaggtcagcgccggtgcggcagcagggggaaagaagaagtccgggaagaacaagtaatcgatctttcggagcgatatgtgttctttgtcgatttgactcaaacctatttaaagttttatttcgcagaactaatcaatgataaaagagctagaggtgttcgacagttttggttggtacttcaaaatatgcagttgtagatgaaatttagcttgcaatcttgcacgctacttatcagttatatctgcaatgatgatctaactaaaaggatggcaatatgcctggttgcactcttagattgacttagcattttgtggatgggtttttgctgtcttcttatgcatatctgaagatgcagtgagtttttttagcagagattgcatagtttcagtttgatcccttgattacgttgcctccttgaccatttttaggtggagtgttcatatcagtgtcagccctttgttggaattgaactattagattcattcgtaattctcttgtagtgttataatcaaatgtgtaggttgcatgtaaccataggcaaaaaaaaaaaaaaaa

SEQ ID NO: 1364 - protein, 96 aa, Zea mays; identical to SEQ ID NO: 222
  misc_feature: Ceres CLONE ID no. 465143
  misc_feature: Ceres CDNA ID no. 25447421
  misc_feature (1)..(80): Pfam Name: SPC12 PFAM Desc: Microsomal signal peptidase 12 kDa subunit
  misc_feature: Homolog of GI Number: 77555520 NR Desc: microsomal signal peptidase 12 kda subunit
  misc_feature: Homolog of GI Number: 30102562 NR Desc: At4g40042
  misc_feature: Homolog of GI Number: 50754117 NR Desc:  similar to Microsomal signal peptidase 12 kDa subunit
  misc_feature: Homolog of GI Number: 62860158 NR Desc: LOC549392
  misc_feature: Homolog of GI Number: 7661746 NR Desc: signal peptidase 12kDa
  misc_feature: Homolog of GI Number: 57101164 NR Desc:  similar to Microsomal signal peptidase 12 kDa subunit
  misc_feature: Homolog of GI Number: 16905460 NR Desc: signal peptidase 12kDa subunit
  misc_feature: Homolog of GI Number: 27667224 NR Desc: similar to signal peptidase 12kDa
  misc_feature: Homolog of GI Number: 72153363 NR Desc:  similar to Microsomal signal peptidase 12 kDa subunit
  misc_feature: Homolog of GI Number: 67083963 NR Desc: microsomal signal peptidase 12 kDa subunit

SEQ ID NO: 1365 - DNA, 1426 bp, Zea mays
  misc_feature: Ceres CLONE ID no. 465494
  misc_feature: Ceres CDNA ID no. 40350993
  CDS (484)..(1233): REFERENCED BY SEQ ID NO: 1366
aatttacataatgttcattgactttataaatttactagtagaattagctagctaacaaatatctaactaactattaactaatttactaaaaaataactaataattaaactattagatatgttgtttaaatgtctccaactaattttaggctctaattattaactctagtgcattaaaataccctctaacagtctaaatagaaatagaaaaaaaatcgtcagtgtgatcctgtgagggttcatcttcttctccaagcagatttctgttggttagctactcacgtcaactcaaaatctcgcgttcacctccttcatagtctctccgcctcccgcttacctctttggttctagtctatctccctctcgtttcttcctgtgagcgacagctggtggagctgcgccgctctcaccttcgccggcgacgggcattcacaagtagtgatctcttgactaacggcgtagtggtgactaaagagccttgacaatgagcagcataggcacaggttatgatctgtctgtcaccaccttctctcctgatggccgcgtcttccaggtcgagtatgccacaaaagctgtcgacaacagcggtactgttgttgggatcaagtgcaaagatggcattgttctgggtgtcgagaagctggtaacctcaaagatgatgctggaggggtcaaatcggaggatccattcagtgcaccggcattcgggcttggttgttgctggtttggcagcagatggcagacaaattgtttcaagggctaaatcagaagctgccagttatgaaaaggtctatggagaacccattcctgtgaaggatttggcagatcgtgtagcaagttatgttcatctttgcacgctgtactggtggctcagaccttttggttgcggtgttattcttggaggttatgatagggatgggccacagctttacatgatagagccctcaggagtttcctataaatactttggtgctgcattggggaagggaaggcaggccgcaaagactgagatagaaaagttgaaactttcggagcttacctgccgagaaggcattgttgaagttgcaaagataatttatggagtgcatgacgaatccaaggacaaagcttttgagttggagttgagctggatctgtgatgaatcgaaccgccagcatcagaaggttccgaatgaattgttggagcaggccaaagctgctgctcaggcagctcttgaggagatggatactgactaagaaacatgacaaatatgcccatgcttcatgtttttgtgctgttgatatctttgatccctttggggtgacagactggacattgccaatttgttggattttatttggatgtcatgtaaaactccattcatggaagtttgaatctggattgactgatatcagagctgtggtgttttttacaaaaaaaaaaaaaaaa

SEQ ID NO: 1366 - protein, 249 aa, Zea mays
  misc_feature: Ceres CLONE ID no. 465494
  misc_feature: Ceres CDNA ID no. 40350993
  misc_feature (31)..(216): Pfam Name: Proteasome PFAM Desc: Proteasome A
MSSIGTGYDLSVTTFSPDGRVFQVEYATKAVDNSGTVVGIKCKDGIVLGVEKLVTSKMMLEGSNRRIHSVHRHSGLVVAGLAADGRQIVSRAKSEAASYEKVYGEPIPVKDLADRVASYVHLCTLYWWLRPFGCGVILGGYDRDGPQLYMIEPSGVSYKYFGAALGKGRQAAKTEIEKLKLSELTCREGIVEVAKIIYGVHDESKDKAFELELSWICDESNRQHQKVPNELLEQAKAAAQAALEEMDTD

SEQ ID NO: 1367 - DNA, 936 bp, Zea mays
  misc_feature: Ceres CLONE ID no. 465540
  misc_feature: Ceres CDNA ID no. 29191369
  CDS (117)..(659): REFERENCED BY SEQ ID NO: 1368
aaaaaacgtgcttcagctgggctttcggggttacatcaatatttcccttcctccacttcacatcctgttcgtgactcgtgatttcgccgccggaaagccgagggagagggagcgagatggggttcgtcggcgacacgatggagtcaatccgctccatgcagatccgccaattgctcacgcagatcatcagcctcggtatgattgttacctctgcattaatcatatggaaggggttgatagttttcacagggagcgagtcaccagttgtagtggttctctctggtagcatggaacctggatttaaaaggggtgatatcctgtttttgcatatgagcaaagatcctattcgcacaggagaaatagttgttttcaatatcgatggccgtgaaattccaattgtccaccgcgtaattaaggtccatgaacgtcaggacactgcagaagtggacatcctcaccaaaggtgacaataattttggggatgaccgactattatatgcacatgggcagctttggctccagcaacatcacattatgggacgtgctgtgggctaccttccatatgttggctgtattacaattatcatgactgagaaaccatttattaagtacctgctgattggtgcactgggcttgctggtcataacgtcgaaagattagagtgtcaaacttcgcgcagtatagattttgctcttatggtgcaacatcagaggttattggctttgctgcgttaagagaagccgttctgttgcaccatggatcaaacgagaatatttgtttatagactgagagcacctgcccactaattagatagtcggttctcatccagcatccatcttttggtatttttagcctagctaatgagttgaaccagttcgttgttctatttgatgatcactattcattgcagctttccagcaaaaaaaaaaaaaaaaaa

SEQ ID NO: 1368 - protein, 180 aa, Zea mays
  misc_feature: Ceres CLONE ID no. 465540
  misc_feature: Ceres CDNA ID no. 29191369
  misc_feature (52)..(124): Pfam Name: Peptidase_S24 PFAM Desc: Peptidase S24
  misc_feature: Homolog of GI Number: 55296017 NR Desc: putative signal peptidase 18K chain
  misc_feature: Homolog of GI Number: 20465737 NR Desc: putative signal peptidase subunit
  misc_feature: Homolog of GI Number: 51972110 NR Desc: At3g15710
  misc_feature: Homolog of GI Number: 34784421 NR Desc: Spc18 protein
  misc_feature: Homolog of GI Number: 48146371 NR Desc: SPC18
  misc_feature: Homolog of GI Number: 50752707 NR Desc:  similar to SPC18 protein
  misc_feature: Homolog of GI Number: 55642557 NR Desc:  similar to SPC18 protein
  misc_feature: Homolog of GI Number: 50979142 NR Desc: signal peptidase complex
  misc_feature: Homolog of GI Number: 58383727 NR Desc: ENSANGP00000020448
  misc_feature: Useful for making ornamental plants with modified flowers
  misc_feature: Useful for making ornamental plants with modified flowers
  misc_feature: Useful for making ornamental plants with modified flowers
  misc_feature: Useful for making plants with increased biomass and foliage
  misc_feature: Useful for making plants with increased biomass and foliage
  misc_feature: Useful for making smaller plants
MGFVGDTMESIRSMQIRQLLTQIISLGMIVTSALIIWKGLIVFTGSESPVVVVLSGSMEPGFKRGDILFLHMSKDPIRTGEIVVFNIDGREIPIVHRVIKVHERQDTAEVDILTKGDNNFGDDRLLYAHGQLWLQQHHIMGRAVGYLPYVGCITIIMTEKPFIKYLLIGALGLLVITSKD

SEQ ID NO: 1369 - DNA, 1172 bp, Zea mays
  misc_feature: Ceres CLONE ID no. 465852
  misc_feature: Ceres CDNA ID no. 36590604
  CDS (118)..(933): REFERENCED BY SEQ ID NO: 1370
attagcaaagcgtacatccctccaacaaaccttgagttgagagaggagagaggagacagcaagcgacacaacacagaggtaaccggctcacgcctgtctcggtggccgtgggcaatcatggccactgtgggacagtctggggccctgaggagggtcaccgtgcactacgccaactcgcccacaggcagcacggtggcagaggtgagctttgacgaccttgacgacgagctgctcctgtttgtgctcgccgatcttcttcctggccaggaaggtttacaccagtcgatcttggaaggaacatacaacaaccaggagaaccacatgagaggtgcagcacccagtgcaccatatggttattcacggccagaggagtaccgtgcagagagcagcactgctgcagcagcagcaactggttctaggaattcaggcatggatgaacagatcgcctcggacttcgagtacgccaagcagctgcagcaggagatggaggacctcagcgtcaaagacgaagacgacaacgatatcagctgcgtgccgtctccatctgactctgacgatgagcacgagcatcatgacgaagaggaagaggctgacaggcaggaggacggtgatggtgatgatgatccagacaacatgacttatgagcaaggacaggcacttgtagaatctgtggggactgagtacagaggtctatccgatgagctcatctcctacctgcagccatggaagtacaaggcagtcaaggcttcagggctcttctcccggaaaacaaaccatgaagactgcccgatctgcctgtccactttcagaaaccgggaaaccatgataacgttgccgtgcaggcatcactaccacgcagcttgtgtcaccagatggctcaaggtcaacaagacatgccctgtatgcaaatacgaactgtttggactttcctaggatccgaccacgtcgacgatggagctgagaggataatgatgatgacgacgacaacgacagatggttgtgtcatctgctctctttttttagcgccaagaaaactggaaatgaaaaagggaaatcaatccgaaaggagaatagaaattaggaagtataggtagaatatctctcttgccagtgactgtgcgatgaattaagcatacctcgtgctatttatgacgaaaaaaaaaaaaaaaaaa

SEQ ID NO: 1370 - protein, 271 aa, Zea mays
  misc_feature: Ceres CLONE ID no. 465852
  misc_feature: Ceres CDNA ID no. 36590604
  misc_feature: null
  misc_feature: Useful for making plants with altered terpenoid content
  misc_feature (223)..(263): Pfam Name: zf PFAM Desc: Zinc finger
  misc_feature: Homolog of GI Number: 34898016 NR Desc: zinc finger protein
  misc_feature: Homolog of GI Number: 50928063 NR Desc: OSJNBa0088I22.8
  misc_feature: Homolog of GI Number: 50948261 NR Desc: putative RING
  misc_feature: Homolog of GI Number: 6522599 NR Desc: zinc
  misc_feature: Homolog of GI Number: 3822225 NR Desc: RING
  misc_feature: Homolog of GI Number: 34911538 NR Desc: P0421H07.18
  misc_feature: Homolog of GI Number: 50912521 NR Desc: RING zinc finger protein
  misc_feature: Homolog of GI Number: 558543 NR Desc: C
  misc_feature: Homolog of GI Number: 72088267 NR Desc:  similar to ring finger protein 38
MATVGQSGALRRVTVHYANSPTGSTVAEVSFDDLDDELLLFVLADLLPGQEGLHQSILEGTYNNQENHMRGAAPSAPYGYSRPEEYRAESSTAAAAATGSRNSGMDEQIASDFEYAKQLQQEMEDLSVKDEDDNDISCVPSPSDSDDEHEHHDEEEEADRQEDGDGDDDPDNMTYEQGQALVESVGTEYRGLSDELISYLQPWKYKAVKASGLFSRKTNHEDCPICLSTFRNRETMITLPCRHHYHAACVTRWLKVNKTCPVCKYELFGLS

SEQ ID NO: 1371 - DNA, 1556 bp, Zea mays
  misc_feature: Ceres CLONE ID no. 465864
  misc_feature: Ceres CDNA ID no. 40041225
  CDS (85)..(1434): REFERENCED BY SEQ ID NO: 1372
acgggccacggccgcggccgaattgaattaatggcgtgacgcggagtcgcgaaaaccagacttattacgtgacgacgaccaacgatgcagctcgatagacttatgggcgcctccgtggtcctcgccgtcgttgtttccctcgccgccgtcctccctattgctcgcgctgagatcaagacgacgcctgttgtctccgactcgcgctccgtcatcctgttcgaggagttcggcttcaggcgcggcggccacgccagtatctcagccaccggcatctcgtggagggtccccgaggggtctcagctgcaagccgtggacacgacgctcatgggtttcttcctcatctccaactcccttttctacgagatcaacaatgagtccgactacgccgaggccaccggcggcgccttctgcccgctcacaagcaagtacgtgcagcggctcttcctgttcaaggaggtggcgcccgacggcacggggaggggctccctgaccatcgactccgacgaccagtacacggtgctgttcagcagctgccaagagggcgtggaggtcaccatggacgtgcgcaccgagatgtacaacctgcggcgctccggcaccagggagtacctccccgtcggcctgctgccgctgccgtggatcttcgcggccgcggccgcggtgcacttcgcgttcctgggcacgtgggtggtcgtctgcgtcaaacaccgcaggacggcggagcgcatccacgccgtgatgggcgcgctgctgctgttcaaggcgctcaagctcgcgtgcgccgccgaggaccagtggttcgtggagcgcacgggcacgccgcatgggtgggacgtcgccttctacgtgttcggcttcttcaagggcatcctgctcttcaccgtcatcgtgctcatcggcaccggctggtccttcttgaaaccttacctccaggagcgcgagaagaacgtgctgatggtcgtcatacccctgcaagtgatcgagaacatcgcgtcggcggtgataggggagacggggccggcggggagggactggctggcgtggaaccagatcttcctcctggtggacgtcatctgctgttgcgcggtgttcttccccatcatatggtccatccgcaacctgcgggaggcgtccaagaccgacggcaaggcagcacggaacctccagaagctcacgctcttcaagcagttctacctggtggtggtgtgctacctctacttcacgcggatcgccgcgtcggccgtcgccgccgtgctcagctacaagtaccagtgggccgtcaatgtctccatcgagatgaccagccttgcgttctatgtgttcgtgttctataacttccagcccgtggagaaaaacccttacctgtacgtgggtgacgatgaggaggaagccgcgggtgggcagcttgagatggagagcacatttgagatctgacgagacattttctttagattatatgagatctgatgagacacgcatgcatgtactcccagttttgtatagttatacagtgctacaaacaacctgatatggttttcacaaaaaaaaaaaaaaaa

SEQ ID NO: 1372 - protein, 443 aa, Zea mays
  misc_feature: Ceres CLONE ID no. 465864
  misc_feature: Ceres CDNA ID no. 40041225
  misc_feature (131)..(419): Pfam Name: Lung_7 PFAM Desc: Lung seven transmembrane receptor
  misc_feature: Homolog of GI Number: 50926348 NR Desc: OSJNBa0043L24.20
  misc_feature: Homolog of GI Number: 50910571 NR Desc: putative lung seven transmembrane receptor 1
  misc_feature: Homolog of GI Number: 34908068 NR Desc: P0506B12.23
  misc_feature: Homolog of GI Number: 50948717 NR Desc: putative lung seven transmembrane receptor 1
  misc_feature: Homolog of GI Number: 50931707 NR Desc: putative lung seven transmembrane receptor 1
  misc_feature: Homolog of GI Number: 14248997 NR Desc: lung seven transmembrane receptor 1
MGASVVLAVVVSLAAVLPIARAEIKTTPVVSDSRSVILFEEFGFRRGGHASISATGISWRVPEGSQLQAVDTTLMGFFLISNSLFYEINNESDYAEATGGAFCPLTSKYVQRLFLFKEVAPDGTGRGSLTIDSDDQYTVLFSSCQEGVEVTMDVRTEMYNLRRSGTREYLPVGLLPLPWIFAAAAAVHFAFLGTWVVVCVKHRRTAERIHAVMGALLLFKALKLACAAEDQWFVERTGTPHGWDVAFYVFGFFKGILLFTVIVLIGTGWSFLKPYLQEREKNVLMVVIPLQVIENIASAVIGETGPAGRDWLAWNQIFLLVDVICCCAVFFPIIWSIRNLREASKTDGKAARNLQKLTLFKQFYLVVVCYLYFTRIAASAVAAVLSYKYQWAVNVSIEMTSLAFYVFVFYNFQPVEKNPYLYVGDDEEEAAGGQLEMESTFEI

SEQ ID NO: 1373 - DNA, 1216 bp, Zea mays
  misc_feature: Ceres CLONE ID no. 466296
  misc_feature: Ceres CDNA ID no. 25446844
  CDS (169)..(1014): REFERENCED BY SEQ ID NO: 1374
aaaaaaaattgaacccataaattactagtagtacgtagcagctctaccaatgaatctgccttgtacatgcacaatcacaagctggagaattgtgctgggaacatgtccatctcctggcggtgctaaaaaaactaaaaagtgtttcgttcaactccatcagccgtgaacatgggcttcaagcgcagccccccgccgttcctcgccgtggccaacaagaccaacaggcaggtcttccgaggtctcctgggagtgaacttcgcctctgcaggatcaggcatcctcgacacgacggggagctccatcatcccgctgagcaagcaggtggagcagttcgccgccgtgcggcgcaacatctcgtcgcgcgtcggcaacgggtctgctgctgccgacgccctgctgtcgcggtccctgttcctcgtcagcaccggcggcaacgacctgttcgccttcttcgcgcggaacagcacgccgtcggacgccgacaagcggcggttcgtcgccaacctcgtcgcgctgtaccagaaccatgtgaaggctctgtacgtgctcggggctcggaagttcgccgtgatcgacgtcccgccggtcgggtgctgcccctacccgaggagccttcacccgctgggcgcctgcatcgacgtgctcaacgagctggcgcgcgggttcaacaagggcgtcagggcggccatgcacggcctcggcgtgagcttccaggggctcaggtactccgtcgggagctcccacgccgtcgtgcagagcatcatgaagcaccctcaaaggctggggttcaaggacgtgactaccgcgtgctgcgggtcgggccggttcaacggcaagtccgggtgcacgcccaacgcgacgctgtgcgacaaccggcaccagtacctgttctgggacctgctgcaccccacgcacgccgcctccaagatcgccgccgccgccatatacaacggctcgctccacttcgccgcgccgatgaacttcaggcagctggccgaagacgaccggtgctagctagcacagctagagctagcacgagttcgtagggacgtgtctctgttctctgctgcggactgtggtgaatatggtcgttggtgtgtagaggacgatggatgtgcatggctgctgtgttcgctgtatgtttctcgaccgtggtttggtttagatgatgatgaccgacgccgccggcgtagtttggacaaaaaaaaaaaaaaaa

SEQ ID NO: 1374 - protein, 281 aa, Zea mays
  misc_feature: Ceres CLONE ID no. 466296
  misc_feature: Ceres CDNA ID no. 25446844
  misc_feature (12)..(259): Pfam Name: Lipase_GDSL PFAM Desc: GDSL
  misc_feature: Homolog of GI Number: 50252143 NR Desc: putative anter
  misc_feature: Homolog of GI Number: 51964352 NR Desc: PREDICTED P0516G10.12
  misc_feature: Homolog of GI Number: 50904827 NR Desc: putative GDSL
  misc_feature: Homolog of GI Number: 54291019 NR Desc: GDSL
  misc_feature: Homolog of GI Number: 54291021 NR Desc: GDSL
  misc_feature: Homolog of GI Number: 77556793 NR Desc: GDSL
  misc_feature: Homolog of GI Number: 50252142 NR Desc: putative anter
  misc_feature: Homolog of GI Number: 50901190 NR Desc: putative GDSL
  misc_feature: Homolog of GI Number: 50927935 NR Desc: OSJNBa0084K11.17
  misc_feature: Homolog of GI Number: 50907099 NR Desc: putative GDSL
  misc_feature: Useful for making stronger plants
MGFKRSPPPFLAVANKTNRQVFRGLLGVNFASAGSGILDTTGSSIIPLSKQVEQFAAVRRNISSRVGNGSAAADALLSRSLFLVSTGGNDLFAFFARNSTPSDADKRRFVANLVALYQNHVKALYVLGARKFAVIDVPPVGCCPYPRSLHPLGACIDVLNELARGFNKGVRAAMHGLGVSFQGLRYSVGSSHAVVQSIMKHPQRLGFKDVTTACCGSGRFNGKSGCTPNATLCDNRHQYLFWDLLHPTHAASKIAAAAIYNGSLHFAAPMNFRQLAEDDRC

SEQ ID NO: 1375 - DNA, 772 bp, Zea mays
  misc_feature: Ceres CLONE ID no. 466878
  misc_feature: Ceres CDNA ID no. 25446075
  CDS (97)..(471): REFERENCED BY SEQ ID NO: 1376
actcagtactgcacactgccatcgctctcctacggtactgctgcctaccgcgcgtctcgtcccttcgctgccgctctatctatctcggccggagccatgggcggcggtggcgcggcgctgctgctgctggtgatgtgggcgggcgtggcgtcggcggccgtgtacgaggtgggcggcacgattgggtggaccgtcatgggcaaccccgactacgccgcctgggccagctccaagcagatcgtcatcggcgacaccgttgtgttcacgtataacaagcagttccacaacgtgctggcggtgagcaaggcggactacaagaactgcatcgccaccaagccgacggccacctggtccacggggaacgattccgtcgtcctcaacaccacgggccaccactacttcctctgcggctacccgggccactgcgctgccggccagaaggtggacatccgcgtcaccgggaacgtctagctagcttgctatagctagcccatcattatatatatatctgtagtcatcttaattattaaccccgcatttatttatttaactagccaccgaaccaatccaacgtgttatataataaggatatgcatgatgactaaaggatgttgttgtaatacgtagtatgtaagtcgcgtgtccacattgctactacaccatgacaccaccatcatcataaatatactgttatttacaggccttgcctactagaaaaaaaaaaaaaaaaaaaaaaaaaaaaaaaaaaaaaaaaacaaaaaaaaaaaaaaaa

SEQ ID NO: 1376 - protein, 124 aa, Zea mays
  misc_feature: Ceres CLONE ID no. 466878
  misc_feature: Ceres CDNA ID no. 25446075
  misc_feature (31)..(114): Pfam Name: Cu_bind_like PFAM Desc: Plastocyanin
  misc_feature: Homolog of GI Number: 3319353 NR Desc: contains similarity to copper
  misc_feature: Homolog of GI Number: 8515096 NR Desc: phytocyanin homolog
  misc_feature: Homolog of GI Number: 2760838 NR Desc: putative phytocyanin
  misc_feature: Homolog of GI Number: 56966972 NR Desc: Chain D
  misc_feature: Homolog of GI Number: 2493319 NR Desc: Mavicyanin
  misc_feature: Homolog of GI Number: 3746072 NR Desc: putative blue copper
  misc_feature: Homolog of GI Number: 50919275 NR Desc: putative phytocyanin
  misc_feature: Homolog of GI Number: 134970 NR Desc: Stellacyanin
  misc_feature: Homolog of GI Number: 50940937 NR Desc: putative blue copper binding protein
  misc_feature: Homolog of GI Number: 50912975 NR Desc: putative Blue copper protein precursor
MGGGGAALLLLVMWAGVASAAVYEVGGTIGWTVMGNPDYAAWASSKQIVIGDTVVFTYNKQFHNVLAVSKADYKNCIATKPTATWSTGNDSVVLNTTGHHYFLCGYPGHCAAGQKVDIRVTGNV

SEQ ID NO: 1377 - DNA, 1368 bp, Glycine max
  misc_feature: Ceres CLONE ID no. 467390
  misc_feature: Ceres CDNA ID no. 40350994
  CDS (49)..(1137): REFERENCED BY SEQ ID NO: 1378
ggcagaaccatcgctcaagctcacactcacagtaaaatccaaaccaaaatggcggaaaataaagccattgaagaagctcagagcaagttccgttcagagttccttcaagttctgcgtagtaggcgacccgctcaagttccattaacagtcgaattcgcgaagccagtggtgaatcctttgcatcagaactctcctccatcgatcgaagagatcaagataatggagtcgtgtccgagaactgatatagagaaccttgaagacttgctcgaggaggagaatctctatttgaatatagaggaaggagagcaaggacggttgcctttgttgattttgaagttgaaggaaagcgataagcagagaaaaaggcctgcagttgtttttcttcacagtacgaacaaatacaaagaagtcctacgtccattgcttaaggcgtatgcttcgcgaggatatatagcaatttctgttgattctcgttaccatggagaacgtgctaccagcgcaaccacctatcgcgatgcacttatttctgcatggaaaactggtgagacgatgccattcatatttgacacggtctgggacttgattagattggcagattatctaacacagagagaggatatagacccttctaggataggaatcactggaatatcacttggaggaatgcatgcatggtttgctgcagttgctgatactcgctatgctgtggttgctcctctgattggcattcagggatttcaatgggccataggcaacgataaatggcaggctcgagttgatagtataaagcctctttttgaggcggctcgtgatgatttgggtaaaggtgctattgacaaagaagtggtggagaaggtgtgggaccgaattgctcctggtttagcttcccaatttgactcaccttattcagttccaactatcgcaccacgtcctttgcttattgttaatggtgcggaagatcctcggtgtcccgttgcaggcttggaaattccaagggcacaagcaagccaggcatatggacagtttgactgtttagataatttcaagattattacagaacctggagttggacaccaattaacgagacttcaagtgaaagaatcatcttattggtttgacaggttcttgaacccttagcccgtgccctcatatgtgttcatcaagccctgtgtggttgttgctctagctcattgcctcatttctattgtcattgtgtcatgatatcaaagtcaataaattgtcaaatagaaatcatcatcatgatgactcttaaggtacagtcaataaatttattatgtatgatggtgtgtaattgaatgatagtaaaaaaaaaaattatattgtcattgcaaaaaaaaaaaaaaaaaa

SEQ ID NO: 1378 - protein, 362 aa, Glycine max
  misc_feature: Ceres CLONE ID no. 467390
  misc_feature: Ceres CDNA ID no. 40350994
  misc_feature (120)..(362): Pfam Name: Peptidase_S9 PFAM Desc: Prolyl oligopeptidase family
MAENKAIEEAQSKFRSEFLQVLRSRRPAQVPLTVEFAKPVVNPLHQNSPPSIEEIKIMESCPRTDIENLEDLLEEENLYLNIEEGEQGRLPLLILKLKESDKQRKRPAVVFLHSTNKYKEVLRPLLKAYASRGYIAISVDSRYHGERATSATTYRDALISAWKTGETMPFIFDTVWDLIRLADYLTQREDIDPSRIGITGISLGGMHAWFAAVADTRYAVVAPLIGIQGFQWAIGNDKWQARVDSIKPLFEAARDDLGKGAIDKEVVEKVWDRIAPGLASQFDSPYSVPTIAPRPLLIVNGAEDPRCPVAGLEIPRAQASQAYGQFDCLDNFKIITEPGVGHQLTRLQVKESSYWFDRFLNP

SEQ ID NO: 1379 - DNA, 1356 bp, Glycine max
  misc_feature: Ceres CLONE ID no. 468082
  misc_feature: Ceres CDNA ID no. 36518166
  CDS (17)..(1096): REFERENCED BY SEQ ID NO: 1380
gaaggaatatctagctatgggagacattgatccagcttttatacaatccacagaacaccgtcccatagcaaaggtggtggaagttagagagattccagtgatagacctttcagaaggtagaaaagaattactcatttcagaaattggcaaagcatgtgaggagtggggatttttccaagtaataaatcatggggtaccctttgagattagtagagaggttgagattgtctccaagaagttctttgagacgagcttagaggagaagaagaaagtgaaaagagatgaatttaatgcaatggggtaccatgatggggagcacaccaagaacgtaagagactggaaagaggtgtttgattaccttgttgaaaacactgcacaagtcccatcttcccatgagccaaatgatttggatttgaggactctcaccaaccaatggccccaaaactctcctcattttagggaaacattgcaagagtatgctcgagaagtggaaaagctagcttacaagttgttggagctgatttcacagagcttgggtttggctgctgacaaattccatggctgtttcaagaaccaactcagcatggtgcgactcaattactatcccgcatgccctttccctgacctggcacttggtgttggtcgccacaaggattccagtgctttaactgtgcttgcccaagatgatgttggaggattacaagttaagagaaaatcagatggagaatggattcctgttaaacctaccccaaatgcatttattatcaatgtgggggatatagttcaggtttggagcaatgacaagtacgagagcgtggagcacagggtggtggtgaatacagaaaaggaaaggttttcaattccattcttctttttccctgctcaccatgttatggtgaagcctgccgaggagctggtaaatgagcaaaatccagcaagatatagagaatacaagtatggtaagttctttgccaacagaaaccggagtgatttcaagaagcgtgatgtggagaatatccaaattcatcacttcaggatcttggatgaggcatttgggttggcatcctcaatatcatccatatctgagcataactagttctatctgctagttccatcatttcaaatccaaacaaaattgtgttggttcgattctgccaataaataataaaatattgagctttagttctagtatgtgttgttctctaaatttttattctatataaagagttcaagacatggactagtgtaagttgtagtgtgagtatctggtaacaccttagaagtcctggttgagtataaaatcactgtgaaatcaatacaaaagaagacattttatccaaaaaaaaaaaaaaaaaa

SEQ ID NO: 1380 - protein, 359 aa, Glycine max
  misc_feature: Ceres CLONE ID no. 468082
  misc_feature: Ceres CDNA ID no. 36518166
  misc_feature (187)..(288): Pfam Name: 2OG PFAM Desc: 2OG
  misc_feature: Homolog of GI Number: 50428684 NR Desc: putative oxidoreductase
  misc_feature: Homolog of GI Number: 42572483 NR Desc: oxidoreductase
  misc_feature: Homolog of GI Number: 30685157 NR Desc: oxidoreductase
  misc_feature: Homolog of GI Number: 50942943 NR Desc: putative Isopenicillin N synthase and related dioxygenases
  misc_feature: Homolog of GI Number: 18103924 NR Desc: putative oxylase protein
  misc_feature: Homolog of GI Number: 28827438 NR Desc: putative flavanone 3
  misc_feature: Homolog of GI Number: 6016680 NR Desc: putative leucoanthocyanidin dioxygenase
  misc_feature: Homolog of GI Number: 50920237 NR Desc: putative gibberelin 20
  misc_feature: Homolog of GI Number: 50916927 NR Desc: putative oxidoreductase
MGDIDPAFIQSTEHRPIAKVVEVREIPVIDLSEGRKELLISEIGKACEEWGFFQVINHGVPFEISREVEIVSKKFFETSLEEKKKVKRDEFNAMGYHDGEHTKNVRDWKEVFDYLVENTAQVPSSHEPNDLDLRTLTNQWPQNSPHFRETLQEYAREVEKLAYKLLELISQSLGLAADKFHGCFKNQLSMVRLNYYPACPFPDLALGVGRHKDSSALTVLAQDDVGGLQVKRKSDGEWIPVKPTPNAFIINVGDIVQVWSNDKYESVEHRVVVNTEKERFSIPFFFFPAHHVMVKPAEELVNEQNPARYREYKYGKFFANRNRSDFKKRDVENIQIHHFRILDEAFGLASSISSISEHN

SEQ ID NO: 1381 - DNA, 546 bp, Zea mays
  misc_feature: Ceres CLONE ID no. 468702
  misc_feature: Ceres CDNA ID no. 25446413
  CDS (88)..(387): REFERENCED BY SEQ ID NO: 1382
gtctcagccaaaaaaaaagaataaatcggaaaagcaagagacgccgaaaattcgaagggggaagaggagaagaggggaaagaagcaaatggcggagtccccgagcaagatcgaatccatgaggaagtgggtcgtcgagcacaagctccgagccgtaggttgcctctggctaggtgggatcagcagttcgatcgcatacaactggtcgcggcccaatatgaagactagcgtcaagatcatccacgcaaggttgcatgcgcaggctctaaccctagctgcattagttggttctgcatgcgtggagtactacgaccagaagtatggttcttctgggccaaaggtggacaagtacacaagccaatatctggcccattcgcataaagattaaggtccccatgttggttcatctcttggtgctcatgacccgcccgtggatgctggatgtttattctttttgtcttcttactttaaaaatggtgtacttgccagagaaatgataatgggggatataatgcagatattatcatcgaaaaaaaaaaaaaaaaaa

SEQ ID NO: 1382 - protein, 99 aa, Zea mays
  misc_feature: Ceres CLONE ID no. 468702
  misc_feature: Ceres CDNA ID no. 25446413
  misc_feature (1)..(71): Pfam Name: HIG_1_N PFAM Desc: Hypoxia induced protein conserved region
  misc_feature: Homolog of GI Number: 51964126 NR Desc: PREDICTED OSJNBa0016G10.13 gene product
  misc_feature: Homolog of GI Number: 77553422 NR Desc: Hypoxia induced protein conserved region
  misc_feature: Homolog of GI Number: 77548353 NR Desc: anaerobically inducible early gene 2
  misc_feature: Homolog of GI Number: 66850228 NR Desc: mitochondrial hypoxia responsive domain protein
MAESPSKIESMRKWVVEHKLRAVGCLWLGGISSSIAYNWSRPNMKTSVKIIHARLHAQALTLAALVGSACVEYYDQKYGSSGPKVDKYTSQYLAHSHKD

SEQ ID NO: 1383 - DNA, 1389 bp, Zea mays
  misc_feature: Ceres CLONE ID no. 468770
  misc_feature: Ceres CDNA ID no. 40041227
  CDS (82)..(1086): REFERENCED BY SEQ ID NO: 1384
gctgctgaggacactaggcccgaccgcccgaggaaggaagagaaacccgcagagggcgatagaggtcagcgcgattcggagatgggcatgggcgacgaactgtgggacgactcggcgctggtcgtcgccttcgaccgcgccatttccacgttcaatgaaatgcattgcaagagcaggcgagcaacgccaagtaaggatgcgaagaaggaacacgctgctgctcctgcagcagaagaagagcccattactgctggagcagtggatgagtgcagagaggaagatgacaactgtgacaacgcacagacagttgagcaacagcagccctctgacgacaggcagacagttgagcaagcttctcttcaggaaactgatccaggcaaagagacacatgtttcagaggctaaaacgctcacagcagatgctgatggaaatttgagttcaagccagcaaactggggagtacaatgaattgctgagacaatactatgagcttgaggagaagagtcggaacattcttgagcaacttcaacaaacaaactcttggaattatcaggcaccaggatatgcttctacaacccaacagcagcaagttcctgtctatagtgccacagcaccagaccttcactcttccaccactcaatcatcatgctgcaattggaatgttcccctggtatctgtctactgctgttcaactggccaaccaagtggaggttctgcttatatgccacctactgctggctgcagcgcaacattgacttgtgatcaatgcccagatgcaaacagtgcataccctagcgtttcaaacttcatgcaggtcccaacaaatgtatctatcaatgatgatcaagttgctaaggctgcaatgaagactgctgaaggtgccttcaattttatgagaagtacgatatctggacagcctggcgcccaaagaaatgaatctgatactgggaaggaggaaagcactgatatgggcacaaacctgaatcttgatagtgatcttgctgctctcttaaattcatggtatgctgctgggttctacacttgcaggtacctcacgctgcaatctacgagaaattccagaccgtagagtgctttggccgtcttgagttttagatgtctggggaaaaaaaaagcaaatcactgggtgcgcgtgtgtgccttcaagtacgaatattctgctggagtttgtctactgtctgcttgctgcttgtcactgctattttaagctacactagactttcggtattgctcgaatgtgaatctgttgatgccaggcagaaaaattgcgtataaatgtgtaaactgtcgcactgacctatcagatattcgtcgtatatagagcgctgccatgttcaacctaaaaaaaaaaaaaacaaaaaaaaaaaaaaaa

SEQ ID NO: 1384 - protein, 334 aa, Zea mays
  misc_feature: Ceres CLONE ID no. 468770
  misc_feature: Ceres CDNA ID no. 40041227
MGMGDELWDDSALVVAFDRAISTFNEMHCKSRRATPSKDAKKEHAAAPAAEEEPITAGAVDECREEDDNCDNAQTVEQQQPSDDRQTVEQASLQETDPGKETHVSEAKTLTADADGNLSSSQQTGEYNELLRQYYELEEKSRNILEQLQQTNSWNYQAPGYASTTQQQQVPVYSATAPDLHSSTTQSSCCNWNVPLVSVYCCSTGQPSGGSAYMPPTAGCSATLTCDQCPDANSAYPSVSNFMQVPTNVSINDDQVAKAAMKTAEGAFNFMRSTISGQPGAQRNESDTGKEESTDMGTNLNLDSDLAALLNSWYAAGFYTCRYLTLQSTRNSRP

SEQ ID NO: 1385 - DNA, 1303 bp, Zea mays
  misc_feature: Ceres CLONE ID no. 469230
  misc_feature: Ceres CDNA ID no. 40041228
  CDS (304)..(918): REFERENCED BY SEQ ID NO: 1386
cacaccctccttcctaaaaatagtagccggcgccatgcaaatgcgattccccacagctccccgttcctgatggagctcctccgcagatcaatggacctatgagacgacgagcgacgccagtcagcaaccaggtcgtccaggtaccgcaggaactcccagcggccacccctactagcaaccactccagtctccagctgagctgagctgagctgagcaacaaaggttcagctccattccaacgcgcggccgctgcctcggctgccaccgccgagatcagccgccatctccaccaaaggttaatcgatggacctgcccccaaaccccgagagcccgggaggcggtggtgatggcggcggaggaggcggagccggtggatcgagcggcggggcgtcttcgtcggcgccgggcggcggcacgccgcagacgccgagccggtacgaggcgcagaagcggcgggactggaacacgttcgggcagtacctgcggaaccaccggccgccgctgagcctggcgcagtgcagcggcgcgcacgtgctggagttcctgcggtacctggaccagttcggcaagaccaaggtccacacggcggcgtgccccttcttcggccacccgagcccgcccgcgccgtgcccctgcccgctgcgccaggcgtggggcagcctcgacgcgctggtgggccgcctccgcgccgccttcgaggagaacggaggccgcccggagtccaaccccttcgcggcgcgcgccgtccgcctctacctccgcgaggtccgcgagcaccaggcccgcgcgcgcggcgtcagctacgagaagaagaagcgcaagaagccgcagccagctgatcacgccagcgggagcggaggacaaggccctcaccacccgccgcctccggcaccgccgcccgccggcgcggcgtgctgaggcctgaggaacagtactacgacacacgcaccccatttggtatgccggccggactgagcatattttatgtaggtttcgatcgatttgccggtgcatgcatgcatggtttatttgctactaccgttttgctcgcgctgctggtgctgcttcttcttcgcttagactctctctaccgatcgtgtgccgtgctacattgttatttcttcttctccgtctctctctctctctctcctgctacacgcttcagttcctagctaccgcttattttcgtttcaagcagtttaatttgcttgtagaagcaaatcttatcattggatcattgaattgaagcctatatatatatgcttttcattcaaaaaaaaaaaagaaaaaaaaaaaaaaaaaa

SEQ ID NO: 1386 - protein, 204 aa, Zea mays
  misc_feature: Ceres CLONE ID no. 469230
  misc_feature: Ceres CDNA ID no. 40041228
  misc_feature: The plant flowers significantly late compared to wild-type.
  misc_feature: null
  misc_feature: Useful for making plants with modulated flowering time
  misc_feature: Useful for making plants with modulated low light sensitivity
  misc_feature: Homolog of GI Number: 50926456 NR Desc: OSJNBb0072M01.12
  misc_feature: Homolog of GI Number: 34909440 NR Desc: OSJNBa0014K08.14
  misc_feature: Homolog of GI Number: 66779666 NR Desc: Initiation factor 2:Small GTP
  misc_feature: Homolog of GI Number: 66776813 NR Desc: Phosphoribosylaminoimidazole
MDLPPNPESPGGGGDGGGGGGAGGSSGGASSSAPGGGTPQTPSRYEAQKRRDWNTFGQYLRNHRPPLSLAQCSGAHVLEFLRYLDQFGKTKVHTAACPFFGHPSPPAPCPCPLRQAWGSLDALVGRLRAAFEENGGRPESNPFAARAVRLYLREVREHQARARGVSYEKKKRKKPQPADHASGSGGQGPHHPPPPAPPPAGAAC

SEQ ID NO: 1387 - DNA, 663 bp, Zea mays
  misc_feature: Ceres CLONE ID no. 469296
  misc_feature: Ceres CDNA ID no. 29191487
  CDS (81)..(500): REFERENCED BY SEQ ID NO: 1388
aagcacaagtgcacaaccaacagcaaagaagagacgacgtcgatcgatcgatatctcagcaaccaagcaggtaggtaggcatggcggccgagaaggagggcgcggtggtgaccaagggccacgacgaggggatgaaggcggcggcggcgctgctggaggagttcgggctcccgccggggctgctgccgctggaggacgtgacggaggtggtgttcgtgcgggccaccggctacttctggctcgcgcagcgcaagaaggtggagcaccggttccgcaagatcggcaagcaggtgagctacgacgtcgccgccatgggtaaggttcacggatcgctggcccgcgctgggaaggtgcgcgggcagacgcccaaggttgcaaagcaggacaagaagaagaagccccgcggccgcgctcacaagcgcatgcaatacaaccgccgcttcgtcaccgccgttgttggattcggcaagaagcgcggccccaactcatcggagaagtagatctagctatggctttgtgttttattccccactagtttcctcactgatggcaacttgctgaagacttatgctattatctgtatcgatgttactgcaatactgttaagtaggatatatgcatcgtttagttgatcaaaaaaaaaaaataaaaaaaaaaaaaaaa

SEQ ID NO: 1388 - protein, 62 aa, Zea mays; identical to SEQ ID NO: 38
  misc_feature: Ceres CLONE ID no. 469296
  misc_feature: Ceres CDNA ID no. 29191487
  misc_feature (3)..(61): Pfam Name: Ribosomal_S30 PFAM Desc: Ribosomal protein S30
  misc_feature: Homolog of GI Number: 55773694 NR Desc: 40S ribosomal protein S30
  misc_feature: Homolog of GI Number: 30102786 NR Desc: At5g56670
  misc_feature: Homolog of GI Number: 25295582 NR Desc: 40S ribosomal protein S30
  misc_feature: Homolog of GI Number: 50603825 NR Desc: MGC89853 protein
  misc_feature: Homolog of GI Number: 6679753 NR Desc: Finkel
  misc_feature: Homolog of GI Number: 15822932 NR Desc: Finkel
  misc_feature: Homolog of GI Number: 27807419 NR Desc: Finkel
  misc_feature: Homolog of GI Number: 36968262 NR Desc: Finkel
  misc_feature: Homolog of GI Number: 47682823 NR Desc: MGC80045 protein

SEQ ID NO: 1389 - DNA, 583 bp, Zea mays
  misc_feature: Ceres CLONE ID no. 469861
  misc_feature: Ceres CDNA ID no. 35385340
  CDS (124)..(408): REFERENCED BY SEQ ID NO: 1390
cagagccagtctctctctcgcgcaagccacagtagagcaaccaaccataccaccggcccgtgtcgatctctggcctctctcgtgcaaggaattaagcaggcaagaggccaaccttcttccagcatggccaaggcgagcagcaggctgctcttctcgctctcgctcgtcgtcctgctgctcctcgtggagaccactacttctccccatggacaggctgacgccatcgactgcggcgcgagctgctcgtaccggtgcagcaagtcgggacggcccaagatgtgcctgagggcgtgcggcacctgctgccagcgctgcggctgcgtcccgccgggcacctccggcaacgaggacgtctgcccctgctacgccaacatgaagacccacgacggccagcacaagtgcccgtgatccatccaccgtggttcccagcatcagcagctttgccaaaaagacatgatacctacatatatataagagtacctagctgctgctgctctactaccttgttggttcattatattgtgcgcgtgcatgcatgaataaataaatgaacatattagggcagaaaaaaaaaaaaaaaaaa

SEQ ID NO: 1390 - protein, 94 aa, Zea mays; identical to SEQ ID NO: 656
  misc_feature: Ceres CLONE ID no. 469861
  misc_feature: Ceres CDNA ID no. 35385340
  misc_feature (26)..(94): Pfam Name: GASA PFAM Desc: Gibberellin regulated protein
  misc_feature: Homolog of GI Number: 887939 NR Desc: GAST1 protein homolog
  misc_feature: Homolog of GI Number: 18087524 NR Desc: At1g75750/F10A5_16
  misc_feature: Homolog of GI Number: 2792297 NR Desc: GAST
  misc_feature: Homolog of GI Number: 25313155 NR Desc: protein F10A5.6
  misc_feature: Homolog of GI Number: 5102600 NR Desc: GEG protein
  misc_feature: Homolog of GI Number: 21618022 NR Desc: GAST1
  misc_feature: Homolog of GI Number: 2253442 NR Desc: LTCOR11
  misc_feature: Homolog of GI Number: 14625945 NR Desc: snakin2
  misc_feature: Homolog of GI Number: 44889867 NR Desc: GASA

SEQ ID NO: 1391 - DNA, 1837 bp, Glycine max
  misc_feature: Ceres CLONE ID no. 470488
  misc_feature: Ceres CDNA ID no. 36695700
  CDS (142)..(1731): REFERENCED BY SEQ ID NO: 1392
gtctgaagccggtagctggactagctgctggagtgtggaggaagactagggaggctgccttcatatagcggctagttggagcccaacgctcgccattgcaagccttcccggttacttgttcactaacaaggtcgggacggcatggcccttggaactgcgtaccatcactacctgcagctcgccggcgaccatggcaccgccacacacgcactgctcctcggcgtacttatcttcctcgtcatccgcctagtatccgcaaggcgaaccggcacaacctcagccaacaaacgtaagcagcaacagcggcttccgctcccgccttcgcccccgggcaagctgcccatcatcggccacctccacctcatcggcgccgagacccacatctcgatccgggacctggacgccaagcacgggcgcaacggcctgctgctcctccgcatcggcgccgtgcccaccctgttcgtgtcctcgcccagcgccgccgacgccgtcctgcgcacccaggaccacatcttcgcgtcgcggccgccgtccatggccgccgagatcatccgctacgggccctcggacgtcgcgttcgtgccctacggcgagtactggcggcagggcaggaaactcctcaccacgcacatgctcagcaccaagaaggtgcagtccttccgccatggccgacaggaagagatccgcgcggctgccaccgccgcgccgccggcggcggtggacctgagcgatctcctgtccgggtacaccaacgacgtggtgtgccgcgcggtgctgggcgcgtcgcaccggaaccaaggccggaacaggctgttcagcgagctgacagagatcaacgtgtccctcctcggcgggttcaacctcgaggactacttccccccgaatatggccatggcggacgtgctcctccggctggtgtccgtcaaggcccggcggctcaaccagaggtggaacgacgtgttcgacgagctcatccaggaacacgtgcagagcaggccctccggcgagagcgaggagagcgaggcggacttcatacacgttctgctctccatacagcaagagtacggcctcactacggacaatctcaaggccatcttggtggacatgttcgaggcaggtatagagacatcttacctgacgctagagtacggcatggccgagctcatcaacaacaggcacgtcatggagaagctacagacggaggtgaggacgacgatgcgctcgccggacggcaagaagctggacatgctagcggaggaggacctcggcagcatgccctacctcaaggcgaccatcaaggagacgctgcgcctgcacccgccggcgccgttcctcctcccgcactactccaccgccgactccgagatcgacggctacttcgtcccagccgggacgcgcgtcctcgtcaacgcctgggcgctcgggagggaccgcacgacgtgggagaagccggaggagttcatgccggagcggttcgtgcaggaaccgggcgccgtggacgtccacatgaagggcaaggacctcaggttcatcccgttcggctccggccggaggatctgccccgggatgaacttcggattcgccaccatggagatcatgctggccaatctcatgtaccattttgattgggaggttccgggctctgcagcaggggtgtccatggacgagtcctttgggctgacgcttcgccggaaggagaagcttctccttgttccaaggattgcttcctgataatcctacatctgtaaaacttgtgtcttgctagctgtaccgggaacaagattaaataatgcaaggaataaagtgactctgttcttcgttaaaaaaaaaaaaaaaa

SEQ ID NO: 1392 - protein, 529 aa, Glycine max
  misc_feature: Ceres CLONE ID no. 470488
  misc_feature: Ceres CDNA ID no. 36695700
  misc_feature (59)..(524): Pfam Name: p450 PFAM Desc: Cytochrome P450
  misc_feature: Homolog of GI Number: 42742281 NR Desc: Bx3
  misc_feature: Homolog of GI Number: 42742283 NR Desc: Bx4
  misc_feature: Homolog of GI Number: 19909888 NR Desc: P450
  misc_feature: Homolog of GI Number: 48526685 NR Desc: P450
  misc_feature: Homolog of GI Number: 62148966 NR Desc: P450
  misc_feature: Homolog of GI Number: 62148968 NR Desc: P450
  misc_feature: Homolog of GI Number: 62148970 NR Desc: P450
  misc_feature: Homolog of GI Number: 62148972 NR Desc: P450
  misc_feature: Homolog of GI Number: 26655531 NR Desc: cytochrome P450
  misc_feature: Homolog of GI Number: 26655533 NR Desc: cytochrome P450
MALGTAYHHYLQLAGDHGTATHALLLGVLIFLVIRLVSARRTGTTSANKRKQQQRLPLPPSPPGKLPIIGHLHLIGAETHISIRDLDAKHGRNGLLLLRIGAVPTLFVSSPSAADAVLRTQDHIFASRPPSMAAEIIRYGPSDVAFVPYGEYWRQGRKLLTTHMLSTKKVQSFRHGRQEEIRAAATAAPPAAVDLSDLLSGYTNDVVCRAVLGASHRNQGRNRLFSELTEINVSLLGGFNLEDYFPPNMAMADVLLRLVSVKARRLNQRWNDVFDELIQEHVQSRPSGESEESEADFIHVLLSIQQEYGLTTDNLKAILVDMFEAGIETSYLTLEYGMAELINNRHVMEKLQTEVRTTMRSPDGKKLDMLAEEDLGSMPYLKATIKETLRLHPPAPFLLPHYSTADSEIDGYFVPAGTRVLVNAWALGRDRTTWEKPEEFMPERFVQEPGAVDVHMKGKDLRFIPFGSGRRICPGMNFGFATMEIMLANLMYHFDWEVPGSAAGVSMDESFGLTLRRKEKLLLVPRIAS

SEQ ID NO: 1393 - DNA, 1280 bp, Glycine max
  misc_feature: Ceres CLONE ID no. 470649
  misc_feature: Ceres CDNA ID no. 25445536
  CDS (20)..(1063): REFERENCED BY SEQ ID NO: 1394
ggagcaaacaaaagaagcaatgatgatgaatgtcatagggctgagtctgagtctggtgttaacttcactggcagcagcgagcaccatcgtcaaagaagggcacagagttgtcgtggttgaatacgaccaaggtggccatcagaacaccaaaatctcaatatcaccagaacaacctacgcatgctaatcttaaagatcccatttgcgacgcctatggaaaatgcaagcacaaaatcgtggatgcaatggagaagtctcaagaggtcatccatgagaagaaggacgagattgccgccaacaaggaggcagcacgccaagttgctggtaaaaccaaagagagagtgtatgataaagcccgtcatgtccacgaatacgcccaaaacactgtagaaacagccaagaaccatattgcctgtaacgtgtcaaacgccaaagatgcattcaagcgtctaatagcaggatctttggagaggcagagccttaattctttgatgggggtggctaacatgttggggttttccacggcttatgggatgtgtgtgtgggttacgttcatctccagctatgtgcagtccagggctatggcaaggcaacaatttgcagtggtgcagagtaaaatatatcctgtttatttcagggccatgtcttatagcatcggggtcgctttattcgcccatgtcttggcccatagaaacaccttgctctccaacaagtctgacttattgcaagcatataatcttctggcctcccttgtcacacttttcttcaattctctttacttggagcctcgggccaccaagaaattgtggtttattcagttgatgttcgagaggataaagatagaaaaagaggaaggaagaggcagatcagaagatgtgagtagcagaactaaagagccagcttccacgaccgcagaccaggatgcagtcagaacaaggataatcaagctcaatgacaagctcaagaaactcaattcctactcctcattcctcaatatcctcaatctcatgtctcttacttggcatctcgtttatttggctcaacgacttccccatatttgctaaaccaaatactacgttccttttgtcttttctactaatcacttgttttctgtgtttcttttctgtttctatcatgtttgttgatatttgcaaatacttcagtctctagatttttgtatcttttagctttgggaacaatacagtgtttaccactccctgtatttaatttgtgttaagtgtaaaactcttgttactttgctttaaaaaaaaaaaaaaaaaa

SEQ ID NO: 1394 - protein, 345 aa, Glycine max
  misc_feature: Ceres CLONE ID no. 470649
  misc_feature: Ceres CDNA ID no. 25445536
  misc_feature (64)..(133): Pfam Name: LEA_4 PFAM Desc: Late embryogenesis abundant protein
  misc_feature: Homolog of GI Number: 4836403 NR Desc: seed maturation protein PM27
  misc_feature: Homolog of GI Number: 50924420 NR Desc: OSJNBa0088K19.14
  misc_feature: Homolog of GI Number: 61830092 NR Desc:  similar to MBC3205
  misc_feature: Homolog of GI Number: 76621817 NR Desc:  similar to CG32512
  misc_feature: Homolog of GI Number: 37183016 NR Desc: MBC3205
MNVIGLSLSLVLTSLAAASTIVKEGHRVVVVEYDQGGHQNTKISISPEQPTHANLKDPICDAYGKCKHKIVDAMEKSQEVIHEKKDEIAANKEAARQVAGKTKERVYDKARHVHEYAQNTVETAKNHIACNVSNAKDAFKRLIAGSLERQSLNSLMGVANMLGFSTAYGMCVWVTFISSYVQSRAMARQQFAVVQSKIYPVYFRAMSYSIGVALFAHVLAHRNTLLSNKSDLLQAYNLLASLVTLFFNSLYLEPRATKKLWFIQLMFERIKIEKEEGRGRSEDVSSRTKEPASTTADQDAVRTRIIKLNDKLKKLNSYSSFLNILNLMSLTWHLVYLAQRLPHIC

SEQ ID NO: 1395 - DNA, 1525 bp, Glycine max
  misc_feature: Ceres CLONE ID no. 471676
  misc_feature: Ceres CDNA ID no. 40041226
  CDS (175)..(1188): REFERENCED BY SEQ ID NO: 1396
ggctaataattaagacagaaacatacgtggcagcttagggttcaccccaagtcctaaaaacgccccctccctacccttcccccatttcccccccaacccaaacgctgccaacaacaacactctctctacaaaattgatggtcccaccgacgagcgggtgtcggaatcggaggccatgaacggcggcgccaccaccgccaccttccgatccatcctcgacaagcccctcaaccagcttaccgaggatgacatttctcagctcactcgcgaagactgtcgcagattcctcaaagaaaaagggatgcgtaggccttcctggaacaaatcgcaggcgatccaacaggtcatttccctgaaagcgctgctggaaccttccgacgatgatactcctcctcctcctcctcccgccatgcaccaccgtagccatgctcaacctcaacctcaagtgaatttgagtgaacctcctcctcctccgcccaaggctccgccacctgaagaacccgcttttcatgctgctgaagacattcagaaatctgcgtcgtctggggaaaagcctacggaaactaatgacaccaacaccaacgttgctagccccaaagggtgtgcaactagtggatcatttgggcaaatgacaattttctattgtggtaaggtgaatgtctatgacagagtctcgcctgataaggcacgagcaatcatgcagcttgcaacgagtccagtccagcttactcaggatgatcctttaaatggaaatgcagctgtttggacttctccttgccacttaccgatggataaggatgtcctcgttcctgttgatactacaatccttcaggttgctcaagcagataagatggtggagtatcctctgcaatatagggagaaagggagcatagctcgtgatgctgatgtagagggtcaggaacaccgaaaagtgtcattgcaacgatatcttgaaaagcgtaaggacaggggaagattgaaaggcaagaaattgactgggataacttcatctaacttcgagatgtatttgaaccttccagtgaaggtccattcctcaaatgggaattcaagccgtagcagtactagctctccaccacaacctagactgcctctagtttccagtggttcagatcagctaaaggttgcccttcccattgatctcaatgacaaagatgttcaagaatgctaaaattcaaactagatagattatgcagagttgggactcgtagatgattgaagagagatgacgaaagtattataactgaagagaccatagcgtctagcagcctactgcaagaattggattgctcttagactggtcaattttagtatatttaactgtttgggcaaatttcttttgtttaggatagtggagtgtcctgcctacctgatcaattttgtaatctaatttcatccttcgggaatatcttgttactgaagttttaaggttttatgagttgaaatgtagagccaggagcagctattttcccaggaaaaaaaaaaaaaaaaaaaaaaaaaaaaaaaaa

SEQ ID NO: 1396 - protein, 337 aa, Glycine max
  misc_feature: Ceres CLONE ID no. 471676
  misc_feature: Ceres CDNA ID no. 40041226
  misc_feature (145)..(180): Pfam Name: Zim PFAM Desc: ZIM motif
MNGGATTATFRSILDKPLNQLTEDDISQLTREDCRRFLKEKGMRRPSWNKSQAIQQVISLKALLEPSDDDTPPPPPPAMHHRSHAQPQPQVNLSEPPPPPPKAPPPEEPAFHAAEDIQKSASSGEKPTETNDTNTNVASPKGCATSGSFGQMTIFYCGKVNVYDRVSPDKARAIMQLATSPVQLTQDDPLNGNAAVWTSPCHLPMDKDVLVPVDTTILQVAQADKMVEYPLQYREKGSIARDADVEGQEHRKVSLQRYLEKRKDRGRLKGKKLTGITSSNFEMYLNLPVKVHSSNGNSSRSSTSSPPQPRLPLVSSGSDQLKVALPIDLNDKDVQEC

SEQ ID NO: 1397 - DNA, 1600 bp, Glycine max
  misc_feature: Ceres CLONE ID no. 471829
  misc_feature: Ceres CDNA ID no. 25445526
  CDS (135)..(1097): REFERENCED BY SEQ ID NO: 1398
aattgaatcaacgaatcaatcatcatcacatcacgacgacgcatgattctggtcttgctctgttccaaaactgaatcccaatcacgaagaaaagaatccctcgcttggatcttgcaacgtcgcgagagggatccatgatactcctgcagtctcattctagattcctgttccagaccttgttgaatcgggcccaaaatctcgaaaaaggagttgaactggatcaccactgggttgagtttgatgatgttcgatatcatattcaggtgtcaatgaagaatcctcatgttttgttgctatcagtatcgttgcctactccttcttcagaaactatttttgtctgtggacttccttttggagccatcgaagcaatcaaagctgcatatggtaatcttgtgcaaattcttgatcctccaagggatggctttaacctcacattaaaaataaatctgtcaaagcttccggcaaatcaagagcaaaaacatgcttttttggtaaaagttgcatcaataagggaggttgtccttggtgcaccattgagagtaattttagaacatcttgctgccagaactgttgctccagacctggatccacttgttgcccttgttcatcggcctaatgagtctttctttctttttcctcaggctgataaggtgactgtagtgtatcctatgagattcaacgattcaatagacattgttctcgcaacttcattcctgcaggaatttgtcgaagccaggcgtacagctggacttaataatacacctccttgttcatggtctcttactcctccactggaactaaaagaagttcccgctgcgaatgcaggatttgtgacatttgttatcttccctcgtcatgtcgaaggccagaaactggatcgtacagtatggaatctgtcaacttttcatgcctatgttagctatcatgttaagtgctcagaaggatttatgcatacacgtatgcggcgtcgtgtggagtccttgattcaggctctgaatcgtgccaaaccagatgtcgagaattcaaagaaaacttcatacaacagatccttcaaacggctgagtctcaaggattcaaggaccaactcattttcataaagaggaagcatggtgaggaagatattctgcttctattggactatacaatcaccaaccaaggagtcgctattgcatgtttgcagaatgttccagatgcttgtttctgaactcttcacgcttagtatccaaggaattgctggtctatttctgcagactgctccaggagcttgtaatttattcatggaaaagaataggatacaaatacaatagaaacgacctgacaaaattagttattaaaatgtacaactatttatcatctgaatgtggtgtatatctgtatttggggatacgtatcaaaatatcttcctttttaaggcattcatcaaagtttccttttattgtaaagtatcgataatgtgttgatgcaagtttaaacttttgaatgaggtgacaaacatggataagctgttgtagcgtttgaagggttttaaattagatcatgtagcatgcttttgcggattgtaattcaaattcatcgtgtttactcaaaaaaaaaaaaaaaa

SEQ ID NO: 1398 - protein, 320 aa, Glycine max
  misc_feature: Ceres CLONE ID no. 471829
  misc_feature: Ceres CDNA ID no. 25445526
  misc_feature (96)..(296): Pfam Name: P34 PFAM Desc: Arp2/3 complex
  misc_feature: Homolog of GI Number: 34911928 NR Desc: OSJNBb0006H05.27
  misc_feature: Homolog of GI Number: 4926828 NR Desc: T17H7.13
  misc_feature: Homolog of GI Number: 30685673 NR Desc: actin
  misc_feature: Homolog of GI Number: 50926408 NR Desc: OSJNBa0004N05.15
  misc_feature: Homolog of GI Number: 4093165 NR Desc: p34
  misc_feature: Homolog of GI Number: 47086645 NR Desc: actin related protein 2/3 complex
  misc_feature: Homolog of GI Number: 62655196 NR Desc:  similar to actin related protein 2/3 complex subunit 2
  misc_feature: Homolog of GI Number: 54644354 NR Desc: GA10664
  misc_feature: Homolog of GI Number: 45200876 NR Desc: AGL221Wp
  misc_feature: Homolog of GI Number: 50750876 NR Desc:  similar to actin related protein 2/3 complex subunit 2
MILLQSHSRFLFQTLLNRAQNLEKGVELDHHWVEFDDVRYHIQVSMKNPHVLLLSVSLPTPSSETIFVCGLPFGAIEAIKAAYGNLVQILDPPRDGFNLTLKINLSKLPANQEQKHAFLVKVASIREVVLGAPLRVILEHLAARTVAPDLDPLVALVHRPNESFFLFPQADKVTVVYPMRFNDSIDIVLATSFLQEFVEARRTAGLNNTPPCSWSLTPPLELKEVPAANAGFVTFVIFPRHVEGQKLDRTVWNLSTFHAYVSYHVKCSEGFMHTRMRRRVESLIQALNRAKPDVENSKKTSYNRSFKRLSLKDSRTNSFS

SEQ ID NO: 1399 - DNA, 1046 bp, Zea mays
  misc_feature: Ceres CLONE ID no. 472579
  misc_feature: Ceres CDNA ID no. 36588561
  CDS (137)..(787): REFERENCED BY SEQ ID NO: 1400
tctctccgtttttccccttcgcgtatcttcgtccgccgcaacccttcacgtatcgtctctctctcacacggtcacaccctgacctcccccatccccctcccagaaaagacccctcgaaaaacggcggcgctgcgacatggcggaggtcgaggctccagctactgcggtcgaggctccagctgctgcggtcgcgacgacgacccctgaggtggcggcgcccgaggccggagccgctacggaggcgaagggtccgcacaagcttcaccggcagtggaccttctggtacgacatccagacgaagaccaagtccggggctgcgtggggcacctccctcaaaaaggcctacaccttcgacaccgttgaggagttctggagcatgtatgatcagatttttcgtccaagcaagttgtctgggagtgctgattttcatctattcaaggctggagtagagccaaaatgggaagacccagagtgtgcaaatggtggcaaatggactgtcccatgcaacagaaaggcaacctttgagaccatgtggcttgaaacgttgatggctcttattggggagcagttcgatgaaacagaggacatttgtggaattgttgctagtgtccgtgcaagaggagataagctggcattatggactaggactgccagcaatgaagctgtccaggtaaacattggcaagaagtggaaggatgtcatcgactacaacgacaagatcacgtacactttccatgacgactctaagagagacaagcccagcagaggtgggcggtacaccgtgtaagctggacgtcaagaagggcgttgctttggattggaattggagagcggaggtgggattttcttctgggactggcgccgactttcgtttgattcagcttttacacgaggcagttttcgccgctattacaatgttattttcctctcagacagcttatgtggtacaagaaagagacgttggagacattgacggtttctgtatggcactagatttctatcttaatatggcccccccggttcagtagcgaaaaaaaaaaaaaaaa

SEQ ID NO: 1400 - protein, 216 aa, Zea mays
  misc_feature: Ceres CLONE ID no. 472579
  misc_feature: Ceres CDNA ID no. 36588561
  misc_feature (13)..(216): Pfam Name: IF4E PFAM Desc: Eukaryotic initiation factor 4E
  misc_feature: Homolog of GI Number: 6016335 NR Desc: Eukaryotic translation initiation factor 4E
  misc_feature: Homolog of GI Number: 31432586 NR Desc: cap
  misc_feature: Homolog of GI Number: 1352442 NR Desc: Eukaryotic translation initiation factor 4E
  misc_feature: Homolog of GI Number: 170753 NR Desc: initiation factor
  misc_feature: Homolog of GI Number: 547713 NR Desc: Eukaryotic translation initiation factor 4E
  misc_feature: Homolog of GI Number: 67005945 NR Desc: eukaryotic initiation factor 4E
  misc_feature: Homolog of GI Number: 51557995 NR Desc: eukaryotic initiation factor iso4E
  misc_feature: Homolog of GI Number: 32698526 NR Desc: eukaryotic translation initiation factor iso4E
  misc_feature: Homolog of GI Number: 2209274 NR Desc: eukaryotic initiation factor
  misc_feature: Homolog of GI Number: 21592435 NR Desc: eIF4Eiso protein
MAEVEAPATAVEAPAAAVATTTPEVAAPEAGAATEAKGPHKLHRQWTFWYDIQTKTKSGAAWGTSLKKAYTFDTVEEFWSMYDQIFRPSKLSGSADFHLFKAGVEPKWEDPECANGGKWTVPCNRKATFETMWLETLMALIGEQFDETEDICGIVASVRARGDKLALWTRTASNEAVQVNIGKKWKDVIDYNDKITYTFHDDSKRDKPSRGGRYTV

SEQ ID NO: 1401 - DNA, 757 bp, Zea mays
  misc_feature: Ceres CLONE ID no. 472762
  misc_feature: Ceres CDNA ID no. 25445743
  CDS (467)..(700): REFERENCED BY SEQ ID NO: 1402
aaaacagccaaaaggacatggccggctctcctctctctctcacacacacagacacaaggacgacgtgcgcggagaggttttttattcagtagtagtagtagacatgcaagtcgtgatcatgcgtaggtagatatggtcatgacggtccgaaccgcaggcgccgacgacggcgggatagatatggatcgtcttcaggcggccgccggcgccgtcgtcgtcgtttagggttcagttcaccctggagcagtcggtggaggtgctgatggtgtaggggatgctgacgccgcacttggaggggatgctggcggcgttaccggcgttgaggccgctgacgccggcggcggcgttcttgaggcagttgcaggcggcgcggcggtcggcggtggtgcgggcggcgttgttgaggctcctgacgccgctgcagcagccggcggagggccccgagccctggccgcgcgcgtaggagatgcagggcgcgatggccgacgccacctgcccgcagctgatggccgcctccgacgtcgccgccgccagcagcaccaaggccaccacggccgccgccactactgccaactgctgcgtgcgggccatgttccttgaggagggaggtgcctgccgccgctctgctagctcgctcgctcgggctgtttggaaatgcggaggtcacaggtcagtagatggcaatggcagctggtggtgatgagtggtggtgaggagagttgaagtgggatgtcgctcctcaaaaaaaaaaaaaaaa

SEQ ID NO: 1402 - protein, 77 aa, Zea mays
  misc_feature: Ceres CLONE ID no. 472762
  misc_feature: Ceres CDNA ID no. 25445743
  misc_feature: Homolog of GI Number: 77739898 NR Desc: lipoprotein
MQGAMADATCPQLMAASDVAAASSTKATTAAATTANCCVRAMFLEEGGACRRSASSLARAVWKCGGHRSVDGNGSWW

SEQ ID NO: 1403 - DNA, 1213 bp, Zea mays
  misc_feature: Ceres CLONE ID no. 472785
  misc_feature: Ceres CDNA ID no. 36588292
  CDS (248)..(934): REFERENCED BY SEQ ID NO: 1404
acaattgcagcacgccgacctcccccgtatccccgcttctccgccgccttcccgtcctgcgcaacaacacgcgcagcacaattgcagcacggccgtcacgccgacctcgcccatatccatccctgcttccccgccgccctcccatcctgcacatccatcccgccgccctgccgctttctttcaccgattaatttattctctttaaaccccataggcctccagcaaaggtcccaatctcgtgctgaggatggagaactgtaacaacggacaggcggccgccgtatccatggacgatttcaaggtggtggtgccggtgcatccgctgatcagccactgggtctcagtactccgcgatcgctccaccccttcccacgccttcaggagtgcaatgggggagctagggagattgctaatctatgaggcaacacgagattggttgccgacagtaacacggcagatccagtcacctgtgggcactgaggttgttgaatctgtcagtgagatggagccaataatgattgtacctattcttagagcagggcttgcacttgcagatctcgcaacatcaattttgccttcaactagaactttccatttaggtatggcccgggatgagacaacactgatggcctctgtttacttaaataagctacctgatagattcccgaaaggatgtaaaatcctcattgtggatcctatgctagcaactggtggaacagtcactgcagcagttgatctggttatggaacgtggagctgaaatcagtcagataaaaattatatcagctgttgctgcccctcctgccctcaagaagctcaatcaaagattcccaaggatttgtgtgtatacaggagccatggatcaaattgtaaacgagaaaggtttcataatcccaggccttggggatgctggagatcgcagctatggaacatgactccggcccttcggtgatggccatcgttaggaatttcagcaaaacccagatttagttgatgcctgcttattttcgtagatgagatttgtggttccactgaacacaaatctgtagttttgagggtctggacataatattttgacaatgtgatgtcaaatttcgcccttctattgtggcgatgtcctgataatggttatgagcttcatggagtgtttattttgagaagtgggatagcctgcaatcaccgtagctctaaacaaaaaagaaaaaaaaaaaaaa

SEQ ID NO: 1404 - protein, 228 aa, Zea mays
  misc_feature: Ceres CLONE ID no. 472785
  misc_feature: Ceres CDNA ID no. 36588292
  misc_feature (70)..(200): Pfam Name: Pribosyltran PFAM Desc: Phosphoribosyl transferase domain
  misc_feature: Homolog of GI Number: 1848214 NR Desc: uracil phosphoribosyltransferase
  misc_feature: Homolog of GI Number: 53749356 NR Desc: putative uracil phosphoribosyltransferase
  misc_feature: Homolog of GI Number: 21281024 NR Desc: putative uracil phosphoribosyltransferase
  misc_feature: Homolog of GI Number: 30693932 NR Desc: uracil phosphoribosyltransferase
  misc_feature: Homolog of GI Number: 21536984 NR Desc: uracil phosphoribosyltransferase
  misc_feature: Homolog of GI Number: 16329360 NR Desc: uracil phosphoribosyltransferase
  misc_feature: Homolog of GI Number: 22299307 NR Desc: uracil phosphoribosyltransferase
  misc_feature: Homolog of GI Number: 53687805 NR Desc: COG0035: Uracil phosphoribosyltransferase
  misc_feature: Homolog of GI Number: 61216942 NR Desc: Uracil phosphoribosyltransferase
  misc_feature: Homolog of GI Number: 17229555 NR Desc: uracil phosphoribosyltransferase
MENCNNGQAAAVSMDDFKVVVPVHPLISHWVSVLRDRSTPSHAFRSAMGELGRLLIYEATRDWLPTVTRQIQSPVGTEVVESVSEMEPIMIVPILRAGLALADLATSILPSTRTFHLGMARDETTLMASVYLNKLPDRFPKGCKILIVDPMLATGGTVTAAVDLVMERGAEISQIKIISAVAAPPALKKLNQRFPRICVYTGAMDQIVNEKGFIIPGLGDAGDRSYGT

SEQ ID NO: 1405 - DNA, 1334 bp, Glycine max
  misc_feature: Ceres CLONE ID no. 473347
  misc_feature: Ceres CDNA ID no. 36580915
  CDS (62)..(1015): REFERENCED BY SEQ ID NO: 1406
gaaattcaaaaaaaaaaaaaaaaaacctgttacagagagatacagagagagagagacggagatggagatggagaaaacgggcgcaggagtagtagtgttatcggcgaaggaggcattcgagaagcttgagaaggtcggagaagggacatacgggaaggtgtacagggcacgagagaaggccactgggaaaatcgttgctctcaagaagactcgtcttcacgaggaccaagacggtgttcctcccaccacacttcgcgaggtttccatcttgcgaatgctctctcgcgatccccatgtcgttaggttaatggatgtgaagcaaggccagaacaaggaagggaagacagtgttgtacttggtgtttgagtacatggacactgatctcaagaaattcatccgctccttcgatcaaccgggacaaaacattccacccgaaactatcaaaagcttgatgtaccagctttgcaaggggattgctttctgccacggtcatggcatcttgcacagggacttgaagcctcacaatctgttgatggaccgaaaaacaatgatgcttaaaattgctgatcttggactcgctcgggcatttactgtgccaattaagaaatatacacatgagatactaaccctgtggtatagagctcctgaagtcctcttgggtgctacccattactcaatggcagtggacatatggtccgttggctgcatatttgccgaacttgtcaccagacgagctctctttcctggtgattccgagcttcaacaactcctgcatatattcaggctattgggtactcctaatgaagaggtgtggccaggggtgagtaaactaaaggactggcatgaatacccccaatggaactctcaaagtctgtcaacggctgttccaggtttggaggagcttggactcgatttgctatctcaaatgttggagtatgaaccttccaagaggatttctgcaaagaaagcaatggaacatgcttacttcgatgacctggacaagaggaatctttagaaagacacagattgattcaagatttggttgtagaaatttatgactaccaatttatttttatgcttctctcgagcgtgtatcgttttaggatgatggacttttgctgtttaacttttcatatttgaggactgacggagtgattgattgcgcttgggatttatttgcagaaactacatttgaaattaggattagtaaaaaaaatgttctgtttagttttcaatataaagcaatagagatagttgcatctacagctacatgtggatcttgcatgacttcctataaatgaagggataactttcacaaaaaaaaaaaaaaaaaa

SEQ ID NO: 1406 - protein, 315 aa, Glycine max
  misc_feature: Ceres CLONE ID no. 473347
  misc_feature: Ceres CDNA ID no. 36580915
  misc_feature (17)..(213): Pfam Name: Pkinase_Tyr PFAM Desc: Protein tyrosine kinase
  misc_feature: Homolog of GI Number: 23505877 NR Desc: At1g76540/F14G6_14
  misc_feature: Homolog of GI Number: 11125685 NR Desc: B2
  misc_feature: Homolog of GI Number: 1806146 NR Desc: cdc2MsF
  misc_feature: Homolog of GI Number: 15218072 NR Desc: cell division control protein
  misc_feature: Homolog of GI Number: 13275210 NR Desc: cyclin dependent kinase
  misc_feature: Homolog of GI Number: 1321678 NR Desc: cyclin
  misc_feature: Homolog of GI Number: 32187089 NR Desc: cyclin
  misc_feature: Homolog of GI Number: 42362295 NR Desc: cyclin
  misc_feature: Homolog of GI Number: 21537217 NR Desc: putative cell division control protein cdc2
  misc_feature: Homolog of GI Number: 21536682 NR Desc: putative cell division control protein cdc2 kinase
MEKTGAGVVVLSAKEAFEKLEKVGEGTYGKVYRAREKATGKIVALKKTRLHEDQDGVPPTTLREVSILRMLSRDPHVVRLMDVKQGQNKEGKTVLYLVFEYMDTDLKKFIRSFDQPGQNIPPETIKSLMYQLCKGIAFCHGHGILHRDLKPHNLLMDRKTMMLKIADLGLARAFTVPIKKYTHEILTLWYRAPEVLLGATHYSMAVDIWSVGCIFAELVTRRALFPGDSELQQLLHIFRLLGTPNEEVWPGVSKLKDWHEYPQWNSQSLSTAVPGLEELGLDLLSQMLEYEPSKRISAKKAMEHAYFDDLDKRNL

SEQ ID NO: 1407 - DNA, 1763 bp, Glycine max
  misc_feature: Ceres CLONE ID no. 473434
  misc_feature: Ceres CDNA ID no. 35383180
  CDS (1)..(1503): REFERENCED BY SEQ ID NO: 1408
aaaaataaaataaaaaggaaacgtatagaaaaagcttttccaagaattggcaaaaagagaagaagggagagagattcatgttcatattttccccttcgtgcccgtcaagtttctgattctctttttcaattcctttctctttcaggtgattttttctccacgataaagttgcgatttcgccggtgtcgttttgccgcaagatggtgtcgttttcgggaatataaaatcagggttgaagttctttcttcagcattgaatctttggttacataggttggtttctttagaactcgattcaatttcaaataattggtcctccctttttgtggaactcaattctattaggttagtggaaagagaaaaaaaaaacatggttgaatcaattgctgcaacttcactccttggccaccgtccaatttgtggtggaaatttaaccagggatgtatctgttaaacgcaaatctttgaatactgttcggttcccaacaactgagtttcttggtggtggaaggattgtggtttctctggctttgcctaaatctgataagcaagataggtttgtgttttcatcaattaaggccttggctgtggagttaacaagagaagcacatgcttatagggaagagaaattgcccaacagggataccaagattgatcgtggatttgatcaaaggcctgattcgtggcctcctgcgaatagggcagataaaccgtcgcttcggaatccactactccgtcatgagaggatgggatgtggttggttgggtgctatatttgagtgggagggtgttctaattgaagacaaccctgatttagagaagcaggcttggctggcactctctcaggaagaaggcaaaccctctcctcctgcttttatcctcaagagaatagagggcatgaagaatgaacaggcgatttcagaagtgctgtgttggtctagggatccggcacagttgagaagaatggctaatagaaaggaagaaatctaccaatctttgcagggtgggatatataggttcttgtctggatccaaggagtttgttagtgttttgatgcattataagataccaatggcattggtttccacgcggcctaggaaggctcttgagtctgctataggggagattgggattgaggacactttcagtgttattgtagcagcagaggatgttcataggggaaagcctgatccagaaatgtttgtgtatgctgcacagcttttgaacttcatacctgagaggtgcattgtgtttggtaactccaatctaacagtggaggctgcacatgaagcgcggatgaagtgtgtggctgttgctagcaagcatcctgtatatgagcttggggctgcagacttggttgtcaggcgcctagatgagctttcagtggttgatttgaagaatcttgcagacattgaaatgactgaatttgggtctgtggagcctgagatggagctggaggtggaaaaagattatggctcatcatcagttgatgacaatttctggtaaatcctataatgtacagttgattgaacctcatctgattgttgatgatattagttacaggttagttacttgtgtatatggtaatcagaataaatggggggaaaaaatgataagtggtatgcattgaacattgatgttactactaatgcattttctgttcatatacattcacgaatttttagatttgatttactggtgtttccatccataaaatagaatacaaattacctcatgaagtttaggtcaaaaaaaaaaaaaaaaaa

SEQ ID NO: 1408 - protein, 377 aa, Glycine max
  misc_feature: Ceres CLONE ID no. 473434
  misc_feature: Ceres CDNA ID no. 35383180
  misc_feature (232)..(317): Pfam Name: Hydrolase PFAM Desc: haloacid dehalogenase
  misc_feature: Homolog of GI Number: 52077176 NR Desc: putative genetic modifier
  misc_feature: Homolog of GI Number: 10444400 NR Desc: genetic modifier
  misc_feature: Homolog of GI Number: 18542168 NR Desc: putative genetic modifier
  misc_feature: Homolog of GI Number: 50927875 NR Desc: OSJNBb0012E24.15
  misc_feature: Homolog of GI Number: 57234800 NR Desc: glycoprotease family protein/hydrolase
  misc_feature: Homolog of GI Number: 18399067 NR Desc: haloacid dehalogenase
  misc_feature: Homolog of GI Number: 42572363 NR Desc: haloacid dehalogenase
  misc_feature: Homolog of GI Number: 22137294 NR Desc: AT3g10970/F9F8_21
  misc_feature: Homolog of GI Number: 73748237 NR Desc: glycoprotease family protein
MVESIAATSLLGHRPICGGNLTRDVSVKRKSLNTVRFPTTEFLGGGRIVVSLALPKSDKQDRFVFSSIKALAVELTREAHAYREEKLPNRDTKIDRGFDQRPDSWPPANRADKPSLRNPLLRHERMGCGWLGAIFEWEGVLIEDNPDLEKQAWLALSQEEGKPSPPAFILKRIEGMKNEQAISEVLCWSRDPAQLRRMANRKEEIYQSLQGGIYRFLSGSKEFVSVLMHYKIPMALVSTRPRKALESAIGEIGIEDTFSVIVAAEDVHRGKPDPEMFVYAAQLLNFIPERCIVFGNSNLTVEAAHEARMKCVAVASKHPVYELGAADLVVRRLDELSVVDLKNLADIEMTEFGSVEPEMELEVEKDYGSSSVDDNFW

SEQ ID NO: 1409 - DNA, 1121 bp, Glycine max
  misc_feature: Ceres CLONE ID no. 473830
  misc_feature: Ceres CDNA ID no. 25446658
  CDS (202)..(945): REFERENCED BY SEQ ID NO: 1410
gacctataccgtgttactgttagttaaggcttactgagttgcaagattcacttcaaattatgcgtttcgctgatcggcttctcatcaaatcaaacgacgtcgcagttccttgattatttccttttgttgatccgtggaatcgcgcacacggtgttggtgtgtgctgtgaggtagaaagaagaatcctaaattgtgagcagcatgaattaccttcttggagctttcaagcctgcatgtaatgtcgtgatcacgtttaacgacgggaagaaccgaaagcaggtcccttttaaaaaagaaaatggtcaaatggttacagtcccacttttccaaagtcaagaaaacattgctgggaagattacaatagaaccaatgcaagggaagaagattgatcacaatggtgtaaaagttgagctccttggacagatagagatgtattttgacagaggaaatttttatgactttacttcccttgtacgagaactagatgttcctggagaaatctatgagaggaaaacatatgcatttgaattttctactgttgaaatgccatatgaaacatataatggggtgaatgtaaggcttagatatgtgttgaaagtgaccattaatcgtggctatgctggaagcgtagtagaataccaggattttgtggttcgcaactattctccacctccacaaattaacaatagcatcaagatggaagttggaattgaagattgtctgcacatcgaatttgaatacaacaaaagcaagtatcatctgaaagatgtcatcattggcaagatatacttcttacttgtcagaatcaagataaaaaacatggatcttgagattaggcgtcgagaatccacaggatcagggaccaacacccatgttgagacagaaacattggctaaatttgagttgatggatggtgctcctgttagaggtaggttaactttgtaattggatgatactttttgtagtttctatttaccataaaaatagtttagatctatttatcatatatgttttgatatcctttcgaggggaaccctcccttttgtatttactgacttttaaaataatatttgtttgtaagcagtaatatctcgtgtttatacaaaaaaaaaaaaaaaaaa

SEQ ID NO: 1410 - protein, 247 aa, Glycine max
  misc_feature: Ceres CLONE ID no. 473830
  misc_feature: Ceres CDNA ID no. 25446658
  misc_feature (8)..(243): Pfam Name: Vps26 PFAM Desc: Vacuolar protein sorting
  misc_feature: Homolog of GI Number: 76573311 NR Desc: vacuolar protein sorting
  misc_feature: Homolog of GI Number: 9759192 NR Desc: vacuolar sorting protein
  misc_feature: Homolog of GI Number: 21689605 NR Desc: AT4g27690/T29A15_180
  misc_feature: Homolog of GI Number: 77552143 NR Desc: vacuolar sorting protein
  misc_feature: Homolog of GI Number: 77556215 NR Desc: vacuolar sorting protein
  misc_feature: Homolog of GI Number: 4680205 NR Desc: H beta 58 homolog
  misc_feature: Homolog of GI Number: 1408298 NR Desc: PepA
  misc_feature: Homolog of GI Number: 50749300 NR Desc:  similar to embryogenesis protein H beta 58 homolog
  misc_feature: Homolog of GI Number: 50368602 NR Desc: Vps26
  misc_feature: Homolog of GI Number: 3342000 NR Desc: H beta 58 homolog
MNYLLGAFKPACNVVITFNDGKNRKQVPFKKENGQMVTVPLFQSQENIAGKITIEPMQGKKIDHNGVKVELLGQIEMYFDRGNFYDFTSLVRELDVPGEIYERKTYAFEFSTVEMPYETYNGVNVRLRYVLKVTINRGYAGSVVEYQDFVVRNYSPPPQINNSIKMEVGIEDCLHIEFEYNKSKYHLKDVIIGKIYFLLVRIKIKNMDLEIRRRESTGSGTNTHVETETLAKFELMDGAPVRGRLTL

SEQ ID NO: 1411 - DNA, 1580 bp, Glycine max
  misc_feature: Ceres CLONE ID no. 474014
  misc_feature: Ceres CDNA ID no. 36580398
  CDS (33)..(1406): REFERENCED BY SEQ ID NO: 1412
aaaacccacaaacacttgagtcagacaaaaagatggaaacctctaataacaaccatgatgctcctcctccacctctacttaaagacctgaaggtgaccatccacaatgcctccatgatttttccatccaaagagattgagagaaagtcccttttcttgtcaaacattgacaaggtcctcaactttgatgtggaaacggttcacttctttggtgcccacaaagattttcctcctcatgttgtgaatgagaggctcaagaatgccctagaggatgcccttgtggtttatgacttcttgggtggaagattgaagctcaactatgacaccaaaagattggagatggattgtaatccagagggagctggattcgtggtggcttccagcgagtacaatttggatcagataggggacttggattatccaaatccagcttttgcacaattggtacatcagaataaggattttcttaaagatggtgatgttccactctgtgttgcccaggtgacatccttcaagtgtggtggttttgcaattggcatatctactagccacaccacctttgatggcctcagcttcaaaaccttcctagacaacattgcttcaatagccgctaagaagcccttggttgtcacgccctgtcatgacaggcacctcctagccgcccgatccccaccacgtgtcaccttcccacaccctgagatgctcaagctaagtgaccagctcccaacatgccccgagtccaacatctttgaggcctccaccgaacaacttgatttcaaggtcttcaaactaacattaaacgacatcacaaaattgaaggaagaggctaggaattcttcaattagtggtggcctaagtactaaatgtgtcactggctttaacgttatcactgcctacatatggagatgcaaggcactttcgtgctacaatgatgagaaccctaataggtcatcaactatactatatgctgtagatatacgttcaagattgaaccctccattgcctaaatcatacgcgggtaacgcagtgttaactgcttatgccacggcaaagtgtaaggagctagaagaatggccttttatgaagctagttgaaatggtgcgtgagggagcaactaggatgacaaatgagtatgcaagatctatcatagattggggagagataaacaatgggtttcccaatggggaggttttggtgtcttcatggtggagattagggtttgaggaagtggagtatccgtgggggaagccaaagtattgttgcccagtggtgtatcataagaaggatattattttgttgtttcctccggttggtggaggtgaaggggtgagtattattgtggctcttcctcctaaggaaatggaaaaattccatgggctcttcaacaagttcttgacttcacattgagggaaatgatgggtctttcttcctcctcctatggaaatggaaagattccatgcatgcttaagttcatgacttgagaattatgtctctccctctattgatatccttattaatatgacatctttagcttttcgctagttgttatgtaaaaaaaaaaagaaaaaaaaaaaaaaaaaa

SEQ ID NO: 1412 - protein, 457 aa, Glycine max
  misc_feature: Ceres CLONE ID no. 474014
  misc_feature: Ceres CDNA ID no. 36580398
  misc_feature (19)..(453): Pfam Name: Transferase PFAM Desc: Transferase family
  misc_feature: Homolog of GI Number: 21553834 NR Desc: Similar to gbZ84386 anthranilate N
  misc_feature: Homolog of GI Number: 50261885 NR Desc: AT1G65450
  misc_feature: Homolog of GI Number: 9759150 NR Desc: N
  misc_feature: Homolog of GI Number: 17104563 NR Desc: putative N
  misc_feature: Homolog of GI Number: 57899390 NR Desc: putative hydroxyanthranilate hydroxycinnamoyltransferase
  misc_feature: Homolog of GI Number: 50904351 NR Desc: N
  misc_feature: Homolog of GI Number: 34222064 NR Desc: At3g48720
  misc_feature: Homolog of GI Number: 77551124 NR Desc: N
  misc_feature: Homolog of GI Number: 50926145 NR Desc: OSJNBa0029H02.14
  misc_feature: Homolog of GI Number: 25403354 NR Desc: protein F1K23.12
METSNNNHDAPPPPLLKDLKVTIHNASMIFPSKEIERKSLFLSNIDKVLNFDVETVHFFGAHKDFPPHVVNERLKNALEDALVVYDFLGGRLKLNYDTKRLEMDCNPEGAGFVVASSEYNLDQIGDLDYPNPAFAQLVHQNKDFLKDGDVPLCVAQVTSFKCGGFAIGISTSHTTFDGLSFKTFLDNIASIAAKKPLVVTPCHDRHLLAARSPPRVTFPHPEMLKLSDQLPTCPESNIFEASTEQLDFKVFKLTLNDITKLKEEARNSSISGGLSTKCVTGFNVITAYIWRCKALSCYNDENPNRSSTILYAVDIRSRLNPPLPKSYAGNAVLTAYATAKCKELEEWPFMKLVEMVREGATRMTNEYARSIIDWGEINNGFPNGEVLVSSWWRLGFEEVEYPWGKPKYCCPVVYHKKDIILLFPPVGGGEGVSIIVALPPKEMEKFHGLFNKFLTSH

SEQ ID NO: 1413 - DNA, 1519 bp, Glycine max
  misc_feature: Ceres CLONE ID no. 474246
  misc_feature: Ceres CDNA ID no. 25445531
  CDS (472)..(1029): REFERENCED BY SEQ ID NO: 1414
aatattccatatgttcaatgaaggctttaatacttaaatttgacatttttgtttgttgaagtcagatttctctttattttctcttcaaccaaactaaaaaattactttcttccctattttcttttcctccatccaaacatagggtaaaggtgatacaagcatccgtcaatgtgaattgtaacaagctaataagatgtggtttgataaatattgatagaaatatattaggactattagtcttaatgttggtaagcttgagctacattatgactaatttgcctaataaattcgaacaaatattatatgcatttggatttagattgagatgcagcttgactagatctggatttaattctttttaggttcaattttatgagactctggatcagtatatcataaatgttttttttaagagagtatattataaatgttatcttatcgatttatctaattccatgtttccttcattaaatgcataatagttcttatgattgtttcttttgcagatatggtaatgctagtgtttggaagatctttactgacctttttgatttctttccgttgactgcattggttgagtccgaaatattttgtttgcatggtgggctttcaccttcaattgagactcttgataacataaggaacttcgatcgtgttcaagaggttcctcatgaagggcccatgtgcgatctgttgtggtctgatccagatgataggtgtggctggggaatttctcctcgtggtgctggatatacatttggccaggatatatccgaacaatttaatcacacaaacaagcttaagttaattgctagagctcatcagctggttatggatggatttaactgggctcatgaacaaaaggtggttaccatttttagtgcacctaactactgttatcgatgtgggaacatggcctccattttagaggttgatgattccatgggccacacatttatccagtttgatcctgctcccaggagaggagaacctgatgtcacccgtagaacgcctgattacttcttatgatgttgctgctgctgcatatcatactggggtcgcagttacatctcattctgcacaaatttcaagtagtttgtgcatcctcatcctcgttgatgagattactgtaaggacttaaaatctttgggtatgcacaccaaacttttttggtgattgcccaataccgtactaatgtaaattaggcgagaaacattccagttttttgtgacgctcaagaacttgctggacaccctattggagaagtctcctagatgatggccatgtcagaatatgtattattccagtgacctgtggatatattttttgtgtttccccatctctagaagcaatgactgtgtttccccatctctagaagcaatgacttggattttatatttctgttgatgatttgctttgctatgttctatcaattttcagtaaaagttgcatgataatagtgattcagttttgttctttactaaaaaaaaaaaaaaaaaaaaaaaaaaaaaaaaaaaaa

SEQ ID NO: 1414 - protein, 185 aa, Glycine max
  misc_feature: Ceres CLONE ID no. 474246
  misc_feature: Ceres CDNA ID no. 25445531
  misc_feature (19)..(121): Pfam Name: Metallophos PFAM Desc: Calcineurin
  misc_feature: Homolog of GI Number: 287811 NR Desc: phosphoprotein phosphatase type 2A
  misc_feature: Homolog of GI Number: 7248363 NR Desc: type 2A protein phosphatase
  misc_feature: Homolog of GI Number: 15810367 NR Desc: putative phosphoprotein phosphatase 2A isoform 4
  misc_feature: Homolog of GI Number: 21593204 NR Desc: phosphoprotein phosphatase 2A isoform 4
  misc_feature: Homolog of GI Number: 33589738 NR Desc: At2g42500/F14N22.23
  misc_feature: Homolog of GI Number: 418777 NR Desc: phosphoprotein phosphatase
  misc_feature: Homolog of GI Number: 42571197 NR Desc: serine/threonine protein phosphatase PP2A
  misc_feature: Homolog of GI Number: 50919225 NR Desc: serine/threonine protein phosphatase PP2A
  misc_feature: Homolog of GI Number: 5419931 NR Desc: protein phosphatase 2A catalytic subunit
  misc_feature: Homolog of GI Number: 50919837 NR Desc: serine/threonine protein phosphatase PP2A
MHNSSYDCFFCRYGNASVWKIFTDLFDFFPLTALVESEIFCLHGGLSPSIETLDNIRNFDRVQEVPHEGPMCDLLWSDPDDRCGWGISPRGAGYTFGQDISEQFNHTNKLKLIARAHQLVMDGFNWAHEQKVVTIFSAPNYCYRCGNMASILEVDDSMGHTFIQFDPAPRRGEPDVTRRTPDYFL

SEQ ID NO: 1415 - DNA, 1288 bp, Glycine max
  misc_feature: Ceres CLONE ID no. 476141
  misc_feature: Ceres CDNA ID no. 25445519
  CDS (65)..(1072): REFERENCED BY SEQ ID NO: 1416
ggactcagacccgttatcttcattctactcaatcgatcctcactttttcttgtcaaagcagggcatggcaaaagatgaaaagctgagccaatcgcatgaaacatggaagcaagagattgcaagaagccaatcccaagtggatgtattgcaaaaagaacttacagagttaaaggcttgcaatcagggttcagatggaaatgcaaaaaaggatttggaggttcttcggcgaagagtcaagactgcttctacattgttgacttacctgaagtcaaaagctaggctcatggctgttcctcatctagcccatacatcttgtggcatcaaacaattagagggggtatgctttgttgacaaaaatgggataccattatcaggttggtccagcaatgttgatttttcttcatttgatgacgcagatgaagaatcttggaatggaattagccaccagcatggttccttagatgaacaagatgcagcttacataggtgaaatgctcaagtctgtacagatggtcacagatgtgatggaagcccttgtcaaaagggttttactggctgagtcagaaactgcaatagaaaaggaaaaagtaagtataagtaaggaagaaattaagcggaagtctacccagttagagaacatgtctatgaaattacaggagatggagcattttgctttgaatacaaatagtatcctaactgagatgcggcagagagttgaggacttggtggaagaaacaaccagacagagagaacgggctgctgaaaatgaggaagaactttctagagtgaagcaggaatttgagtctctgaaatcatatgttagcggtctaataacagtaagagaaaccttgctttcttcagagaagcaatttcgaactattgagaggctgtttgaaaagctagttgcaaagactactcaattagagggtgagaaaatgcagaaagaggctgaagttcagaaacttatggaagagaatgttaggttgagtgcactgcttgacaagaaagaggctcaacttcttgcattgaatgaacaatgcaaggtaatggccttgaacgcttcaaacatgtaaatgccaaagttttatgctgaccactggaggcactaaaaagaaggtttatccataaacatcgttaatgccttaagttttattttctggtgccatttgttgttaaaattgaacgcagaaaatacttgtgcttggaatgtaaacttggagtgctctttcatggggaagaaaaaaaatgaggatggggtgtctctttgctgtaaaaaaaaaaaaaaaaaa

SEQ ID NO: 1416 - protein, 335 aa, Glycine max
  misc_feature: Ceres CLONE ID no. 476141
  misc_feature: Ceres CDNA ID no. 25445519
  misc_feature: Homolog of GI Number: 37993504 NR Desc: putative calcium
  misc_feature: Homolog of GI Number: 53791782 NR Desc: calcium
  misc_feature: Homolog of GI Number: 30698213 NR Desc: kinectin
  misc_feature: Homolog of GI Number: 73997526 NR Desc:  similar to RAB6
  misc_feature: Homolog of GI Number: 31432145 NR Desc: putative centromere protein
MAKDEKLSQSHETWKQEIARSQSQVDVLQKELTELKACNQGSDGNAKKDLEVLRRRVKTASTLLTYLKSKARLMAVPHLAHTSCGIKQLEGVCFVDKNGIPLSGWSSNVDFSSFDDADEESWNGISHQHGSLDEQDAAYIGEMLKSVQMVTDVMEALVKRVLLAESETAIEKEKVSISKEEIKRKSTQLENMSMKLQEMEHFALNTNSILTEMRQRVEDLVEETTRQRERAAENEEELSRVKQEFESLKSYVSGLITVRETLLSSEKQFRTIERLFEKLVAKTTQLEGEKMQKEAEVQKLMEENVRLSALLDKKEAQLLALNEQCKVMALNASNM

SEQ ID NO: 1417 - DNA, 1652 bp, Glycine max
  misc_feature: Ceres CLONE ID no. 476782
  misc_feature: Ceres CDNA ID no. 40041229
  CDS (151)..(1305): REFERENCED BY SEQ ID NO: 1418
gagtggcagtgagtgacacattcagctgcacaaagaatcccaaagtagagaaacagcacactctcacctcactcacttgtccttgttatatttgttttatatcttgtcacaatctgtgactgttcgagttatccgaggcccctcttttatatggtcgttgataaaatggcttcgacccttttaacaaagatgcttttgggtcaccgattgatacacccttcttcgttcctcactcaccagccacagattctctcttctctattcagtaaacggctgttttgtatacgagctgtcccggtctcagcctctacatcccaaaacatcaaaacaactggttgggctccttgtatggcttcttcctcagttggtagaagagctacatattcaacacaatctgtatcgacaaatgagccagttgtatctgtagattggctttatgataacctgaaggagccagatatcaaggtactagatgcttcgtggtacatgccggatgagcagaggaatccaattcaaaaatatcaggttgctcacattcctggtgcccttttctttgatgtagatggaatagcagatcggactacaaaattaccacacatgctgccatcagcggaagcgtttgctgctgctgtttctgctcttggcatagagaacaaagatgatttggttgtttatgatggaaaaggattatttagtgcagctcgtgtttggtggatgttccgagtatttgggcatgacagagtttgggtattagatggtggcctgccgagatggcgtgcatcaggttatgatgttgaatccagtgcttcaagtgatgctattcttaaagccagtgctgctactgaggctatagagaaagtatataagggacaaacagttggcccactcacatttcagactaaatttcagccacatcttgtttggaacattgatcaggtaaagaaaaatatagaggacaaaactcaccaacacatagatgctcgatcaaagcctagatttgatggaactgtacaagagcctcgaaagggaatcagaagtggtcatgtacctggtagcaaatgcatcccttttgcacagttgttagatagttcacagacattgttaccagcagatgagttgaagaagcgatttgaacaagaaggcatctctctggaaagcccagctgtgacttcatgtggaacaggcgtaactgcttgcattcttgcattgggtcttcatcgtcttagaaagtctgatgttgcagtttatgatggatcttggactgaatggggagcacaatcaaatacacctgttgacactttatgaattcaatacagctaaatttgcatgccaccaaaaagtatctgcaagtgaaggggctgttttcatttgtcaaacattttgaacacaccaatttttgtatgctttactgtttgttgttttggtttagttgtggttgagattcttgagaattgctaatatgttcaaatgttactaatattaaatcctatcatgtggcttataaatacaatgataggatggttcaagaatgtctcatagaagtgggaaaaggttgggtttgttgaaaattacaaaataagatttaagatcatatatcacacaccttatgcaaattatttcttaaaaaaaaaaagaaaaaaaaaaaaaaaaaa

SEQ ID NO: 1418 - protein, 379 aa, Glycine max
  misc_feature: Ceres CLONE ID no. 476782
  misc_feature: Ceres CDNA ID no. 40041229
  misc_feature (254)..(371): Pfam Name: Rhodanese PFAM Desc: Rhodanese
  misc_feature: Homolog of GI Number: 6686778 NR Desc: 3
  misc_feature: Homolog of GI Number: 21592746 NR Desc: mercaptopyruvate sulfurtransferase
  misc_feature: Homolog of GI Number: 4406372 NR Desc: thiosulfate sulfurtransferase
  misc_feature: Homolog of GI Number: 7581972 NR Desc: 3
  misc_feature: Homolog of GI Number: 30684873 NR Desc: mercaptopyruvate sulfurtransferase
  misc_feature: Homolog of GI Number: 79318054 NR Desc: ATRDH2
  misc_feature: Homolog of GI Number: 4966366 NR Desc: Similar to gbAF109156 thiosulfate sulfurtransferase
  misc_feature: Homolog of GI Number: 77556476 NR Desc: thiosulfate sulfurtransferase
  misc_feature: Homolog of GI Number: 50905511 NR Desc: putative thiosulfate transferase
  misc_feature: Homolog of GI Number: 14571545 NR Desc: thiosulfate transferase
MASTLLTKMLLGHRLIHPSSFLTHQPQILSSLFSKRLFCIRAVPVSASTSQNIKTTGWAPCMASSSVGRRATYSTQSVSTNEPVVSVDWLYDNLKEPDIKVLDASWYMPDEQRNPIQKYQVAHIPGALFFDVDGIADRTTKLPHMLPSAEAFAAAVSALGIENKDDLVVYDGKGLFSAARVWWMFRVFGHDRVWVLDGGLPRWRASGYDVESSASSDAILKASAATEAIEKVYKGQTVGPLTFQTKFQPHLVWNIDQVKKNIEDKTHQHIDARSKPRFDGTVQEPRKGIRSGHVPGSKCIPFAQLLDSSQTLLPADELKKRFEQEGISLESPAVTSCGTGVTACILALGLHRLRKSDVAVYDGSWTEWGAQSNTPVDTL

SEQ ID NO: 1419 - DNA, 1318 bp, Glycine max
  misc_feature: Ceres CLONE ID no. 476989
  misc_feature: Ceres CDNA ID no. 36580679
  CDS (80)..(1093): REFERENCED BY SEQ ID NO: 1420
ataataatcacttggaaacaaccgcgctaaggttggaacttggaggaacttgtgtctgtgtgtccttttttccagagtcatggctatggctttgagtctctcccaattccctgttcgtgggtctgtttctttgcccaaaagaagactacccagaagaagcttttgcattaggggcatgtcagaaacctcttccacttcttctgtgagcacccaacaagaacaaccaacttctgataatgcttcttcagtgacaattgctcctccccctaacttcaagccccctgagcctaaacgctttgcaattaggcctgataagaccagtgaagtgtttggagctttgcttcctttgatctttcgttttgccactggagttttcgtttctgggtattctttttcaattgtttctaaggatgaaattcctacagacgaatatgctttggaacttaatggcgttaccataaaagaaacagcaaaattaggccctcgcccagagaagcctattgaaatatatgaatttgagagctgtccattttgccgaaaggttagagaaattgttgccattttggatcttgatgttcttttctatccttgtccaagaaatggcccaaatttccgtcaaaaggttctagagatgggtggcaaactgcagttcccctacatggttgacccaaacacaggcgcttcaatgtatgaatcagatgacataattcggtatttggttgacaaatatggcgatggaaacgttcctttatctttatcacttggatttttaacgacactaacggctggtcttggtatgcttagtcgtatttcaaaggggactacttatactccagcgaagttccctccaaagcctcttaaattatgggcatatgaggggtctcctttctgcaaacttgtacgtgaagtacttgtggaattggagctgccacacttgcttgtcagttgtgctaggggtagcccaaagagacatatactttatcagaaaactggaactttccaggcaccttttttggaagatccaaacactgggatagaaatgtttgaaagtgcagaaatcatagagtatctaagagcaacatacgctctttagtaagtgatgctatgatagggagaggcttgtaagggtttttaagtctcatgatatgcaccttcatttccttttgtaaatgtaattgctaatggttctaagttctaacgggtaaatcaaattttctctatatagaaatttcaaatagtggaatcaagtgcctcaatatttagcaatggtttgaggtggttaaaaaaaaaaaaaaaaaagaaaaaaaaaaaaaaaaaa

SEQ ID NO: 1420 - protein, 337 aa, Glycine max
  misc_feature: Ceres CLONE ID no. 476989
  misc_feature: Ceres CDNA ID no. 36580679
  misc_feature (141)..(215): Pfam Name: GST_N PFAM Desc: Glutathione S
  misc_feature (260)..(333): Pfam Name: GST_N PFAM Desc: Glutathione S
  misc_feature: Homolog of GI Number: 50948459 NR Desc: putative auxin
  misc_feature: Homolog of GI Number: 56178808 NR Desc: Glutaredoxin family protein
MAMALSLSQFPVRGSVSLPKRRLPRRSFCIRGMSETSSTSSVSTQQEQPTSDNASSVTIAPPPNFKPPEPKRFAIRPDKTSEVFGALLPLIFRFATGVFVSGYSFSIVSKDEIPTDEYALELNGVTIKETAKLGPRPEKPIEIYEFESCPFCRKVREIVAILDLDVLFYPCPRNGPNFRQKVLEMGGKLQFPYMVDPNTGASMYESDDIIRYLVDKYGDGNVPLSLSLGFLTTLTAGLGMLSRISKGTTYTPAKFPPKPLKLWAYEGSPFCKLVREVLVELELPHLLVSCARGSPKRHILYQKTGTFQAPFLEDPNTGIEMFESAEIIEYLRATYAL

SEQ ID NO: 1421 - DNA, 1751 bp, Glycine max
  misc_feature: Ceres CLONE ID no. 477053
  misc_feature: Ceres CDNA ID no. 36580417
  CDS (39)..(1580): REFERENCED BY SEQ ID NO: 1422
acttaataaaccatctcattctcctccaattccctaaaatggccactctttcctcctacgaccacttcatcttcactgccttagctttcttcatatctggcctaattttcttcctcaaacagaaatccaaatccaaaaagttcaacctccctccaggaccccccgggtggcctattgttgggaacctcttccaagttgctcgttctgggaaacctttctttgagtatgtgaacgatgtgagactcaaatatggctcaatcttcaccctcaagatgggaacaaggaccatgatcatcctcaccgacgcaaaactggtccacgaggccatgatccaaaagggtgcaacctacgccaccaggccccccgagaaccccaccagaaccatcttcagtgaaaacaagttcaccgtgaatgcagcgacctatggccccgtgtggaagtcgctgaggaggaacatggtgcagaacatgctcagctcaacaagacttaaggagtttcgcagtgttcgggacaatgcgatggacaagctcatcaacagactcaaggacgaggccgagaagaataacggcgtggtttgggtgctcaaggatgccaggtttgctgttttttgcatacttgtggctatgtgttttggtcttgagattgatgaggagacagtggagagaatagatcaggttatgaagagtgttctcatcactttggacccgagaattgatgactatcttccaattctaagcccctttttctcaaagcaaagaaagaaagccttggaggttcgcagagaacaggttgagttcttagttccaattatagaacaaagaagaagagcaattcaaaaccctgggtcagatcacaccgccacaacgttttcctacctagacacactttttgacctcaaagttgaagggaagaaatcagcaccctctgatgcagaattggtgtctttatgctcagagtttcttaacggtggcacagacacaacagcaacagcggttgagtggggcatagcacagctcatagcgaaccctaacgttcagacaaagctgtacgaggaaataaagagaacggtgggagagaagaaggtggatgaaaaggacgttgagaaaatgccatacctacacgctgtggtgaaggagcttctaagaaagcaccctccaacacactttgtgctaacacatgctgtgactgagcccaccactttgggagggtatgacataccaattgatgcaaatgttgaggtgtacacaccagccattgctgaggaccccaaaaattggttaaaccctgagaagtttgaccctgagagattcatctctgggggtgaggaagcagacataactggggtcacaggggtgaagatgatgccatttggggttgggagaaggatttgccctggcttggctatggccacagtgcatattcacctcatgatggcaaggatggtgcaggagtttgagtggggtgcataccctccagagaagaagatggatttcactggcaagtgggagttcactgtggtcatgaaggagtctctaagagcaaccatcaaaccaagaggaggagaaaaagtgaagttgtaaaattttcctgcttctattcttctgggttttaaatttcacagacaacataaatattattgctattatcatcatcatatatgtatacatcatcatggtttgtggttgatttgcatacagagtactgcaagtttcatcccatcattatattgtctcaaaaaaaaaaaaaaaaaa

SEQ ID NO: 1422 - protein, 513 aa, Glycine max
  misc_feature: Ceres CLONE ID no. 477053
  misc_feature: Ceres CDNA ID no. 36580417
  misc_feature (38)..(505): Pfam Name: p450 PFAM Desc: Cytochrome P450
  misc_feature: Homolog of GI Number: 59958320 NR Desc: At3g10570
  misc_feature: Homolog of GI Number: 438241 NR Desc: CYP77A2
  misc_feature: Homolog of GI Number: 2739010 NR Desc: CYP77A3p
  misc_feature: Homolog of GI Number: 70664010 NR Desc: OSJNBa0042I15.13
  misc_feature: Homolog of GI Number: 438243 NR Desc: P450 hydroxylase
  misc_feature: Homolog of GI Number: 21595357 NR Desc: cytochrom P450
  misc_feature: Homolog of GI Number: 7413528 NR Desc: cytochrom P450
  misc_feature: Homolog of GI Number: 8567786 NR Desc: cytochrome P450
  misc_feature: Homolog of GI Number: 7406467 NR Desc: cytochrome P450
  misc_feature: Homolog of GI Number: 28393336 NR Desc: putative cytochrome p450
MATLSSYDHFIFTALAFFISGLIFFLKQKSKSKKFNLPPGPPGWPIVGNLFQVARSGKPFFEYVNDVRLKYGSIFTLKMGTRTMIILTDAKLVHEAMIQKGATYATRPPENPTRTIFSENKFTVNAATYGPVWKSLRRNMVQNMLSSTRLKEFRSVRDNAMDKLINRLKDEAEKNNGVVWVLKDARFAVFCILVAMCFGLEIDEETVERIDQVMKSVLITLDPRIDDYLPILSPFFSKQRKKALEVRREQVEFLVPIIEQRRRAIQNPGSDHTATTFSYLDTLFDLKVEGKKSAPSDAELVSLCSEFLNGGTDTTATAVEWGIAQLIANPNVQTKLYEEIKRTVGEKKVDEKDVEKMPYLHAVVKELLRKHPPTHFVLTHAVTEPTTLGGYDIPIDANVEVYTPAIAEDPKNWLNPEKFDPERFISGGEEADITGVTGVKMMPFGVGRRICPGLAMATVHIHLMMARMVQEFEWGAYPPEKKMDFTGKWEFTVVMKESLRATIKPRGGEKVKL

SEQ ID NO: 1423 - DNA, 1338 bp, Glycine max
  misc_feature: Ceres CLONE ID no. 477295
  misc_feature: Ceres CDNA ID no. 40350995
  CDS (318)..(920): REFERENCED BY SEQ ID NO: 1424
aaatctatcttactataggttgattcttaccctcttctgttctctatatgtctctatttcttttctctctctataaataagcagccttacaactcttcttaatcccatcaaatcgaaccctttttaaacgctcaaatacaaatttctggcaccaaatccttcccactctcctcaattccattcatttcaactcaacaatctctcagatccgtcaaacaaaatataaaagatagaaaaccctagttctgtaaatatataaaggaaaaaagctttttgctggttttgaggcatagcattaaattggattttgattattcatggctgaacaagcattggaaggtagccaacctgtggatttaacaaagcacccttctgggattgtgcctacccttcaaaatattgtgtcaacggtcaatttggactgtaagttggagcttaaatcaattgcacttcaagctcgaaatgcagaatacaatcccaagcgttttgctgctgttattatgaggatcagggaaccaaaaactactgcactcatttttgcatctggcaagatggtctgtactggagccaagagtgagcaacagtctaaattggcggcaaggaagtatgctagaattattcaaaagcttggtttcccagctaaatttaaggattttaagattcagaacattgttggctcttgtgatgtcaagttccccattcgacttgagggtcttgcctattcccatggtgctttctcaagttatgaaccagagctgtttccaggactaatctatcgcatgaagcaacccaagatagtcttgcttatatttgtctctggaaaaattgttctgacaggagccaaggttagagatgagacttacacagcttttgagaacatatatccagtgcttactgagttcaggaaaaaccaacaatgattactactgtcaagagagcaggagcaaggcttgattgaactgtaaatatgaagaccagagatagaaatatctgtaatctggattgagttttaataagacacctgtgtttgttctgtctttttctctcttttaagaaaagggatcctgctttagtaaagtggaagaaaaaaaaaaaccgtgtattgaatttgactgtagaaaaagagatttataagaggcagaatgaaaagaaaaagtggaagcctgtgcaaatcatgaataactttcactgaagtggaaactatttgtggttcatttcaactatgagtaactttgttttttggctaatcaaacactacatttgataactatgcttcatgcttacaataacgttgtaattgaacaaaggaattggtttatcaaaaaaaaaaaaaaaaaa

SEQ ID NO: 1424 - protein, 200 aa, Glycine max
  misc_feature: Ceres CLONE ID no. 477295
  misc_feature: Ceres CDNA ID no. 40350995
  misc_feature (110)..(196): Pfam Name: TBP PFAM Desc: Transcription factor TFIID
MAEQALEGSQPVDLTKHPSGIVPTLQNIVSTVNLDCKLELKSIALQARNAEYNPKRFAAVIMRIREPKTTALIFASGKMVCTGAKSEQQSKLAARKYARIIQKLGFPAKFKDFKIQNIVGSCDVKFPIRLEGLAYSHGAFSSYEPELFPGLIYRMKQPKIVLLIFVSGKIVLTGAKVRDETYTAFENIYPVLTEFRKNQQ

SEQ ID NO: 1425 - DNA, 1049 bp, Glycine max
  misc_feature: Ceres CLONE ID no. 477451
  misc_feature: Ceres CDNA ID no. 36699672
  CDS (43)..(960): REFERENCED BY SEQ ID NO: 1426
atcaccttctcttctctaagcactttactttttttttcagccatggagtttcattgccttccaatatttctttatctcaatttgatgttgatgacagccaatgctgcgttaactcctagacattactgggaaacgatgcttccaagaactcccttgccgaaagcaatcacagagctactaagccttgaaagtaggtccatatttgaatatgccgggaatgatgaccagtcagaaagtaggtccatattaggatacgctggctataatcaagacgaggatgatgtgagcaaacacaatatacaaatcttcaacaggttgtttttcttggaagaggacctgcgtgctggcaaaatattcaacatgaagttcgtcaacaacacaaaagccacagtcccgttgctaccgcgccaaatttcgaaacaaataccgttctcagaagataaaaagaagcaagtgttggcgatgcttggcgtggaagcgaactcaagcaacgccaagatcatagcggagaccattggtctttgccaagagcctgcaacggagggagaaaggaaacactgcgcgacttcgttggagtccatggttgatttcgtcgtttccgcgctcgggaagaacgttggtgctttctcaacagagaaagaaagggaaactgagtctggaaagtttgtagtggtgaaaaatggggtgaggaagttgggagatgataaggttattgcctgtcatccaatgagttacccttatgttgtgtttgggtgtcatctagtgccaaggagtagcgggtatttggtgcgcttgaagggagaagatggggttcgagtgaaagcagttgttgcgtgccacagagacacgtcaaagtgggaccataatcatggggcattcaaagtgctcaatcttaagcctgggaatggtacagtatgccatgtcttcactgaggggaatcttctttggcttccaaattagattaattaccatatacatatttgtccttgttctatccttaaataagtggaatcacctgaagaattgtgcgtaaaaaaaaaaaaaaaaaa

SEQ ID NO: 1426 - protein, 305 aa, Glycine max
  misc_feature: Ceres CLONE ID no. 477451
  misc_feature: Ceres CDNA ID no. 36699672
  misc_feature (91)..(305): Pfam Name: BURP PFAM Desc: BURP domain
  misc_feature: Homolog of GI Number: 18568375 NR Desc: seed coat BURP domain protein 1
  misc_feature: Homolog of GI Number: 24416618 NR Desc: resistant specific protein
  misc_feature: Homolog of GI Number: 24416616 NR Desc: resistant specific protein
  misc_feature: Homolog of GI Number: 24416620 NR Desc: resistant specific protein
  misc_feature: Homolog of GI Number: 54645911 NR Desc: RD22
  misc_feature: Homolog of GI Number: 14422446 NR Desc: BURP domain
  misc_feature: Homolog of GI Number: 18447761 NR Desc: dehydration
  misc_feature: Homolog of GI Number: 14422444 NR Desc: BURP domain
  misc_feature: Homolog of GI Number: 14422442 NR Desc: BURP domain
  misc_feature: Homolog of GI Number: 14422448 NR Desc: BURP domain
MEFHCLPIFLYLNLMLMTANAALTPRHYWETMLPRTPLPKAITELLSLESRSIFEYAGNDDQSESRSILGYAGYNQDEDDVSKHNIQIFNRLFFLEEDLRAGKIFNMKFVNNTKATVPLLPRQISKQIPFSEDKKKQVLAMLGVEANSSNAKIIAETIGLCQEPATEGERKHCATSLESMVDFVVSALGKNVGAFSTEKERETESGKFVVVKNGVRKLGDDKVIACHPMSYPYVVFGCHLVPRSSGYLVRLKGEDGVRVKAVVACHRDTSKWDHNHGAFKVLNLKPGNGTVCHVFTEGNLLWLPN

SEQ ID NO: 1427 - DNA, 1217 bp, Glycine max
  misc_feature: Ceres CLONE ID no. 478111
  misc_feature: Ceres CDNA ID no. 40350996
  CDS (69)..(1046): REFERENCED BY SEQ ID NO: 1428
ggagagatagaattagaattaaaaagcgtgaaggacagtgataggtttggtttggaaggaagaagaaaatgaaggccatagtgataacgaggccaggaggtcccgaagtgctccaacttgaggaagtggaagatccccaagtcggagacgacgagcttctcatcggagtccacgccacttcccttaacagagccgatacctttcagaggaaaggctcctaccctccccctaagggcgccagcccttacctcggtctcgaatgttccggaactgtcctttccctgggtaaaaacgtttccagctggaaaatcggtgatcaggtgtgtgctcttctcgccggaggcggatatgccgagaaagttgcagttccggtaggacaagttcttccggttccagccggtgtttctctcacggatgcagctagttttcctgaggttgcttgcactgtctggtcaactgttttcatgatgagtcgcttatctcaaggggaaaccttgttggttcatggaggttccagtgggattggtacatttgcaattcagatagccaagtatcgagggtcacgagtgtttgttactgcaggaagtgaggagaagctagctttttgcaagagtatcggagctgatgtgggcatcaattataaaacagaagactttgttgcgcgggtaaaggaagaaactggtggccaaggtgttgatgttattcttgattgtatgggagcatcctactatcaaagaaatcttgatagcttgaattttgatggaaggctttttattattggctttcaaggtggggttagtacacaagcagatctacgccctttacttgctaagcgtctcacagtacaaggagctggtttacgcaatagaagtctggaaaataaagctgtgattgttagtgaagtggagaagaatgtttggcctgcaattgccgaaggaaaggttaagcctgtggtctacaaatctttcccgctttctgaggcagcggaggctcaccagcttatggaaagcagccagcatattgggaagatattgcttttgccatgaaaattgtcgtaaatactgaagttcgtgacatacttctggatcctttgtgtttggacttgtttctttgttaagatctcaggattctaatatggttgcggattaaaataacagctaaaggaattgatatggcaaaaaaaaaaaaaaaaaaaaaaaaaaaaaaaaaaaaaaaaa

SEQ ID NO: 1428 - protein, 325 aa, Glycine max
  misc_feature: Ceres CLONE ID no. 478111
  misc_feature: Ceres CDNA ID no. 40350996
  misc_feature (139)..(281): Pfam Name: ADH_zinc_N PFAM Desc: Zinc
MKAIVITRPGGPEVLQLEEVEDPQVGDDELLIGVHATSLNRADTFQRKGSYPPPKGASPYLGLECSGTVLSLGKNVSSWKIGDQVCALLAGGGYAEKVAVPVGQVLPVPAGVSLTDAASFPEVACTVWSTVFMMSRLSQGETLLVHGGSSGIGTFAIQIAKYRGSRVFVTAGSEEKLAFCKSIGADVGINYKTEDFVARVKEETGGQGVDVILDCMGASYYQRNLDSLNFDGRLFIIGFQGGVSTQADLRPLLAKRLTVQGAGLRNRSLENKAVIVSEVEKNVWPAIAEGKVKPVVYKSFPLSEAAEAHQLMESSQHIGKILLLP

SEQ ID NO: 1429 - DNA, 1528 bp, Glycine max
  misc_feature: Ceres CLONE ID no. 478116
  misc_feature: Ceres CDNA ID no. 40041230
  CDS (128)..(1267): REFERENCED BY SEQ ID NO: 1430
ggaaatagtaattgcctcacttgagtctaaggaggccacttcatgatccctatttattgagtggtagtggaccacttttaagaaacaaattgtcttactaagtcttatagtgattgctaccacaaccatgaattgtaggaggttggtttatgtagttgtgtggttcaatctgtatgtggcatgcacattcattcaagtttcaggtctggacgcctctaacttcagcaagtgttggttcccagcaatttacaactttggtgactcaaattcagacacaggagctgtttttgcagcattcacaggggtgaagcctcccaatggcataagcttctttggaagcctctcaggaagggcctctgatggtcgtctcatcatagattttatgactgaagagttgaagctgccatacctgaatgcatatttggactcggttggatcgaattacaggcatggtgcaaactttgcagtaggaggctcctccattcggcctggtggttttagtccattccctcttggccttcaagtagctcagttcctactgttcaagtttcacaccaacactctcttcaatcagttttctaacaacaggacagaacaaccgttcaagaatagtcttccaaggccggaggacttttccaaggccctatacacctttgatattggacaaaatgatcttgcctttggtcttcaacacacttcacaggaacaagttacaaagtcaattcctgaaatcttaaaccagttcttccaagcagtgcagcaactatacaatgtaggggcaagagtgttctggattcataacacaggtccaattggatgcttgccctacagttacatttattatgagcccaagaagggtaacatagatgcaaatggctgtgtgaaacctcagaatgatcttgctcaggaatttaacagacagctcaaggaccaagtgtttcagctaaggagaaagttcccacttgcaaaatttacatatgttgatgtgtacactgccaaatatgaactaatcaacaatacaagaaaccaaggttttgtgagtccattggagttctgttgtggcagttactatggttaccacataaattgtgggaagacagccataataaatggaacagtatatggaaatccatgcaaaaatccttcccaacatgttagttgggatggcatacactactctcaagcagcaaatcaatgggtcgctaaaaaaattctctatggatccctctctgatccaccagttccaattgggcaggcatgtttctgagcatagctagtcacttatattgagatagagtaccatacattatgggggtcttcattcttcaagttgttatttccataaacaagcaattgtgttagaacaattaattggggagccgtatacatgagtaagaacatatatcataatttatgttgtgggaaaagctattgtagcttaattttggaaatgtgaggtcacactgtaacggctcaactaccagataatgttagttcagtcaacttaaataaaaaaaaaaaaaaaaaa

SEQ ID NO: 1430 - protein, 379 aa, Glycine max
  misc_feature: Ceres CLONE ID no. 478116
  misc_feature: Ceres CDNA ID no. 40041230
  misc_feature (40)..(362): Pfam Name: Lipase_GDSL PFAM Desc: GDSL
  misc_feature: Homolog of GI Number: 1110502 NR Desc: coil protein
  misc_feature: Homolog of GI Number: 28950957 NR Desc: At5g14450
  misc_feature: Homolog of GI Number: 15232872 NR Desc: early nodule
  misc_feature: Homolog of GI Number: 51969146 NR Desc: ENOD8
  misc_feature: Homolog of GI Number: 11072007 NR Desc: F12A21.4
  misc_feature: Homolog of GI Number: 50938787 NR Desc: putative early nodulin 8 precursor
  misc_feature: Homolog of GI Number: 50938785 NR Desc: putative early nodulin 8 precursor
  misc_feature: Homolog of GI Number: 53791335 NR Desc: putative early nodule
  misc_feature: Homolog of GI Number: 34894838 NR Desc: putative lipase homolog
  misc_feature: Homolog of GI Number: 53791598 NR Desc: putative lipase homolog
  misc_feature: Useful for sterility
MNCRRLVYVVVWFNLYVACTFIQVSGLDASNFSKCWFPAIYNFGDSNSDTGAVFAAFTGVKPPNGISFFGSLSGRASDGRLIIDFMTEELKLPYLNAYLDSVGSNYRHGANFAVGGSSIRPGGFSPFPLGLQVAQFLLFKFHTNTLFNQFSNNRTEQPFKNSLPRPEDFSKALYTFDIGQNDLAFGLQHTSQEQVTKSIPEILNQFFQAVQQLYNVGARVFWIHNTGPIGCLPYSYIYYEPKKGNIDANGCVKPQNDLAQEFNRQLKDQVFQLRRKFPLAKFTYVDVYTAKYELINNTRNQGFVSPLEFCCGSYYGYHINCGKTAIINGTVYGNPCKNPSQHVSWDGIHYSQAANQWVAKKILYGSLSDPPVPIGQACF

SEQ ID NO: 1431 - DNA, 1236 bp, Glycine max
  misc_feature: Ceres CLONE ID no. 478164
  misc_feature: Ceres CDNA ID no. 40350997
  CDS (53)..(904): REFERENCED BY SEQ ID NO: 1432
actccctcacatcacaagaagcacaatttctctctttctttttgtgtccaaaatggctcctagttctactcacaatactgggttctatgtgcttatgctagttgggatagtgattagcactatggttgctacctgtgctggtagcttctaccaagactttgatctaacatggggtggtgaccgtgctaagatattcaatggtggccagcttctatctctttcccttgacaaagtctctggctctggcttcaaatcaaagaaagaatacctatttgggaggattgatatgcagctcaagctcgttgctggcaactctgctggcactgtcactgcttactacttgtcatcccaagggccaacacatgatgagattgatttcgagtttttgggaaacctaagtggggacccttatattctccacacaaacatcttcacgcaaggcaaaggtaacagggagcaacagttctatctctggttcgaccccaccagaaacttccacacttattctatcatttggaagccccagcacatcatattcttggttgataacacaccaataagggtattcaagaatgctgaatctcttggtgttccttttccaaagaaccagcccatgagaatctattctagcctctggaatgctgatgactgggccaccagaggaggattggtgaaaactgattggtccaaagcaccctttacagcatactaccgcaatttcaaagccactgagttctcactcaagtcttccatttcaaattctggtgctgaatatgaggcaaatgagcttgattcttatagcagaagaagactgagatgggttcagaagtacttcatgatctataactactgcagtgatctcaagcgattcccacaaggtcttcctgctgaatgtagacgctgaaggttccaagagatgaagagaatggccactttctgattggatttgaatcgtctatgtaaaatatgctatgtttattatgtcttagattctttattgacttctgtcttttttttcttcctttttttttagtttctattttatagttgctaatgtatatgtatattaaggggtcttaacaataaatcatattctttgtaccacttttcttgtcaatatgggcagttagtctcatcctagctcgtccacccggtgaaattgatcatgttggaatcaatttctatctgttcatataataaaaaggtgtagtcaagtttaaaaaaaaaaaaaaaaaa

SEQ ID NO: 1432 - protein, 283 aa, Glycine max
  misc_feature: Ceres CLONE ID no. 478164
  misc_feature: Ceres CDNA ID no. 40350997
  misc_feature: null
  misc_feature: Useful for making plants with altered cell wall content and/or composition
  misc_feature (233)..(281): Pfam Name: XET_C PFAM Desc: Xyloglucan endo
  misc_feature (32)..(213): Pfam Name: Glyco_hydro_16 PFAM Desc: Glycosyl hydrolases family 16
MAPSSTHNTGFYVLMLVGIVISTMVATCAGSFYQDFDLTWGGDRAKIFNGGQLLSLSLDKVSGSGFKSKKEYLFGRIDMQLKLVAGNSAGTVTAYYLSSQGPTHDEIDFEFLGNLSGDPYILHTNIFTQGKGNREQQFYLWFDPTRNFHTYSIIWKPQHIIFLVDNTPIRVFKNAESLGVPFPKNQPMRIYSSLWNADDWATRGGLVKTDWSKAPFTAYYRNFKATEFSLKSSISNSGAEYEANELDSYSRRRLRWVQKYFMIYNYCSDLKRFPQGLPAECRR

SEQ ID NO: 1433 - DNA, 1355 bp, Glycine max
  misc_feature: Ceres CLONE ID no. 478278
  misc_feature: Ceres CDNA ID no. 40350998
  CDS (90)..(1037): REFERENCED BY SEQ ID NO: 1434
ggaagcaacaacttcttctgtttcaacctcatcgtcatcgtactactactacccacgttctgctcctttgcggatcgtgtccacaaaagatggcagacaatgaggatggaagggataagactactcgtgggaatgaatgggaggttgtatctctgacagcatcgacatatgcagctgctcctggtcctgatgaagttgagatgaaggatgatgggaacgaagatgtatatggacaagatgaaggagaaacgtcacatgctttatttatgtctcgtcactttgtctttcctcccagtcagcatgaaaacttgcctgtggaacctgactatggtgagattcatgatgattctggagacaaagatgttgcctctgaagagactcctgaagaagtgaccataccaagtggaaaggatgaagaaaacttgacattaccaggattggaagtttcagaggagtttgagggcatgcggtattttgacgagaaaatcaacagattatctgttcgtggtaaacagtttgaggaaagtacaactctaccagcatttggtttgactgaaaagggggagagcatgtatgaccctgcaaaatacacttctttcgacagtgaaactgctattggtggcataacagcttatggtgaaagcatagttgatcctgaaacaactgaatcagcagagcaagggtcaaacgtatctcctgatctatcattgtcaaactactcttccaaagataatgaatacaactcctcagatcttccttgtggagcttggtggaagcggagagctgcctccttatatgctcatgcaaaagaggcaaatgcattctggtctgtcttcattgcagctgctgtgatgggtcttgtaatgcttggtcaacgctggcagcaggaaagagctttacaacttaaatggcaaatcagtataaatgatgaggcgaggagcagggtgcttgctcccatatatcgactcaaagatgtgattgttggtggcaaccgtcgtggctccttgatcaggggaagctcctctggtgaaagttaagggaaaggtggctcagtgcgtatgggctcctatccttgtggtaaaagtgaagatgatgacgaaaaaatgtatgtcagagagaggttgagaatgaaaagtgctacaattgtgaaatgcaggtttggtactaggattggttgacctttcccaattatgaatgccaatgttcaaacattttatgttatggattttcttctttgtattgattagcaatgtatagctcttgaagttattcaacttatgtattctgattgtgtgaaattggcagtttaaacacaaaaagatgtaaatgattgcttgaaaaaaaaaaaaaaaaaa

SEQ ID NO: 1434 - protein, 315 aa, Glycine max
  misc_feature: Ceres CLONE ID no. 478278
  misc_feature: Ceres CDNA ID no. 40350998
MADNEDGRDKTTRGNEWEVVSLTASTYAAAPGPDEVEMKDDGNEDVYGQDEGETSHALFMSRHFVFPPSQHENLPVEPDYGEIHDDSGDKDVASEETPEEVTIPSGKDEENLTLPGLEVSEEFEGMRYFDEKINRLSVRGKQFEESTTLPAFGLTEKGESMYDPAKYTSFDSETAIGGITAYGESIVDPETTESAEQGSNVSPDLSLSNYSSKDNEYNSSDLPCGAWWKRRAASLYAHAKEANAFWSVFIAAAVMGLVMLGQRWQQERALQLKWQISINDEARSRVLAPIYRLKDVIVGGNRRGSLIRGSSSGES

SEQ ID NO: 1435 - DNA, 1080 bp, Glycine max
  misc_feature: Ceres CLONE ID no. 478570
  misc_feature: Ceres CDNA ID no. 35383181
  CDS (47)..(781): REFERENCED BY SEQ ID NO: 1436
tctcgtcccgcaagtattcctccaatctccgtcgatcaccaccaccatgtcgtggctcctccgatccaccaagtctaagttcctctcttcctcttcctcttcttctctttctagaaccttcccctctctccctcgccctcagattggagccatctctcccctccccgatctcttccaccgcaacaccgccaccatgcctttcgcgaaggaaaacgcttccggtggaaacttgaccggtcttcccaaagttcccgcgaataagcttggcagtgattctgatgcgaccaattcttcgaggtacaaagcttctggactgaacaccaatgtgctggctggagctagatatgtctctagagtttgggctgcacagggtcaaatgccattgggagtcaatactgtgatggctagaagttttgagagaagtatggaagctggcacattgggaatgattggtcataaacgttttatgagtgacatcccaagtaaaaccagtgagacaaacccatctggttttcgtccgttatctcctcatcttcctctttatcagccccaactttcttcgaccctctcaattttcaatagaattgctggagctttcctagctggtgtcattttggttttttatatgatctatatgaagttgggtttggttagcctcacctatgactctttctaccagttcatattttattcatcgaaactcaacctacttgtcatggagatttctgccttagccgtgtcctatcatctgtatagtgcaattcgtcatttattcttatgatttgaatcagcaactgacgcctgaactttaggtttgaacctgaggtggaactttgcataattcgaccttggaggcatacttccatatgtctgtcagtcataaggaacttcatttagaaatgtgattttgcttaattgtagttatgtattatcggcttaataattacaattgtggcacaacttaaggagtattttgcacctgacattcggtcatgctttttgctgccctctcaaattgcatgcaagtaactgttgcatttaataaatgcatttgagttttggcaaaaaaaaaaaaaaaaa

SEQ ID NO: 1436 - protein, 244 aa, Glycine max
  misc_feature: Ceres CLONE ID no. 478570
  misc_feature: Ceres CDNA ID no. 35383181
  misc_feature (153)..(243): Pfam Name: Sdh_cyt PFAM Desc: Succinate dehydrogenase cytochrome b subunit
  misc_feature: Homolog of GI Number: 14861486 NR Desc: succinate dehydrogenase subunit 3
  misc_feature: Homolog of GI Number: 15004510 NR Desc: succinate dehydrogenase subunit 3
  misc_feature: Homolog of GI Number: 56806668 NR Desc: succinate dehydrogenase subunit 3
  misc_feature: Homolog of GI Number: 14861484 NR Desc: succinate dehydrogenase subunit 3
  misc_feature: Homolog of GI Number: 15004512 NR Desc: succinate dehydrogenase subunit 3
  misc_feature: Homolog of GI Number: 15004516 NR Desc: succinate dehydrogenase subunit 3
  misc_feature: Homolog of GI Number: 33589714 NR Desc: At5g09600/F17I14_210
  misc_feature: Homolog of GI Number: 15004514 NR Desc: succinate dehydrogenase subunit 3
MSWLLRSTKSKFLSSSSSSSLSRTFPSLPRPQIGAISPLPDLFHRNTATMPFAKENASGGNLTGLPKVPANKLGSDSDATNSSRYKASGLNTNVLAGARYVSRVWAAQGQMPLGVNTVMARSFERSMEAGTLGMIGHKRFMSDIPSKTSETNPSGFRPLSPHLPLYQPQLSSTLSIFNRIAGAFLAGVILVFYMIYMKLGLVSLTYDSFYQFIFYSSKLNLLVMEISALAVSYHLYSAIRHLFL

SEQ ID NO: 1437 - DNA, 1215 bp, Glycine max
  misc_feature: Ceres CLONE ID no. 479121
  misc_feature: Ceres CDNA ID no. 40350999
  CDS (63)..(923): REFERENCED BY SEQ ID NO: 1438
gctgtgaagtgtgaattaaaatatattcaattttgcgtttctctgcctaaaaggattgaaagatgggtcaagcattcggttgctaccaagtcgatcagtcaaatgtggctatcaaggagcattttggaaaatttgatgatgtcctagagcctggatgtcactgcctgccttggtgtcttgggtaccagattgctggtagtctgtcgctgcgagtgcagcaacttgatgttcgatgtgagacgaaaaccaaggacaatgtctttgtcaatgtggttgcatctgtgcaataccgagctgtgtctgagaaagcatctgatgcattctataggcttaccaacactagggagcagatccaatcatatgtttttgatgtcatcagggccagtgtaccaaagttggagttggattctgtctttgagcagaaaaatgatatagcaaaggctgtggaggaggagcttgagaaggccatgtcaacctatggatttgagatagttcagactctcattgttgatatagagcctgatgttaatgtcaagagagcaatgaacgagataaacgcagctgctagattgaggttggctgcaaatgagaaggctgaagctgagaaaatactgcagatcaagaaagcggagggagaagcagaatccaaatatctgtcaggactcggtatcgctcgtcaacgtcaggccattgtggatggactgagggacagcgtgcttgctttctctgagaacgtgcccgggacatcagctaaagatgtcatggacatggtgctggtgactcaatactttgacaccatgaaagagataggagcatcgtcaaggtcctcgtctgtgttcatacctcacggtcctggggcagttaaagacattgccgtgcaaattcgggatggtctccttcaggccactgcctcacagaattaagctttcttggagttgtaaataacaaatagtatgtgtgtcaggtttttttcaggaaatgcttcttttgtttgaacttataaagtctgcatctttactcttcttatatttgatagattcatagcagtgtctattttatgtgtaagtactgatgtgcagttttgaatacttgtttaaggatagtcttaatgtcaagttgcttgtgaatcattaaggaatttgttatgtaagaattacttcccaaaagatgtgtttttcttttagtgtcctatcttgtaaaaaaaaaaaaaaaaaa

SEQ ID NO: 1438 - protein, 286 aa, Glycine max
  misc_feature: Ceres CLONE ID no. 479121
  misc_feature: Ceres CDNA ID no. 40350999
  misc_feature (7)..(193): Pfam Name: Band_7 PFAM Desc: SPFH domain / Band 7 family
MGQAFGCYQVDQSNVAIKEHFGKFDDVLEPGCHCLPWCLGYQIAGSLSLRVQQLDVRCETKTKDNVFVNVVASVQYRAVSEKASDAFYRLTNTREQIQSYVFDVIRASVPKLELDSVFEQKNDIAKAVEEELEKAMSTYGFEIVQTLIVDIEPDVNVKRAMNEINAAARLRLAANEKAEAEKILQIKKAEGEAESKYLSGLGIARQRQAIVDGLRDSVLAFSENVPGTSAKDVMDMVLVTQYFDTMKEIGASSRSSSVFIPHGPGAVKDIAVQIRDGLLQATASQN

SEQ ID NO: 1439 - DNA, 1579 bp, Glycine max
  misc_feature: Ceres CLONE ID no. 479548
  misc_feature: Ceres CDNA ID no. 40351000
  CDS (6)..(1421): REFERENCED BY SEQ ID NO: 1440
aggtcatggatgtgttgttgttgttattattatgtgttctcttggttggtttgccaaacctggctatagtagagagtcgcagggctcccgttctggactactttgagtattgtgctatgagctgcagagcttacagtgcctcgttggaagaatttggaggggttggtgatggaacaactttgaacactaaagcctttcaggctgccatagagaatctgagtcagtatgcagcaagtggtggttctcaactttatgttcccccaggaaaatggttaactggcagcttcaatctcaccagccatttcactttattcctacacaaggatgctgtaattcttgcctctcaggatgagaatgactggccagtgattgatcccttgccatcttatggtagagggagggacacacaaggtggaaggtttagcagcctgatttttggaaccaacctcactgatgtaatcataactggggacaatggcacaatagatggacaaggtgatctgtggtggcaaaaattccacaagggtgagctcaagtacacccgtccttacctggttgaaattatgtactcagataatgttcagatatccaatctcactttggttaattctccatcatggaatgtccatcctatatacagcagcaacgttgttgttcaaggaatcacaattcttgctcctgtgacatccccaaatacagatggaatcaacccggattcttgcacagacacacgaattgaggactgttacattgtatccggggatgactgtgttgctgtgaagagtggttgggatgagtatggtatagcttatggaatgccaacaaagcagcttgtaatcagaagactcacttgtatttctccattcagtgctgcgattgctttagggagtgaaatgtctggtgggattcaggatatgagggctgaggacattgtagccatcaatacagaatcaggggtcaggatcaaaactgctgtaggaagaggaggctatgtcaaggacatatttgttagaagaatgaccatgaaaaccatgaaatgggcattttggatgacaggaaattacgggtctcatgctgatgacaactatgatcctaatgcacttcctgtgattcagaacattaattatcgcgatatggttgctgagaatgtcactatggctgcaaggttggagggtatatctggggaccccttcacaggtatatgcatatccaatgtaaccattcaactggcaaagaaggctaaaaaagttccatggacttgcactgatattgctgggatttcaagtgatgtgactcctgcgccttgtgatctgttgcctgaccaaggagaagagaagattggggcatgcaccttcccagaagaaagtttgcccatcgaagatatcaaggttcaaacgtgcacttacagaaggaacttatgatgatagtgtaaaaggaatgactaagttcaagggaacaatccaaagcaatgtaatacttcaaaaattgtatttaaaatagtgtacttgtaaagactctgaacaaggcaatgacaacaatgatacagaaatgagtctataacaaaaaaaaaaaaaaaaaa

SEQ ID NO: 1440 - protein, 471 aa, Glycine max
  misc_feature: Ceres CLONE ID no. 479548
  misc_feature: Ceres CDNA ID no. 40351000
  misc_feature: null
  misc_feature: Useful for making plants with altered cell wall content and/or composition
  misc_feature (311)..(333): Pfam Name: Glyco_hydro_28 PFAM Desc: Glycosyl hydrolases family 28
MDVLLLLLLCVLLVGLPNLAIVESRRAPVLDYFEYCAMSCRAYSASLEEFGGVGDGTTLNTKAFQAAIENLSQYAASGGSQLYVPPGKWLTGSFNLTSHFTLFLHKDAVILASQDENDWPVIDPLPSYGRGRDTQGGRFSSLIFGTNLTDVIITGDNGTIDGQGDLWWQKFHKGELKYTRPYLVEIMYSDNVQISNLTLVNSPSWNVHPIYSSNVVVQGITILAPVTSPNTDGINPDSCTDTRIEDCYIVSGDDCVAVKSGWDEYGIAYGMPTKQLVIRRLTCISPFSAAIALGSEMSGGIQDMRAEDIVAINTESGVRIKTAVGRGGYVKDIFVRRMTMKTMKWAFWMTGNYGSHADDNYDPNALPVIQNINYRDMVAENVTMAARLEGISGDPFTGICISNVTIQLAKKAKKVPWTCTDIAGISSDVTPAPCDLLPDQGEEKIGACTFPEESLPIEDIKVQTCTYRRNL

SEQ ID NO: 1441 - DNA, 1378 bp, Glycine max
  misc_feature: Ceres CLONE ID no. 480964
  misc_feature: Ceres CDNA ID no. 25446845
  CDS (156)..(935): REFERENCED BY SEQ ID NO: 1442
aagtagtgtccaattctgagtgagccaaaaccaaaactcacctttcgcatccctcagctctccatcccattcggaaccaaatttcagttccacccaaaaccctaattttctttctctcccgcacctagatcttcaggttttaggcaccttccgccatgcacaaattgggaagaggtcatcgggacaaactccagcagttcataacaataactggagccagtgagaaaatagcactgcaggctctgaaggctagtgattggcatcttgaaggagcatttgatttcttttacaaccaaccccagcttaaaacatttactgattctaggcacttggaggagctatacaatagatataaagatgcatatgttgatatgattttggcagatggcatcactgtcctttgcaatgatatccaggtggatcctcaagatatagtaatgttagttctttcatggcacatgaaggctggaaccatgtgtgaattttccaagaaggagtttattgaaggtttacagtctttggggattgattctctggataagttccgtgaaaagataccatatatgcgctctgagctgaaagatgaacagaaattccgcgagatatataactttgcttttggctgggcaaaagagaagggtcaaaaatctcttgcattggatacagctattggtatgtggcaattattatttgctgagaagcagtggccacttgttgatcattggtgccagttcttgcaggctcggcataacaaagcaatatctagggacacatggtctcagcttttggagtttgcaaagactgttggctcaaatttatctgattatgatgccgaaggtgcttggccatatcttattgatgaatttgtggaatatctgaacgagaatggcatcatccaaaatggcctgatcaatgattctagtctaaaatggtgatgcattcagatctcaataaattgctctttaagagaatttgataagcctcttgtgatgagttgtgctattctgtgattgaactcctctttgttattaagtgggattcagtctaaattagattctagagcaaactcattcttgttgacaagtagttgcatcatttgtgagattgttgatatggcatatgaatttccttgggtattgtggaattagtaatgggagcctactaattccacggtgttatagtttctggtctcttttaatttaataattaattcttgaacgatgatgtcttgttagaagataagagacttatgtaattgttgttagctgtccttgtttctggtctactttcatcttgtaaaatatgtggcaccaagttattaaaacattcatgaaatagagaaggggaaaaaataactatcaaaaaaaaaaaaaaaaaa

SEQ ID NO: 1442 - protein, 259 aa, Glycine max
  misc_feature: Ceres CLONE ID no. 480964
  misc_feature: Ceres CDNA ID no. 25446845
  misc_feature: null
  misc_feature: Useful for making plants with altered Lignin content
  misc_feature: Homolog of GI Number: 51535194 NR Desc: putative leucine zipper protein
  misc_feature: Homolog of GI Number: 72126264 NR Desc:  similar to rp42 homolog
  misc_feature: Homolog of GI Number: 68432257 NR Desc:  similar to rp42 homolog isoform 1
  misc_feature: Homolog of GI Number: 51703576 NR Desc: MGC84420 protein
  misc_feature: Homolog of GI Number: 73919225 NR Desc: DCN1
  misc_feature: Homolog of GI Number: 50730510 NR Desc:  similar to RP42 homolog
  misc_feature: Homolog of GI Number: 50752397 NR Desc:  similar to RP42 homolog
MHKLGRGHRDKLQQFITITGASEKIALQALKASDWHLEGAFDFFYNQPQLKTFTDSRHLEELYNRYKDAYVDMILADGITVLCNDIQVDPQDIVMLVLSWHMKAGTMCEFSKKEFIEGLQSLGIDSLDKFREKIPYMRSELKDEQKFREIYNFAFGWAKEKGQKSLALDTAIGMWQLLFAEKQWPLVDHWCQFLQARHNKAISRDTWSQLLEFAKTVGSNLSDYDAEGAWPYLIDEFVEYLNENGIIQNGLINDSSLKW

SEQ ID NO: 1443 - DNA, 1251 bp, Glycine max
  misc_feature: Ceres CLONE ID no. 481121
  misc_feature: Ceres CDNA ID no. 40351001
  CDS (505)..(987): REFERENCED BY SEQ ID NO: 1444
atcaaatacccaccgaattcaaccccccatataacaaatctcctcccatcccatttttcagcaccaaagtttgaaacttttctcaattgggttgaggagagtttgactcaaatttttatttttctaacgaagcagtagctattagaagtgcaaaaattaaatgtccaacatcttcttgttgatgtttgagattcatgtatccgattctcagtgaaatcttcttttccgggtgtatgatcaattccactgttaggcgcaggacccatttagttcaatccttctcagttgctttcctctattggttgtactacgtttcatgatttctaaaccttccttagtctaataatcatctactactagctattattattattattattattatcatcatcatcatatataataaaatctatctgcaatattatttttctgagtttgtgtctagttagtgtctgggtcctggtcctgccaattgtgtcaattaattgtattgaatcataaaagatggcttcctcaagtggaacatcttcagggtcatctctgcttcagaactctggttctgaggaggatttgcaggcggtgatggatcagagaaagaggaagagaatgatatcaaaccgcgaatctgcacggcgatctcgcatgaggaagcagaagcacttggacgatcttgtttcccaagtggctcagctcagaaaagagaaccaacaaatactcacaagcgtcaacatcaccacgcaacagtacctgagcgttgaggctgagaactcggtgcttagggctcaggtgggtgagcttagtcacaggttagagtctctgaatgagatcgttgacgtgttgaatgccaccactgtggcgggttttggagcagcagcaacatcgagcaccttcgttgagccaattaataataatagcttcttcaacccgttgaatatggggtatctgaaccaccctattatggcttctgcggatatattgcagtattgagatccatggtctctgagtctgagatttgatgaggatttcttcttcttcttctaggtttgagtctgttgagaaattgtaatcactaccatatggtgataaggaataataataatgaatgtgtatcgtaaaacggatgggattgttgggtgctggttctgtaaatgtggcatgggccattactgtaatttgtcaccctcctttcctatattattataataataatattgacctaaaaaaaaaaaaaagaaaaaaaaaaaaaaaaaa

SEQ ID NO: 1444 - protein, 160 aa, Glycine max
  misc_feature: Ceres CLONE ID no. 481121
  misc_feature: Ceres CDNA ID no. 40351001
  misc_feature (26)..(80): Pfam Name: bZIP_2 PFAM Desc: Basic region leucine zipper
MASSSGTSSGSSLLQNSGSEEDLQAVMDQRKRKRMISNRESARRSRMRKQKHLDDLVSQVAQLRKENQQILTSVNITTQQYLSVEAENSVLRAQVGELSHRLESLNEIVDVLNATTVAGFGAAATSSTFVEPINNNSFFNPLNMGYLNHPIMASADILQY

SEQ ID NO: 1445 - DNA, 1334 bp, Glycine max
  misc_feature: Ceres CLONE ID no. 482298
  misc_feature: Ceres CDNA ID no. 35383182
  CDS (169)..(1191): REFERENCED BY SEQ ID NO: 1446
aaagcgtcgttttcataatcgtaccagtgtctttcatcatcctcttcgtgatcgtcttctgttgttgctccactcactatctttatttttcctattctatccttctcgcttcttaggttagccgagcgtcatcgatccagaaacgataaaggcagtcataaagtgagaatggatctgtgtgctgctcatgcgaagaaccttttccacacaaattcgttttaccacagacccattccctccaatttgggaaggagcagagtgtttgagatcactgtttcgaggagaaacccttactctaaagggtatcgcctatttgttgtcagcgccacggggaagaacaatcatgaccacaactcctcttcttccggcaatgatgaatggtccattccagaagaagatggtactagagggaataattcttctgatggcaacaaatcagataacaactctgagaaatgtcatcatactaatctggattggcgcgaattcagggcaaagctatatagggatgagttgaaagaaatatcagatgctgacacgcataatcaaggtggaacattgcctatttccaaacctcttggagcacagtgggctcatcctattccagtacctgagactggttgcgtacttgtggctaccgaaaagcttgatggtgttcgcacatttgaaagaactgttattctccttctcagatctggaactagacatcatcaaggaggaccttttggaattgtcatcaaccgtcctcttcacaaaaagatcaaacacatgaaacctacaaaccatgatctattaactaccttctctgattgttctctgcatttcggcggacctcttgaggcaagcatggttttgttgaaaacagaggagaagatgaagcttccaggatttgaagaggtaatccctgggctatgttttggatctcgaaacagtttggatgatgctgcaggacttgtgaagaaggggattctcaagcctcatgacttcagattctttgttggttatgctggatggcaactggatcagttgagagatgagattgagtcagattattggtatgtagctgcatgtagctcaagtttgctttgtggggctttatcagattcttcagaaagtttgtgggaggagattttgcagctaatgggtggtcattactcagaattgagccggaagccaaagcaagacatgtagctactcatgtatggtttcaaattcagagtcaaatgaatgaagaacctgtaatcagggtgctacaaagtcaactgtactgatgttcactttaatgtcaaataaatagataatttatccccctgtccaaaaaaaaaaaaaaaaaa

SEQ ID NO: 1446 - protein, 340 aa, Glycine max
  misc_feature: Ceres CLONE ID no. 482298
  misc_feature: Ceres CDNA ID no. 35383182
  misc_feature (147)..(340): Pfam Name: DUF179 PFAM Desc: Uncharacterized ACR
  misc_feature: Useful for delaying flowering time
  misc_feature: Useful for increasing chlorophyll and photosynthetic capacity
  misc_feature: Useful for making ornamental plants with modified leaves
  misc_feature: Useful for making plants with increased biomass
  misc_feature: Useful for making plants with increased biomass and foliage
  misc_feature: Useful for making plants with increased biomass and foliage
  misc_feature: Useful for making shorter plants
  misc_feature: Useful for making stronger plants
MDLCAAHAKNLFHTNSFYHRPIPSNLGRSRVFEITVSRRNPYSKGYRLFVVSATGKNNHDHNSSSSGNDEWSIPEEDGTRGNNSSDGNKSDNNSEKCHHTNLDWREFRAKLYRDELKEISDADTHNQGGTLPISKPLGAQWAHPIPVPETGCVLVATEKLDGVRTFERTVILLLRSGTRHHQGGPFGIVINRPLHKKIKHMKPTNHDLLTTFSDCSLHFGGPLEASMVLLKTEEKMKLPGFEEVIPGLCFGSRNSLDDAAGLVKKGILKPHDFRFFVGYAGWQLDQLRDEIESDYWYVAACSSSLLCGALSDSSESLWEEILQLMGGHYSELSRKPKQDM

SEQ ID NO: 1447 - DNA, 2122 bp, Zea mays
  misc_feature: Ceres CLONE ID no. 483675
  misc_feature: Ceres CDNA ID no. 40041231
  CDS (177)..(2060): REFERENCED BY SEQ ID NO: 1448
acacacgactagaaccaggcaaccagctgcggagggaggaaacctagcggaacactgtgcaggtgacggcggcgcgctaccggtgacaggggatacggcggcatcgtcccctcctccatccccggcgcggcggcgccagcagccggcctgcaggcacacaagtggccacccttccaatggcggtggagaagtccagcagcggcacatcaactccctccaccacctccaccatggaccggtttcagaagattgtcctaagctgggattacctccgtctcatcgctgaatccaagggcggcaagcaggccaaggtgctgcagcatgtgaagaacacatacgtctcggtggctgagtaccttggtgtctttgagccactgctctttgaggaggtcaaggcacagatcatccagggacgcagtaacgacgaggaagaatctgggatggactggaggaggggagcagtggggtcgtgcacggagtctgaggggttccacaagctctctgtggcggtggaagacaattttcaggataatgtgtcagagaatgatctactgcttatctccaaggagaaatttgaggagggatcgacccctaatgcatatgcatttgcattagtggagcagcgaggtggtggcatacatatttcacttagaacttttgtggcaggtgaaattcaaaatctgaatgttgcaaagcctgtgaagtctacaaggctgcaacattttgcttccattattgcaagtcaaaacagcttgctgtggatactgaaggtctgcagcttgtctacaataatgcgggagttcacagctatgcattccgtagcttctctaccttttaaggatttgattctttcagctaccgaggcgcacaaggatggtgatgatcaaagtcgtgcgtggaatgtccctgagccacttatggattatctcaaagtgaatcttaatgattcccagctagaagcagttaatgcaggtctttcacgcagatcctttgttcttattcagggccctccaggaacaggaaagacacaaactattcttggactccttagtgccgttctccattctgctcctgcaagaatgcagatcaaaggaggatttgatgttctaaaacatgggccagaactggacattgatggcaagcgtgcacactggataaaggcatctccttggttacttggtgcaaatcctcgagatctgattatgcctgttgatggtgatgatggattttacccgacgggaaatgaactgaaacccgaaatcgtaagttccaatcgcaagtatcgggctcatgtgttggtgtgtgctccatccaactcagcactcgatgagatcgtgttgcgtgttcttaagacaggaattcgagatgaaaataacaacacttataaccctaaaattgtgcgcattggagtgaaggcccttcattctgttaaagcagtttctatggattatcttattcaacaaaaactttctggtgtagatcgcacattagatggtgggagacgaggtgctggtgaatatgatcggattagagcttcaatactggacgaagcagccattgtattttctactctgagtttcagtggatcatcaatttttagcaggatgacccgtgcttttgatgttgttataattgatgaagctgcacaagcggtggaacctgcaactcttattcctttgatccatggctgcagacaaatttttcttgttggtgacccagttcagttgcctgcaactgtcatttcacagactgcacagaagttgggatatggaacgagcttgttcaaaagatttcaagctgccggttttccagtgcaaatgcttaaaatccaatatcgcatgcatccagagattagtacattcccttcaaaagaattttatgaaggggtactacaagatttttttttttttttttttggaagcgatgattcttttctcttatctaattatggggagaagctgactatcgtagagtgcaccaccaaaattattttttgtgaaactgcagaggtgacaaatatgtcgcttatgtctgttttccacggttcacagttaaattgatggggctggagcctggaggttcaccagctccagtatttgtctacaaaaaaaaaaaaaaaaaa

SEQ ID NO: 1448 - protein, 627 aa, Zea mays
  misc_feature: Ceres CLONE ID no. 483675
  misc_feature: Ceres CDNA ID no. 40041231
  misc_feature: Homolog of GI Number: 57834047 NR Desc: OSJNBa0035I04.7
  misc_feature: Homolog of GI Number: 32490215 NR Desc: OSJNBb0088C09.17
  misc_feature: Homolog of GI Number: 34896974 NR Desc: putative component of a tRNA splicing complex
  misc_feature: Homolog of GI Number: 54290635 NR Desc: regulator of nonsense transcripts 1
  misc_feature: Homolog of GI Number: 42566850 NR Desc: tRNA
  misc_feature: Homolog of GI Number: 54290630 NR Desc: component of a tRNA splicing complex
  misc_feature: Homolog of GI Number: 7268305 NR Desc: SEN1 like protein
  misc_feature: Homolog of GI Number: 65304349 NR Desc: tRNA
  misc_feature: Homolog of GI Number: 15219364 NR Desc: tRNA
  misc_feature: Homolog of GI Number: 9954728 NR Desc: Similar to tRNA
MAVEKSSSGTSTPSTTSTMDRFQKIVLSWDYLRLIAESKGGKQAKVLQHVKNTYVSVAEYLGVFEPLLFEEVKAQIIQGRSNDEEESGMDWRRGAVGSCTESEGFHKLSVAVEDNFQDNVSENDLLLISKEKFEEGSTPNAYAFALVEQRGGGIHISLRTFVAGEIQNLNVAKPVKSTRLQHFASIIASQNSLLWILKVCSLSTIMREFTAMHSVASLPFKDLILSATEAHKDGDDQSRAWNVPEPLMDYLKVNLNDSQLEAVNAGLSRRSFVLIQGPPGTGKTQTILGLLSAVLHSAPARMQIKGGFDVLKHGPELDIDGKRAHWIKASPWLLGANPRDLIMPVDGDDGFYPTGNELKPEIVSSNRKYRAHVLVCAPSNSALDEIVLRVLKTGIRDENNNTYNPKIVRIGVKALHSVKAVSMDYLIQQKLSGVDRTLDGGRRGAGEYDRIRASILDEAAIVFSTLSFSGSSIFSRMTRAFDVVIIDEAAQAVEPATLIPLIHGCRQIFLVGDPVQLPATVISQTAQKLGYGTSLFKRFQAAGFPVQMLKIQYRMHPEISTFPSKEFYEGVLQDFFFFFFGSDDSFLLSNYGEKLTIVECTTKIIFCETAEVTNMSLMSVFHGSQLN

SEQ ID NO: 1449 - DNA, 483 bp, Zea mays
  misc_feature: Ceres CLONE ID no. 483725
  misc_feature: Ceres CDNA ID no. 35383183
  CDS (88)..(243): REFERENCED BY SEQ ID NO: 1450
cttctcccctgcgacaaagacgacgcaagtccctactcctccaaaccctcgccgactcagatccagcttcctcgcaccgccgtcgccatgccgttcactccaggcccctactctggcgtcagcaccctcgcccttgtggcgagggcgtcggcctttggcgtcggtgtcgtctacgggagcatcaagctctcaatcctcaaggtaacaaaacctaaaaaggaggaagtgcatgatcattactaaggacgacaaggctgctacattttaattcccacatatggaaggatgttataaattggcagtgcaccccttctccatacgtacaatacaatttcgtttatgatttgtggacctgtctgtaacatacctgctatttttttttgtgttgtaataaattcttatacaatgacatgaaatcaggaagtggaaaagcaagtcgttcgacaaaaaaaaaaaaaaaaaaaaaaaaaaaaaaaaaaaaaa

SEQ ID NO: 1450 - protein, 51 aa, Zea mays; identical to SEQ ID NO: 662
  misc_feature: Ceres CLONE ID no. 483725
  misc_feature: Ceres CDNA ID no. 35383183
  misc_feature: Homolog of GI Number: 50921369 NR Desc: OSJNBb0050O03.8

SEQ ID NO: 1451 - DNA, 614 bp, Zea mays
  misc_feature: Ceres CLONE ID no. 483916
  misc_feature: Ceres CDNA ID no. 35385341
  CDS (91)..(432): REFERENCED BY SEQ ID NO: 1452
actttcgccgccgcctctctccttcccgagcaggaggcggacaaggtaagcagcaatcgcaggaaccctagcgccgccgcacccgcaggaatgggtatcgacctcgtcgccggtgggaggaataagaagaccaagcgcactgcgcccaagtctgacgatgtctacctcaagctcctcgtcaagctctaccgtttcttggtcaggaggaccaagagcaatttcaacgctgtcattctcaagaggcttttcatgagtaaaaccaaccgaccaccaatctccatgcgccgccttgtcaagtttatggaaggaaaggagaagaacattgctgtcattgttggcacagtcacagatgacaaaaggatccaggaggttccttccataaacttgacaaggcggctcagggagttgggtcccggggttggagttccttagggctctactagtgtgtgcggtggtcaagtgttttctccttccttggtcaagtgtttgccttggttcaacccctcactcttggtttggagtacgggtgtagtttttcttttgtaagaaccttcctttttattctatcttaatttaaagatgcagttcttctgtgtacaaaaaaaaaaaaaaaa

SEQ ID NO: 1452 - protein, 113 aa, Zea mays
  misc_feature: Ceres CLONE ID no. 483916
  misc_feature: Ceres CDNA ID no. 35385341
  misc_feature (12)..(95): Pfam Name: Ribosomal_L18e PFAM Desc: Eukaryotic ribosomal protein L18
  misc_feature: Homolog of GI Number: 34897628 NR Desc: cytoplasmic ribosomal protein L18
  misc_feature: Homolog of GI Number: 57471708 NR Desc: ribosomal protein L18
  misc_feature: Homolog of GI Number: 50939929 NR Desc: putative cytoplasmic ribosomal protein L18
  misc_feature: Homolog of GI Number: 23397141 NR Desc: putative 60S ribosomal protein
  misc_feature: Homolog of GI Number: 606970 NR Desc: cytoplasmic ribosomal protein L18
  misc_feature: Homolog of GI Number: 6714451 NR Desc: putative 60S ribosomal protein L18
  misc_feature: Homolog of GI Number: 28798549 NR Desc: 60S ribosomal protein
  misc_feature: Homolog of GI Number: 3021348 NR Desc: ribosomal protein L18
  misc_feature: Homolog of GI Number: 25295214 NR Desc: 60S ribosomal protein L18
  misc_feature: Homolog of GI Number: 48098918 NR Desc: similar to ribosomal protein L18
MGIDLVAGGRNKKTKRTAPKSDDVYLKLLVKLYRFLVRRTKSNFNAVILKRLFMSKTNRPPISMRRLVKFMEGKEKNIAVIVGTVTDDKRIQEVPSINLTRRLRELGPGVGVP

SEQ ID NO: 1453 - DNA, 2496 bp, Zea mays
  misc_feature: Ceres CLONE ID no. 484153
  misc_feature: Ceres CDNA ID no. 40041232
  CDS (459)..(2030): REFERENCED BY SEQ ID NO: 1454
gactcgcgctcggcacgcaggcacgcgactgcggtggcgctcaggctcgggctctcagcaacggcggggcagtcccagactcagcgtctccctctcgccaatcgccttgcgccctcgctccgttcctctgctcaccggccgattctgcgtgcgcgcctcccgctcccctatcgcctccggtcgaacgtcgacggcgcccggccccggcggctgcattgcgctgcttgcggccggcgggtagcgggagccagcaggctctgctcccccaaggcggccgcgccgctttggtagcgcttatgccccaaacgaagtgttacccatccgcttagcgctcaagcgtgcgcttagttgcaagattttccagcatagcttgctcacctacttctcaatttagaagacctcaatttctggatctgagcatcaaatcaagaccataccactttagtcagtcctgtctgatggcactgactgcagctccagccagtggtgattcacagagtggtcctcagaggaactatcaggttgttgttgctgccacttgtgacatgggcattggcaagggtggggtattgccatggaagcttcttggtgatcttaaattcttcaaagaacttacactaactacaactgatcctgccaaaaagaatgcagttataatgggaaggaaaacatgggagagcattcctgttaagtcaaggccactgcctggtcgtttgaatgtcatacttactcgatctggtagttttgattttgcaacagtagagaatgttgttatatgtggaagtatgaaatctgccttagagctgctagcatcaactccatactgcttatcaattgagaaagtttttgtcataggaggtgggcaggtactgagagattatttgaatggacctgcatgtgaggctatccatctgactgatattcagtcaagcattgagtgtgatactttcatccctccagttgacttctcagtgttccagccttggtattcatctttcccagtggtagagagcaacattaggcattcttttgtgacttttgttcgtgttagaaagtcagtggcagaaactcatgagtcaaatggcaaggaattaactgagattgataccaagaatgacaaatttgaaatagagaatttctcttttctccccaagatggtacatgaccgccatgaggagtatcaatatctcaatcttgttgaagatattataaggtttggtgctcagaaaaatgacaggacaggaactggaacattgtcaaaatttgggtgtcagatgcgattcaacttaaggaaaatttttcctctgctgacaacaaagagggtattttggcgtggtgttgtcgaagaactcctttggttcatcagtggctcaacaaatgcaaaggttttgcaagagaagggtattcatatctgggatggcaatgcttcaagagagtatcttgaccgtattggcttggcacacagggaggaaggtgatctaggtccagtttatggatttcaatggcggcactttggtgctgaatacactgacatgcacgctgactatactggaaaaggctttgatcagctaatggatgtgattgacaagattaagaacaatcctgatgaccgccgaataattttatcggcgtggaatccttcagatctcaagaagatggctcttcctccttgccacatgtttgcacaattttatgtggagaacggggagctatcctgccagatgtatcaacgctctgcagacatggggcttggtgttccattcaacatcgcatcatattctcttttgacgtacatgattgctcaagtttgtgatctttctccaggagattttgtccatgttataggggatgctcatgtctatagaaatcacgttcgagctctggaggaacagattcagaagatgcctaaaccatttccaattttaaagataaatccttcgaaaaaggatatagattctttcatggcgtcagacttcaagctggttggctatgatcctcaccagaagctagagatgaaaatggcagtgtaacggtggcttagctctggagcccccagccttgtaacctcggtgggtgaaatcagtcgaacgaactggtactacataaaaaatgaaccggacatcgcactagcttgtttttggtgatggtgctgaatgttgtgcgggaggcgttttcccccgttattagtagcgatctgcgtgctatatatggtcgctgaagtcaaaattgtctctcttttatttttatctactactactactcaattgcgagtgagagatggtctgggcacaccattcaattgcaacggcctactggtgtgttgccccccctatgagggctgtgacgattgcgccactacctcgtgagaaacatgatgtgaccgaaattgctgtgtacctgcatggtagaacaacgccctctttggtatctggttgccttaatacgtgacctggttaattcagtttccagtttggatgggcaaaaaaaaaaaaaaaa

SEQ ID NO: 1454 - protein, 523 aa, Zea mays
  misc_feature: Ceres CLONE ID no. 484153
  misc_feature: Ceres CDNA ID no. 40041232
  misc_feature (19)..(196): Pfam Name: DHFR_1 PFAM Desc: Dihydrofolate reductase
  misc_feature (240)..(523): Pfam Name: Thymidylat_synt PFAM Desc: Thymidylate synthase
  misc_feature: Homolog of GI Number: 1706522 NR Desc: Bifunctional dihydrofolate reductase
  misc_feature: Homolog of GI Number: 30690081 NR Desc: bifunctional dihydrofolate reductase
  misc_feature: Homolog of GI Number: 3309066 NR Desc: bifunctional dihydrofolate reductase
  misc_feature: Homolog of GI Number: 289193 NR Desc: dihydrofolate reductase
  misc_feature: Homolog of GI Number: 21702230 NR Desc: dihydrofolate reductase
  misc_feature: Homolog of GI Number: 288615 NR Desc: dihydrofolate reductase
  misc_feature: Homolog of GI Number: 3097056 NR Desc: dihydrofolate reductase
  misc_feature: Homolog of GI Number: 21281275 NR Desc: putative dihydrofolate reductase
  misc_feature: Homolog of GI Number: 77550896 NR Desc: thymidylate synthase
  misc_feature: Homolog of GI Number: 77555241 NR Desc: thymidylate synthase
MALTAAPASGDSQSGPQRNYQVVVAATCDMGIGKGGVLPWKLLGDLKFFKELTLTTTDPAKKNAVIMGRKTWESIPVKSRPLPGRLNVILTRSGSFDFATVENVVICGSMKSALELLASTPYCLSIEKVFVIGGGQVLRDYLNGPACEAIHLTDIQSSIECDTFIPPVDFSVFQPWYSSFPVVESNIRHSFVTFVRVRKSVAETHESNGKELTEIDTKNDKFEIENFSFLPKMVHDRHEEYQYLNLVEDIIRFGAQKNDRTGTGTLSKFGCQMRFNLRKIFPLLTTKRVFWRGVVEELLWFISGSTNAKVLQEKGIHIWDGNASREYLDRIGLAHREEGDLGPVYGFQWRHFGAEYTDMHADYTGKGFDQLMDVIDKIKNNPDDRRIILSAWNPSDLKKMALPPCHMFAQFYVENGELSCQMYQRSADMGLGVPFNIASYSLLTYMIAQVCDLSPGDFVHVIGDAHVYRNHVRALEEQIQKMPKPFPILKINPSKKDIDSFMASDFKLVGYDPHQKLEMKMAV

SEQ ID NO: 1455 - DNA, 769 bp, Zea mays
  misc_feature: Ceres CLONE ID no. 484500
  misc_feature: Ceres CDNA ID no. 35385342
  CDS (96)..(365): REFERENCED BY SEQ ID NO: 1456
ctgtttgttgtttttcttctcccgtccgcagtccgcttggcgtgcgcgacggctagggcgaccgccgccgccctacgccctacgtccagctgcccatgtcttcttcgggccccttgccggcgggaactcaccagaccaggaatcgtgctggcaaccggcgcaagtctggaggctggactgctgcaatcaacatgtacaatgaccaaacaattgacccctcagagaaaccggtaatgtattctggatctagcagctcatcatggggtcacctgaagcttcctcatcagatgaacttcctcgaggagttgcgccgtgcagtggacgctcatacagaatttgcgtcgcctgtcgtcacctggaactaatcgaagtcagcatctgcatcattatgcgttatgactaattttcgaagtcagcatctgcatcattatgcgttatgactaatttatggaaggcaggctgttcgccaggtctatgtatgatgtatcccatacacggatgatgtgccaaaaggctttcgtctgacctgcagctgcttctggaatctgcatctgtacaattgtaccattgttacccctggccttgtagctgcaaagcagtttgttgtaacaattaaatgaggcgccggatcctcacgccatcgaaagtttgaaacagcttggttgttgtatggtagttccaagacttggtgattataatgtgcgcattttctcgacctggagttttagaatatgtagaaggtaatgcttataaaaaaaaaaaaaaaaaa

SEQ ID NO: 1456 - protein, 89 aa, Zea mays
  misc_feature: Ceres CLONE ID no. 484500
  misc_feature: Ceres CDNA ID no. 35385342
  misc_feature: Homolog of GI Number: 51964154 NR Desc: PREDICTED OSJNBa0030C08.45 gene product
MSSSGPLPAGTHQTRNRAGNRRKSGGWTAAINMYNDQTIDPSEKPVMYSGSSSSSWGHLKLPHQMNFLEELRRAVDAHTEFASPVVTWN

SEQ ID NO: 1457 - DNA, 638 bp, Zea mays
  misc_feature: Ceres CLONE ID no. 484684
  misc_feature: Ceres CDNA ID no. 36588792
  CDS (138)..(440): REFERENCED BY SEQ ID NO: 1458
aagataaaaagagggacacttttggtggtaatgttagtgaaagagatttcgatgtgaacacggtgccagttacttgttctgtctccttaactcaccttcaggaagaacctggtaagctgagcacagccatcgacctcatggatatagaccatggggttagcgcaggtgcactggatcgttcacatgcatcaggtggtgcaggtaaaagaagttttgagacggccgaagtagctgctgaagtacccgagcataagaaaactaagctggataataatgttgtgcctataagctctggtccacgcgagaatgcctgtacgaatgatggcaatagcgataaactgatgcctggaagctcaagcagtgatggcaagcgcgtgtttccacttgatctaaatgcagtgggggatgaggacatcgtaaatattccagccttcaggtgatgaagagttcgctgttccatgacaaaccaaccgtggtggtttggttcagaatgagagatgtgcattgtaaatcgcatgtgcagtttttgacctaatgttttcagacaacacttacagatgtgatgttcccctctttggcagtgaataattctgctccagaatatgcttacagatgtgatcataaaaaaaaaaaaaaaa

SEQ ID NO: 1458 - protein, 100 aa, Zea mays
  misc_feature: Ceres CLONE ID no. 484684
  misc_feature: Ceres CDNA ID no. 36588792
MDIDHGVSAGALDRSHASGGAGKRSFETAEVAAEVPEHKKTKLDNNVVPISSGPRENACTNDGNSDKLMPGSSSSDGKRVFPLDLNAVGDEDIVNIPAFR

SEQ ID NO: 1459 - DNA, 583 bp, Zea mays
  misc_feature: Ceres CLONE ID no. 484907
  misc_feature: Ceres CDNA ID no. 25446414
  CDS (194)..(463): REFERENCED BY SEQ ID NO: 1460
aggcgaagcggagtagtggaagcagaggcggcagccatggccgtgatggagaagctcaagatctttgtcgttaaggagcccgtagtcgcggcctcctgcctcatcgctggattcggtctctttcttccagcagttgtccggccaatcctggattcatggcagaccgcggaacaagttcctccacctcttctaaatgatccatgttcttgatgaaggtgatgaggagcacaggaaaccacagaacccagcaaccccctttggtttcccacgctcctcgtcggcatcagcaactattcgatcacatcccctatttcaaactttactcggtggttgcaggtgtcaccggcaagaaaaagtagtgaacttgcattgttttctcatgccaatgttgccccacattttcttccccgtgttttttctggcgaccagattggaaggcttttcccaagagtcacggtcttgaactctagatggtatccgcggaataatcattgtacctgaatcatatactgcaatgtggcagttttgaaaatgtttcccctcctacaaaggttgatagaatgccacaaaaaaaaaaaaaaaa

SEQ ID NO: 1460 - protein, 57 aa, Zea mays
  misc_feature: Ceres CLONE ID no. 484907
  misc_feature: Ceres CDNA ID no. 25446414
  misc_feature: Homolog of GI Number: 55908883 NR Desc: putative fiber protein
  misc_feature: Homolog of GI Number: 25992541 NR Desc: fiber protein Fb11
  misc_feature: Homolog of GI Number: 34910368 NR Desc: P0684B02.18
MAVMEKLKIFVVKEPVVAASCLIAGFGLFLPAVVRPILDSWQTAEQVPPPLLNDPCS

SEQ ID NO: 1461 - DNA, 551 bp, Zea mays
  misc_feature: Ceres CLONE ID no. 485183
  misc_feature: Ceres CDNA ID no. 25446415
  CDS (118)..(315): REFERENCED BY SEQ ID NO: 1462
ctcccataacccatccgagtgccacgttcaaccaggtgtgggtgtgaagttcgccggtagccgagaggagggatgtgtccgtcgcacttgaattccggtgttgccagcagtcagtgaatgggaggggcctcgacgggtttgtcgtcgtgcgagaatcacgcacacccgactcctcgaacgaggaagactctggacgccggagaaattgtttgccggagcatcaaggtccgtcgcggtactcggactcccgcaggcagtactcggctctgcgtaaccctcgacgaacaagtgaccgaggacccaggtgttcagtaggtggaaattgctgagcaggagctcattgaaggtgaagagcaggtagtccaggaggaggcctataatgaggagtacgagcttatctaggtggcgtctcccagtcagctttatggtgccaatgaataatgcttagtttgctttattattctcatttattttttaagacttccgctatgtaataatgatatttgtgacatttatctctatacactttgtcattaaaaaaaaaaaaaaaa

SEQ ID NO: 1462 - protein, 65 aa, Zea mays
  misc_feature: Ceres CLONE ID no. 485183
  misc_feature: Ceres CDNA ID no. 25446415
MGGASTGLSSCENHAHPTPRTRKTLDAGEIVCRSIKVRRGTRTPAGSTRLCVTLDEQVTEDPGVQ

SEQ ID NO: 1463 - DNA, 2234 bp, Zea mays
  misc_feature: Ceres CLONE ID no. 485285
  misc_feature: Ceres CDNA ID no. 40041233
  CDS (53)..(1885): REFERENCED BY SEQ ID NO: 1464
attcccttccctctcgcgagctcagatcacgcgaagcaaggaaaaaagaaaaatggcgcagctggtggagacgtacgcgtgctcgccggccacggaacgcggccgtggaatcctcctggccggggaccccaagacagacacgatcgcctactgcaccggccgcagcgttatcatccgccgcctcgatgcgcctctcgacgcttgggcctaccctgaccacgcctaccccacgaccgtcgcccgcttctcccccaacggcgagtgggtcgcctccgccgacgcctccggctgcgtccgcgtctggggccgctacggtgaccgcgctctcaaggccgagtttcggcccctctcgggacgcgtcgacgacctccgctggtcccccgacggcctacgcatcgtcgtctctggggacggcaagggcaagtccttcgtccgcgcatttgtgtgggactctggcagcactgttggtgaatttgatgggcactcaaagagggttctgagctgtgacttcaaaccaacacgtccatttcgcattgtgacatgtggtgaagattttctggctaacttctatgaaggaccaccattcaaatttaagcattccataagggatcactcaaattttgttaactgtatccggtatgctcctgatggtagtaagtttatcactgtgagttctgataagaagggtttgatatatgatggcaaaactggagaaaaaataggagaactttccactgaaggcaatcatacagggagcatatatgctgttagctggagtcctgacagtaaacaggttctaacagtttctgctgataaatctgcaaaagtatgggatatcatggaagatgcaagtgggaaattgaatcgaactttgtcttgccctggtataggaggtgtggatgatatgcttgttggttgtctctggcagaatgaccacctcgtgacagtctctcttggtgggacatttaatgtgttctctgcaagcaacccagaccaagaaccagttacatttgcaggacatttgaagactgttagttctttggtcttctttcctcaaagtagcccaagaactatactatctactagctatgatggtgtcatcatgaggtggatacagggtgttggatttggtggcagattggtgcgcagaaacaacactcaaataaaatgttttgctgcagtagaagaagagcttgttacctcaggttatgataataaggtcttcagaattcctcttaatggaaaccagtgtggagatgctgagtcagttgatataggcggtcagccaaatgctttgaaccttgcaattcagaaacctgaatttgcactgatcactactgattccgggattgtgttgctgcacaattcaaaagtcatttctacaacaaaagttaactatgccatcacgtcatcttcagtgtctcctgatggcacagaagctgttgtgggtgctcaagatgggaaactgcgaatctattccatcagtggcgatacactcacagaagaagctctgcttgagaagcaccggggtgctatcacttccatacattattcgccagatgtttctatgtttgcttctgctgataccaacagggaagctgttgtgtgggatcgagcaagtagagaggtcaagctgaagaacatgttgtaccacacagccaggataaactccctggcttggtcacctgacagtcgattggttgccactggctcactggacacctgtgcaattgtctacgagatagacaagccggtagccagtcgcgtcaccatcaagggagcccatcttggtggggttcatgggttaaccttcctcgacaatgatattctggtgactgccggtgaagatgcttgcattcgtgtttggaaggtggtgcagcaataggccgctcttcattctggtgtgcaatgagaatgtctgtgctgttgattggaataaacttttttttgttggtttggtggctgttactcacggggtcatagcatggtttgttgctttatctgcgatttgtgctctaaatttcctttacaattctttttgagctgtattatttttgcttgttttttttcaggaagactcctttgtaagtggatccggtatccctgcatctgattttgttaggagttgtgagaatatagggatactgttgttgctttttctaccccaggtccctaaaatagtcgttaataactgacttcgctgtggttaagtttttaaaaaaaaaaaaaaaaaa

SEQ ID NO: 1464 - protein, 610 aa, Zea mays
  misc_feature: Ceres CLONE ID no. 485285
  misc_feature: Ceres CDNA ID no. 40041233
  misc_feature (570)..(606): Pfam Name: WD40 PFAM Desc: WD domain
  misc_feature: Homolog of GI Number: 3123032 NR Desc: 66 kDa stress protein
  misc_feature: Homolog of GI Number: 21387079 NR Desc: WD40
  misc_feature: Homolog of GI Number: 34895466 NR Desc: putative 66 kDa stress protein
  misc_feature: Homolog of GI Number: 4262240 NR Desc: putative stress protein
  misc_feature: Homolog of GI Number: 42568857 NR Desc: transducin family protein / WD
  misc_feature: Homolog of GI Number: 1722837 NR Desc: WD
  misc_feature: Homolog of GI Number: 55242257 NR Desc: ENSANGP00000021922
  misc_feature: Homolog of GI Number: 52138693 NR Desc: WDR1 protein
  misc_feature: Homolog of GI Number: 21356527 NR Desc: CG10724
  misc_feature: Homolog of GI Number: 62089078 NR Desc: WD repeat
MAQLVETYACSPATERGRGILLAGDPKTDTIAYCTGRSVIIRRLDAPLDAWAYPDHAYPTTVARFSPNGEWVASADASGCVRVWGRYGDRALKAEFRPLSGRVDDLRWSPDGLRIVVSGDGKGKSFVRAFVWDSGSTVGEFDGHSKRVLSCDFKPTRPFRIVTCGEDFLANFYEGPPFKFKHSIRDHSNFVNCIRYAPDGSKFITVSSDKKGLIYDGKTGEKIGELSTEGNHTGSIYAVSWSPDSKQVLTVSADKSAKVWDIMEDASGKLNRTLSCPGIGGVDDMLVGCLWQNDHLVTVSLGGTFNVFSASNPDQEPVTFAGHLKTVSSLVFFPQSSPRTILSTSYDGVIMRWIQGVGFGGRLVRRNNTQIKCFAAVEEELVTSGYDNKVFRIPLNGNQCGDAESVDIGGQPNALNLAIQKPEFALITTDSGIVLLHNSKVISTTKVNYAITSSSVSPDGTEAVVGAQDGKLRIYSISGDTLTEEALLEKHRGAITSIHYSPDVSMFASADTNREAVVWDRASREVKLKNMLYHTARINSLAWSPDSRLVATGSLDTCAIVYEIDKPVASRVTIKGAHLGGVHGLTFLDNDILVTAGEDACIRVWKVVQQ

SEQ ID NO: 1465 - DNA, 575 bp, Zea mays
  misc_feature: Ceres CLONE ID no. 485471
  misc_feature: Ceres CDNA ID no. 25446416
  CDS (128)..(421): REFERENCED BY SEQ ID NO: 1466
aaatccgctcggggtgtcacgcagttaaccaacgccagagaaggagtgcgttgggagagagagcagagcgcagcgatgaggagagcagtgagggccgccgctttggggacttcttcaacaacgccatatgggctcgggaatcaggccggtgaccttcgcggggtcgccgtggattcgtctgggaccgcgacgggtgagtccgagaactggggcaccgctaatcgctcgccggacgtctggcgcgctcaccaaatcactgttcgccgtggtccggtctctgcgccacccgattgccgacgagcaagccaccgtggaatctgaggttcagcaagtagagatagctgagcaggagctcattgaaggagaagaacaggtggtcgaagaggagtcgcctaacactgaggagttcgatctgatctaggtggcgtttctcagttgactttggcgccgacgatccttagttcgttttatatttatctttattttgtaataagtcttccgctatgtaataaatactctgatgttttatgacatttatctctatacactctgttattacaaaaaaaaaaaaaaaa

SEQ ID NO: 1466 - protein, 97 aa, Zea mays
  misc_feature: Ceres CLONE ID no. 485471
  misc_feature: Ceres CDNA ID no. 25446416
MGSGIRPVTFAGSPWIRLGPRRVSPRTGAPLIARRTSGALTKSLFAVVRSLRHPIADEQATVESEVQQVEIAEQELIEGEEQVVEEESPNTEEFDLI

SEQ ID NO: 1467 - DNA, 1239 bp, Zea mays
  misc_feature: Ceres CLONE ID no. 485480
  misc_feature: Ceres CDNA ID no. 25445996
  CDS (159)..(704): REFERENCED BY SEQ ID NO: 1468
aacgacgagcagtgcaagccaagcattctcacgctagctgttctcttcttgcctcatccatcgtgcatctatattctcggcgcgagttacgtctttttcgtcgtccggccggcgagcattttgcttctgtgatcgatcggcgcgcgcgacgtacggccatggagatgatcgacgcagagctgcgtctgggtccgcccggcagcagcaacagagacgtcatcaacgtcgtgcagccttcgttggcggcggcgaaacggccgtcgtcgtcggtggtggagagcgaggcgtccgggacggacgaccatgaccatgacgacgccgcaccgacctccaaggtgcaggtggtggggtggccgccggtgagagtgtaccggaagaacgcgttccacgcggcggcggaggcgaggaggaccaggcggggcgagcagcagggaggaggaggcctgtacgtgaaggtgagcatggacggggcgccatacctccggaaggtggacctgcggacctacggcggctaccgtgagctgagggacgcgctggacgcgctcttcggctgcttctcctcctcggccgacggcggatgccagttcgccgtcgcctacgaggacaaggacggcgacctcatgctcgccggcgacgtgccatgggagatgttcatctgttcttgcaagaagctcaggatcatgagggggtccgaagcaagataaccaagcaacgaggatgcaaggacctgttgtatgcatatgcatggaggccggccggactcatgctgtcatgcatgagagtttgagagaggagaagaagacgacctactggaactgaaggcggttgggtatacctgcatggggagggagcccacgcatgcacgcgcgcgtcgtcgtgttctacggccagctagccaccagaccggctgccggcccatatgcacaccacggagatggaggtgatggttcaaggatcacggcggcgtacgcgcgcgtcatcagtcacgccgtcctgtcatcagatgagatggaggggtgatgcatgagggcagtgctagctgtggacggctggctggacgtgcagatcggagcgagattgtactgtgcacgcacataagctttgtacagtggcatgtgctggtcatctgtaattttgatttttttccccctccttttgtaagtgagcaagtttgaggaaaaaatgtatgaatgaagaaaaggagaggggggatttcaaattcgaaaaaaaaaaaaaaaa

SEQ ID NO: 1468 - protein, 181 aa, Zea mays
  misc_feature: Ceres CLONE ID no. 485480
  misc_feature: Ceres CDNA ID no. 25445996
  misc_feature (1)..(181): Pfam Name: AUX_IAA PFAM Desc: AUX/IAA family
  misc_feature: Homolog of GI Number: 34897206 NR Desc: putative auxin
  misc_feature: Homolog of GI Number: 50934701 NR Desc: putative auxin
  misc_feature: Homolog of GI Number: 50917149 NR Desc: putative auxin
  misc_feature: Homolog of GI Number: 77556998 NR Desc: AUX/IAA family
  misc_feature: Homolog of GI Number: 7442239 NR Desc: auxin
  misc_feature: Homolog of GI Number: 34550779 NR Desc: Gbiaa
  misc_feature: Homolog of GI Number: 414181 NR Desc: auxin
  misc_feature: Homolog of GI Number: 416641 NR Desc: Auxin
  misc_feature: Homolog of GI Number: 12083214 NR Desc: putative phytochrome
  misc_feature: Homolog of GI Number: 7442240 NR Desc: auxin
MEMIDAELRLGPPGSSNRDVINVVQPSLAAAKRPSSSVVESEASGTDDHDHDDAAPTSKVQVVGWPPVRVYRKNAFHAAAEARRTRRGEQQGGGGLYVKVSMDGAPYLRKVDLRTYGGYRELRDALDALFGCFSSSADGGCQFAVAYEDKDGDLMLAGDVPWEMFICSCKKLRIMRGSEAR

SEQ ID NO: 1469 - DNA, 1749 bp, Zea mays
  misc_feature: Ceres CLONE ID no. 485995
  misc_feature: Ceres CDNA ID no. 25446601
  CDS (450)..(1355): REFERENCED BY SEQ ID NO: 1470
attctcctacccctctttcccgcccttaagcacctgccaaaccctctttaaaccctcgagtcatactcaaaatttctcgcgttgttggctttctcgccgcaatccgtccggggtagccgagacagaggaccctcgagctcgatttcataggtttcatctcggattttgaggttttgggtggtggggattcttgggttgcctttgcttttgtttgaccggatcttggagtgtgtgctgctgtcgttagctcactgggagcggcagcagatctgtgaatcaaccccctacagaacctccgaatcttgcgagtctcccggaaagttttgcttttgggggtgcgaatttggttctagtttgctcgatttgagccgaggcttttggtgatttcttgtaacgagatttgaggcggaggcttggcagtagctgcggtggatctgcggcctacggcgatgtctgctcccgactccctcacctccggccggggccgccgcgcggagcctcccctgccccgcctgaagcgtgtccgcgtttacttcgtggacgccgacgctacggacaccgactcctctggcaacgaggacgagcgcggcaagcggcgcgtgcgggaggtcatccacatcgacgtggagtccgcctcggctctgacgcggtcggcgcagccgctggtgctcccgaagaagcggccgctgccgtcccaggcggcggcggcggcgctcgtgcggcgacgctcctccggggccgggttccggcggcgcttccccggcgtccggctccgaccgtggggcaagtacgccgcggagatccgcgacccgcaccagcggaagcgcctgtggctcggcaccttcgacacagcggaggaggccgccgcggcctacgacgacgccgcgctccgcctcaagggctcgcgccacgtcgtcaccggcttccccgctgaggcgcctcccccctggccgcgcctggggctccgtcctcgccgggaggtccccaaggaagcggcggagggcgccgcggaagaggacggagaggccctcgcatcggccccggccccggtcccggcggcagcgcccgggtcactggattcgcaggcggtggacggcaccgcactggtctgcccgttctcgtctccgatctctgttctccgtcacgccgctgacgagatgccagccgcgcacgccctgccggcgttcgagttcctctattcggggcttggggagctcggcgacctcggcacagcgacggcgccatcgaaggcggtggcggcggagttcgactgcctgccgtggtgggagggcgaggacttcgtgacagtgacaggcctcacggcgtcagccggtgccgccgtcagcgtcatataacggcgttaccttttacacccctcggtgctcgggcctcgtcgtcgtgccgtgtggcgccatttcggatgctcagggcgggaaacgcgtgggctgccgtgtggcggcatcgaatcggagtaaaaagctagtactagtattgtttttttattaattattaactgactactctgctagaggctagagcagagtggttgcttgtggcggcgagtcgtatgtctaggcgtggcgggccccactgggccaggcaggttctcctttctgtgtgcgggtgccttgaaccgcacggctctcgcgtggaaacgcagcagtgaactgtaatgtaagcggcatgtgttaattggccgtcattagaactaagaaaattagagttctaagtaaaaaaaaaaaaaaaaaa

SEQ ID NO: 1470 - protein, 301 aa, Zea mays
  misc_feature: Ceres CLONE ID no. 485995
  misc_feature: Ceres CDNA ID no. 25446601
  misc_feature (101)..(165): Pfam Name: AP2 PFAM Desc: AP2 domain
  misc_feature: Homolog of GI Number: 56784079 NR Desc: Pti6
  misc_feature: Homolog of GI Number: 34898320 NR Desc: Similar to Nicotiana tabacum mRNA for ERF1
  misc_feature: Homolog of GI Number: 55741324 NR Desc: putative TSI1
  misc_feature: Homolog of GI Number: 42567199 NR Desc: AP2 domain
  misc_feature: Homolog of GI Number: 50198974 NR Desc: At4g23750
  misc_feature: Homolog of GI Number: 22655200 NR Desc: putative Ap2 domain protein
  misc_feature: Homolog of GI Number: 50923961 NR Desc: OSJNBa0039C07.10
  misc_feature: Homolog of GI Number: 37718880 NR Desc: putative AP2 domain transcription factor
  misc_feature: Homolog of GI Number: 40060531 NR Desc: putative ethylene response factor 4
  misc_feature: Homolog of GI Number: 42568434 NR Desc: AP2 domain
MSAPDSLTSGRGRRAEPPLPRLKRVRVYFVDADATDTDSSGNEDERGKRRVREVIHIDVESASALTRSAQPLVLPKKRPLPSQAAAAALVRRRSSGAGFRRRFPGVRLRPWGKYAAEIRDPHQRKRLWLGTFDTAEEAAAAYDDAALRLKGSRHVVTGFPAEAPPPWPRLGLRPRREVPKEAAEGAAEEDGEALASAPAPVPAAAPGSLDSQAVDGTALVCPFSSPISVLRHAADEMPAAHALPAFEFLYSGLGELGDLGTATAPSKAVAAEFDCLPWWEGEDFVTVTGLTASAGAAVSVI

SEQ ID NO: 1471 - DNA, 625 bp, Zea mays
  misc_feature: Ceres CLONE ID no. 486253
  misc_feature: Ceres CDNA ID no. 11403819
  CDS (149)..(320): REFERENCED BY SEQ ID NO: 1472
tcatcgcatccatccaccacgcaccccaccaacccatacccataccagaggctctctgattttacttctcagcggtagatcggctgagcgagcgagcgagcgaggcacacggagctagctaaacagagcacacggatagaaaagcaagatgtcggacggcacggcgacctgcatcgacatcatcctcgccattatcctgccgccgctcggggtcttcttcaagttcggctgcggggttgagttctggatctgccttatcctcaccttcttcggctacctccccggcatcatctacgccgtctgggccatcaccaagtagccggccggtgcgttagcatgcaatgcgcgcgcagggtgatctcgtggcgggggacgcggtgtgcgcgtgtcttgagatgtgattccttccttccttgtttagttgctgctgctcctgctggtgtagtactggtgtatccagtccttttaatttcttgattagtttgctcggctgaagaaatcaggacgcgtgcctggtgttgctgctcagctccatgtacttgtacaaccgttcctccctgcagctgctgccccttctctctttttgtttaccttggattgatggattgtaaaaaaaaaaaaaaaa

SEQ ID NO: 1472 - protein, 56 aa, Zea mays
  misc_feature: Ceres CLONE ID no. 486253
  misc_feature: Ceres CDNA ID no. 11403819
  misc_feature (6)..(56): Pfam Name: UPF0057 PFAM Desc: Uncharacterized protein family UPF0057
MSDGTATCIDIILAIILPPLGVFFKFGCGVEFWICLILTFFGYLPGIIYAVWAITK

SEQ ID NO: 1473 - DNA, 1202 bp, Zea mays
  misc_feature: Ceres CLONE ID no. 486551
  misc_feature: Ceres CDNA ID no. 25445997
  CDS (202)..(957): REFERENCED BY SEQ ID NO: 1474
ctctagaattttacagtattctactcgctgcctgcgttccaaaacctttcgtcttttcccccgccgtctacaaagacttcacactcgcagccgcaggctgctccggcagactcctacaccgggaagacttctcctctcctctctcctctctcctctctcccttccactcgcgctctcctggataccgcgcgcggcgacgagatggcgatagatcacgcgacccctctcgggctgaagcggagaggcgccatgggcggaggcggcgagtgcgacgacggcagtgatacccggcggtggccgccgtggctgaggccgctgctgtccgctagcttcttcgtccaatgcagggtccacgccgacgcgcacaagagcgagtgcaacatgtactgcctcgactgcatgggcggcgcgctctgcgcgctctgcctcgccgcgcgccaccgcgaccaccactccatccagatacggaggtcgtcgtaccacgacgtgatccgggtgtcggagatacagaaggtgctggacatcgccggcgtgcagacgtacatcatcaacagcgcgcgcgtggtgttcctcaacgagcggccgcagccccgcccgggcaagggcgtcaccaacacctgcgaggtctgcgagcgcagcctcctcgactgcttccgcttctgctcccttgggtgcaagatagtgggcacggcccgtggctaccgtcctgggaagaagaagcacggcggcggcggcggtaacaagaagagggcgtcgccggcgccggcgcttaaggacatgcggtctgactcggaggactcgtgcaccagcaccagcggcgccagcagcgacaagagcagcgtcgtgcagagctcccctccgccgccgacctctgccagccaccgcccccccgggaacaagcgccggaagggcatcccgcaccggtcgcccttgggcagcctcatcgtcgagctctaggactcttcgtcagcgccaaggcaaggcaacgcactctgtatacatgacatagccccccgaagagaagggaataacaaacagtaagcctctggacgtggagggcgaagggcgacagcggtaagccgtaagatcggacaatccttagttttgcttcttctcaggttttgttttgcttttacagttactagcagtggtaccatcagtaagataaccgcgactaagttttgccaaaaaaaaaaaaaaaa

SEQ ID NO: 1474 - protein, 251 aa, Zea mays
  misc_feature: Ceres CLONE ID no. 486551
  misc_feature: Ceres CDNA ID no. 25445997
  misc_feature: Homolog of GI Number: 50911681 NR Desc: putative zinc
  misc_feature: Homolog of GI Number: 50928391 NR Desc: OSJNBa0086O06.23
  misc_feature: Homolog of GI Number: 42566916 NR Desc: zinc
  misc_feature: Homolog of GI Number: 6714272 NR Desc: F6N18.8
  misc_feature: Homolog of GI Number: 18398555 NR Desc: zinc
  misc_feature: Homolog of GI Number: 51091043 NR Desc: putative zinc
  misc_feature: Homolog of GI Number: 51091044 NR Desc: putative zinc
  misc_feature: Homolog of GI Number: 22136542 NR Desc: At1g21000/F9H16_1
  misc_feature: Useful for decreasing plant size
  misc_feature: Useful for making shorter plants
  misc_feature: Useful for making smaller plants
MAIDHATPLGLKRRGAMGGGGECDDGSDTRRWPPWLRPLLSASFFVQCRVHADAHKSECNMYCLDCMGGALCALCLAARHRDHHSIQIRRSSYHDVIRVSEIQKVLDIAGVQTYIINSARVVFLNERPQPRPGKGVTNTCEVCERSLLDCFRFCSLGCKIVGTARGYRPGKKKHGGGGGNKKRASPAPALKDMRSDSEDSCTSTSGASSDKSSVVQSSPPPPTSASHRPPGNKRRKGIPHRSPLGSLIVEL

SEQ ID NO: 1475 - DNA, 440 bp, Zea mays
  misc_feature: Ceres CLONE ID no. 486680
  misc_feature: Ceres CDNA ID no. 36705441
  CDS (52)..(207): REFERENCED BY SEQ ID NO: 1476
actcctaaccctcgcccgactcagatctatctgccccgcgccgccgtcgccatgccgttcactccgggtccctactctggcgtcagcaccctcgcccttgtagcgagggcatcggtcttcggcttcggtgtcgtctacgggagcatcaagctctcaatcctcaaggcaacaaagcctaaaaaggaagaagcgcatgctcatcactaaggacgacagggctgctacatgttaatttctatggaaggatgatataaaaatgtggttgcactctttctccatacgtgcaatttgatttatgatttgtggacatcttgctgtaacacacctgctgagttatcttagttttgtgtcataataaaattcttagccaatgacttgaaatcaggaaggggaaaatcaaaagaacccaaaaaaaaaaaaaaaataaaaaaaaaaaaaaa

SEQ ID NO: 1476 - protein, 51 aa, Zea mays
  misc_feature: Ceres CLONE ID no. 486680
  misc_feature: Ceres CDNA ID no. 36705441
  misc_feature: Homolog of GI Number: 50921369 NR Desc: OSJNBb0050O03.8
MPFTPGPYSGVSTLALVARASVFGFGVVYGSIKLSILKATKPKKEEAHAHH

SEQ ID NO: 1477 - DNA, 1296 bp, Zea mays
  misc_feature: Ceres CLONE ID no. 486930
  misc_feature: Ceres CDNA ID no. 25892180
  CDS (200)..(1039): REFERENCED BY SEQ ID NO: 1478
aatccgttcaccccgcgaccctgcgtgcccccctccctccctcagcccccccctctctctcgctctcggcgacgactgggcgaccgccgccgccgctgccgctgcgccgcccttgtccaggtgcccaggtcttcgccggcgccttcgccaggtcttcgaaggtaacgagcaccaaccggattcagggaatataagtaaaatgaggccagttttttgtgggaaccttgactatgatgttcgcatctcagaggttgagcgcctttttgggaagtatggaagggtggaacgagtggatctaaagacagggtttgcatttgtctacatggaagatgaacgcgatgctgaagatgctatcagtagacttgatggaattgattttggcagaaaaggaaggaggatcagggttgagtggacaaaggaggatcgcactgttggccgaaaaagcagctcaaggaggtctccaaccaatacaaaaccgaccaaaaccttgtttgtgatcaactttgacccgatcaacacaagaatccgagatctggagaggcacttcgataaatatggcagggtcgcaaatgtaagaatcaaaaagaactttgcctttatccagtttgaggtacaggaggatgctacaagagcattggagggtactaatggaagccatttcatggacagggtgatctctgttgagtatgcacttcgtgatgacgatgaaaaaggtgaaagagggaacgggtacagcccagacaggagaggtcgtgaaagatccccaggtagaaggcgttctcctagtccctacggtagaggacgggagagaggtagcccagattacgggagaagcaaggagagggggagcccagactatggcaggggaggacgcagccctgataatggcaggggagtaagcccagctggtggtggcagaggcgatcatgccaggggtggagggcgcagtcctgactatgatcgccagcgccgggaagctagtcctccaggttatgacaggtcccccagccgctcacctgggagggaggccagagagtagaagcagcgttccattccatgcctgtgttcaagcatcagatgaatgtgcaagttggtaatgttagccggcaggaaacttgtctactatgcgcgttagctcgtgtttgactttccacccatttcagtatgaagcgacctcagaatgtaactcgtgtagtagtattttttagtggtagctttcagtactggtttgaacctgttgttggctttattttctgagtaaaatgcaccactcgaacttgaaaaaaaaaaaaaaaa

SEQ ID NO: 1478 - protein, 279 aa, Zea mays
  misc_feature: Ceres CLONE ID no. 486930
  misc_feature: Ceres CDNA ID no. 25892180
  misc_feature (4)..(69): Pfam Name: RRM_1 PFAM Desc: RNA recognition motif.
  misc_feature: Homolog of GI Number: 50904881 NR Desc: putative arginine/serine
  misc_feature: Homolog of GI Number: 41323931 NR Desc: splicing factor
  misc_feature: Homolog of GI Number: 30696140 NR Desc: arginine/serine
  misc_feature: Homolog of GI Number: 16323490 NR Desc: putative arginine/serine
  misc_feature: Homolog of GI Number: 1707370 NR Desc: splicing factor
  misc_feature: Homolog of GI Number: 2980800 NR Desc: splicing factor At
  misc_feature: Homolog of GI Number: 1667582 NR Desc: splicing factor At
  misc_feature: Homolog of GI Number: 7269400 NR Desc: splicing factor At
  misc_feature: Homolog of GI Number: 21928093 NR Desc: AT3g61860/F21F14_30
  misc_feature: Homolog of GI Number: 1707366 NR Desc: splicing factor
  misc_feature: Useful for delaying flowering time
  misc_feature: Useful for increasing chlorophyll and photosynthetic capacity
  misc_feature: Useful for making bigger plants
  misc_feature: Useful for making lethal plants for genetic confinement systems
  misc_feature: Useful for making ornamental plants with modified flowers
  misc_feature: Useful for making ornamental plants with modified leaves
  misc_feature: Useful for making plants with altered leaf shape eg curled leaves
  misc_feature: Useful for making plants with altered leaf shape eg curled leaves
  misc_feature: Useful for making plants with altered leaf shape eg curled leaves
  misc_feature: Useful for making plants with altered leaf shape eg curled leaves
MRPVFCGNLDYDVRISEVERLFGKYGRVERVDLKTGFAFVYMEDERDAEDAISRLDGIDFGRKGRRIRVEWTKEDRTVGRKSSSRRSPTNTKPTKTLFVINFDPINTRIRDLERHFDKYGRVANVRIKKNFAFIQFEVQEDATRALEGTNGSHFMDRVISVEYALRDDDEKGERGNGYSPDRRGRERSPGRRRSPSPYGRGRERGSPDYGRSKERGSPDYGRGGRSPDNGRGVSPAGGGRGDHARGGGRSPDYDRQRREASPPGYDRSPSRSPGREARE

SEQ ID NO: 1479 - DNA, 793 bp, Zea mays
  misc_feature: Ceres CLONE ID no. 487008
  misc_feature: Ceres CDNA ID no. 36705442
  CDS (115)..(573): REFERENCED BY SEQ ID NO: 1480
accaaggaaattcacaaagcgatactagctagtccctaccaaagcatacttcctgaaacactcttgcaatccactgagttctgtttgttgagacgcatagagctagagtcgacaatgtcgctcgtgaggcgcagcaacgtgttcgaccccttctccatggacctctgggaccccttcgacaccatgttccgctccatcgtcccgtcggcgacctccaccaactccgagactgccgccttcgccagcgcccgcatcgactggaaggagacgcccgaggcgcacgtgttcaaggccgacctccccggcgtcaagaaggaagaggtcaaggtcgaggtcgaggacggcaacatgctggtcatcagcggccagcgcagcagggagaaggaggacaaggacgacaagtggcaccgcgtcgagcgcagcagcggccagttcgtcaggcgcttccgcctgccggagaacaccaaggtggatcaggtcaaggctggcctcgagaacggcgtgctcacggtcaccgtgcccaaggcggaggagaagaagcctgaggtgaaggctattgagatctctggttgagcatccaatccaatatggacgattggacgtggaaggtttcctgtgtcttctacgatataataattggtcgctgtcctgtgtggatgtttcctgtgtcttctacgatatattaatgtacttctgtctgtttcgtttcgtatgtacaatcttccgggtatcgttcatgtatccctttgaataataacaaataaaatcgggtttattaaaaaaaaaaaaaaaa

SEQ ID NO: 1480 - protein, 152 aa, Zea mays
  misc_feature: Ceres CLONE ID no. 487008
  misc_feature: Ceres CDNA ID no. 36705442
  misc_feature (48)..(151): Pfam Name: HSP20 PFAM Desc: Hsp20/alpha crystallin family
  misc_feature: Homolog of GI Number: 22335 NR Desc: heat shock protein 17.2
  misc_feature: Homolog of GI Number: 1122315 NR Desc: heat shock protein 17.0
  misc_feature: Homolog of GI Number: 50900608 NR Desc: putative heat shock protein
  misc_feature: Homolog of GI Number: 50900610 NR Desc: putative heat shock protein
  misc_feature: Homolog of GI Number: 1122313 NR Desc: heat shock protein 16.9
  misc_feature: Homolog of GI Number: 50900606 NR Desc: putative heat shock protein
  misc_feature: Homolog of GI Number: 1536911 NR Desc: 17 kDa class I small heat shock protein
  misc_feature: Homolog of GI Number: 1763972 NR Desc: heat shock protein
  misc_feature: Homolog of GI Number: 17942919 NR Desc: Chain D
  misc_feature: Homolog of GI Number: 16930753 NR Desc: small heat shock protein
MSLVRRSNVFDPFSMDLWDPFDTMFRSIVPSATSTNSETAAFASARIDWKETPEAHVFKADLPGVKKEEVKVEVEDGNMLVISGQRSREKEDKDDKWHRVERSSGQFVRRFRLPENTKVDQVKAGLENGVLTVTVPKAEEKKPEVKAIEISG

SEQ ID NO: 1481 - DNA, 488 bp, Zea mays
  misc_feature: Ceres CLONE ID no. 487028
  misc_feature: Ceres CDNA ID no. 40351003
  CDS (60)..(398): REFERENCED BY SEQ ID NO: 1482
ggcggttgaggcgacacggcagaagtgagcaaagcgtccaggtgcggagccgcggagggatgggcggcaggagggaggccatagagcgggagctgaagaagcttcgggcagagcgggaggagctcgacggccggatacggctgctggaatcgcagctcgaggcagggcctgcgggattcaacggtgcggcggcggggaaaggagtaggggacgatgcgtgcggcgggagtggagcgtgccagagccgcgtgggtaacgggtttgcttcggacggtagcctcccggcggatatgatctaccggtacagccgccacctccttctcccggacttcggggtcgaaggccagcggaagctatcacagtcgtcgattttagttgttgccgtgttttttctgtagtgatgttgagtgtatcgtagcctgtttgtgcaagtgcaatatgtcctccctaatacgacacgtttttctggagcaaaaaaaaaaaaaaaa

SEQ ID NO: 1482 - protein, 112 aa, Zea mays
  misc_feature: Ceres CLONE ID no. 487028
  misc_feature: Ceres CDNA ID no. 40351003
MGGRREAIERELKKLRAEREELDGRIRLLESQLEAGPAGFNGAAAGKGVGDDACGGSGACQSRVGNGFASDGSLPADMIYRYSRHLLLPDFGVEGQRKLSQSSILVVAVFFL

SEQ ID NO: 1483 - DNA, 597 bp, Zea mays
  misc_feature: Ceres CLONE ID no. 487206
  misc_feature: Ceres CDNA ID no. 25445749
  CDS (87)..(458): REFERENCED BY SEQ ID NO: 1484
aaaacaaaagcgtcgttctctcttcctggtccaagtgatcttgccaagttacgagcagcaagcagagatcagatcatccatcggcaatgtcgaacatcgggcagtccttccaggccggcaaggcggaggcccagggcgagtaccaggcggagcacgcggcgcagtgcgtcaaggacaccgccggagccgcggccgacagcgcgcagctgcagcagcaccgcgccaccggcaccgttgagcaggtggcgcagacgggccagggcgtggcggcaggcgtcaaggacacggtggcgggcgcggcggttggcgtcaccaacacggtggcgggcgtggcggcgggcgtcacgaacacggtgaccggcgcggtggcgggcgtcacgaacacggtgaccggcgcggcggcggcgccgtcgtgctcaccgcctagttttcagtccttattcgcctcttggttttgagatctatatctgaactagcagtgctttcttgtctcacctatttgtgttaagaagacgtagtttttaaatccattgctccttcctgtttggacagtgctttcatatcaaatatttcaggtatattagagctaaaaaaaaa

SEQ ID NO: 1484 - protein, 123 aa, Zea mays
  misc_feature: Ceres CLONE ID no. 487206
  misc_feature: Ceres CDNA ID no. 25445749
  misc_feature (26)..(99): Pfam Name: LEA_4 PFAM Desc: Late embryogenesis abundant protein
  misc_feature: Homolog of GI Number: 70878897 NR Desc: nucleolar RNA
  misc_feature: Homolog of GI Number: 10954052 NR Desc: ovarian fibroin
  misc_feature: Homolog of GI Number: 70872650 NR Desc: nucleolar RNA
  misc_feature: Homolog of GI Number: 19236 NR Desc: glycine
  misc_feature: Homolog of GI Number: 1345540 NR Desc: glycine
  misc_feature: Homolog of GI Number: 68124303 NR Desc: nucleolar RNA
  misc_feature: Homolog of GI Number: 70872654 NR Desc: nucleolar RNA
  misc_feature: Homolog of GI Number: 71664984 NR Desc: fibrillarin
  misc_feature: Homolog of GI Number: 66776103 NR Desc: LigA
  misc_feature: Homolog of GI Number: 395147 NR Desc: glycine
MSNIGQSFQAGKAEAQGEYQAEHAAQCVKDTAGAAADSAQLQQHRATGTVEQVAQTGQGVAAGVKDTVAGAAVGVTNTVAGVAAGVTNTVTGAVAGVTNTVTGAAAAPSCSPPSFQSLFASWF

SEQ ID NO: 1485 - DNA, 732 bp, Zea mays
  misc_feature: Ceres CLONE ID no. 487283
  misc_feature: Ceres CDNA ID no. 25446417
  CDS (46)..(378): REFERENCED BY SEQ ID NO: 1486
aatcccggtcctgtcctcccccgaccaaacacagtccctggatccatgggtgtcgaggaggagcgcgacggcgaggagcaacgccgccccctcctctcctccaccccgccagccgcggcggacccgcagcagcagcagtaccagttcctgggccggagcacctcttcagtgctgcgcggcggtggcgggggctgggaagggcctgaggtgagcgccgacgaggtcaggtcggccgctggcttccacacgttccagggcccacctcccaacggcgacaacgcctatgcttacccgccgtccattcatagcgccatgctctccccgtccccatctcatgccccaccgtctccccatccaaatgaagggttggcgatataggccgagaacgagatatgtcacgattctcgcattggggacgtacgcaatgatgactatctgtgctggaggacaggaccagcggcaggcatctttcaggatttaaggattgcggttgctgtccgccatagctgtctggagaagggcagagcagctgcattacatcgaactgttggagagcagtgcactcactaatccacagtagtttgccagtgtgcctgtttggccttctgactctgtgactgtgatgccatcgtgccatgcaaagagccaaatgtgctgcaacagcgagtcaagtcacgcttggtcctacaactgagacctctggtaagattgacgccaaaaaaaaaaaaaaaa

SEQ ID NO: 1486 - protein, 110 aa, Zea mays
  misc_feature: Ceres CLONE ID no. 487283
  misc_feature: Ceres CDNA ID no. 25446417
MGVEEERDGEEQRRPLLSSTPPAAADPQQQQYQFLGRSTSSVLRGGGGGWEGPEVSADEVRSAAGFHTFQGPPPNGDNAYAYPPSIHSAMLSPSPSHAPPSPHPNEGLAI

SEQ ID NO: 1487 - DNA, 845 bp, Zea mays
  misc_feature: Ceres CLONE ID no. 487530
  misc_feature: Ceres CDNA ID no. 29191488
  CDS (231)..(662): REFERENCED BY SEQ ID NO: 1488
actactcagctaaaaacgaaacagggaagtgccaaccaaactagccaaacaagtggtaataccacggcccttgtggcgacaggcgacagcaacagtgaaacgccccgctcccaagccggcaaacaccagcccccgcgacggcgccgcgccgtcctctcccgaccgacggcaacggaaaccctggtgacttgaagattacttttatctatactccaccttcttttgtggctatggcactagcagctatctataaccttttcatcattaacaaatccggcggccttatatactacaaggactatggttcagcagggaggatggataccaatgacagtttaagattagcaagcctctggcattcgatgcatgctatctcgcagcaactgtcccctaccactggctgtactggcattgatctcttacaagctcataactttgatctccattgctttcaatccctcacagggacgaaatttttcgtcgtatacgaaactggagctccaaatatggaaatgctgctgaaagcgatttacgagctgtacacagacttcgttctgaagaatccgttctatgagatggagatgccgattcggtgcgagctgtttgaccacaacctggctcaggtgatccagaaggaccgcgttgctctcctgggtcggtgaaattggaaagcttttggtcctaaccataccatgtatcttgtactttcccccctttttctacattatgctcggacttcctgtgcaattgtctcggccgaagacagctggtgaccaacaactgtttggtcctgactattagcaccgtatttggaacagatctatggacgaaaaaaaaaaaaaaaa

SEQ ID NO: 1488 - protein, 143 aa, Zea mays
  misc_feature: Ceres CLONE ID no. 487530
  misc_feature: Ceres CDNA ID no. 29191488
  misc_feature (6)..(136): Pfam Name: Sybindin PFAM Desc: Sybindin
  misc_feature: Homolog of GI Number: 34901426 NR Desc: synbindin
  misc_feature: Homolog of GI Number: 55775438 NR Desc: synbindin
  misc_feature: Homolog of GI Number: 24582905 NR Desc: CG9298
  misc_feature: Homolog of GI Number: 66558617 NR Desc:  similar to ENSANGP00000011080
  misc_feature: Homolog of GI Number: 54644131 NR Desc: GA21680
  misc_feature: Homolog of GI Number: 57530486 NR Desc: similar to Trafficking protein particle complex subunit 4
  misc_feature: Homolog of GI Number: 31223771 NR Desc: ENSANGP00000011080
  misc_feature: Homolog of GI Number: 62653423 NR Desc:  trafficking protein particle complex 4
  misc_feature: Homolog of GI Number: 41152142 NR Desc: trafficking protein particle complex 4
  misc_feature: Homolog of GI Number: 11140825 NR Desc: trafficking protein particle complex 4
MALAAIYNLFIINKSGGLIYYKDYGSAGRMDTNDSLRLASLWHSMHAISQQLSPTTGCTGIDLLQAHNFDLHCFQSLTGTKFFVVYETGAPNMEMLLKAIYELYTDFVLKNPFYEMEMPIRCELFDHNLAQVIQKDRVALLGR

SEQ ID NO: 1489 - DNA, 934 bp, Zea mays
  misc_feature: Ceres CLONE ID no. 488208
  misc_feature: Ceres CDNA ID no. 25446418
  CDS (55)..(729): REFERENCED BY SEQ ID NO: 1490
atccgtccaaaacccttagcttcgcttcagtgtcttcacgggccgccggcggagatgcggttcacggcgtctccggtggtggagcttccggtcagcggcgcggtgttgactttcgaacaggacaacgactccttcgaggtgggcacctctgtgtggccctcgtccctggtcctcgtcaagttcgtcgagcgctgcatccgcgacccggccctcccctttgccgacgtgctccgcttcccgggaacccgggccgtggagctcgggtccgggtgcggaccggcaggacttggcctctcccgcctcggcctcaccgatctcgtcctcaccgacatcgccgccgtgctcccggcgctccgccgcaacctgcggcgcaaccgagttcacctcgcgcgcgcgccccgcctcgcccagctccactggaactgccccgcgcatctcgcgacgctagccaccccgcgccgcttcgatctcgtcgtcgccgcagacgtggtctacgtgcaggagtccgtgccgcacctcatcgcggccatggatgcgctcgccgacgccgagcgcggcgtggtgctgctcggctaccagatccggtcgcccgaggcgcaccaggtgttctgggagaccgttccggctgtcttcccggtcatcgagaaggtggcacgggagcacctcgaccctgagtacgcctacgaggaatccgatgtattcatactccgaagaagcccgcgtcagtgaggtcaggtggtgaacttttgccagcagtttactccccgatgttgtgtttattcagctcagaagttatgagcttctagtcatggtgactagtgaggatatgtaatagaaactccatggttgtttcttgatgagtcggtgcattgtgtgggttagtaaacaactctaataaaatgagatgatcagatcaagaaaaaaaaaaaaaaaa

SEQ ID NO: 1490 - protein, 224 aa, Zea mays
  misc_feature: Ceres CLONE ID no. 488208
  misc_feature: Ceres CDNA ID no. 25446418
  misc_feature: Homolog of GI Number: 50915912 NR Desc: DNA ligase
  misc_feature: Homolog of GI Number: 67986110 NR Desc: regulatory protein
  misc_feature: Homolog of GI Number: 11359723 NR Desc: proteophosphoglycan
  misc_feature: Homolog of GI Number: 72547018 NR Desc: proteophosphoglycan ppg3
  misc_feature: Homolog of GI Number: 72547041 NR Desc: proteophosphoglycan ppg1
  misc_feature: Homolog of GI Number: 13592175 NR Desc: ppg3
  misc_feature: Homolog of GI Number: 67988031 NR Desc: ROK
  misc_feature: Homolog of GI Number: 67987177 NR Desc: 4Fe
  misc_feature: Homolog of GI Number: 66776813 NR Desc: Phosphoribosylaminoimidazole
  misc_feature: Homolog of GI Number: 34809533 NR Desc: Epa5p
MRFTASPVVELPVSGAVLTFEQDNDSFEVGTSVWPSSLVLVKFVERCIRDPALPFADVLRFPGTRAVELGSGCGPAGLGLSRLGLTDLVLTDIAAVLPALRRNLRRNRVHLARAPRLAQLHWNCPAHLATLATPRRFDLVVAADVVYVQESVPHLIAAMDALADAERGVVLLGYQIRSPEAHQVFWETVPAVFPVIEKVAREHLDPEYAYEESDVFILRRSPRQ

SEQ ID NO: 1491 - DNA, 2685 bp, Zea mays
  misc_feature: Ceres CLONE ID no. 488978
  misc_feature: Ceres CDNA ID no. 40041235
  CDS (3)..(2516): REFERENCED BY SEQ ID NO: 1492
gggatctggagtggcgccctgacggttacctcggcgcaagaagcaaaaactcgtcgcggtggaacggggtgatgctcctccgggcaaagtcttcctccttgatacaatcagcttcaagagcaggagcatggatgcccccgcaccaactcgccatttcctccgccgcgacaagagcctcctccactctctccgcctcactcgccaggtgcagcagagctgcggccatcacggaccccttcgccatcgcggacgccctctccgccgccagttccgccccggcgtcgcagtccctgtccaccggatcgcagctccacgcgtccggcataaagctgggcgtcgtgttcgccgacacctacacctcgaaccagctcctcatccactactccaagcgcgggcaactcgccagcgcgctggacgtgttcgacgaaacgccgagccgcaaccacgtcacctggacggctatggtgtccgccgcggcgcgcggcggggcgcctggcctgggcctgcggctcttcgcctccatgctcaggagcgggttctgccccaacgagttcgctctggccagcgcgctcggcgcttgctgccagtgggtggcggctgacgtgaagctgggcctctcccttcacggcctcgccgtcagggccgtcctgcatggaaacccttacgtggggagctcgctgatgctggtgtatgccaagcacgggcgtgtcgctgctgcggagcgagtgttcgcaggcatagcttccggttccagagacgtggcgtgctggaacgcgatgctggagggctacgtcgccaacggccatgggtatgacgcgacgaggacggtggccctgatgcatggatctggaatagcgcctgacatgttcacctacatttcggctgcgaaggcttcttggatcgcccgcgacttgtatttcgggcggcaggtccatggtctcgtcgtccgcagcgtgttcgagtccaacaacacctcagtgatgaacgcactcatggatatgtatttcaaagcgggacagaaggaaaccgctgctgatatctttggtaagattcggtggaaggatactgtttcttggaacacgatgttatcaggcctggcgcacgaggaggacgagagggcagctgcggactgctttgtcgacatggcacggtgcggctgcaggtctaaccatgttacgttctctgtcatgctgaggctgattggcgcctgcgcctccctcggccttcagatcttcggacttgcctaccgccatggctactctgacaacgttcttgtggcgaacgcagccatcaacatgctctcgcggtgtgggctgctcagctgtgcctatggctacttctgtgatctcggtgtccggaacgtcgtgacgtggaacgagatgatcgcgggctatggtctgcacggctgttctggagacgcgatgaggctcttccgcagcttggtttgcttcggagcaagaccggacgagttcacctatccagccgttctgtctgccttccaacaggaccatgatgcaaggaaccatgagcaagtccacgcaagtgttctgaaacaggggttcgcttcatgccagttcgtgtccacctcgctcatcaaagcaaaagcggcccttggctcagttctaggtccactgaagatcatccaggatgctggcgagatggatttggtgtcatggggagtcgccatctctgcgttcgtgaagcatggattggatcaagaggcactgtctctcttcaactcgtgcagagttgactgcccagagaagcctgatgagttcatcctgggcaccatcctgaatgcatgtgcaaacgccgcgctgataaggcagtgcagatgcatccattcgctcgttgtcaagacaggacacagcaagcacttgtgcgtgtccagtgctttggttgatgcctatgcgaaatgcagtgacatcactgctgccaaaggcgctttcgctacggtttcgaccaaggacgccatagtgtacaacaccatgctgacagcttatgccaaccatggtctgatccgtgaagtcctcagcctctaccaagagatgactcagcttcagttggcggctccaacaccagctacgttcgttgctgccatatcagcttgcagccacctcgggctagtggagcaggggaagcttctgttcagctccatgctgtctgcgcacggcatgaatcccacaagggccaattacgcatgcctgattgacctcctggcgcgaagagggctcctggaagaagcaacaggcgttatccaggcaatgccgttccaaccgtggcctgcagtatggaggtcactgatgaacggttgccggatccatgggaacaaagaactcggtctgcttgcttcggaacagatcctgaggatggcaccaaacagtgacggcgcatatgtgtcgctgtcgcatgtctacgctgaagatggagattggcggtctgcagaggacgccaggaggaagatggctgagaatcaagtgcacaaggcgcaaggttacagcagtcttcagatctagccattcagttttgtgttcgcagtgaatgtaaagtgtgaaatgctctctctcttttttttgccgggcatttccccaaaaaaaaaatccacacacaattactcctaaaaataggtttgggcatttgatgcacatctgtaggatcctcatgctgctaaaaaaaaaaaaaaaa

SEQ ID NO: 1492 - protein, 814 aa, Zea mays
  misc_feature: Ceres CLONE ID no. 488978
  misc_feature: Ceres CDNA ID no. 40041235
  misc_feature (533)..(556): Pfam Name: PPR PFAM Desc: PPR repeat
  misc_feature: Homolog of GI Number: 50901930 NR Desc: P0025A05.28
  misc_feature: Homolog of GI Number: 50944471 NR Desc: PPR
  misc_feature: Homolog of GI Number: 42566761 NR Desc: pentatricopeptide
  misc_feature: Homolog of GI Number: 54695180 NR Desc: PPR986
  misc_feature: Homolog of GI Number: 50899006 NR Desc: pentatricopeptide
  misc_feature: Homolog of GI Number: 50926434 NR Desc: OSJNBb0070J16.5
  misc_feature: Homolog of GI Number: 53791352 NR Desc: pentatricopeptide
  misc_feature: Homolog of GI Number: 3860271 NR Desc: putative selenium
  misc_feature: Homolog of GI Number: 37536800 NR Desc: putative PPR
  misc_feature: Homolog of GI Number: 46403989 NR Desc: pentatricopeptide repeat protein
MLLRAKSSSLIQSASRAGAWMPPHQLAISSAATRASSTLSASLARCSRAAAITDPFAIADALSAASSAPASQSLSTGSQLHASGIKLGVVFADTYTSNQLLIHYSKRGQLASALDVFDETPSRNHVTWTAMVSAAARGGAPGLGLRLFASMLRSGFCPNEFALASALGACCQWVAADVKLGLSLHGLAVRAVLHGNPYVGSSLMLVYAKHGRVAAAERVFAGIASGSRDVACWNAMLEGYVANGHGYDATRTVALMHGSGIAPDMFTYISAAKASWIARDLYFGRQVHGLVVRSVFESNNTSVMNALMDMYFKAGQKETAADIFGKIRWKDTVSWNTMLSGLAHEEDERAAADCFVDMARCGCRSNHVTFSVMLRLIGACASLGLQIFGLAYRHGYSDNVLVANAAINMLSRCGLLSCAYGYFCDLGVRNVVTWNEMIAGYGLHGCSGDAMRLFRSLVCFGARPDEFTYPAVLSAFQQDHDARNHEQVHASVLKQGFASCQFVSTSLIKAKAALGSVLGPLKIIQDAGEMDLVSWGVAISAFVKHGLDQEALSLFNSCRVDCPEKPDEFILGTILNACANAALIRQCRCIHSLVVKTGHSKHLCVSSALVDAYAKCSDITAAKGAFATVSTKDAIVYNTMLTAYANHGLIREVLSLYQEMTQLQLAAPTPATFVAAISACSHLGLVEQGKLLFSSMLSAHGMNPTRANYACLIDLLARRGLLEEATGVIQAMPFQPWPAVWRSLMNGCRIHGNKELGLLASEQILRMAPNSDGAYVSLSHVYAEDGDWRSAEDARRKMAENQVHKAQGYSSLQI

SEQ ID NO: 1493 - DNA, 655 bp, Zea mays
  misc_feature: Ceres CLONE ID no. 489225
  misc_feature: Ceres CDNA ID no. 25446421
  CDS (16)..(465): REFERENCED BY SEQ ID NO: 1494
actcacttctgaagaatgacagccgtggccctggcgctgcccacggacgacgacaaagacggcggccgccgaggcgtcgaccactccccgacggctcccgcgccccctcctccgccgccgccgccccaggagctggtcatggtggcgcgcgccgtgcagcggctcgtggcgcggaacgacgcggtggtgccgccggcgccggacgggcgcggaggaggccggagactcgggatgcgggcgttcgaggcggcggagggcgcggcggcgccgcgcatcggcgtgcccgagtacctggagcgcgtgcaccgctacgccgcgctggaccccgagtgctacgtcgtggcgtacgcctacgtggacatggccgcgcaccgccggcccgccgccgccgtcgcgtccaggaacgtccaccgcctcctcctcgcgtccctcctcgtcgcctccaaggttctcgacgacttgtgagcgcctttaaatctcttcctctcgttcttatgtttcctaccaaaacctgcacgtacgtacacggtgtctgcgtgtgtctcgagctccagattcgttctagacgtggtgatatattctcgtcggtgaccttgatcgaagacggccggagtacaaatggaatggattcgggattccaaaaaaaaaaaaaaaa

SEQ ID NO: 1494 - protein, 149 aa, Zea mays
  misc_feature: Ceres CLONE ID no. 489225
  misc_feature: Ceres CDNA ID no. 25446421
  misc_feature: Homolog of GI Number: 50928921 NR Desc: OSJNBa0089N06.10
  misc_feature: Homolog of GI Number: 52627113 NR Desc: At3g21870
  misc_feature: Homolog of GI Number: 75755895 NR Desc: TO51
  misc_feature: Homolog of GI Number: 2982283 NR Desc: PREG
  misc_feature: Homolog of GI Number: 3341694 NR Desc: putative PREG1
  misc_feature: Homolog of GI Number: 66776365 NR Desc: PE
  misc_feature: Homolog of GI Number: 50904935 NR Desc: PREG
  misc_feature: Homolog of GI Number: 66778899 NR Desc: UvrD/REP helicase
  misc_feature: Homolog of GI Number: 66778264 NR Desc: LigA
  misc_feature: Homolog of GI Number: 67987371 NR Desc: Aldehyde dehydrogenase
MTAVALALPTDDDKDGGRRGVDHSPTAPAPPPPPPPPQELVMVARAVQRLVARNDAVVPPAPDGRGGGRRLGMRAFEAAEGAAAPRIGVPEYLERVHRYAALDPECYVVAYAYVDMAAHRRPAAAVASRNVHRLLLASLLVASKVLDDL

SEQ ID NO: 1495 - DNA, 1762 bp, Zea mays
  misc_feature: Ceres CLONE ID no. 489254
  misc_feature: Ceres CDNA ID no. 25446847
  CDS (221)..(1276): REFERENCED BY SEQ ID NO: 1496
ggccgaaccagcgctagccctcttcctcttcctcgctatacagtacttcccagcagagcagagagctgagacgaaaacgagaagatcccatccactaccgcccggtcgccgtcctcccttcccgccgcgcccctcctgttccacccgctccgctttgctcgccgcagatcgccctcaggattttattccgccctccgtctccgggctcgcttggatcgagatgggcgtctgcgcgtccaaggccgcctactcctgctgctgctgctgctgctgccgcgagccgcacaacggggttactaacgagaggaccgatgctgtaacggatgacgagaaggcatacgacctgcctgcgttccaggagtttaccttcgagcagttgcggctagctacatcagggtttgcggtggagaacatcgtgtctgagcagggtgagaaggctcccaatgtggtatacaaggggaagctccatgcccagcgccgcatcgccgtcaagcgcttcaaccgctctgcctggcccgacccgcgccagttcctggaagaagctagatcagttggcctgctccgaagcaaaaggttggcaaatttgcttggctgttgctgcgaaggtgatgaaaggttgcttgttgcagaatacatgcccaatgatacgctcgcgaaacatcttttccactgggagtcacaatcaatgaaatggaccatgagattaagggttgttctctgtcttgctgaggctttagaatattgcaccaacaggggccgtgctctctaccatgatctcaatgcctatagagctctgtttgatgatgattgtaaccctagactttcctgttttggcctcatgaagaacagtcgtgatggaaaaagttatagcaccaatttggcatttacgcctccagaatacatgaggactggacgtattactcctgaaagtgtcatacacagctttggaaccttactgattgatgttcttagtgggaaacatattcctcctagccatgcccttgacctgattcgggaccgaaacttcaatatgctcttagactcatgtttagagggtcaattttcaaatgaggaaggggcagaaatggtacgattagcttcaaggtgccttcactatgaaccccgtgaacgacctaatgtccgatcacttgtgcaagtattgactcctctacagagggatgttgagactccatcttatgtgctgatgggtgttccacgtggcggtgcatcttctatccaaccattgcatctttcccctcttgccgaagctacatgagcagacaacagttgaatcacttcgccgtcctattaagcgtttgatagaccaggtgatagagaacaaggattttatagaaaggaaaagagaggttgtatccttttcaccaaatgataaggcgtcagttgatagcttccttcaggaggaggtcagcagaaccgcttcattcactcggttctatgcatccgttgctgaaaactgtcaaccaaaatggagaaaaacactttaaaataccaagggaatttctgagagacatctggaattggttggtttccaagtgagggccacgaagaaccacatcaatgtagaacattttagtgcagatatacgccgaggcagctattgtgtaaaacctctagtgagactgattcctacgagtcctcgagtgctcaacaattttgtacgattgtaaccttaattccgaagtgagttgtcaagtgatgaatgaaatttgctgttgcttttgaatcaaaaaaaaaaaaaaaa

SEQ ID NO: 1496 - protein, 351 aa, Zea mays
  misc_feature: Ceres CLONE ID no. 489254
  misc_feature: Ceres CDNA ID no. 25446847
  misc_feature (287)..(314): Pfam Name: Pkinase_Tyr PFAM Desc: Protein tyrosine kinase
  misc_feature: Homolog of GI Number: 50929765 NR Desc: OSJNBa0088H09.6
  misc_feature: Homolog of GI Number: 10177770 NR Desc: protein kinase
  misc_feature: Homolog of GI Number: 19715586 NR Desc: AT5g59010/k19m22_210
  misc_feature: Homolog of GI Number: 62079554 NR Desc: TPR
  misc_feature: Homolog of GI Number: 15223469 NR Desc: protein kinase family protein
  misc_feature: Homolog of GI Number: 21553556 NR Desc: protein kinase
  misc_feature: Homolog of GI Number: 7630023 NR Desc: protein kinase
  misc_feature: Homolog of GI Number: 6633851 NR Desc: F2K11.13
  misc_feature: Homolog of GI Number: 62079552 NR Desc: stress
  misc_feature: Homolog of GI Number: 22655470 NR Desc: At4g35230/F23E12_210
MGVCASKAAYSCCCCCCCREPHNGVTNERTDAVTDDEKAYDLPAFQEFTFEQLRLATSGFAVENIVSEQGEKAPNVVYKGKLHAQRRIAVKRFNRSAWPDPRQFLEEARSVGLLRSKRLANLLGCCCEGDERLLVAEYMPNDTLAKHLFHWESQSMKWTMRLRVVLCLAEALEYCTNRGRALYHDLNAYRALFDDDCNPRLSCFGLMKNSRDGKSYSTNLAFTPPEYMRTGRITPESVIHSFGTLLIDVLSGKHIPPSHALDLIRDRNFNMLLDSCLEGQFSNEEGAEMVRLASRCLHYEPRERPNVRSLVQVLTPLQRDVETPSYVLMGVPRGGASSIQPLHLSPLAEAT

SEQ ID NO: 1497 - DNA, 658 bp, Zea mays
  misc_feature: Ceres CLONE ID no. 489291
  misc_feature: Ceres CDNA ID no. 25445877
  CDS (74)..(490): REFERENCED BY SEQ ID NO: 1498
atatcgatcagctcttgcaaccttatctccattgcactgcattgcattgcattgcattagtagagggagatccatggccagagaaatggagaaggcaaagaaggccacatcttcccctaagagctcaacaattagtactggtcccaagagcccggtgaggaatggaggaggatctccccctcataagaaaaacactactactgctaccgaggcacgtggacggaaacatgagcagcaaaacgttcgaaaaggaggagacacgttgtctcatgacgagagcaaaccacgacgttcttcatcaactgcggcacaaacctcacccaagagatcaccgagacacgaacaacccctgagctacaacaggctccacacagaggagagagcaataaggcgggctggctacaattatcaggttgcgaagcggcaagcggtggtttactctctctacgcccccaaggccaagagcgtgatggagttgaaggtgcagtgatggctgcgaccttttcttccccaccgttcccgttccagattcgttgcttttgtgtgatgatgaaactataaactgctccgttgtcgcattttctggatgattgtcatgatatagtttcgttctgtgcaataaattactaaattctaccgcctaaaaaaaaaaaaaaaa

SEQ ID NO: 1498 - protein, 138 aa, Zea mays
  misc_feature: Ceres CLONE ID no. 489291
  misc_feature: Ceres CDNA ID no. 25445877
MAREMEKAKKATSSPKSSTISTGPKSPVRNGGGSPPHKKNTTTATEARGRKHEQQNVRKGGDTLSHDESKPRRSSSTAAQTSPKRSPRHEQPLSYNRLHTEERAIRRAGYNYQVAKRQAVVYSLYAPKAKSVMELKVQ

SEQ ID NO: 1499 - DNA, 1358 bp, Zea mays
  misc_feature: Ceres CLONE ID no. 489401
  misc_feature: Ceres CDNA ID no. 40351004
  CDS (104)..(1177): REFERENCED BY SEQ ID NO: 1500
accatccactgcgatacttcagacagctcttcttgcgttgcctactaagctctctctctctctctttctctcttgtgttcttgccttctgcctactacgagtgatggccagcctcactgacctcgtcaacctcgacctgagtgactgcacagacaggatcatcgccgagtacatctgggttggaggatccggcatagacctcaggagcaaagcaaggacggtgaaaggccccatcaccgatccgagccagctgccaaaatggaactacgacggctccagcaccgggcaggctcccggagaggacagcgaagtcatcctctaccctcaagtcattttcaaggacccgttcaggaagtgtaacaacatccttgtgatgtgtgactgctacacgccacaaggcgagccaatccccagtaacaagaggtacaaagctgccacggttttcagccaccccgatgttgcagctgaggtgccatggtacggtattgagcaggagtacactctccttcagaaggatgtgagctggccccttggctggcctgttggtggataccctggtcctcagggaccatactactgtgctgccggtgccgataaggcctttgggcgcgacgtggttgacgcccactacaaagcctgcctctacgccggcatcaacatcagcggcatcaacggcgaagtcatgcctggacagtgggagttccaagtcgggccgtccgttgggatctctgccggcgacgagatatgggtcgcccgctacattctcgagaggatcactgagatggccgggatcgttctctccctcgacccgaagccgatcaagggtgactggaacggcgccggcgctcacaccaactacagcaccaagtcgatgagggaggccggtggctacgaggtgatcaaggaggcgatcgagaagctggggaggaggcacagggagcacatcgccgcgtacggcgagggcaacgagcgccgcctcacgggccgccacgagaccgccgacatcaacaccttcaaatggggcgtggcgaaccgcggcgcgtccatccgcgtcggccgcgacaccgagaaggagggcaagggatacttcgaggaccgcaggccggcttccaacatggacccctacgtcgtcaccggcatgatcgccgacaccaccatcctgtggaagggaaactgataaaaccactgttcttctcctgcacgcatgcatccgccccgtgctgtcactttttgtttttcaaatttcgattcccgtcctaaagtttgttaccacttattattacggtctccagtgtactgctcggaaagtccgaataaaaacggctctaatgattttgttcaaaaaaaaaaaaaaaaaa

SEQ ID NO: 1500 - protein, 357 aa, Zea mays
  misc_feature: Ceres CLONE ID no. 489401
  misc_feature: Ceres CDNA ID no. 40351004
  misc_feature (103)..(355): Pfam Name: Gln PFAM Desc: Glutamine synthetase
  misc_feature (17)..(98): Pfam Name: Gln PFAM Desc: Glutamine synthetase
MASLTDLVNLDLSDCTDRIIAEYIWVGGSGIDLRSKARTVKGPITDPSQLPKWNYDGSSTGQAPGEDSEVILYPQVIFKDPFRKCNNILVMCDCYTPQGEPIPSNKRYKAATVFSHPDVAAEVPWYGIEQEYTLLQKDVSWPLGWPVGGYPGPQGPYYCAAGADKAFGRDVVDAHYKACLYAGINISGINGEVMPGQWEFQVGPSVGISAGDEIWVARYILERITEMAGIVLSLDPKPIKGDWNGAGAHTNYSTKSMREAGGYEVIKEAIEKLGRRHREHIAAYGEGNERRLTGRHETADINTFKWGVANRGASIRVGRDTEKEGKGYFEDRRPASNMDPYVVTGMIADTTILWKGN

SEQ ID NO: 1501 - DNA, 785 bp, Zea mays
  misc_feature: Ceres CLONE ID no. 489481
  misc_feature: Ceres CDNA ID no. 25446603
  CDS (220)..(666): REFERENCED BY SEQ ID NO: 1502
acacctgtacaaagaggctgcaccaccaattgtctgctggtccagcaaaaaaaacatcgtatactttcgtagggtcagggatatcgggttcgattttatttttcttttccctccatcgggacgtcgtaaaatcagggaactttacttctgtaatctgcatctttaaccaaccatctgtatgcaatcatgacacaccgcaggtgaacagatatagttgccatgagcatggaggtagcgggtgcagaggcacctgtcaaggggaaattccttggtatacttgtctgctggcttttgggaaatggaagccttttcgcgtggaacagtattctcaccattgaagattactactcccatctcttcccggattatcatccaacaagagtactcacactagtttaccagccttttgcctttggaataaccctcatcatgacatattatgaagcaaagatgaacacaagattgagaaatcttgcaggattttcccttttcttcctcggttcttttgcattgataattctggatgttgcaactaaaggacatggtgggcttggtgttttcgttggtgtatgcataattagcgccatatttgggacagctgatgctaattgtattttaggaatggttcagttaagctttcagtcaactttgcagctagttctgtgatgcgtgatgtcccagcactcctacatttcattgtactgctcagcgttaatcttccattgtccaaacggtcgtaaggattgccatatttgttccaacagtctccaaaaaaaaaaaaaaaa

SEQ ID NO: 1502 - protein, 148 aa, Zea mays
  misc_feature: Ceres CLONE ID no. 489481
  misc_feature: Ceres CDNA ID no. 25446603
  misc_feature: Homolog of GI Number: 50508592 NR Desc: putative equilibrative nucleoside transporter ENT8 splice variant
  misc_feature: Homolog of GI Number: 50508593 NR Desc: putative equilibrative nucleoside transporter ENT8 splice variant
  misc_feature: Homolog of GI Number: 16518991 NR Desc: putative equilibrative nucleoside transporter ENT2
  misc_feature: Homolog of GI Number: 16518997 NR Desc: putative equilibrative nucleoside transporter ENT6
  misc_feature: Homolog of GI Number: 16518989 NR Desc: putative equilibrative nucleoside transporter ENT7
  misc_feature: Homolog of GI Number: 50508594 NR Desc: equilibrative nucleoside transporter
  misc_feature: Homolog of GI Number: 33348854 NR Desc: equilibrative nucleoside transporter ENT8 splice variant
  misc_feature: Homolog of GI Number: 28207664 NR Desc: putative equilibrative nucleoside transporter ENT8
MSMEVAGAEAPVKGKFLGILVCWLLGNGSLFAWNSILTIEDYYSHLFPDYHPTRVLTLVYQPFAFGITLIMTYYEAKMNTRLRNLAGFSLFFLGSFALIILDVATKGHGGLGVFVGVCIISAIFGTADANCILGMVQLSFQSTLQLVL

SEQ ID NO: 1503 - DNA, 1079 bp, Zea mays
  misc_feature: Ceres CLONE ID no. 489517
  misc_feature: Ceres CDNA ID no. 25446077
  CDS (360)..(893): REFERENCED BY SEQ ID NO: 1504
atcatcatcgcaccccgaccccaagtggatgtggaaggggcttgcgctgacaccgcccgtccgcaccctgccaccaaaccacacgcatcctttcctttccctctcacttggagtttgccatcgccgtcgccttcgcccacacgcgtttccattccatagcgcttcctccgccccgcggcttgcccgcgctatattaaaccggcgacctccccgcccaggcaagctcacctcacgcgggggtcatacccacccacccagccagccaccgccactatacgtacgacctcactgatctcatctcaattctcacagcccgggaggacggactccgactctccgagtgcgcgcgttgatcgcccatgggcaactacctgtcgtgcacgctggccaaggcgccggggccgaggcccggcggcaagcgcgcgagggtgatactcccggacggcggcgtcaggcaggtggcgctgccggcgacggcggcggagctgatgatggacgcgccgggccacttcctcgtccacgtccacgcgcgcggcgcgggcctcggcctcggcgcgcgcctcgccgcgctgcccgcggacgaggagctccagctcggcgccgtctacgccaccttccccatgaagcgcctgggcacgccgctggcggcgcccgacctggcgcgcctcgccgccgccgccgcccgggaggcgcaccggtccgccaaggtggccagcgccgccgtcgtcgccgcgcccccgccggaggacgcgcccaggctgcggctggaggagatggtggacgacgcggccgccgcggagatcgccgtcaccaagcactgggccagcggtgcccggtccaggaggcccacgctggagaccatagacgaggagagttacctgtcgtccagatagatagtggcctacttgcgatgcgcttttcttctccgtttggttttttttaagcattcggttcaaactggatgaacctcaaaacatatgtgatggaaagtaagtagaacgtacagccatttttgtaaaaaaataaaataaaacaaaatatgcactcctatgttttcgaacaaaaaaaaaaaaaaaaaa

SEQ ID NO: 1504 - protein, 177 aa, Zea mays
  misc_feature: Ceres CLONE ID no. 489517
  misc_feature: Ceres CDNA ID no. 25446077
  misc_feature: Homolog of GI Number: 34911266 NR Desc: cytokinesis regulating protein
  misc_feature: Homolog of GI Number: 66776103 NR Desc: LigA
  misc_feature: Homolog of GI Number: 67987177 NR Desc: 4Fe
  misc_feature: Homolog of GI Number: 66776365 NR Desc: PE
  misc_feature: Homolog of GI Number: 66779656 NR Desc: Insulinase
  misc_feature: Homolog of GI Number: 66777773 NR Desc: Major facilitator superfamily
  misc_feature: Homolog of GI Number: 66777243 NR Desc: Ribonuclease PH
  misc_feature: Homolog of GI Number: 66776881 NR Desc: similar to ABC
  misc_feature: Homolog of GI Number: 66778899 NR Desc: UvrD/REP helicase
  misc_feature: Homolog of GI Number: 66776452 NR Desc: Protein
MGNYLSCTLAKAPGPRPGGKRARVILPDGGVRQVALPATAAELMMDAPGHFLVHVHARGAGLGLGARLAALPADEELQLGAVYATFPMKRLGTPLAAPDLARLAAAAAREAHRSAKVASAAVVAAPPPEDAPRLRLEEMVDDAAAAEIAVTKHWASGARSRRPTLETIDEESYLSSR

SEQ ID NO: 1505 - DNA, 702 bp, Zea mays
  misc_feature: Ceres CLONE ID no. 489883
  misc_feature: Ceres CDNA ID no. 40351005
  CDS (1)..(507): REFERENCED BY SEQ ID NO: 1506
agaaaccaggccttggagtcgtcggccggcgctggcggcttctcctgggcggccggcggctcggtcgcggggatgacggccttctcttcggcggcgttctccttcgccggcgccgccttggggagtcggcaagggatgaaggaacccatgcgcgcgtacgtgacggcgacccgggccggcgcatcatggcattgggcccgccgtggcccgcgggcgcagcgcattggctcccagcgcaatcgccctgtgctgtgtgctcagacgagacgagctggcccgcaccgctgggcgctcggatcccgtgagcgcggagactctctggtggccgtcgcacgacgcgcgtcgcctttcacgccagcaaggcagcaacgttcgtttcgttcaacgtcgtcgtgcccgggggcccgtcccgtgggcactgttgacagaacgacagaccacggggacgtgcagtgtatatgcagtagcacgcggccgggcaggtcgtcggacggctccgcagcttagccgggcaaacgtcgagagaccagaccacagggctcgctcgaacgtaccagcgcggcgcgcggcggcataaatgcgtgggcggcgacgtcgctacgaaccatcggtgaccatatgctttctgttccttgcatcgtgcgtggatattaaaatgccgctcgccattgggccgtcccttccggaaaaaaaaaaaaaaaa

SEQ ID NO: 1506 - protein, 144 aa, Zea mays
  misc_feature: Ceres CLONE ID no. 489883
  misc_feature: Ceres CDNA ID no. 40351005
MTAFSSAAFSFAGAALGSRQGMKEPMRAYVTATRAGASWHWARRGPRAQRIGSQRNRPVLCAQTRRAGPHRWALGSRERGDSLVAVARRASPFTPARQQRSFRSTSSCPGARPVGTVDRTTDHGDVQCICSSTRPGRSSDGSAA

SEQ ID NO: 1507 - DNA, 1019 bp, Zea mays
  misc_feature: Ceres CLONE ID no. 489914
  misc_feature: Ceres CDNA ID no. 25401472
  CDS (116)..(847): REFERENCED BY SEQ ID NO: 1508
attttcaacttgcttctcaagtttgctcggtgtcgctcgcgactggctctagttgtactcagccagctatccttggtgtgggggtttgatcgacggagccgtcacaacggcgcctatggcgaagccttccgtacagactcatttcgtcttggacgcgatggccgcggagagggtgaaagtcgcggagaactgggagcgagcgttggattcgttggagaacatgaatcagcgcctgggaaagttcgccaaggtccagcgccagttggtggagcagtcggaggtcgcggcgcaggcggccaagcaggcggcgaaggagcgttctgttctgtcgcgtcaagtggaggaatctgggcagctgctggcgcgggtacagctggaatccatggcggcggagacggagaagtccaggaggagcggatccaccagcccgtcatctaggtcttcaccccctgttcaggtacggaagggtcctcagaagggtgttcagatcaatccactgcctgagatgtcattcccaaagtttgatggtgctaatccgagagtttggttggacaagtgtttggattacttccatattttcaaggtttctgaagctatgtgggtacaagtggcgtctctgcacttggaagggattgctgctcgctggtttcacgtgcatagactgaaacagaggacagggtggaatcattttactcgggatgtgttgaacaagtttggcgcagacgagtatccaaaggcgatgaggagattgatgggtctcaggcagacggggtcactggacgagtttgtgcgggcgttcgaggaagcacggtacatggtatcgctgcataacccaaagatgaactgaatgatcaatacaaaggaaggtcgacaaggtcagtgttccagtcgaggtcctcgtccacagcagtcaaggccaaggcgatcagtggtactactggtaaagggtgcatgaaggtgcggggtcttttgaagaacaaagttacgttgctgttgtcaatacaaaaaaaaaaaaaaaa

SEQ ID NO: 1508 - protein, 243 aa, Zea mays
  misc_feature: Ceres CLONE ID no. 489914
  misc_feature: Ceres CDNA ID no. 25401472
  misc_feature (164)..(230): Pfam Name: Retrotrans_gag PFAM Desc: Retrotransposon gag protein
  misc_feature: Homolog of GI Number: 50916505 NR Desc: putative polyprotein
  misc_feature: Homolog of GI Number: 37536142 NR Desc: putative plant disease resistance polyprotein
  misc_feature: Homolog of GI Number: 77555174 NR Desc: retrotransposon protein
  misc_feature: Homolog of GI Number: 77551744 NR Desc: retrotransposon protein
  misc_feature: Homolog of GI Number: 22725944 NR Desc: Putative retroelement
  misc_feature: Homolog of GI Number: 34895012 NR Desc: putative polyprotein
  misc_feature: Homolog of GI Number: 31431115 NR Desc: putative retroelement
  misc_feature: Homolog of GI Number: 18568269 NR Desc: putative gag
  misc_feature: Homolog of GI Number: 62733754 NR Desc: retrotransposon protein
  misc_feature: Homolog of GI Number: 50923983 NR Desc: OSJNBb0014D23.7
MAKPSVQTHFVLDAMAAERVKVAENWERALDSLENMNQRLGKFAKVQRQLVEQSEVAAQAAKQAAKERSVLSRQVEESGQLLARVQLESMAAETEKSRRSGSTSPSSRSSPPVQVRKGPQKGVQINPLPEMSFPKFDGANPRVWLDKCLDYFHIFKVSEAMWVQVASLHLEGIAARWFHVHRLKQRTGWNHFTRDVLNKFGADEYPKAMRRLMGLRQTGSLDEFVRAFEEARYMVSLHNPKMN

SEQ ID NO: 1509 - DNA, 974 bp, Zea mays
  misc_feature: Ceres CLONE ID no. 490389
  misc_feature: Ceres CDNA ID no. 25446423
  CDS (195)..(821): REFERENCED BY SEQ ID NO: 1510
aacatagtgccatagtggacacgatattcacacatttcagccggcagctaggtatttcttttttgtcgccaagccagaccgccagcagcccttgagtgttgagtccttgacccgaagtcccacagccgccgccaaaagggttcctcaccatcttgaacgctcgccggaccaatcccaagcagtcctcgcagcagatggcagttcccggcggccgcaacggactcagggacgaggacgacgacatggcccagcacgccgaggccttcggcggcgtctctgacgacgaggacgtgcctccccaccttcgcgccctcgccaacgccgcccagtccggcgacgtccccgcccttgtggctgccctcgataatcatgatggcagtattgatgttccagttgaagatggtgatactttgctccatctggcatgcttatatggtcatcttccttgtgtgcagctattgctggaacgtggagctagcttggaatgccaagacgaagaaggtgctattcctcttcacgatgcttgtgctggaggcttcactgagctggtccaatatattctcaactttgctgccaacaaggatggttgcgtagtgagaatgctcaacactattgattctgaaggcgatacgccgctccatcatgctgctagaggagaacatttggatgttgtcaagcttcttctccaggctggggcgtcccccaagaaggagaacacttacgggcagacacccgctgatatggctgaccaagacaccgaagttcgaaccctgttgactgccaagcaaattgaggcaagcacacacatgagtgatgattaagcggcattggaatccttagctgcaactggtaatgttgagaaatagccgtaacatcttatctgccatacaaacttcatttgaactgaagtaatattgtaatcagactagtatggaggggttagcttagctacaaataaaaaaaaaaaaaaaaaa

SEQ ID NO: 1510 - protein, 208 aa, Zea mays
  misc_feature: Ceres CLONE ID no. 490389
  misc_feature: Ceres CDNA ID no. 25446423
  misc_feature (102)..(130): Pfam Name: Ank PFAM Desc: Ankyrin repeat
  misc_feature: Homolog of GI Number: 28373837 NR Desc: Chain A
  misc_feature: Homolog of GI Number: 55616077 NR Desc:  BRCA1 associated RING domain 1
  misc_feature: Homolog of GI Number: 28274850 NR Desc: ankyrin repeat protein E3_19
  misc_feature: Homolog of GI Number: 28274848 NR Desc: ankyrin repeat protein E3_5
  misc_feature: Homolog of GI Number: 28274854 NR Desc: ankyrin repeat protein E4_8
  misc_feature: Homolog of GI Number: 74005696 NR Desc:  similar to BRCA1
  misc_feature: Homolog of GI Number: 28274852 NR Desc: ankyrin repeat protein E4_2
  misc_feature: Homolog of GI Number: 4557349 NR Desc: BRCA1 associated RING domain 1
  misc_feature: Homolog of GI Number: 2828068 NR Desc: BRCA1
MAVPGGRNGLRDEDDDMAQHAEAFGGVSDDEDVPPHLRALANAAQSGDVPALVAALDNHDGSIDVPVEDGDTLLHLACLYGHLPCVQLLLERGASLECQDEEGAIPLHDACAGGFTELVQYILNFAANKDGCVVRMLNTIDSEGDTPLHHAARGEHLDVVKLLLQAGASPKKENTYGQTPADMADQDTEVRTLLTAKQIEASTHMSDD

SEQ ID NO: 1511 - DNA, 658 bp, Zea mays
  misc_feature: Ceres CLONE ID no. 491136
  misc_feature: Ceres CDNA ID no. 29191489
  CDS (128)..(484): REFERENCED BY SEQ ID NO: 1512
ctcaaccagccgttccaagtggtactgctgctactcatgctctctgcttgcatctgctgaaacacttgtctcctgctcccgctcgctgctggggggcgcaggctaaatccgtgcatttcgtagtgtaatgatcgaagtcctttggtgcctggctctggctggctgcatctgcatgcaggtggtccccaagtcgctggcgccgttcctcccggggacgacggtgccggcgacggtgacgtggcacgggtggtcctgggagatgcggttcacgggggggcggcagatccagcgcctggaggccgggtggcggggcttcgcgctggacaacggactgaagctcggcgacgggtgcgtcttcgaggtggtggacggcagggcggagcgcgtggtgttcagggtgcaggtgctccgcgccgacatccccgcggagatccgggagcgggccggcgggtacactccgtccagccccatcctcatcgactagctagctcattgctcacctcatctcatcagctgctggtctgtatccccccgtgcggccgtctgccactgttactgcagagggtgagagtgcaatccgatttttttgcattttagtccttcctcggaaaaaattcacgtttgaaccctaaaaaaaaaaaaaaaaaaaaaaaaaaaa

SEQ ID NO: 1512 - protein, 118 aa, Zea mays
  misc_feature: Ceres CLONE ID no. 491136
  misc_feature: Ceres CDNA ID no. 29191489
  misc_feature (42)..(94): Pfam Name: B3 PFAM Desc: B3 DNA binding domain
  misc_feature: Homolog of GI Number: 50923835 NR Desc: OSJNBa0044M19.12
MIEVLWCLALAGCICMQVVPKSLAPFLPGTTVPATVTWHGWSWEMRFTGGRQIQRLEAGWRGFALDNGLKLGDGCVFEVVDGRAERVVFRVQVLRADIPAEIRERAGGYTPSSPILID

SEQ ID NO: 1513 - DNA, 759 bp, Zea mays
  misc_feature: Ceres CLONE ID no. 491353
  misc_feature: Ceres CDNA ID no. 40351006
  CDS (115)..(390): REFERENCED BY SEQ ID NO: 1514
gtctttgttgcagatcggtgctcctctcaccaccaggccgccacagctcgccggctttcccctccctgccatcgagcaccacctgagcaaacagagcaaggaaatagtttaagaatggctgcgcggagcagttctatggttgccgaggatgactacgagacggatcagaagaagcaagctgctgcagatgttctttttcactattcacaatttgttatggtttgcattggtgaggatgtccgccctactgatctcaggttacatcttatgaaggaagtttcaggaatggccacttctctgaaggagcctcaacaggctgctgcctcaccggcttccagtggggaaccgtcttcctctggaacgatgaaaggagtacaggactatagatgacaacaggtccatgaaacctggcggttttgactactcccctctacttttgatataggcagtttgtcatggaagtgcatgttggaaagaagctgttttccgttgaaaacaccaacacccatcaaacaagaaagcctttctagtttctttttatcgtcggaaagtctatcggcttgctgggactttggtggtgaaagagttgtttgtaacctgcctgcgtgacaacccatgatccattcgatcttgggctggcttggctttagatgttcgcctatcgaatggggcctgggattgtagcgagggattgtcaacaattcattggatatttggagcagcttaaaaaagacgtataacccaaaaaaaaaaaaaaaa

SEQ ID NO: 1514 - protein, 91 aa, Zea mays
  misc_feature: Ceres CLONE ID no. 491353
  misc_feature: Ceres CDNA ID no. 40351006
MAARSSSMVAEDDYETDQKKQAAADVLFHYSQFVMVCIGEDVRPTDLRLHLMKEVSGMATSLKEPQQAAASPASSGEPSSSGTMKGVQDYR

SEQ ID NO: 1515 - DNA, 967 bp, Zea mays
  misc_feature: Ceres CLONE ID no. 491639
  misc_feature: Ceres CDNA ID no. 35388169
  CDS (1)..(765): REFERENCED BY SEQ ID NO: 1516
gagttgatgaataatctggctgtgtaccttgctcgtgtcctgaatggacgcaggaagccgaccttttttggcacggaactcaatgagagcactcagtatggtcacctcgtcttcaggactccaaacccggggcggccgcttctggtgctccggggagtgggggctggggcggcgcttggaacgacgttgggaagatcccgcggcggcgcgcgagggcacatccatcgggcgcgtgctgacgggtttgacgttggaggtcccgatgtgcgaggcacggtgcgcaatagccaaaggcgaggcgtcgccggcgtcatcggaggcggcggccgcggccgtggtggagttgtcggagtcggagtcagagtggaggtgaagggtgcgctcgcggttgcgcctcggcgacggagagcgcccggcgacgtcagcgtccgagttggagtggaagctcggggaacgttcgccgagaagcctcgaggaacgggcgccgcggccggcgccggcgccggcgtcggcgtcggagtccgcatcggagtcgaggtggtcgcggggggaacgctcacggttggtgtcggaagcggcggcgctagggccgaggttgggccgatgggactcggatcgggagcgggacggggagactcggcggcggtggctgttgcgggccgcgcccgcttcgccgtcggaggcgtcggacgccgaccccaggctggcggcggcggccgagcgcttgagggccatgccggcaagtgtggattggagttagtttagggttttggatttcaatcccactacgggattgctccgcctcgccaatatggctgttggcatgttgctctgttgcgatggctgtggcctgtgggagagctgggcgggtggatcccctgggcggtggcatgttcggttgcggaagtgttcactggagagaaaaaaaaattgcacaattatatattttaaaaaaaaaaaaaaaaaa

SEQ ID NO: 1516 - protein, 252 aa, Zea mays
  misc_feature: Ceres CLONE ID no. 491639
  misc_feature: Ceres CDNA ID no. 35388169
  misc_feature: Homolog of GI Number: 50904965 NR Desc: Fibroin heavy chain precursor
  misc_feature: Homolog of GI Number: 1263283 NR Desc: fibroin
  misc_feature: Homolog of GI Number: 2605798 NR Desc: minor ampullate silk protein MiSp1
  misc_feature: Homolog of GI Number: 57899841 NR Desc: fibroin heavy chain Fib
  misc_feature: Homolog of GI Number: 27228959 NR Desc: major ampullate gland dragline silk protein
  misc_feature: Homolog of GI Number: 8572061 NR Desc: fibroin heavy chain Fib
  misc_feature: Homolog of GI Number: 47007909 NR Desc: major ampullate spidroin 3
  misc_feature: Homolog of GI Number: 47007923 NR Desc: major ampullate spidroin 1
  misc_feature: Homolog of GI Number: 9453859 NR Desc: EBNA
  misc_feature: Homolog of GI Number: 765323 NR Desc: silk fibroin heavy chain
MNNLAVYLARVLNGRRKPTFFGTELNESTQYGHLVFRTPNPGRPLLVLRGVGAGAALGTTLGRSRGGARGHIHRARADGFDVGGPDVRGTVRNSQRRGVAGVIGGGGRGRGGVVGVGVRVEVKGALAVAPRRRRAPGDVSVRVGVEARGTFAEKPRGTGAAAGAGAGVGVGVRIGVEVVAGGTLTVGVGSGGARAEVGPMGLGSGAGRGDSAAVAVAGRARFAVGGVGRRPQAGGGGRALEGHAGKCGLELV

SEQ ID NO: 1517 - DNA, 1197 bp, Zea mays
  misc_feature: Ceres CLONE ID no. 491894
  misc_feature: Ceres CDNA ID no. 40351007
  CDS (250)..(978): REFERENCED BY SEQ ID NO: 1518
aaaaaaaaaaaagatcacggacgacacagacggccaccaaatctgcacctgccccagatgcagcagaggtagtcgccacggcgccacctgcccactgcactgcccccagagcctccaagctgcatatcggaagtgaagcgcctcgcagtcctcctctcggatctcgcggtggaagtcgccggtccactcgatcagcgagcgagtcggtgccgcgcggcggattccccgacccgagcaaaggaaccggacatgcggccgcggctggtgctcttcggcgactccataaccgagctgtccttcgcgtccggcggatggggggccgcgctcaccgaccgcttcgcccgccaggctgacgtggtgctgcgcgggctcagcggctacaacacgcggtgggcgctcaaggtgctgccgcgggccatggagggcgcggcgggcgcgggcgcgggcgcggacccggcggccgtgacagtcttcttcggcgccaacgacgcctctctgcccgaccaggtgcaggcgcaccagcacgtgccgctcaaggagtaccagagcaacctccgcgccatctgcgcctatttcaaggagcgatggccctccactgctgtcatactcatcactcccccaccgatttacgagccagcgagaatccgagacatgtatggagacgacgagccttcacgccaaccagaaaggagcaatgaggctgccggcgcttacgcacaggcatgcatagatgttgccacagaattgaaccatccagttatagacatctggaccaagatgcaggaatttccagactggcaaacatctgcattgagcgacgggctccacttcaccccggtaggaaacaagatcctgttcgaggaggtggtgaagacgctggagacgagcatcggtttcagccaggagcggctcccgtcggacctcccgctgttccacgagatcgaccccaaggaccccatgaaagccttcggagcttagcttgggccttggaggagacgcacggtcgttggatcagccacgtctgctgcatttgagttcgtcgtcagtatgcaggaggcctgctgaggccattacaggaacagtgagctttaataagcggtgttttcagtaccgtttggttgtcagcgcatcacgtgttgtttggcacactgtggttggataaatcataccatttcggtcccaaaaaaaaaaaaaaaa

SEQ ID NO: 1518 - protein, 242 aa, Zea mays
  misc_feature: Ceres CLONE ID no. 491894
  misc_feature: Ceres CDNA ID no. 40351007
  misc_feature (5)..(206): Pfam Name: Lipase_GDSL PFAM Desc: GDSL
MRPRLVLFGDSITELSFASGGWGAALTDRFARQADVVLRGLSGYNTRWALKVLPRAMEGAAGAGAGADPAAVTVFFGANDASLPDQVQAHQHVPLKEYQSNLRAICAYFKERWPSTAVILITPPPIYEPARIRDMYGDDEPSRQPERSNEAAGAYAQACIDVATELNHPVIDIWTKMQEFPDWQTSALSDGLHFTPVGNKILFEEVVKTLETSIGFSQERLPSDLPLFHEIDPKDPMKAFGA

SEQ ID NO: 1519 - DNA, 553 bp, Zea mays
  misc_feature: Ceres CLONE ID no. 492168
  misc_feature: Ceres CDNA ID no. 25446426
  CDS (263)..(553): REFERENCED BY SEQ ID NO: 1520
aatcccctccttccttcggcctcaccttcttattctctccgaacaagtcttagacgcctaatccgtagtttacatcccgaagggcggcaagggtgatccaggccgaccatggcttacgtcgagagaggtgttgtgaaagacaagcggactatatggcgactgagcataatctcagacttctttcgggctattgtcaacttcatcagaatcttctttgacacactgttctcagtggacaaaactgacagctacaagaaagggtatggtgctggtaagaagtgggatggtggacctggtggtggtggtgggcggggcccatatggaggtggaggtggtggatttggcggcggaggtggaggtggtaggggtcctcgcactctatctgacatccaatccaatgaccacagttctctccctgcttgtggatcctgctgcgttcctggatgtaatccatttatttttctgcaatgaagagatgctggcaagcatgctacctgcatatgtcagaaatggtagtaacagtgaatctttgttcacaaaaaaaaaaaaaaaa

SEQ ID NO: 1520 - protein, 120 aa, Zea mays
  misc_feature: Ceres CLONE ID no. 492168
  misc_feature: Ceres CDNA ID no. 25446426
  misc_feature: Homolog of GI Number: 24641445 NR Desc: CG1840
  misc_feature: Homolog of GI Number: 49036484 NR Desc: Glycine
  misc_feature: Homolog of GI Number: 33864553 NR Desc: RNA
  misc_feature: Homolog of GI Number: 21553749 NR Desc: glycine
  misc_feature: Homolog of GI Number: 829254 NR Desc: glycine
  misc_feature: Homolog of GI Number: 57227504 NR Desc: p68
  misc_feature: Homolog of GI Number: 15965655 NR Desc: HYPOTHETICAL GLYCINE RICH TRANSMEMBRANE PROTEIN
  misc_feature: Homolog of GI Number: 15965826 NR Desc: PUTATIVE GLYCINE
  misc_feature: Homolog of GI Number: 33862287 NR Desc: RNA
MAYVERGVVKDKRTIWRLSIISDFFRAIVNFIRIFFDTLFSVDKTDSYKKGYGAGKKWDGGPGGGGGRGPYGGGGGGFGGGGGGGRGPRTLSDIQSNDHSSLPACGSCCVPGCNPFIFLQ

SEQ ID NO: 1521 - DNA, 1128 bp, Zea mays
  misc_feature: Ceres CLONE ID no. 492302
  misc_feature: Ceres CDNA ID no. 40351008
  CDS (186)..(953): REFERENCED BY SEQ ID NO: 1522
aaaaaaaccgcaacaaatcaaaacgagccgcaatcgcagcgcagaggcaaagccgtccatctctctcaacgccgccgccgccgccccgccccgccccagaccctaccctccacctccagtccctcgtcccagcgcgaccgattctcctcgatccagcactgatccggcggcttcccggcccggccatggatttgctggcgtccttggccgccgaggagcggtggctgttcccgttgttcctcgccatgtacgccgccatctactgcgtgggccagctcctcgtgttccggcggtgggcgccgcggcagcggctggacggcgccagctgcctgatctcgctcttccacggcacccccgcggcgctggccgccgcgggggccatcctcgcgctgcccgcggggtcccggtccttcgccgcgcccaacgcgcgcctccaggaccacgtcctcgactacagcgtcgcctacttcaccatggacctgctccactacctcgccttcctgcccggggacgtgctcttcatcgcgcaccacctggccacgctcttcgtcttcctcacctgccgctacctcgtccggcacggcgcatacgcgctcctcgtcctcctccttctcgccgaggttaccagcctgctgcagaacgtctggacgctcgcggggatctggcgggaccagtcccccgccgccgcgcgcgtctacggtgccctctcgccgcccttctacgcgctctacacgctcgtcaggggcgtcgccggcccgctcttcctcctcaagatggccgccttctacctgtccggccaggccgtcgacgtcatcccgtggtgggtgcggatctcctggatcctcgttgtcggcaccgccattgccgtcagcaacctgtggatttggaacctctggaaggagctcgtcagggaatggaagcaagccccttccaagtcaaagaaagacacataggctgccacctcattctaaccacagtaccgtaccatgtacgggtgtacgaaccatatgtagcttcttaatctttccaaatacatccgagccagatgatgcagactgatgatatgctaaaagccaatttccgttgacaattggtggaggatgcttatctggaaaaaaaaaaaaaaaa

SEQ ID NO: 1522 - protein, 255 aa, Zea mays
  misc_feature: Ceres CLONE ID no. 492302
  misc_feature: Ceres CDNA ID no. 40351008
MDLLASLAAEERWLFPLFLAMYAAIYCVGQLLVFRRWAPRQRLDGASCLISLFHGTPAALAAAGAILALPAGSRSFAAPNARLQDHVLDYSVAYFTMDLLHYLAFLPGDVLFIAHHLATLFVFLTCRYLVRHGAYALLVLLLLAEVTSLLQNVWTLAGIWRDQSPAAARVYGALSPPFYALYTLVRGVAGPLFLLKMAAFYLSGQAVDVIPWWVRISWILVVGTAIAVSNLWIWNLWKELVREWKQAPSKSKKDT

SEQ ID NO: 1523 - DNA, 778 bp, Zea mays
  misc_feature: Ceres CLONE ID no. 492652
  misc_feature: Ceres CDNA ID no. 40351009
  CDS (262)..(549): REFERENCED BY SEQ ID NO: 1524
acttgggacgcgaggaggaggagttggtgagcgaactcgggatcagtgggtgaccgcagagttcttgcttcttcctcttggaggaggagggctgcagcctgcaggggccggagagagcaggaggaggcggagacatgggtagcttcgctaagctggcgaggagggcggtggagacggacgctccggtcatggtgaagatacaagaactgctccgaggggccaaggatgtgatgtcgcttgcgcagggagttgtttacatccatggtgatgtggatggcccctgttgcgatcatgtatgggttttactaccaggtgtttccaggtgtgagtcagatgtcatcctcggcgcagacacttgccagtgggttcctggctgtcatatcggttaatctagttatcggtttttacatattcatggcgatgaaggagactccacaccaagagccacagccagatcccaccttcctggagaaagccaaagcgagtatcaaccagccaacatcctctcaagggagtgatgattccaaggggaagggaaaggtcgagtaagccgtagcatgttggcttaggtctcgtgtatgttaagtgcatgttatttaggaggaatagttatgccacaccatcacaaggaccgcaacctttcacaatttatgattttgctgtaaatcttgacagttatggctatggagcaatatgaagttgaaccttttgtacctatttgatttggaaactctgttcaatgttgttttagtcaggatactcaaaaaaaaaaaaaaaa

SEQ ID NO: 1524 - protein, 95 aa, Zea mays
  misc_feature: Ceres CLONE ID no. 492652
  misc_feature: Ceres CDNA ID no. 40351009
MVMWMAPVAIMYGFYYQVFPGVSQMSSSAQTLASGFLAVISVNLVIGFYIFMAMKETPHQEPQPDPTFLEKAKASINQPTSSQGSDDSKGKGKVE

SEQ ID NO: 1525 - DNA, 1606 bp, Zea mays
  misc_feature: Ceres CLONE ID no. 492864
  misc_feature: Ceres CDNA ID no. 25446980
  CDS (740)..(1378): REFERENCED BY SEQ ID NO: 1526
agccctactgaactctctcggacgggtgacaggctaacagccgccgcccgccagctttggagagccacggtgacaggccgccagcagccatcgacggccctccctccacctcgccgtcgtccctcttcccccatctcgccgagccatcgtccctccacagcaggaccacctcaccgagccgtcgtccctccacagcaggagtgcaggaccgcatcgccgagtcgtcgtctctccacaccaggttcgccgtcgcggcgcggctacctcgctccgtctcccagctcgtccggtccagctcactcgcggtcgcgaccatctccgtccacctcatccctccggcaagcagttgctatactcatccagggtcagatcagcaactcttgccttatcctgctggctggccgcagcaccggtggtgtggtggaggatggcattgaaatacgtggccagggtaccgtctccatggtgggcgccacaacgtcgtttggctggttcatgggtttccgtctgctcggtaaaatgcggcgcattgggaggacgggatgttgtgtgcgccgctgttagcttcagaccatgcatcgacattcacaaggggaaagttaagcagattgttggttctactcttcgggattcatccaatgatggcatggaacttgtgacaaactttgaatcagacaaatctcctgcagaatttgcaaaatcatataaagaagatgaacttcttggaggacatgttataatgcttggctcagatcctgcaagccaggctgctgcactcgaggcactacatgcatatcctggtggcttgcaagttggaggtggaataaatttgcagaatgcaatgtcttaccttaatgaaggggccagtcatgtgatagtgacctcttatgtgtttagcgatggcaagatgaacattgaaaggctgacaaaacttgtcgagctggttgggaaacagaggcttgtgctggaccttagctgtcgaaaaaaggatggcagatatactattgtaactgacaggtggcagaagttcagtgatgtgtttgtggatgaaccggcattagaatatctcgctgccttcgcagatgagtttttggttcatggtgttgatgtggagggcaaaaggttagggattgatgaggaacttgtggaactattggggcatcattcaccaatcccagtaacttatgctgggggtgtgtcaacaatggatgacctagagaggataaagaaggcaggcaaaagtcgagtagatgtaactgttgggagtgctctagatatatttggaggagatttaccctacaaagatgttgtcctttggcacaagaagcaaagtatggttggccaagtgtcaaggaacatgtgttttgtgttggcctaataaaggatgactttcaaggtgttatcagcgatcgtggcgctgtagtgtaaatggtcttccattcttatcgtagtcctctattttaaattttactcaacaaatattgtcaaacagtgtctgtgtcattgtcgtgtttcttattttacgcgatccatttaagacagtataagaaatgagattgtactccaatcttgatttttgagtcctatcgcaaaaaaaaaaaaaaaa

SEQ ID NO: 1526 - protein, 316 aa, Zea mays
  misc_feature: Ceres CLONE ID no. 492864
  misc_feature: Ceres CDNA ID no. 25446980
  misc_feature (127)..(290): Pfam Name: His_biosynth PFAM Desc: Histidine biosynthesis protein
  misc_feature: Homolog of GI Number: 22655218 NR Desc: phosphoribosylformimino
  misc_feature: Homolog of GI Number: 55953220 NR Desc: BBMII isomerase
  misc_feature: Homolog of GI Number: 51243857 NR Desc: probable phosphoribosylformimino
  misc_feature: Homolog of GI Number: 50878368 NR Desc: putative N'
  misc_feature: Homolog of GI Number: 66851652 NR Desc: 5
  misc_feature: Homolog of GI Number: 46981811 NR Desc: phosphoribosyl
  misc_feature: Homolog of GI Number: 19114853 NR Desc: probable phosphoribosylformimino
  misc_feature: Homolog of GI Number: 42523189 NR Desc: Imidazole glycerol phosphate synthase subunit hisF
  misc_feature: Useful for delaying flowering time
  misc_feature: Useful for increasing chlorophyll and photosynthetic capacity
  misc_feature: Useful for making plants with increased biomass and foliage
  misc_feature: Useful for making plants with increased biomass and foliage
  misc_feature: Useful for making plants with increased biomass and foliage
MALKYVARVPSPWWAPQRRLAGSWVSVCSVKCGALGGRDVVCAAVSFRPCIDIHKGKVKQIVGSTLRDSSNDGMELVTNFESDKSPAEFAKSYKEDELLGGHVIMLGSDPASQAAALEALHAYPGGLQVGGGINLQNAMSYLNEGASHVIVTSYVFSDGKMNIERLTKLVELVGKQRLVLDLSCRKKDGRYTIVTDRWQKFSDVFVDEPALEYLAAFADEFLVHGVDVEGKRLGIDEELVELLGHHSPIPVTYAGGVSTMDDLERIKKAGKSRVDVTVGSALDIFGGDLPYKDVVLWHKKQSMVGQVSRNMCFVLA

SEQ ID NO: 1527 - DNA, 422 bp, Zea mays
  misc_feature: Ceres CLONE ID no. 494216
  misc_feature: Ceres CDNA ID no. 36707098
  CDS (3)..(305): REFERENCED BY SEQ ID NO: 1528
gagggatagagaggcggcagccagggccgggggagagccatgtgcaagctcaggtgcaccaaggagtgggtggggtgctacctgctggtgatcctggtcatcgtcctcctcgtcggcgtcctcttcggcctcggcgtcttcaggcacggctacgacaggatcacggagatcggccgcaaccacacctgcttcgactgcaacacaacaggtaccaactgaccgagccaccggccgtgccctgctcctgcctgcctcggtcgggatcggtgccagcgtgcgtgttgatttgtacgtgtgtgtggtagctcctccgtggaccgtacgtgtgtgcaaactcctgtcgcttggtttagagtgtagactacaggtttaactgattctatgatgaatatttttttccctgcaaaaaaaaaaaaaaaaaa

SEQ ID NO: 1528 - protein, 59 aa, Zea mays
  misc_feature: Ceres CLONE ID no. 494216
  misc_feature: Ceres CDNA ID no. 36707098
MCKLRCTKEWVGCYLLVILVIVLLVGVLFGLGVFRHGYDRITEIGRNHTCFDCNTTGTN

SEQ ID NO: 1529 - DNA, 856 bp, Zea mays
  misc_feature: Ceres CLONE ID no. 494692
  misc_feature: Ceres CDNA ID no. 12637874
  CDS (163)..(682): REFERENCED BY SEQ ID NO: 1530
acccgaccccacccctcctgagggcgagcccgagcgcaaaaccctaaccttgtcttgtgcgcagctccgctattaaagtctgcgtacagtccgccgcggctaggcgaccgcatccgcatctccccaacgtcttctcgccggtcgcgcacgggcaaagcagcgatggctacagcgacggcagttggcggacccgacagggtggagactgcggcgtcgtccgcggcggcagtgctggccgtcgccgttgcctcgcagaggttgctaggtctgctcgctcttgcggttcaaactgtaaatgttggagcagaaatatataataaagatcagcgggcaatatacaagttattatctggaagaatcaaatctgaaaatgtccctgaaaataaggatgggtcagatgacgacgatgatgacgacgacgatgaagacaatgacgatgagggtggtgacgacgacgatgatgctgaggaggaattctctggagaagaagatgggggtgatgacgatgatgaagatgatgatcctgaagctaatggtgaaggaggaagtgacaacgacaatgatgacgacgaagatggtgatgatgatggcgatgaggacgacgaaggtgatgaggacgacgaagacgaggacgatgatgaagatgacgaagaccagccaccttccaagaagaagaaatgatttgctcatccatggatttacctcagcttctccatgctgttagttgtgttgtttagatcatggacagctttgggatcaatgtagcttgttgcttgtcatggtatcgtagtgtaggaaaatttgacatctgatgttaaatcactatcctgctttccccccaaaaaaaaaaaaaaaa

SEQ ID NO: 1530 - protein, 172 aa, Zea mays
  misc_feature: Ceres CLONE ID no. 494692
  misc_feature: Ceres CDNA ID no. 12637874
MATATAVGGPDRVETAASSAAAVLAVAVASQRLLGLLALAVQTVNVGAEIYNKDQRAIYKLLSGRIKSENVPENKDGSDDDDDDDDDEDNDDEGGDDDDDAEEEFSGEEDGGDDDDEDDDPEANGEGGSDNDNDDDEDGDDDGDEDDEGDEDDEDEDDDEDDEDQPPSKKKK

SEQ ID NO: 1531 - DNA, 1110 bp, Zea mays
  misc_feature: Ceres CLONE ID no. 495027
  misc_feature: Ceres CDNA ID no. 36588594
  CDS (236)..(862): REFERENCED BY SEQ ID NO: 1532
gcacatccatccagacatccacccaccagagccggtcgatccgttcgaaacgatccgggaaagattccacgacttgggacttctcacattcccacaccgcactgtgccactgccgccggcccgccgcactagccgttgcttcttgcttctcccttcccgttcccaaggagttgtcctcgccggcggatccggggcgccgctgcaagaggaggaaggaggaggagaggataccagaatggcgtcgcgctcggcgtccaaggatatcatcacgctgcgaggctctgccgccatcgtcagcgagttcttcgggtacgcggcgaatagcatcctctacaaccgcgctgtgtacccggaggagagcttcagcaaggtgaagaagtacgggctcaccatgctgctcacccaggacgagggcgtgaagaacttcatcgccagcctcacctcccagctctcagaatggctggaggccgggaagctgcagcggatcgtgctggtcataatgagcaaagccaccagcgaggtgctcgagcgctggaacttcaacatcgtcaccgacgccgaggtcgtcgagaagggggccatcaaggagaagagcgataaggagatcatgagggagatccaggccatcatgcgccagatcgcgtcttgcatcacctacctcccctgcctcgacgagccatgcgtgttcgacgtgctggcctacacggacacggacgtcgacgctccgggcacctgggtcgagagtgacgccaagctcatcgacaacccgcagatggttaagctgcactccttcgacaccaagattcataaggtggacacgctggtgtcgtacaagaaggacgagtgggacgaggaggagtagagtttgcaccaaaagttaccctgctgctgctagagcttggcgtgaaggctgtgtgaatcgttcattcacgtctagcgtgtactgcactaatagtatactgctactttggggggaagaaaagtgtgagacgctcctaccatttagaatttcgagattgaaatgccggttttaatataacatgagtcacctttaagatctggctgcgaaaaaaaaaaaaaaaaaaaaaaaaaataaaaaaaaaaaaaaaa

SEQ ID NO: 1532 - protein, 208 aa, Zea mays
  misc_feature: Ceres CLONE ID no. 495027
  misc_feature: Ceres CDNA ID no. 36588594
  misc_feature (12)..(201): Pfam Name: HORMA PFAM Desc: HORMA domain
  misc_feature: Homolog of GI Number: 4836787 NR Desc: cell cycle checkpoint protein MAD2 homolog
  misc_feature: Homolog of GI Number: 50925301 NR Desc: OJ000223_09.14
  misc_feature: Homolog of GI Number: 60677610 NR Desc: MAD2
  misc_feature: Homolog of GI Number: 60677612 NR Desc: MAD2
  misc_feature: Homolog of GI Number: 60677614 NR Desc: MAD2
  misc_feature: Homolog of GI Number: 29150192 NR Desc: putative mitotic spindle checkpoint protein
  misc_feature: Homolog of GI Number: 37202030 NR Desc: At3g25980
  misc_feature: Homolog of GI Number: 50746731 NR Desc:  similar to Mitotic spindle assembly checkpoint protein MAD2A
  misc_feature: Homolog of GI Number: 46329473 NR Desc: MGC81153 protein
  misc_feature: Homolog of GI Number: 55623702 NR Desc:  similar to Mitotic spindle assembly checkpoint protein MAD2A
MASRSASKDIITLRGSAAIVSEFFGYAANSILYNRAVYPEESFSKVKKYGLTMLLTQDEGVKNFIASLTSQLSEWLEAGKLQRIVLVIMSKATSEVLERWNFNIVTDAEVVEKGAIKEKSDKEIMREIQAIMRQIASCITYLPCLDEPCVFDVLAYTDTDVDAPGTWVESDAKLIDNPQMVKLHSFDTKIHKVDTLVSYKKDEWDEEE

SEQ ID NO: 1533 - DNA, 796 bp, Zea mays
  misc_feature: Ceres CLONE ID no. 495070
  misc_feature: Ceres CDNA ID no. 40351011
  CDS (82)..(555): REFERENCED BY SEQ ID NO: 1534
actgctactcctacatcgatcagtgggcagcttcgttcaaccccgagaaagcttcgagctagagcgaggggcgaggagacgatggtcgggatcttctccaggttctccgccggcgcccaccgccgctccaagagcgtggccgaggctgtcgagacgctggccaccaacatgagtacaggagaatctgacccagcggcagctgttcctgcggagagcccccacggcatcgaggttggtgttgagttcaagccggtggagcgccccgtggaacctatcaatcttgatgagccagtaaaatgcccgcttcctgagccgtctatactgcacgacgggaggatatggaaggagaaaatgtcttcagttagcacgagggtgagaacagacttgccggtcgtgaaggaagggtcgcagctggagcctgacggtagcagcgctaggtcacgatctgcagttccaaggcgcgccatactgccctccgtaagcgcgcccgagcacaacatcctagcgctgcttgacgagtgcgacgtctccgggagccgtggctctgttgaatgagctcgagttgggcgtcgccagcacattgtaactaaactgcgtttgccacgagctgatctgagcacagcgaaccttacagtatgtctgaaaagaattggaactacacaacagatcttttttctggattgtatctataaatacgagtgaaagcattttggggaaattgtctcgcacttgtcggaggcagttatggttactgaactgaaacatttggttttgtgttgtaaaaaaaaaaaaaaaa

SEQ ID NO: 1534 - protein, 157 aa, Zea mays
  misc_feature: Ceres CLONE ID no. 495070
  misc_feature: Ceres CDNA ID no. 40351011
MVGIFSRFSAGAHRRSKSVAEAVETLATNMSTGESDPAAAVPAESPHGIEVGVEFKPVERPVEPINLDEPVKCPLPEPSILHDGRIWKEKMSSVSTRVRTDLPVVKEGSQLEPDGSSARSRSAVPRRAILPSVSAPEHNILALLDECDVSGSRGSVE

SEQ ID NO: 1535 - DNA, 533 bp, Zea mays
  misc_feature: Ceres CLONE ID no. 495422
  misc_feature: Ceres CDNA ID no. 36707296
  CDS (50)..(295): REFERENCED BY SEQ ID NO: 1536
acgtcttctctccggttgcgaggagggtataggatttcgccgcggcgagatgtcggcgtacgacgaggtggagatcgaggacatggagtggaacgcggagctgaaggcgtacacgtacccgtgcccctgcggcgacctcttccagatcacgctcgacgacctccgcatcggggaggagattgcgcgctgcccgtcgtgttctctcttcctcaccgtcgtttacaacgccgaggactttgctgacgccaaggagccgacccacaagccgtccccgagcccagtcgccgtcgcctgatgtggcccgtgcccggcgagatggacgcatggaaatggatctcagagcaggataacgaatgagtttttgtttggcacacaccactacgggagcatttgtactactcttagatgagtcaacccactgcatattttcagagctcaggttgttgaactatcttttttttgtgcttgacattgtaaggtgacatggacagaacatgctatgaaaaaaattgtttagtcaaaaaaaaaaaaaa

SEQ ID NO: 1536 - protein, 81 aa, Zea mays
  misc_feature: Ceres CLONE ID no. 495422
  misc_feature: Ceres CDNA ID no. 36707296
  misc_feature (5)..(59): Pfam Name: zf PFAM Desc: CSL zinc finger
  misc_feature: Homolog of GI Number: 21648335 NR Desc: Kti11p
  misc_feature: Homolog of GI Number: 62738697 NR Desc: Chain A
  misc_feature: Homolog of GI Number: 45201470 NR Desc: AGR374Cp
  misc_feature: Homolog of GI Number: 50732744 NR Desc:  similar to RIKEN cDNA 2610018L09
  misc_feature: Homolog of GI Number: 57103884 NR Desc:  similar to Zinc finger
  misc_feature: Homolog of GI Number: 61822745 NR Desc:  similar to Zinc finger
  misc_feature: Homolog of GI Number: 76608621 NR Desc:  similar to zinc finger
MSAYDEVEIEDMEWNAELKAYTYPCPCGDLFQITLDDLRIGEEIARCPSCSLFLTVVYNAEDFADAKEPTHKPSPSPVAVA

SEQ ID NO: 1537 - DNA, 433 bp, Zea mays
  misc_feature: Ceres CLONE ID no. 496040
  misc_feature: Ceres CDNA ID no. 35383185
  CDS (1)..(327): REFERENCED BY SEQ ID NO: 1538
atccagccgagaggtcgtgtgcgcgtggatctctgcgtggaagcgatgaagattacggcgctcctggtgctgaagccgtcgacctctggagccgggagctcctcgtccggcggcgagtcgggcccggaggcggtggtgctcgcgaacgcgatagacgtcagccacttcggctacttccagcgcagcgccgcccgcgagttcatcgtcttcgttgcccgcaccgtcgctcagcgcacccagccaggccagcggcagtccgtccagcacgaaggtaacctcagatctgatcggtttttggatctctataagatctggggtccgtactaaattgtccacgcgtgtggggaaaataatgctgtctgttggttcatctaatgtatgcaactgatcttactattgccgaagttgtttttggtcaaaaaaaaaaaaaaaa

SEQ ID NO: 1538 - protein, 93 aa, Zea mays
  misc_feature: Ceres CLONE ID no. 496040
  misc_feature: Ceres CDNA ID no. 35383185
  misc_feature: Homolog of GI Number: 34908586 NR Desc: putative ATGP1
  misc_feature: Homolog of GI Number: 56785197 NR Desc: putative geranylgeranylated protein NTGP1
  misc_feature: Homolog of GI Number: 32400804 NR Desc: geranylgeranylated protein ATGP1
  misc_feature: Homolog of GI Number: 57899188 NR Desc: putative NTGP1
  misc_feature: Homolog of GI Number: 47681462 NR Desc: putative SNARE protein
  misc_feature: Homolog of GI Number: 4097579 NR Desc: NTGP1
  misc_feature: Homolog of GI Number: 35187452 NR Desc: fiber NTGP1
  misc_feature: Homolog of GI Number: 22137308 NR Desc: AT5g58060/k21l19_40
  misc_feature: Homolog of GI Number: 8777319 NR Desc: ATGP1
  misc_feature: Homolog of GI Number: 72547935 NR Desc: vesicle
MKITALLVLKPSTSGAGSSSSGGESGPEAVVLANAIDVSHFGYFQRSAAREFIVFVARTVAQRTQPGQRQSVQHEGNLRSDRFLDLYKIWGPY

SEQ ID NO: 1539 - DNA, 812 bp, Zea mays
  misc_feature: Ceres CLONE ID no. 496065
  misc_feature: Ceres CDNA ID no. 40351012
  CDS (65)..(433): REFERENCED BY SEQ ID NO: 1540
ctgccatcagaatcagaccaccacacgcccgaggcccgactgcaagcgcctgagcccaagacccatggccatggccgccgccaccgtcgcagcgtcactgcccgtggcgcaagggctcgggaagcccctctgcgccggcagcaacgcgccgtcgctccgggccgtcgcgggcgcgccccgtcgtcggtcggccaggaccaggatggccgtcgtccgggcgtccgcgcaaaagcagcactcggccaaggagtgggcggccgcggctgccgtggcggcggcgctggtgctgccggaggtcgcggaggccgcgccggggatctccccgtcgctcaagaacttcctcctcagcatcgtctccggtggggtcgtgctcgtcgccatcgtcggcgccgtcgtcgccgtctctaacttcgatcccgtcaggcggggttgagctgcgacgcgagctccgacttgtttgagctagagaacctcgcagcccttgctcccgcgaacggcgggcccggttgccgtaggacgtgcgagaacgagcttccggtgtacgggacgactggagctggtcttgggaacgacagtagacttgtccgtcgtcgacgcccgtttgggtacgtcagccatggtcggagttgcagagggttgtttgatttcaaataggcagagggggtgaactgtaaagtggtgttccttttttttgttggcatgttgttctcttttcaggactttggtcgttatgtattcgctgctataaattgtgataatataagacttatctaatggttctgtttctgttactgaaaaaaaaaaaaaaaaaa

SEQ ID NO: 1540 - protein, 122 aa, Zea mays
  misc_feature: Ceres CLONE ID no. 496065
  misc_feature: Ceres CDNA ID no. 40351012
  misc_feature (85)..(122): Pfam Name: PsbX PFAM Desc: Photosystem II reaction centre X protein
MAMAAATVAASLPVAQGLGKPLCAGSNAPSLRAVAGAPRRRSARTRMAVVRASAQKQHSAKEWAAAAAVAAALVLPEVAEAAPGISPSLKNFLLSIVSGGVVLVAIVGAVVAVSNFDPVRRG

SEQ ID NO: 1541 - DNA, 722 bp, Zea mays
  misc_feature: Ceres CLONE ID no. 496492
  misc_feature: Ceres CDNA ID no. 40351013
  CDS (197)..(520): REFERENCED BY SEQ ID NO: 1542
atgacatatttgatagcgggccgcaggctaagccattccttctaactgcaactgctgctcctctttgtctcccccgttccgttctccactgaactcctcgccctcgtcgacccgtgacccgtgagcctcttccactgccgccgtcgacgagagctgcgttagccgctagggacaggtgatttcggctgcttccctcatggcgaccgcgctcaagtcgttcttgaacagccccgttggccccaagaccacccacttctggggccctgttgccaactggggcttcgtcgtcgcgggcttggttgacatgaacaagcctcctgaaatgatatctggcaacatgacagcagccatgtgcgtgtattctggactgttcatgaggtttgcatggatggtacagccccggaattatttgcttctagcatgccatgcttccaacgagagtgttcagctctatcagctgtctcgctgggctagggctcaggggtacctggagaagaaagagccagagacacaacagtaaagagggtatgcaacactgcagtgacttgttcctttagtgaccatgcagtatgccgaggagatttcatatacctagcgccgttacaagcttctgcttgcttacttttctgtgcatttggtttttacaatgcgttatgcaatgagtttcccccaaacacgcaatgagtttgggcactattttcgttttaaaaaaaaaaaaaaaa

SEQ ID NO: 1542 - protein, 107 aa, Zea mays
  misc_feature: Ceres CLONE ID no. 496492
  misc_feature: Ceres CDNA ID no. 40351013
  misc_feature (1)..(106): Pfam Name: UPF0041 PFAM Desc: Uncharacterised protein family
MATALKSFLNSPVGPKTTHFWGPVANWGFVVAGLVDMNKPPEMISGNMTAAMCVYSGLFMRFAWMVQPRNYLLLACHASNESVQLYQLSRWARAQGYLEKKEPETQQ

SEQ ID NO: 1543 - DNA, 847 bp, Zea mays
  misc_feature: Ceres CLONE ID no. 497170
  misc_feature: Ceres CDNA ID no. 25446429
  CDS (84)..(368): REFERENCED BY SEQ ID NO: 1544
atacaaaaaacagttcttcctctattctattcttacatggtatcagccgcctagatcctgccttcctctcttttgcgtccgacatgagtgatacgcagagttcattttccagcactactgctgccgtttcttccaccaccgctcttcctctctctcaagctatacacagcgtgaacatcaaatcgcttgtgtcgtacattcttgatactcaagttcacaactacggcaaatggagccaactcttcaccattattctcggtcgcttcgatcttctccaccatatcactacctctgatgttttcgcggatgatcctgcctgggtccgtgagaacctcacaggtagtgatatggaggagaagaaatggtgaaaaggagaagaaagtaaagcctgtagaagcttctgtcactgataaatttaaaaaaggagctgagaaggaaacaaaagaggagaagaaggcaagaaaggcagctgaaagaagaaaagagagaagcccggaaagcaaagaaagagctcaaaggcctgtataaatcagaaacgcagaaggctcagaaagttgccgctgttactgtaccttcttccattcgactaatgtgatggttgatctgtggcacgtttactgatgagcgacgactatgacagtcttgaatccaaaagatcgcctggacaaatgcatcaaagctacgaacgatgtatgataccagttcatatttgtgctatactcatggattttgtcgacaggatacccaatgcttgcttactatatattagttagttgaaggagaagataattatacacacttatcgaaagcatgaaagatccttaaaagaacaaaaaaaaaaaaaaaa

SEQ ID NO: 1544 - protein, 94 aa, Zea mays
  misc_feature: Ceres CLONE ID no. 497170
  misc_feature: Ceres CDNA ID no. 25446429
MSDTQSSFSSTTAAVSSTTALPLSQAIHSVNIKSLVSYILDTQVHNYGKWSQLFTIILGRFDLLHHITTSDVFADDPAWVRENLTGSDMEEKKW

SEQ ID NO: 1545 - DNA, 1179 bp, Zea mays
  misc_feature: Ceres CLONE ID no. 497382
  misc_feature: Ceres CDNA ID no. 40041236
  CDS (478)..(903): REFERENCED BY SEQ ID NO: 1546
agcccgccgcgacgtgtctcccgctcccgcgcgcccctttccggtgagcggccgccctcggctttccgctttccctcctctccctccctgccctgctgtgcactgctcggttgttcggtggccattaatttgcacgctgccaaaaatcacgcagccctcacgctttctggctcctcctcccctcctccgccgtcaggctcgccgcacagcggttttacactgtttcgacttcgcctcttcctccgcgtccgcgaccgcgaccgcgcgcgatagaccaaacagcacgggtcaagggccgaccggttcaagtctcggcggcgactcggattccactcgaccacgcggacgccatccgtgacattcaagtcccttgccgcgttttacttggccgctgagacctgagtctatcgggacacgagcagagttgcagagcggcagggaggttgctggtcgcgcggcttccaaccaactccatccatggacctcgcccggcgggaggcggacagggccgccgcagcggagttcgtggctctcgacatccggggcgagggggagtcgcctgcgaacgacccggaattgctgatggaatcctcatttgtcgccgctaaggagttcgagcgggatcggagaggagacgtcatttcttcctcctccggtgcgtatgagaagcagacagtgcctgtgcatgttgatgactgcccgagggaacacttacagccctccacgccaactgcaggtggtggtgcaaagcgtcgtcgttccagccgtcgtgttctgggatggcgtgatcccaggaaaatactcttcgcctttgcagcattgtccagcgtgggcactttgattctgctctactttacactctctatggggaagatgacaggaggtcaagctgatggccagtgatagccttgctctgtcttgcttgcaatagcattactaatatttatttgtacagaagaaactgaataactggctgctttctaatgtagtagccaccacatccctgcgtatatcttcatgatttcctgattttagatgtttgtacataggcacaggaaagttgtattacagatacagttttaagtgaaaagcttcttctcatgaggagcgttgaacagtccattttgagatgctagttaccggctgaaacaatgtttcttatttccaaaaaaaaaaaaa

SEQ ID NO: 1546 - protein, 141 aa, Zea mays
  misc_feature: Ceres CLONE ID no. 497382
  misc_feature: Ceres CDNA ID no. 40041236
  misc_feature: Homolog of GI Number: 34908762 NR Desc: P0415A04.14
MDLARREADRAAAAEFVALDIRGEGESPANDPELLMESSFVAAKEFERDRRGDVISSSSGAYEKQTVPVHVDDCPREHLQPSTPTAGGGAKRRRSSRRVLGWRDPRKILFAFAALSSVGTLILLYFTLSMGKMTGGQADGQ

SEQ ID NO: 1547 - DNA, 789 bp, Zea mays
  misc_feature: Ceres CLONE ID no. 497394
  misc_feature: Ceres CDNA ID no. 36707375
  CDS (2)..(595): REFERENCED BY SEQ ID NO: 1548
agcttctgtttggctgttgcctggcgggtggcggctgctttggtgcgctgcgcagtgcgctccgtccgtcgaccggccggccgtcccctggcccctgctcgtcgtcttcctcgggcgctcgtcttcctccgaacgcgcgcgggccgccgacctgcttgttctcctggagaagcgcgcccggcgggcaggcgacgcagtccagcggcgggttgaggaagaaggcgagcgaccggcggatccccgtccagccgtcccctgctcgtcttcctcgggccgagcgctcgtcatccactcttcctccagccctccatcggatccccgtccccggctcgtcttcctggtgctcggctgctccagtgctcctggctgctccagtcctcggcccctgctgcagtgctgctcggtcgcgtcggcacctgctgcagatctgctcgacctcggctgcttggcttcctgttccttctgctacaaattcatagtcactgatggggaaggcaaagcgtgcctcgatcttcatcaggctggtttctgcagccggcactggattcttctacgtgaagcgcaagaatcctcgtcgcatcaccgagaagcttgagtttagaaagtatgatccccgtgtgaacaagcatgttctgtttaccgaagcgaagatgaagtgaggtcttgtttctccacaatgcagaactgtaataagttgtcaaccttttgcaaccagaaacctctatgccgttattagacaaatgattaacgatcctatgtgtttttcctgctccaaaataaaaaaaaaaa

SEQ ID NO: 1548 - protein, 57 aa, Zea mays
  misc_feature: Ceres CLONE ID no. 497394
  misc_feature: Ceres CDNA ID no. 36707375
  misc_feature (9)..(55): Pfam Name: Ribosomal_L33 PFAM Desc: Ribosomal protein L33
  misc_feature: Homolog of GI Number: 38566500 NR Desc: At5g18790
  misc_feature: Homolog of GI Number: 23016261 NR Desc: COG0267: Ribosomal protein L33
  misc_feature: Homolog of GI Number: 53801500 NR Desc: 50S ribosomal protein L33
  misc_feature: Homolog of GI Number: 61099925 NR Desc: ribosomal protein L33
  misc_feature: Homolog of GI Number: 48850579 NR Desc: COG0267: Ribosomal protein L33
  misc_feature: Homolog of GI Number: 79039501 NR Desc: 50S ribosomal protein L33
  misc_feature: Homolog of GI Number: 58616944 NR Desc: 50S ribosomal protein L33
  misc_feature: Homolog of GI Number: 57238952 NR Desc: 50S ribosomal protein L33
  misc_feature: Homolog of GI Number: 48766246 NR Desc: COG0267: Ribosomal protein L33
  misc_feature: Homolog of GI Number: 56551145 NR Desc: ribosomal protein L33
MGKAKRASIFIRLVSAAGTGFFYVKRKNPRRITEKLEFRKYDPRVNKHVLFTEAKMK

SEQ ID NO: 1549 - DNA, 706 bp, Zea mays
  misc_feature: Ceres CLONE ID no. 497819
  misc_feature: Ceres CDNA ID no. 40351014
  CDS (307)..(558): REFERENCED BY SEQ ID NO: 1550
atcgatctgacggcctttctacgcgcaacgacgaagcttcgcgaatcccctccttccttcggcctcaccttcttattctccgccgaacaagtcttagacgcctaatccgtagtttacatcccgaagggcggcaagggtgatccaggccgaccatggcttacgtcgagagaggtgttgtgaaagacaagcggactatatggcgactgagcataatctcagacttctttcgggctattgtcaacttcatcagaatcttctttgacacactgttctcagtggacaaaactgacagctacaagaaagggtatggtgctggtaagaagtgggatggtggacctggtggtggtggtgggcggggcccatatggaggtggaggtggaggtggtggatttggcggcggaggtggaggtggtaggggtcctcgcactctatctgacatccaatccaatgaccacagttctctccctgcttgtggatcctgctgcggctaatgagcgcacagccgttctgcctgatgactgcttaacagatgaatacacatgcttcaatatgttctgaagaacatcatagctatcgatatgtatttcactgtcagacgattgtattatatataattagtgtgtcgtttattaacagttaatttacctgtaacttgactctggcatgattcacatggcacattcatggttgaaaaaaaaaaaaaaaa

SEQ ID NO: 1550 - protein, 112 aa, Zea mays
  misc_feature: Ceres CLONE ID no. 497819
  misc_feature: Ceres CDNA ID no. 40351014
MAYVERGVVKDKRTIWRLSIISDFFRAIVNFIRIFFDTLFSVDKTDSYKKGYGAGKKWDGGPGGGGGRGPYGGGGGGGGFGGGGGGGRGPRTLSDIQSNDHSSLPACGSCCG

SEQ ID NO: 1551 - DNA, 1174 bp, Zea mays
  misc_feature: Ceres CLONE ID no. 498422
  misc_feature: Ceres CDNA ID no. 25446986
  CDS (1)..(687): REFERENCED BY SEQ ID NO: 1552
aacttggagcagccgcccctgcccttccttgacctagccgccgctgccccttgccttccctgctccccacccggccgccgccagggactccctctcctcctctctcctctagcttctctctctcctcccctccctgcttctctctccctggcatccgacgcccgcgcttccagccgcaaggaacgcgccatcaacccgccaagacccagcccttgccgcggacctcgtcacgccgagccgaccgagcgcccctgcgcagccgaccgtccaggcgccgacacccatgccctgaagcccgtgttccgccgtgcagcgcccaggccgcgcgcgctcaagccgaacgcgtcgcgcccctgcttcccctgcacgcgagtcacgccatgcgcgcagaatggactccgcgccaggccgaccgccgagccgaccgcgcgcaggaccgcgccctgcccctgttcaagacccggctggaccccaacgtcgccagagcccgagcgcgcccctgccccaagtcatctgcgccgaggacagcaccccgtgtcgagccccgtccgtttctgcttcgcgagtaatggagtttactgtcgtccgttttctctccctcccctattactccctctccccattgatggacgccattcatggtgtttgaagacgccgcgccctctcctctcccctctctctctataaatatggccgagctcctctattcttcctcccacaaccggactccctcctccaccccgagctctccctctctctctcacgcagcagcaacaccgctcaccgtcgccggagtttgtacctcgccgcacatcgacgaccgcgcccgttcccctgctcgccggagacgtccccgaaccccgtccaaacctcgttgttacctgccgtcgaatcactccctctcgtcgacgttcatcattccctgcgcaagaacgagaactcaaggttgaagacaaccccaacccgttaatgtattttctaaattatttttgaattactttattgatcttatgaattattgtaatgttgatgcgatttgtcgattcacgcgtatgatttttagagttgcgatgtagccaaaattgaaccctgcgataatactttgaatatgcgtaggattttataattctaaaaatgaacacggttactattcaccaaaaaaaaaaaaaaaaaa

SEQ ID NO: 1552 - protein, 85 aa, Zea mays
  misc_feature: Ceres CLONE ID no. 498422
  misc_feature: Ceres CDNA ID no. 25446986
  misc_feature: Homolog of GI Number: 55239156 NR Desc: ENSANGP00000028192
MDSAPGRPPSRPRAGPRPAPVQDPAGPQRRQSPSAPLPQVICAEDSTPCRAPSVSASRVMEFTVVRFLSLPYYSLSPLMDAIHGV

SEQ ID NO: 1553 - DNA, 529 bp, Zea mays
  misc_feature: Ceres CLONE ID no. 499101
  misc_feature: Ceres CDNA ID no. 25446604
  CDS (3)..(191): REFERENCED BY SEQ ID NO: 1554
aggattcgaggaacaaccacgatgacaatcctttggtgaagatgtctgtgtgttgtcatctgctggcacgtgatgaacctgtagcaggccaagcaccgaaagacaatacgtcatcaacccatgggcttggaatccaagggtggagatctccaattgtgagccgaccttcaactgacttagaagagtgctaatcatcgttcgatgcatgatggaaggcaggggaggctgaccggcctcctccttggccaaccgaccacgtggaaggcgtctcggcataccatgtcacgtccatgcaaccattttaacccataaatcgacctaggtcatttggaggaagataaagagagaagatagttctaccgtagagagtcacctcttttcattttagtagtttacattagtccttgggagttaaattaagtctgagcttttgccttgggtccttgttgaagtcctgcatatctccctcttgtatcatcgactatcagtttgaatccaattatcttgggtgtcaaaaaaaaaaaaaaaa

SEQ ID NO: 1554 - protein, 49 aa, Zea mays
  misc_feature: Ceres CLONE ID no. 499101
  misc_feature: Ceres CDNA ID no. 25446604
MSVCCHLLARDEPVAGQAPKDNTSSTHGLGIQGWRSPIVSRPSTDLEEC

SEQ ID NO: 1555 - DNA, 1964 bp, Zea mays
  misc_feature: Ceres CLONE ID no. 499122
  misc_feature: Ceres CDNA ID no. 40041237
  CDS (40)..(1812): REFERENCED BY SEQ ID NO: 1556
acagaactgttaagctccgcaggcttcagctcgtccccaatgtcgtctgcttctcttgcatcttctctcttgtgcagcagcagtgcttctactagtagaagcgcaaccgtgccaagagtaaccaggacccctcttttttccaagaaccagtacaaaccgcctcttcggcctcttaggagtagttcagtagtaaggcgatcgttgcagcaggagcaagaggagagggtgggcccggcgtcctctgtctctgtggcctccggcgagcgacaggaggaggcgacggcgtcgcatcatgttggaggggtggatgaggccaaggcgtcgggccatgttggagaggcagataaaggaggccaaggagaaggcgacggcgaggagaagaggagcacagacgagcagcaggaggtggactggaagtcagacgaggagttcaagaagttcatgggcaatccctccatcgaggccgccatcaagttggagaagaagcgcgccgacaggaagctccgcgagctggaccgcgagcccgacgccaaccccgtcgccggcctgttccggggcttggtgaaggaccagctggcccgcgagaagcagaggctggagctggcggagcagaccttcaaggcactcgacctcaacaagctgaagagctgtttcgggtacgacacgttcttcgccgtggacgtccggaggttcggcgacggcgggatcttcatcgggaacctgcgtaagcccatcgaggaggtgcggcctaagctggagaagaagatctccgaggcggctggaacagaggtcaccctctggttcatggaggagaagaacgacgacatcacaaagcaggtctgcatggttcagcccaaggcagagatcgacgtccagctcgagatcaccaagctgagcacgccgtggggctacctcagcgccgtggcgttggcggtcacgaccttcgggacgatcgcgctcatgagcggattcttcctcaagcccggcgccacgttcgacgactacgtctctgacgtgcttcctctgttcggcggcttcctcacgatactcggcgtctctgagattgcgactaggctgacggcggcgaagtacggtgtgaagctgagcccgtcattcctcgtgccgtccaactggacggggtgcctcggcgtgataaacaactacgagtcgttgctgcccaacaagaaggccctgttcgacataccagtcgcgcgcacggccagcgcgtacgtcacgtcggtggtgcttgccgtctcggcgttcatcgtcgacggcagcttcaacggcggcgagaacgccctgttcgtgcggccggagttcttctacaacaacccgctgctgtcgttcgtgcagctggtgatcgggccctacgcagacgagctcgggaacgtgctcccgaacgcggtggagggcgtgggcgtgcccgtggacccgctggcgttcggggggctgctgggcatcgtggtgacgtcgctgaacctgctcccgatcgggcggctggagggcgggcgcatcgcgcaggcgctgttcgggcgcggcacggcggcgctgctgtcgttcggcacgtccgtcctgctgggcgcgggcgccatcagcggcagcgtgctgtgcctggcgtggggcctcttcgccaccttcatccgcggcggggaggagatcccggcgcaggacgagatcacgccgctcggcaacgagcgcctcgcgtgggggttcgtgctcgccttggtctgcctcctcacgctcttccccaacggcggcgggacctactctgcctccttcctcggcgacccgttctttagaggcggcatctagacggaatcatctccttccgtgcagtgtgcgtgtgtttataaagtttttagtaggctaataaccacactactaaccacttgagacgcaaaaaaaaaaaaaaaaaaaaaaaaaaaaaaaaaaaaaaaaaaaaaaaaagaaaaaaaaaaaaaaaa

SEQ ID NO: 1556 - protein, 590 aa, Zea mays
  misc_feature: Ceres CLONE ID no. 499122
  misc_feature: Ceres CDNA ID no. 40041237
  misc_feature (328)..(523): Pfam Name: Peptidase_M50 PFAM Desc: Peptidase family M50
  misc_feature: Homolog of GI Number: 23128478 NR Desc: COG0750: Predicted membrane
  misc_feature: Homolog of GI Number: 53765078 NR Desc: COG0750: Predicted membrane
  misc_feature: Homolog of GI Number: 34895708 NR Desc: P0019D06.11
  misc_feature: Homolog of GI Number: 23127252 NR Desc: COG0750: Predicted membrane
  misc_feature: Homolog of GI Number: 72547018 NR Desc: proteophosphoglycan ppg3
  misc_feature: Homolog of GI Number: 72547023 NR Desc: proteophosphoglycan ppg4
  misc_feature: Homolog of GI Number: 67923178 NR Desc: Peptidase M50
  misc_feature: Homolog of GI Number: 72547036 NR Desc: proteophosphoglycan 5
  misc_feature: Homolog of GI Number: 15901602 NR Desc: cell wall surface anchor family protein
  misc_feature: Homolog of GI Number: 76258449 NR Desc: Peptidase M50
MSSASLASSLLCSSSASTSRSATVPRVTRTPLFSKNQYKPPLRPLRSSSVVRRSLQQEQEERVGPASSVSVASGERQEEATASHHVGGVDEAKASGHVGEADKGGQGEGDGEEKRSTDEQQEVDWKSDEEFKKFMGNPSIEAAIKLEKKRADRKLRELDREPDANPVAGLFRGLVKDQLAREKQRLELAEQTFKALDLNKLKSCFGYDTFFAVDVRRFGDGGIFIGNLRKPIEEVRPKLEKKISEAAGTEVTLWFMEEKNDDITKQVCMVQPKAEIDVQLEITKLSTPWGYLSAVALAVTTFGTIALMSGFFLKPGATFDDYVSDVLPLFGGFLTILGVSEIATRLTAAKYGVKLSPSFLVPSNWTGCLGVINNYESLLPNKKALFDIPVARTASAYVTSVVLAVSAFIVDGSFNGGENALFVRPEFFYNNPLLSFVQLVIGPYADELGNVLPNAVEGVGVPVDPLAFGGLLGIVVTSLNLLPIGRLEGGRIAQALFGRGTAALLSFGTSVLLGAGAISGSVLCLAWGLFATFIRGGEEIPAQDEITPLGNERLAWGFVLALVCLLTLFPNGGGTYSASFLGDPFFRGGI

SEQ ID NO: 1557 - DNA, 1008 bp, Zea mays
  misc_feature: Ceres CLONE ID no. 499462
  misc_feature: Ceres CDNA ID no. 25446078
  CDS (205)..(666): REFERENCED BY SEQ ID NO: 1558
agatttgccatccctagcgccgtcaaggcctccggaaccggtcgcaagcggcgtaggacccccgccgctacagagccctcgtccgtcgcacttcgccgccgcgccggagtcatccagctcgtcgacgcctggcggagagatccccagtgcgaggggaacctccacgacgcgaggagatcagcggtcaccacccatgaaagagtgatggaagcccaaagtagtacttgcttttcaaaagtcgtgggacctaacttatggtatggcgatcgcacaagacttacacccaagcaagaagaagctgcgcttggtttgtcacgtgcctgtggctctggcattccagcatacatttgcaccatgaagaagtctaatgttgtcaagagacagatggtattttcaagacagttcagtaagcgacacatattcggtcgtctgggcacttatgggtgtgaaaccagagtttttgcaggcagggacctgttcggcagtaagctcaacttctcaatgatccatggagaactaaggcttcttggtggatggcccctctttgtgaagagtcaccgtatcgaagcaggacacgtgtgtgctttcatgttccaggaagaggaagagggcgaactgtcacttagggtgcacgtgctgggtactatgccagtgccaacaatctagcctttgcttgtttcgttgatgaggcgcgggatgaacgtcgctaacgaattatgcatcagacattagtattggaaacagcaacatgcagctagctatcttgctctggaaggtgacaagggtatctagattacagccttataggttgtgttgttgttgttctatctagataactatgtatggacatattgttcttttgtgttggagggagtaagcgttagtgttttgagacacaaagattgttattttttagactgaccgctccagttgtgcaaataggaactgaattagtggcattgttagcatgtacatgaaaacgtgatttgtaaaaaaaaaaaaaaaaaa

SEQ ID NO: 1558 - protein, 153 aa, Zea mays
  misc_feature: Ceres CLONE ID no. 499462
  misc_feature: Ceres CDNA ID no. 25446078
  misc_feature (47)..(146): Pfam Name: B3 PFAM Desc: B3 DNA binding domain
MEAQSSTCFSKVVGPNLWYGDRTRLTPKQEEAALGLSRACGSGIPAYICTMKKSNVVKRQMVFSRQFSKRHIFGRLGTYGCETRVFAGRDLFGSKLNFSMIHGELRLLGGWPLFVKSHRIEAGHVCAFMFQEEEEGELSLRVHVLGTMPVPTI

SEQ ID NO: 1559 - DNA, 624 bp, Zea mays
  misc_feature: Ceres CLONE ID no. 499858
  misc_feature: Ceres CDNA ID no. 36701740
  CDS (80)..(424): REFERENCED BY SEQ ID NO: 1560
agaagggagaaagaaaagcagtcgagcagcggtagccggtaggcgagagagtcaggattcaggacgcggcgaggccaccatgagcactctcaagttctgccgggaatgcaacaacatgctgtacccgcgggaggacaaggagacgcgcaccctcctgtacgcgtgccaaacgtgcgagcatgaggagattgccactgatacttgtgtgtacaaaagggttatccgtaagcctggtggtgagcccaaagatgtcctgaaggatgcagcaactgatcctagcctgcctcgcaccagaagcgtcagatgttacaactgcaaccatccagaagctgccttttttcaggccccgactaagggagaacaagccatgacgctgtacttcatctgctgcaacccaagctgcgggcacaggtggagggactgagaaggatctggcttggtcttcgctgcaaacctgccgtattgttagcctaggtacaagttgtgccgtcaactgacgtttgctgcaagcttataagctactataacctcgtaacaaaacgatggtttggctggagacgaaatctgttgttcctcatgataagaaacagaaacagctatgaactatcaaaaaaaaaaaaaaaa

SEQ ID NO: 1560 - protein, 114 aa, Zea mays
  misc_feature: Ceres CLONE ID no. 499858
  misc_feature: Ceres CDNA ID no. 36701740
  misc_feature (4)..(48): Pfam Name: RNA_POL_M_15KD PFAM Desc: RNA polymerases M/15 Kd subunit
  misc_feature: Homolog of GI Number: 50939271 NR Desc: putative RNA Polymerase II subunit 14.5 kD
  misc_feature: Homolog of GI Number: 77556133 NR Desc: RNA Polymerase II subunit 14.5 kD
  misc_feature: Homolog of GI Number: 46359779 NR Desc: At3g16980
  misc_feature: Homolog of GI Number: 21537166 NR Desc: RNA Polymerase II subunit 14.5 kD
  misc_feature: Homolog of GI Number: 50797497 NR Desc:  similar to DNA
  misc_feature: Homolog of GI Number: 68390787 NR Desc:  similar to DNA
  misc_feature: Homolog of GI Number: 53734145 NR Desc: Zgc:103515
  misc_feature: Homolog of GI Number: 34855683 NR Desc: similar to DNA directed RNA polymerase II polypeptide I
MSTLKFCRECNNMLYPREDKETRTLLYACQTCEHEEIATDTCVYKRVIRKPGGEPKDVLKDAATDPSLPRTRSVRCYNCNHPEAAFFQAPTKGEQAMTLYFICCNPSCGHRWRD

SEQ ID NO: 1561 - DNA, 509 bp, Zea mays
  misc_feature: Ceres CLONE ID no. 499871
  misc_feature: Ceres CDNA ID no. 40351015
  CDS (79)..(438): REFERENCED BY SEQ ID NO: 1562
gaaataaaggactatctcagcgatttccgaaccctccccacccccacacccacccgatccaaccgagtcccggcggcgatggcggcggcggcgacgaacgccgatgtggaggtggtcgacttcgacctcgatgacgacgacctcatggacgaggacgccgggccggatccagcaccgccccccgcctcccgcctccgctccaccatcgcgggcgacgacgcgccgcgtaggaccaagggccgcggcttccgcgaggaccctaactcctccgcgacccgcgactcgcgctttggcgcggggggacgcgccgacctcgactcgcttggcggccctggacccatccagtcaattgaaggatggattgtgttggttgtgtgcgcgtgtgtttcagtgatttgctcctttttttttctttctcgtggatctatcgatggatgaacatgaatgaatgaaccgaactgcacagctccgttgtgagctgatgcatgcatacaaaaaaaaaaaaaaaa

SEQ ID NO: 1562 - protein, 119 aa, Zea mays
  misc_feature: Ceres CLONE ID no. 499871
  misc_feature: Ceres CDNA ID no. 40351015
MAAAATNADVEVVDFDLDDDDLMDEDAGPDPAPPPASRLRSTIAGDDAPRRTKGRGFREDPNSSATRDSRFGAGGRADLDSLGGPGPIQSIEGWIVLVVCACVSVICSFFFLSRGSIDG

SEQ ID NO: 1563 - DNA, 1001 bp, Zea mays
  misc_feature: Ceres CLONE ID no. 499878
  misc_feature: Ceres CDNA ID no. 36588662
  CDS (87)..(740): REFERENCED BY SEQ ID NO: 1564
acggcctctctgccttttccttttccttcccccgctttctccttccttcctcccccctccccgctcccctcgcccagccaccggccatgtcggtggagacggagcgcagctccaccgagtcctccggggcctccgggctcgacttcgaggacaccgcgctcacgctcaccctccgcctcccgggctccgcgccttccgccgccgcggcctccctgtccctctcctcctcgtcgtcctccgccttccccgaccccgaccgcaagcgcgcctcctccgacgccgaccccggccgctcctccccgctcgccgcgtcctccgacgctgcaccggcacccaaggctcgtgtggtgggctggccgccggtgaggtcgtaccgcaagaacgcgctcgccgacgccgcgggctccagcaaggccgccaagttcgtcaaggtggccgtcgacggcgcgccctacctgcggaaggtggacctccaggcgtacgccggctacgaccagctgctccgcgcgctccaggacaagttcttctcccacttcaccatcaggaagttcgccgacgacgagaggaagctggtggacgcggtgaacgggacggagtacgtgcccacgtacgaggacaaggatggcgactggatgctcgtcggcgacgtcccctggaagatgttcgtggaaacctgccagcgccttcgtctgatgaaaggttcagaggccgtgaacttggcaccgagagccgcccgatgaggcacactccgttgggcgttggcacgcactggcgtcttgaaggaaagcgggaactctgctggtcttgatgaggatcttcacgtgagataggaacgtgtgtacagttgtcgccttatggtattgagttgaggaaacttggaggttccattacttgtctgtagtctctactttatatagatgcgaagaagcttgagatacacattgcctacaatgtcttttgatgaataagaccagacagcaccgataaaaaaaaaaaaaaaa

SEQ ID NO: 1564 - protein, 217 aa, Zea mays
  misc_feature: Ceres CLONE ID no. 499878
  misc_feature: Ceres CDNA ID no. 36588662
  misc_feature: Useful for making plants with modulated growth and phenotype characteristics
  misc_feature: The sequence is a functional homolog of  SEQ ID NO 738 in the  10/374,780 US patent application
  misc_feature (18)..(215): Pfam Name: AUX_IAA PFAM Desc: AUX/IAA family
  misc_feature: Homolog of GI Number: 55770681 NR Desc: putative Nt
  misc_feature: Homolog of GI Number: 34906138 NR Desc: P0509B06.6
  misc_feature: Homolog of GI Number: 50725573 NR Desc: putative iaa4.1 deduced protein
  misc_feature: Homolog of GI Number: 4887022 NR Desc: Nt
  misc_feature: Homolog of GI Number: 32396295 NR Desc: auxin
  misc_feature: Homolog of GI Number: 17976835 NR Desc: putative auxin induced transcription factor Aux/IAA
  misc_feature: Homolog of GI Number: 22531416 NR Desc: IAA16 protein
  misc_feature: Homolog of GI Number: 12484197 NR Desc: auxin
  misc_feature: Homolog of GI Number: 21592887 NR Desc: putative auxin
  misc_feature: Homolog of GI Number: 4887020 NR Desc: Nt
MSVETERSSTESSGASGLDFEDTALTLTLRLPGSAPSAAAASLSLSSSSSSAFPDPDRKRASSDADPGRSSPLAASSDAAPAPKARVVGWPPVRSYRKNALADAAGSSKAAKFVKVAVDGAPYLRKVDLQAYAGYDQLLRALQDKFFSHFTIRKFADDERKLVDAVNGTEYVPTYEDKDGDWMLVGDVPWKMFVETCQRLRLMKGSEAVNLAPRAAR

SEQ ID NO: 1565 - DNA, 2059 bp, Zea mays
  misc_feature: Ceres CLONE ID no. 499922
  misc_feature: Ceres CDNA ID no. 40041238
  CDS (110)..(1525): REFERENCED BY SEQ ID NO: 1566
actctctctctctctctctctctgaactggcatttgggccatcgatcactggtaacgcgcccgctcactcactcgcatcacactccgtaactccccgacccccgcgcgcatgggcgatccccgggcccgcacgtccaccgtcgccgccggcgagctgcggccgccggagccgccgctcgacccgctcgagttcctctcccgctcctggagcgcctcggggcgcgcgttcgcgccaccgccgccgacgccgccgccggccgcgcacgcgctcgcggccagccccatcgcggaggacccctcgtgcgagtttgacgacggggtcgccgccgccgccgccgcctccgggagctccttctccttcgcctccgcggccacgtcgcagctcatcatggagcggatcctcgcgcagtcccaggaagtggcgccgctcacctccggccggctctcgcacagcagcggcccactcaacggcggcggctctctctccgacagcccgccggtctcgccggagatcgatgacgcaaagtactgcagagcggtgagcacgccgaagccgcaggcctaccgggcgggcaacaagacggtggggcggtggctcaaggaccggaaggagaagaagaaagaggagacgcgggcgcacaacgcgcaggtgcacgcggcggtgtccgtagcggcagtggcggccgccgtggccgccgtggcggcggcgacggccgcggcctcggcgtccggcaaggacgagcgggccgcccgcacggacatggccgtggcgtcggcggcgacgctcgtggccgcgcagtgcgtggaggcggccgagtccatcggcgccgagcgggagcacctggaggccgtggtcgggtcggccgtcaacgtcaggacgcccggagacatcgtcaccgtcaccgctgctgcggccaccgcgttgagaggcgcggccacgctgaaggcgagggctctgaaggaggtgtggaacatcgcggccgtgatcccggtagagaagggcgcggtcggcggcggcagcggcggcggcggaggagggcacaaccagaagcacggcgcgtccaagcagcagcagcatcgcaagctggagagcaacggcagcagcgtcagcgacgtgtcgctggaggaggagaacaacttcctcggcatctgcagccaggagcttctcgctcgcggcaccgagctcctcaaacgcacacggaaaggcgctctgcactggaaggtcgtatcggtgtacatcaaccggatgggcctggtgatgttgaagatgaagagccggcatgtggcggggacgatcacgaagaagaagaaaagcgtggtgatcgacgtgtgcagggacgtgccggcgtgggccgggcggcacctgctggaggacggcgagcaccggcggtacttcggcctgcggaccgcggagcaccgggtgatcgagttcgagtgcggcagccagcgggagcacgagatgtggaccaagggcgtggcgcggctgctgagcatcgccggcgagcggaggcgcctggtggcgtgacctggcctggccctggactggacattggcggcctgcgtgctcgttgttcggtcgcctcgtgccgtcaccgttcgttcgtcggcgacccgcccgaccgctggggcctggggcctccatccaccgtaccgtccgtccctgtgctaggctggagcacatgcgagaggtcgaaggcaacagagcagagcggcatggcatttggcgggaggagagggggtatgtagctataggaggtagggttggcaggatcctggtgctgctagggcacgaggtttgaatccgtgtcggtgtgttttcttttctttttttctttttttatgggggggatgcgacgccggtgcatggggcgccatgccttggggtagagatgagctctctgccctattgttctctcttctcttccactctcttgtaagttttgcttctactctttttccctttttcttccatctcgttcggggtgtggccatactgggactgtagctggtgaaagataaatgctttgttctggtagtagcagtaaaaaaaaaaaaaaaa

SEQ ID NO: 1566 - protein, 471 aa, Zea mays
  misc_feature: Ceres CLONE ID no. 499922
  misc_feature: Ceres CDNA ID no. 40041238
  misc_feature: Homolog of GI Number: 66780099 NR Desc: PE
  misc_feature: Homolog of GI Number: 50926005 NR Desc: OSJNBa0067K08.21
  misc_feature: Homolog of GI Number: 66776365 NR Desc: PE
  misc_feature: Homolog of GI Number: 79494795 NR Desc: ice binding
  misc_feature: Homolog of GI Number: 66776103 NR Desc: LigA
  misc_feature: Homolog of GI Number: 66776896 NR Desc: LigA
  misc_feature: Homolog of GI Number: 66778899 NR Desc: UvrD/REP helicase
  misc_feature: Homolog of GI Number: 67988281 NR Desc: N
  misc_feature: Homolog of GI Number: 5821151 NR Desc: RNA binding protein
  misc_feature: Homolog of GI Number: 2996650 NR Desc: KIAA0324
  misc_feature: Useful for making plants that grow better in shade
  misc_feature: Useful for making plants with increased biomass and foliage
MGDPRARTSTVAAGELRPPEPPLDPLEFLSRSWSASGRAFAPPPPTPPPAAHALAASPIAEDPSCEFDDGVAAAAAASGSSFSFASAATSQLIMERILAQSQEVAPLTSGRLSHSSGPLNGGGSLSDSPPVSPEIDDAKYCRAVSTPKPQAYRAGNKTVGRWLKDRKEKKKEETRAHNAQVHAAVSVAAVAAAVAAVAAATAAASASGKDERAARTDMAVASAATLVAAQCVEAAESIGAEREHLEAVVGSAVNVRTPGDIVTVTAAAATALRGAATLKARALKEVWNIAAVIPVEKGAVGGGSGGGGGGHNQKHGASKQQQHRKLESNGSSVSDVSLEEENNFLGICSQELLARGTELLKRTRKGALHWKVVSVYINRMGLVMLKMKSRHVAGTITKKKKSVVIDVCRDVPAWAGRHLLEDGEHRRYFGLRTAEHRVIEFECGSQREHEMWTKGVARLLSIAGERRRLVA

SEQ ID NO: 1567 - DNA, 1353 bp, Zea mays
  misc_feature: Ceres CLONE ID no. 499927
  misc_feature: Ceres CDNA ID no. 40041239
  CDS (468)..(995): REFERENCED BY SEQ ID NO: 1568
ccccatttccattcctcgctcaccaagccaacagccaaatcgaattcgccgacgactctctttattcctcccgctcgccgctgccctgccgccgccgcctgagggcaagaagcgagcgagcgcaccgcggatctccatccctgccccccgcgcgcaccggtgaagacgacgagcccctcgtgaatggtgggagcccgcgcgacgtccgtcgcctcgcagccgcagccggaggaggcctccttccgcggcttcggttactgcatgcagggctggtaccaccgctgcatcggtctcgacccctgaaccccgccgccacttgcttctttgatttgatttcattcggttcgttcggtgcccctcccgtcctggatctgttgcccgagagcgcgagagcgcgcgagattcgcccccttctcttctcataggaagcaggaagcaagccgaccgctcgctgagcgccgccgccgatggccgtcgcggtgccgtccacgctgccgatgaagctctggagggcggaggcccgcggcaaggccgccgccgccgcggggcccgacgaccccctgcgcgtcctggtgacggtgaccgtcctcgggagcgccggcccgttgcggttcatcgtcttcgagggcgacacggtcgccgcgctcatccgcggcgcgctgcgctgctacgcccgcgagggccgcatgccgctgctcggcaccgacccggccggcttcgtcctctccaccgccaacggcggatccggcgcactcggagaagacgagaggatcagcttcaacgggtgccggaacttcctgctttggcagaaggctgcggctcagggtgccgccgccaaccacgccgggtccgatgctctgacggcaaccctgagccccggcaggaagggcagcggtggattcaaggctactgatccgagccatggcaggaaaggcggcggcggctggaaggctggcctgaacaagttcctcctcagcttcagcatcaaggtgtgatctatgcgtggacgagagaaggggggcgtttcttggtgtcgaggcaccgcgcaacaataaaaatgcattgcattggtttgtctgttttttcaattaatcaggattgtttgttgccgccagtgagatggcgaagtgtaattcgtcatgcgaatccgagtcgagtcgaggcaatgtgattcatcgtatgtttgagtcgagtcgtgtcagttgcttagtttatttggctgttctatttccaaatcatcggatcgggttcctctggtatcttgttaaaggttcttcattcaataataaaaaaaaaaaaaaaaaaaaaaaaaaaaaaaaaaaaaaaaaaaaaaaattaaaaaaaaaaaaaaaa

SEQ ID NO: 1568 - protein, 175 aa, Zea mays
  misc_feature: Ceres CLONE ID no. 499927
  misc_feature: Ceres CDNA ID no. 40041239
  misc_feature: Homolog of GI Number: 16226338 NR Desc: At1g70780/F5A18_4
  misc_feature: Homolog of GI Number: 13359433 NR Desc: putative senescence
MAVAVPSTLPMKLWRAEARGKAAAAAGPDDPLRVLVTVTVLGSAGPLRFIVFEGDTVAALIRGALRCYAREGRMPLLGTDPAGFVLSTANGGSGALGEDERISFNGCRNFLLWQKAAAQGAAANHAGSDALTATLSPGRKGSGGFKATDPSHGRKGGGGWKAGLNKFLLSFSIKV

SEQ ID NO: 1569 - DNA, 1003 bp, Zea mays
  misc_feature: Ceres CLONE ID no. 500363
  misc_feature: Ceres CDNA ID no. 25446605
  CDS (440)..(802): REFERENCED BY SEQ ID NO: 1570
gcgcgggatctaattccaaacagcactgcccttgcttctaccgttccccaagtgcgctccctctctcgccatccatctcgtgcacgactgggcaaccgttgccgctgtcgaggtgcccaggtcttcatcggtccctcgtcagttcttctccggcccttcgccgccgacaagctcccccagtacttatgttaccaaagcaaggctagtaaatcataccggaaagaatggtgatggcgtcttggtcttgggtctgctagatgcatgcctactgccttatcgcaaagctagcttacctggtcatacgaatttgtagtcggttctgatctaattgcaagtgcatctagtaacttggattttttcgcaaaaaaatatcgggtgttcacgcctggcccctgcgcttgcagctactgaagagacaggagcaaagagttaacaggagatgaatgcccctgaccgttatgagcgtttcgtcgtgccagagggcaccaagaaagtgtcctatgagagggatacaaagattgtgaatgctgcatcattcactgtcgaacgcgaggatcacactgtaggcaatatcctccgcatgcagttgcacagagacccaaatgttctctttgccgggtataagctccctcacccactccagtacaagatcattgttaggatccacacaacgagccagtcctccccgacgcaggcctacacccaggctatcaatgatctagacaaagagcttgagtaccttaagcaagcttttgaggatgagaagaacaggtacgaggacaggatgaagcaggggttctagatgaatggaatagtgtgggagataaacttcctgtgttagttttatcctaggcgagtcaacaatgaaacgaacgcccaaggattgtgaatgtctgatccctgaactaaggttgcttgctgtcgttttactgtcatgcttgtgtcaatattcgtattattgcaaacacaccaatggagttttacattaaaaaaaaaaaaaaaa

SEQ ID NO: 1570 - protein, 120 aa, Zea mays
  misc_feature: Ceres CLONE ID no. 500363
  misc_feature: Ceres CDNA ID no. 25446605
  misc_feature (29)..(103): Pfam Name: RNA_pol_L PFAM Desc: RNA polymerase Rpb3/Rpb11 dimerisation domain
  misc_feature: Homolog of GI Number: 50934495 NR Desc: putative DNA
  misc_feature: Homolog of GI Number: 29029080 NR Desc: At3g52090
  misc_feature: Homolog of GI Number: 54644890 NR Desc: GA19897
  misc_feature: Homolog of GI Number: 19921456 NR Desc: CG6840
  misc_feature: Homolog of GI Number: 57087487 NR Desc:  similar to DNA
  misc_feature: Homolog of GI Number: 6755362 NR Desc: polymerase
  misc_feature: Homolog of GI Number: 11595485 NR Desc: RPB11a protein
  misc_feature: Homolog of GI Number: 34873368 NR Desc: similar to DNA
  misc_feature: Homolog of GI Number: 76653872 NR Desc:  similar to DNA
MNAPDRYERFVVPEGTKKVSYERDTKIVNAASFTVEREDHTVGNILRMQLHRDPNVLFAGYKLPHPLQYKIIVRIHTTSQSSPTQAYTQAINDLDKELEYLKQAFEDEKNRYEDRMKQGF

SEQ ID NO: 1571 - DNA, 924 bp, Zea mays
  misc_feature: Ceres CLONE ID no. 500987
  misc_feature: Ceres CDNA ID no. 25446431
  CDS (235)..(612): REFERENCED BY SEQ ID NO: 1572
agccctcgctcagttggccggcctcgccttcgcatccgtccggccgcagtcaacctccggttcggagttcccattccccaccaaccaccgtctccatcgcaccgtcgcactgtcgcctcgccggccgcacctacgccgttgaagtcgctgtcgcagctgcagtgggcagtgcatcaggactcgaaggaagcatagcatcatcggtttttgtgtttcattaattctcatttcaagatggcatctgctggcctaaagccaggggtgcctgttattctacgggagctggagccatcctcagagatgttcaagcaaggagcgtcccttcgagtcacaggaagtctccagtcattcgatgtggagtccgcgactgccaccattcaagacggcagcgtaagtctgaaggttgacacccagcatctgagggatgtcagtttccgcacgaactcggtgtaccaattcattggtgaacttcagatccgtgaagttgatgatgcgattctactcgcgcgcatcggaaggaacgtcgatggcctcgacatgaacctttaccagcaggctctactcatccgacggcagcacgaagcaaagctgctgagctccaggagagcatgatctgcttgctatcttggagcaggaggcgcatggtggttgtagttattaggtttctttgtttctcaacagtgcaattgcatatgtaaacgtgaagagaactggaccaagaactggttaattgagagggtctgctgcatatgatttgcgatctctcttgccctccaaagggctgccatggcatgtgtagatgtgactgccaatttgtgatcatcttacttgcagcagaatgctggttttattttattgacatgagaacagccttgtggatcatgtttactgggatgctttgttgtgttaaaaaaaaaaaaaaaa

SEQ ID NO: 1572 - protein, 125 aa, Zea mays
  misc_feature: Ceres CLONE ID no. 500987
  misc_feature: Ceres CDNA ID no. 25446431
  misc_feature: Homolog of GI Number: 44917503 NR Desc: At1g56260
MASAGLKPGVPVILRELEPSSEMFKQGASLRVTGSLQSFDVESATATIQDGSVSLKVDTQHLRDVSFRTNSVYQFIGELQIREVDDAILLARIGRNVDGLDMNLYQQALLIRRQHEAKLLSSRRA

SEQ ID NO: 1573 - DNA, 1178 bp, Zea mays
  misc_feature: Ceres CLONE ID no. 501001
  misc_feature: Ceres CDNA ID no. 25088394
  CDS (164)..(1069): REFERENCED BY SEQ ID NO: 1574
gatttagtacaacgtctcctgtagtcctgtgtcctctcgcgcgccgcgccgcccctcaggccccagctctcgctctccagtctccaccgccgctccggtgctcccttccgggattcccctccggcgagcttgctcagctccgctccaggtttccacgtcgtccatggcgctcgtcgtgatgtgtgggcagccgtgcagcagtaaaacatcagccgccgcttgccttgctgtggcgctgcactcctcctcgcctgaccttactgtccgaatcatcgatgagtcatccctccatctcaggcgcaacgatagctacaaagatatggttgtggagaaaaacttgagagggcttcttagatcagaagttgacaggtctgtgtcacgcgacagcataattattgtcgactcgttgaataatattaaggggtaccgctatgagttgtggtgtcttgcgcgtgcatctggtgtaagatattgtgtgcttttttgtgatacagaagtggaccattgtaaggaatggaacaacaaccgccaggagaaaggggaaccagcatatgatactaatatatttgaagatcttgtaagtagatttgagaagccagatagacgcaatcgttgggattcccctctttttgaattgttcccatctagagatgaattagtggaaacagctcctgatattgctgaagctgtgtcatatttgacaaaaaaagtggattccaaaacaagagatgtaaaagttctccagcctacaatagccactcagacggtgcgaacaacagaggctaattccctctatgagatggacaaggcaacgcaggaggtggtcaatgcaattgttgaagcacagtcatgcggtcttgggcttgctgtgaataagatctccattggacccaacttgccaactatcaagcttgagagatctgttggcctacctgagctcagaagcctgcggagaactttcatcaagctggcagggcagtacagtctgagtgggccaccaccaccgacagatgctgacagcgcaaagaggatgtttgtcgactacttaaaccgtgaacttggtgcatgataattttcattcgcctgcgttgcatgaacactatgtagcatgtggttaactttggggaatagataattgaagacaacttgattgtacttgttcaaaaaaaaaaaaaaaa

SEQ ID NO: 1574 - protein, 301 aa, Zea mays
  misc_feature: Ceres CLONE ID no. 501001
  misc_feature: Ceres CDNA ID no. 25088394
  misc_feature: Homolog of GI Number: 23504265 NR Desc: DRL1 protein
  misc_feature: Homolog of GI Number: 68438715 NR Desc:  similar to CG3587
  misc_feature: Homolog of GI Number: 28850452 NR Desc: similar to similarity to S. cerevisiae kti12 protein
  misc_feature: Homolog of GI Number: 68438717 NR Desc:  similar to CG3587
  misc_feature: Homolog of GI Number: 62858797 NR Desc: LOC549045
  misc_feature: Homolog of GI Number: 66539109 NR Desc:  similar to CG3587
  misc_feature: Homolog of GI Number: 72005680 NR Desc:  similar to CG3587
  misc_feature: Homolog of GI Number: 45185181 NR Desc: ABL049Cp
  misc_feature: Homolog of GI Number: 48116535 NR Desc: similar to CG3587
MALVVMCGQPCSSKTSAAACLAVALHSSSPDLTVRIIDESSLHLRRNDSYKDMVVEKNLRGLLRSEVDRSVSRDSIIIVDSLNNIKGYRYELWCLARASGVRYCVLFCDTEVDHCKEWNNNRQEKGEPAYDTNIFEDLVSRFEKPDRRNRWDSPLFELFPSRDELVETAPDIAEAVSYLTKKVDSKTRDVKVLQPTIATQTVRTTEANSLYEMDKATQEVVNAIVEAQSCGLGLAVNKISIGPNLPTIKLERSVGLPELRSLRRTFIKLAGQYSLSGPPPPTDADSAKRMFVDYLNRELGA

SEQ ID NO: 1575 - DNA, 596 bp, Zea mays
  misc_feature: Ceres CLONE ID no. 502125
  misc_feature: Ceres CDNA ID no. 25446432
  CDS (79)..(411): REFERENCED BY SEQ ID NO: 1576
ttttttttccggcctcccattcctcgcgcggcgaccacccgattcgaagcgtgcggagagaccgaagaagcgggagagatggctcgtaccaagcagactgctcgcaagtccacgggagggaaggctcccaggaagggtacgggcagcttcggcaagcgccggaacaaaacgcacacgctgtgcatccgctgcggccgccgcagcttccacctccagaagagtacctgctcctcctgcggctaccccgcggcccgcatccgcaagtataattggagtgtgaaggccatcaggcgcaagaccactggtacgggaaggatgaggtacatgcgacacgtgcctcgccgtttcaagagcaacttcagagaagggactgaggctgccccaaagaagagtgctgctgctgccaactaagtgtggatgttgccatcaagaacctcagaagctagacgttggatctttttgattgaattgtacttctgaactatttgcccgtaatactattacagtactggtttaccgtgtcttgaattgaagccagacgccatcttctttgggagcgtgatttatatattaccccaataaaaaaaaaaaaaaaa

SEQ ID NO: 1576 - protein, 110 aa, Zea mays
  misc_feature: Ceres CLONE ID no. 502125
  misc_feature: Ceres CDNA ID no. 25446432
  misc_feature (18)..(71): Pfam Name: Ribosomal_L37e PFAM Desc: Ribosomal protein L37e
  misc_feature: Homolog of GI Number: 50904689 NR Desc: putative 60S ribosomal protein L37
  misc_feature: Homolog of GI Number: 50915832 NR Desc: putative ribosomal protein L37
  misc_feature: Homolog of GI Number: 44662866 NR Desc: ribosomal protein L37
  misc_feature: Homolog of GI Number: 21553481 NR Desc: putative ribosomal protein
  misc_feature: Homolog of GI Number: 21537060 NR Desc: putative 60s ribosomal protein L37
  misc_feature: Homolog of GI Number: 21280805 NR Desc: putative 60S ribosomal protein L37
  misc_feature: Homolog of GI Number: 24642107 NR Desc: CG9091
  misc_feature: Homolog of GI Number: 45934571 NR Desc: 60S ribosomal protein L37
  misc_feature: Homolog of GI Number: 54643623 NR Desc: GA21535
  misc_feature: Homolog of GI Number: 72538603 NR Desc: GA21535
MARTKQTARKSTGGKAPRKGTGSFGKRRNKTHTLCIRCGRRSFHLQKSTCSSCGYPAARIRKYNWSVKAIRRKTTGTGRMRYMRHVPRRFKSNFREGTEAAPKKSAAAAN

SEQ ID NO: 1577 - DNA, 877 bp, Zea mays
  misc_feature: Ceres CLONE ID no. 502127
  misc_feature: Ceres CDNA ID no. 25445744
  CDS (64)..(558): REFERENCED BY SEQ ID NO: 1578
atctagggtttcgcacccaacacccggagtgagcggcggcgagggatcggatcgtcggcggcgatggaggacgaggtgcagagggcagcggtgagcagttggaacgagcttgactatgaggcggaagcgcgtttggtggcggaggcgagggcgtcgtgggataggaaggcaaggggggaggaggaggatgaagaagaacatgatcctgagatgaccttggactactacgcctaccaggctaaaaagtttcgcaacacctggaacatcctctattttggccacttcggtcgcttcgaggacaccacaaggatccctcctatgcgctttacagagaagccgcctgactccccggcgtacccgcgcctccgcctggaaccctttagccgagcggagcaaggaaagaaatggggaagggtacgggcagcttcggcaagcgccggaacaagacgcacacgctctgcatccgctgcggccgccgcagcttccacctccagaagagcacctgctcctcctgcggctaccccgccgcccgcatccgcaagtataactggagtgtgaaggccatcaggcgtaagacaactggtaccggaaggatgaggtacatgcgacacgtgcctcgccgtttcaagagcaacttcagagaagggactgaggctgccccaaagaagggtgttgctgctgccaactaagtgtggtcttgctgccatcaagaagcgctagaacttgagactttttgattgaattgtacttctgaactatttagcccataatactatgcttgaattaatttcagacgccctggagaggtatatgtatctttttggtgagaatggttcagtacgctctagccttgaaaagcataaaaaaaaaaaaaaaa

SEQ ID NO: 1578 - protein, 94 aa, Zea mays
  misc_feature: Ceres CLONE ID no. 502127
  misc_feature: Ceres CDNA ID no. 25445744
  misc_feature (2)..(55): Pfam Name: Ribosomal_L37e PFAM Desc: Ribosomal protein L37e
  misc_feature: Homolog of GI Number: 50904689 NR Desc: putative 60S ribosomal protein L37
  misc_feature: Homolog of GI Number: 50915832 NR Desc: putative ribosomal protein L37
  misc_feature: Homolog of GI Number: 44662866 NR Desc: ribosomal protein L37
  misc_feature: Homolog of GI Number: 21553481 NR Desc: putative ribosomal protein
  misc_feature: Homolog of GI Number: 21280805 NR Desc: putative 60S ribosomal protein L37
  misc_feature: Homolog of GI Number: 21537060 NR Desc: putative 60s ribosomal protein L37
  misc_feature: Homolog of GI Number: 24642107 NR Desc: CG9091
  misc_feature: Homolog of GI Number: 45934571 NR Desc: 60S ribosomal protein L37
  misc_feature: Homolog of GI Number: 38048279 NR Desc: similar to Drosophila melanogaster CG9091
  misc_feature: Homolog of GI Number: 54643623 NR Desc: GA21535
MGKGTGSFGKRRNKTHTLCIRCGRRSFHLQKSTCSSCGYPAARIRKYNWSVKAIRRKTTGTGRMRYMRHVPRRFKSNFREGTEAAPKKGVAAAN

SEQ ID NO: 1579 - DNA, 1854 bp, Zea mays
  misc_feature: Ceres CLONE ID no. 502363
  misc_feature: Ceres CDNA ID no. 40351016
  CDS (184)..(1461): REFERENCED BY SEQ ID NO: 1580
taactgcgtgactgcaccattgaggacgccaattcataacttccttccttccttccttccgagcaccggattcgagcaaaagcatccgcgcgtgcgcccactccctccgcctgccctctgatcctcctcgcctccgcccttggctccaatgcgctgtcctacctggaggccgtgctttgctttatgattctcatgttcatatttgagacgtatcttgacatccgtcagcatagggccctcaagctgccaactttgcccaaacccctgctgggagtaatcagtgatgaaaagtttgaacgctctagagcttatagccttgataaaagctacttccattttgtccatgagtttgtgactattttaatggataccacaatactgtactacagatccgttccctggttttggaagaaatctggagagttagttaccaatgttgggctgaatgctgagaatgagataatacacacccttgcattcttagctggtgccatggtttggtcaaagattacagacttgtcgttctctatttattcaacttttgttatagaggctcgacatggttttaacaagcaaactatatggctcttcatcagggatatgatcaaaggagttttactattcatgatactggggccaccaatcgtggctgctatcatctacatagtacagattggaggaccctacctggatatatatctctttggttttatgtttgcattagctcttctgatgatgacaatataccccattgtgatagctcctctgttcaacaagttcacccctcttcctgaaggagtcctcagggagaaaatagagaagctggcagcttccctcaaatttcctttgaaaaaacttttcgtggtagatgggtctaccagatcaagccacagtaatgcttacatgtatggattttttaagaataaacgcatagtactctatgacacattgattcagcagtgtaccaatgaggatgagatagtttctgttattgcacatgaacttgggcactggaaactcaatcatattgtctattcctttgtagctgtccagctgcttatgtttcttcaatttggaggatatactctactgcttatgtttcttcaatttggaggatatactctagtaaggaactccaaagatctatttcaaagttttggcttcgaggatcagccaataataactggactgatcattttccagcacaccagaatacccatccaacaccttctgagcttttgcctgaaccttgtcagcagagcatttgaatttcaggctgatgcctttgccaagaaccttggatatgcccctcagctccgagcggcccttgttaaactacatgaggagaacttgtctgcaatgaacaccgatccttggtattcggcatatcactactcccacccacctctcgtcgaaaggctgcaagctcttgaagattcagacgccaaaaaaaatgactaacgccaactgtcagagctgttgttcctgatggggcgaagccttgatccttgtacgaggtttccatgagggtacgattcattggttgagtgttgtaaaagctctgtaagcatccagcacgaagatgcttacatgcacgttgagaaatattataggttattgaggactctctctgttttttagttgtcgctggataattcaattttgtattatccagcgacaactaaaaataaacagagggagtataagcgaaccagctatgcaaaactgatgcatcttcctgtgttgaagtcacttgccactcaaagctacactacatgcacgtttcggggcttcgggcagacagtgagacgcatctgaatggaactctttcaaaaaagaaaaaaaaaaaaaaaa

SEQ ID NO: 1580 - protein, 425 aa, Zea mays
  misc_feature: Ceres CLONE ID no. 502363
  misc_feature: Ceres CDNA ID no. 40351016
  misc_feature (211)..(421): Pfam Name: Peptidase_M48 PFAM Desc: Peptidase family M48
MILMFIFETYLDIRQHRALKLPTLPKPLLGVISDEKFERSRAYSLDKSYFHFVHEFVTILMDTTILYYRSVPWFWKKSGELVTNVGLNAENEIIHTLAFLAGAMVWSKITDLSFSIYSTFVIEARHGFNKQTIWLFIRDMIKGVLLFMILGPPIVAAIIYIVQIGGPYLDIYLFGFMFALALLMMTIYPIVIAPLFNKFTPLPEGVLREKIEKLAASLKFPLKKLFVVDGSTRSSHSNAYMYGFFKNKRIVLYDTLIQQCTNEDEIVSVIAHELGHWKLNHIVYSFVAVQLLMFLQFGGYTLLLMFLQFGGYTLVRNSKDLFQSFGFEDQPIITGLIIFQHTRIPIQHLLSFCLNLVSRAFEFQADAFAKNLGYAPQLRAALVKLHEENLSAMNTDPWYSAYHYSHPPLVERLQALEDSDAKKND

SEQ ID NO: 1581 - DNA, 856 bp, Zea mays
  misc_feature: Ceres CLONE ID no. 502438
  misc_feature: Ceres CDNA ID no. 25446433
  CDS (279)..(542): REFERENCED BY SEQ ID NO: 1582
aaattcctatgaatttaaataaataaaaaaaacggatactgcgggataccttatatccctaatttcccttgcgcactgcttctccccacggcgcacgcgcacacgcgcaccatctcctgcgcgccgccagcccgtcaccgcttggagacccgcgcagccgcgcttccctgcgcgccgccagccgtcgccgatccgtggccgcgtccgccgccgccagctctcaggtcgcgccgtcagccagcccgtctgccgtcgtgaggcttttttttgcatttacaatgtcgcagcttggcacatgttcattgcctggagctgcaatctatggcacttcaactaggaaatttggaggtttggagtttcagcaacataaagttaatcacatctcatttggtcggaaagcgtctgttaaagcaacattgaaaactgtgaggtgcaatgccactcaaacacaaagcgtccaaaagaaatcttcaagtgcaactattcagcgtgataagaaaggaaatgtacaagggccaaaactggatgacggcgcgacctgagagccggcggcggcggccgggtccgacggcgcggccgcggcgcaggcggcggccttccggaaggccaacgagggcaaggcgtagctgcctgtgctgtgcatatgcatgcgtggttaattagctggagtgctccggtcgcttaatctgttggatttggtggtttgttggttgtgttgtgtgcgtgtgtttcagtgatttgctcctttttttttctttctcgtggatctatcgatggatgaacatgaatgaatgaaccgaactgcacagctccgttgtgagctgatgcattcatgcatgcaacaaaaaaaaaaaaa

SEQ ID NO: 1582 - protein, 87 aa, Zea mays
  misc_feature: Ceres CLONE ID no. 502438
  misc_feature: Ceres CDNA ID no. 25446433
MSQLGTCSLPGAAIYGTSTRKFGGLEFQQHKVNHISFGRKASVKATLKTVRCNATQTQSVQKKSSSATIQRDKKGNVQGPKLDDGAT

SEQ ID NO: 1583 - DNA, 839 bp, Zea mays
  misc_feature: Ceres CLONE ID no. 502480
  misc_feature: Ceres CDNA ID no. 40351017
  CDS (300)..(629): REFERENCED BY SEQ ID NO: 1584
aatgtgttcgatgaaatcgcttacccaagttatcttatctaaggaagtactgcggcggtcagaattacagctaaatgttgtagacgggcaactgtgcttccaaacttgaaatctgacggcaggacaggcaagtgtcatgaagattgagggaaacttgcatgtttgatatacccagctgctttctgtaacgaaaaactcgtgatcattttgttgaattggtcactgtcagggagggatctacttgtcagtttttggtattaaggctgctggccttcccttgcatggtatctgtagaataaatgggagaagcacactcggatgaattttgccattgccaggggtgtgctggcaagtatgcactactcagagacgaagaaaacccacgattggcaatctttgagaggcggctgccttgctgtggttgtgggataggatggtctacttttcttttaggtttcttgtgtcctttgatttggtactttgcagccatactttactgctgcaagtactacaacaaggatcctcgagagcgccctggtctagctgcatcagctgttgcggctctcatcttcacagttctggcaattatcgctctctctgtggcactgataatctgtgtatacaagtagtacccaaagcgaggaaaacgcggtcgctggacctggaattcagaagaaacttgtaatttgagtgatagtagcatgcctttgcagtcatcctacatgcatcagtatcactatagcaagttgttgaattaaatgctgctaccgtcccggttgaccagtcggctgccgttgtttatcaacgaggatgttcattgctcaaaaaaaaaaaaaaaa

SEQ ID NO: 1584 - protein, 109 aa, Zea mays
  misc_feature: Ceres CLONE ID no. 502480
  misc_feature: Ceres CDNA ID no. 40351017
MGEAHSDEFCHCQGCAGKYALLRDEENPRLAIFERRLPCCGCGIGWSTFLLGFLCPLIWYFAAILYCCKYYNKDPRERPGLAASAVAALIFTVLAIIALSVALIICVYK

SEQ ID NO: 1585 - DNA, 485 bp, Zea mays
  misc_feature: Ceres CLONE ID no. 502506
  misc_feature: Ceres CDNA ID no. 35383186
  CDS (114)..(329): REFERENCED BY SEQ ID NO: 1586
ctctcgaaaccctagtcctctgttacttctcccgccgccgccaatcccctcccgttctccgccaccgccaatcccctcccgtcctccgccacctctgctgagagcgagaagagatggatcaggtgaaggatacggacaaggtggtgctcatggaggagtctatggaagcggtggtggcggtggaggtggcggtggtcaaggtggtggtggctctggctatgggtctggatccggctccggttatggaggtggcaacgacaacggacattactaggctctttttcagagctaggaacatgttatacaaatatgtcaccagacatgagtaggtcttgctgcatgggatgctagttgtgtccatcgtgtgtgtaacaccgcaaggcttgtaatttgtcctgtaaactgcttgctgctttacattactggcaacaactaagtgataaataaaaatcatctatggaattatagcaaaaaaaaaaaaaaaa

SEQ ID NO: 1586 - protein, 71 aa, Zea mays
  misc_feature: Ceres CLONE ID no. 502506
  misc_feature: Ceres CDNA ID no. 35383186
  misc_feature: Homolog of GI Number: 31432402 NR Desc: putative glycine
  misc_feature: Homolog of GI Number: 78708763 NR Desc: transposon protein
  misc_feature: Homolog of GI Number: 20245 NR Desc: Glycine
  misc_feature: Homolog of GI Number: 31432403 NR Desc: putative glycine
  misc_feature: Homolog of GI Number: 78708764 NR Desc: transposon protein
  misc_feature: Homolog of GI Number: 77554396 NR Desc: transposon protein
  misc_feature: Homolog of GI Number: 31432412 NR Desc: putative glycine
  misc_feature: Homolog of GI Number: 31432426 NR Desc: putative glycine
  misc_feature: Homolog of GI Number: 51090508 NR Desc: putative glycine rich protein
  misc_feature: Homolog of GI Number: 77554397 NR Desc: transposon protein
MDQVKDTDKVVLMEESMEAVVAVEVAVVKVVVALAMGLDPAPVMEVATTTDITRLFFRARNMLYKYVTRHE

SEQ ID NO: 1587 - DNA, 1373 bp, Zea mays
  misc_feature: Ceres CLONE ID no. 502706
  misc_feature: Ceres CDNA ID no. 40041240
  CDS (117)..(836): REFERENCED BY SEQ ID NO: 1588
atggtcctctctcccatgcgctcggcctccagttctccgcgggagcacgcctagccgagcggctcttccccacggcgcccttctccctcatcgcgacgctccggctcagctcatccatggcggctcctctgtccggcgtttctccctcgcgcccagctcggagttcctccctgcgctcatctccatatcgagcgtctccagctcttgcgcctggctggatcttccctcggctcgccgcgcccctgtttccgccggcgttccttccacggccgcgcgcaatgtttttctgctcgtgcacgcccgtctcccatggccgcggcgccctgactcctgctctcctgcgtcgcgcccgagcaccctgcttcctgctcgccggccaccagaaagcttcctgcgcgcagggcgttctcgtctcgacctccttccccgcgcgcaactttttctttgccccttgcgcacagccgccaccagtcgagcttcatgtacgcgcccagcgcgcgcccagctgtgaatcttccctggcgcgctcgcccatgccgtgcacaaccaagatcgcctacgcgccccatctccctctggatcccctgcaagctccttgcgcgggccgcgttcctctgctcggccatggccgcgcgccggcgctattctctgcgtgcgccctgcctttttccccgcgcgcagcttgtcccaatgccgagcttggccctgctctctgctccagctcgcagtcgctgcgttgccgagtccctggccgcgtctgctggttgtgtcctttcgtgggaacgctcactttgccgtggtcctgcgctttcttctcgatctggcatgggttttagttatcggtcaagcgcgcccccgttttctttgtcttgtcgttgtcgttcggtcaccccacctcgatgccggtccctacatgttgtctccgacttatgttcgcgctaataaaagaatcccaagaagatatagcgaagcaagccactggtcgatgcccaagtgctcggtgaaaggccaaaacaagaatcatcgccgtttatgcggagttctagttaatatggagagattccaagagttgtggatggaagagaaagtgaagctccgttcaatactcgtcacctgtttgatcgaagacttcaatccaagactgtcgtcgttcttccaataaattttatgatcgtgaaataagacgcttagtttgcgtatgaagtttaagttagaattacccgggatgcgaggtgtgcttcgaggagtttagttaccgagtatattcgaactagttctattttgcagagtgtagaatttcggtgacgcgtaggttaaatttagtattttatgcaattatcgataaatttatcgatgcaaaaaaaaaaaaaaaa

SEQ ID NO: 1588 - protein, 239 aa, Zea mays
  misc_feature: Ceres CLONE ID no. 502706
  misc_feature: Ceres CDNA ID no. 40041240
MAAPLSGVSPSRPARSSSLRSSPYRASPALAPGWIFPRLAAPLFPPAFLPRPRAMFFCSCTPVSHGRGALTPALLRRARAPCFLLAGHQKASCAQGVLVSTSFPARNFFFAPCAQPPPVELHVRAQRAPSCESSLARSPMPCTTKIAYAPHLPLDPLQAPCAGRVPLLGHGRAPALFSACALPFSPRAACPNAELGPALCSSSQSLRCRVPGRVCWLCPFVGTLTLPWSCAFFSIWHGF

SEQ ID NO: 1589 - DNA, 1965 bp, Zea mays
  misc_feature: Ceres CLONE ID no. 503185
  misc_feature: Ceres CDNA ID no. 40041241
  CDS (78)..(1622): REFERENCED BY SEQ ID NO: 1590
cttcctcttctccagcctccctctgccaacaactctcgcgagggcgccgtccgcctccgcctccgtctcggggagcgatgacgatcgcgcgacgcctgctccgatccaatgcctccgcccaggcaatcagcttactgaagcatgtaactggcactgcaagtttgcaaggccatgcacatagtccgttggatgcgtcagtcagacattttagttcagctccatctgcccagtctgacacaactgaagaaaatgggttcaagggccatggcatgttggcaccttttacagctggctggcagagcaatgatttgcatcctctaattattgagagatctgagggttcctatgtttatgacatcaatgggaataaatacctggattctcttgcagggttatggtgcacagctttaggtggtagcgagcctcgattagtcaaggcagcaactgagcaattaaacaatttgcccttctaccattccttttggaaccgcacaaccaaaccttcattggaccttgcacaggagatccttagcatgttcactgcaagggaaatgggaaaagttttcttcacaaacagtggttcagaagcaaatgactctcaggtcaaactagtatggtattataacaacgcattggggaggccagacaagaagaaatttattgcacgatcaaaagcataccatggatctacactgatatcagcgagcctaactggtcttcctgccctgcaccagaagtttgatctaccagcaccttttgttctgcacactgactgccctcactactggcgatatcatcttcctggtgagacggaagaagaatttgcgactagacttgccaccaatttagagaatcttattctcaaagaaggaccagaaacaatcgctgctttcattgctgaacctgtgatgggtgccggtggtgtcatccctcctccaaagacctattttgacaaggttcaagcagtggtcaagaagtatgacattcttttcatagcagatgaggtcatcactgcatttggaaggttgggaactatgtttggatgcgattattataacatcaagccagatctagtttccttggccaaggctctttcaaatgcctatgtacccatcggggcaactcttgttagcccagagatatcagaggtgattcactcccagagcaataagctcgcctcatttgctcatgggtttacatactctggtcatccagttgcctgtgcagtggcaatagaagctttgaaactttaccgcgaaagggatattcctggtcatgtcaagcaaatcgctccaaagttccaggacggaattagggcgttggcagacagcccaatcatcggggagatacgtggcttagggatgattatgggaaccgaattcaccaacaacaaatcaccggctgatctattccctgccgaatggggggttggtgccatctttggagaggagtgccagaagcgcggcatgctggtcagggttgctggcgacgccatcatgatgtcgcccacgctgatcatgacgcccggcgaggtcgacgagctggtgagcatctacggggaagccctcagggccacggaggagagggtgtcagacctgaagatgaaatccgagaagaactaaccaaaagggcgaggacgacgacgataacgcctggcggcaacggtagcagctgatgtacaggtgaataaaatggtcgtgactgcgagatggcaataatgcgcgggaatggtcgacggtcgtctctgatcttggagtgcaaggtcaagctgctcggtcgctaaacaacggtggctgaacttttaaacgggacatagatgtttttttccctaagcaatggcagtatctcaaatgtttgctgccctgtagtttctgaacataaagggttagcagacgttataaaatttaaattttatcgtaaaacagttgttattctcaaaaaaaaaaaaaaaaaaaaaaaaaaaaa

SEQ ID NO: 1590 - protein, 514 aa, Zea mays
  misc_feature: Ceres CLONE ID no. 503185
  misc_feature: Ceres CDNA ID no. 40041241
  misc_feature (82)..(437): Pfam Name: Aminotran_3 PFAM Desc: Aminotransferase class
  misc_feature: Homolog of GI Number: 50928703 NR Desc: OSJNBa0008M17.3
  misc_feature: Homolog of GI Number: 11994739 NR Desc: aminotransferase
  misc_feature: Homolog of GI Number: 12963338 NR Desc: aminotransferase
  misc_feature: Homolog of GI Number: 14030435 NR Desc: gamma
  misc_feature: Homolog of GI Number: 29837282 NR Desc: gamma
  misc_feature: Homolog of GI Number: 29837286 NR Desc: gamma
  misc_feature: Homolog of GI Number: 50904709 NR Desc: putative 4
  misc_feature: Homolog of GI Number: 23296654 NR Desc: putative aminotransferase
  misc_feature: Homolog of GI Number: 33340007 NR Desc: putative aminotransferase
  misc_feature: Homolog of GI Number: 50942161 NR Desc: putative gamma
MTIARRLLRSNASAQAISLLKHVTGTASLQGHAHSPLDASVRHFSSAPSAQSDTTEENGFKGHGMLAPFTAGWQSNDLHPLIIERSEGSYVYDINGNKYLDSLAGLWCTALGGSEPRLVKAATEQLNNLPFYHSFWNRTTKPSLDLAQEILSMFTAREMGKVFFTNSGSEANDSQVKLVWYYNNALGRPDKKKFIARSKAYHGSTLISASLTGLPALHQKFDLPAPFVLHTDCPHYWRYHLPGETEEEFATRLATNLENLILKEGPETIAAFIAEPVMGAGGVIPPPKTYFDKVQAVVKKYDILFIADEVITAFGRLGTMFGCDYYNIKPDLVSLAKALSNAYVPIGATLVSPEISEVIHSQSNKLASFAHGFTYSGHPVACAVAIEALKLYRERDIPGHVKQIAPKFQDGIRALADSPIIGEIRGLGMIMGTEFTNNKSPADLFPAEWGVGAIFGEECQKRGMLVRVAGDAIMMSPTLIMTPGEVDELVSIYGEALRATEERVSDLKMKSEKN

SEQ ID NO: 1591 - DNA, 2675 bp, Zea mays
  misc_feature: Ceres CLONE ID no. 503649
  misc_feature: Ceres CDNA ID no. 36590504
  CDS (128)..(2425): REFERENCED BY SEQ ID NO: 1592
ctctacaaatgaaacccctgagacagtcagacgtcccgtgctcgtcatcaccacccacatctcagttcaccccggcgtcgtcctcttcccccggcgctactctcccgctccacgttccaaaggaaagatggcgtcccatattgttggataccctcgcatgggccccaagagagagctcaagtttgccttggagtctttctgggatgggaagagcagcgccgatgatttagagaaagttgcctctgacctcaggtctagcatctggaagcaaatgtcagaagctgggatcaagtacattcccagcaacaccttctcgtactatgaccaggtccttgataccacggccatgcttggtgctgtcccagagcgctactcttggactggaggcgagattggcttgagcacctatttctcaatggccaggggaaatgccactgtccctgctatggagatgaccaagtggtttgatacaaactaccactttattgtccctgaacttggcccaagcaccaagttcacatacgcttctcacaaggctgtttctgagtacaaggaggcaaaagcgctcggtattgatactgtcccagtgcttgttggaccagtgtcatacttgctcctctctaagcctgccaagggtgtggagaaatctttctctcttctttcgcttcttggcagcattcttcccatctacaaggaggttgtttctgaactgaaggcagctggtgcttcatggattcagtttgatgagcctacccttgttaaagaccttgatgttcacgaattggcagcattctcttcagcatatgctgaactagagtcggcattctctggattgaatgtgcttatcgagacatactttgctgacattcctgctgagtcctacaagaccctcacgtcattgagtggtgtgactgcttacggttttgatcttatccgtggagccaagacccttgatcttatcaggagcagcttcccctctgggaagtacctcttcgctggtgttgtggatggacgcaacatttgggctgatgatcttgctgcatctcttagcactcttcagtctcttgaggccgttgctggcaaggacaaacttgtggtgtcaacctcctgctcactgatgcacaccgctgttgatcttgtcaatgaaactaagctggatgatgagattaagtcatggcttgcatttgctgcccaaaaggttgtcgaggttaatgcccttgcgaaggctttggcaggccaaaaggatgaggcttactttgcagccaatgctgctgctcaggcctcaaggagatcatcacctagagtgacaaacgaggaggtccaaaaggctgcagctgctttgaagggttctgaccaccgccgtgctaccactgttgctgctagattggatgctcagcagaaaaagctcaaccttcctgtccttcccacaaccacaattggttcattccctcagactgtggaactcaggagggtccgtcgtgagtacaaggcaaagaagatctccgaggaggaatacatcagtgccatcaaggaagaaatcagcaaggttgtcaagatccaagaggagcttgacattgatgtgcttgtgcatggagagccagaaagaaatgacatggttgagtacttcggtgagcaattatctggttttgcattcactgccaacggatgggtgcaatcttatggatcacgttgtgtgaagccacccattatctatggcgatgtcagccggccgaaccccatgactgttttctggtccaagacggcacagagcatgaccgctcgtcccatgaagggaatgttgactggtccagtcacaatcctcaactggtcatttgtcaggaacgatcagcctaggtttgagacatgctaccaaatagctcttgcaataaaaaaggaggttgaggatcttgaggctgctggtattcaggtgatccagattgatgaggcagctctaagggagggtctgccactgcgcaagtcagagcatgcattctacctggactgggctgtccactctttcagaatcaccaactgcggagtccaggacaccacccagatccacacccatatgtgctactccaacttcaacgacatcatccactccatcatcgacatggacgcagatgtgatcaccatcgagaactcccggtccgacgagaagctactgtccgtgttccgcgagggtgtgaagtacggagctggaatcggtccaggtgtctacgacatccactcgcccaggatcccctccaccgaggagatcgcggaccgcgtcaacaagatgctcgccgtgctcgacaccaacatcctctgggtgaaccctgactgcggtctcaagacacgcaagtacacggaggtgaagcctgccctgaccaacatggtctccgccaccaagctcatccgcacccagctcggcagcgcgaaatgagtcagatttggtagatccatggtttgttgaacacaaaagccagcagggtcatttgtttcgaataatttgggtccttactcctgttccatggcgttaggttagcctcattggtgttggtggggtacggcgttacgtgtccgtgttctaagtttggagtgtgtgtttctcttttttgttggggtttgtgtgctttggttatataaacagaaatggagtacgcagtcttcgaatcgcaaaaaaaaaaaaaaaa

SEQ ID NO: 1592 - protein, 765 aa, Zea mays
  misc_feature: Ceres CLONE ID no. 503649
  misc_feature: Ceres CDNA ID no. 36590504
  misc_feature: null
  misc_feature: Useful for making plants with altered cell wall content and/or composition
  misc_feature (189)..(208): Pfam Name: Methionine_synt PFAM Desc: Methionine synthase
  misc_feature: Homolog of GI Number: 68212679 NR Desc: 5
  misc_feature: Homolog of GI Number: 68552654 NR Desc: 5
  misc_feature: Homolog of GI Number: 68556469 NR Desc: 5
  misc_feature: Homolog of GI Number: 15982743 NR Desc: AT5g17920/MPI7_60
  misc_feature: Homolog of GI Number: 20147149 NR Desc: AT5g17920/MPI7_60
  misc_feature: Homolog of GI Number: 12620762 NR Desc: ID830
  misc_feature: Homolog of GI Number: 974782 NR Desc: cobalamine
  misc_feature: Homolog of GI Number: 68655495 NR Desc: methionine synthase 1 enzyme
  misc_feature: Homolog of GI Number: 68655500 NR Desc: methionine synthase 2 enzyme
  misc_feature: Homolog of GI Number: 886471 NR Desc: methionine synthase
MASHIVGYPRMGPKRELKFALESFWDGKSSADDLEKVASDLRSSIWKQMSEAGIKYIPSNTFSYYDQVLDTTAMLGAVPERYSWTGGEIGLSTYFSMARGNATVPAMEMTKWFDTNYHFIVPELGPSTKFTYASHKAVSEYKEAKALGIDTVPVLVGPVSYLLLSKPAKGVEKSFSLLSLLGSILPIYKEVVSELKAAGASWIQFDEPTLVKDLDVHELAAFSSAYAELESAFSGLNVLIETYFADIPAESYKTLTSLSGVTAYGFDLIRGAKTLDLIRSSFPSGKYLFAGVVDGRNIWADDLAASLSTLQSLEAVAGKDKLVVSTSCSLMHTAVDLVNETKLDDEIKSWLAFAAQKVVEVNALAKALAGQKDEAYFAANAAAQASRRSSPRVTNEEVQKAAAALKGSDHRRATTVAARLDAQQKKLNLPVLPTTTIGSFPQTVELRRVRREYKAKKISEEEYISAIKEEISKVVKIQEELDIDVLVHGEPERNDMVEYFGEQLSGFAFTANGWVQSYGSRCVKPPIIYGDVSRPNPMTVFWSKTAQSMTARPMKGMLTGPVTILNWSFVRNDQPRFETCYQIALAIKKEVEDLEAAGIQVIQIDEAALREGLPLRKSEHAFYLDWAVHSFRITNCGVQDTTQIHTHMCYSNFNDIIHSIIDMDADVITIENSRSDEKLLSVFREGVKYGAGIGPGVYDIHSPRIPSTEEIADRVNKMLAVLDTNILWVNPDCGLKTRKYTEVKPALTNMVSATKLIRTQLGSAK

SEQ ID NO: 1593 - DNA, 1661 bp, Zea mays
  misc_feature: Ceres CLONE ID no. 503689
  misc_feature: Ceres CDNA ID no. 35388193
  CDS (157)..(1002): REFERENCED BY SEQ ID NO: 1594
acaaacaacacctctccatcgcgagctgcgaaagacgagcagagggagggagggcaaagcgaagagaaacacaaccgcgccacccacccacgcacccggagcgaaggggagaccggccgcaacagaaggcagagagagctagagccgcgcgcggcaatgggcaacagcatcggcgggcggcgcaagggcgccaaggtgatgcagctggacggcacggcgttccgcgtgaagccgccggcgtccgcgggcgcggtgctgcgcgaccacccggggttccagctgctcgagtccgaggaggtgaagctgctgggcgtgcgcgcccggccgctggcgcacgacgcgcagctgcgcccgggcaggctctacttcctcgtggtgctgccccggccgtccgtcccgccgcgccgcgcctggtccggcgcgctccaggtgggcgcgcgggagcggctggagtcgctcatgctcacgcgccgctccacctccgacctctccctgccggcatccgcggtcacggccacggccacggcgccggcgtccccgctctccgagtccgagggtgggcccgtccggctccggatgcgcctgcccaaggcgcaggtcgagaggctcatggccgagagccgcgacggcgccgaggccgcagcccggatcgtgcagctctgcgccgctgctaataaccccgccagcggcgccgccacgcccgagagggggatcctgcggacgcccgagcggagcccgcggttcgtgcccactccggactggggcgtcggcgccgcctcgtccccgcagacgcccgagcggagccccaggttcgcggcgaccacgcccgactgggggactgatgggttcatggtgccggcgggcgctgcgacggcgcccaggacgccggagaggtggcccgcgctgccccgcaccccggagtacgcgtcgcccaacgtcagggccagccggaaagagaagcgaacgcggttcgtggcgctgccggatgagataatcgcgtgacttcttcttcgtctctcccgcgcgcgcgcgcgccgggatgaaacgatcgaggcctgcggttgcttgatttggaggagcgtggcaagcaaaagcatgatgtgctggggtgacgatcagagagcccagaagatgtactagactgattgatggtccgcagcagggtcccagacgctctgtcccgtggttggtcgttttcctcggttgcgagcgagccggggaagagcgcctgctgtgctgccggccggcccacgacggtagcggcggcagctccctgtcttgcctccgacgacgacagggactcaagtgtgtcgtcttcttttttttcttcttcttctactgtggtctgtggtctatgtatcttctacatatttaaggctatcttgctcgtcctctctagatgttgtaggttgctgaagaagcttaggatataaatacttctacatgtatatgaaaacacttgcggaggccatgacagtagccaacagcttcgcgtgtcatcgtctgcgtcgtttaattttactctagcattcgtctcaatccacatgcatcaatatggattgaagtgaatactaagtattcaaacaatgcctcgtaattctgttcatgtaaatattccgtcgaatatgaataaggtttcgcatgcaaaaaaaaaaaaaaaa

SEQ ID NO: 1594 - protein, 281 aa, Zea mays
  misc_feature: Ceres CLONE ID no. 503689
  misc_feature: Ceres CDNA ID no. 35388193
  misc_feature: Homolog of GI Number: 66776813 NR Desc: Phosphoribosylaminoimidazole
  misc_feature: Homolog of GI Number: 66776103 NR Desc: LigA
  misc_feature: Homolog of GI Number: 66778899 NR Desc: UvrD/REP helicase
  misc_feature: Homolog of GI Number: 66778264 NR Desc: LigA
  misc_feature: Homolog of GI Number: 67985651 NR Desc: Short
  misc_feature: Homolog of GI Number: 66776365 NR Desc: PE
  misc_feature: Homolog of GI Number: 67986517 NR Desc: Flavin
MGNSIGGRRKGAKVMQLDGTAFRVKPPASAGAVLRDHPGFQLLESEEVKLLGVRARPLAHDAQLRPGRLYFLVVLPRPSVPPRRAWSGALQVGARERLESLMLTRRSTSDLSLPASAVTATATAPASPLSESEGGPVRLRMRLPKAQVERLMAESRDGAEAAARIVQLCAAANNPASGAATPERGILRTPERSPRFVPTPDWGVGAASSPQTPERSPRFAATTPDWGTDGFMVPAGAATAPRTPERWPALPRTPEYASPNVRASRKEKRTRFVALPDEIIA

SEQ ID NO: 1595 - DNA, 673 bp, Zea mays
  misc_feature: Ceres CLONE ID no. 504810
  misc_feature: Ceres CDNA ID no. 25446434
  CDS (97)..(348): REFERENCED BY SEQ ID NO: 1596
gaagtggcggaagagaagcaagaaataaaaaaaagaagcgagtggagaccgcagcacgcccgggcggcgtctggggatgacgcgcgcccgccgccaatggccgcaccgacgcagacgctagtgctggcggggatcatcctcctcaacttagtcctcgccgcggcagcgctctaccgccgcatccgcggccgccgcaggccccggcagcacgtcccgccgccgccgccgctcgagccggccgccgcggaggaggcggaggcggaggcggaggaaggatgcggtggggagaggcggcagagccagcggaggaggaggacaccgccttctggcagcgcaacgggaagatgagatcagtctcgtccaagtaggacacaatgcccctgctacttgggctcactgacgatagcagacctcaacatcggtagtgtctaggcatgaaacccttgagagcagctgctgtatgcctgcatcgaaccgtttggtgtaacgccgcggccttctgtcaagatcctggcctgattctgggcagattgagttgtgtcgtgatacatgccgtccctcagggttctgtaccagcgagtgccggcatagggctgttttgatcgtgtggccatggacctcctgacccagccgcagcgccagcaattctgtgcaaacaaaaaaaaaaaaaaaa

SEQ ID NO: 1596 - protein, 83 aa, Zea mays
  misc_feature: Ceres CLONE ID no. 504810
  misc_feature: Ceres CDNA ID no. 25446434
MAAPTQTLVLAGIILLNLVLAAAALYRRIRGRRRPRQHVPPPPPLEPAAAEEAEAEAEEGCGGERRQSQRRRRTPPSGSATGR

SEQ ID NO: 1597 - DNA, 1007 bp, Zea mays
  misc_feature: Ceres CLONE ID no. 505520
  misc_feature: Ceres CDNA ID no. 25446590
  CDS (87)..(701): REFERENCED BY SEQ ID NO: 1598
attctgctttcccctcgctccagagtccagtccccagacgagcggttggagcttcgacgtgcggttccatttccttccctgctctgatggccgtcgccgaagtggcgatcgagattctcccgcagcagcagcagcagccgccgccgccgccgccgccgcagccaccggcggtagcgcccccgaacctctccgtgccgagagtgctccagtatctgtacctcttgagcgcgtgggtcgcctgcgcgggcgtggctgccgggaccgtggcgcgccgagccttgggcgactcttccccgttggtctacgggttcctcaaagtctcgatcggagccctcgttttccccgcgctgctcatcctcgtcttcgccctgcgggtcttgcgcgccatgcttgcggtggggttcagacggtcactccgcactcacgccagggagattcagatccaagccacgaagatatttagagcgttaacgtggaaggtgctgcaggaccctatcgtgctcgcgtggctcgcatctttgcttttcatcctgcttcttgcagcaagtgttctggtgtttgtgggacttctaccaatggaggagtctcgcagagaaaggattggttatgcgctctctgatgtgggggtattgggtgcaatggcaatgtattgccttatcattatacccagttttgcgctgaagatctggaggagcaagtagggtggcgatgctgcacaaggcacaacactggcgatatctgaggcaaggacagttggagaaggcgcaaaagatggactcgtagttaccgtgggtgaagccagctaattaatgttttagagaaataattctctcttggagactactactactgttctacctcagcagcaccggtgctggtgcgtgtgtaacgtggtcaccgtaggtatcactaccctaccctaagccctatcagaacataagcaccccttggagatttgtgccgtctaaatgaatatagttggttcagcgtcaaaaaaaaaaaaaaaa

SEQ ID NO: 1598 - protein, 204 aa, Zea mays
  misc_feature: Ceres CLONE ID no. 505520
  misc_feature: Ceres CDNA ID no. 25446590
MAVAEVAIEILPQQQQQPPPPPPPQPPAVAPPNLSVPRVLQYLYLLSAWVACAGVAAGTVARRALGDSSPLVYGFLKVSIGALVFPALLILVFALRVLRAMLAVGFRRSLRTHAREIQIQATKIFRALTWKVLQDPIVLAWLASLLFILLLAASVLVFVGLLPMEESRRERIGYALSDVGVLGAMAMYCLIIIPSFALKIWRSK

SEQ ID NO: 1599 - DNA, 804 bp, Zea mays
  misc_feature: Ceres CLONE ID no. 505671
  misc_feature: Ceres CDNA ID no. 36586443
  CDS (147)..(353): REFERENCED BY SEQ ID NO: 1600
agaattgtcagagggcaccaccagccaaggagggagggagagggacggacgaagacgagccgacccgacctcgtgcggtgtgtaggtcgagagagagagagagagaccctaccgggcgggagagagccaggaagaggagggcgacgatggcgtccggctggggcatcaacgggaacaagggccgctgctacgacttctggctggagttcagcgagtgcatgagccgctgccgccagccctccgactgcggcctcctccgcgaggactacctcgagtgcctccaccactccaaggagttccagcgcaggaacaggaggaggcaaagaaataccaggaagagattgccactctgaacaaggagatgaagaaactgaagctacaagtccaagaaaagacagaagaggtccatgtttcagaggacaaggcacttgctatccaaaaacaatccgaaggcttgctgactgaatatgaccgcctgctggaggataatcagcatcttcggacacagctgctgtcaattgaccgcaggctttccaactcttcttgaacgaagagtctatttaggggatgctgaagaatttctgtggaagatcatgttaccacccaaagtgtatggcagctacctgcttcctcacttgttagtcttagcatcttcaattaactagctattgcattatattgttggcaaaactagtgcaagcattatatggtctagaactttggagtttctcttgtgtgtttcttgtaatgcctactttttatgtgtgcttatagtgattactgttttgaaaaaaaaaaaaaaaa

SEQ ID NO: 1600 - protein, 68 aa, Zea mays
  misc_feature: Ceres CLONE ID no. 505671
  misc_feature: Ceres CDNA ID no. 36586443
  misc_feature: Homolog of GI Number: 50948425 NR Desc: putative fiber protein Fb14
  misc_feature: Homolog of GI Number: 30841446 NR Desc: fiber protein Fb14
MASGWGINGNKGRCYDFWLEFSECMSRCRQPSDCGLLREDYLECLHHSKEFQRRNRRRQRNTRKRLPL

SEQ ID NO: 1601 - DNA, 1571 bp, Zea mays
  misc_feature: Ceres CLONE ID no. 505875
  misc_feature: Ceres CDNA ID no. 25445998
  CDS (1)..(1116): REFERENCED BY SEQ ID NO: 1602
ctcgattcgcatccccttttcccgtccatgcgcgcgccggcgggcggtgccagtgccaccgcgctcgcggctgccatgaacattaagcagccgctgcacggcgcatcgacgctgttcgcgctgctctctctctcgctgctcctcctccgcctgctcctccgcctccgcctggccgccttccgcgacgcggcgctgtcgctccacctgctggcgcgcctccgcctccgccccgtcctcctctgcctcccggcagcctgccacgacggcggcgccggcgccggcgccaccacgctgcgcgtctggtgccccgccaccccatcctccaagccgccgctgctcctcctccacggcttcggcggggacgccaagtggacgtgggcgcgcaacctcccgcgcctgtcccgccacttccacgtgtacgcgccgtacctcgtgttcttcggcgcgcagtcccggtccgcgtcgccgctgcgctccgtggcgttccaggcccgctgcgccgccgaggccatgcgcctcctcggcgtgccccgctacgacgtcgcggggatcagctacggcggcttcgtcgcctaccggatggccgccgccgaggccagggacgccgtgggcaggctcgtcatcatgaccaccggcgtcgcggccacgcccggggagatgcgggccatggcggcgcgcgaggaccgcaccgtcgaggatgcgctgctgccggacaccgccgaggggctgcgcttcctcgtaagacgctccatgcatcgccccccgccttggatgccggacttcgtgcttgacgacttcatccagctcatgtacgtggaccagaaaagggagagggcagagttgctgcacgaactgctcaagagcggagctggcttcgaccccctcccggttcttacccaagaaacactgatcatctggggcgacaaagaccaggtgttccccgtcgacctcggccacaggctgcacaggcttctgggcgagaggtccaggctagagatcgtcagggacgcagggcacgcgctgcagctggagggcgccgaccacgtcaaccgctccatcaagtcgttcctcctggacgagcgggtcgggccgggagccggcgcgggccgcaagtaggacgaggccttctcccgtccaggcccacaagcaaacggaggcctgctcgcaggtgcctgcgttgcagagcttcaacagtgcgaacgccagctgtagttaagcagcggagcgccggagcggcaatgacctgcacgcagacgccccggccccaccgccccgcaatcatgcagcgctggggctactggttacaaaagtacagagaagcgtcgctccggactagtttgttttgtacaataatgtctgaaagaacgagcttgtgcggccgaaattcggagagctgtctttatctggtgcgcacagtctgtctctttgtttcttcatgctcagcctcatgagataacgatatatttatgacagctccaacaataatttgtaagctaaattcaagcattttattttatatttcaataaagaaagggagaaaagctacctcctgatcaaaaaaaaaaaaaaaa

SEQ ID NO: 1602 - protein, 346 aa, Zea mays
  misc_feature: Ceres CLONE ID no. 505875
  misc_feature: Ceres CDNA ID no. 25445998
  misc_feature (112)..(198): Pfam Name: Abhydrolase_1 PFAM Desc: alpha/beta hydrolase fold
  misc_feature: Homolog of GI Number: 50939321 NR Desc: hydrolase
  misc_feature: Homolog of GI Number: 37991918 NR Desc: putative  hydrolase
  misc_feature: Homolog of GI Number: 18420566 NR Desc: hydrolase
  misc_feature: Homolog of GI Number: 21536873 NR Desc: putative hydrolase
  misc_feature: Homolog of GI Number: 67633792 NR Desc: hydrolase
  misc_feature: Homolog of GI Number: 9955530 NR Desc: putative hydrolase
  misc_feature: Homolog of GI Number: 31431677 NR Desc: putative hydrolase
  misc_feature: Homolog of GI Number: 55297584 NR Desc: hydrolase
  misc_feature: Homolog of GI Number: 50911957 NR Desc: putative hydrolase
  misc_feature: Useful for delaying senescence
MNIKQPLHGASTLFALLSLSLLLLRLLLRLRLAAFRDAALSLHLLARLRLRPVLLCLPAACHDGGAGAGATTLRVWCPATPSSKPPLLLLHGFGGDAKWTWARNLPRLSRHFHVYAPYLVFFGAQSRSASPLRSVAFQARCAAEAMRLLGVPRYDVAGISYGGFVAYRMAAAEARDAVGRLVIMTTGVAATPGEMRAMAAREDRTVEDALLPDTAEGLRFLVRRSMHRPPPWMPDFVLDDFIQLMYVDQKRERAELLHELLKSGAGFDPLPVLTQETLIIWGDKDQVFPVDLGHRLHRLLGERSRLEIVRDAGHALQLEGADHVNRSIKSFLLDERVGPGAGAGRK

SEQ ID NO: 1603 - DNA, 738 bp, Zea mays
  misc_feature: Ceres CLONE ID no. 506054
  misc_feature: Ceres CDNA ID no. 25446436
  CDS (50)..(529): REFERENCED BY SEQ ID NO: 1604
actcatctatttcttttgaatcattgtatactagctagccagagcttgtatggccactgctcatcatgcggatgaccatcgtgcagggagaagaagcgaggccgtcggagagaactacatgaggggcctctacggcgacgatgactacaacgccacccactacggtcaccagcagcagcagcggccgccgcccgcgcccatggcggtggccaaggcgttagccacagccacggcagccttctccatgttgttgttgtcggggctggcggtgacgggcacggtgctggcgctcatcgtggcgacgccattgatggtgatcttcagccccgtgctggtgccggcggccatcacggtggcgctgctcacggtaggcatcgtttcgtcgggagggttcggcgtggctgcggtggctgtgctggcgtgggtgtaccgctaccttcagaccacgacctcgtcgtcgggtcagcagccgcacatcgtcaaggactgggcgcagcagcaccgtctggagcagacacgcgcgcactgaaataaaaaaaaaaagcgtagtacccctccgtttctttttatttgttgctgtttagttcatatttgtcactgtttcgttaaaaatgaactagcgggataacgagaacgggaggtaatatagcttttcatctaatgtaatgtaacgtaatcttatgtttgcagcagtaataatgtgtattatatatttgcagcaaaaaaaaaaaaaaaaaa

SEQ ID NO: 1604 - protein, 159 aa, Zea mays
  misc_feature: Ceres CLONE ID no. 506054
  misc_feature: Ceres CDNA ID no. 25446436
  misc_feature (49)..(145): Pfam Name: Oleosin PFAM Desc: Oleosin
  misc_feature: Homolog of GI Number: 50899460 NR Desc: putative oleosin
  misc_feature: Homolog of GI Number: 1622939 NR Desc: oleosin
  misc_feature: Homolog of GI Number: 5381321 NR Desc: 15 kDa oleosin
  misc_feature: Homolog of GI Number: 963064 NR Desc: low molecular weight oleosin
  misc_feature: Homolog of GI Number: 1076817 NR Desc: oleosin 16
  misc_feature: Homolog of GI Number: 1171352 NR Desc: 16 kDa oleosin
  misc_feature: Homolog of GI Number: 82705 NR Desc: lipid body
  misc_feature: Homolog of GI Number: 2119749 NR Desc: oleosin
  misc_feature: Homolog of GI Number: 460803 NR Desc: oleosin
  misc_feature: Homolog of GI Number: 50927500 NR Desc: OSJNBa0079A21.12
MATAHHADDHRAGRRSEAVGENYMRGLYGDDDYNATHYGHQQQQRPPPAPMAVAKALATATAAFSMLLLSGLAVTGTVLALIVATPLMVIFSPVLVPAAITVALLTVGIVSSGGFGVAAVAVLAWVYRYLQTTTSSSGQQPHIVKDWAQQHRLEQTRAH

SEQ ID NO: 1605 - DNA, 802 bp, Zea mays
  misc_feature: Ceres CLONE ID no. 506064
  misc_feature: Ceres CDNA ID no. 25446437
  CDS (91)..(612): REFERENCED BY SEQ ID NO: 1606
aaaaaaaaaccttgtcactttgtcagggcttcggggacagccaaagaagacggacggacccagtgaggcgagcacgggcgctcaccggcgatggcgacgagggcatgggtggccgcggcggtggccttgaaccctcaactgctgcctctccgctcctgctcgcccacgaagtcggtctccccagcgcagcgctcggcgtcgatggggctccggctgcgcagcggccggccgtgcctggggaagttcgtgtgccgccgcgccaagaacgcgggatacgaggactacaagttcccggaccccatcccggagttcgccgagcaggagacgagcaagttcagggagcacatggcgtggcggctggagcagaagaaagaggactacttcggggaccatgtcgaggagatcgttgacgtctgcaccgagatcatggggacattcctggagaacgattaccgtggaccagggacgctcctggttcacccgttcctggacatgaagggcgagatcaaggagagggggctccccggcgcacctcaggcggcacgggcggcgatagcatgggccgaaaagaacgtggacaaggactggaaggcctggactggggaatactagcactagaagaggtatcaataaagattttgccatttgaattggcatgagaagagagtaaaaactaaagaggatgtttctatgttttaccactgagcttgtatggtttagcactgtgttcctgctctattattctcagttagatcagaggttgcagcttgccagactggcatataaaaaaaaaaaaaaaaaa

SEQ ID NO: 1606 - protein, 173 aa, Zea mays
  misc_feature: Ceres CLONE ID no. 506064
  misc_feature: Ceres CDNA ID no. 25446437
MATRAWVAAAVALNPQLLPLRSCSPTKSVSPAQRSASMGLRLRSGRPCLGKFVCRRAKNAGYEDYKFPDPIPEFAEQETSKFREHMAWRLEQKKEDYFGDHVEEIVDVCTEIMGTFLENDYRGPGTLLVHPFLDMKGEIKERGLPGAPQAARAAIAWAEKNVDKDWKAWTGEY

SEQ ID NO: 1607 - DNA, 1132 bp, Zea mays
  misc_feature: Ceres CLONE ID no. 506459
  misc_feature: Ceres CDNA ID no. 36692633
  CDS (93)..(851): REFERENCED BY SEQ ID NO: 1608
actataagtaacttgctcaccgaactcaccacacccaaatcatccgcgaaaccacagctcagttcggtgagcggagcgctcgaccatcagacatgggcgtcagcgacggcgacggcaacggccccaaggcgagcgaggaggcggtctcgtgcgaagggagtcccgagtataggttgccgttctccaagccgcacgtccccagcccaccgcaggtgtccgacccgacgaactacgccatgactggcaagatcctgctcgccgcggcgggggcgttcgcgggcgtgctcctggcgctcgtcgcgctgcacctctacaacagcacacggcggcggcgcctcggcggcaaccagcggcggctgttccggagcctggccatcgccggtggcgacgatgaccgccgcgacggtgacggagagggagcgcctcccccccatcgcggcctcgattccgctgtgctcgccgcgataccggtcgtgctgatcgaagcgggcgcggatgcggggggcggggactgcgcggtctgtctcgcggagctcgagcccggggagaaggcccgcgcgctgccgcggtgcggccaccgcttccacatcgagtgcattggcgcctggttccgggggaacgccacgtgcccgctctgccgcgccgacgtcgtcgtcgtggcgccgggcgctatcgtgccagccgagggcggggcgctgtcggaggaggtgcggatagacgtggccggggacgccgtcgccgcgacgcccaatggatccacggtagtgccggtgatggggaggttgcatagcggccgggatcttgagaaagccaggcgggtctttgcttccacccgattctcttccttctgacagggctccattggctcccacagccacagactacaggacctcggaagcttcctctgattttcgcacatggacacctcgattgtttcggagcgttctgccattagactgtacatagatttgttggtgatgccagctgtgttttgccatgatttgtagtacgattttttgcggacgaactcatggacatatctgtctcgacgttgactcgagacatgtaaactgcttggatgctatttgcttcacaacattaatgattgatagttgtaaaaaaaaaaaaaaaa

SEQ ID NO: 1608 - protein, 252 aa, Zea mays
  misc_feature: Ceres CLONE ID no. 506459
  misc_feature: Ceres CDNA ID no. 36692633
  misc_feature (141)..(182): Pfam Name: zf PFAM Desc: Zinc finger
  misc_feature: Homolog of GI Number: 34894514 NR Desc: P0551A11.21
  misc_feature: Homolog of GI Number: 52077541 NR Desc: ring
  misc_feature: Homolog of GI Number: 50921049 NR Desc: putative ring
  misc_feature: Homolog of GI Number: 34903920 NR Desc: OSJNBa0038J17.5
  misc_feature: Homolog of GI Number: 4567308 NR Desc: putative RING zinc finger protein
  misc_feature: Homolog of GI Number: 56201670 NR Desc: ring
  misc_feature: Homolog of GI Number: 21593806 NR Desc: putative RING zinc finger protein
  misc_feature: Homolog of GI Number: 60389473 NR Desc: E3 ubiquitin ligase EL5
  misc_feature: Homolog of GI Number: 50900334 NR Desc: zinc finger
  misc_feature: Homolog of GI Number: 34903936 NR Desc: OSJNBa0038J17.13
MGVSDGDGNGPKASEEAVSCEGSPEYRLPFSKPHVPSPPQVSDPTNYAMTGKILLAAAGAFAGVLLALVALHLYNSTRRRRLGGNQRRLFRSLAIAGGDDDRRDGDGEGAPPPHRGLDSAVLAAIPVVLIEAGADAGGGDCAVCLAELEPGEKARALPRCGHRFHIECIGAWFRGNATCPLCRADVVVVAPGAIVPAEGGALSEEVRIDVAGDAVAATPNGSTVVPVMGRLHSGRDLEKARRVFASTRFSSF

SEQ ID NO: 1609 - DNA, 565 bp, Zea mays
  misc_feature: Ceres CLONE ID no. 506580
  misc_feature: Ceres CDNA ID no. 25446438
  CDS (117)..(389): REFERENCED BY SEQ ID NO: 1610
atccctaattaagccaaaaggcactgaagaagccagtcaatagcgagttctactactagtagctagcctgctgatctgttctgttttagttcgcaaagccttctgtttcggcgaccatggaggatgagaggaacacccagcagcaccagggcggtgaggcccagcaggacgccgccgatcaggtggacgtgaaggatagggggctcctggacagccttctcggcaggaagaagcacgacgacgaccaggagaagaagaagcagacggatgagctggcgaccggcatggagaaggtcacggtgtccgagcccgagaagcacgggcacaaggaggaggagcacgaggtcgtcggcgagaagaaggagggccttcgttttgctattttataagtgctagaaacgtgttatatatagaatatattacttaagtttgtgaagtagtgttattttatttttggtgtaatttattttgtctgtgagtgacccctcacatgcatatcgctctttttttactgtattctgagcaaagttttacatggttatcatgatcaaaaaaaaaaaaaaaa

SEQ ID NO: 1610 - protein, 90 aa, Zea mays
  misc_feature: Ceres CLONE ID no. 506580
  misc_feature: Ceres CDNA ID no. 25446438
  misc_feature: Homolog of GI Number: 532623 NR Desc: dehydrin
  misc_feature: Homolog of GI Number: 55274278 NR Desc: SK3
  misc_feature: Homolog of GI Number: 7489664 NR Desc: cold acclimation protein WCOR410b
  misc_feature: Homolog of GI Number: 1084470 NR Desc: cold acclimation protein
  misc_feature: Homolog of GI Number: 1657845 NR Desc: cold acclimation protein WCOR410c
  misc_feature: Homolog of GI Number: 61657606 NR Desc: dehydrin
  misc_feature: Homolog of GI Number: 4105115 NR Desc: dehydrin 8
  misc_feature: Homolog of GI Number: 642246 NR Desc: paf93
  misc_feature: Homolog of GI Number: 6017942 NR Desc: dehydrin
MEDERNTQQHQGGEAQQDAADQVDVKDRGLLDSLLGRKKHDDDQEKKKQTDELATGMEKVTVSEPEKHGHKEEEHEVVGEKKEGLRFAIL

SEQ ID NO: 1611 - DNA, 565 bp, Zea mays; identical to SEQ ID NO: 1609
  misc_feature: Ceres CLONE ID no. 506583
  misc_feature: Ceres CDNA ID no. 25446438
  CDS (117)..(389): REFERENCED BY SEQ ID NO: 1612

SEQ ID NO: 1612 - protein, 90 aa, Zea mays; identical to SEQ ID NO: 1610
  misc_feature: Ceres CLONE ID no. 506583
  misc_feature: Ceres CDNA ID no. 25446438
  misc_feature: Homolog of GI Number: 532623 NR Desc: dehydrin
  misc_feature: Homolog of GI Number: 55274278 NR Desc: SK3
  misc_feature: Homolog of GI Number: 7489664 NR Desc: cold acclimation protein WCOR410b
  misc_feature: Homolog of GI Number: 1084470 NR Desc: cold acclimation protein
  misc_feature: Homolog of GI Number: 1657845 NR Desc: cold acclimation protein WCOR410c
  misc_feature: Homolog of GI Number: 61657606 NR Desc: dehydrin
  misc_feature: Homolog of GI Number: 4105115 NR Desc: dehydrin 8
  misc_feature: Homolog of GI Number: 642246 NR Desc: paf93
  misc_feature: Homolog of GI Number: 6017942 NR Desc: dehydrin

SEQ ID NO: 1613 - DNA, 1167 bp, Zea mays
  misc_feature: Ceres CLONE ID no. 506642
  misc_feature: Ceres CDNA ID no. 40041242
  CDS (71)..(613): REFERENCED BY SEQ ID NO: 1614
accacacctcccgccatgcactgcatcgccccccgcctgctcctcctcccactcccgaccgcctcccgccatgcgctatcgccaacccagacgccacctcttcctcccctcccgcgcctgtaagttccacctcgcctcggcacgctcgccgtcccgcgccgccgtttcggttttcggcgacgacgaggatgagatggcgcgtgcgtgcagggctgctgctgctgctcgtccctgtgccttctcccccgcgacgacgcgctctcgtccccctccgcctgcgcgcaccgcctcaagccttggtcttggcgtgcccaatcccccacctcgtcctcctaacgcttgtccccgcccgctccccaccctgatctacctgtctctacccttacctcttccatttctacttctccccgttgctgctctgctcctgctgccacaagagtattcactttcaatcgttgctcgcgcctgtgatttcgtgccgcacgccgacttgtttgctgttttcgctgccgtcttctgttggatcggatttgtctggatcgcttccgagaccggatctacgctgttcagtgccgcaccccttctcttgttcagtgctcctgcgctgatttagacccgcacgactctggatctgccccagccgtgcggcccggccggatcggagcgaggggatgtccggatctcggtcgctgaggcgagatgcggatctaaggccccttccctcggtgacgtggttgctgctgctgctgttctccgggcgtttgatcccaatatagctgaggtcaagcttgatgatctgcgtactgtggatttgctaatgaggggtggccggatcggactgttggcgtccgacctgatttggttgttcgcttgaatagacttggttaccagtggacagtgggagtgatcgttcagcagcactagagcaatttgttttacatgtaaaattagagtggctgctagagatgcaccaatggccgagctgcatgtgtttattcctatacagcgacagttgtgtgattgatccaaaacgcaaaattttagttttcatcaaatgatgatttcctgatgccactacctgtgtgtgtgaggcacttattaaatgaaaagtaactttcggttgggatctgggaaaaaaaaaaaaaaaaaaaaaaaaaaaaaaaaaaa

SEQ ID NO: 1614 - protein, 139 aa, Zea mays
  misc_feature: Ceres CLONE ID no. 506642
  misc_feature: Ceres CDNA ID no. 40041242
MARACRAAAAARPCAFSPATTRSRPPPPARTASSLGLGVPNPPPRPPNACPRPLPTLIYLSLPLPLPFLLLPVAALLLLPQEYSLSIVARACDFVPHADLFAVFAAVFCWIGFVWIASETGSTLFSAAPLLLFSAPALI

SEQ ID NO: 1615 - DNA, 529 bp, Zea mays
  misc_feature: Ceres CLONE ID no. 507024
  misc_feature: Ceres CDNA ID no. 25445950
  CDS (54)..(287): REFERENCED BY SEQ ID NO: 1616
atcgccgaggaaccaaagctagagacaaccgctgcgtaaacgaatccatcgccatggcgtctcgtctcgttgcggcggcggcctcctcctcctccctctcctcagcgtcccccctcgctcgcctaatctctcgccgcggccttgccggtgccgcagacggccatgggtctgcgaaggtgcccttgtggaaagatccgttgagcccgagcaagtggaaggaagagcactttgttctagcaagcctctcaatgtggggggttatatctagattatctgcagtagcttagtccatctaaatgaaatgtgacagctgaactttggaagtcgcatcattggggaaacgaaatttaagtcgattgatttgttaatgccctcgttgatgtaatatttcccttgttcggtggatttccggtctgtataatatttatgcacgcttgcactttatccatggtatttgtatacccgtataaggcagcatggaggatgtttcttgcaaaaaaaaaaaaaaaaaaaaaaaaaaaaaaaaaaa

SEQ ID NO: 1616 - protein, 77 aa, Zea mays
  misc_feature: Ceres CLONE ID no. 507024
  misc_feature: Ceres CDNA ID no. 25445950
MASRLVAAAASSSSLSSASPLARLISRRGLAGAADGHGSAKVPLWKDPLSPSKWKEEHFVLASLSMWGVISRLSAVA

SEQ ID NO: 1617 - DNA, 614 bp, Zea mays
  misc_feature: Ceres CLONE ID no. 507461
  misc_feature: Ceres CDNA ID no. 40351018
  CDS (181)..(372): REFERENCED BY SEQ ID NO: 1618
aaataaagaaggctgaaggctccacacagacaactccgtagagctccctgctttgttcagacttcagagcccttcctcttgtgtccgtgcaaattggtgatacttgaacagggatctcctccatattagtgagcaggatgtataatcctcccagtgggcaggacatgtcctactacgatcatgtgcagaagcgccatgaggagaagggctgcctatatgcatgcctgttcactgcgtgctgctgcttctgctgcttcgagacctgtgagtgctgcctcgaggccatctgctgctgctgctagttctgcttggagggcatgggcgtccatcatcgtggagatgtggccatgcgggacacccaccgccgaataaaatgctgtacttatatgcacgcacgttagaaatgcattagtgtctgtttgatgtgatcttgtgtgtgtgtgaaatgcattagtgtctgtttgatgtgatcttgtgtgtgtgcgcgcgcatcttcatttgcaccggaaaaatgctttgtgaaggtctgtaaatctgttgtatgtatcttggtcagatgaactctattattgtgccatatatctcgcttgcattggacaaaaaaaaaaaaaaaa

SEQ ID NO: 1618 - protein, 54 aa, Zea mays
  misc_feature: Ceres CLONE ID no. 507461
  misc_feature: Ceres CDNA ID no. 40351018
MYNPPSGQDMSYYDHVQKRHEEKGCLYACLFTACCCFCCFETCECCLEAICCCC

SEQ ID NO: 1619 - DNA, 734 bp, Zea mays
  misc_feature: Ceres CLONE ID no. 507903
  misc_feature: Ceres CDNA ID no. 36706739
  CDS (1)..(207): REFERENCED BY SEQ ID NO: 1620
acaagtgtcttttgctctcgccctctcctagcatcaagagaaccaataagcttagccacgctaaactcttgtctcttatgttttagagtggtagcaaaatccgtccaagaaggtggcagcttagcgatattaccgccagccacgaacttgtcaggcaagacacatgataattgttcgagttccttagccagtgcctgtattccatgagtctgttcgactacaggacgattttccaccatcttatagtcaaacagatgtgcacgttagataagaatcaacatacttgttggcaagagtgccaatcacagcgcctcgaaacaggttatcggcaacgtcgaacattctctcctcttcaggagtgaactgttcaagtttcccctatgcggcgtgatagcagttcattgcagtcaaccacagtatcatcttactacgccgcctcttataaaatgtcccatcaaaaggttcacttggttttaacgcaccaacaaatccactaacagaaaaatgcctaatatcaggtttttggattgttagagaaataggcattttcagttttaatttaatccagaaaatcatagtgatgtatatgtgatgacatgtatgtgcatatgtatatcactagtcactgcacataagcagtaaacaacagtaaaatatgcagaaatacaaagaaaaaaaaaaaaaaaaaaaaaaaaaaaaaaaaaaaaaaaaaaaaaagaaaaaaaaaaaaaaaa

SEQ ID NO: 1620 - protein, 52 aa, Zea mays
  misc_feature: Ceres CLONE ID no. 507903
  misc_feature: Ceres CDNA ID no. 36706739
MSLFDYRTIFHHLIVKQMCTLDKNQHTCWQECQSQRLETGYRQRRTFSPLQE

SEQ ID NO: 1621 - DNA, 2050 bp, Zea mays
  misc_feature: Ceres CLONE ID no. 508189
  misc_feature: Ceres CDNA ID no. 40041243
  CDS (232)..(1557): REFERENCED BY SEQ ID NO: 1622
actcacgagaccgtccaccgcgacgcgctctcttgcccgtgcccccgtcctccccttccccctccacctccgcggcgcccgcggtaacctcgccacgccacatcgcgtgcgagcaccaaccgtcgccggccctctaattaagctgcctgcgcggcgcgatccggtgtccaccgctgccccgccggaggaggaggaggaggaggaagggggcggggggtggagcacagggggatgctagaggcgaagccgccgtcgccgggctcctccggcgcggccggggcggcggcacacatccacgctcaccggcggtgggcggcgccgctgctggcctcggtcctgctctcgtcgctcctcatctccgcgtcgctcttcttctcctcctcccgcgcgctgctcctctccttctcgccgctcccctccgcggcctccgccgagcccctcttcgtcgaggccaagctccgccagcagatgcgggccgaggagcgccccgcgcggggcgccgtgcccaggatctcctacctcgtctccggctccgcgggggacggagccgcgctgcgccggacgctcagggcgctctaccacccggcaaacacgtacgtcgtgcacctcgacctcgaggctcccgccgccgagcgcgccgagctcgccgctgccgtccgcgccgaccccgtctacgccaggttccgcaacgtcaaggtcgtcacacgggcgaacctggtcacctaccgtggcccgaccatggtggccaatacgctgcacgcggctgccatcctgctgcgcgagggcggtgattgggactggttcatcaacctctccgcctccgactatccactcgtcacccaggacgacctgttgcatgtgctctccgagttgcccaggcagcttaacttcattgagcataccagtgacatcggatggaaggagtaccagagggcgaagccagtgatcatcgaccctgggctatacagcctgcagaagtctgacgttttctggataacagagaaacggagtgtcccaactgcgttcaagctcttcactggctcggcatggatggtgctcacccaccagtttatcgaatactgcatatggggatgggacaatctcccaaggacagtcctgatgtactacgccaatttcctttcctcgccagagggctacttccacacggtcatctgcaacgtgccggagttccgcaacaccacagtcaaccacgacctgcatttcatttcctgggacaacccaccgaagcagcaccctcactacctcacgctcgctgacttcgacggcatggttaacagcaacgcgccctttgcaaggaagttcgggagagaagaccccgtgctggacaagatcgaccaggagctactgggccgccggcctgatgggtttgtgcccggtggatggacgtatctactgaatgcgacgagtgaggaagggagacccttcgccgttgagcgcgtgcaggatctccgcccagggcctggtgtggatagattgaagaaactcgtcacgggcttgctcacacaagaaggctttgatgacaagcactgcctgtgagactgccccccagtaagatgattctggctgggggcggtagattacacggtcaaatctgagggcattggagccattttctgggaatatgcctactggctgaagaagcagcacatagtatcatgtgatgtacgcgtggatgcaagcaacggtaagataggtgctcttacagacacagccgcctgagttgagctactaccgtacagcaggaggccacggacgtagccggcggagattatacaggaatagtagctcattaggttatgttagatgactatatcagccccttcccaaccgtcaataatgttgggaattttgacatctccgcggcgctgcgggttgtgcaaggcaggcaggcaggcagtccattcttcgcttggatgccatggcgcctggtgtaaccaactggtagcgtgtgaggaggcttcgttgtattgactagtgcatatttctgggcaaaacagatgcgtttggttgcataaaaaaaaaaaaaaaa

SEQ ID NO: 1622 - protein, 441 aa, Zea mays
  misc_feature: Ceres CLONE ID no. 508189
  misc_feature: Ceres CDNA ID no. 40041243
  misc_feature (94)..(319): Pfam Name: Branch PFAM Desc: Core
  misc_feature: Homolog of GI Number: 30102766 NR Desc: At5g39990
  misc_feature: Homolog of GI Number: 61656789 NR Desc: BGGP Beta
  misc_feature: Homolog of GI Number: 61656784 NR Desc: BGGP Beta
  misc_feature: Homolog of GI Number: 61656804 NR Desc: BGGP Beta
  misc_feature: Homolog of GI Number: 61656794 NR Desc: BGGP Beta
  misc_feature: Homolog of GI Number: 61656799 NR Desc: BGGP Beta
  misc_feature: Homolog of GI Number: 77556820 NR Desc: glycosylation enzyme
  misc_feature: Homolog of GI Number: 55276719 NR Desc: putative N
  misc_feature: Homolog of GI Number: 42567183 NR Desc: glycosyltransferase family 14 protein / core
  misc_feature: Homolog of GI Number: 34903664 NR Desc: B1015E06.17
  misc_feature: Useful for delaying flowering time
  misc_feature: Useful for increasing chlorophyll and photosynthetic capacity
  misc_feature: Useful for making ornamental plants with modified leaves
  misc_feature: Useful for making plants with increased biomass and foliage
MLEAKPPSPGSSGAAGAAAHIHAHRRWAAPLLASVLLSSLLISASLFFSSSRALLLSFSPLPSAASAEPLFVEAKLRQQMRAEERPARGAVPRISYLVSGSAGDGAALRRTLRALYHPANTYVVHLDLEAPAAERAELAAAVRADPVYARFRNVKVVTRANLVTYRGPTMVANTLHAAAILLREGGDWDWFINLSASDYPLVTQDDLLHVLSELPRQLNFIEHTSDIGWKEYQRAKPVIIDPGLYSLQKSDVFWITEKRSVPTAFKLFTGSAWMVLTHQFIEYCIWGWDNLPRTVLMYYANFLSSPEGYFHTVICNVPEFRNTTVNHDLHFISWDNPPKQHPHYLTLADFDGMVNSNAPFARKFGREDPVLDKIDQELLGRRPDGFVPGGWTYLLNATSEEGRPFAVERVQDLRPGPGVDRLKKLVTGLLTQEGFDDKHCL

SEQ ID NO: 1623 - DNA, 685 bp, Zea mays
  misc_feature: Ceres CLONE ID no. 508920
  misc_feature: Ceres CDNA ID no. 25446442
  CDS (1)..(456): REFERENCED BY SEQ ID NO: 1624
gccattgccacgagcagagcagacgaccttcctcgcctcctctgctctgtcaagcttctcgcgcgcgctctctctctctctctctctccctccatccacttcttgatcgagacggcaatggcgaagggcgggctgagcaagctcaagtgcatgctcaagaggtggcactcctcgagccggatttcgcgcacgccgtcagggtgctcggcgcgctcctcgcacgacgtcggcgacgctggcgccgggaacatgactacttcaaggcgccttgctgacaggaagaccgcaaagttccagaagaacatcaccaggaggggttctgtgcctgaaaccactgtcaagaagggaaatgactaccctgttggccctctagtgcttgggttcttcatctttgtcgtcattggatcatcgttgtttcagatcatcaggacggcaaccagcggcggggtggcttgagagccggcccacatctaatccccagtatagagagttgcttgttatacatgcatccagctaggattgggtagcagctaaaatgttaaacgtgacaagactgccctgcattccgttcatttggtgggccttgaatctggaactgaaccataaggcagaatcatgtaccttatataaagtgttaaatgggtaactggatctcagtgtttcaaacaaaaaaaaaaaaaaaaaa

SEQ ID NO: 1624 - protein, 68 aa, Zea mays
  misc_feature: Ceres CLONE ID no. 508920
  misc_feature: Ceres CDNA ID no. 25446442
  misc_feature (1)..(65): Pfam Name: RAMP4 PFAM Desc: Ribosome associated membrane protein RAMP4
  misc_feature: Homolog of GI Number: 25403305 NR Desc: protein F17L21.12
  misc_feature: Homolog of GI Number: 77552122 NR Desc: sorbitol transporter
  misc_feature: Homolog of GI Number: 51090654 NR Desc: auxin
  misc_feature: Homolog of GI Number: 23479574 NR Desc: Arabidopsis thaliana F17L21.12
  misc_feature: Homolog of GI Number: 67084013 NR Desc: ribosome associated membrane protein 4
MTTSRRLADRKTAKFQKNITRRGSVPETTVKKGNDYPVGPLVLGFFIFVVIGSSLFQIIRTATSGGVA

SEQ ID NO: 1625 - DNA, 1169 bp, Zea mays
  misc_feature: Ceres CLONE ID no. 510331
  misc_feature: Ceres CDNA ID no. 36585335
  CDS (284)..(1033): REFERENCED BY SEQ ID NO: 1626
atcgcacttgccaggtcgggcatgggccaacgaaaaagagtgacgtttcttcaccaatcaccctgcgtttgttctcctgttcatcacccgtgcgtgctctctctctctctctctctctctctcgtgcggcaactgcgaggccgccgacgcccgacggcagggtgcccaggccttcttcggtcccatcgcgaggccatagttgcatcattcgcctgagacgactgcccagcaccaggactgatctcctcactaggggcgtagaggtgaagagaagaacttgacaatgagcagcataggcacaggttacgatctgtctgtcaccaccttctccccagatggtcgcgtcttccaggtcgaatatgctaccaaggccgtcgacaacagcgggactgttgttgggatcaagtgcaaagatggcattgtcctgggtgttgagaagctggtaacctcaaagatgatgctggaagggtcaaaccggaggatccattcagtgcaccggcactctggcttggctgttgctggtttagcagcagatggcaggcaaattgtttcaaggacgaagtcagaagctgccagttatgaaaaggtctatggagaacccattcctgttaaggaattggctgatcgcgtggcaagttatgttcatctttgcacgctgtactggtggctcaggccttttggctgcggcgttattcttggaggttatgatagggatgggccacagctctacatgatagaaccctcaggagtttcttataaatactttggtgctgcattagggaaggggagacaggctgcaaaaactgagatagaaaagttgaaactttcagagcttacgtgccgggaaggcattgttgaagttgcaaagataatttatggagtacatgacgaagcgaaggataaagctttcgagttggagttgagctggatctgcgatgaatcgaaccaccagcatcagaaggttccaaatgaactgttggagcatgccaaagctgctgcccaggctgctcttgaggagatggatgccgactaagagacacgatgatttgcccaaacttggtgttttcggtggtgttgatatctctgatccctttgggggggacccactaggggtaggcacatttcaaccgaaaaccgagccgaactggaaccaaaaaaaaaaaaaaaaa

SEQ ID NO: 1626 - protein, 249 aa, Zea mays
  misc_feature: Ceres CLONE ID no. 510331
  misc_feature: Ceres CDNA ID no. 36585335
  misc_feature (31)..(216): Pfam Name: Proteasome PFAM Desc: Proteasome A
  misc_feature: Homolog of GI Number: 34909168 NR Desc: proteasome subunit alpha type 3
  misc_feature: Homolog of GI Number: 50931867 NR Desc: putative proteasome subunit alpha type 3
  misc_feature: Homolog of GI Number: 14594925 NR Desc: putative alpha7 proteasome subunit
  misc_feature: Homolog of GI Number: 2285802 NR Desc: 26S proteasome alpha subunit
  misc_feature: Homolog of GI Number: 21617882 NR Desc: 20S proteasome subunit C8
  misc_feature: Homolog of GI Number: 2511592 NR Desc: multicatalytic endopeptidase complex
  misc_feature: Homolog of GI Number: 1809142 NR Desc: multicatalytic endopeptidase subunit C8
  misc_feature: Homolog of GI Number: 60475221 NR Desc: proteasome C8
  misc_feature: Homolog of GI Number: 48096769 NR Desc: similar to C 3.4.25.1 proteasome endopeptidase complex
  misc_feature: Homolog of GI Number: 63694257 NR Desc:  similar to proteasome alpha7/C8 subunit
MSSIGTGYDLSVTTFSPDGRVFQVEYATKAVDNSGTVVGIKCKDGIVLGVEKLVTSKMMLEGSNRRIHSVHRHSGLAVAGLAADGRQIVSRTKSEAASYEKVYGEPIPVKELADRVASYVHLCTLYWWLRPFGCGVILGGYDRDGPQLYMIEPSGVSYKYFGAALGKGRQAAKTEIEKLKLSELTCREGIVEVAKIIYGVHDEAKDKAFELELSWICDESNHQHQKVPNELLEHAKAAAQAALEEMDAD

SEQ ID NO: 1627 - DNA, 1608 bp, Glycine max
  misc_feature: Ceres CLONE ID no. 510762
  misc_feature: Ceres CDNA ID no. 24726913
  CDS (533)..(1459): REFERENCED BY SEQ ID NO: 1628
attattattattattattattattattattcgtttcttcggttcatctattatcttttggtttcctgaatccatttctttctacggttatcttatcttattggctaccatcttccctatcttcctcaactgggttctgcgtattgttttaagtttaggcttgtttcattttagtatttgattgctaattttatatttctgtattcatttgtttatttatttatttattactttgtttcattcacgattctagatgagctctaaggttagtgagggggttatttcctttatgttagatttaatccccttcccctttatcatgctaatgtataaatggttgttgccttttttgtcctccatatgtccagattttcttctgtgaatttgaactgaattgaattcgcttggttgctgctggcttctgtgcttcctgtttaacttatttccagtggattattgttggcacaagttattggtctaattgaaatgaaagaatttgagtgaagaggagaattagactgtctgatctggctatggagaattcttataaggctaatggaaatggaccaactgagaatggatactctgttgcaaggcattcttatcaaccctccttgaaggggtcattaccttggctggacataagggtgttttatgtaagagtgtgcaagtgtgagcttgatgattccactcctggatttcttacactgaatcatgttcctttgaatcctgacactcttcttgaaattaatggtgttcgtactagtatatattctgatgggatgtcaacccttctcaagagagacagggtagatagaaaatcagaagaagtgacatttgtaagcactgacagcataaggatgagtggtagtgtcaagttcgaggtgtttgataaagatgttctgctgctttccggtgctttagaattgtgtaataccaatggtgttgttggggaatcaagttataatggacaaaggtggagtatgaactgcgagtcatatataattccaggcaccagcttctttaaggggaaacaattgctgttgccagactcaagtctcccaacaattgaggtctacattgcgggctccttcttgagtactccaattatcttgacaaaaaccttgcagctttctcagaaaaagcatgcaaagaagggggtgttggatgcaattccagagcatgaggccagtgaaaatgggaaagatacttcttcaaccctttctttgcaggccccagattacctttacgacaaacatgaagatgaagattataacagcgtctacccaggaacagcatatgctgatggagaagatggagaactctcatggttcaatgctggtgttagggtcggtgttggtattggacttagtgtttgtcttggcattggcattggtgttggcttgcttgttaaaacctaccaaggcaccactagccactttagaagacggctgttctgattggtgcttctatttaagcttaaaatactctgctttttgtccatctccctcttaatccaaagacagctaaccttattttttgtccatctccctcttgatccatagacaacaggttaaatatcttgtccaagaaaaaaaaaaaaaaaaaa

SEQ ID NO: 1628 - protein, 308 aa, Glycine max
  misc_feature: Ceres CLONE ID no. 510762
  misc_feature: Ceres CDNA ID no. 24726913
  misc_feature: Homolog of GI Number: 8778440 NR Desc: F18O14.16
  misc_feature: Homolog of GI Number: 25517982 NR Desc: F22L4.6 protein
MENSYKANGNGPTENGYSVARHSYQPSLKGSLPWLDIRVFYVRVCKCELDDSTPGFLTLNHVPLNPDTLLEINGVRTSIYSDGMSTLLKRDRVDRKSEEVTFVSTDSIRMSGSVKFEVFDKDVLLLSGALELCNTNGVVGESSYNGQRWSMNCESYIIPGTSFFKGKQLLLPDSSLPTIEVYIAGSFLSTPIILTKTLQLSQKKHAKKGVLDAIPEHEASENGKDTSSTLSLQAPDYLYDKHEDEDYNSVYPGTAYADGEDGELSWFNAGVRVGVGIGLSVCLGIGIGVGLLVKTYQGTTSHFRRRLF

SEQ ID NO: 1629 - DNA, 1251 bp, Glycine max
  misc_feature: Ceres CLONE ID no. 511015
  misc_feature: Ceres CDNA ID no. 24766338
  CDS (103)..(870): REFERENCED BY SEQ ID NO: 1630
gatgcgaaaatatctcgttcatgttaatgttatgataacgaggaatggactatgatgctgttctgttggtgacggtgtgattgattgtgacgaaatctgacaatgaagcgtggagcattgttgtcagtgcttgcctgcgccttcgcggcggtgatctgggcagcgaacggcgacgacaacctcgtcccgcctcgccgggaagtgtacggcaatgggcgaatattcgacatcagtcatcggtaccaacccgagatgccggaatgggaatcgaatgacggcatagggcagttcctgtggcttcccaagagcatgaagaacggttccctcgccaacaactccgaaatgaagtttcccacccacaccggcacgcacgtcgatgcccccggtcacgtgttcgaccactacttccacgccggcttcgatgtcgacacgctcgacttggacatcctcaacggacctgctatgttggttgatgttccaagagatagtaatattaccgctcaagttatgaagtcgttgaatattccaaggggtgtaatacgtgttctcttccgaactttaaataccgaccggcggctgatgtttcagaaggaatgggactcaagctatgtgggattcacagccgatggagccaaatggctagtggagaacacagatatcaaacttgtaggaattgattacctatctgttgcttcttatgattacttgattccatctcaccttgtttttctaaaagacagggagatcattctcgtggaaggcttgaagcttgatgatgttccagcagggttatattcagtccattgcttacctcttaggttggctggtgctgagggatcaccaatacggtgcattctgattaaaaattagggtgtccacatgtctgtgttcggtgtccgcgtcggtgtcggtgcttcataggctggaactgataaattggcatgggggtgtggtgtccttatggagcaagatagtttcaatgttgtgcaacaacttttgtagcttatgtttacacttactaaaaacatgcataagcacttcaaaaaatcattttgaaaaggaaaataatgtatatatagataatttgcacatttcattagcacttcaagagagatgcaacgatattggcattgcgctgaatttggttttcttttgtctgctaggttggaaaggaataagttggcacaatggtgtctttatggagcaagatagtatcaataatgtttgttaaagaaaaaaaaaaaaaaaaaa

SEQ ID NO: 1630 - protein, 255 aa, Glycine max
  misc_feature: Ceres CLONE ID no. 511015
  misc_feature: Ceres CDNA ID no. 24766338
  misc_feature (40)..(240): Pfam Name: Cyclase PFAM Desc: Putative cyclase
  misc_feature: Homolog of GI Number: 51535583 NR Desc: metal
  misc_feature: Homolog of GI Number: 50905785 NR Desc: metal
  misc_feature: Homolog of GI Number: 23016903 NR Desc: COG1878: Predicted metal
  misc_feature: Homolog of GI Number: 73660193 NR Desc: putative cyclase
  misc_feature: Homolog of GI Number: 48846762 NR Desc: COG1878: Predicted metal
  misc_feature: Homolog of GI Number: 68268415 NR Desc: Putative cyclase
  misc_feature: Homolog of GI Number: 76810113 NR Desc: cyclase
  misc_feature: Homolog of GI Number: 83748994 NR Desc: Metal
  misc_feature: Useful for sterility
MKRGALLSVLACAFAAVIWAANGDDNLVPPRREVYGNGRIFDISHRYQPEMPEWESNDGIGQFLWLPKSMKNGSLANNSEMKFPTHTGTHVDAPGHVFDHYFHAGFDVDTLDLDILNGPAMLVDVPRDSNITAQVMKSLNIPRGVIRVLFRTLNTDRRLMFQKEWDSSYVGFTADGAKWLVENTDIKLVGIDYLSVASYDYLIPSHLVFLKDREIILVEGLKLDDVPAGLYSVHCLPLRLAGAEGSPIRCILIKN

SEQ ID NO: 1631 - DNA, 1380 bp, Glycine max
  misc_feature: Ceres CLONE ID no. 511038
  misc_feature: Ceres CDNA ID no. 40351019
  CDS (74)..(874): REFERENCED BY SEQ ID NO: 1632
attaatgaccacagtgaagttcaaatgatgcttgtttcctggccatttctatagttttgtgacgtgattgagaatgtggaactttgcatctagtttaattgctggaagtgtgggtctgaaaaatgattctccaaaaccaactcactctgcttcagaattttctgatgacgagacttccatggttagcagagaggaaaggctagaatgcccaatatgctgggaatcctttaacattgttgaaaatgtgccttatgtcttatggtgtggtcacaccctttgtaaaaattgcatccttggattacaatgggccgtggtgaatttcccaacactgccaattcggcttccgctttttatctcctgcccgtggtgcaaccttttgtctctccgtttagtttaccagggaaatctgaaattccctcacaagaactactttcttctatggatggttgagaacatgaacggtgatagagtgaagtcacattctactgtttgcggggatcatcaaccagtgtggccaattatagacagtttaaccaacggaagccaagtaagccatgacagccttcagggagggcaagtttgccatccagagtcttcaagttccaatcattatcatggtgataccagtaattacttaagtatagaaacactgcatacatctctgcggaagtcattggttttatttgttcacttgacagcaaagttcccattgatcattatatttcttttgattgtcttatatgccataccagtcattgcagccattttggctctgtatatacttgttaccattctgtttgctctcccatcatttctcatcttgtactttgcatatcctagtttggattggcttgtcagggaaattatcacttgagatcaaagctgtatttcttctgctttgcaagcattatgaatgtaactttgcctcaccttgtggccccttcatccagtgtcttctacttcgtaattggtcaacatttccatttgcagctgtatcttttatcttatcatatatagccccagtcaatctcagtacacttcttgaatcttgagctctggttgagcttggctgggtgggaggagggatatcagtttttggcataatctattttgaagaccatcaaggccgtggagtgaacaaggtaatgaataatgattttgccctttcctggtggcaaatggttgttttatcaatatatgaacttcagaagaacaccctgatgtagttatcaagtgggtcaatatcagaaaagcttttttttttcatgggcacatttggatgctcctgttaatactgcctacagtatttttgctaattgtaatttgtaattataattagtagagctattttcctggccaaaaaaaaaaaaaaaaaaaaaa

SEQ ID NO: 1632 - protein, 266 aa, Glycine max
  misc_feature: Ceres CLONE ID no. 511038
  misc_feature: Ceres CDNA ID no. 40351019
MWNFASSLIAGSVGLKNDSPKPTHSASEFSDDETSMVSREERLECPICWESFNIVENVPYVLWCGHTLCKNCILGLQWAVVNFPTLPIRLPLFISCPWCNLLSLRLVYQGNLKFPHKNYFLLWMVENMNGDRVKSHSTVCGDHQPVWPIIDSLTNGSQVSHDSLQGGQVCHPESSSSNHYHGDTSNYLSIETLHTSLRKSLVLFVHLTAKFPLIIIFLLIVLYAIPVIAAILALYILVTILFALPSFLILYFAYPSLDWLVREIIT

SEQ ID NO: 1633 - DNA, 1439 bp, Glycine max
  misc_feature: Ceres CLONE ID no. 511270
  misc_feature: Ceres CDNA ID no. 40351020
  CDS (105)..(1115): REFERENCED BY SEQ ID NO: 1634
aagttccactctatatccatcgtcaacagtgaagtgcgaatactcagcaactggagctggggaaccttgtctctactcgctctcgtccccgccggagatccaccatggccggcaaccccgccaccacttcctcctccgcattatctcccgagaaatttaatttcaatttctcccccgataacccctcccgaatcaccctcacttcggatcaggtcaaccactgcacccaagccctcaacattctgaaggagaagctccacgcttctaacgtgatcactcaggagttcgcacacttgcaggcgaacaggataacgccgagcgagatgaggagaagatgcaccgtcgcgtatgacgacgtcaatttgaggaaaaaccgatacaccgacgttctgccatttgacaagaacagggttgttctcaaatctagtactgattatagacctgaagcacaggggtatatcaatgcaagccttgtctcgacctcctcagctggaaacgtgtcccagtttatagccacgcaaggtccacttcaacatacttacgaggatttctgggaaatgatcatccaatatcactgccctgcaattatcatgcttactaggttggtggataattacaagatgacaaaatgtggagattattttcaagctgaggataggcctagagaagttggtaatatttctattattggtaaatgggagaacactactgaaacttcactcgtgctgcgccatttggaggtgaaccatagagaggtagaagatgcgccattatctgttttgcatattcagtatcctgaatggcctgaccatggagttcccaaagatacatttgctgtgcgtgaaattctgaaaagattataccatttaccaccaaactttggtccaatagtggtgcactgcagtgcaggtattggtagaactggaacatactgcacaattcacaacacaattcagagaatagttgctggtgatatgtctgctgtagatattgctaagacaatagctatgttcaggtcccagcgtattggaatggttcagacccaggatcagtacattttctgctataacgctatcatagatgaactggaagaccttgtatctcagcagcagtaggagtagaaggtgctggaacttggaaggatgttgaagctgcttgcctcattttgaagctaactatcaattcttcgaacgtttttatgttcctgcaatgctcatgttttccagcagctgaagtctgaaacattagcatctgggagattttatgaatttcaccgaattctgttattctcatgcttttttgtataattgcaggcagggaaagctgacaaatattaacatccttttgattatattgttagaattctattggggaacagaatggcataatgactacaataatgcattgtccctcctattgctaaaaaaaaaaaaaaaaaa

SEQ ID NO: 1634 - protein, 336 aa, Glycine max
  misc_feature: Ceres CLONE ID no. 511270
  misc_feature: Ceres CDNA ID no. 40351020
  misc_feature (86)..(326): Pfam Name: Y_phosphatase PFAM Desc: Protein
MAGNPATTSSSALSPEKFNFNFSPDNPSRITLTSDQVNHCTQALNILKEKLHASNVITQEFAHLQANRITPSEMRRRCTVAYDDVNLRKNRYTDVLPFDKNRVVLKSSTDYRPEAQGYINASLVSTSSAGNVSQFIATQGPLQHTYEDFWEMIIQYHCPAIIMLTRLVDNYKMTKCGDYFQAEDRPREVGNISIIGKWENTTETSLVLRHLEVNHREVEDAPLSVLHIQYPEWPDHGVPKDTFAVREILKRLYHLPPNFGPIVVHCSAGIGRTGTYCTIHNTIQRIVAGDMSAVDIAKTIAMFRSQRIGMVQTQDQYIFCYNAIIDELEDLVSQQQ

SEQ ID NO: 1635 - DNA, 1604 bp, Glycine max
  misc_feature: Ceres CLONE ID no. 511554
  misc_feature: Ceres CDNA ID no. 25446632
  CDS (151)..(1131): REFERENCED BY SEQ ID NO: 1636
gagagagaaagacaaatagaagaagctgcatttgcagagacgcattcgcgtttgtctgagagagagaattggaaggttgcgacgagtgatgatatacatattgtggcggtagtgaaatcgaggaaaaagaggtagcaatcgtgagttgcaatgagtagcgaaaagtctccttcatcagcttctgcttcagcttcttcttcgagtagctacgagttgagcaaaggcatcaatggcctcgacaaggttattcttcgcgacccacgtggtagctccgctgaggtgtacttgtacggtgctcacgtgacttcatggaagaatgaacaggccgaggaattgctttttctcagtagtaaggctatatttaagcctccaaagccaattcgtggagggatcccaatatgttttcctcaattttcaaacctcggtcctctcgactcgcatggatttgctagaaatcggttctggaccattgatgattctcctcctccttttctgacaaatactccgagtaaagcctttgttgatttgattcttaaaccctcagaagacgacatcaagatttggcctcacagttttgaatttcgtcttagggtagctcttggatctggaggagatctgatgatgacatctcggatcaggaacactaacattgatgggaagccattttcattcacatttgctaatcatacatatttctctgtgtcagatataagtgaagtgcgggttgaaggattagagacattggattatcttgacaacttgcagaaaagggaacgctttactgaacagggggatgctttaacatttgaatcggaatttgacaggatatatctaagcactcctacaaagattgcaattcttgatcatgagaagaagagaacaattgtattacgtaaagatggtcttcctgatgctgtggtgtggaatccttgggacaagaaagcaaaggctatgtctgattttggtgatgatgagtataagtacatgctttgtgtagaggctgctgctattgaaaagcctatcactttgaaacctggcgaggaatggaagggaagactagaactttcaactgttccttctagttattgtagtggacagcttgaccccaaaaaagttattcaaggaagctgaaagatctcgttgtgttttgtgtcctgtacaggtagcttgttgccgcaccgatgaactttgaaaggaaagtgtctccaacaatttccccccttcatgttccacttaaaccttcatgtaggacggccggatgaactcatgcatagagttttgttaaataatattttcctgcaactgatgactagttcggtcataatttacgtacaagtagaatagcccacagttgtttatggaaaatcgaaattaaaacctccaattttattgtattttcacgttgggttctcgtactcataaaatgtttgtttttacatatcgtaggcaatgaatgcatgtatttgacaattgacgggatcattttacaacactataagttggcctgtatgtcgttaagttgttgctgttatctacatattcatgtaatgaagcaagataattattaaatatataattgttatttcaaaaaaaaaaaaaaaaaa

SEQ ID NO: 1636 - protein, 326 aa, Glycine max
  misc_feature: Ceres CLONE ID no. 511554
  misc_feature: Ceres CDNA ID no. 25446632
  misc_feature (31)..(306): Pfam Name: Aldose_epim PFAM Desc: Aldose 1
  misc_feature: Homolog of GI Number: 50928507 NR Desc: OSJNBa0041A02.19
  misc_feature: Homolog of GI Number: 50942779 NR Desc: putative Aldose 1
  misc_feature: Homolog of GI Number: 19387263 NR Desc: putative apospory
  misc_feature: Homolog of GI Number: 549984 NR Desc: possible apospory
  misc_feature: Homolog of GI Number: 55773848 NR Desc: Aldose 1
  misc_feature: Homolog of GI Number: 18417396 NR Desc: aldose 1
  misc_feature: Homolog of GI Number: 52007251 NR Desc: COG0129: Dihydroxyacid dehydratase/phosphogluconate dehydratase
  misc_feature: Homolog of GI Number: 21245008 NR Desc: epimerase
  misc_feature: Homolog of GI Number: 58579911 NR Desc: transglycolase
  misc_feature: Homolog of GI Number: 21233574 NR Desc: epimerase
MSSEKSPSSASASASSSSSYELSKGINGLDKVILRDPRGSSAEVYLYGAHVTSWKNEQAEELLFLSSKAIFKPPKPIRGGIPICFPQFSNLGPLDSHGFARNRFWTIDDSPPPFLTNTPSKAFVDLILKPSEDDIKIWPHSFEFRLRVALGSGGDLMMTSRIRNTNIDGKPFSFTFANHTYFSVSDISEVRVEGLETLDYLDNLQKRERFTEQGDALTFESEFDRIYLSTPTKIAILDHEKKRTIVLRKDGLPDAVVWNPWDKKAKAMSDFGDDEYKYMLCVEAAAIEKPITLKPGEEWKGRLELSTVPSSYCSGQLDPKKVIQGS

SEQ ID NO: 1637 - DNA, 1312 bp, Glycine max
  misc_feature: Ceres CLONE ID no. 511803
  misc_feature: Ceres CDNA ID no. 40351021
  CDS (74)..(1144): REFERENCED BY SEQ ID NO: 1638
agaggaacaaagaaaggaaaagagaaaaaaatttctcagaagagtctccgctgaaagttttggtttcttgaagatgtcgttgctctccgatcttatcaaccttaacctctccgacatcaccgataaagtgatcgccgagtacatatgggtaggtggatctggcatggatatgaggagcaaagcaaggacactctcaggaccggttaaagacccttcgaagcttcccaagtggaactatgatggttccagcactggtcaagctcctgggcaagatagtgaagtgatcttatatccacaagcaattttcaaggatccattcaggaggggtagcaatatcctggttatgtgtgatgcttacactcctgctggggaacccattcctacaaacaagagaaataatgctgcaaagatattcggccatcctgatgttgctgctgaagaaccctggtatggcctagagcaagaatacaccttgttgcaaaaagatgtccaatggcctctaggatggcctcttggtggttttcctgggccacaaggaccatattattgtggtactggtgctaacaaggctttcgggcgtgatattgttgactcacattacaaagcatgtatttatgcgggcattaacatcagtggaatcaatggagaagtgatgcctggtcagtgggaattccaagttggtccatcaattggcatctctgctgctgacgaattgtgggttgctcgttatattttggagaggatcaccgagattgcaggagtggtgctttcctttgaccctaaaccaattcagggtgattggaatggtgctggtgctcacacaaattacagtaccaagtccatgagaaacgatggtggctatgaagtcatcaaaaaagcaattgctaagttggaaaagagacacaaggagcacattgcagcttacggagaaggcaacgaacgtcgtttgactggacgacacgagacagctgacatgaacacctttgtatggggtgttgcaaaccgtggtgcttctattagagtagggagggacactgagaaggcagggaaggggtattttgaggataggaggcctgcctctaatatggacccttatgtggtcacttccatgattgctgagacaaccattctttggaaaccataagcagcctcaaaaataatcacacatgccttgttttttcatgttttgtgtgcactcttgttgtgactacctcgccttttcttaggcattgtttgttggtagtactgaagtgaagaattgtcgtgtcattccattaatgtacgttttcaaaggaaaaaaaaaaaaaaaaaa

SEQ ID NO: 1638 - protein, 356 aa, Glycine max
  misc_feature: Ceres CLONE ID no. 511803
  misc_feature: Ceres CDNA ID no. 40351021
  misc_feature (103)..(355): Pfam Name: Gln PFAM Desc: Glutamine synthetase
  misc_feature (17)..(98): Pfam Name: Gln PFAM Desc: Glutamine synthetase
MSLLSDLINLNLSDITDKVIAEYIWVGGSGMDMRSKARTLSGPVKDPSKLPKWNYDGSSTGQAPGQDSEVILYPQAIFKDPFRRGSNILVMCDAYTPAGEPIPTNKRNNAAKIFGHPDVAAEEPWYGLEQEYTLLQKDVQWPLGWPLGGFPGPQGPYYCGTGANKAFGRDIVDSHYKACIYAGINISGINGEVMPGQWEFQVGPSIGISAADELWVARYILERITEIAGVVLSFDPKPIQGDWNGAGAHTNYSTKSMRNDGGYEVIKKAIAKLEKRHKEHIAAYGEGNERRLTGRHETADMNTFVWGVANRGASIRVGRDTEKAGKGYFEDRRPASNMDPYVVTSMIAETTILWKP

SEQ ID NO: 1639 - DNA, 1498 bp, Glycine max
  misc_feature: Ceres CLONE ID no. 511819
  misc_feature: Ceres CDNA ID no. 36580532
  CDS (310)..(1071): REFERENCED BY SEQ ID NO: 1640
gataatacagcacaaaaaaacttcacacacacaacacaacactttcctctctctctctctctctctctctctagggttccaagtttgaacttgaaagtgttgaactttctctagctttttcacaaatttggttgcacttgcaactgaggcaggaaagagggatcaccagggggcacgagaggaggaagaggaaagagaagaaaaaacaagaaaagtagagaaaggggtaggtgttgtacagaaatagaaattaaaaaattgagtgaaaaattaaaagggaaatttttttagaagaagagtgatagggatatggggaggggaagagtggagttgaagaggatagagaacaagataaacaggcaagtcacttttgcaaagaggagaaatgggcttctcaagaaagcctatgagctatctgttctctgtgatgctgaggttgccctcatcatcttctccaaccgaggcaagctttatgagttctgtagcagctctagcatgctcaaaacacttgaaaggtaccagaaatgcagctatggtgctgtggaagttagcaaacctgccaaagagctcgagcagagcagctaccgtgaatacttgaagctgaaagcaagatttgaatcacttcaaaggacccaaagaaaccttttaggggaagacttaggcccactgaatatcaaagaacttgagcatcttgaacggcaattggattcatctctaaagcaagtgaggtccacaaagacacaattcatgctggaccagttatctgatcttcaaaccaagatgttagtagaagcaaacagatccttgacagtgaagctggaagaaatcaattcaagaaaccactacaggcaatcatgggaagctggtgatcaaagtatgccatatggtggtggtggtccagagaattctcactctcattctcactctcagggcttcttccaaccattggaatgcaaccctacactacatattggtcctgattacaggtacaatgctgtagcttcagatcagataactgccacaactcaacctcaacaagtgagtggctttattccagggtggatgctttgaactaattaggctcagtgcattcaggtggagacataaaaaagcaaacaccttacaaaagggcaaaagccaaaaatgcatcttggtgttggcaaggtgtaaatgcaaccctgcttctacagttattttggtgtataagaaactgatgttgtgacttgttcaaacttttgaacttttagccatagacatatatggcaatttataacattaggtatcttttaaaggatccctttttattattaaatatctgaacgaccgatttcaattttcttctattgcattacatattaatcttggcttgatgtaagctcagttttcttctaggtttttgcttgcattataagtgaaagattgtaaaatttcatgaagctctgaaatctcttttcaatctttcataaaaaaaatatacatcaaaaaaaaaaaaaaaaaa

SEQ ID NO: 1640 - protein, 253 aa, Glycine max
  misc_feature: Ceres CLONE ID no. 511819
  misc_feature: Ceres CDNA ID no. 36580532
  misc_feature: The plant flowers significantly earllier than wild-type.
  misc_feature: The plant is abnormally small.
  misc_feature: Useful for making plants with modulated growth and phenotype characteristics
  misc_feature: null
  misc_feature: The sequence is a functional homolog of  SEQ ID NO 26 in the  10/666,642 US patent application
  misc_feature: The sequence is a functional homolog of  SEQ ID NO 30 in the  10/666,642 US patent application
  misc_feature: Useful for making plants with modulated biomass
  misc_feature: Useful for making plants with modulated flowering time
  misc_feature (75)..(172): Pfam Name: K PFAM Desc: K
  misc_feature (9)..(59): Pfam Name: SRF PFAM Desc: SRF
  misc_feature: Homolog of GI Number: 73810196 NR Desc: MADS
  misc_feature: Homolog of GI Number: 62132637 NR Desc: MADS box protein M6
  misc_feature: Homolog of GI Number: 6683777 NR Desc: CAGL2
  misc_feature: Homolog of GI Number: 20385584 NR Desc: MADS
  misc_feature: Homolog of GI Number: 63094573 NR Desc: MADS
  misc_feature: Homolog of GI Number: 3290209 NR Desc: MADS
  misc_feature: Homolog of GI Number: 3646334 NR Desc: MdMADS8
  misc_feature: Homolog of GI Number: 28372802 NR Desc: transcription factor MAGL4
  misc_feature: Homolog of GI Number: 73537277 NR Desc: AGL2
  misc_feature: Homolog of GI Number: 3646336 NR Desc: MdMADS9
MGRGRVELKRIENKINRQVTFAKRRNGLLKKAYELSVLCDAEVALIIFSNRGKLYEFCSSSSMLKTLERYQKCSYGAVEVSKPAKELEQSSYREYLKLKARFESLQRTQRNLLGEDLGPLNIKELEHLERQLDSSLKQVRSTKTQFMLDQLSDLQTKMLVEANRSLTVKLEEINSRNHYRQSWEAGDQSMPYGGGGPENSHSHSHSQGFFQPLECNPTLHIGPDYRYNAVASDQITATTQPQQVSGFIPGWML

SEQ ID NO: 1641 - DNA, 686 bp, Glycine max
  misc_feature: Ceres CLONE ID no. 511820
  misc_feature: Ceres CDNA ID no. 29191490
  CDS (70)..(564): REFERENCED BY SEQ ID NO: 1642
ggcaaaccctagtgcttcccaccgatccatttcagccgccgccgcgcgtagcaagcaggagcagcaaggatgccggctggccacgggctgcgctcgcggacgcgcgacctgttcgcgcgccccttccgcaagaagggctacatcccgctcaccacctacctccgcacctacaagatcggcgactacgtcgacgtcaaggtgaacggcgccgtccacaaggggatgccgcacaagttctaccacggccgcaccggtcgcgtctggaacgtcaccaagcgcgccatcggcgtcgagataaacaagcaggtgaatggtcgcatcatcaggaagcgtatccatgtccgcgtggagcatgtgcagccgtcccgctgcacagaagagttccgcctgaggaaggtgaagaatgatcagctgaaggcggatgcaaaggagcgcggcgaggtcatcagcaccaagaggcagccgttgggtcccaagcctggcttcatggttgaggggactaccatcgagaccgtcactcccatcccgtacgatgtggtcaatgatcttaagggcggatactaggttgtttgtttggtctttctacctgttctacatctgtgttactctagtgcgtacaattttgctcacactgagcagtagtatgaacctattgtgtgttcatgttgaaaaaaaaaaaaaaaaaa

SEQ ID NO: 1642 - protein, 164 aa, Glycine max
  misc_feature: Ceres CLONE ID no. 511820
  misc_feature: Ceres CDNA ID no. 29191490
  misc_feature: null
  misc_feature: Useful for making plants with modulated flowering time
  misc_feature (2)..(100): Pfam Name: Ribosomal_L21e PFAM Desc: Ribosomal protein L21e
  misc_feature: Homolog of GI Number: 31432571 NR Desc: 60S ribosomal protein L21
  misc_feature: Homolog of GI Number: 3885884 NR Desc: 60S ribosomal protein L21
  misc_feature: Homolog of GI Number: 32400808 NR Desc: 60s ribosomal protein L21
  misc_feature: Homolog of GI Number: 12321346 NR Desc: 60S ribosomal protein L21
  misc_feature: Homolog of GI Number: 3482935 NR Desc: Putative ribosomal protein L21
  misc_feature: Homolog of GI Number: 76161012 NR Desc: 60S ribosomal protein L21
  misc_feature: Homolog of GI Number: 54292803 NR Desc: ribosomal protein L21
  misc_feature: Homolog of GI Number: 15213768 NR Desc: ribosomal protein L21
  misc_feature: Homolog of GI Number: 54609233 NR Desc: ribosomal protein L21
MPAGHGLRSRTRDLFARPFRKKGYIPLTTYLRTYKIGDYVDVKVNGAVHKGMPHKFYHGRTGRVWNVTKRAIGVEINKQVNGRIIRKRIHVRVEHVQPSRCTEEFRLRKVKNDQLKADAKERGEVISTKRQPLGPKPGFMVEGTTIETVTPIPYDVVNDLKGGY

SEQ ID NO: 1643 - DNA, 1240 bp, Glycine max
  misc_feature: Ceres CLONE ID no. 512456
  misc_feature: Ceres CDNA ID no. 40041244
  CDS (24)..(1124): REFERENCED BY SEQ ID NO: 1644
ggggaaacagtagtcacagaaacatgaatttactctatcaaaaaaagctcctttctcgatggcttatagccattctttggtgttctattatagcccccatctttcaacatgtttctgttatgagcctaccaaacaatgagactgtgccagcggtgatggtatttggggactctatagtagatccgggaaacaacaactatatcaccacacttgtcaaatgcaatttcccaccatatggtagagattttggtgaaggaaatcaaccaactgggaggttcagcaatggcttagttccatcagacataattgctgcaaaacttggagtcaagaagcttttacctgcttatcttgacccaaatttgcaacttcaagatctcctcactggtgtaagctttgcctcaggcggtgccggatatgatcctctaacagctgaattagtgaatgtgatgtcattgtcagatcaattagacatgttcaaggaatacataaagaagataaatgaagcggttggaagaaacagaacgacaatgatagtatctaagagcatatacatagtatgtgtaggaagtgatgacattgccaatacttattatcaatcaccttttaggagtgctgagtatgatattccttcatacacggacttcatggcttcagaagcctcaaaattcttgcaggaactttatggactaggagctagaagaattggagtatttggtttatcagttatagggtgtgtgccctcacaaagaacactcggtggaggcttgaatagagcatgcttagattcttctaaccaagcagcaatgctcttcaactcgaagctcaactcccagatggttgtgcttggaaaaaagttttcagactctaggcttgtttatcttgattcttacaacggatttcttaacatgcttcaaaatcctgctaaatttggtttcgaagtgataaagaaaggatgctgtggcacgggggatatagaagtgagcattttgtgcaaccgttacagcataaacacatgctctaacaccactcactacttgttctgggacagttatcatcctacacaggaggcttatcttgcccttagttctctagtgtttgataacaaaattaaggacttcttctgagaacaattggagtgcctacgtcatctgtatttgattaatattttaaaagaccattttagcataaaaaaaactcttatgaattttaaagattatgtaagaaaaaaaaaaaaaaaaaa

SEQ ID NO: 1644 - protein, 366 aa, Glycine max
  misc_feature: Ceres CLONE ID no. 512456
  misc_feature: Ceres CDNA ID no. 40041244
  misc_feature (44)..(357): Pfam Name: Lipase_GDSL PFAM Desc: GDSL
  misc_feature: Homolog of GI Number: 15054386 NR Desc: family II lipase EXL3
  misc_feature: Homolog of GI Number: 26449364 NR Desc: putative family II lipase EXL3
  misc_feature: Homolog of GI Number: 8778808 NR Desc: T4O12.13
  misc_feature: Homolog of GI Number: 18394825 NR Desc: family II extracellular lipase
  misc_feature: Homolog of GI Number: 21592372 NR Desc: anter
  misc_feature: Homolog of GI Number: 37534726 NR Desc: putative anter
  misc_feature: Homolog of GI Number: 28827430 NR Desc: putative family II extracellular lipase 1
  misc_feature: Homolog of GI Number: 15054382 NR Desc: family II lipase EXL1
  misc_feature: Homolog of GI Number: 50920277 NR Desc: putative lipase/acylhydrolase
  misc_feature: Homolog of GI Number: 15054384 NR Desc: family II lipase EXL2
MNLLYQKKLLSRWLIAILWCSIIAPIFQHVSVMSLPNNETVPAVMVFGDSIVDPGNNNYITTLVKCNFPPYGRDFGEGNQPTGRFSNGLVPSDIIAAKLGVKKLLPAYLDPNLQLQDLLTGVSFASGGAGYDPLTAELVNVMSLSDQLDMFKEYIKKINEAVGRNRTTMIVSKSIYIVCVGSDDIANTYYQSPFRSAEYDIPSYTDFMASEASKFLQELYGLGARRIGVFGLSVIGCVPSQRTLGGGLNRACLDSSNQAAMLFNSKLNSQMVVLGKKFSDSRLVYLDSYNGFLNMLQNPAKFGFEVIKKGCCGTGDIEVSILCNRYSINTCSNTTHYLFWDSYHPTQEAYLALSSLVFDNKIKDFF

SEQ ID NO: 1645 - DNA, 1672 bp, Glycine max
  misc_feature: Ceres CLONE ID no. 512621
  misc_feature: Ceres CDNA ID no. 25445630
  CDS (378)..(1214): REFERENCED BY SEQ ID NO: 1646
tgaattcacaattatttattttttttcttcttctagaaaaaaggcattttagtcatttcaaatgacacttaattctgtcggtgacatgtggcacagcacatcccctcactctcccattatttgaacatcattattggatatcatgtgattttgcatgtgatgccaccacccacacaaataatgagcattgaaaaattggtcactctagcaatccatgtttgatgataccctttttacagtgaacacaaattcgtattcctcattcaatttggagagctcggcatatttatttataccttatttagtggcatgcaaagatagataggaattatgctatactgagtttacatgttttgcttgaactgtaaatgcaaaatatgattctgatgaatgtggtgatgctgttattgcagtatgaagacattgtccaattggaatggttgtccaactttgtggaggattccttttgtggggggagcctaacaatgaacaaagtggaagagccatcatgtaccactaaggaggactcggtcaacacccaatttcacacatcaagcccagtttctgtcctcgaaagtagcagttcttgctctggtggcaagactttgccacctcgcagtccagagatttacatccctgtgccgtgtggacgtgcacgcagcaagcgtccacgtccagcaaccttcaatcctaggcctgccatgaaccttatttcccctgcctcctcttttgttggggagaatatgcagcctaatgtcatatcatccaaggcctcttcagattctgagaattttgctgagtctcaacttgttcccaagatgccgaagctagcttctggggagcctaagaagaaaaagaaagtgaaggtgccacttccagtagctccagctgataacaatcaaaatgcctcacaacctgttaggaaatgcatgcattgtgagataaccaagacaccacagtggagggcagggccaatggggccaaaaacactatgcaatgcatgtggtgttcgttacaagtccggccggctcttccccgaataccggcctgctgcaagtccaactttttgcccatccgtgcactccaattctcataagaaggtcctggaaatgagatgcaggggatttgacaaatctggttttgcaatcaattcagctgcctcacctgaactcattccaaacactaacagcagccttaccctggagtacatgtgatgtgaaggaggattgatcctttgttggaaatttctctttcattgctgccctctagagtcatgtcttatgttatttcttttgatatttcatttctttggttcattggtttttgtacagggttggactgggggaataggagcaatagatgatgatgatcttattttagcagttaggggaagattgtaatgagaagtgaggaaaaaaagggtagacatatgcaggtcaaaaagggtagggtcttaggtctagtaattgtaggtcccttaaggtcattaggagttggtgtctcggttgttttttttatttttcttggaattcttttcatttttttccctttttatatatatccctatttgtgggaattctttttgcagttcattttgtagcaaaaatttcgagttgagtaagagagtttttaatttgtaaaaaaaaaaaaaaataaaaaaaaaaaaaaaaaa

SEQ ID NO: 1646 - protein, 281 aa, Glycine max
  misc_feature: Ceres CLONE ID no. 512621
  misc_feature: Ceres CDNA ID no. 25445630
  misc_feature (187)..(222): Pfam Name: GATA PFAM Desc: GATA zinc finger
  misc_feature: Homolog of GI Number: 37572443 NR Desc: AG
  misc_feature: Homolog of GI Number: 37572451 NR Desc: AG
  misc_feature: Homolog of GI Number: 12711287 NR Desc: GATA
  misc_feature: Homolog of GI Number: 15451574 NR Desc: Putative GATA
  misc_feature: Homolog of GI Number: 34909448 NR Desc: OSJNBa0014K08.18
  misc_feature: Homolog of GI Number: 37572449 NR Desc: AG
  misc_feature: Homolog of GI Number: 34098855 NR Desc: At5g66320
  misc_feature: Homolog of GI Number: 52421283 NR Desc: At1g08010
  misc_feature: Homolog of GI Number: 50911202 NR Desc: putative AG
  misc_feature: Homolog of GI Number: 37572445 NR Desc: AG
  misc_feature: Useful for delaying flowering time
  misc_feature: Useful for making bigger plants
  misc_feature: Useful for making shorter plants
MQNMILMNVVMLLLQYEDIVQLEWLSNFVEDSFCGGSLTMNKVEEPSCTTKEDSVNTQFHTSSPVSVLESSSSCSGGKTLPPRSPEIYIPVPCGRARSKRPRPATFNPRPAMNLISPASSFVGENMQPNVISSKASSDSENFAESQLVPKMPKLASGEPKKKKKVKVPLPVAPADNNQNASQPVRKCMHCEITKTPQWRAGPMGPKTLCNACGVRYKSGRLFPEYRPAASPTFCPSVHSNSHKKVLEMRCRGFDKSGFAINSAASPELIPNTNSSLTLEYM

SEQ ID NO: 1647 - DNA, 720 bp, Glycine max
  misc_feature: Ceres CLONE ID no. 512638
  misc_feature: Ceres CDNA ID no. 36527526
  CDS (98)..(490): REFERENCED BY SEQ ID NO: 1648
attcaccacaaccctctctctatattccattgccacccagttttgaatatatttttattccttctttgtttcttcactttcttccatacacataaccatgtcttctcagactgttgtcctcaaagttggtatgtcatgtcaagggtgtgctggagcagtgaacagggttttgggaaaaatggaaggtgttgagtcatttgacattgatctgaaggagcagaaggtgacagtgaaaggaaatgtggagccagatgaagttctgcaagccgtttccaaatctgggaagaagactgcattctgggtggatgaagcaccacaatctaaaaacaagcctttagaaagtgcacctgttgcctcagaaaacaagccttcagaagctgcaactgttgcctcagctgagcctgaaaacaagccttcagaagctgcaattgttgattcagctgagcctgaaaacaagccttcagatactgttgttgaaactgttgcttaaggcatttgtggttctatttttctatgtggaagtaggtctgtttcatatagtatttcatgtgctttgtgcatgtcagctattatatttggtgtgttgttactggtatctaagctacaataacttgtggcctatttttcacatgagatacatttcatgggtgctataatttagaatttgaacctgtcactcttgttaaaaaaaaaaaaaaaaagaaaaaaaaaaaaaaaaaa

SEQ ID NO: 1648 - protein, 130 aa, Glycine max
  misc_feature: Ceres CLONE ID no. 512638
  misc_feature: Ceres CDNA ID no. 36527526
  misc_feature (6)..(67): Pfam Name: HMA PFAM Desc: Heavy
  misc_feature: Homolog of GI Number: 6525011 NR Desc: copper chaperone homolog CCH
  misc_feature: Homolog of GI Number: 53748477 NR Desc: copper chaperone
  misc_feature: Homolog of GI Number: 47176684 NR Desc: copper chaperone
  misc_feature: Homolog of GI Number: 21553785 NR Desc: copper homeostasis factor
  misc_feature: Homolog of GI Number: 37651975 NR Desc: chopper chaperone
  misc_feature: Homolog of GI Number: 50909185 NR Desc: copper chaperone homolog CCH
  misc_feature: Homolog of GI Number: 56202338 NR Desc: putative copper chaperone
  misc_feature: Homolog of GI Number: 18655401 NR Desc: At1g66240/T6J19_6
  misc_feature: Homolog of GI Number: 30039180 NR Desc: copper chaperone
  misc_feature: Homolog of GI Number: 50942155 NR Desc: putative copper chaperone
MSSQTVVLKVGMSCQGCAGAVNRVLGKMEGVESFDIDLKEQKVTVKGNVEPDEVLQAVSKSGKKTAFWVDEAPQSKNKPLESAPVASENKPSEAATVASAEPENKPSEAAIVDSAEPENKPSDTVVETVA

SEQ ID NO: 1649 - DNA, 1620 bp, Glycine max
  misc_feature: Ceres CLONE ID no. 512743
  misc_feature: Ceres CDNA ID no. 36518510
  CDS (19)..(1482): REFERENCED BY SEQ ID NO: 1650
gagaacaataggagcatcatggttaggctatggtgctcttctctctcaattacacttttattccaacagctcatcagattgtgcatttcttggagtgtgcaaaccccaacacccccattgccaatcctccctctcccaacatattcccagttgaaatggcaacaaagggagatcataatgtttttccattttggtgtgaacacattcagtgacagagaatggggcactggccaggaaaacccagcaatcttcaatccaacggggctcaacaccacccagtgggccactgtggcagcagatgcaggagtttcattgatgatattaactgcaaaacaccatgatggcttctgcctctggccttccaagtacactgaccattctgtcattagcagccctaggcaaggtggcaagggtgatgtggttcaagactttgtcaatgcagccactgcacaaggaattgatgtaggggtctacctttcaccttgggatagacatgaccctagatatggcaatgatttgctctacaaccaatactacttggctcaactacaagagttgctcaagaaatatccaaatgttagagagatttggttcgatggagcaaagggtgccaatgcaaaaaatatgacgtattacttttcagattggttttccatggtgaaggagctgcagagttccatcaacatcttctctgatgcaggtcctgatgttaggtgggtgggagatgaaacaggttctgcagggtatacatgttggtctaccattaatcgaacctctctatccattggaagtccagacatcattcagtatataaacactggtgatccaaaagggacagattggctaccggcggaatgtgatgtatccattcgaaaaggatggttttggcacaaatcagaatcaccaaaaaagctaagcgagctacttgacatttattacaattcggttgggagaaattgtgtgttacttctcaatgtgcctcctaatacaagtggccttataactgaagttgatgccaatagattgaaagagtttagaagtgcaatcaagacaattttccatcagaatcttgctgaggattgttttgttaaagttagtagccaaagagggggtttcgggccagaaaagatgctagacagtgaccacttgtggtcatactgggccccaagggacgatgatgatgaaaaggaccattgggttgaaatttgggccaaggaagggagattgagattcaatgtggttagaatacaagaggcaattggtcttggtcaaaggatcaaacggcatgaaatctatgtggatggtaaattgatcatcaaagccacaacggttggttataagaggcttcataggcttgatgggggtgaagtgcacgctcgtggtgtgaggataagaattagaaaggcaagaggagtgcctcttatctcttctattggcttgcattatgatcctttctggcactcaaagtttactgtatcctgaagagttaagtaagtttaggtaaaggagcataactgcaataaattaagtagagccttaagaagaatattgaaatattgttctatcagtaaagaacaaaaaataaatttactttaaatttccaaaaaaaaaaaaaaaaaa

SEQ ID NO: 1650 - protein, 487 aa, Glycine max
  misc_feature: Ceres CLONE ID no. 512743
  misc_feature: Ceres CDNA ID no. 36518510
  misc_feature (11)..(376): Pfam Name: Alpha_L_fucos PFAM Desc: Alpha
  misc_feature: Homolog of GI Number: 30683758 NR Desc: glycosyl hydrolase family 29 / alpha
  misc_feature: Homolog of GI Number: 50927915 NR Desc: OSJNBa0084K11.7
  misc_feature: Homolog of GI Number: 42556000 NR Desc: FucA
  misc_feature: Homolog of GI Number: 60494104 NR Desc: putative lipoprotein
  misc_feature: Homolog of GI Number: 48848369 NR Desc: COG3669: Alpha
  misc_feature: Homolog of GI Number: 79042905 NR Desc: Twin
  misc_feature: Homolog of GI Number: 34397691 NR Desc: alpha
  misc_feature: Homolog of GI Number: 60493986 NR Desc: putative exported fucosidase
  misc_feature: Homolog of GI Number: 4096756 NR Desc: alpha
  misc_feature: Homolog of GI Number: 71900009 NR Desc: Coagulation factor 5/8 type
MVRLWCSSLSITLLFQQLIRLCISWSVQTPTPPLPILPLPTYSQLKWQQREIIMFFHFGVNTFSDREWGTGQENPAIFNPTGLNTTQWATVAADAGVSLMILTAKHHDGFCLWPSKYTDHSVISSPRQGGKGDVVQDFVNAATAQGIDVGVYLSPWDRHDPRYGNDLLYNQYYLAQLQELLKKYPNVREIWFDGAKGANAKNMTYYFSDWFSMVKELQSSINIFSDAGPDVRWVGDETGSAGYTCWSTINRTSLSIGSPDIIQYINTGDPKGTDWLPAECDVSIRKGWFWHKSESPKKLSELLDIYYNSVGRNCVLLLNVPPNTSGLITEVDANRLKEFRSAIKTIFHQNLAEDCFVKVSSQRGGFGPEKMLDSDHLWSYWAPRDDDDEKDHWVEIWAKEGRLRFNVVRIQEAIGLGQRIKRHEIYVDGKLIIKATTVGYKRLHRLDGGEVHARGVRIRIRKARGVPLISSIGLHYDPFWHSKFTVS

SEQ ID NO: 1651 - DNA, 1340 bp, Glycine max
  misc_feature: Ceres CLONE ID no. 512935
  misc_feature: Ceres CDNA ID no. 40351022
  CDS (350)..(1198): REFERENCED BY SEQ ID NO: 1652
aaaaaaaaaccgcatctgttccgtgtaaggagaagtcacaaaatttctcagctcctgcctgtatacttcacatggcctaatcccacagtcgcacactcttccaccctgccatcaccaatcatcaacacaacgcccattattatttaaaaatccttaatatattattattcttcgtccatcgctttttcttgaagactacttcatccttcttattagtttctttttatttcaatctttctcactcgcacgcacgcacgcacagtctctagtggtaccgtgccggttcatttgcttcatccaccacctcattttcagagatttcgtgcactcaacaaactctcatccacccatggcgtcatcactatcaacaatagctctattcctgccccaatcgctctatattaagccccgcctggcgccacggcctcttcctccccctcaattccgctcccttttcctaacctcaccggcgggtgctcgtactgctactgtcatgcctagaagggcggcagtcatcgtgtcggcggcgacggcggagacgccgaagaagaagggcgaatcgaaagggttcgtggaagagatgaggttcgtggcgatgaggctgcacacgagggaccaggccagggagggcgagaaggaggtcaagcagcccgaggagaaagccgttaccaagtgggacccatccgtcgaagggtacctgaaatttcttgtggacagtaagctcgtttatgacacgctggagaaaatcgttcaagaggctcctcatccttcttatgctgaattcagaaacactggattggaaaggtctgcaagtttggcagaagatttggagttgttcaaggagcaaggttataccattcctgaaccttcttctcctggtcttacctatgcacaatatcttaaggagttatctgtgaaggatccccaagcattcatttgccatttttacaatatctactttgctcattcagctggtggtcgaatgattgggaaaaaggttgctgaaaagttacttaacaacaaggcgttggagttctacaaatgggatgatgaccttccacgattgttgcagaatgtgagagacaagttgaataaagttgctgaaccttggagtcgggaagaaaaggaccactgtctggaagaaacagaaaaatcattcaagctctctggagagattctccgtttgattttatcatgataatagatgccctgctatctgtgtaattatgggtattaaagtgcatggcggaagccaacaacattaccatatgtgaattattttatttccaatacgcaaaggaataatagaactgatgttgattaaaaaaaaaaaaaaaaaa

SEQ ID NO: 1652 - protein, 282 aa, Glycine max
  misc_feature: Ceres CLONE ID no. 512935
  misc_feature: Ceres CDNA ID no. 40351022
  misc_feature (88)..(279): Pfam Name: Heme_oxygenase PFAM Desc: Heme oxygenase
MASSLSTIALFLPQSLYIKPRLAPRPLPPPQFRSLFLTSPAGARTATVMPRRAAVIVSAATAETPKKKGESKGFVEEMRFVAMRLHTRDQAREGEKEVKQPEEKAVTKWDPSVEGYLKFLVDSKLVYDTLEKIVQEAPHPSYAEFRNTGLERSASLAEDLELFKEQGYTIPEPSSPGLTYAQYLKELSVKDPQAFICHFYNIYFAHSAGGRMIGKKVAEKLLNNKALEFYKWDDDLPRLLQNVRDKLNKVAEPWSREEKDHCLEETEKSFKLSGEILRLILS

SEQ ID NO: 1653 - DNA, 1081 bp, Glycine max
  misc_feature: Ceres CLONE ID no. 513073
  misc_feature: Ceres CDNA ID no. 40351023
  CDS (178)..(738): REFERENCED BY SEQ ID NO: 1654
gaagaagaagggttttaagagagagagagagagagcgaataattaaaaggcccttgccttcacctttggtgtccaaagatattgctagagagaagaactagttgttcaattagcttcttcttcttcttcttcttccacccttcttgtttgagtaaattaagaagcttgagatcagacatgtcgagctgcagcatcgatgttgcgcctgagcaactctgctacatcccctgcaacttctgcaatattgttcttgcggtgagtgttccatgcagtagcctgtttgacattgtgaccgttcgatgtgggcactgcaccaatctatggtccgtgaacatggccgccgcgtttcagtcactgtcatggcaagatgttcagggatctgggcactgcaatccagagtacaggattgacactggctccacgtccaaatgcaacaataggattgcaatgcgtgcgcccaccactcatgtaactgaggaaagggttgtgaacaggcctcccgagaagaggcagcgcgtaccttctgcttataaccagtttataaaggaagagattcagaggatcaaagccaataatcctgatatcagtcatagagaagctttcagtacagctgcaaagaactgggcacattttccccatattcatttcgggctgatgttggagagcaacaaccaagttaagatggagaatgtttctgagaagcatttaatgtcaagggctgcgctattgaataaatgaatgctatcttcatcatatcacaggacttgggtttcatttgaatctgtcaagtaaacaatgtcctgacctaaaaggagttttaaggacaatcatctctttttcttcgttagtgtacttgtcactacttactacttgttcaatggatgcttttcacttaatttgaagcaagaatgctagttttcccttgtcatctttcaataagttctatcttctagctgattcagatgaaagatgaaatatgtatgctactgttttaagctcgatggcgagaacatttatcatcatattttttggtaatactaataaacttttaagttaatttgttaaaaaaaaaaaaaaaaaa

SEQ ID NO: 1654 - protein, 186 aa, Glycine max
  misc_feature: Ceres CLONE ID no. 513073
  misc_feature: Ceres CDNA ID no. 40351023
  misc_feature: Useful for making plants with modulated growth and phenotype characteristics
  misc_feature: The sequence is a functional homolog of  SEQ ID NO 1506 in the  10/666,642 US patent application
  misc_feature: The sequence is a functional homolog of  SEQ ID NO 420 in the  10/666,642 US patent application
  misc_feature (4)..(159): Pfam Name: YABBY PFAM Desc: YABBY protein
MSSCSIDVAPEQLCYIPCNFCNIVLAVSVPCSSLFDIVTVRCGHCTNLWSVNMAAAFQSLSWQDVQGSGHCNPEYRIDTGSTSKCNNRIAMRAPTTHVTEERVVNRPPEKRQRVPSAYNQFIKEEIQRIKANNPDISHREAFSTAAKNWAHFPHIHFGLMLESNNQVKMENVSEKHLMSRAALLNK

SEQ ID NO: 1655 - DNA, 1405 bp, Glycine max
  misc_feature: Ceres CLONE ID no. 513383
  misc_feature: Ceres CDNA ID no. 35388204
  CDS (113)..(1159): REFERENCED BY SEQ ID NO: 1656
attatgcaaagttccagttacttctagtacaccaactgttagctcttctgataggttgtcctctgatccaaatgctgaacttttccctcaccttaattcattgttaacctccatggaaggtttatctatatacgaacggaccacaaactctaatgaaacctctaaccgtgactcaaaaggtgcagaacacgaagttgtgtttagactcctttgctctaataatgtagctgggagcgtaattggcaaaagaggggctatagtcagagctctagaaagtaaaacaggtgcttctattatctttgcagctcctttaagcgagcatgccgaacgcattgtcaccatttctgctgtagagagccttgagtcttgtaattctcctgcacaagatgctgttattcttgtctttgctagaattattgaagatcacattggaaagggttttctccaagtctctagcatggaatcacctgtaactgcaaggcttttagttgcaacaagcacggtaaattgctttagtggcaatgaaggtcaggtgatttcagaattgagagaagtaactggggctgacatacaaatattgcatggagagtcagttcctaatggtgcttcagatgaggatgtggtggtgcagatcactggagagtacagatgtgtacaaaatgccctatataaaattacttctagaatcagggataatctttcacccaatgaggtggttgctgaagcaagaccaaaatccaattggaaagtgaataaggatcctataaagggtaaaccttttgcccgtggaaaatctgcttttccttctggaaggtttctgccacggaatgcaggggtgcatgctgaaacaatattacaaaatggagaattacatacggatttaagtgagaatttggaacgtgggagaggaaacatgtttgctacggtgacaaatactactgtggagataatagtttctgaacacgtctttggttctgtttatggtgaagatggtggcaatttggatcgaatcagacagatttcaggtgcaattgttacggtttatgatccttccgttggtacaagtggagggaaagttgtcatatctgggacaccagatcaaacctttgcagcgcagagcttgcttcaagcctttattcaaacgggacaagcaagctgatggaaagctgcatttcatcatcagttggtgccatgaatggtgtacatagatgtcacacgacaaccttcactttgtgaatacggattcactcttttttcttaaagataatgcttacctcttatagactataaacacagattttgttctctttctctccctccttcccccgcacatagtctcacttttaatttaaggttcatcacaataccattttgcttcaagaccaagaaaaaaaaaaaaaaaaaa

SEQ ID NO: 1656 - protein, 348 aa, Glycine max
  misc_feature: Ceres CLONE ID no. 513383
  misc_feature: Ceres CDNA ID no. 35388204
  misc_feature (29)..(83): Pfam Name: KH_1 PFAM Desc: KH domain
  misc_feature: Homolog of GI Number: 22328051 NR Desc: KH domain
  misc_feature: Homolog of GI Number: 28261403 NR Desc: HEN4
  misc_feature: Homolog of GI Number: 30681758 NR Desc: KH domain
  misc_feature: Homolog of GI Number: 4314357 NR Desc: putative RNA
  misc_feature: Homolog of GI Number: 42573788 NR Desc: KH domain
  misc_feature: Homolog of GI Number: 28261405 NR Desc: HEN4 isoform 2
  misc_feature: Homolog of GI Number: 56783855 NR Desc: HEN4
  misc_feature: Homolog of GI Number: 54290950 NR Desc: putative HEN4
  misc_feature: Homolog of GI Number: 30725478 NR Desc: At5g53060
  misc_feature: Homolog of GI Number: 8809595 NR Desc: RNA
MEGLSIYERTTNSNETSNRDSKGAEHEVVFRLLCSNNVAGSVIGKRGAIVRALESKTGASIIFAAPLSEHAERIVTISAVESLESCNSPAQDAVILVFARIIEDHIGKGFLQVSSMESPVTARLLVATSTVNCFSGNEGQVISELREVTGADIQILHGESVPNGASDEDVVVQITGEYRCVQNALYKITSRIRDNLSPNEVVAEARPKSNWKVNKDPIKGKPFARGKSAFPSGRFLPRNAGVHAETILQNGELHTDLSENLERGRGNMFATVTNTTVEIIVSEHVFGSVYGEDGGNLDRIRQISGAIVTVYDPSVGTSGGKVVISGTPDQTFAAQSLLQAFIQTGQAS

SEQ ID NO: 1657 - DNA, 1234 bp, Glycine max
  misc_feature: Ceres CLONE ID no. 513833
  misc_feature: Ceres CDNA ID no. 40351024
  CDS (235)..(837): REFERENCED BY SEQ ID NO: 1658
aaaaaccgcacacacactctctctttctctctcttcaaatcaaaacccatcacaattcacaacaacatacaaatcccaaatcctatcttttctcttctcatataaaagaacccttctttcgaatccttcccgctcttttccctctgatttaattcatgcgcagatccaaaccctaatccatctctccgagctctttgatttttgagttaataaaaaaaaaaaaattagggtttgatggctgaccaaggattggaagggagccagccggtggatctacagaagcatccttctgggatcgtgcctacccttcaaaatattgtgtccacagtcaatttggactgtaagttggacctcaaaacaattgcacttcaagctcgtaatgcagagtacaatcccaagcgttttgctgctgtcattatgaggataagagatcccaaaacaactgcacttatttttgcttctggcaagatggtttgtactggagctaagagtgaacaacagtctaaattggcagcaaggaagtatgctcgtattatccaaaagcttggcttcccagccaaatttaaggatttcaaaattcagaacattgtcggctcttgtgatgtcaagttccccatacggctggagggtcttgcatattcccatggtgctttctcaagttatgaaccagagctgtttccagggctaatctaccgtatgaagcaacctaaaatagttttgcttatatttgtctctggaaaaattgttctaacaggagccaaggtgagagatgagacttacactgcctttgaaaacatatatcccgtgcttactgagttcaggaaaaaccaacaatgattgtaattcaagaaagagcaggagcagtggtttggcagagaagttcgtggaactgtaaatattaagacaaaggatataatctagattgatataaattaaagacagccgtttgtgttgccccttgtctttgtttttttgatttgtcttgatgtagtaaagtggcagacgttgtctattgaattgacatttttgaaaaaaaaaaaagagaaaagaggattttgaggtgtcagaaatgaggaaaaaaaaagtggagctaaatggaaaaagtagcacattgagtcctgacagtagcttgaaaatgttttgataacttctactatcaattgaccgtagtgtgatctaactactgagtagcattgaatatcttgatcaacaaatcaaaaaaaaaaaaaaaaaa

SEQ ID NO: 1658 - protein, 200 aa, Glycine max
  misc_feature: Ceres CLONE ID no. 513833
  misc_feature: Ceres CDNA ID no. 40351024
  misc_feature (110)..(196): Pfam Name: TBP PFAM Desc: Transcription factor TFIID
MADQGLEGSQPVDLQKHPSGIVPTLQNIVSTVNLDCKLDLKTIALQARNAEYNPKRFAAVIMRIRDPKTTALIFASGKMVCTGAKSEQQSKLAARKYARIIQKLGFPAKFKDFKIQNIVGSCDVKFPIRLEGLAYSHGAFSSYEPELFPGLIYRMKQPKIVLLIFVSGKIVLTGAKVRDETYTAFENIYPVLTEFRKNQQ

SEQ ID NO: 1659 - DNA, 1144 bp, Glycine max
  misc_feature: Ceres CLONE ID no. 513892
  misc_feature: Ceres CDNA ID no. 36695351
  CDS (195)..(695): REFERENCED BY SEQ ID NO: 1660
ttttttaatttggaaatagtaatttatgaaaataattccaaaagaatgttaaaatgttattgctattgatatggtgggtagtcttcaatgttaaattaaaattttctaatacatgacatcatgtaaattgatattttgttttcttgtattgtgtagattgacttcaagttagtataactggctgtcaagttgtaatggcattggtctctggaagaagttctgcactgaacccaaatgcacctctattcatacctgctgctcttcggcaggtggaggatttttcacctcaatggtgggatcttgtgaaatcttcaacatggtttcgtgattattggttgagccaacataaggaggaagaatttgaagttgccaatgactctagtaatgatgatattgagaatatgctctcagaaacttttgatctaggcatggaagaagacttcaatgttctagagaacgagtttgagcagttggtgatgtcttctgaagctctagatcattctgatcctaatgctggaaaagtgtctcctcagggtcttaacaaagatgttaaagctattcttattaacttgacaccaaaatcaccaagggaaaggggtcccaagtccctgtctgggcttgcaaagcacctcgagaagccagcacagcatgtgaatgcgaagtgtgtctctctccgaattcaccaacctcgttgaggaaaacatttgaagctcatagtgatagcttgctagagctgcaagttgctgactagagcatgagatctgttgaaagaatttttgtatatagagggtgcaatgttcttgtatttttcttgtttatggtcttgtatattttgatggagccctcggaactgtaggtaggtaagactttaattctgaccagccaaaattcgggtatgtctatggttaatgaacttaaatctcatttttaaataaatgttacatggcatggaagtgtgtggatgtaagttttaggtgtctttagttcaatgtggcaattggagtatacttttcaagccttgtgatttgcatttagagtgataatgatattgtagctgcttttttcttgtacaaacacctatccattgtgtggccaagccaaattcagtaacaatttccctacttttaaaaaaaaaaaaaaaaaa

SEQ ID NO: 1660 - protein, 166 aa, Glycine max
  misc_feature: Ceres CLONE ID no. 513892
  misc_feature: Ceres CDNA ID no. 36695351
  misc_feature (6)..(23): Pfam Name: PAM2 PFAM Desc: Ataxin
  misc_feature: Homolog of GI Number: 8489786 NR Desc: dehydration
  misc_feature: Homolog of GI Number: 20197424 NR Desc: ERD15 protein
  misc_feature: Homolog of GI Number: 33415268 NR Desc: poly
  misc_feature: Homolog of GI Number: 21592689 NR Desc: ERD15 protein
  misc_feature: Homolog of GI Number: 42571167 NR Desc: dehydration
  misc_feature: Homolog of GI Number: 56481323 NR Desc: early response to dehydration 15
  misc_feature: Homolog of GI Number: 56481295 NR Desc: early response to dehydration 15
  misc_feature: Homolog of GI Number: 56481331 NR Desc: early response to dehydration 15
MALVSGRSSALNPNAPLFIPAALRQVEDFSPQWWDLVKSSTWFRDYWLSQHKEEEFEVANDSSNDDIENMLSETFDLGMEEDFNVLENEFEQLVMSSEALDHSDPNAGKVSPQGLNKDVKAILINLTPKSPRERGPKSLSGLAKHLEKPAQHVNAKCVSLRIHQPR

SEQ ID NO: 1661 - DNA, 1229 bp, Glycine max
  misc_feature: Ceres CLONE ID no. 514057
  misc_feature: Ceres CDNA ID no. 35383188
  CDS (209)..(934): REFERENCED BY SEQ ID NO: 1662
ggttctggccaccctcaagtgtaaatacaaccttagcatgaaattcaactttgtgggactacgtgttggagtttgattggtgaacgtggtgtgctaatgccttcttaagttttgcttttctgtcactttccctctgtgttggtttgctctcatcacttttgtctgcattacacctgagcctcagatctcatctcttatccacaaaaccatggctgaaaaggtgaccatcatgaaactcaaggttgatcttgagtgtgagaaatgctacaagaaggttaagaaacttctcggcaagtaccctcaaattcgggaccagaagttcgatgagaaggaaaacattgtgttcatcacagtggtgtgttgcagcccagagaagataagagacaagctttgctacaaaggtggaggctcaatcaaaagcattgagatactggaaccgcccaagcccaagcccgccgggcccgagaagaaggaggccgagaaacccaaggccgagcccgagaaaaagaaagacccagagaagcctaaagcagaccctcccaaagccgaaaagcccaagaccgagcccgagaaaaagaaggacggtggtggcgagaagcccaaggaagagcccgaaaaaaagaaggacggtggggagaagcctaagcccgggcccgagaagcccaaggataagccaacacccgcgccgttacctgtgcagccacatatagcggcaccgatggcggtcccagttgggatgctctatgctcctcctccgtgctacggaggcaggcccgttgggcctggctacgagtacggtgggcccatgctctgttacgacggttactatgcaaggcccgtttacgatagttacagtggaggcagaccctgttatgggaaccgttgtgatcaatatttcagcgaagagaatccacaaggatgcacaattatgtgacaattacatccacggcgttgcattattgttgggatctgtaaatgatggtggccattcacaatttctctcaattatcatcatgtttaatcacgttcaatccaatgagctagtatttctctgtttttgttatttaaaattcgacgagagaaaaaaaaaacaatgaggggggaaaagaaaaataaggttatttaatcaatggttataaatgctatactgcagtgatgttttttttttttcgttccatgagttaataaaataaagtttctttaccaacaagaaaaaaaaaaaaaaaaaa

SEQ ID NO: 1662 - protein, 234 aa, Glycine max
  misc_feature: Ceres CLONE ID no. 514057
  misc_feature: Ceres CDNA ID no. 35383188
  misc_feature: Homolog of GI Number: 7488684 NR Desc: isoprenylated protein
  misc_feature: Homolog of GI Number: 7488685 NR Desc: isoprenylated protein
  misc_feature: Homolog of GI Number: 3242079 NR Desc: proline
  misc_feature: Homolog of GI Number: 17065592 NR Desc: putative proline
  misc_feature: Homolog of GI Number: 4097543 NR Desc: ATFP1
  misc_feature: Homolog of GI Number: 50939869 NR Desc: copper chaperone
  misc_feature: Homolog of GI Number: 25408515 NR Desc: probable farnesylated protein
  misc_feature: Homolog of GI Number: 50923867 NR Desc: OSJNBa0053B21.14
  misc_feature: Homolog of GI Number: 20197942 NR Desc: putative farnesylated protein
  misc_feature: Homolog of GI Number: 4138732 NR Desc: proline
MKLKVDLECEKCYKKVKKLLGKYPQIRDQKFDEKENIVFITVVCCSPEKIRDKLCYKGGGSIKSIEILEPPKPKPAGPEKKEAEKPKAEPEKKKDPEKPKADPPKAEKPKTEPEKKKDGGGEKPKEEPEKKKDGGEKPKPGPEKPKDKPTPAPLPVQPHIAAPMAVPVGMLYAPPPCYGGRPVGPGYEYGGPMLCYDGYYARPVYDSYSGGRPCYGNRCDQYFSEENPQGCTIM

SEQ ID NO: 1663 - DNA, 1654 bp, Glycine max
  misc_feature: Ceres CLONE ID no. 514305
  misc_feature: Ceres CDNA ID no. 35383189
  CDS (309)..(1451): REFERENCED BY SEQ ID NO: 1664
gacggtcaaagttacgcggcgacgtgtagggaatccaaaggcgcagagtggaaggcagagaccaaaaaccactggcggaattgtagacgaaacagaacacagaaagagcgagcaacggccattcgatttcgatgtggcgcagtcgtgagtaacgtgcaataccacgggtaacgcggttttctggctcacctttccgcattttccttcttccctctcgcacccataagtacccctccctaaatcaacgctttcctcacaaaaaacaaaaactcacttctcatcattcattcatcttcgttctaagagccatgtctagcaccgttggccagaccatcaagtgcaaagctgcgattgcatgggaggctgggaagccgctggtgattgaagaagtggaggttgcgccaccgcaagccggtgaagtccgtttgaagatcctctacacctctctttgccacactgatgtttacttctgggatgcgaagggccagactccattgtttcctcgcatttttggccatgaagcttcggggattgtggagagcgtaggcgagggtgtgactcatctgaaaccaggtgaccatgccctccctgtgttcacaggagagtgtggagattgcgcccattgcaagtcagaggagagcaacatgtgtgagctactcaggatcaacaccgataggggtgtcatgatccatgatggccaatcaaggttctctaagaatggacaacccatacaccatttcttgggaacctctacattcagtgaatacactgttgtccatgctggatgtgttgcaaagatcaaccctgctgctccacttgacaaagtttgtgttctcagttgtggaatttgcacaggttttggtgctaccgtaaatgtagcaaaaccaaaacctggttcctctgttgccatatttggacttggagctgttggccttgcggctgctgaaggtgcaagagtttcaggtgcttcaagaatcattggagttgatttagtttctgcccgatttgaagaagctaagaagtttggggttaatgagtttgtgaacccaaaggatcatgataaacctgtgcaacaggtaattgctgaaatgaccaatggaggtgtggatcgggctgttgaatgtactggcagcatccaagccatggtctcagcattcgaatgcgtccacgatggttggggtcttgctgtacttgttggtgtgcctagtaaagatgatgcattcaaaactgctcctattaatttcctgaacgagaggactcttaagggcaccttttatggcaactacaaaccacgcaccgatcttccatctgttgtcgagaagtacatgagtggggagctagaagtggacaaattcatcactcacacagttccattctcagagatcaacaaagcttttgatttaatgctgaagggacagtccattaggtgtatcatccgcatgcaagagtgagatggatatgaaaagtccatgactgtgttctgggacagactactcttatgtgatttatgaataaaaagagagaagagagaataaaaaatttattgataaaatccccaattaggctattaggattatgattgtattgttgcacattgagtgttgggaatgacagggcatttagccctttgttacttaaaaaaaaaaaaaaaaaa

SEQ ID NO: 1664 - protein, 380 aa, Glycine max
  misc_feature: Ceres CLONE ID no. 514305
  misc_feature: Ceres CDNA ID no. 35383189
  misc_feature (195)..(337): Pfam Name: ADH_zinc_N PFAM Desc: Zinc
  misc_feature: Homolog of GI Number: 29373061 NR Desc: alcohol dehydrogenase 1
  misc_feature: Homolog of GI Number: 3694835 NR Desc: alcohol dehydrogenase Adh
  misc_feature: Homolog of GI Number: 71793966 NR Desc: alcohol dehydrogenase
  misc_feature: Homolog of GI Number: 2570182 NR Desc: alcohol dehydrogenase
  misc_feature: Homolog of GI Number: 68138959 NR Desc: alcohol dehydrogenase
  misc_feature: Homolog of GI Number: 51587338 NR Desc: alcohol dehydrogenase
  misc_feature: Homolog of GI Number: 20639 NR Desc: alcohol dehydrogenase
  misc_feature: Homolog of GI Number: 452767 NR Desc: alcohol dehydrogenase
  misc_feature: Homolog of GI Number: 452769 NR Desc: alcohol dehydrogenase
  misc_feature: Homolog of GI Number: 74002261 NR Desc:  similar to Alcohol dehydrogenase class III chi chain
  misc_feature: Useful for sterility
MSSTVGQTIKCKAAIAWEAGKPLVIEEVEVAPPQAGEVRLKILYTSLCHTDVYFWDAKGQTPLFPRIFGHEASGIVESVGEGVTHLKPGDHALPVFTGECGDCAHCKSEESNMCELLRINTDRGVMIHDGQSRFSKNGQPIHHFLGTSTFSEYTVVHAGCVAKINPAAPLDKVCVLSCGICTGFGATVNVAKPKPGSSVAIFGLGAVGLAAAEGARVSGASRIIGVDLVSARFEEAKKFGVNEFVNPKDHDKPVQQVIAEMTNGGVDRAVECTGSIQAMVSAFECVHDGWGLAVLVGVPSKDDAFKTAPINFLNERTLKGTFYGNYKPRTDLPSVVEKYMSGELEVDKFITHTVPFSEINKAFDLMLKGQSIRCIIRMQE

SEQ ID NO: 1665 - DNA, 686 bp, Glycine max
  misc_feature: Ceres CLONE ID no. 514323
  misc_feature: Ceres CDNA ID no. 25446634
  CDS (65)..(499): REFERENCED BY SEQ ID NO: 1666
actgatacaggaacagctagcagagaaacaaagttacaagtaaagtaaattaagaagatcattaatggcttctcttgcaaccttagctgctgttcaaccagctgcgctcaatggccttgctggaagttccctctttggaactaagctctctttcaagccctctcgccacactgtcaaatccaagaacttcaggagtggtgccgtggtagcaaagtatggtgacaagagtgtgtactttgatttggaggatctgggcaacactacggggcagtgggacttgtatggctcagatgcaccttcaccctacaaccctcttcagagcaagttcttcgagacatttgctgctccattcacaaagaggggattgttactcaagtttctgatattgggaggtggttccacccttgcatacttcagtgcaacagcctcaggtgacattctaccaatcaagaagggaccacaacttccaccaaagcttggtcctcgtggcaagatctaatttgatttgtatcagagctccatctattgagttcctttttaatttttatttttctggtttgcataatgtgtaagtatgcttgcagactacttactattcaaagatgcttctttccagtctaattgagtggcattgctttggttttcaattgaagcaaagacatatttggaaaaaaaaaaaaaaaaaa

SEQ ID NO: 1666 - protein, 144 aa, Glycine max
  misc_feature: Ceres CLONE ID no. 514323
  misc_feature: Ceres CDNA ID no. 25446634
  misc_feature (6)..(144): Pfam Name: PSI_PsaH PFAM Desc: Photosystem I reaction centre subunit VI
  misc_feature: Homolog of GI Number: 33520419 NR Desc: photosystem I psaH protein
  misc_feature: Homolog of GI Number: 407355 NR Desc: PSI
  misc_feature: Homolog of GI Number: 407353 NR Desc: PSI
  misc_feature: Homolog of GI Number: 397555 NR Desc: photosystem I psaH protein
  misc_feature: Homolog of GI Number: 21553440 NR Desc: Photosystem I reaction center subunit VI
  misc_feature: Homolog of GI Number: 21618081 NR Desc: photosystem I subunit VI precursor
  misc_feature: Homolog of GI Number: 1916350 NR Desc: PSI
  misc_feature: Homolog of GI Number: 21287 NR Desc: psaH
  misc_feature: Homolog of GI Number: 445928 NR Desc: photosystem I:SUBUNIT=PS I
  misc_feature: Homolog of GI Number: 445929 NR Desc: photosystem I:SUBUNIT=PS I
  misc_feature: Useful for making plants with increased biomass and foliage
MASLATLAAVQPAALNGLAGSSLFGTKLSFKPSRHTVKSKNFRSGAVVAKYGDKSVYFDLEDLGNTTGQWDLYGSDAPSPYNPLQSKFFETFAAPFTKRGLLLKFLILGGGSTLAYFSATASGDILPIKKGPQLPPKLGPRGKI

SEQ ID NO: 1667 - DNA, 1325 bp, Glycine max
  misc_feature: Ceres CLONE ID no. 514506
  misc_feature: Ceres CDNA ID no. 24766098
  CDS (494)..(1057): REFERENCED BY SEQ ID NO: 1668
attgttttggcctttggttaaagaatccttcatcacattaatcagtccagacagagaactgagagaagaccctcacttcctgtttggctcgacgaagacctcacttcgcccaacctccgtctccggcggcgtctcttatcctaacggctccttccctcaccgtcactgaaacggcgtccctgaactcgcaacactgccctccctctgactctgatttcgttcgaacttcgaactcattcccacttcgcagtcctcgccatgcttcgttgtcggcgactcctcgcagtggcaaacctcaaacgacatagctagagatctacaaactctccctcattgtctggtcctcttcctgctccaaactgaaccgcaaaatttttgtttttttcactgaatacagggtgcgatttgtttccattttccagtcaatcctatactccttaggctattgtaatcttctgctaataaggaggaattattattgggttctgaaaacatgttgaaacaagcaattggcagaatcttcagaaccggtgtttatgcttgtgaaggaaatagagttttgccttggatttatgtgccttcgagctttttccaccatggacaagcgcacatggcacctagaagcttttttggggtagaggatttccttgatgatgacaatagccgaccttacacataccaaaaagggaagaagtcaaagaatccaaataagcacatatcattcaaacaaagaacaattgcctacatggaaccttttacacttgatgtgtttatctcaaagcgctttgtatcggcttcactcactcatagggtaacaagcaaacaggttgcagttgccgggaccaactccaaggacataaaagctgttcttaggtctcgttcagacataccagcatgcatagcaattggtaggattttagctgaaagagcaaaagaagctgatgtttacactggttcttatactccaagggacagggacaagtttgaagggaaaatcagagctgtagttcaatcacttattgacaatgggattgatatcaaggtttatcttgattgagtttagtcactcaagtttgtgggactatcagttaaggtgttgatattttggttgaagcagtaggccccttgtgtgtttgaacatgtccatttagtttggttttgatgataatgggaatatcattattcgaattacagatttggtaatttagttttatgaatgagttatgttgtcgtaattgtagttggttattcgttttaattaatgttaaataacctgtcacaaataatacaatcatatgatattgtacaaaaaaaaaaaaaaaaaa

SEQ ID NO: 1668 - protein, 187 aa, Glycine max
  misc_feature: Ceres CLONE ID no. 514506
  misc_feature: Ceres CDNA ID no. 24766098
  misc_feature (65)..(182): Pfam Name: Ribosomal_L18p PFAM Desc: Ribosomal L18p/L5e family
MLKQAIGRIFRTGVYACEGNRVLPWIYVPSSFFHHGQAHMAPRSFFGVEDFLDDDNSRPYTYQKGKKSKNPNKHISFKQRTIAYMEPFTLDVFISKRFVSASLTHRVTSKQVAVAGTNSKDIKAVLRSRSDIPACIAIGRILAERAKEADVYTGSYTPRDRDKFEGKIRAVVQSLIDNGIDIKVYLD

SEQ ID NO: 1669 - DNA, 1124 bp, Glycine max
  misc_feature: Ceres CLONE ID no. 515341
  misc_feature: Ceres CDNA ID no. 40351025
  CDS (92)..(748): REFERENCED BY SEQ ID NO: 1670
acaacattctctagagcacacacaaacccgtccctcacactctccaaaccctagcggcactacacactagttctatcgctatctccccaagatgtcgagcgccgatcccgagcacagagaagaggaggaggcacccgccgttggcgacgacgaggacaccggagctcacgtcgctccaatcgtcaagctcgaggaggttgctgtcaccaccggcgaggaggacgaagatgcaatcctggatctcaaatcgaagctttaccggttcgacaaggacgggaaccagtggaaggagcgtggcgccggcactgtgaagttcctgaagcataaggcttccggcaaggttaggcttctcatgaggcaatccaagacgctcaagatctgcgctaatcatctcattttgcctacgatgagtgtgcaagagcacgctgggaacgagaaatcctgcgtttggcatgctagggattttgctgatggtgaactcaaggacgagctcttctgcatccgttttccttctattgaaaattgcaaaagcttcatggaaacattccaagaagttgctgaaacacaaaaggcagaggatgagaaggaatcatctgatgcagctggtcttattgagaaattaagtgttgaagagaaggctgatgcagagaagaaagatgaagagaagtctgaggacaaaactgtggagaaagaatctgcatcaggaaaggaaagcaaggcagttgaagagcctgcttcctcagcttgagtatttcttattcatattccatacttggctatctgacaaggttaggtggttgatgtttttgccgcccatatcttgggatattctcatacttgatggttgccggattgtgtcactgaattgagctgtttgtgtcctcttgagtttttgtcagcttgcaaagttagggttgggtttgaattttgaggcttgaatggttgagctttcggggtctgggagtctattattattgttattttcattctacatatgtatttgttgcgagtaatgggtcattttggttgggagggtgcagtccagaaatagtaaaaattatagacgaaggttttggtacaacttgtttgagttccacaattatttcaaaaaaaaaaaaaaaaaa

SEQ ID NO: 1670 - protein, 218 aa, Glycine max
  misc_feature: Ceres CLONE ID no. 515341
  misc_feature: Ceres CDNA ID no. 40351025
  misc_feature: The plant flowers significantly late compared to wild-type.
  misc_feature: The plant produces a reduced number of seeds.
  misc_feature: Useful for biocontainment applications
  misc_feature: Useful for making plants with modulated flowering time
  misc_feature (37)..(158): Pfam Name: Ran_BP1 PFAM Desc: RanBP1 domain
MSSADPEHREEEEAPAVGDDEDTGAHVAPIVKLEEVAVTTGEEDEDAILDLKSKLYRFDKDGNQWKERGAGTVKFLKHKASGKVRLLMRQSKTLKICANHLILPTMSVQEHAGNEKSCVWHARDFADGELKDELFCIRFPSIENCKSFMETFQEVAETQKAEDEKESSDAAGLIEKLSVEEKADAEKKDEEKSEDKTVEKESASGKESKAVEEPASSA

SEQ ID NO: 1671 - DNA, 1232 bp, Glycine max
  misc_feature: Ceres CLONE ID no. 516005
  misc_feature: Ceres CDNA ID no. 35383190
  CDS (112)..(1005): REFERENCED BY SEQ ID NO: 1672
tcctccttccatctttcaataccattgtactacaatattgccctctaagtttttgcttcttaatccacaccctttcccacaccctttcattgttctggttttctgcctgaaatggagtacatgaaccagagaccaaaatatgattgccttctttttgatttagatgatactttgtatccactaagcactggtcttgcaaaagcatgtggccaaaatattaaagactatatggtggaaaagcttggcatagacaaaagcaaaattgatgacttgtccaacctcctctacaagaactatggaacaactatggctggtttaagggcaattggatatgactttgaatatgatgaatatcacagttatgttcatgggagattaccttatgagaatttgaaaccagacccagttctgaggaaccttttgctgagcctgccctataggaaactgattttcacaaactcagacaaagtccatgctgttaaggcactaagcaagcttggattagaagactgctttgaaggaatcatatgctttgagacccttaatcccatccacaaaagttctgtctctgatgatgaagacgacattgagtttgtggggggttcaggcacaacaattccagcaccaaaaaaagatgttaatagctttcaaatctttgacctcattagccattttgctaagcccaatcccaacacagttttgccaaagacaccaattatttgcaaaccatcagaaaatgccattgagttggctctcaagatagccaaccttaatccacagagaactttgttctttgaggatagtgtccgcaacatacaagctggaaaacgtgtgggtcttcacactgtgctggttggaaaatctcagagaattaaaggagcagattatgcattagaaagcatccacaaccttagggaggcagtaccagaactatgggagggtgacataaaatcagaagttgcttatcctggcaagcattctgtggagacatctgtgactgcttagatcattgatgaaaaaaaaaaaaaccaaaataagaaaaaggagagaagtcctttgggaaattcccaacatgggatgtagtaactgtagttgatgtagatgctttgatcatattataactataataaattaatatatgtagttgacgtagatgctttgataagataataaaattttaatataaaatattaaattctaaaaaaaaaaaaaagaaaaaaaaaaaaaaaaaa

SEQ ID NO: 1672 - protein, 297 aa, Glycine max
  misc_feature: Ceres CLONE ID no. 516005
  misc_feature: Ceres CDNA ID no. 35383190
  misc_feature (10)..(251): Pfam Name: Hydrolase PFAM Desc: haloacid dehalogenase
  misc_feature: Homolog of GI Number: 7406669 NR Desc: putative ripening
  misc_feature: Homolog of GI Number: 8885554 NR Desc: ripening
  misc_feature: Homolog of GI Number: 32815949 NR Desc: At5g59490
  misc_feature: Homolog of GI Number: 34913328 NR Desc: ripening
  misc_feature: Homolog of GI Number: 27527030 NR Desc: putative phosphatase
  misc_feature: Homolog of GI Number: 27528429 NR Desc: putative phosphatase
  misc_feature: Homolog of GI Number: 15887729 NR Desc: AGR_C_662p
  misc_feature: Homolog of GI Number: 68189692 NR Desc: HAD
  misc_feature: Homolog of GI Number: 69930017 NR Desc: HAD
MEYMNQRPKYDCLLFDLDDTLYPLSTGLAKACGQNIKDYMVEKLGIDKSKIDDLSNLLYKNYGTTMAGLRAIGYDFEYDEYHSYVHGRLPYENLKPDPVLRNLLLSLPYRKLIFTNSDKVHAVKALSKLGLEDCFEGIICFETLNPIHKSSVSDDEDDIEFVGGSGTTIPAPKKDVNSFQIFDLISHFAKPNPNTVLPKTPIICKPSENAIELALKIANLNPQRTLFFEDSVRNIQAGKRVGLHTVLVGKSQRIKGADYALESIHNLREAVPELWEGDIKSEVAYPGKHSVETSVTA

SEQ ID NO: 1673 - DNA, 940 bp, Glycine max
  misc_feature: Ceres CLONE ID no. 516279
  misc_feature: Ceres CDNA ID no. 36581320
  CDS (107)..(598): REFERENCED BY SEQ ID NO: 1674
atactttcttcggtgatagaaagcacatagaagagaaagaaagaaaacaaagaggagaaagaaagtagttgaggaagatacaaacaatttttgcagattgttgagaatgcctttcaagaagcctcatcacacctcagacaagaactacataacaggggacgacggaggcaagttcgagatacaacctagaggactcaacattgtgtggggaaatgattctcgatactggaaaattccagaacaaggtcctgcggagctgatccaagtttcatggttggaggtatccggcgtggtaaacttaccaggtgtcaagaaatatagggttgaattcgaagtgagagttaaagacgatgggttcggttggagtggcacggacgtgctagtgatggctaagattgggaaaacgggaaaatatacgtataaggtgacgaaactaaaccctggtgaaaccttgaatattccaaaatcaactgacccacttgagattcaagtgaacaagcaatctgaggaccttcactttggattatatgaagtgtggagcggaaaatggaagggaggccttgaaattgtcagagccctcatcaaacctttaacttaattgcatgcaactcatcataccatatatcgttttcttcatttgccaactttgacaagtggattaattgtttgtggtttaattattattattactttgtatttggcgttgagtactactgtatgatatatagatgataatatgtgtccatgctctgcactagctgagacctggattattccaacttgcaagtgctgtgagaataacagtgtgttctggtcatgcatgcatgctgagagaaacaatgtatgtcggtcttaaaaagttcactgtatttgcataaactatatgtactaaataatggatttacaagtgtgttttttttagaaaaaaaaaaaaaaaaaa

SEQ ID NO: 1674 - protein, 163 aa, Glycine max
  misc_feature: Ceres CLONE ID no. 516279
  misc_feature: Ceres CDNA ID no. 36581320
  misc_feature: Homolog of GI Number: 4995205 NR Desc: lectin
  misc_feature: Homolog of GI Number: 6850934 NR Desc: lectin
MPFKKPHHTSDKNYITGDDGGKFEIQPRGLNIVWGNDSRYWKIPEQGPAELIQVSWLEVSGVVNLPGVKKYRVEFEVRVKDDGFGWSGTDVLVMAKIGKTGKYTYKVTKLNPGETLNIPKSTDPLEIQVNKQSEDLHFGLYEVWSGKWKGGLEIVRALIKPLT

SEQ ID NO: 1675 - DNA, 1360 bp, Glycine max
  misc_feature: Ceres CLONE ID no. 516374
  misc_feature: Ceres CDNA ID no. 36699761
  CDS (54)..(857): REFERENCED BY SEQ ID NO: 1676
ggacaaactaatctccataaaataatctgagtgaccctcctcactttgtggccatggcttcactcacgtgcctccgcccaacccaccctcatcttcatcgcggttcagtgcttctcgccatttcgaaccgctgcttcaaccattcctccttgctgaactggattctctccgtaaacccttctcgaaccgctcctccacgcgcaatggccaagccctgttcctcacctgcccaagacctagtcgcttctcctggcgattttgaatttgtgctgcctctgaaaattgtggagtatccggatccgagattgagggccaggaataagcgcatagttgccttcgatgatagtctgaagaagcttgtccacgaaatgtttgatgtaatgtacaaaactgatggtattggtctctcagcaccccaattaggaattaatgttcaacttatggtgttcaatccagtaggtgagcatggtgaaggagaggaaattgttcttgtaaacccaagagttagccaatactcaaagaaactgacactatttaatgaaggttgcctatctttccctggaatcaatgctgatgtaaagcgaccagaatctgtgaagattgatgcacgtgatatcaatggaacaaggttttcagtcaacttgtctgaccttcctgcacgaatattccagcatgaatttgaccatctacaaggaattcttttctttgagagaatgactgaagaagttcttgatagtatttgtggacagttacaggccctagaaacaaagtatgagggaatgactggactcccaagccctgaaaagatagaaaaccgcaggaggagaaaggtcgctgttggttttgggaaacgatgatcttcaaggtcaatattaggcataatactgaatgcacacttaccagacatttctagtttgaacttcataaaatgatgaagcatagattacaggttcaattgtttatgaatggtcattggaagacatctctattgtatcaatgctattgtcagttgttcatgttgccctgaagggaacaactgtcttgaagggctatttcctacgtatttatttatttattgctttctattgttttaattctagttctaaacatttagctctagttgtaggcatttactatgtattattttaggatttattacttgaaaacagctcatagaatggaggaaaacctttctttatatggctctcccaatatcccgaaagcaataattgtttgtaatataaggggaaattacactgtaataacttgacaagtcttgaatgattctcatttgaatcttgatctcataaacttgaatgaaagttcacaaatgttgcacttgaaaaaaaaaaaaaaaaaa

SEQ ID NO: 1676 - protein, 267 aa, Glycine max
  misc_feature: Ceres CLONE ID no. 516374
  misc_feature: Ceres CDNA ID no. 36699761
  misc_feature (74)..(227): Pfam Name: Pep_deformylase PFAM Desc: Polypeptide deformylase
  misc_feature: Homolog of GI Number: 17433052 NR Desc: Peptide deformylase
  misc_feature: Homolog of GI Number: 21553551 NR Desc: Formylmethionine deformylase
  misc_feature: Homolog of GI Number: 11320966 NR Desc: peptide deformylase
  misc_feature: Homolog of GI Number: 55297594 NR Desc: putative polygalacturonase
  misc_feature: Homolog of GI Number: 34911566 NR Desc: putative peptide deformylase
  misc_feature: Homolog of GI Number: 55297586 NR Desc: peptide deformylase
  misc_feature: Homolog of GI Number: 32307482 NR Desc: peptide deformylase
  misc_feature: Homolog of GI Number: 40889671 NR Desc: Chain B
  misc_feature: Homolog of GI Number: 23613598 NR Desc: formylmethionine deformylase
  misc_feature: Homolog of GI Number: 51892481 NR Desc: polypeptide deformylase
MASLTCLRPTHPHLHRGSVLLAISNRCFNHSSLLNWILSVNPSRTAPPRAMAKPCSSPAQDLVASPGDFEFVLPLKIVEYPDPRLRARNKRIVAFDDSLKKLVHEMFDVMYKTDGIGLSAPQLGINVQLMVFNPVGEHGEGEEIVLVNPRVSQYSKKLTLFNEGCLSFPGINADVKRPESVKIDARDINGTRFSVNLSDLPARIFQHEFDHLQGILFFERMTEEVLDSICGQLQALETKYEGMTGLPSPEKIENRRRRKVAVGFGKR

SEQ ID NO: 1677 - DNA, 1195 bp, Glycine max
  misc_feature: Ceres CLONE ID no. 516412
  misc_feature: Ceres CDNA ID no. 25446908
  CDS (175)..(849): REFERENCED BY SEQ ID NO: 1678
tctcttgttcccattctttttgtgacgctattttttcgtgcatctccaatgcttgaatgtcttgaattgtttcgaactgttcgcaatttctgattgctttaatcaagcaaggagagtcgctttgacgggaagcaaggatttccgctgcaattggaatcgtcggatcaattcgtcatgaagtttctggagtgttctgctttagatcggcttaacgatttcttgggtaatttgaatctgggagaacgtactatcaaaggatgccttgaagcctatagttgcaaacatgctggatcggataaaaaactctctatcagtttggagacagagattcttgattatcttgggaaatcatccgacactgattcctcctcaccagatcaaaccttattaaccagaaacagccgaaagacattggtttacctggttcttaccctgtatcacatgtatcccgattatgacttcagtgcagttaaagctcaccagtttttcgcagaggaatcatgggacagctttaagcagatttttgatacctacatgaatgaagcttcaaaggaatgggctgaaactgttgggagtgcttctttgctggacaccttgttcaaggcccttgatgaggtggtgaagttagtggattctgaaatttacggttatgtccctgatttcgaggcaaatccattactagagagtggagcaatatggtcctttaatttcttgttttataatagaaagcttaagcggattgtatcttttcgattcagttgttttagtaacttaattgctgaaggactgcttattgatgatatacacaatgagtatgatgaagagatatttgctgacatggatatatgagtcacttctacctcaattagttagcatatgaagacttctgatcctcccatgtgtagttctgttatatatgatggtttcagatgcgttgctctgtaaatcaaagaccgtttcagtgtggcccgagtcgtagatatagcatatgtatcttcccgtatgcatatagtatatttaacatctgtatcttcctccgatgcacatcgtagatttggaatctgtatcttcctccactgttaggacacacctctggtgtaatattagcaaaaacatacttatttgaaattggtgcaaggagtattggatattattaggttaaaaaaaaaaaaaaaagaaaaaaaaaaaaaaaaaa

SEQ ID NO: 1678 - protein, 224 aa, Glycine max
  misc_feature: Ceres CLONE ID no. 516412
  misc_feature: Ceres CDNA ID no. 25446908
  misc_feature: Homolog of GI Number: 50929403 NR Desc: OSJNBa0084K01.13
  misc_feature: Homolog of GI Number: 28422218 NR Desc: Maf1
  misc_feature: Homolog of GI Number: 47087413 NR Desc: zgc:63803
  misc_feature: Homolog of GI Number: 66519694 NR Desc:  similar to ENSANGP00000019317
  misc_feature: Homolog of GI Number: 61845744 NR Desc:  similar to Repressor of RNA polymerase III transcription MAF1 homolog
  misc_feature: Homolog of GI Number: 57095696 NR Desc:  similar to MAF1 homolog
  misc_feature: Homolog of GI Number: 73974747 NR Desc:  similar to MAF1 protein isoform 2
  misc_feature: Homolog of GI Number: 60470529 NR Desc: repressor of RNA polymerase III transcription
MKFLECSALDRLNDFLGNLNLGERTIKGCLEAYSCKHAGSDKKLSISLETEILDYLGKSSDTDSSSPDQTLLTRNSRKTLVYLVLTLYHMYPDYDFSAVKAHQFFAEESWDSFKQIFDTYMNEASKEWAETVGSASLLDTLFKALDEVVKLVDSEIYGYVPDFEANPLLESGAIWSFNFLFYNRKLKRIVSFRFSCFSNLIAEGLLIDDIHNEYDEEIFADMDI

SEQ ID NO: 1679 - DNA, 1321 bp, Glycine max
  misc_feature: Ceres CLONE ID no. 516501
  misc_feature: Ceres CDNA ID no. 35383191
  CDS (64)..(1056): REFERENCED BY SEQ ID NO: 1680
acctagtttccttattcttcttccttcgctgaatccctagctgttctcttctccgatccgataatggcctctctattcaacaatgctaacggcgttctcggaaaatccgagaagctcattatcgacaccgaccctgggatcgatgatagcatggctatttttatggcttttcaaagtccagacgtggaggttctgggtttgacaaccatttttggtaatacaactactgaagtttccacacgcaatgctttgcttttgtgtgagatcgcaggccgtgaaaatattccagttgcacagggaagccctgagccgttgaagggtggaacgcctcgtgttgctgattttgttcatggtaaagatggactagggaacacattcctacccccacctaaaggtgagaaaattgagaagagtgctagtgagtttttggttgagaaagtctcggaatatcccggtgaagtatctgtgctagcacttggaccactaacaaatgttgctttggcaatcaaacgagattctgcgtttgcaagcaaagtgaagagaatagttattcttggtggtgcattctttgccttggggaatgtgaatcctgctgcagaagcaaatatccatggggacccggaagccgcagatattgtgtttacctctggggcagatgttgttgttgttggaataaacattacaacccaagtccaattcacagatgctgatctccttgatctgaaggaatccaaaggaaagtatgctcccttcttgagtgacatatgcaaattctatagggactttcatgtaaaatctgaccgtgtccatggaattttcctccatgatcctgtcagttttgtggcagttgtgcgtccagatcttttcacatacaagaagggggtagtgagggtagagacacaaggcatctgtgttgggcacacacttctggaccaaggattgaaaaagtggaatacgagtaacccatggacgggttattctcctgttgcagttgcttggactgtgaatgtcaagggagttcttgattatatcagggagctattgatgaaaccctgaagtataggctataggcatttgtactacccatctgacagacaaaagcattggaaagtgatagaaacgatagcttcttatttgcaaaaacatgtataaggtcattttcattatttcactgaatgtcaatcagaactttgggcgtcaaggattcacaaccagttcttacgccgtttaatattataaagttcatgtaccaatggaattctctaccttctttgagaagaaagcagtcattctttacttttccaaaaaaaaaaaaaaaaaa

SEQ ID NO: 1680 - protein, 330 aa, Glycine max
  misc_feature: Ceres CLONE ID no. 516501
  misc_feature: Ceres CDNA ID no. 35383191
  misc_feature (15)..(327): Pfam Name: IU_nuc_hydro PFAM Desc: Inosine
  misc_feature: Homolog of GI Number: 50948453 NR Desc: putative inosine
  misc_feature: Homolog of GI Number: 46560602 NR Desc: putative inosine
  misc_feature: Homolog of GI Number: 52077164 NR Desc: putative inosine
  misc_feature: Homolog of GI Number: 50916725 NR Desc: putative inosine
  misc_feature: Homolog of GI Number: 41469366 NR Desc: putative inosine
  misc_feature: Homolog of GI Number: 41469367 NR Desc: putative inosine
  misc_feature: Homolog of GI Number: 76817298 NR Desc: Inosine
  misc_feature: Homolog of GI Number: 15887725 NR Desc: AGR_C_654p
  misc_feature: Homolog of GI Number: 48731811 NR Desc: COG1957: Inosine
  misc_feature: Homolog of GI Number: 52141983 NR Desc: inosine
MASLFNNANGVLGKSEKLIIDTDPGIDDSMAIFMAFQSPDVEVLGLTTIFGNTTTEVSTRNALLLCEIAGRENIPVAQGSPEPLKGGTPRVADFVHGKDGLGNTFLPPPKGEKIEKSASEFLVEKVSEYPGEVSVLALGPLTNVALAIKRDSAFASKVKRIVILGGAFFALGNVNPAAEANIHGDPEAADIVFTSGADVVVVGINITTQVQFTDADLLDLKESKGKYAPFLSDICKFYRDFHVKSDRVHGIFLHDPVSFVAVVRPDLFTYKKGVVRVETQGICVGHTLLDQGLKKWNTSNPWTGYSPVAVAWTVNVKGVLDYIRELLMKP

SEQ ID NO: 1681 - DNA, 1205 bp, Glycine max
  misc_feature: Ceres CLONE ID no. 516554
  misc_feature: Ceres CDNA ID no. 40351026
  CDS (496)..(978): REFERENCED BY SEQ ID NO: 1682
gagttcaatgattgattggagcagaattagagcaaaatatttatattctgttgcataagtactctgtactcaaatggaattatttcattctcaaaataaataccatacttttcttttcatttcataagagatacaaagaatgaattttgttcattcacatgtgagggattgatttccttttaatgttaaatcttggaaccatgttacatgccatataaacagggaccacataagggtaaagcaactaaagcgtaggctttaggtccaccagcaaaaaactatttgatattagtacttataaagtaaaaaaggcctcatcatatactgataaaaagaaaaccacatatgttagtaaaaatgcccaacgtatttaaagtgcaaaatttcttttaaaaattgttttaggttttgtttatcgttggacggaccctgcatatagtaacagaccaacaatagtttgcaacaaaaataaccttatgtttcatcatcatatgtatgaacataacctcggtctccacatttgtttttgtttgtttattgttgttaatttggttattgccagagactcaagaagttgccgaagtgaaaccaactgagggctctgtcaaccgagatgcagtgcttgcaagagttgcaactgagaagagattgtcactaatcaaagcatgggaagaaagtgaaaaatcaaaagctgaaaacaaggctcacaaaaagctttcatccgtttctgcatgggaaaacagcaagaaagctgctgtggaggctgacctgaaaaagattgaagaagaactggagaagaaaaaggcagaagctgcagaaaagataaaaaacaaaattgctgcaatccacaaggaagctgaagaaagaagagcaataattgaggcaaagaaaggggaagatcttcttaaggcagaggaacaagctgcaaagtatagagcaactggaacagctccaaagaaactccttggttgtttctaatgcttcaaatctcaagcattgtggggaaagaaaaagttatttttttattgtgtatctttggttattaaatatcattaatacaagtgtggttttagtttacatgttggagatttagcccatgttcatttattatgtgtgcaaacctgacacattggcgtgtatataccaactactttgtggataaagaaattaaattattcaatctgtgcaaaaaaaaaaaaaaaaaa

SEQ ID NO: 1682 - protein, 160 aa, Glycine max
  misc_feature: Ceres CLONE ID no. 516554
  misc_feature: Ceres CDNA ID no. 40351026
  misc_feature: Useful for making plants with modulated growth and phenotype characteristics
  misc_feature: The sequence is a functional homolog of  SEQ ID NO 1492 in the  11/479,226 US patent application
  misc_feature: The sequence is a functional homolog of  SEQ ID NO 1773 in the  11/479,226 US patent application
  misc_feature: The sequence is a functional homolog of  SEQ ID NO 20 in the  10/286,264 US patent application
  misc_feature: The sequence is a functional homolog of  SEQ ID NO 438 in the  10/666,642 US patent application
  misc_feature: The sequence is a functional homolog of  SEQ ID NO 644 in the  11/435,388 US patent application
  misc_feature: The sequence is a functional homolog of  SEQ ID NO 716 in the  10/412,699 US patent application
  misc_feature: The sequence is a functional homolog of  SEQ ID NO 876 in the  10/412,699 US patent application
  misc_feature (26)..(46): Pfam Name: Remorin_N PFAM Desc: Remorin
  misc_feature (48)..(157): Pfam Name: Remorin_C PFAM Desc: Remorin
MNITSVSTFVFVCLLLLIWLLPETQEVAEVKPTEGSVNRDAVLARVATEKRLSLIKAWEESEKSKAENKAHKKLSSVSAWENSKKAAVEADLKKIEEELEKKKAEAAEKIKNKIAAIHKEAEERRAIIEAKKGEDLLKAEEQAAKYRATGTAPKKLLGCF

SEQ ID NO: 1683 - DNA, 1202 bp, Glycine max
  misc_feature: Ceres CLONE ID no. 516694
  misc_feature: Ceres CDNA ID no. 35383192
  CDS (321)..(674): REFERENCED BY SEQ ID NO: 1684
gaaccaacgaacacaagggaaaaaaaagtacccactttcccttcttcttcttcttcttcaatttgggttttctcaaaagtgaaaagcgaagtccgtcactgccacaatcaccacttagatcagtgatatacacacccatctcagaaaccccacaagaacaaaaactcagaactcttgagtgatagacttcgaatgaaatcctgtttttcattagtgagattcaattgaagtgaagtgattattcactggaaaacttatttttcatacaactgaagctgttagatttgttttaactacacaagtttgttggatctttgagcatggctgggaatcaagatcagttcgagatcaagtttcggttgactgatggttctgatattggccccaaaagttttcctgcagctactagtattgcaacattaaaagagagtgttcttgctcagtggccaaaagacaaggagaatggcccaaagaccataaaagatgtgaagttaattagcgcaggaaaaattttggagaacaacagaacagttggggaatgccagagcccgttatgtgatacccctgatactgttacgacgatgcatgtggttgtgcaacatcctgctacggagaaagagaagaaagctgccaacaaagcaacacagaacaaatgcatgtgcgttattttatagcatccagattgaatagcagatgccatctgtcttagttggttagggacacttcctttttacgtaacctgcagcgtcaaatatttcaacacacacaaattatttggttgcatgcctgattcgtactacagaaagagtactggactatttactttataaaaatggagtacttgacttggtgaagattgtgaagctagtagttccctgattcctctgcggcgccatatttcttgcgcaatttcataggagatgttcttctgccggtctcaacatgtattaggtgttgcctcattaggcacttggtatatttgttgattgaaatgaactctactagtttgccatcttacccctcatatatatttttacaattcttctctttcgtgtgcctgatacaacatgcttaattccagacatgtatgtgttgaatatttgaatgtgttttaattttctggttgtttatatggtaccattgctactctcactcttgtataacagttgtggcaatagtggttcaaaaaaaaaaaaaaaaaa

SEQ ID NO: 1684 - protein, 117 aa, Glycine max
  misc_feature: Ceres CLONE ID no. 516694
  misc_feature: Ceres CDNA ID no. 35383192
  misc_feature: Homolog of GI Number: 46015773 NR Desc: Chain A
  misc_feature: Homolog of GI Number: 50912815 NR Desc: putative NTGP5
  misc_feature: Homolog of GI Number: 4097587 NR Desc: NTGP5
  misc_feature: Homolog of GI Number: 21592966 NR Desc: ubiquitin
  misc_feature: Homolog of GI Number: 25402954 NR Desc: protein F2E2.12
  misc_feature: Useful for making plants with increased biomass and foliage
MAGNQDQFEIKFRLTDGSDIGPKSFPAATSIATLKESVLAQWPKDKENGPKTIKDVKLISAGKILENNRTVGECQSPLCDTPDTVTTMHVVVQHPATEKEKKAANKATQNKCMCVIL

SEQ ID NO: 1685 - DNA, 1318 bp, Glycine max
  misc_feature: Ceres CLONE ID no. 516799
  misc_feature: Ceres CDNA ID no. 40351027
  CDS (309)..(1121): REFERENCED BY SEQ ID NO: 1686
agtatcgagccaattctttccctctctttgctgcttgctccaaaaccccttattagggtcaccgctgtttgggttagggttagggtttctccacacattctttatctaccaatcttcttccactactttcccttcgttccctctcactctcttcatttgtaagctttttgcgctagggttttctctgcaatctcttgtactcgaagttcgttccttcttccggatctcaatctatggatatccgcaagaggggaagacacgaaaccggcttcagcttaaatggaggattcaagagatccaagcaagaaatggagtccttatcaactggtgtaggaagcaaatcgaagccatgtaccaagtttttcagcactgctggttgcccatttggtgagggctgccacttcttgcactatgttcccggtggttataatgcagttgcccatatgatgaatttaacacctgcagcacctcctccaccatcaagaaatgttgcagctctgcctcatgtacctaatgggtctgcaccatctgccgttaagacccgcatatgcaacaagtttaatactgctgaaggttgcaaatttggtgacaaatgccattttgctcatggtgaatgggaacttggcaaacacattgctccatcatttgatgatcatcatgccatgggaccccctggagcaggtcgtcttgctggtcgaatggagcctccgggtcctgccgcaagttttggtgccaattccacagcgaagatcagcgtagaagcttccctggctggagctatcattgggaagggtggtgtgaactcaaaacagatctgccgccaaactggagccaaactttcaattcgagagcatgaatctgacccaaatcttagaaacattgaacttgagggaagttttgagcaaatcaaggaagcaagtaacatggtaaaggatttacttttgaccctgcaaatgtctgcaccacctaaaacaaccccgggtgttcctggtgcacctgcctctcatggaagcaattttaagacgaagctgtgtgagaattttgcaaaagggtcttgcacgtttggagatagatgtcactttgcacatggagcttctgaattgcgtaaatcaggagtatgaactttcttagtgaggcacattagccagggttattattattgttgtgcattgctactttagcagtactgacagtactttcgatgttagttttgttgttgagttgttttaggtcccaattgggatgtttgggatgatttttttttttcagttttgaaattattaaaaaccaaacttagttcaaaaaaaaaaaaaaaaaa

SEQ ID NO: 1686 - protein, 295 aa, Glycine max
  misc_feature: Ceres CLONE ID no. 516799
  misc_feature: Ceres CDNA ID no. 40351027
  misc_feature (170)..(232): Pfam Name: KH_1 PFAM Desc: KH domain
  misc_feature (35)..(61): Pfam Name: zf PFAM Desc: Zinc finger C
MDIRKRGRHETGFSLNGGFKRSKQEMESLSTGVGSKSKPCTKFFSTAGCPFGEGCHFLHYVPGGYNAVAHMMNLTPAAPPPPSRNVAALPHVPNGSAPSAVKTRICNKFNTAEGCKFGDKCHFAHGEWELGKHIAPSFDDHHAMGPPGAGRLAGRMEPPGPAASFGANSTAKISVEASLAGAIIGKGGVNSKQICRQTGAKLSIREHESDPNLRNIELEGSFEQIKEASNMVKDLLLTLQMSAPPKTTPGVPGAPASHGSNFKTKLCENFAKGSCTFGDRCHFAHGASELRKSGV

SEQ ID NO: 1687 - DNA, 1266 bp, Glycine max
  misc_feature: Ceres CLONE ID no. 517054
  misc_feature: Ceres CDNA ID no. 40351028
  CDS (158)..(1063): REFERENCED BY SEQ ID NO: 1688
actctcatcttttcagtttatctgtttctcaatcgttagatctcatcttatactcaccggcgagtccatctcgcgccagcgtcgacgccgctccggcaaccgctccggccaccgcctttggttccctcactttctcgtccttcttcttctcagaaatatgccttctcagaaagttgaaacgggtcatcaagacacggtccatgatgttgcaatggattactatggtaagaggctggccacggcttcatcagatcacacaattaagataattggggtgagtaatacggcctctcagcatctcgcaacattgactggtcaccaaggacctgtttggcaagtggcgtgggctcaccctaagtttggttctctacttgcatcgtgttcctatgatggtcgtgtcattgtttggaaggagggcaaccaaaatgaatggactcaagctcatgtgtttgatgaccacaagtcatctgtgaattcggttgcttgggcgcctcacgagttgggtctttgcttggcttgtggctcgtctgatgggaatatatctgttctgactgcaagagcagacggtggctgggacactgtgagaattgatcaggctcatccagttggtgtcacttcggtgtcatgggcgccatcgatggcacccggagcccttgtcggtgcagggttgcttgatccagtacagaagctgtgctctggtggttgtgataatactgtgaaggtatggaagctaaacaatggactctggaagatggactgcttccctgctcttcagatgcacacggattgggttcgagatgttgcttgggcacccaatttagggctccctaaatctaccattgctagcgcatcacaggacggtaaagtgattatatggaccgtggcgaaagagggggatcagtgggaaggcaaggttttgaatgatttcaacacccctgtttggagggtctcatggtcattgacaggaaacatattggctgtggctgatgggaacaacaatgtgacattgtggaaggaagcagttgatggggaatggcaacaggtgacaacagtggagccttagaatttgatattttttttttgaaaatggttagaattttcgttttgaaatatatagttgacgacatcttgtttctttgcatactatacagttgattaattgtgcttcataatgcactaagttccttgacgtttgtgatccattgagtattccgtgattggaagaatgaagttaattagtttgagttgaaaaaaaaaaaaaaaaaa

SEQ ID NO: 1688 - protein, 301 aa, Glycine max
  misc_feature: Ceres CLONE ID no. 517054
  misc_feature: Ceres CDNA ID no. 40351028
  misc_feature (249)..(286): Pfam Name: WD40 PFAM Desc: WD domain
MPSQKVETGHQDTVHDVAMDYYGKRLATASSDHTIKIIGVSNTASQHLATLTGHQGPVWQVAWAHPKFGSLLASCSYDGRVIVWKEGNQNEWTQAHVFDDHKSSVNSVAWAPHELGLCLACGSSDGNISVLTARADGGWDTVRIDQAHPVGVTSVSWAPSMAPGALVGAGLLDPVQKLCSGGCDNTVKVWKLNNGLWKMDCFPALQMHTDWVRDVAWAPNLGLPKSTIASASQDGKVIIWTVAKEGDQWEGKVLNDFNTPVWRVSWSLTGNILAVADGNNNVTLWKEAVDGEWQQVTTVEP

SEQ ID NO: 1689 - DNA, 1397 bp, Glycine max
  misc_feature: Ceres CLONE ID no. 517070
  misc_feature: Ceres CDNA ID no. 40351029
  CDS (246)..(902): REFERENCED BY SEQ ID NO: 1690
ggaaggatgcttcttcaattccctttccttctttcttagctttgaagaccaactcatttcaacttaacccatcaaaaccatcgctctctattttcgtcctttctacctttctccgatcccaatccctaatctttctctcttcaaactctaattttttcatctggggagatcggctgacgaatcgagaggatctcatcgctcgcaagggattagggtttcaatcgatcgcatcacatatcacaatcatgtttagccggatgttcggtaaacctaaacaggaaaccaatgctgttgccactttggacaagctaaacgagacacttgaaatgctggagaaaaaggagaaagtgctccttaaaaaggtggcagcagaagttgaaaaggccaaagaattcacaagggggaagaacaaaagggcggcaatacaatgtctgaagaggaagaggttatatgaacagcaaatagagcagcttggaaatttccagttgcgtattcatgaccagatgataatgttggaaggtgctaaagccaccacagaaacggtagacgcgttaagaactggagcagctgctatgaaggctatgcaaaaagcaacgaatattgatgatgttgacaagactatggatgagatcaatgaacagactgagaatatgaaacagattcaggatgcattgtctgctccaattggtgcggctgctgattttgacgaggatgaattggaagcagaacttgaagaactggagggtgctgagttggaagaacagcttcttcagccagcaactacagctcctgcggccccagtgcaggtcccagctgggcagcaacctactcgcccagttcccgcaaagcgaactccggaagaagatgaattggcagctttgcaggctgagatggcactttgagcagaattttgcaggcttttttttgtgcatggcttcaatgaagaattgtaaccactattacgtggagaattctgcttctctcctgctcgcttatctttgaaattattgagctgaccagaggatgtatataaaagtggaaaaaaaattatcataaaagtcttcaaaacgtactacttttattttggatgagttcgaacccctcctttccattatacgtatcaagtatattgatgcatttgactatcttatactttatgtggttgagtttaacgtggtcagtttaatcaatgtattatatcttaaacatgcttacagcaaagtataaggaataagaatttggttagcctatgagctagaacacagccatgattaaggtgatgatttttatttgtccataggaggatttacaagctgcactgccactgtgaatgtaaaattttattttctttatattataataatgattaagtaattaagaaaaaaaaaaaaaaaaaa

SEQ ID NO: 1690 - protein, 218 aa, Glycine max
  misc_feature: Ceres CLONE ID no. 517070
  misc_feature: Ceres CDNA ID no. 40351029
  misc_feature (17)..(189): Pfam Name: SNF7 PFAM Desc: SNF7
MFSRMFGKPKQETNAVATLDKLNETLEMLEKKEKVLLKKVAAEVEKAKEFTRGKNKRAAIQCLKRKRLYEQQIEQLGNFQLRIHDQMIMLEGAKATTETVDALRTGAAAMKAMQKATNIDDVDKTMDEINEQTENMKQIQDALSAPIGAAADFDEDELEAELEELEGAELEEQLLQPATTAPAAPVQVPAGQQPTRPVPAKRTPEEDELAALQAEMAL

SEQ ID NO: 1691 - DNA, 1314 bp, Glycine max
  misc_feature: Ceres CLONE ID no. 517340
  misc_feature: Ceres CDNA ID no. 25088395
  CDS (28)..(1041): REFERENCED BY SEQ ID NO: 1692
gcaaaacttttcatgtgatgtgtgcagatggacatggagccagttcttgcaattgattttgacattaaagagattcctaagaaagtgaattgggaggaatacataccccaaggctcagatcagtgggagttacagatggttgtatctagaatgtttgatgagcggcctatatggtccaaaaattcgcttaccgaactcttgcttgataagggcttaagcttttcgcacagcatgctcagaaggcttctatctagaatttcttactacttttctagtggaccatttctgaggttttggatcaagaaagggtatgatccacgcaaagatcctaattctcgaatttatcaaagaattgattatcgagtacctgttccattacgaagttactgtgatgctcattcagccaataaatcaaaacatagatggaaggatatatgtgcctttcgtgttttcccttacaagttccagacttctttacagtttttcgaccttgttgatgattatattcaatcagaaataaataagcctcctttccgaccaacttgcacttctggaactgggtggttctcacaacacatgatcaattgtattagacaacgtcttatggtgcgatatctatcagtattccccaagcctggtgctgagaatttactcagagctgccactttaaagtttgaaaaattgaagagggagtgctataggcatgccatgaagctcgatggagaagaatgccaacaagctaatttaggtttggaagagaatgaagaacttgataatggtgaagatgaagaggaggcagctgagggtaatgatagtgatgaagaatgggaagaagagcatgatttggctggagataatgaaatgcctctgccatctgattcctacatcaactttgagaatctttcaaggactcatttacaggatctttttgttaacttccctcctaatgaaattgattgtgacaatgtgcaagcaaatggcagcgaagaagaatatcaaatatacggggaagatagtgaggacaattactctgatgaatgatttctggcatttggagtcatcaaatacacaggaatgtcaatatttgtagaagttacataggagggtagatatcatcttttagatttgttgattaaatatcatcatagatcctagtattcactgttacgtataagaacaagtatctctaattacattagagaaacacgggagaaaaaaatagtagaagtagatgatggaaaatagaagagaaatggacatggttgattgaagaaaaaaaaaaaaaaaaaaaaaaaaaaaaaaaaaaaaaaaaaa

SEQ ID NO: 1692 - protein, 337 aa, Glycine max
  misc_feature: Ceres CLONE ID no. 517340
  misc_feature: Ceres CDNA ID no. 25088395
  misc_feature: Homolog of GI Number: 30693186 NR Desc: transcription factor
  misc_feature: Homolog of GI Number: 15238539 NR Desc: transcription factor
  misc_feature: Homolog of GI Number: 34913408 NR Desc: B1074C08.27
  misc_feature: Homolog of GI Number: 48099969 NR Desc: similar to ENSANGP00000003484
  misc_feature: Homolog of GI Number: 83318959 NR Desc: putative general transcription factor IIIC polypeptide 5
  misc_feature: Homolog of GI Number: 38197503 NR Desc: GTF3C5 protein
  misc_feature: Homolog of GI Number: 33879582 NR Desc: GTF3C5 protein
  misc_feature: Homolog of GI Number: 15030196 NR Desc: GTF3C5 protein
  misc_feature: Homolog of GI Number: 6912402 NR Desc: general transcription factor IIIC
  misc_feature: Homolog of GI Number: 34853155 NR Desc: similar to general transcription factor III polypeptide 5
MDMEPVLAIDFDIKEIPKKVNWEEYIPQGSDQWELQMVVSRMFDERPIWSKNSLTELLLDKGLSFSHSMLRRLLSRISYYFSSGPFLRFWIKKGYDPRKDPNSRIYQRIDYRVPVPLRSYCDAHSANKSKHRWKDICAFRVFPYKFQTSLQFFDLVDDYIQSEINKPPFRPTCTSGTGWFSQHMINCIRQRLMVRYLSVFPKPGAENLLRAATLKFEKLKRECYRHAMKLDGEECQQANLGLEENEELDNGEDEEEAAEGNDSDEEWEEEHDLAGDNEMPLPSDSYINFENLSRTHLQDLFVNFPPNEIDCDNVQANGSEEEYQIYGEDSEDNYSDE

SEQ ID NO: 1693 - DNA, 1483 bp, Glycine max
  misc_feature: Ceres CLONE ID no. 517890
  misc_feature: Ceres CDNA ID no. 36580996
  CDS (113)..(1129): REFERENCED BY SEQ ID NO: 1694
aacatagactagtgcggtgcattccctcgtttaccatgctttcctaagagaaagagaaaagtaaaacccctcactactgatagattttcattcctccgaggaaaaaaaaaacatgtcggatgctttgatcaatggattggccggagctggaggagggatcattgctcagctcatcacatacccacttcaaactgtaaacactcgccaacaaaccgagcgtgatccgaagaaagacacgaggagtcaaggggccctcgaacgaatgtgccaggttgtaaaagaagaggggtgggaacggttgtatggaggcttgatgccatcggtagtgggtacagctgcgtctcagggagtttactattatttctatcaaatattcaggaacaaagctgaagcagctgcactacaacaaaagaaaatgggcgttggtgatggatcagttgggatgctctcctctcttgttgttgctgctttatctgggtgtgttaacgtgctcttgacaaatcccatatgggtagttgttacgcgtatgcagacacatagaaaagagtcgaacagaactccagctgatcagggtttgtttgttgccactgagcagccaattctttctgcagttgagcctcttccttatggaactagtcatgtgattcaagaaatctacggtgaagctggaatttggggtttctggaaaggtgtattaccaacattaatcatggtaagcaatccttccatacagttcatgctgtatgaagccatgttggcaaagttaagaaaaagacgtgcttggagtaagaagggtagcaacggggtaactgctttagagatatttcttattggagctttagctaagcttggagctactgttgtaacttatccgatcctagttgtgaaggcaaggctccaagctagacaggataaaactggagacaggagacaccattacaaaggtacatgggatgctattattaaaatgatccgctatgaggggtttaatgggttttacaaaggcatgggcacaaaaatcgtacaaagtgtgctggctgctgctgttttgttcatgatgaaggaagaattagttaggggggttcgtttcttgcttgccaaggatgctgtaaagccaaagaatctgtgattggaggccactagcttgatcaagatttcatgtaccatcttcagttagcaaattagttcaaatggtaggggaattagagtgattcaaacaacatattgaaatatggctttaactgtatcttgattattttcatcaggttagtttccatagaggaaattcatgccaaaaattacacactgggttcattggtttgtttcatgaacaagacagggttgtagatttgaagtatgctgctgaaacaaatattctttttacgaacgaatatcactatctgatttcattggcagctaaagatttagatcaaaatttaattcacgaataaaaaaaaaaaaaaataaaaaaaaaaaaaaaaaa

SEQ ID NO: 1694 - protein, 338 aa, Glycine max
  misc_feature: Ceres CLONE ID no. 517890
  misc_feature: Ceres CDNA ID no. 36580996
  misc_feature (233)..(328): Pfam Name: Mito_carr PFAM Desc: Mitochondrial carrier protein
  misc_feature: Homolog of GI Number: 21593883 NR Desc: putative peroxisomal membrane carrier protein
  misc_feature: Homolog of GI Number: 2088650 NR Desc: putative peroxisomal membrane carrier protein
  misc_feature: Homolog of GI Number: 50906495 NR Desc: putative peroxisomal membrane protein
  misc_feature: Homolog of GI Number: 66499523 NR Desc:  similar to GA16787
  misc_feature: Homolog of GI Number: 68438779 NR Desc:  similar to Peroxisomal membrane protein PMP34
  misc_feature: Homolog of GI Number: 46329911 NR Desc: LOC398157 protein
  misc_feature: Homolog of GI Number: 67678431 NR Desc: LOC398157 protein
  misc_feature: Homolog of GI Number: 12056127 NR Desc: peroxisomal membrane protein PMP34
  misc_feature: Homolog of GI Number: 62652344 NR Desc:  similar to Mitochondrial folate transporter/carrier
MSDALINGLAGAGGGIIAQLITYPLQTVNTRQQTERDPKKDTRSQGALERMCQVVKEEGWERLYGGLMPSVVGTAASQGVYYYFYQIFRNKAEAAALQQKKMGVGDGSVGMLSSLVVAALSGCVNVLLTNPIWVVVTRMQTHRKESNRTPADQGLFVATEQPILSAVEPLPYGTSHVIQEIYGEAGIWGFWKGVLPTLIMVSNPSIQFMLYEAMLAKLRKRRAWSKKGSNGVTALEIFLIGALAKLGATVVTYPILVVKARLQARQDKTGDRRHHYKGTWDAIIKMIRYEGFNGFYKGMGTKIVQSVLAAAVLFMMKEELVRGVRFLLAKDAVKPKNL

SEQ ID NO: 1695 - DNA, 1577 bp, Glycine max
  misc_feature: Ceres CLONE ID no. 518251
  misc_feature: Ceres CDNA ID no. 40041245
  CDS (102)..(1229): REFERENCED BY SEQ ID NO: 1696
aaatcagcaaaaacacgatccattcccaatttccatcacacacagacaaacactctctacattttcatttccccgcgtgatcgttcagattcacaggccttatggcgacgagatattgggtagtgtctctccccgttcaaaattccgcatccactctctggaacaaattgcaggaacaaatctccaaacactccttcgacactcctctttacagattcaatatccccaatctccgggtcggaaccctagactccctcctctccctcagcgacgatctcgtcaagtcgaacagtttcgtggagggagtgtcgcacaagataaggcggcagattgaggagctggagagagtgtcgggcgtgatgagcagtggtttgacggtggatggagtccccgttgattcctacttgacgcggtttgtttgggatgaagcgaggtacccgactatgtcgccattgaaggagattatcgatgggattcacggtcaggtggcaaagattgaggatgatctcaaggttcgtgtttccgagtataacaatatccgcagtcagcttaatgccatcaaccgaaagcaaactggaagcttagctgtccgtgatctttccgacttggtaaaacctgaggatattataacttcagaaaatttaactacccttctggcaattgttcccaagtattcacagaaggattggctctctagttatgaaatcttgacaaactatgtggttcccaggtcttccaagaagttgtatgaggataacgaatatgctctttatactgtaacactcttcagtcgtgttgcagacaattttagaactagtgcacgggaagaagggttccaaattcgtgatttcgaatacagtcccgaatcacacgacagcaggaagcaagagttagagaaattggtggaagatcaggaaagtttgaggggttctctattgcagtggtgttatacaagttatggagaggttttcagctcctggatgcacttttgtgcagtgcgtgtatttaccgagggcattctgagatatggtcttccaccatctttcttggcatgtgttttagctccatcagtcaaagcagagaagaaagtacgttctatccttgaagggttgagcgatagctcaaacagtgcttactggaagactgaggacgaaggagttgggatggctggcctagcaggtgatgctgatgcccacccttatgtctccttcactatcaatcttgtttgagtgcagcacccagaaacaagccctgtctcgtttcagggtcagcgaaagattccttgtacataagggtcatgttcaattcttttatatatatatatatatatatatatatatataatttgagcgtattgaagtttccagaaggataaggatctggtgaatttaagtgtagttttgtggtatcaagttttgatcattagcaacttgtatgttgagttgtctcattatgttcgatcgtatgtgattgtgcgactcgaggagttagaatctttgtattttcctgttaaatatctacaatatatcatataatattttaattgtcttgaatttttcaaaaaaaaaaaaaaaaaa

SEQ ID NO: 1696 - protein, 375 aa, Glycine max
  misc_feature: Ceres CLONE ID no. 518251
  misc_feature: Ceres CDNA ID no. 40041245
  misc_feature (2)..(374): Pfam Name: V PFAM Desc: V
  misc_feature: Homolog of GI Number: 29367377 NR Desc: putative vacuolar ATP synthase subunit C
  misc_feature: Homolog of GI Number: 50932993 NR Desc: putative vacuolar ATP synthase subunit C
  misc_feature: Homolog of GI Number: 6636332 NR Desc: vacuolar ATP synthase subunit C
  misc_feature: Homolog of GI Number: 6688428 NR Desc: vacuolar H+
  misc_feature: Homolog of GI Number: 5852162 NR Desc: vacuolar ATPase subunit C
  misc_feature: Homolog of GI Number: 66508559 NR Desc:  similar to CG8048
  misc_feature: Homolog of GI Number: 1213460 NR Desc: C subunit of V
  misc_feature: Homolog of GI Number: 72062735 NR Desc:  similar to CG8048
  misc_feature: Homolog of GI Number: 41151984 NR Desc: ATPase
  misc_feature: Homolog of GI Number: 53733700 NR Desc: Atp6v1c1l protein
MATRYWVVSLPVQNSASTLWNKLQEQISKHSFDTPLYRFNIPNLRVGTLDSLLSLSDDLVKSNSFVEGVSHKIRRQIEELERVSGVMSSGLTVDGVPVDSYLTRFVWDEARYPTMSPLKEIIDGIHGQVAKIEDDLKVRVSEYNNIRSQLNAINRKQTGSLAVRDLSDLVKPEDIITSENLTTLLAIVPKYSQKDWLSSYEILTNYVVPRSSKKLYEDNEYALYTVTLFSRVADNFRTSAREEGFQIRDFEYSPESHDSRKQELEKLVEDQESLRGSLLQWCYTSYGEVFSSWMHFCAVRVFTEGILRYGLPPSFLACVLAPSVKAEKKVRSILEGLSDSSNSAYWKTEDEGVGMAGLAGDADAHPYVSFTINLV

SEQ ID NO: 1697 - DNA, 1740 bp, Glycine max
  misc_feature: Ceres CLONE ID no. 519689
  misc_feature: Ceres CDNA ID no. 40041246
  CDS (68)..(1399): REFERENCED BY SEQ ID NO: 1698
gttatgtgagtgcggcaatagtggaatagcggtagagtgtgcgatcgagaaagcagaaagcagaaagatggggttggaatcggtgggagatttagcgattaacgtgattctgaaaaaattaggagcccaagacattgcgagagtggcgtgtgtgagcaaaaggttcagttcttccgcttccgatgacactctttggatcaatctctgcttcaatgaactcgctttgacacaacccctcgatcatctcggaaaccctctctcttccttcaaggaatgctatctagcatggagaggagcttttgttatgtacccttggtctcttgttaagcgtgtaaaaaggtgctgggatagaataaaaacctggttgaccaataattttcctgaagcggaggccactctttgtaaaggtgcaactgaagctgacattcaggagttggagaatgtattaaaggtgaaattgcctcttcctacaaggatcctttatcgctttcacaatgggcaagaatttgcaaaggcagatccagaaactagtacatttggcagatctttgggtctaattggtggctactccttctatggtcatttggtgaatgtttatctattacctatatgtcagataatcctagaaactcagcaaactaggcgtcgcttgagctttttaagaagatcaaagtatgttcttgtggctgcttcatccacatacagtagaaagttgtttttcctcaactgtaccaatggtcaactatatgtcgggaccaggtctcctcttaccgaaagagacataatcccttgtgtacctcatgacctgattagtttacatcaggaattgaatagttcagagcaacaagatgccatgctactgtggttagaagaacatggtcgccgtttagaacacggctttatcaaacttcatgatgaaggaaatggcaaaagcattaatcttttcccagaagaaccccatatttgttcaacggctgttactaatggtgtgaaggttcgcgcttctgcactggttatccctgagttgatggatcttcaagatgaccttggagagtacttatttgcttattcaatccgcttgtcccttgaacctcaaggatgcattattaatggaatgtccttcagctcttgccagctccattggaggcactggatcatccgtgctaatgatattgttatatctgatgtcagtggaaaagctgttataggacagtttccacttttgcgtccgggtgctcaagaatttgtttatcagagttgcacgcctctaccaacaccatcaggttctattgaaggttcttttacatttatacccggcagattggcagacccaaaaggagacccttttctagctacagtggctcgtttcccgctccagctgccagactatatattctgattttgattctggatgggattgaagtatctctaatggcaattgcagctctcagatattgtttgggtgtattatgtccctttcgggagaggtttttaagttggacctgcacaatttccctatctataagagaagcaaagtatgtacaatatttgatctctatcataagagaagcaaagtagatacaatatttgttaggggtgttcatggtttgattaggttggattttttgttaaaaaatcatccaaatcaaacttaaaaaacttgtgatttggttcgattcagttttcatttaaaataaaattcaaatcagaccaagttaatagaaaaaaaaaaaaaaaaaa

SEQ ID NO: 1698 - protein, 443 aa, Glycine max
  misc_feature: Ceres CLONE ID no. 519689
  misc_feature: Ceres CDNA ID no. 40041246
  misc_feature (3)..(48): Pfam Name: F PFAM Desc: F
  misc_feature: Homolog of GI Number: 62733979 NR Desc: F
  misc_feature: Homolog of GI Number: 52006118 NR Desc: COG2967: Uncharacterized protein affecting Mg2+/Co2+ transport
  misc_feature: Homolog of GI Number: 56967208 NR Desc: Chain D
  misc_feature: Homolog of GI Number: 76809273 NR Desc: ApaG
MGLESVGDLAINVILKKLGAQDIARVACVSKRFSSSASDDTLWINLCFNELALTQPLDHLGNPLSSFKECYLAWRGAFVMYPWSLVKRVKRCWDRIKTWLTNNFPEAEATLCKGATEADIQELENVLKVKLPLPTRILYRFHNGQEFAKADPETSTFGRSLGLIGGYSFYGHLVNVYLLPICQIILETQQTRRRLSFLRRSKYVLVAASSTYSRKLFFLNCTNGQLYVGTRSPLTERDIIPCVPHDLISLHQELNSSEQQDAMLLWLEEHGRRLEHGFIKLHDEGNGKSINLFPEEPHICSTAVTNGVKVRASALVIPELMDLQDDLGEYLFAYSIRLSLEPQGCIINGMSFSSCQLHWRHWIIRANDIVISDVSGKAVIGQFPLLRPGAQEFVYQSCTPLPTPSGSIEGSFTFIPGRLADPKGDPFLATVARFPLQLPDYIF

SEQ ID NO: 1699 - DNA, 2106 bp, Glycine max
  misc_feature: Ceres CLONE ID no. 519908
  misc_feature: Ceres CDNA ID no. 36581255
  CDS (143)..(1891): REFERENCED BY SEQ ID NO: 1700
ggtataccaaattgcttgaggccttcaatttcacccttcacacgtggtggtggtgttgttcttcttctcttcccctttctttttcttcttctgagcttgtttaagctctttctatttgattccattaacatatattatcacaatgtgtggtattcttgctgttcttggttgttctgatgactctcgagccaaaagggtccgcgtgcttgagctctctcgcagattgaagcaccgtggccctgactggagtgggctccatcaacatggtgactgctttttagcacatcaacggttagccatagttgatcctgcttctggggatcaacctctctttaacgaggacaaatccgtcattgtcacggtgaatggagagatttacaaccatgaagagctcaggaaacagctgcctaatcacaagttccgtactggatgtgattgtgatgttattgcacacctgtacgaggaacatggagaagactttgtggacatgctggatggtatcttctcatttgttctactggacacccgtgacaacagttttatagtggctcgggatgctattggggtcacttccttgtacattggatggggattagatggctctgtttggatttcatcagaaatgaaaggcctgaatgatgattgtgaacactttgagtgttttccacctggtcacttgtactctagcaaagaaagagggtttcgcagatggtacaatcctccttggttctctgaggctactccatccaccccttatgatcctctcgttttaagacacacctttgagcaggcagtcataaaaagattgatgactgatgtgccttttggtgttctactctctggaggtttggactcttcattggttgcatccgtcacttctcgctacttggccaacacaaaggctgctgagcagtggggatcaaagttacattcattctgtgtaggccttgagggctcaccagatttgaaggctgcaaaagaagttgctgactatctaggcactgtccaccatgagtttaccttcactgttcaggatggaatagatgccattgaagatgttatctaccatgttgaaacatatgatgtgactacaattagagctagcacacccatgtttctcatgtctcggaagattaaatcacttggtgtcaaatgggttatctccggagaaggatctgatgagatctttggagggtatctgtacttccacaaggcacccaacaaggaggagtttcacagagaaacatgccgcaagatcaaagcactccaccaatatgattgcttgcgagccaataaatcaacatttgcttggggtctagaagcccgtgtaccatttttggacaaggcatttatcaatactgcaatgagtattgaccctgagtcgaaaatgataaaaagagatgaaggacgaattgagaagtggattctgaggagagcctttgatgatgaagagcatccttatctgccaaagcacattttatacaggcagaaagagcaattcagtgatggagttggctatagctggattgatggccttaaggcccatgctgcaaaacatgtgactgacaaaatgatgcttaatgctggtaacatctaccctcacaacaccccaacaaccaaggaagcatattactacagaatgatctttgagaggttcttccctcagaactcagctaggctcaccgttcctggaggagcaagtgttgcatgtagcacagccaaagctgttgagtgggatgctgcttggtctaacaaccttgatccttctggtagagcagcacttggagtgcacatttcagcctatgaaaaccagaacaacaacaagggtgtagaaattgagaagattatacctatggatgctgctcctcttggtgttgcaatccagggataatataaagctgtgacaaagaataattgggggagaatgaactatgctaaacgtgtatgaaaaatttgcctgcagtgtacttttatcttggcaaagctttgtagtgtatagatatagatataaggctttctaaaagtgtagcgtattgtattatcttgaatgctgtgatttgaagtcttaataaaagtgtttctattatcgaaaaaaaaaaaaaaaaa

SEQ ID NO: 1700 - protein, 582 aa, Glycine max
  misc_feature: Ceres CLONE ID no. 519908
  misc_feature: Ceres CDNA ID no. 36581255
  misc_feature (209)..(450): Pfam Name: Asn_synthase PFAM Desc: Asparagine synthase
  misc_feature (46)..(161): Pfam Name: GATase_2 PFAM Desc: Glutamine amidotransferases class
  misc_feature: Homolog of GI Number: 77816462 NR Desc: Asparagine synthase
  misc_feature: Homolog of GI Number: 78688086 NR Desc: Asparagine synthase
  misc_feature: Homolog of GI Number: 78691622 NR Desc: Asparagine synthase
  misc_feature: Homolog of GI Number: 78368728 NR Desc: Asparagine synthase
  misc_feature: Homolog of GI Number: 26246639 NR Desc: Asparagine synthetase B
  misc_feature: Homolog of GI Number: 77956831 NR Desc: COG0367: Asparagine synthase
  misc_feature: Homolog of GI Number: 77973051 NR Desc: COG0367: Asparagine synthase
  misc_feature: Homolog of GI Number: 77979053 NR Desc: COG0367: Asparagine synthase
  misc_feature: Homolog of GI Number: 77961554 NR Desc: COG0367: Asparagine synthase
  misc_feature: Homolog of GI Number: 77635338 NR Desc: COG0367: Asparagine synthase
MCGILAVLGCSDDSRAKRVRVLELSRRLKHRGPDWSGLHQHGDCFLAHQRLAIVDPASGDQPLFNEDKSVIVTVNGEIYNHEELRKQLPNHKFRTGCDCDVIAHLYEEHGEDFVDMLDGIFSFVLLDTRDNSFIVARDAIGVTSLYIGWGLDGSVWISSEMKGLNDDCEHFECFPPGHLYSSKERGFRRWYNPPWFSEATPSTPYDPLVLRHTFEQAVIKRLMTDVPFGVLLSGGLDSSLVASVTSRYLANTKAAEQWGSKLHSFCVGLEGSPDLKAAKEVADYLGTVHHEFTFTVQDGIDAIEDVIYHVETYDVTTIRASTPMFLMSRKIKSLGVKWVISGEGSDEIFGGYLYFHKAPNKEEFHRETCRKIKALHQYDCLRANKSTFAWGLEARVPFLDKAFINTAMSIDPESKMIKRDEGRIEKWILRRAFDDEEHPYLPKHILYRQKEQFSDGVGYSWIDGLKAHAAKHVTDKMMLNAGNIYPHNTPTTKEAYYYRMIFERFFPQNSARLTVPGGASVACSTAKAVEWDAAWSNNLDPSGRAALGVHISAYENQNNNKGVEIEKIIPMDAAPLGVAIQG

SEQ ID NO: 1701 - DNA, 1453 bp, Glycine max
  misc_feature: Ceres CLONE ID no. 519939
  misc_feature: Ceres CDNA ID no. 24766084
  CDS (227)..(1246): REFERENCED BY SEQ ID NO: 1702
gattgtaaagttacttgtgttcttaagtatgagaatcatttatttagcgaaaaaaatacttatttgattttttctacaaaattttcttgagccagcaagagtcacacatcataagaccgtgatctttaagcaggacaaaacaaaatctatcaaggaagccatatattggtatccaaattccaaacttgtgttgggtttggttccttgagttgagaggagtgaaaaaatggatcacagtgcggatgctcaacgcacggacctgatgaccatcacccgtttcgtgctgaacgaacagtcgaagcacccagagtctcgtggcgatttctcaatcctgctcagtcacattgttctcggctgcaagttcgtctgctctgctgttaacaaggcgggtcttgctaagcttattggacttgcaggagagacaaatgttcagggtgaagagcaaaagaaattggatgtcctatccaatgatgtcttcatcaaggcattgatcagcagtggacgaacatgcatcttggtgtctgaagaagatgaggaagcaacatttgtggaaccttctaagcgtggaaaatactgtgttgtttttgacccgctggatggttcctctaacattgattgtggtgtttcaattggcacaatctttgggatttatttgataaaagaagaccatgaaccaaccgtagaagatgttttgcaacctgggaagaacatgttggcagctggttattgcatgtatggaagctcttgcacgcttgtgttaagcactggaagtggtgttaatggtttcacccttgatccatctcttggggagttcattctaactcaccctgacatcaagatcccaaagaaaggcaagatctattcagtgaatgaaggaaatgctaaaaactgggatggccctactaccatgtatgtggaaaactgcaagtatccaaaagatggttcatcaccaaagtccctaagatatattggaagcatggttgctgatgttcaccgcacactgctttatggaggtatctttctgtacccggctgataaaaagagtccaaatgggaaacttcgtgtactctatgaagtcttcccaatgtcattcttgatggaacaagcaggaggacaggctttcaccggcaaccaaagggcacttgatttggttccaaagaagttgcacgagcgatctcccatattccttggtagctatgaagatgtagaggaaatcaaggctctttactctgctgatgaaaaataggaatgaagctggaagaaagctatctttgtctttcgctactcacaagcaattgttatctaattgttacacatgtcatgtatatgttaagaaaagttattaatgttttgtgatttagaaaaattattttattccttatatctaaatattttaaaatttaataataattataatttatgcagatagttttataaaaaaaaaaaaaaaaaa

SEQ ID NO: 1702 - protein, 339 aa, Glycine max
  misc_feature: Ceres CLONE ID no. 519939
  misc_feature: Ceres CDNA ID no. 24766084
  misc_feature: null
  misc_feature: Useful for making plants with modulated biomass
  misc_feature (13)..(337): Pfam Name: FBPase PFAM Desc: Fructose
  misc_feature: Homolog of GI Number: 30984564 NR Desc: At1g43670
  misc_feature: Homolog of GI Number: 20278691 NR Desc: cytoplasmic fructose
  misc_feature: Homolog of GI Number: 11139718 NR Desc: cytosolic fructose
  misc_feature: Homolog of GI Number: 166956 NR Desc: cytosolic fructose
  misc_feature: Homolog of GI Number: 4741918 NR Desc: cytosolic fructose
  misc_feature: Homolog of GI Number: 3041775 NR Desc: fructose
  misc_feature: Homolog of GI Number: 5305145 NR Desc: fructose
  misc_feature: Homolog of GI Number: 6684169 NR Desc: fructose
  misc_feature: Homolog of GI Number: 440591 NR Desc: fructose
  misc_feature: Homolog of GI Number: 21245 NR Desc: fructose
  misc_feature: Useful for delaying flowering time
  misc_feature: Useful for making ornamental plants with modified flowers
MDHSADAQRTDLMTITRFVLNEQSKHPESRGDFSILLSHIVLGCKFVCSAVNKAGLAKLIGLAGETNVQGEEQKKLDVLSNDVFIKALISSGRTCILVSEEDEEATFVEPSKRGKYCVVFDPLDGSSNIDCGVSIGTIFGIYLIKEDHEPTVEDVLQPGKNMLAAGYCMYGSSCTLVLSTGSGVNGFTLDPSLGEFILTHPDIKIPKKGKIYSVNEGNAKNWDGPTTMYVENCKYPKDGSSPKSLRYIGSMVADVHRTLLYGGIFLYPADKKSPNGKLRVLYEVFPMSFLMEQAGGQAFTGNQRALDLVPKKLHERSPIFLGSYEDVEEIKALYSADEK

SEQ ID NO: 1703 - DNA, 1626 bp, Glycine max
  misc_feature: Ceres CLONE ID no. 520244
  misc_feature: Ceres CDNA ID no. 29191491
  CDS (106)..(1464): REFERENCED BY SEQ ID NO: 1704
gacaatcgaacgggaaaaggcgtcttcataaacgccgcccaaaacttctcatacccttttattcattccattcgtttctagggttttcttttctttgccgagaaaatgagagagtgcatttcgatccacattggccaggccggtatccaggttggaaacgcctgctgggaactctattgccttgaacacggcattcagcccgatggacagatgccgagtgacaagaccgttggcggaggagacgacgccttcaacacatttttcagcgagaccggcgccggaaagcacgtgccccgcgccgtcttcgtggatcttgaacccaccgtgatcgacgaagtccgaaccggtgcgtaccggcagctcttccacccggagcagctgatcagcggcaaggaagacgccgccaacaacttcgcgcgtggccactacaccatcgggaaggagatcgtcgatctctgcctcgacaggatccgaaagctcgccgacaactgcaccggtctccagggtttcctcgtcttcaacgccgtcggtggcggcaccggttctggcttgggctcgcttctcttggagcgtctctccgttgactatggaaaaaagtcaaagctcggtttcaccgtttatccatcccctcaggtttcgacctcggtcgtggaaccctacaacagcgtcctttcaacgcattctctcctcgaacacaccgatgttgctgtgcttctcgacaacgaggcaatctacgacatttgcaggagatctcttgacatcgaacgccctacctacaccaacctgaaccgtctcgtttcccaggtgatatcatccctcactgcctctttgaggtttgatggagcactgaatgttgatgtgactgagtttcaaaccaacttggttccttacccaaggatccatttcatgctttcctcgtatgcccctgttatctctgccgagaaagcataccatgagcagctttccgttgctgagatcaccaacagtgccttcgagccatcctccatgatggcaaagtgtgaccctcgccacggcaagtacatggcgtgttgtttgatgtaccggggcgatgtcgtgcccaaggatgtgaatgctgctgtggccaccatcaagaccaagagaaccatccagtttgtggattggtgccccactgggttcaagtgtggtataaactatcagcctcctactgttgttcctggaggtgaccttgccaaggtgcagagggctgtgtgcatgatttcgaactccactagtgtggctgaagtgttctccaggattgatcataagtttgacctcatgtatgcgaagagggccttcgtgcactggtatgtgggtgaaggtatggaagagggtgagttctcagaggctcgtgaggaccttgctgctcttgagaaggattatgaggaggttggtgccgagtctggtgatggagatgatgatggtgaaggagatgatgattattagagtgtctgaaatatcgtgtgtttgatgtctactttttcgtcttctgtcggacatgtgtggtttttgaatgatgattgttatcaaatatatgtgctatgtatagcacagaagtttctatatatctgttcccttctattaccaatgaaaaaaaaaaaaaaaaaa

SEQ ID NO: 1704 - protein, 452 aa, Glycine max
  misc_feature: Ceres CLONE ID no. 520244
  misc_feature: Ceres CDNA ID no. 29191491
  misc_feature: null
  misc_feature: Useful for making plants with altered cell wall content and/or composition
  misc_feature (248)..(393): Pfam Name: Tubulin_C PFAM Desc: Tubulin/FtsZ family
  misc_feature (49)..(246): Pfam Name: Tubulin PFAM Desc: Tubulin/FtsZ family
  misc_feature: Homolog of GI Number: 54641821 NR Desc: GA20973
  misc_feature: Homolog of GI Number: 50761268 NR Desc:  similar to MGC53359 protein
  misc_feature: Homolog of GI Number: 72014982 NR Desc:  similar to Tubulin alpha
  misc_feature: Homolog of GI Number: 72061122 NR Desc:  similar to Tubulin alpha
  misc_feature: Homolog of GI Number: 72129043 NR Desc:  similar to Tubulin alpha
  misc_feature: Homolog of GI Number: 72057626 NR Desc:  similar to Tubulin alpha
  misc_feature: Homolog of GI Number: 72057628 NR Desc:  similar to Tubulin alpha
  misc_feature: Homolog of GI Number: 72057632 NR Desc:  similar to Tubulin alpha
  misc_feature: Homolog of GI Number: 72057634 NR Desc:  similar to Tubulin alpha
  misc_feature: Homolog of GI Number: 72128849 NR Desc:  similar to Tubulin alpha
MRECISIHIGQAGIQVGNACWELYCLEHGIQPDGQMPSDKTVGGGDDAFNTFFSETGAGKHVPRAVFVDLEPTVIDEVRTGAYRQLFHPEQLISGKEDAANNFARGHYTIGKEIVDLCLDRIRKLADNCTGLQGFLVFNAVGGGTGSGLGSLLLERLSVDYGKKSKLGFTVYPSPQVSTSVVEPYNSVLSTHSLLEHTDVAVLLDNEAIYDICRRSLDIERPTYTNLNRLVSQVISSLTASLRFDGALNVDVTEFQTNLVPYPRIHFMLSSYAPVISAEKAYHEQLSVAEITNSAFEPSSMMAKCDPRHGKYMACCLMYRGDVVPKDVNAAVATIKTKRTIQFVDWCPTGFKCGINYQPPTVVPGGDLAKVQRAVCMISNSTSVAEVFSRIDHKFDLMYAKRAFVHWYVGEGMEEGEFSEAREDLAALEKDYEEVGAESGDGDDDGEGDDDY

SEQ ID NO: 1705 - DNA, 1121 bp, Glycine max
  misc_feature: Ceres CLONE ID no. 520992
  misc_feature: Ceres CDNA ID no. 40351030
  CDS (188)..(844): REFERENCED BY SEQ ID NO: 1706
tcttctctctctctctctctcttccaaaataagattcttccctctctctctctccagaatttcctcctcccactgcttctttctttcttgcagcgcgattgctgcatcctcctccaataagagctcgctgctagcgaaccctaacacggcggcaacgtgaggtgttcggttgaagttcagatcagccatggccgcagcaacccccacttctctgcggttcctcctctccgtttccgtaaccctaaccctgcttaacctcgccgcctcaaattccgaaggcgacgctctctacacgctgaaacggagcctctcggaccctgacaacgtcctccagagctgggatcccactctcgttagtccctgtacttggttccacgtcacctgcaaccaggacaaccgagtcactcgagtggatcttggtaactctaacctatctggacatttggtacctgaacttgggaagctggagcatctacagtatcttgagttgtacaaaaacaacattcaaggaactattcctccggaacttggaaacctgaagagtctagttagcttggacttgtacaacaacaacatatcaggcaccatcccaccttcattggggaaattgaagaatcttgtctttttacgactcaatgacaaccgactaactggcccaattcccaaggaactgtctgctgtttcaagccttaaagtagtggatgtctccaacaatgatttatgtggtacaattcctacatctgggccattcgagcatattccattgaataactttgagaataatccccgcttggaaggtccagagttgttgggactagtaagttatgacacaaactgctcgtgaataacgtgatgtggtaggatctcaatctgcgttgaattatatatatgtattctaaaatttaagtgtattacctcatagtgtaatgggaagtggtaaatgtaatctctggtatatgtaaatttacatactgaaggacattggaatttgtgacttgaatatctattgatgtaatactagaaaaaagatcgacttggtcactcgctgataaaatatttgtgacgcattgctctccaaaaaaaaaaaaaaaaaaaaataaaaagaaaaaaaaaaaaaaaaa

SEQ ID NO: 1706 - protein, 218 aa, Glycine max
  misc_feature: Ceres CLONE ID no. 520992
  misc_feature: Ceres CDNA ID no. 40351030
  misc_feature (119)..(142): Pfam Name: LRR_1 PFAM Desc: Leucine Rich Repeat
MAAATPTSLRFLLSVSVTLTLLNLAASNSEGDALYTLKRSLSDPDNVLQSWDPTLVSPCTWFHVTCNQDNRVTRVDLGNSNLSGHLVPELGKLEHLQYLELYKNNIQGTIPPELGNLKSLVSLDLYNNNISGTIPPSLGKLKNLVFLRLNDNRLTGPIPKELSAVSSLKVVDVSNNDLCGTIPTSGPFEHIPLNNFENNPRLEGPELLGLVSYDTNCS

SEQ ID NO: 1707 - DNA, 1237 bp, Glycine max
  misc_feature: Ceres CLONE ID no. 521206
  misc_feature: Ceres CDNA ID no. 35383193
  CDS (102)..(704): REFERENCED BY SEQ ID NO: 1708
ataacagacctaatcaatcagtcatacgaatttccagaatacaaattcacactctctttggctctggtgttgtgttgtgttgaggtacttgagaagagaaaatggtgtcgtcgcaggttgtgaatacgtacccgttgtcgagctacacgttcggcacgaaggagcccaagatggagaaggatacctccgtcgcggatcgtctcgctcgcatgaaagtcaactatatgaaggagggaatgaggaccagtgtggaaggaattttactggtacaagagcacaatcatcctcatatacttcttctgcaaattggaaacacattctgcaaactcccaggtggtcgtctcaaaccaggagagaatgaaaatgagggcttgaagagaaagttgactagcaagcttggtgctaattcaccagctcttgtgcctgactggcagataggtgagtgtgtagcaatctggtggaggccaaattttgaaaccataatgtatccatactgccctcctcatataacaaaacccaaggagtgcaaaaagcttttccttgttcatttatctgagagggaatactttgcagtgcccaaaaatttaaaactactagctgttccattgtttgaactctatgacaatgttcagagatacgggccagttatatccaccattcctcagcagctatccagattccagtttaaaatgatcactaattgaacataaatttgaagcttacatgctgataattactactttcatttgtaattttcgtaactaggaattatcattgcatagactggctagaaaactgagttttgaagtgagttgctgagtagagtagttatgttgtgacatggtttgtctgtatttcattcattgtactgtgggttgatgtcggttatcaacaatcaacccaagagggaatcaagtaatcaactagtaggctatatgcatctaatgcctagtagaaatgaaggtgatcaggtagtgtttgatctcatgtctgttgcttctgccctgctcaggttgccaatattacaataggaaagggtaaaggaatgggcattggttttcattactagtttttctggtgaaaggcattgaatggaaaaaattatacatttgaaattcaaaaaaaaaaaaaaaaaaaaaaaaaaaaaaaaaaaaaaaaaaaaaaaaaaaaaaaaaaaaaaaaaaaaaaaaaaaaaaaaaaaaaaaaaaaaaaaaaaaaaaaaaaaaaaaaaaaaaaa

SEQ ID NO: 1708 - protein, 200 aa, Glycine max
  misc_feature: Ceres CLONE ID no. 521206
  misc_feature: Ceres CDNA ID no. 35383193
  misc_feature: Homolog of GI Number: 50929747 NR Desc: OSJNBa0032F06.22
  misc_feature: Homolog of GI Number: 60551046 NR Desc: Cpsf5 protein
  misc_feature: Homolog of GI Number: 61371857 NR Desc: cleavage and polyadenylation specific factor 5
  misc_feature: Homolog of GI Number: 5901926 NR Desc: cleavage and polyadenylation specific factor 5
  misc_feature: Homolog of GI Number: 73973808 NR Desc:  similar to nudix
  misc_feature: Homolog of GI Number: 66499810 NR Desc:  similar to cleavage and polyadenylation specific factor 5
  misc_feature: Homolog of GI Number: 66845767 NR Desc: cleavage and polyadenylation specific factor 5
  misc_feature: Homolog of GI Number: 62664839 NR Desc:  similar to Autocrine motility factor receptor
  misc_feature: Homolog of GI Number: 72009482 NR Desc:  similar to Calcitonin gene
MVSSQVVNTYPLSSYTFGTKEPKMEKDTSVADRLARMKVNYMKEGMRTSVEGILLVQEHNHPHILLLQIGNTFCKLPGGRLKPGENENEGLKRKLTSKLGANSPALVPDWQIGECVAIWWRPNFETIMYPYCPPHITKPKECKKLFLVHLSEREYFAVPKNLKLLAVPLFELYDNVQRYGPVISTIPQQLSRFQFKMITN

SEQ ID NO: 1709 - DNA, 1509 bp, Glycine max
  misc_feature: Ceres CLONE ID no. 521355
  misc_feature: Ceres CDNA ID no. 24726548
  CDS (222)..(1172): REFERENCED BY SEQ ID NO: 1710
tcgttctcgcagcaaacaaacaaaccccccacccaacgcattcttcaatcttccccttcgcgtcttttgggtggtttggtttaggacatttcacaaacacctcctctcccctccattttccatttccattcttctctccactataaattctccttctctttctttctcgtaatcttcgcctcccttcaactccaccctctctccttcttacctccttgaccatgatgagtttcgccatggattcagtttcggtgttaaaccctaaactctcccactcccattcctctctcccattcagcaggttcccccattccctcaacttccaccccttactcaaaccccgcgcagttaacgccgccgtcccccctaacggcctcgccgcctgcttcctcaccctccaccgacggaaaccgttaaccgtcgctttcacagcttctcaccaagactcggaacacagagagattgaagtggagaaggagcgtgacgtccatgcaggctctgaagaatctcaggaagcgtggaagcaggttctggagacgtttagggaacaggcagagaagtttcagggcgtttctcaagaggcttatgaggtgtattctaagaaggctgctgtcattctgacagatgccacggagcagttaaaggtgctggcagataagacaaagaacgagttgagtgtggcagcaaaggaaatcactgacgaagggaaagagtatttgtctgcagcggcggatagttcaccagaggtgaaggagattgtggaaacgtttacctcaccgcctgaggatattcagaaattgtctggagtgagggacttctatgttggtgtaccttatggtttgatgctttctcttggtggcttcctttcctttatggtaactggcaacactgcagcgataaggtttggggtgattttaggtggtgtcctcctggctttaagcattttaagtctgaaatcctacaaaaaaggacgcacctctcctctcgctttgaagggccaagctgctatagcaagtatattgtttctgcgggagataagctcaataggcaaaggatcatcttatttcactgccttgatcagtggtgcagtggtggcattctatatctatagaatagtactggaacgtaatcatcaaaagagctcaaacttggaaactgaaccaggaaactagttctatgatgagtgtaaaaaattgaagatctgcatgaagatcaggtaaaatactgaagatcgagttgaagatagtcagtaaattttggtgatcattttttatcatatagtttttcacgggctgggtcatcaagactagagactcactgctaagggttatggtttcataccttgaaaaacggagctcggagaatctggaaataatttctagttgtggtttttttctggaaaattactaatatcatattatgagtaaccttaaccggttacagattctaatgtacaagaaaaaattagatatggtgtttagggctttgtccaaaaaaaaaaaaaaaaaa

SEQ ID NO: 1710 - protein, 315 aa, Glycine max
  misc_feature: Ceres CLONE ID no. 521355
  misc_feature: Ceres CDNA ID no. 24726548
  misc_feature: Homolog of GI Number: 7488560 NR Desc: inner envelope membrane protein precursor
  misc_feature: Homolog of GI Number: 22136954 NR Desc: putative non
  misc_feature: Homolog of GI Number: 21554522 NR Desc: putative non
  misc_feature: Homolog of GI Number: 34907806 NR Desc: P0703B11.24
  misc_feature: Useful for increasing chlorophyll and photosynthetic capacity
  misc_feature: Useful for making ornamental plants with modified flowers
  misc_feature: Useful for making plants with increased biomass and foliage
  misc_feature: Useful for sterility
MSFAMDSVSVLNPKLSHSHSSLPFSRFPHSLNFHPLLKPRAVNAAVPPNGLAACFLTLHRRKPLTVAFTASHQDSEHREIEVEKERDVHAGSEESQEAWKQVLETFREQAEKFQGVSQEAYEVYSKKAAVILTDATEQLKVLADKTKNELSVAAKEITDEGKEYLSAAADSSPEVKEIVETFTSPPEDIQKLSGVRDFYVGVPYGLMLSLGGFLSFMVTGNTAAIRFGVILGGVLLALSILSLKSYKKGRTSPLALKGQAAIASILFLREISSIGKGSSYFTALISGAVVAFYIYRIVLERNHQKSSNLETEPGN

SEQ ID NO: 1711 - DNA, 1234 bp, Glycine max
  misc_feature: Ceres CLONE ID no. 521758
  misc_feature: Ceres CDNA ID no. 36581057
  CDS (277)..(897): REFERENCED BY SEQ ID NO: 1712
atactttttgtagagaatattggttggcgagcatggaaccacacaagaagagaaagaggagaaaagaaaagtaaaaaggaaaggaaaggaaggatctttggggaattgggaggcaaggaaagaaagatgcaggattaggtgtgtggatagggagggtccagcgtagcgtactacctggcttctgttctttctacccacgacttttctctcaaaccaaccacatcattcaactattgcactgccaaggtttggacagtgttacgtgcttcacgaaacatgacctctgctcacgaccttactgataatgaagatgatggacagcagcagtcagaatcacaaattcagtccccttctgcaaatggaatttctgatccagatattagtacccagaatgtcaatgtacagtatgcaacacctggccagcttggaactgggcatgcaatggtaccacctgtgtatccatatccagatccttactatagaagcatctttgctccctatgatacacaaccttatcccccgcaagcctatagtggacagccaatggtccatcttcagttaatgggaattcagcaagctggtgttcctctgccaactgatgcagttgaggagcctgtgtttgtcaatgcaaaacaataccacggtatattaagacgtagacaatcccgtgcaaaagctgaatcagaaaataaagttataaggaataggaagccatacttgcatgaatctcgacacaagcatgcactgagaagaccaagaggatgtggtggtcggtttctgaattcaaagaaagacgagaatcagcatgatgatgtgacatcagctgacaaatcacaatccaatatcaatcttaattctaataaaaatgatcaaacctcatcagataggacatcctaaactactgagacgacgataccttagacagtggagatctatattgtatgtcacaagatcaataatacctgccttggatatcccacttttgcttcattctggctttgtacaacactgtaggttgtgtggtaggtagcgttagtatgtcgcatgatgcaggtaaaatgtaaattgaagtgattttatcaaatattgacctttggtaggggagatttttatggtgaacagcatttctttgtatttggtactgtagagaggttagagattggtattttgtttggttggatcgtatttatttaccttgctagtgacagttaaaaaagaaaaaaaaaaaaaaaaa

SEQ ID NO: 1712 - protein, 206 aa, Glycine max
  misc_feature: Ceres CLONE ID no. 521758
  misc_feature: Ceres CDNA ID no. 36581057
  misc_feature (111)..(167): Pfam Name: CBFB_NFYA PFAM Desc: CCAAT
  misc_feature: Homolog of GI Number: 28973313 NR Desc: putative transcription factor
  misc_feature: Homolog of GI Number: 6634774 NR Desc: Contains similarity to gbY13720 Hap2a transcription factor from Arabidopsis thaliana
  misc_feature: Homolog of GI Number: 30691791 NR Desc: CCAAT
  misc_feature: Homolog of GI Number: 21389663 NR Desc: putative CCAAT
  misc_feature: Homolog of GI Number: 77556592 NR Desc: transcription factor
  misc_feature: Homolog of GI Number: 77556593 NR Desc: transcription factor
  misc_feature: Homolog of GI Number: 50917949 NR Desc: putative CCAAT
  misc_feature: Homolog of GI Number: 50942001 NR Desc: putative CCAAT box binding factor/transcription factor Hap2a
  misc_feature: Homolog of GI Number: 2398521 NR Desc: transcription factor
  misc_feature: Homolog of GI Number: 7630040 NR Desc: CCAAT box binding factor/ transcription factor Hap2a
MTSAHDLTDNEDDGQQQSESQIQSPSANGISDPDISTQNVNVQYATPGQLGTGHAMVPPVYPYPDPYYRSIFAPYDTQPYPPQAYSGQPMVHLQLMGIQQAGVPLPTDAVEEPVFVNAKQYHGILRRRQSRAKAESENKVIRNRKPYLHESRHKHALRRPRGCGGRFLNSKKDENQHDDVTSADKSQSNINLNSNKNDQTSSDRTS

SEQ ID NO: 1713 - DNA, 1317 bp, Glycine max
  misc_feature: Ceres CLONE ID no. 522380
  misc_feature: Ceres CDNA ID no. 36581422
  CDS (63)..(1268): REFERENCED BY SEQ ID NO: 1714
gaaaagtacgtgtcccattcttgtcaacaaacgtggcgcgcttcttaacataagcacttgcaatggcggattcagagcgaatccaaaattcgtggatggcttcggatcaaactgcaattgaaatgagcggcgagggcacaggttccagggaatgctcttctctccctccgccgccgcaaaaaccattcaattctgatcaattgggaatcggagaacgagctttctccgccgccggcgccgccttcctctccgccatcattgtcaatcccctcgacgttgccaagacaaggttgcaagcacaagcggcaggggtcgcatattctcatccactcagtaatatgaccagtagaatggcttgttttgggccaaatatgatatttgctgatttaaaatgttctccatcatgccaccgggctggattccagggcacagtgtccatttgtcctcccgagtgttttcgctacaaaggaacactagatgttatctacaaaattataaaacaggagggaatttctaggctatggagaggcacaaatgctggcctggctcttgcagtaccaactgtgggaatataccttccttgctatgacatactccgcaattggttggaggaattcacagctaaaaaggcaccaaccacaactacttatgtacctctagtagctggttcattggcacgctctctagcttgcactacttgctaccctattgaacttgctaaaactcgtatgcaggcatttaaagagactcaaattggtaaaaagcctcctggagtgatccagactctgctaggtgttgtttcaaatgtcaagagcacaaacactccacagaacagcttgcaaggttatcgtgttttgtggactggcatgggagctcaacttgcccgtgatgtacccttctctgctatttgttggtcgacacttgaaccgactagaagaaaacttcttggtttgattggaggtgatgatgccaatgcattgagtgttcttggggcaaattttggagctgggtttgttgcaggaaccttagcagctggagccacatgtccgctagatgttgtaaaaactcgaaggcagatagagagggatcctgttagggcattgaaaatgactacaagacagacactgatggaggtgtggagagatggaggcttgaaaggattgtttacaggtgttggtccacgagttggtcgagcaggcccctctgttggaattgtgatttcattttatgaagttgtaaagtttgttctacatcatcagtacacataatcatgattttctgcacactttttttgctgccaaaaaaaaaaaaaaaaaa

SEQ ID NO: 1714 - protein, 401 aa, Glycine max
  misc_feature: Ceres CLONE ID no. 522380
  misc_feature: Ceres CDNA ID no. 36581422
  misc_feature (48)..(91): Pfam Name: Mito_carr PFAM Desc: Mitochondrial carrier protein
  misc_feature: Homolog of GI Number: 51964868 NR Desc: PREDICTED P0434E03.16
  misc_feature: Homolog of GI Number: 62867562 NR Desc: putative mitochondrial carrier protein
  misc_feature: Homolog of GI Number: 30690323 NR Desc: mitochondrial substrate carrier family protein
  misc_feature: Homolog of GI Number: 19310377 NR Desc: At2g46320/F11C10.1
  misc_feature: Homolog of GI Number: 34904154 NR Desc: P0417G05.20
  misc_feature: Homolog of GI Number: 42571249 NR Desc: mitochondrial substrate carrier family protein
  misc_feature: Homolog of GI Number: 73965532 NR Desc:  similar to Mitochondrial carrier protein CGI
  misc_feature: Homolog of GI Number: 76644919 NR Desc:  similar to Mitochondrial carrier protein CGI
  misc_feature: Homolog of GI Number: 21358315 NR Desc: CG2616
MADSERIQNSWMASDQTAIEMSGEGTGSRECSSLPPPPQKPFNSDQLGIGERAFSAAGAAFLSAIIVNPLDVAKTRLQAQAAGVAYSHPLSNMTSRMACFGPNMIFADLKCSPSCHRAGFQGTVSICPPECFRYKGTLDVIYKIIKQEGISRLWRGTNAGLALAVPTVGIYLPCYDILRNWLEEFTAKKAPTTTTYVPLVAGSLARSLACTTCYPIELAKTRMQAFKETQIGKKPPGVIQTLLGVVSNVKSTNTPQNSLQGYRVLWTGMGAQLARDVPFSAICWSTLEPTRRKLLGLIGGDDANALSVLGANFGAGFVAGTLAAGATCPLDVVKTRRQIERDPVRALKMTTRQTLMEVWRDGGLKGLFTGVGPRVGRAGPSVGIVISFYEVVKFVLHHQYT

SEQ ID NO: 1715 - DNA, 627 bp, Glycine max
  misc_feature: Ceres CLONE ID no. 522388
  misc_feature: Ceres CDNA ID no. 29191492
  CDS (78)..(437): REFERENCED BY SEQ ID NO: 1716
atttcatcgctcttcacataaacttcaagcgagcaaacaaacaactagcaagggaagaaagaaactacagaaaagaaatggcttccacttctgcagtttcaatggctatgccagtaacttatgctagccagaagagggtggtgcctagctcggatgcattcttcaagccactgcctctacggtcttccaaggcagtgacagcatcaaaactcaatggaaggtttcaagtgagggcctccatgaaggagaaagttgtgacggggctcaccgcagctgcattgacagcttcaatgatggttcctgatgtggctgaggctgccgttacaccttctctcaagaacttcttgctcagcatcgcggcaggtggagttgttgttgttgccattattggtgctgtgatcggtgtttccaatttcgatcccgtcaagcgtagctgatggagttctgaggcactgtgttttatttatttttttgttacctcttatcatgatatgtatctttaatgtaatgttcttcagaaatgaagtgaaccctctgatgtgtgtactaatatgtgactcttatgctccacttgagcagaagcttttcaatgcttaaaattgtaaaaagaaaaaaaaaaaaaaaaaa

SEQ ID NO: 1716 - protein, 119 aa, Glycine max
  misc_feature: Ceres CLONE ID no. 522388
  misc_feature: Ceres CDNA ID no. 29191492
  misc_feature (82)..(119): Pfam Name: PsbX PFAM Desc: Photosystem II reaction centre X protein
  misc_feature: Homolog of GI Number: 45356861 NR Desc: ultraviolet
  misc_feature: Homolog of GI Number: 33520421 NR Desc: ultraviolet
  misc_feature: Homolog of GI Number: 18476498 NR Desc: ultraviolet
  misc_feature: Homolog of GI Number: 50939905 NR Desc: putative ultraviolet
MASTSAVSMAMPVTYASQKRVVPSSDAFFKPLPLRSSKAVTASKLNGRFQVRASMKEKVVTGLTAAALTASMMVPDVAEAAVTPSLKNFLLSIAAGGVVVVAIIGAVIGVSNFDPVKRS

SEQ ID NO: 1717 - DNA, 1023 bp, Glycine max
  misc_feature: Ceres CLONE ID no. 522492
  misc_feature: Ceres CDNA ID no. 29191713
  CDS (220)..(807): REFERENCED BY SEQ ID NO: 1718
aaaccctaataatccttctctctctctctctctccatgagcacagtaccgtaacgtaacgtaaccacgagatgcctctattctagcacttggaaccccaaatccgtgccaattcctccgctccttttcgcagacgaaggcacattctgacgttcacaagattggaaggcaagactaaagattccaccacctgatacaagctagaaaacagaggtttgaaatggctgtgtcactgtggagaagtcgcactgcttcatcagcactgaacttgttcaacaatactcttcgctgtttctcttccgaggcaacaaactccagtcctcatagtacacgagagagtatgatgtattctgacataaactcacgaattgggagttgcatgccactgtctgcaatgcgcattggaacaatcattcacaacattgagttgaacccagggcaaggtggcaagctcgtccgagctgctggaactagtgcaaagatcttgaaagagcccacatcggcatactgtttaatccaactgccctcgggtgttaaaaagttgattgattctcgatgtagggccactgttggtgttgtatctaatcctagccatggggatcgcaaacttaggaaggccggacacagccgatggcttggtcgaagaccagttgtccgaggagtggcaatgaatccagtagatcatcctcatggtggaggagagggtaagagcaagagtggtggacgatttgggcgaggatctctcactccttggggcaagccaactaagagtggctacaagactggacccctgaagcgcaaaaggtagtaggataccatattcattatagctgtttctgatgtttccttatgagatgcttgtaagttgtaataattgtggaaactgtcattcctatttaggaaattcattgaactgattaggttcacagccaatttgtggattttatgggttcaaattttattgttgttaaagtaaaatgtttttgaaatgatcacattttcctccaaaaaaaaaaaaaaaaaa

SEQ ID NO: 1718 - protein, 195 aa, Glycine max
  misc_feature: Ceres CLONE ID no. 522492
  misc_feature: Ceres CDNA ID no. 29191713
  misc_feature (48)..(181): Pfam Name: Ribosomal_L2_C PFAM Desc: Ribosomal Proteins L2
  misc_feature: Homolog of GI Number: 17644112 NR Desc: ribosomal protein L2
  misc_feature: Homolog of GI Number: 17644114 NR Desc: ribosomal protein L2
  misc_feature: Homolog of GI Number: 572523 NR Desc: ribosomal protein L2
  misc_feature: Homolog of GI Number: 17644110 NR Desc: ribosomal protein L2
  misc_feature: Homolog of GI Number: 17933116 NR Desc: ribosomal protein L2
  misc_feature: Homolog of GI Number: 6094106 NR Desc: Mitochondrial 60S ribosomal protein L2
  misc_feature: Homolog of GI Number: 23495405 NR Desc: Ribosomal protein L2
  misc_feature: Homolog of GI Number: 17933118 NR Desc: ribosomal protein L2
  misc_feature: Homolog of GI Number: 786202 NR Desc: rpl2
MAVSLWRSRTASSALNLFNNTLRCFSSEATNSSPHSTRESMMYSDINSRIGSCMPLSAMRIGTIIHNIELNPGQGGKLVRAAGTSAKILKEPTSAYCLIQLPSGVKKLIDSRCRATVGVVSNPSHGDRKLRKAGHSRWLGRRPVVRGVAMNPVDHPHGGGEGKSKSGGRFGRGSLTPWGKPTKSGYKTGPLKRKR

SEQ ID NO: 1719 - DNA, 1472 bp, Glycine max
  misc_feature: Ceres CLONE ID no. 522751
  misc_feature: Ceres CDNA ID no. 36569705
  CDS (464)..(1210): REFERENCED BY SEQ ID NO: 1720
gagaccaaccctagtaagatgcacaacattttatggtggagattggaacaaagagataaaaagaaagagaaaaaaagtgaacatctgaggataaaaaagccaagttagataacaggagagatgaacacaactgtgttgtagttgttgttgttgatgtttgctttgttctctttctctctctctctagggtttcaagagtgttttgaactactccagaaccctctcttgtttttcacaaatttgggttcagtagagtactgacccagaaaagaagattcaacaggtacctaagagaaggaaagagggggatagaaagaaagaaaaagaaatagaaactgcacgtataaaagaagaaagaaagaatcaaagaaaataggaaaaaagggcaaatattttgtttgaataagatataaggcaatagtaatattagtattgttgataataattaggtagaaaaaatattatggggaggggaagagtggaactgaaaaggatagagaacaagataaacaggcaggtaacgtttgcaaagaggagaaatgggcttctcaagaaagcctatgagctttctgttctctgtgatgctgaggttgccctcatcatcttctccacccgtggcaagctttatgaattctgcagcaccaacagcatgctcaaaacacttgaaaggtaccaaaagtgcagctatggtgcagtggaagtcagcaaacctggcaaagagcttgagagcagctaccgtgagtacttgaagctgaaagcaagatttgaatctcttcaaaggacccaaaggaaccttcttggtgaagacttgggcccattaaataccaaagatcttgagcagcttgagcgccaactggattcatctcttaagcaagtgaggtcaacaaagactcagttcatgctggaccagttagctgatcttcagaataaggagcatatgttggtggaagcaaacagatctttgaccatgaagctggaagaaatcaattcaagaaaccagtataggcaaacatgggaagctggtgagcaaagtatgccatatggaacccaaaatgctcactctcaaggcttcttccagcctttggagtgcaaccccacattgcagataggttctgactacaggtacatccctgaagcctcagagcagcagctagctgccacaactcaagctcaacaagtcaatggatttattcctggatggatgctttgacctaagatctcagtattttagatggctacataaataaaattagcaaacacctaaggccaaagtcaaaatgcctcttgctgttggaaatgtgtaaatgctgcttgttcttctgttaatttgttttggcataaaaacagcagtgactgacttaaaactattaaaactttagccatagacataggatgtggcatgaaggttatagtatttaatttgaatattttggaaggacaagttttatctgaccaaaaaaaaaaaaaaaaaa

SEQ ID NO: 1720 - protein, 248 aa, Glycine max
  misc_feature: Ceres CLONE ID no. 522751
  misc_feature: Ceres CDNA ID no. 36569705
  misc_feature: The plant flowers significantly earllier than wild-type.
  misc_feature: The plant is abnormally small.
  misc_feature: Useful for making plants with modulated growth and phenotype characteristics
  misc_feature: null
  misc_feature: The sequence is a functional homolog of  SEQ ID NO 26 in the  10/666,642 US patent application
  misc_feature: The sequence is a functional homolog of  SEQ ID NO 30 in the  10/666,642 US patent application
  misc_feature: Useful for making plants with modulated biomass
  misc_feature: Useful for making plants with modulated flowering time
  misc_feature (75)..(173): Pfam Name: K PFAM Desc: K
  misc_feature (9)..(59): Pfam Name: SRF PFAM Desc: SRF
  misc_feature: Homolog of GI Number: 73810196 NR Desc: MADS
  misc_feature: Homolog of GI Number: 62132637 NR Desc: MADS box protein M6
  misc_feature: Homolog of GI Number: 73537277 NR Desc: AGL2
  misc_feature: Homolog of GI Number: 6683777 NR Desc: CAGL2
  misc_feature: Homolog of GI Number: 20385584 NR Desc: MADS
  misc_feature: Homolog of GI Number: 63094573 NR Desc: MADS
  misc_feature: Homolog of GI Number: 3290209 NR Desc: MADS
  misc_feature: Homolog of GI Number: 3646334 NR Desc: MdMADS8
  misc_feature: Homolog of GI Number: 28372802 NR Desc: transcription factor MAGL4
  misc_feature: Homolog of GI Number: 3646336 NR Desc: MdMADS9
MGRGRVELKRIENKINRQVTFAKRRNGLLKKAYELSVLCDAEVALIIFSTRGKLYEFCSTNSMLKTLERYQKCSYGAVEVSKPGKELESSYREYLKLKARFESLQRTQRNLLGEDLGPLNTKDLEQLERQLDSSLKQVRSTKTQFMLDQLADLQNKEHMLVEANRSLTMKLEEINSRNQYRQTWEAGEQSMPYGTQNAHSQGFFQPLECNPTLQIGSDYRYIPEASEQQLAATTQAQQVNGFIPGWML

SEQ ID NO: 1721 - DNA, 719 bp, Glycine max
  misc_feature: Ceres CLONE ID no. 522921
  misc_feature: Ceres CDNA ID no. 29191598
  CDS (54)..(518): REFERENCED BY SEQ ID NO: 1722
acacaaaacactagtccctcccttcttccttgtctctttctcttctcaacaacatgcagatcttcgtcaagactttgactggcaagaccatcaccctcgaggtcgagagtagcgacaccatcgacaacgtcaaggccaagatccaggacaaggaaggtatccctcctgaccagcagaggttgatttttgctggtaagcagctggaagatggtcgcactcttgctgattataacatacaaaaggaatcaacacttcacttggtcttgaggctcaggggaggaaccatgattaaagtgaagactctaactggaaaagaaattgaaattgacattgagccaactgatacaatcgaccggatcaaggaacgcgttgaagaaaaagagggaattccacctgtgcagcagagactcatatatgcaggtaaacagcttgctgatgacaaaacagctaaagagtacaacattgagggtggttctgtacttcacttggtgcttgcattgaggggtggtacttattagtgtagatgccatatcagaacccaaagacatgaaaggaagctctattcctgccccgtctctctgaagacatcattgttcttttatgtgcttggtttttgtaattgtggctactattggtggtcagtaactcagtatctttttagttgtatgctatttaaaaccctaagttggcctttataatgaaaaaaaaaaaaaaaaaaa

SEQ ID NO: 1722 - protein, 154 aa, Glycine max
  misc_feature: Ceres CLONE ID no. 522921
  misc_feature: Ceres CDNA ID no. 29191598
  misc_feature: The plant flowers significantly late compared to wild-type.
  misc_feature: null
  misc_feature: Useful for making plants with modulated cold sensitivity
  misc_feature: Useful for making plants with modulated flowering time
  misc_feature (1)..(74): Pfam Name: ubiquitin PFAM Desc: Ubiquitin family
  misc_feature: Homolog of GI Number: 51534981 NR Desc: polyubiquitin 2
  misc_feature: Homolog of GI Number: 50726105 NR Desc: polyubiquitin 2
  misc_feature: Homolog of GI Number: 29824269 NR Desc: putative ubiquitin
  misc_feature: Homolog of GI Number: 20562909 NR Desc: polyubiquitin 2
  misc_feature: Homolog of GI Number: 20197530 NR Desc: ubiquitin
  misc_feature: Homolog of GI Number: 7862066 NR Desc: polyubiquitin
  misc_feature: Homolog of GI Number: 81230138 NR Desc: putative polyubiquitin
  misc_feature: Homolog of GI Number: 34911624 NR Desc: putative polyubiquitin
  misc_feature: Homolog of GI Number: 30523391 NR Desc: ubiquitin
  misc_feature: Homolog of GI Number: 15982787 NR Desc: AT4g05320/C17L7_240
  misc_feature: Useful for delaying flowering time
  misc_feature: Useful for increasing chlorophyll and photosynthetic capacity
  misc_feature: Useful for making smaller plants
  misc_feature: Utility: Cold Germination Useful for making plants with increased tolerance to cold stress
MQIFVKTLTGKTITLEVESSDTIDNVKAKIQDKEGIPPDQQRLIFAGKQLEDGRTLADYNIQKESTLHLVLRLRGGTMIKVKTLTGKEIEIDIEPTDTIDRIKERVEEKEGIPPVQQRLIYAGKQLADDKTAKEYNIEGGSVLHLVLALRGGTY

SEQ ID NO: 1723 - DNA, 2241 bp, Glycine max
  misc_feature: Ceres CLONE ID no. 523290
  misc_feature: Ceres CDNA ID no. 40041247
  CDS (100)..(2100): REFERENCED BY SEQ ID NO: 1724
atacacttttgaagttttatttctctcttcttctcatacagttattcttcatttcccatattgattcattttctggttgaaacagaagacgctgaagacatgtctggtcactgggggattcttgtttcagatccatggcttcagaatcagttcacacaagtggagcttcgtagcttaaagtcccatttcatgagcatgaggagggaaagtgggaggcttgtgattgcggatttggcttcgaagatgtcaaggttgaaggtggtgggagagaatctgagtgaggaagagagagcttcttgcgtgaaggatgtgtatcagaacactgaagaggaggttgattttgaattgtttctcaaggtctacttgaaactccaaacatttgtgaattctagaaccggaagtagtccaaagaactcgtcagcgttcctcaaggcagctacaaccacattgcttcacacaataagtgaatcagagaaagcatcatatgtagcacatataaatcactatctagcacaagatgagttcctcaagaaatatcttcctattgacccttcaaccaatgagctctttgaaattgcaaaagatggtgttcttctttgcaagcttatcaatgtagcagttccagggaccatcgacgaacgggcgatcaatacaaaaagaatactcaatccatgggaaaggaatgaaaatcacacactttgcctcaactctgctaaagcaattggatgtacagtggtcaacattggcactcaggacttcattgaaggaaggcgtcatctggtgcttggggtgatttctcagattattaagatacaattattggcggacctcgatttgaagaaaactccacagctgcttgagctgcttgatgacagtaaggatatggaagagttcatgaatctacccccagaaaaaatcttgttgaggtggatgaatttccatttgaaaaaagcagggtacaagaagattgtcactaatttctcctctgatgtgaaggatgctgaggcttatgcacaccttctaaatgttcttgcacctgaacacactaatctctccacgttggcagttaaaaatccctttgaaagagcaaagttagttcttgaacatgctgataagatgggttgcaagcgatacttaactgcgagagacatagtggaaggatccccaaatcttaatcttgcctttgttgctcatattttccagcacaggaatggactttcagcccagacaaaacaacagatgtctctccttgagacatttccagatgacaccctagactctagagaagaaagagcatttcgcctttggatgaatagctttggaaattcaacatatatcaacaatgtcttcgaggatctccgaaatgggtgggttcttctagagactcttgacaaggtgtcgccagggattgtcaattggaagattgctaataagcctccgattaagatgccatttagaaaagtggagaactgcaaccaagttgtgaaaatagggaaacagcttaaattttcgctggtaaatgttgctggaaatgacattgtgcagggaaataaaaaattaatactagcttatttgtggcaattgatgcgatacaatatcctacaacttctcaagaacttgagattttactctcgtggaaaggaaataaatgatgctgatattttagagtgggccaacagcaaggttagcagctccagaagccaaagccgcatggacagttttaaggataaaagtttatcagatggaatatttttccttgagcttctaagttcagtgacacccagagctgtaaattggggtcttgtaacaaagggagtaacctaccaagagaaaaagatgaacgccacctacattatcagtattgcaagaaagcttggatgttctatattcctgcttcctgaagacatcactgaggtgaatccaaaaatgatccttacactaacagctagtataatgtcttggtgcctaaaacaccctcatgaagaaaggacagtgggaacttccgataacgagagtgggggtcaattggagactacatcaaactcaacactagatgactctgcctctgattcatcactagatgagaatgggaacatataaatatatgccttgagtgaaaccgttatatatatatataaccactctttttagttgatcaaaagatcaatgtatgacactagttaatttaatggtttcaaagcaaattttgttcaagcaactatgaaaaaaaaaaaaaaaaaa

SEQ ID NO: 1724 - protein, 666 aa, Glycine max
  misc_feature: Ceres CLONE ID no. 523290
  misc_feature: Ceres CDNA ID no. 40041247
  misc_feature (517)..(623): Pfam Name: CH PFAM Desc: Calponin homology
  misc_feature: Homolog of GI Number: 59797940 NR Desc: Fimbrin 1
  misc_feature: Homolog of GI Number: 59797967 NR Desc: Putative fimbrin
  misc_feature: Homolog of GI Number: 51971889 NR Desc: fimbrin 2
  misc_feature: Homolog of GI Number: 8777376 NR Desc: fimbrin 2
  misc_feature: Homolog of GI Number: 34914666 NR Desc: fimbrin
  misc_feature: Homolog of GI Number: 2905893 NR Desc: fimbrin
  misc_feature: Homolog of GI Number: 4544422 NR Desc: putative fimbrin
  misc_feature: Homolog of GI Number: 50912181 NR Desc: putative fimbrin
  misc_feature: Homolog of GI Number: 23296651 NR Desc: putative fimbrin protein
  misc_feature: Homolog of GI Number: 56201784 NR Desc: putative plastin 3
MSGHWGILVSDPWLQNQFTQVELRSLKSHFMSMRRESGRLVIADLASKMSRLKVVGENLSEEERASCVKDVYQNTEEEVDFELFLKVYLKLQTFVNSRTGSSPKNSSAFLKAATTTLLHTISESEKASYVAHINHYLAQDEFLKKYLPIDPSTNELFEIAKDGVLLCKLINVAVPGTIDERAINTKRILNPWERNENHTLCLNSAKAIGCTVVNIGTQDFIEGRRHLVLGVISQIIKIQLLADLDLKKTPQLLELLDDSKDMEEFMNLPPEKILLRWMNFHLKKAGYKKIVTNFSSDVKDAEAYAHLLNVLAPEHTNLSTLAVKNPFERAKLVLEHADKMGCKRYLTARDIVEGSPNLNLAFVAHIFQHRNGLSAQTKQQMSLLETFPDDTLDSREERAFRLWMNSFGNSTYINNVFEDLRNGWVLLETLDKVSPGIVNWKIANKPPIKMPFRKVENCNQVVKIGKQLKFSLVNVAGNDIVQGNKKLILAYLWQLMRYNILQLLKNLRFYSRGKEINDADILEWANSKVSSSRSQSRMDSFKDKSLSDGIFFLELLSSVTPRAVNWGLVTKGVTYQEKKMNATYIISIARKLGCSIFLLPEDITEVNPKMILTLTASIMSWCLKHPHEERTVGTSDNESGGQLETTSNSTLDDSASDSSLDENGNI

SEQ ID NO: 1725 - DNA, 1668 bp, Glycine max
  misc_feature: Ceres CLONE ID no. 523865
  misc_feature: Ceres CDNA ID no. 36581543
  CDS (66)..(1400): REFERENCED BY SEQ ID NO: 1726
gaagactcgctacatcttctttccaaatcccaactactactcacactcactgcagatctcaatccatggctaccattgttagcatcaaggcccgccagatctttgacagtcgtggcaatccaaccgtcgaggtggatttgacatgctccgatggtacttttgctagagctgctgttccaagtggtgcatccactgggatttatgaggcccttgaattgagagatggaggatctgactaccttggaaagggtgtatcaaaggctgttgacaatgtgaacaccattattgcccctgctttggttggcaaggacccaactcagcagactgctattgacaacttaatggttcaacaacttgatggaactgttaacgaatggggttggtgcaagcaaaagcttggagcaaatgccatattggcagtgtctcttgcagtctgcaaagctggtgctgctgtcctgaaagttcctctttacaagcatattgcaaatattgcgggtaacaaaaagttggttttgcctgttcctgctttcaatgtcattaatggtggatcacatgctggaaacaaacttgctatgcaggagtttatggttcttcccgtgggagcttcctctttcaaggaagccatgaagatgggtgtagaagtatatcacaatttgaagtctgtgattaagaagaaatatggtcaagatgcagtaaatgttggtgacgaaggtggctttgcccctaacatccaggaaaacaaggaaggtttggaattgctgaaaactgccattgccaaagctggttacacaggcaaagttgtcattggaatggatgttgcagcttctgaattctacaaggaagataaaacatacgatttgaacttcaaggaagataacaatgatggctcacagaagatctctggagatgctttgaaagatctatacaagtcatttgtgacagagtatccaattgtttcaattgaggatccttttgaccaggatgactgggagcactatgctaagcttactgctgaggttggaaccaatgtacaaattgttggtgatgatctcttggttaccaaccccaagagggttcagaaggcaattgatacaaaagcatgcaatgctcttctccttaaggtcaaccaaattggttctgtgactgagagtattgaagctgtcaggatgtccaaaaaagctggatggggtgtcatggcgagtcacagaagtggagagactgaggataccttcattgctgacctttctgttggtttggcaacgggtcaaattaagactggagctccatgcaggtcagagcgtcttgctaaatataaccagctcttgagaattgaggaggagcttggtgcggaagcagtgtatgctggagctaacttccgtacccctgttgagccctactaaagttttcaagtggaaaaaacctggagatccccacgagtttgagcaatgagatttggatgcgcggttttagttgtgatcaataagtcgatagttagaacaatagtcttggtataaggaccttgccaataattttttagttctgattcacagagctaagacagttccgtcttagactttaaaagttttgatatttagctttaatacttgaagtttacttccaattttatggggtatccccaaaacatttcataaaaaaaaaaaaaaaaaa

SEQ ID NO: 1726 - protein, 444 aa, Glycine max
  misc_feature: Ceres CLONE ID no. 523865
  misc_feature: Ceres CDNA ID no. 36581543
  misc_feature (147)..(441): Pfam Name: Enolase_C PFAM Desc: Enolase
  misc_feature (3)..(139): Pfam Name: Enolase_N PFAM Desc: Enolase
  misc_feature: Homolog of GI Number: 533474 NR Desc: 2
  misc_feature: Homolog of GI Number: 24580920 NR Desc: CG17654
  misc_feature: Homolog of GI Number: 3023714 NR Desc: Enolase
  misc_feature: Homolog of GI Number: 780372 NR Desc: enolase
  misc_feature: Homolog of GI Number: 42521309 NR Desc: enolase
  misc_feature: Homolog of GI Number: 33415263 NR Desc: enolase
  misc_feature: Homolog of GI Number: 6996529 NR Desc: enolase
  misc_feature: Homolog of GI Number: 33113259 NR Desc: enolase
  misc_feature: Homolog of GI Number: 78707886 NR Desc: enolase
MATIVSIKARQIFDSRGNPTVEVDLTCSDGTFARAAVPSGASTGIYEALELRDGGSDYLGKGVSKAVDNVNTIIAPALVGKDPTQQTAIDNLMVQQLDGTVNEWGWCKQKLGANAILAVSLAVCKAGAAVLKVPLYKHIANIAGNKKLVLPVPAFNVINGGSHAGNKLAMQEFMVLPVGASSFKEAMKMGVEVYHNLKSVIKKKYGQDAVNVGDEGGFAPNIQENKEGLELLKTAIAKAGYTGKVVIGMDVAASEFYKEDKTYDLNFKEDNNDGSQKISGDALKDLYKSFVTEYPIVSIEDPFDQDDWEHYAKLTAEVGTNVQIVGDDLLVTNPKRVQKAIDTKACNALLLKVNQIGSVTESIEAVRMSKKAGWGVMASHRSGETEDTFIADLSVGLATGQIKTGAPCRSERLAKYNQLLRIEEELGAEAVYAGANFRTPVEPY

SEQ ID NO: 1727 - DNA, 1293 bp, Glycine max
  misc_feature: Ceres CLONE ID no. 523995
  misc_feature: Ceres CDNA ID no. 25445626
  CDS (1)..(990): REFERENCED BY SEQ ID NO: 1728
aacacattaagaagaaccagaataaagtacctagtggaggatcaaagtcttcatctcataatctggcacccaaagtcagcgagagcttccagctccttcaaaagcccccccaccacagaatatgcctataagaaattctggatttttgctgatgttgaagagggacgaccagctcaagttccagcaaggagtaaactgcctttgagcaatggtggcaagcatgttcgtgccagtcatgaggaacggaatgtaggttctgctgccggccgtttgcctcctaaatcaggatccagttacaagaccagtaaacctagtatggcatcagcagattctagaaagcagcttggtaacaacagtgataatggaccaggctggccagttgggccaaaaggcttgccttcaaagatttctgttggtaccactgggaataagtcttcagcacctggtataaaaaactctgtgaatggtatgcggaaatcactcccttcaaagaatcatccatccattccaaaacagagtgtagatcaaagaatttcgaagcagagtgttgaacaaagaattccaaagcagagtgtggaacaaagaagagacatacgagaactaaatagacctaaaatgacaccaaaacaaccagtggcatcatcaaaaccacagataaataagccacttaaacaaaattcagttcatactgcttcgcaagatcgtcgtcccaagcataaggttgctaaacgaccctttgatgatgatgaggacgaagtggatttcaggaacgtgatcagaaatatctttaattacaaccccaataaatttgttgatgacgatgacgatgacaatatggaggcaggctttgatgaaatcttgagggaagaaaagcggagtgaaatgattgctaaaagggaggacgaggagcaacttaggttaattgaggaggaagaggaaagagagaggagaagaaaaatggcaaagttaaagaaacggaagcttggctagcagtagttagtagtaacatgtcattgattttggtataatgaaaattctcttttcccaagggcagtttaatcatgggattaaattatacaattcatcaatgaagatagaaaaacattcgccctcacattgagcttgtttcaatttgaattacttagaaaagatataccgttatgtaaacgcagtttcggatttagtcaagggcaggggttggggttgcattgtgtatgtatgattttgagcgttttgcacactgattggcggtcattatacgcagtggatggattggaaaaaaaaaaaaaaaaa

SEQ ID NO: 1728 - protein, 224 aa, Glycine max
  misc_feature: Ceres CLONE ID no. 523995
  misc_feature: Ceres CDNA ID no. 25445626
  misc_feature: Homolog of GI Number: 24650526 NR Desc: CG5815
  misc_feature: Homolog of GI Number: 57102740 NR Desc:  similar to ubiquitin
  misc_feature: Homolog of GI Number: 50747850 NR Desc:  similar to RIKEN cDNA 5830435K17
  misc_feature: Homolog of GI Number: 73988903 NR Desc:  similar to CG5815
MASADSRKQLGNNSDNGPGWPVGPKGLPSKISVGTTGNKSSAPGIKNSVNGMRKSLPSKNHPSIPKQSVDQRISKQSVEQRIPKQSVEQRRDIRELNRPKMTPKQPVASSKPQINKPLKQNSVHTASQDRRPKHKVAKRPFDDDEDEVDFRNVIRNIFNYNPNKFVDDDDDDNMEAGFDEILREEKRSEMIAKREDEEQLRLIEEEEERERRRKMAKLKKRKLG

SEQ ID NO: 1729 - DNA, 813 bp, Glycine max
  misc_feature: Ceres CLONE ID no. 525332
  misc_feature: Ceres CDNA ID no. 40351031
  CDS (60)..(509): REFERENCED BY SEQ ID NO: 1730
aaaaaagaaaagaaaagaaaaaagagcgatttttccctcaccaaagaagaaccaaaacaatggcggatcaactcaccgatgaacagatctccgagttcaaggaagccttcagcttgttcgataaggacggcgatggttgcatcacaaccaaggagcttggaactgttatgcgttcattggggcaaaacccaactgaggcagaactccaggacatgatcaatgaagtggatgctgatgggaatggtaccattgacttccctgagttcctaaacctcatggctaggaagatgaaggacactgattctgaggaggagctgaaagaggcattccgggttttcgacaaggatcagaatgggttcatctctgctgctgagctccgtcatgtgatgaccaacctcggggagaaactcaccgatgaagaggtcgatgagatgattcgtgaggctgatgttgatggagatggccaaataaactacgaggagttcgttaaggtgatgatggccaagtgagtgatcatcacattatggccacaagaacctaaatgaagaagtgttgattaaaaggaaatgaccaaaaaaacagaggtaaggggaaggacaagggtttgggctgtataacagtgatgtagtagtccttgtcctttcttcttcctacatttatatttgacggtttttgaatccaaccttaaaatgtcaattagtggcaattcctgctactaatggatgtagtggaactgaaccttcttagtttgtctgtaattttttccaagaaataaagggttgtaatgttaatgtcaaaaaaaaaaaaaaaaaa

SEQ ID NO: 1730 - protein, 149 aa, Glycine max
  misc_feature: Ceres CLONE ID no. 525332
  misc_feature: Ceres CDNA ID no. 40351031
  misc_feature (12)..(40): Pfam Name: efhand PFAM Desc: EF hand
MADQLTDEQISEFKEAFSLFDKDGDGCITTKELGTVMRSLGQNPTEAELQDMINEVDADGNGTIDFPEFLNLMARKMKDTDSEEELKEAFRVFDKDQNGFISAAELRHVMTNLGEKLTDEEVDEMIREADVDGDGQINYEEFVKVMMAK

SEQ ID NO: 1731 - DNA, 1270 bp, Glycine max
  misc_feature: Ceres CLONE ID no. 525717
  misc_feature: Ceres CDNA ID no. 40351032
  CDS (121)..(951): REFERENCED BY SEQ ID NO: 1732
gagggtttgaggtatttatttaattggcaaaagacagtgtttgggtttcacaaacagacacacagtcggttcttccttctcaaatattcttgagatccccattttctccgaagcaaagccatggctaagggtcctggtctctactctgacatcggcaagaaagctagggatctgctgttcaaggactaccacagtgaccagaagttcaccatcaccacctactcaccgactggagtggctattacagcatcaggaaccaggaaaagtgaactgtttctggctgatgtcaacacccagttgaagaacaaaaacatcactactgatatcaaagttgatacagattctaatctcttcacaactatcactgtcaatgaacctgctcctggtctgaaggctatttttagcttcaaagttcctgaccaaaggtctggaaaggtggaagttcagtacttgcatgactatgctggaataagcaccagtgttgggttgacagcaaacccaattgtcaacttctctggtgttataggaactaatgttcttgctcttggtgctgatctttcttttgactccaaaattggggagttaacaaaatccaatgctggactgagcttcactaaagatgacttgattgcctcattgactctgaatgacaaaggtgatgctttgaatgctgcatattaccatgtagttaaccccttgaccaacactgctgttggtgctgaagtgacccatagattctcaactaatgagaacactctcacccttggtacccagcatcagttggatccattgaccacattgaaggcacgtgtgaacaactttggaaggacaagtgctctgatccagcacgagtggcgtcccaaatcgttctttaccatttctggtgaggtagacaccaaggccattgaaaagagtgctaaggttggattgagtttggttctcaaaccctaagaattttgatccatcctggcaagagcattgagtaggtgttaggaaccgtatagtctgtcagactaaattatttccttgaagttggttctcttcatgggtaagaagttttcatggagttttcgttgcatttgagcaattcaaccttgtaaaaataaataggctttccataaaccaaatgttacttttaaatgcccaaagcttatcaagcctcttttcttgaatggggattggcactctttattgaggttttgacatgagaaattttatatcttctgatttgatttgatggatattttctgcgaaaaaaaaaaaaaaaaaa

SEQ ID NO: 1732 - protein, 276 aa, Glycine max
  misc_feature: Ceres CLONE ID no. 525717
  misc_feature: Ceres CDNA ID no. 40351032
  misc_feature (4)..(269): Pfam Name: Porin_3 PFAM Desc: Eukaryotic porin
MAKGPGLYSDIGKKARDLLFKDYHSDQKFTITTYSPTGVAITASGTRKSELFLADVNTQLKNKNITTDIKVDTDSNLFTTITVNEPAPGLKAIFSFKVPDQRSGKVEVQYLHDYAGISTSVGLTANPIVNFSGVIGTNVLALGADLSFDSKIGELTKSNAGLSFTKDDLIASLTLNDKGDALNAAYYHVVNPLTNTAVGAEVTHRFSTNENTLTLGTQHQLDPLTTLKARVNNFGRTSALIQHEWRPKSFFTISGEVDTKAIEKSAKVGLSLVLKP

SEQ ID NO: 1733 - DNA, 728 bp, Glycine max
  misc_feature: Ceres CLONE ID no. 526014
  misc_feature: Ceres CDNA ID no. 36705479
  CDS (61)..(516): REFERENCED BY SEQ ID NO: 1734
tagagccggcttctccctctgcgcaggaattgggaacattcgacaggtagagtttcttcaatggctcctaaagttgataagaagaacgacccaaaggcacaggccttgaagactgctaaggcagttaagtctggtgctacctttaagaagaaggcaaagaagatccgaacttctgtcactttccacagaccgaggacattgaagaaggataggaaccccaagtaccctcgcattagcgcgcctccaagaaataagcttgatcattatcagatcctgaaataccctctgaccactgaatccgccatgaagaagattgaggacaacaacactttggttttcattgtcgacctgcgtgccgacaagaagaagatcaaggatgccgtgaagaaaatgtatgacatccaggccaagaaagttaacaccttgatcaggcctgatggaaccaagaaggcttatgtccggttgacccctgattacgatgcattggatgtggcaaacaagattgggattatctaaggtagtacctaggcagttctatggttattcttggcggaaactttttaaaaaaatgataggttctatattttgtgttttgttattttgtatgttttggttccgttgacactaagcagacctcgtgtttcaattttgactagagagttgtttaaattgatgattggaatgatcatgttaaaattttctaattagtgaaaaaaaaaaaaaaaaaa

SEQ ID NO: 1734 - protein, 151 aa, Glycine max
  misc_feature: Ceres CLONE ID no. 526014
  misc_feature: Ceres CDNA ID no. 36705479
  misc_feature (69)..(148): Pfam Name: Ribosomal_L23 PFAM Desc: Ribosomal protein L23
  misc_feature (9)..(63): Pfam Name: Ribosomal_L23eN PFAM Desc: Ribosomal protein L23
  misc_feature: Homolog of GI Number: 2641201 NR Desc: ribosomal protein L23a
  misc_feature: Homolog of GI Number: 76573339 NR Desc: ribosomal protein L25
  misc_feature: Homolog of GI Number: 7340791 NR Desc: ribosomal protein L23
  misc_feature: Homolog of GI Number: 13560777 NR Desc: ribosome protein L23a
  misc_feature: Homolog of GI Number: 1084424 NR Desc: ribosomal protein L23a
  misc_feature: Homolog of GI Number: 7711063 NR Desc: ribosomal protein L23
  misc_feature: Homolog of GI Number: 21592339 NR Desc: 60S ribosomal protein L23A
  misc_feature: Homolog of GI Number: 3355475 NR Desc: 60S ribosomal protein L23A
  misc_feature: Homolog of GI Number: 2654122 NR Desc: ribosomal protein L23a
MAPKVDKKNDPKAQALKTAKAVKSGATFKKKAKKIRTSVTFHRPRTLKKDRNPKYPRISAPPRNKLDHYQILKYPLTTESAMKKIEDNNTLVFIVDLRADKKKIKDAVKKMYDIQAKKVNTLIRPDGTKKAYVRLTPDYDALDVANKIGII

SEQ ID NO: 1735 - DNA, 1341 bp, Glycine max
  misc_feature: Ceres CLONE ID no. 526894
  misc_feature: Ceres CDNA ID no. 40041248
  CDS (17)..(1084): REFERENCED BY SEQ ID NO: 1736
acgcacgcacgaggccatgtcgggattcagagacactcacggttttcctcgtccaatcctcgctgtgaatctcgctctcgctcttctccacgccgccgttgcgttcctcgcgttctttcagttgctgagaattcacatgaggaatgcgcagcttggttggactcggcaaaaggtgttccatgtattgattggctcttctaatttgggttatgtcatttatttggcattgacaattgttgcttcctgcaagggatggacctgttggtcgcactcttgtggtttcatatttatggctttccccaaagtacttttttttgcagcatttcttcttcttttatccttctgggttgacctttgccatcaggcagatgatgatgatgactatgaaggaagtttttgtgacaaccctttgctggagaagactttaaatgaatcaaatttagcaagcatagatagccatagaaagtgctttccttttcggtttgctcgtgttggaaatcggcaaaaaattgtgattttggttactttgctagttttcatcatcgtggttgcttttgctgtagtaatctggattgggctaggaaagaatcccattgattctgaagtggcagctcggatatatttatatctttctgctattgggatgcttttgttgggaggagcattagcatgctatggaattctattatgcttgaaaatgagcaaagtgagagccgagaaactttcatctgaaatgtggaaggttgcaggtttaactattgtctctgtaatatgcttcacatcaagttcctgtgtagaacttttaaccgacatccctatgcagtataactggcatcagcggcgtctgaatgatgtttactcctctcttttactcattttgtattattttgtgggttcatcaataccttcagcagtggtactgtgggtaatgagagaattaccacctgaagaagctgctagcatacccgaagaatcaagtacaatagcttttgttgctgatagttcaattgcaatccatcatcctcaacgctgggctacagcaacaagcatgcagaatcagacatcaagagcgagtcctatatgattatgcattaacctttgcaaatatatcttggtctgctggagtttggacagcttaatggaatttcctcaggatgtttaaccctagagcgcagaagagagaaaatgataatgatggatgcaagttctcaagggacttgaggtttcccttcccactgtatttacaatctaaatctaaatgtatatagcagcaatttgatatatgaaaagttcttttccttctatacaaaaaaaaaaaaaaagaaaaaaaaaaaaaaaaaa

SEQ ID NO: 1736 - protein, 355 aa, Glycine max
  misc_feature: Ceres CLONE ID no. 526894
  misc_feature: Ceres CDNA ID no. 40041248
  misc_feature: Homolog of GI Number: 34909574 NR Desc: P0046E05.19
  misc_feature: Homolog of GI Number: 7527730 NR Desc: T5E21.3
MSGFRDTHGFPRPILAVNLALALLHAAVAFLAFFQLLRIHMRNAQLGWTRQKVFHVLIGSSNLGYVIYLALTIVASCKGWTCWSHSCGFIFMAFPKVLFFAAFLLLLSFWVDLCHQADDDDDYEGSFCDNPLLEKTLNESNLASIDSHRKCFPFRFARVGNRQKIVILVTLLVFIIVVAFAVVIWIGLGKNPIDSEVAARIYLYLSAIGMLLLGGALACYGILLCLKMSKVRAEKLSSEMWKVAGLTIVSVICFTSSSCVELLTDIPMQYNWHQRRLNDVYSSLLLILYYFVGSSIPSAVVLWVMRELPPEEAASIPEESSTIAFVADSSIAIHHPQRWATATSMQNQTSRASPI

SEQ ID NO: 1737 - DNA, 1623 bp, Glycine max
  misc_feature: Ceres CLONE ID no. 526991
  misc_feature: Ceres CDNA ID no. 25088003
  CDS (536)..(1429): REFERENCED BY SEQ ID NO: 1738
gaacatctaccctagcggtgtgaactgaaccaacttcactgcaccagaaaggctttcaaccatctactccacttcttcacactctgtgtgtgtaagtgcttacattacattacaattcactcatcaactgtgctggatttttgtttctattgattgataaccttttttgtggacaaaacggtgttgcttagtgttaacaatgcacagcctcaaccaaaagcatctttggttttaagtaaacatttggttctgttttgtgctcatctaattgcagtgagcaatatgattcatgaaagaagaattttttctatcttgttagtgttgttcttctaaatacctccctccattcaagaacagaagagatttggtttccataattcccattaagaaattgtgtttatagcaggaaaacttgttttgagtagaggttcatggtaaaaattgtgtcttttgatgggaggtttaatgctctatagtctgaagaaagtattggaatggaagcacaacgcaaaaggaaaataacaatctcttcttaatggaaataagtattgcaaggtctcatctcgaaacacagggaatattcttttcaaatgtttcaagaacgataggatgggaaagcaccaagaaacttccatgtaatgtggcttcccagagttcaagatgggactttcacagattggcctcttcccatcaagcttttactgcagtgtatcctagaaggccttttatctgtagagcaaattctatgccaattagtttacaggaatctgcatcatatggagataattctattgaggatgaggatccatctacagacttggaagaggaaactttggcaaaaccacctaccagtgaacagataatggcactgcttgctgacacacagggagcaaaactcactaagaagcttagtgaagccaaccggcaaaatcggttcctaaaaagacagttgaatgtaacggaggatgcattggtaaaattcaaaaatgaacttgcagtcatggagcttgaaattcaggccttggccagattagcagaagaaatagctcaatgtggtattccagaaggttcaaggaagatcaatggaaagtacattcattctcaccttgttgctagattagaagctgtaaatgaacaactgaaggaacaaataaaggatgttgatgcggcacaatcaaaggaggtttctgtgttttgggttggcatggctgagagtgtgcaagttatgggcacctttgatggctggagccaaggagagcacctttcacctgagtatactggttcttacacaaggttttcaactacattgttgcttaggccaggaaggtatgaaatcaaattcttagtagatggtgaatggcatctgtcaccagagtttcccattattggtgaagggttaaccaaaaataatttgctagttgttgagtaatgaattaatgattcatattttcaatcctagtaactgatacataagcagaaacttgagtgttattttcttaaagttatttaaattttctttctttggtgtataggcacacacacttttttgagtgttttgtgttgctacactatttgatctgcaattatatttttaggttttcagccaaaaaaaaaaaaaaaaaa

SEQ ID NO: 1738 - protein, 297 aa, Glycine max
  misc_feature: Ceres CLONE ID no. 526991
  misc_feature: Ceres CDNA ID no. 25088003
  misc_feature: Homolog of GI Number: 16974327 NR Desc: AT5g39790/MKM21_80
  misc_feature: Homolog of GI Number: 42568201 NR Desc: 5'
  misc_feature: Homolog of GI Number: 30689754 NR Desc: 5'
  misc_feature: Homolog of GI Number: 50872462 NR Desc: isoamylase N
MEISIARSHLETQGIFFSNVSRTIGWESTKKLPCNVASQSSRWDFHRLASSHQAFTAVYPRRPFICRANSMPISLQESASYGDNSIEDEDPSTDLEEETLAKPPTSEQIMALLADTQGAKLTKKLSEANRQNRFLKRQLNVTEDALVKFKNELAVMELEIQALARLAEEIAQCGIPEGSRKINGKYIHSHLVARLEAVNEQLKEQIKDVDAAQSKEVSVFWVGMAESVQVMGTFDGWSQGEHLSPEYTGSYTRFSTTLLLRPGRYEIKFLVDGEWHLSPEFPIIGEGLTKNNLLVVE

SEQ ID NO: 1739 - DNA, 1616 bp, Glycine max
  misc_feature: Ceres CLONE ID no. 527135
  misc_feature: Ceres CDNA ID no. 36516463
  CDS (221)..(1312): REFERENCED BY SEQ ID NO: 1740
aaaaaacaagtaagctcgctcattgttcttccgattgaaagcacgtcgaataagcgcttttaggatttaaaggggaaaacttgaagtgcctctggataagtggtggagtttgtttgtttgattgattttgcaaatcagttgaatggtaggatccccaatcacccaacaagatcaggtgtgattgaaggaaaaaggggcataggggaagttgaagtgaaaaatgctgagtgatagagatgggaaagaggacatggacaggcttagtgacttgcctgaccttgttttgcttcatataatgaaatttatgagcatgaaacatgctgttcagacttgtgtcttgtctacaagatggaaggaactgtggaaacgtctctcgaatttggcattgcattcctcagattttaccaaccttgcacatttcagcaaatttttatcatgggttctgttgaatcgagatagctccatttccctgcatagtctagatttgaggcgtaaaggctgtatagatcatgaactcctggacatgatcatgggatatgctgtgtcacatgatgtccagcagttggcaattgaagttaatttaaatgctaaatttggttttaagttgcagcctagtatcttttcttgtaaatctttgacatttcttaagctttccatctgggctgtcccttggatgactgaacttccaagttccctgcagttgccagcattgaaaagcttgcatcttgagcatgtcactctaactgcaggtgaaggtgactgtgccgagcccttttcagcttgtcacatgttgaatactttggtcattgaccggtgtaacttgcatcatggtgcaaaattcctctgcatatgtaattccaacctttctactttgaccataggtagtaccattcaagaaacaccctacaaatttatactttctactccaaatcttagatctctttccgtgatgcgtgatcctattcaccaactctctgcttgcaatctttctttacttgaacaagtaaatattgacgttgaagcctattttgatgctcattttcaaaggacacatttagcccttataagtttgctgcaagtgctcgcagattatgcaaagataatgatactctcttcaagtaccctcaagattctaaatggtctctcaacttctggttcaatgataacacaaatcccttgctttgttcaattaaagtcattgaaattgaaaatgaaatcttcttcaaacatatctgatgagggagttagcaggatagtagagtacttaattataaaatgtccggtggccaaagttgatattataaattgctgagagtgataagaacacttatcctcagaactgttgaaggggggaaaagatcaaaagaccacttgatagactgatgaatctgaagtttctttttttgttggtgtaatatgttgcatcattgcctagtcttaaggagagcctctgtggtagtggtgctagccttatggaaattatgtgtatcatgctcctaccgatgtaactaaattattatattagactatggagttgttgtatgaactcatgtcaaagttactatgatgagtatgtttattatttcttattgattactaaaaaaaaaaaaaaaaaa

SEQ ID NO: 1740 - protein, 363 aa, Glycine max
  misc_feature: Ceres CLONE ID no. 527135
  misc_feature: Ceres CDNA ID no. 36516463
  misc_feature (14)..(59): Pfam Name: F PFAM Desc: F
  misc_feature: Homolog of GI Number: 22328603 NR Desc: F
  misc_feature: Homolog of GI Number: 30678601 NR Desc: F
  misc_feature: Homolog of GI Number: 30688556 NR Desc: F
  misc_feature: Homolog of GI Number: 15239560 NR Desc: F
  misc_feature: Homolog of GI Number: 22137028 NR Desc: At5g18770/F17K4_20
  misc_feature: Homolog of GI Number: 18423560 NR Desc: F
  misc_feature: Homolog of GI Number: 42566399 NR Desc: F
  misc_feature: Homolog of GI Number: 42572987 NR Desc: F
  misc_feature: Homolog of GI Number: 15222756 NR Desc: F
  misc_feature: Homolog of GI Number: 8778488 NR Desc: F20N2.9
MLSDRDGKEDMDRLSDLPDLVLLHIMKFMSMKHAVQTCVLSTRWKELWKRLSNLALHSSDFTNLAHFSKFLSWVLLNRDSSISLHSLDLRRKGCIDHELLDMIMGYAVSHDVQQLAIEVNLNAKFGFKLQPSIFSCKSLTFLKLSIWAVPWMTELPSSLQLPALKSLHLEHVTLTAGEGDCAEPFSACHMLNTLVIDRCNLHHGAKFLCICNSNLSTLTIGSTIQETPYKFILSTPNLRSLSVMRDPIHQLSACNLSLLEQVNIDVEAYFDAHFQRTHLALISLLQVLADYAKIMILSSSTLKILNGLSTSGSMITQIPCFVQLKSLKLKMKSSSNISDEGVSRIVEYLIIKCPVAKVDIINC

SEQ ID NO: 1741 - DNA, 1367 bp, Glycine max
  misc_feature: Ceres CLONE ID no. 527561
  misc_feature: Ceres CDNA ID no. 40041249
  CDS (298)..(942): REFERENCED BY SEQ ID NO: 1742
accttgactctgctctgccacggctgagaaaatagcgactcagaaacacgctcgtcttcacgatcctgcgattccgctctccaacgagtctgcgcaggatgaaaaatcgggaggctagccgtcggtgaagaatcgcgcgattcgccaggaaatcgcgattcaagcacgattcatccccgatacagagattcaaccacaattcaggaaaaaaaaacgagacaaaatccgtttcgtatcaataggagctggaatcgtatcgaatcgcgagatacggatcgtgaatcaagtctctgggtgatggctggttcagaacctgtaagtgcagagggagagagtatggctgtggatgctgccccaaggaagccccggattctacttgctgctagtgggagtgttgctgctgtcaaatttgcaaatctttgtcattgtttctctgaatgggcagatgtaagagcagtttcctcaagtggatctttgcatttcattgatagagcatcaatgcccaaggatgtaattctatacacggatgaggatgaatggtctagttggaagaaattaggtgatagtgtgcttcacattgagcttcgcaaatgggcagatatcatggtcatcgctccattatcggcaaacacccttggcaagattgctggagggttgtgtgacaatctacttacatgtatcgttcgagcctgggactacagcaagccattctttgttgcaccagccatgaacactttgatgtggaacaatcctttcactgagcggcatttcatctccattgatgagcttggcatttctctcatcccgcctgttacaaagaggttagcttgtggggattatggcaatggtgccatggctgaaccctctaccatttactcaactgtaaggctcttctatgagtcaaaggctcagcaaggtagagctgtggtaaccttaaggtgaatgaaggggtagtcctacgcccccattcatggtagtcaatagcactctatagcaggataacggagcgcagcagccctgagttactatggaagtcgaaatcgctgagcgattttcaataaccgctgtagcggctgcaatagtggtctaaatacagcttttcgggtgctacagcgcactgccataatattagacttcaaattctatatttactccagaaacatcattgtttgggtaaaaatttacaaaaaagttacccctgttttgaccctttattcctttacacattgcaagattatattttatcctatgttttgttctttctttctttatactttccactcaattcacattttttcaattttattttatctaatttgttatgttctttttctattaaaaaaaaaaataaaaaaaaaaaaaaaaaa

SEQ ID NO: 1742 - protein, 214 aa, Glycine max
  misc_feature: Ceres CLONE ID no. 527561
  misc_feature: Ceres CDNA ID no. 40041249
  misc_feature: The plant flowers significantly late compared to wild-type.
  misc_feature: Useful for making plants with modulated flowering time
  misc_feature (23)..(143): Pfam Name: Flavoprotein PFAM Desc: Flavoprotein
  misc_feature: Homolog of GI Number: 52218792 NR Desc: At3g18030
  misc_feature: Homolog of GI Number: 28948674 NR Desc: Chain A
  misc_feature: Homolog of GI Number: 2047324 NR Desc: HAL3B protein
  misc_feature: Homolog of GI Number: 8778701 NR Desc: T1N15.24
  misc_feature: Homolog of GI Number: 51090974 NR Desc: putative HAL3B
  misc_feature: Homolog of GI Number: 72089189 NR Desc:  similar to CG30290
  misc_feature: Homolog of GI Number: 12583571 NR Desc: putative halotolerance protein HAL3 homolog
  misc_feature: Homolog of GI Number: 45188030 NR Desc: ADR156Cp
  misc_feature: Homolog of GI Number: 19115217 NR Desc: thymidylate synthase
MAGSEPVSAEGESMAVDAAPRKPRILLAASGSVAAVKFANLCHCFSEWADVRAVSSSGSLHFIDRASMPKDVILYTDEDEWSSWKKLGDSVLHIELRKWADIMVIAPLSANTLGKIAGGLCDNLLTCIVRAWDYSKPFFVAPAMNTLMWNNPFTERHFISIDELGISLIPPVTKRLACGDYGNGAMAEPSTIYSTVRLFYESKAQQGRAVVTLR

SEQ ID NO: 1743 - DNA, 724 bp, Glycine max
  misc_feature: Ceres CLONE ID no. 527608
  misc_feature: Ceres CDNA ID no. 40351033
  CDS (86)..(535): REFERENCED BY SEQ ID NO: 1744
atccatttctcgcaacaacgcttaatctctctcattccccatttcctcacctccttcaaccgctgctaaattctagggttccgaaatggacgctggcggaaagatcaagaagggcgccggaggtagaaagggcggcggcccaaagaagaagccggtttcaaggtccgtcaaagccggtctccaattccccgtcggaagaattggccgttatttgaagaaaggaaggtacgctcagcgtgtcggtaccggtgctcccgtatacttggctgcagttctcgaatacctagctgccgaggtgcttgagttggctgggaatgccgcacgtgacaacaagaagaacaggattattccaagacacgtgcttttggcagtgaggaacgatgaagagttggggaaattgcttgctggagtgacaattgcacatggtggcgtgcttccaaacatcaaccctgttttgttgcctaagaagactgagagggcttccaaggaacctaaatctccatccaaggctaccaaatctcctaagaaagcttagattacttttttattttccatatttaatttagtgttgtatatcggtgtttaggtgcttttggtgtaacaggatattttatgtgtttcgaaaacactgtaattcttgtcccaatttgttgcttgtaggagtgagtttgcttcgttaatgaaaagtggaaacccccttgttttcaaaaaaaaaaaaaaaaaa

SEQ ID NO: 1744 - protein, 149 aa, Glycine max
  misc_feature: Ceres CLONE ID no. 527608
  misc_feature: Ceres CDNA ID no. 40351033
  misc_feature (26)..(101): Pfam Name: Histone PFAM Desc: Core histone H2A/H2B/H3/H4
MDAGGKIKKGAGGRKGGGPKKKPVSRSVKAGLQFPVGRIGRYLKKGRYAQRVGTGAPVYLAAVLEYLAAEVLELAGNAARDNKKNRIIPRHVLLAVRNDEELGKLLAGVTIAHGGVLPNINPVLLPKKTERASKEPKSPSKATKSPKKA

SEQ ID NO: 1745 - DNA, 1569 bp, Glycine max
  misc_feature: Ceres CLONE ID no. 528148
  misc_feature: Ceres CDNA ID no. 40351034
  CDS (310)..(1101): REFERENCED BY SEQ ID NO: 1746
gttattcaattctcaaattcgaacttgggttttggttgatttttcctttttgtgtgtgaattctactttgggggtggcttcgatttgtgtccgaggaggaattgtggttaacctactgtgcatttgattacgggtgtgtctcaggaatttgagattttggggatggaacttgacatggattgaggaatgtagcgactttgttatgttatgtggttggcgattgtgttgttactaggaaattcaataatgtgtttcccagttgcccaaagtcctgattagtcgttcccctaaggtgtttggatatattttatgttatggagtcaaggctgggcacttcatggacgatttaagaaaatgattctcacaaagcagtaccgatgcatacactcagctagttgtcaatgtactaaagggcatttaagtgaagatatgatattcttagtatttcataatttgaattggaatcccaagctaattgcaactctatcatgtgtgtgcaaatggtttgatgatcttgccaagcgagttctatggaaagagttttgtcgaacaagagctccgaaaatgttgtgtgatctgcaatctaatgggagccacattgttgatgggaactggagggccctagggaagcttcttatatactgttcaggatgcacaaaaggtggcttgttcaatagcattcagattcctggtcactttgtttatcagacacgattttctagaacatcaggaaagagctttcttttgccacaatgcaggactgatgttttgtatgtatgtgatccttgtgagcatcttgaccaaggtgaggaaggagatgtaggattcttccgtggcatttttaagtcatttgcaacctcaaaggtcaggaagatgcttattaataaaggtgccaagctccatccaacagaagtctgcccttattgtaaggcaaagttgtggagcatgctgcaagccaaaatgatccctcaaagtgctagttgcaggttgggttcttatgatgattgcattgagtattatgtgtgcctcaacggccacatgcttgggatatgtaccctattaccattgtctgattcagaagaggcatctgaattggagtaatacctaaatgattttcaggttggcagtaaatcttcacaagtcggttgaacgctgccggtatactcctggtttaattgactactcagcacctaaaatatgcattaacttgccctcaagcttgaagctgcaatctcacccatcccaagccagcatttccaaggatggtcgaagatattaatcaatttctcgtatgaatcattatacagaaggttgttactgtgaaccatgtgatatcccatttagattgatacgtggtgtctctgcctgtgacaaatatgcgtgtgtaataattcatacttgttcaatatagaatcaggattatcactttactctccaaccccctaccccggttgatgaagaatacaaaataaattggatttaaatgagaaacagtattctctcggttctggcaggtctgaatttgtgtaagaacgcgtggaatttgagatcaaaaaaaaaaaaaaaaaa

SEQ ID NO: 1746 - protein, 248 aa, Glycine max
  misc_feature: Ceres CLONE ID no. 528148
  misc_feature: Ceres CDNA ID no. 40351034
MILTKQYRCIHSASCQCTKGHLSEDMIFLVFHNLNWNPKLIATLSCVCKWFDDLAKRVLWKEFCRTRAPKMLCDLQSNGSHIVDGNWRALGKLLIYCSGCTKGGLFNSIQIPGHFVYQTRFSRTSGKSFLLPQCRTDVLYVCDPCEHLDQGEEGDVGFFRGIFKSFATSKVRKMLINKGAKLHPTEVCPYCKAKLWSMLQAKMIPQSASCRLGSYDDCIEYYVCLNGHMLGICTLLPLSDSEEASELE

SEQ ID NO: 1747 - DNA, 979 bp, Glycine max
  misc_feature: Ceres CLONE ID no. 528631
  misc_feature: Ceres CDNA ID no. 36580190
  CDS (65)..(808): REFERENCED BY SEQ ID NO: 1748
gagaccgttatacaagtgtgagaaaaattccatgtcttagattatactctccagtgagagagttatggcaaatgctggaaatctgatatcatcaaggaactttaatccaataatattcaatccataccactatgcaactaagctcaaaaccttgaggttgctctctcggtttcactcttacaacaataatgccactgtcactgcttccaaaaaaaaggatgacttgcaatctccattgattgggaagaacacgagcagggctcctcgccgtctgatcacaatatcaccaggtgatggcaaatatcatggggattggacttgtgactatcgcgtctctttgcacgacctagagttacaggatttgattgaagatgataataactcacgtaaggatgctcaagttttcatcaatctctctatccaaaagcatgctagctttggtttatcggtggatggaagagtcaccacatccttcactagaaaatgtagcacctgttcttctccgtattgccgacagattgatgcaaaatttaacgtatgggttcttatagcacgtagagatgaccgcaagataccgctacctgatattggaggtgaccctaatgtgatttatgttagaccgggatacgaagttgatcttgattctcttgtacaagatgccatccgattaaactctgtagtaaaagatacttgctcagaattgtgcgagaaatctgagggtacaatacaatatataactggacaaggccaagcttctgttgataaaaggtggtcaagactattggaactaaagaaagaaaatttatgatctatagtacaatgtaagaagttttatatatagaataatagtcagtttgcaaatagattggataatttgtcttacttagttttgcatgtgtatacctctgcagacattggataatatattttacgaaacaattcagctttttagaccttcaagcaaaaaaaaaaaaaaaaa

SEQ ID NO: 1748 - protein, 247 aa, Glycine max
  misc_feature: Ceres CLONE ID no. 528631
  misc_feature: Ceres CDNA ID no. 36580190
  misc_feature: Homolog of GI Number: 50926566 NR Desc: OSJNBa0038O10.2
MANAGNLISSRNFNPIIFNPYHYATKLKTLRLLSRFHSYNNNATVTASKKKDDLQSPLIGKNTSRAPRRLITISPGDGKYHGDWTCDYRVSLHDLELQDLIEDDNNSRKDAQVFINLSIQKHASFGLSVDGRVTTSFTRKCSTCSSPYCRQIDAKFNVWVLIARRDDRKIPLPDIGGDPNVIYVRPGYEVDLDSLVQDAIRLNSVVKDTCSELCEKSEGTIQYITGQGQASVDKRWSRLLELKKENL

SEQ ID NO: 1749 - DNA, 1340 bp, Glycine max
  misc_feature: Ceres CLONE ID no. 528857
  misc_feature: Ceres CDNA ID no. 25893105
  CDS (63)..(1148): REFERENCED BY SEQ ID NO: 1750
ggcatatcagtttccagttccttccattcctttcttccggatcacagggaaaataaaaaacaatggagttggacttgacaccaaagacagcagaagtgttgtttgagggagatggtggaggttactacacttggtggagttctaaagtgccactgctggccaagaccaatgttggtgctggtcggttagtgcttcagcctcagggctttgctattcctcattattcagatatatccaaagtaggttatgtgcttcaagggaacgatggcgtagctgggatggccctccgcaacagtactactagagaagaggtggttgtgaagcttaagaagggagatgttataccagtacctattggaagtgtctcgtggtggttcaacgatggggactcagatcttgtcattgtttttcttggagaaacttcaaaggctcttattcctggcgaaattagttatttctttctaaccgggcttcaaggagttataggaggcttctctaatgagctcacaagcaaaatatatggtttggacaaagatggggtggaaaagctcacaaaaagccaaagtggggttgtgatcatcaaattagacaaaagccaatctttgcctaagccccaaatggaaataaccaaaaagctagtctataatatagatgttgcacaccccgaaaatgttgtggaaaatgctggaatagtcaaaaccttaacggagcaagattttccttttattggggatgttgggttaagtgtgattagagtgaaacttgaaccgggtgctattaaggcaccatcatacccaatcaaccctacggttcagttgatttacattgctagaggaagtggcaagattgaaattgtggactttagtgggaagtgtgcattagagactcaagttgaggctggtcatttgcttgttgtgccacaattctttgtggttgcacaaattgctggggaagaaggaattgagagttactctatcgtgacaactacaaagcctttatttgaagagttgggtggaagggcatcaatttggagcgccttgtcaccatctgtgcaacaagcatctcttcacgtggattcagaatttcaaagcctcttcatatccaagatcaaggaaaccacaaatctcattcctcccactactaattagtcactttgtttatgcatatatttatgtattttcaatgtatgatgttgagtgtttacttacccttgagttgcttttggagaaaaagtctgtgttgcgatcaaccagaaatgttaaaataaaccaagtgtgacaacctatttccaataatttcataaaatatgagttttatgtgctaaaaaaaaaaaaaaaaaa

SEQ ID NO: 1750 - protein, 361 aa, Glycine max
  misc_feature: Ceres CLONE ID no. 528857
  misc_feature: Ceres CDNA ID no. 25893105
  misc_feature (194)..(343): Pfam Name: Cupin_1 PFAM Desc: Cupin
  misc_feature (40)..(118): Pfam Name: Cupin_2 PFAM Desc: Cupin domain
  misc_feature: Homolog of GI Number: 24111337 NR Desc: At1g07750/F24B9_13
  misc_feature: Homolog of GI Number: 21593610 NR Desc: globulin
  misc_feature: Homolog of GI Number: 4580389 NR Desc: legumin
  misc_feature: Homolog of GI Number: 37730876 NR Desc: legumin
  misc_feature: Homolog of GI Number: 34906084 NR Desc: putative legumin
  misc_feature: Homolog of GI Number: 28950670 NR Desc: legumin
  misc_feature: Homolog of GI Number: 55168333 NR Desc: putative legumin
  misc_feature: Homolog of GI Number: 28950668 NR Desc: legumin
  misc_feature: Homolog of GI Number: 7595348 NR Desc: globulin
  misc_feature: Homolog of GI Number: 949869 NR Desc: legumin
MELDLTPKTAEVLFEGDGGGYYTWWSSKVPLLAKTNVGAGRLVLQPQGFAIPHYSDISKVGYVLQGNDGVAGMALRNSTTREEVVVKLKKGDVIPVPIGSVSWWFNDGDSDLVIVFLGETSKALIPGEISYFFLTGLQGVIGGFSNELTSKIYGLDKDGVEKLTKSQSGVVIIKLDKSQSLPKPQMEITKKLVYNIDVAHPENVVENAGIVKTLTEQDFPFIGDVGLSVIRVKLEPGAIKAPSYPINPTVQLIYIARGSGKIEIVDFSGKCALETQVEAGHLLVVPQFFVVAQIAGEEGIESYSIVTTTKPLFEELGGRASIWSALSPSVQQASLHVDSEFQSLFISKIKETTNLIPPTTN

SEQ ID NO: 1751 - DNA, 827 bp, Glycine max
  misc_feature: Ceres CLONE ID no. 528914
  misc_feature: Ceres CDNA ID no. 29191493
  CDS (86)..(628): REFERENCED BY SEQ ID NO: 1752
acagcagttgttgagtcagcggttctgggttggagacagagagagagaagttttcagtttcagaaagaaagcaaaagcaatagcaatgggttggatcggtgagactgttgattccatcaaatctcttcagatccgccaggtcctcacccaggctgtgagcctaggcatgattgttacgtctgcactgataatatggaaggcattgatgtgcgttactggcagtgaatctcccgttgttgttgttctttctggaagcatggaacccggattcaagcggggagacatcttgttcttgcacatgagtaaagatcctattcgggcaggggagattgttgtgtttaatgttgatggacgtgagattccaattgttcatcgtgtaattaaggtacatgaaagggaagatactggggaggttgatgttctcacaaaaggagacaacaattatggggatgacaggctactgtatgctcatggtcaactttggctgcaaaggcaccacattatgggtagagccgtcgggttcttaccatacgtaggctgggtgaccatcattatgactgaaaagcctattatcaagtatattctcattggtgctttggggttgctcgtgataacttcgaaagattaaatgatgaatatgaagtcaaaactgcggtctaacttcggatggtagggtgagcagaatataatggtaagattaaaagatgaatctgaaatcattttgtaccattcatagtatatgggggacaatatgatgttaaggatttatgcaaaatagttgaattttggtatattcttacttcttcctaaaaaaaaaaaaaaaaaaa

SEQ ID NO: 1752 - protein, 180 aa, Glycine max
  misc_feature: Ceres CLONE ID no. 528914
  misc_feature: Ceres CDNA ID no. 29191493
  misc_feature (52)..(124): Pfam Name: Peptidase_S24 PFAM Desc: Peptidase S24
  misc_feature: Homolog of GI Number: 20465737 NR Desc: putative signal peptidase subunit
  misc_feature: Homolog of GI Number: 55296017 NR Desc: putative signal peptidase 18K chain
  misc_feature: Homolog of GI Number: 51972110 NR Desc: At3g15710
  misc_feature: Homolog of GI Number: 50604094 NR Desc: MGC82823 protein
  misc_feature: Homolog of GI Number: 58383727 NR Desc: ENSANGP00000020448
  misc_feature: Homolog of GI Number: 34784421 NR Desc: Spc18 protein
  misc_feature: Homolog of GI Number: 48146371 NR Desc: SPC18
  misc_feature: Homolog of GI Number: 32484220 NR Desc: MGC64284 protein
  misc_feature: Homolog of GI Number: 55642557 NR Desc:  similar to SPC18 protein
  misc_feature: Useful for making ornamental plants with modified flowers
  misc_feature: Useful for making ornamental plants with modified flowers
  misc_feature: Useful for making ornamental plants with modified flowers
  misc_feature: Useful for making plants with increased biomass and foliage
  misc_feature: Useful for making plants with increased biomass and foliage
  misc_feature: Useful for making smaller plants
MGWIGETVDSIKSLQIRQVLTQAVSLGMIVTSALIIWKALMCVTGSESPVVVVLSGSMEPGFKRGDILFLHMSKDPIRAGEIVVFNVDGREIPIVHRVIKVHEREDTGEVDVLTKGDNNYGDDRLLYAHGQLWLQRHHIMGRAVGFLPYVGWVTIIMTEKPIIKYILIGALGLLVITSKD

SEQ ID NO: 1753 - DNA, 1341 bp, Glycine max
  misc_feature: Ceres CLONE ID no. 529557
  misc_feature: Ceres CDNA ID no. 36531816
  CDS (282)..(1226): REFERENCED BY SEQ ID NO: 1754
gtcttctttctctcttcctggttttcgttggagaatcctgaaaaccgcttgattttaatcaaagggtcatcaggattcgggcacccatatctcgtatcactccttctctcctctgttgtcttagaaagaagaccaagaaaagcatcaatttttgcaagcaatcttcttcttttgccctttctcttgtcttaaacacacacacacaacaacccagctgctgaagctgaagcatcacaactcacacatgattcgagtggccacaaattaagcgtgttggtgttatgagtgagagaatggaatcgagtagcattgagagcagcactgtatcatcgatgactatgatggaagaggatgagcatccccatcagttttcttcaatctcgaagcttcatagcaatggccccaccactaccagtgtccatgaccttcttgaatgccccgtttgcaccaactctatgtaccctcccatccatcagtgccacaacgggcacacactttgttcaacttgcaagacaagggtacacaaccgatgcccaacttgcaggcaggaacttggcgatataaggtgtttggcattagagaagatagcagaatcacttgaactgccttgcagatacatctctcttgggtgtccagagatatttccctattacagcaaactcaaacatgaggctatttgtaacttcagaccatacaactgcccttatgccgggtcagactgctcggtggttggggatattccatgccttgtcgctcatttaagggatgaccacagggttgatatgcattctggatgcacttttaaccatcgctatgtcaagtccaatcccatggaagtagaaaatgctacatggatgctaacggttttccactgttttggtcagtatttttgcctccattttgaggccttccagcttggcatggctccggtttacatggcgttcctccgattcatgggggatgaaagagaggcgcggaactacagctacagcttggaggtgggaggaaatggacgtaaactaacttttgaggggagtccaaggagcattagagatagccataagaaggtcagagacagtcatgatggtctcatcatttaccgcaacatggcacttttcttctcaggtggagacaggaaagagttgaagctacgagtaacaggaaggatatggaaagaacagcaaaaccctgaaggtggagtgtgcatacccaacctgtgtagctaggttgattgcatattctcttgaattctatttcttgctgtagataatttgagaagtgttaatctttgaatggtgaatggttatggggatttaacttccgaaaaaaaaaaaaaaaaaa

SEQ ID NO: 1754 - protein, 310 aa, Glycine max
  misc_feature: Ceres CLONE ID no. 529557
  misc_feature: Ceres CDNA ID no. 36531816
  misc_feature (90)..(289): Pfam Name: Sina PFAM Desc: Seven in absentia protein family
  misc_feature: Homolog of GI Number: 63095207 NR Desc: SINA
  misc_feature: Homolog of GI Number: 5834248 NR Desc: SINAH1 protein
  misc_feature: Homolog of GI Number: 46577512 NR Desc: Ubiquitin ligase SINAT5
  misc_feature: Homolog of GI Number: 50907133 NR Desc: putative Ubiquitin ligase SINAT5
  misc_feature: Homolog of GI Number: 28827536 NR Desc: putative seven in absentia protein
  misc_feature: Homolog of GI Number: 53749302 NR Desc: putative ubiquitin ligase SINAT5
  misc_feature: Homolog of GI Number: 56783949 NR Desc: putative ubiquitin ligase SINAT5
  misc_feature: Homolog of GI Number: 20136190 NR Desc: ring finger E3 ligase SINAT5
  misc_feature: Homolog of GI Number: 6850870 NR Desc: seven in absentia
  misc_feature: Homolog of GI Number: 21536945 NR Desc: seven in absentia
MESSSIESSTVSSMTMMEEDEHPHQFSSISKLHSNGPTTTSVHDLLECPVCTNSMYPPIHQCHNGHTLCSTCKTRVHNRCPTCRQELGDIRCLALEKIAESLELPCRYISLGCPEIFPYYSKLKHEAICNFRPYNCPYAGSDCSVVGDIPCLVAHLRDDHRVDMHSGCTFNHRYVKSNPMEVENATWMLTVFHCFGQYFCLHFEAFQLGMAPVYMAFLRFMGDEREARNYSYSLEVGGNGRKLTFEGSPRSIRDSHKKVRDSHDGLIIYRNMALFFSGGDRKELKLRVTGRIWKEQQNPEGGVCIPNLCS

SEQ ID NO: 1755 - DNA, 1559 bp, Glycine max
  misc_feature: Ceres CLONE ID no. 530173
  misc_feature: Ceres CDNA ID no. 36527528
  CDS (325)..(1245): REFERENCED BY SEQ ID NO: 1756
ggcgcacaccaaattgaaaaaaaaaaataacaaggagcgaaacaaagaagaaagaaaagaaaagagaaaaggacagaaacaaacagacgcagagcgcggaaccaaatgaaatgattgagaagagagcgaagaaaaaaaacagagccaaaccaaaccccaccgtccccgaaacggttcgttttgcccttcttcggaaccctcccttccgcgccgctgctgctgctccggtcgccgtcggcgattctccggtaaccgaacaccatcgatccgtcaggagcctcggatctcggatctgagcgaaacgaatcgaaacgaaacgaaacgatgccgtctcatgcggatctggaccggcagatcgagcatctgatggagtgcaagcctctgccggaagccgatgtgaaggcgctgtgcgatcaggcgagagcgattctcgtggaggagtggaacgttcagccggtgaagtgccccgtcaccatctgcggcgacattcacggccagttctacgatctcatcgagctctttcggataggaggaaacgctcccgatactaattacctctttatgggcgattatgtagatcgtgggtactattcagtggagactgtcacgcttttggtggccttgaaagttcgttatagagatagaattacaatccttaggggaaatcatgagagccgtcaaatcactcaagtgtatggcttctacgatgaatgcttgagaaagtatggaaatgccaatgtctggaaattctttaccgatttgtttgattatttacctctgaccgcccttattgagagtcagattttctgtttgcatggaggtctctcaccatctttggatacacttgataatatccgtgccttggatcgcatacaggaggttccacacgaaggaccaatgtgtgacctcttgtggtctgatccagatgatcgctgtggttggggaatatctccacgtggtgctggatatacatttggacaggatatagctgctcagttcaatcataccaatggtctatccttgatatctagagctcaccagcttgtcatggaaggattcaattggtgccaggacaagaatgtggtgactgtttttagtgcacccaattactgttaccgatgtgggaacatggctgccatactagaaattggagagaatatggatcagaattttctgcagtttgatccagctccccgacaaattgagcccgacaccacacgaaagacaccagattattttttgtaacttcatataaccctttgtttgtaagctactgctttatgctgttactgtagatgtgtctttaaggagagaagagtttcactgtttaagtgggacggttatcatcaacataattctttcttttggagtttgtctgctgttgctgctgctgccgtcttatttggacaagaaacaaatagaaattgacacaattggtgtttgtatatttttgataggaggaagcggcaataacatgatatatcatgtgctgtaattttttcttaaattaaatctcaagttagagagcagatttttgagttcaaaaaaaaaaaaaaaaa

SEQ ID NO: 1756 - protein, 306 aa, Glycine max
  misc_feature: Ceres CLONE ID no. 530173
  misc_feature: Ceres CDNA ID no. 36527528
  misc_feature (47)..(242): Pfam Name: Metallophos PFAM Desc: Calcineurin
  misc_feature: Homolog of GI Number: 46099869 NR Desc: P2A1_NEUCR Serine/ threonine protein phosphatase PP2A catalytic subunit
  misc_feature: Homolog of GI Number: 19112732 NR Desc: major serine/threonine protein phosphatase pp2a
  misc_feature: Homolog of GI Number: 10638985 NR Desc: protein phosphatase 2A
  misc_feature: Homolog of GI Number: 34398261 NR Desc: protein phosphatase 2A catalytic subunit
  misc_feature: Homolog of GI Number: 34398263 NR Desc: protein phosphatase 2A catalytic subunit
  misc_feature: Homolog of GI Number: 3859548 NR Desc: protein phosphatase 2A catalytic subunit
  misc_feature: Homolog of GI Number: 54291182 NR Desc: serine/threonine protein phosphatase PP2A
  misc_feature: Homolog of GI Number: 3986750 NR Desc: serine/threonine protein phosphatase type 2A
  misc_feature: Homolog of GI Number: 21593150 NR Desc: serine/threonine protein phosphatase type 2A
  misc_feature: Homolog of GI Number: 20259838 NR Desc: similar to protein phosphatase type 2A
MPSHADLDRQIEHLMECKPLPEADVKALCDQARAILVEEWNVQPVKCPVTICGDIHGQFYDLIELFRIGGNAPDTNYLFMGDYVDRGYYSVETVTLLVALKVRYRDRITILRGNHESRQITQVYGFYDECLRKYGNANVWKFFTDLFDYLPLTALIESQIFCLHGGLSPSLDTLDNIRALDRIQEVPHEGPMCDLLWSDPDDRCGWGISPRGAGYTFGQDIAAQFNHTNGLSLISRAHQLVMEGFNWCQDKNVVTVFSAPNYCYRCGNMAAILEIGENMDQNFLQFDPAPRQIEPDTTRKTPDYFL

SEQ ID NO: 1757 - DNA, 917 bp, Glycine max
  misc_feature: Ceres CLONE ID no. 530765
  misc_feature: Ceres CDNA ID no. 40351035
  CDS (175)..(753): REFERENCED BY SEQ ID NO: 1758
atattattgcttttaattccttgttatgcccgatcttcaccaacgagcccacgaaacataaatcccccgcaacgaacaaaaacatatataactccacccctcaacgacaacaatcccttcttcttccctcagatccacaacccgcgtcctcacctaagccgccggcaccggaagatggaggacgacgagaagacacccttggtgggagaaatcgaggaggtggacgcgagtcccgtggaggaggagggcacgagcgagcgggagaagcgcgtgcggaccaaggtcccggaggcagagatccacctgtatcggcaggggaagggccccgtggcggtgttcaagtcggcactgggcggctgggagcaggatcagctcgagatcagggaggacatcctcgagaagtacggcatgaaatcggtcttcgcgttcaatccgaccgccggggggcgcggcgttcctgtccggttcaatcccagaaatgggaggtcgattttgacgtacagggatggggctgttgtttaccttgatggagaacctaaggattcacttgttaaaccagtgacgaggatcttggttggggttgctttaataacctttatgataacactagtttcaagggatactccgaactggttgaagaaattaaatttctctggtgtgaacttccctccatggatcttggcttgtgtagttattgtcttcacccgcatgaggaagagaactagagattttctgaagaagcggggttggtgaatgaacttgtgtgtgatgcctctgtggtagggttttatgcatttctctatacactttcaagatttgtttaaactgacataattttgttgattacttatatcatcacaaatgttataggttaataataagggatgccacatttgatgataaaaaaaaaaaaaaaa

SEQ ID NO: 1758 - protein, 192 aa, Glycine max
  misc_feature: Ceres CLONE ID no. 530765
  misc_feature: Ceres CDNA ID no. 40351035
MEDDEKTPLVGEIEEVDASPVEEEGTSEREKRVRTKVPEAEIHLYRQGKGPVAVFKSALGGWEQDQLEIREDILEKYGMKSVFAFNPTAGGRGVPVRFNPRNGRSILTYRDGAVVYLDGEPKDSLVKPVTRILVGVALITFMITLVSRDTPNWLKKLNFSGVNFPPWILACVVIVFTRMRKRTRDFLKKRGW

SEQ ID NO: 1759 - DNA, 696 bp, Glycine max
  misc_feature: Ceres CLONE ID no. 530776
  misc_feature: Ceres CDNA ID no. 29191494
  CDS (72)..(524): REFERENCED BY SEQ ID NO: 1760
agcaacagccaacatatctcctcgcattttccttgcaaccgattgcctatccccctcccaacccaagaccgatggcgcccaaggccgagaagaagcccgcggcgaagaagccggcggaggaggagcccgcggcggagaagacgaccgccgggaagaagcccaaggcggagaagcgggtccccgcgggcaagtccgccggcaaggagggcggcgagggcaagcgtggcaagaagaagggcaagaagagcgtggagacgtacaagatctacatcttcaaggtgctgaagcaggtgcacccggacatcggcatctcgtccaaggccatgtccatcatgaactccttcatcaacgacatcttcgagaagctggccggcgaggccgccaagctcgcgcgctacaacaagaagcccaccatcacgtcccgcgagatccagacctccgtgcgcctcgtgctccccggcgagctcgccaagcacgccgtctctgagggcaccaaggccgtcaccaagttcacctcctcctaggcttgcacgctcgccctttgtaggcatctcttgtgttgatgttccccttgttgtagttatatgttgctggtttctctgtcggcgctgctcgtaactgcgtcatgtaacccttgcaaggacttgtttatttgtgaatcatcaacactttgttgtcaaaaaaaaaaaaaaaaaa

SEQ ID NO: 1760 - protein, 150 aa, Glycine max
  misc_feature: Ceres CLONE ID no. 530776
  misc_feature: Ceres CDNA ID no. 29191494
  misc_feature: No seed is being produced by the plant
  misc_feature: The plant flowers significantly late compared to wild-type.
  misc_feature: Useful for biocontainment applications
  misc_feature: Useful for making plants with modulated flowering time
  misc_feature (57)..(129): Pfam Name: Histone PFAM Desc: Core histone H2A/H2B/H3/H4
  misc_feature: Homolog of GI Number: 22325 NR Desc: H2B histone
  misc_feature: Homolog of GI Number: 577825 NR Desc: H2B histone
  misc_feature: Homolog of GI Number: 21801 NR Desc: histone H2B
  misc_feature: Homolog of GI Number: 22323 NR Desc: H2B histone
  misc_feature: Homolog of GI Number: 1708107 NR Desc: Histone H2B
  misc_feature: Homolog of GI Number: 50932769 NR Desc: putative histone H2B
  misc_feature: Homolog of GI Number: 34895900 NR Desc: putative histone H2B
  misc_feature: Homolog of GI Number: 34895888 NR Desc: putative histone H2B
  misc_feature: Homolog of GI Number: 34895904 NR Desc: putative histone H2B
  misc_feature: Homolog of GI Number: 34895838 NR Desc: putative histone H2B
MAPKAEKKPAAKKPAEEEPAAEKTTAGKKPKAEKRVPAGKSAGKEGGEGKRGKKKGKKSVETYKIYIFKVLKQVHPDIGISSKAMSIMNSFINDIFEKLAGEAAKLARYNKKPTITSREIQTSVRLVLPGELAKHAVSEGTKAVTKFTSS

SEQ ID NO: 1761 - DNA, 768 bp, Glycine max
  misc_feature: Ceres CLONE ID no. 530901
  misc_feature: Ceres CDNA ID no. 29191495
  CDS (88)..(480): REFERENCED BY SEQ ID NO: 1762
gcgtgttttcatcgttgtcgttcagttctgaacggaaaagcaccgtcgcaccttccctgaggcttctcttgtctgtcgcgagtgaccatggtgagggttagtgtgctgaacgatgctctgaagagcatgtacaatgctgagaaaaggggaaagcgccaagtcatgattcggccatcctccaaagtcattatcaaattccttttggtgatgcagaagcacggatacattggagagtttgagtatgttgatgaccacagggctggtaaaatcgtggttgaattgaacggtagactgaacaagtgtggggttattagtccccgttttgatgtcggcgtcaaagagattgaaggttggactgctaggcttctcccctcaagacagtttgggtatattgtattgactacctctgccggcatcatggatcacgaagaagctaggagaaaaaatgttggtggtaaggtactgggtttcttctactagagtttaatttcgattaagaggatgtcaggaatttcaattgagattcatggattgtaatggaggatatgctaggcccctagtaatatcaagcatagcaggagctgttttgtgatgttccttattttgtttgcaaaaccaagttggtaactataacttttattttcttttatcattatttttctttataccaaaatgtactggccaagttgttttaaacagtgagaactttgattaaaaaaaaaaaaaaaaaaaaaaaaaaaaaaaaaaaagaaaaaaaaaaaaaaaaaa

SEQ ID NO: 1762 - protein, 130 aa, Glycine max
  misc_feature: Ceres CLONE ID no. 530901
  misc_feature: Ceres CDNA ID no. 29191495
  misc_feature (5)..(130): Pfam Name: Ribosomal_S8 PFAM Desc: Ribosomal protein S8
  misc_feature: Homolog of GI Number: 23397065 NR Desc: putative cytoplasmic ribosomal protein S15a
  misc_feature: Homolog of GI Number: 17863 NR Desc: r
  misc_feature: Homolog of GI Number: 6683481 NR Desc: wrp15a
  misc_feature: Homolog of GI Number: 20259193 NR Desc: putative cytoplasmic ribosomal protein S15a
  misc_feature: Homolog of GI Number: 13560779 NR Desc: cytoplasmic ribosomal protein S15a
  misc_feature: Homolog of GI Number: 50908303 NR Desc: putative ribosomal protein S15
  misc_feature: Homolog of GI Number: 50935123 NR Desc: ribosomal protein S15
  misc_feature: Homolog of GI Number: 2130985 NR Desc: r
  misc_feature: Homolog of GI Number: 3355488 NR Desc: 40S ribosomal protein S15A
  misc_feature: Utility: Cold Growth Useful for making plants with increased tolerance to cold stress
MVRVSVLNDALKSMYNAEKRGKRQVMIRPSSKVIIKFLLVMQKHGYIGEFEYVDDHRAGKIVVELNGRLNKCGVISPRFDVGVKEIEGWTARLLPSRQFGYIVLTTSAGIMDHEEARRKNVGGKVLGFFY

SEQ ID NO: 1763 - DNA, 1418 bp, Glycine max
  misc_feature: Ceres CLONE ID no. 530952
  misc_feature: Ceres CDNA ID no. 29191496
  CDS (134)..(1153): REFERENCED BY SEQ ID NO: 1764
gaaaccaagtctcgcaagccatcttggctagcactctctccttccccaccgcgccgccgagctccgcctccggccgacgcaagcagcccacctcggacgaattcttcttcccctactactcgtatctaccgggatggcgtcgggtggagatctcccatccgggttcgctgatgagagcaaaagtacaaaaacagaaggatcatccaacgaatgtcaaggggtccctccagctgccgctgcaggcttgtcgggtcctttcgatttttcttctatgcaaagtttgctcaatgatccatctataaaggagatggcggaccagattgcaagggaccctgcattcaatcagatggctgagcagctacagaaaggtgctcagactgcaggagaacagggcatgcctccattggatcctcatcaatacatggaaacaatgcaaaaggtcatggaaaaccctcagtttatgacaatggcagagcgcctcgggactgctcttatgcaggatcctactatgtccagtatgctggaaaatttgactagtccaacacataaggaggagcttgaagagcgcatgtctcggattaaggaagatccagccttgaagccaattcttgatgagttagagaatggtggtcctgctgcaatgataaagtactggaatgaccctgaaactcttcaaaagattggccaggcaatgggaactaccatgccgtttagcactgtctctactgctgaaccttctggtactgaagaaactgaagaagaaggtgaagatgaagacgaatccattgtccaccacactgccagtgttggtgacggtgagggtctgaagaaggctctagatggtggagcagacaaggatgaagaagactctgagggaagaagggccttgcactttgcatgtggatatggtgagttcaagtgtgcggaaatcctccttgaggcgggtgctgctgtagatgccatggataagaacaagaacaccccactgcattacgctgctggctatggccggaaagagtgtgtggatcttctgttgaagcacggtgctgctgtcactctccaaaacatggatgggaagacgcccatcgacgtcgccaagctcaacaaccaggacgaggtcctcaagctgctcgagaaggacgtgttcctgtaaatcacttcacttggcccccatgaagaggcatcatgttttacatcccttggcattggttttatatagtcatactcgaatcggcattttattcgttgtgtaagaatctactgttagctagcctgcaggccgactggctgaggttagaactgcatgttactgtatatggagacttgtgtatcgtccactttgttgctgttgattccactagagtaatccaagatgtacccaagattatttttgtcgtttgaaaaaaaaaaaaaaaaaa

SEQ ID NO: 1764 - protein, 339 aa, Glycine max
  misc_feature: Ceres CLONE ID no. 530952
  misc_feature: Ceres CDNA ID no. 29191496
  misc_feature: Useful for making plants with modulated growth and phenotype characteristics
  misc_feature: The sequence is a functional homolog of  SEQ ID NO 1839 in the  10/374,780 US patent application
  misc_feature (313)..(333): Pfam Name: Ank PFAM Desc: Ankyrin repeat
  misc_feature: Homolog of GI Number: 50725344 NR Desc: putative TGB12K interacting protein 3
  misc_feature: Homolog of GI Number: 50948069 NR Desc: putative ankyrin domain protein
  misc_feature: Homolog of GI Number: 37625031 NR Desc: putative ankyrin
  misc_feature: Homolog of GI Number: 24637568 NR Desc: ankyrin domain protein
  misc_feature: Homolog of GI Number: 13310811 NR Desc: ankyrin
  misc_feature: Homolog of GI Number: 29826242 NR Desc: TGB12K interacting protein 2
  misc_feature: Homolog of GI Number: 29826244 NR Desc: TGB12K interacting protein 3
  misc_feature: Homolog of GI Number: 21592978 NR Desc: ankyrin repeat
  misc_feature: Homolog of GI Number: 3478700 NR Desc: AFT protein
  misc_feature: Homolog of GI Number: 58698160 NR Desc: ankyrin repeat domain protein
MASGGDLPSGFADESKSTKTEGSSNECQGVPPAAAAGLSGPFDFSSMQSLLNDPSIKEMADQIARDPAFNQMAEQLQKGAQTAGEQGMPPLDPHQYMETMQKVMENPQFMTMAERLGTALMQDPTMSSMLENLTSPTHKEELEERMSRIKEDPALKPILDELENGGPAAMIKYWNDPETLQKIGQAMGTTMPFSTVSTAEPSGTEETEEEGEDEDESIVHHTASVGDGEGLKKALDGGADKDEEDSEGRRALHFACGYGEFKCAEILLEAGAAVDAMDKNKNTPLHYAAGYGRKECVDLLLKHGAAVTLQNMDGKTPIDVAKLNNQDEVLKLLEKDVFL

SEQ ID NO: 1765 - DNA, 1400 bp, Glycine max
  misc_feature: Ceres CLONE ID no. 531011
  misc_feature: Ceres CDNA ID no. 25446851
  CDS (159)..(1109): REFERENCED BY SEQ ID NO: 1766
aaaaaaaaagatgaactggggaattgactagtgcggcgcgctcctattatcaccgtagacggcggaggtggcggtggtggtgtagacacggcgtgacggcgatctcttgagataaatgttggttgaaagaggaagaagaagaagagttgtattgtagaatgagccaaccaacggtgatacttgccactgcgagctatgatcacactattcgtttttgggaggccaagagtggccgttgctaccgcaccatccaatatcctgattcgcaagtaaaccggctggagataaccccggataaacgcttcctggctgcagctggcaatccacacatacgactgtttgatgttaactcaaatagtcctcaaccagtaatgagctatgattcacataccaataatgtaatggctgttgggtttcaatgtgatggtaattggatgtattctggctcagaggatggcacagttaaaatctgggatttgagggcacccggttgtcaaagggaatatgaaagtcgtgcagctgtaaacactgttgttctacacccaaatcagactgaactaatatctggtgaccaaaatggcaacattcgtgtgtgggatttgacagcaaattcatgcagttgcgaattggttccagaggtggatacagctgtacgctctttaacagtaatgtgggatgggagcttggtagttgcagcaaataatcacgggacatgttatgtgtggcgcttgttgcgagggactcagacaatgacaaactttgagcctcttcacaagctgcaagcacacaagggatacatcctcaaatgtcttttatcacccgagttctgtgaaccccacaggtacttggcaactgcatcttctgatcatactgtcaaaatatggaatgttgatggttttaccctagaaaaaactcttataggtcaccaacgctgggtgtgggactgtgtcttctccgtggatggcgcctaccttattacagcttcctctgatacaactgcgaggctctggtctatgtcaactggtgaagatattaaagtttaccaagggcatcataaagctacaatttgctgtgccctacacgatggggctgaacccgcaacttcctgagataatggtcataaagttatttttctccatcagctacatcttgttttgtaaataataatctgcctcttgatctttgaagtttactatagttctttgactttatgcacgtttagtcaataagaatcctcttcgtggatgatatacgctgtccggagtaatctaaatttgtaacatgagaatatttctaatattatttgtcagtaatttctcaattagagtgctcttgtcaaatagcgtggatcaaaacacaaataaatatttcatgatatcaccaaaaaaaaaaaaaaaaaa

SEQ ID NO: 1766 - protein, 316 aa, Glycine max
  misc_feature: Ceres CLONE ID no. 531011
  misc_feature: Ceres CDNA ID no. 25446851
  misc_feature (7)..(21): Pfam Name: WD40 PFAM Desc: WD domain
  misc_feature: Homolog of GI Number: 79313281 NR Desc: nucleotide binding
  misc_feature: Homolog of GI Number: 19112474 NR Desc: pop3
  misc_feature: Homolog of GI Number: 46435032 NR Desc: likely WD40 component of TOR1 and TOR2 kinase complexes
  misc_feature: Homolog of GI Number: 55245103 NR Desc: ENSANGP00000026987
  misc_feature: Homolog of GI Number: 17230958 NR Desc: WD
  misc_feature: Homolog of GI Number: 23126094 NR Desc: COG2319: FOG: WD40 repeat
  misc_feature: Homolog of GI Number: 607003 NR Desc: beta transducin
  misc_feature: Homolog of GI Number: 23130558 NR Desc: COG2319: FOG: WD40 repeat
  misc_feature: Homolog of GI Number: 53763802 NR Desc: COG2319: FOG: WD40 repeat
  misc_feature: Homolog of GI Number: 17225210 NR Desc: beta transducin
MSQPTVILATASYDHTIRFWEAKSGRCYRTIQYPDSQVNRLEITPDKRFLAAAGNPHIRLFDVNSNSPQPVMSYDSHTNNVMAVGFQCDGNWMYSGSEDGTVKIWDLRAPGCQREYESRAAVNTVVLHPNQTELISGDQNGNIRVWDLTANSCSCELVPEVDTAVRSLTVMWDGSLVVAANNHGTCYVWRLLRGTQTMTNFEPLHKLQAHKGYILKCLLSPEFCEPHRYLATASSDHTVKIWNVDGFTLEKTLIGHQRWVWDCVFSVDGAYLITASSDTTARLWSMSTGEDIKVYQGHHKATICCALHDGAEPATS

SEQ ID NO: 1767 - DNA, 1382 bp, Glycine max
  misc_feature: Ceres CLONE ID no. 531099
  misc_feature: Ceres CDNA ID no. 40351036
  CDS (154)..(1146): REFERENCED BY SEQ ID NO: 1768
gattcatctccgtcggcctcgccgacacgaaaccgtagacgaataactccaacaattctcagttctttctttaatattttgagaggagcaccaggaatcgtttggcactaaagagaaagtgagagagggagatgaaataagttcgtactgaagatggcgtcgaggcaaatggaagagattcggaagaaattggctgaccttaattacccgagagcgaatgcccctgcacagtccctcctatttgctggcatggagcgctatgcccttctagagtggctcttctttcggcttttaggtgataagtcacccttttctcaacaaaacatacaaggggatggccttgatcgtgatgaggagacaggtcgaattcagtatttggctgagattgctaagtttctgggtattacaacaactgtagatacagatgccattcaggggcatggaagctatgaagaccgtactgcaatgcttcgtcttattgtagatctagtggacgcaacaatatgcgcagataatccagaatggagtgttgacgagcaggtagccaaggacatccaattaatagactccattgcagaaaaacaagctcaaatattttctgaagaatgtaaattgtttcctgcagatgttcagattcagtccatatatccattgccagatgtttctgagctggagttgaagttttctgaacaatcaaaaatattgttgaatcttcaacaaaaagttgatgacttggcatccaagcatgcttacaatcctgatgaggagtatactgaggtggaatcccaattgcgggcacatttggaatcttttctagaaacagctagaacattcaatttgatttacaccaaggaaattcgtccatggacacacatgatggaggttccgcaacttcatggatttggaccagctgccaatcgtttattggaggcctataaaatgcttttgaagtttttgggcaacctacggaatcttagggactcacatgcagcacttgccttcggttcttctgagacatccgacgggccttcatctgtcacacgaataatctctgaatgtgaatctgcattgacagtcttaaatcgtgatcttggaattctctctgcttccattgctcgtgaacaggtagagaagatgaacatttgacgaaacatgagaaacaagttattaatccttattcttttggattttgtgaacttgtgcataatgttcatattgttgacatgatgtgtgctgatgtgaagtcagcacggttgtcagactgggtctatgtaaacttgtggagggtctgaagtgtgacacatagacttcacttgtaaactgagaagagtatagctaatacaaaaatattattaaaaaacctgaaaaaaaaaaaaaaaaaa

SEQ ID NO: 1768 - protein, 330 aa, Glycine max
  misc_feature: Ceres CLONE ID no. 531099
  misc_feature: Ceres CDNA ID no. 40351036
  misc_feature (1)..(324): Pfam Name: Plant_NMP1 PFAM Desc: Plant nuclear matrix protein 1
MASRQMEEIRKKLADLNYPRANAPAQSLLFAGMERYALLEWLFFRLLGDKSPFSQQNIQGDGLDRDEETGRIQYLAEIAKFLGITTTVDTDAIQGHGSYEDRTAMLRLIVDLVDATICADNPEWSVDEQVAKDIQLIDSIAEKQAQIFSEECKLFPADVQIQSIYPLPDVSELELKFSEQSKILLNLQQKVDDLASKHAYNPDEEYTEVESQLRAHLESFLETARTFNLIYTKEIRPWTHMMEVPQLHGFGPAANRLLEAYKMLLKFLGNLRNLRDSHAALAFGSSETSDGPSSVTRIISECESALTVLNRDLGILSASIAREQVEKMNI

SEQ ID NO: 1769 - DNA, 1470 bp, Glycine max
  misc_feature: Ceres CLONE ID no. 531436
  misc_feature: Ceres CDNA ID no. 40351037
  CDS (141)..(1280): REFERENCED BY SEQ ID NO: 1770
gccggctccagcaacctctgccaagtaagttcctcatttccctttagtgcaggtccaacgccaatctgaagcagcaagtgggtttggcaccaagacccatttgttcatttgaggggaataatcagaggaagtttgtggcaatggcttctaccgttcctgtggagcaagtcaacaatggccccctgcaggtgacaggtgactccttcatcagagagcatctgaggaagttggctccttatcagcccattttgccctttgaggttttatcagctcgccttggacgtaagcctgaggatatcgtgaagttagatgctaatgaaaatccttatggtccccctccagaggtcatggaagccctaggatcaatgcaattcccatatgtctatcctgacccagagagccgcagattgcgcgcagctcttgcccatgattcaggccttgaagctgaatatattcttgcagggtgtggtgcagatgagcttattgatttgatcatgcgttgtgtgctggatcctggagacaagattgtggactgccctccgaccttcacaatgtatgaatttgatgctgcggttaatggagcacttgttatcaaagttccaaggaggccagatttcagcttgaatgttgaacaaattgctgaagttgttaaacaagagaagcccaaatgcatatttttaacatctccaaataatccagatggaagtataattgatgacgaagttctcttaaaaatactcgagcttcctatattggtgatactggatgaagcatacattgagttttcagcaattgaatcaaggatgagttgggtgaagaaacatgataatttgattgttcttcggacatttagcaaaagagctggtttagctggacttcgagtgggatatggagcttttcctttgagtataattgagtatctttggagagcaaagcagccgtataatgtatctgttgctgctgaaatttctgcatgtgcagcattgcaaaatcctacctatctagagaatgtaaaaaatgctttgttgaaagaaagagggagactttatgaccttttgaaagaagttccattcctccggccatttccaagccattctaacttcattctttgtgaggttacatcaggaaaggatgcaaagaagctaaaggaggacctagcacaaatgggtttgatgattcgtcactatgacaagaaagagctgaaagggtacgttcgtgtgactgttgggaagcctgaacaaacagatacacttatgaagtgcctcaagagactctcgtaggaggaaaatttgatgtaataaatattgtaacacgtcatgctaaactcctcttagctaatctttatatagagccgtcaaaattagaagaaaatatgttgattttggcaagggatgtggatgtagctttatatattattgacctaaatctaccatgataaatattgtgttttgcaaaaaaaaaaaaaaaaaa

SEQ ID NO: 1770 - protein, 379 aa, Glycine max
  misc_feature: Ceres CLONE ID no. 531436
  misc_feature: Ceres CDNA ID no. 40351037
  misc_feature (51)..(375): Pfam Name: Aminotran_1_2 PFAM Desc: Aminotransferase class I and II
MASTVPVEQVNNGPLQVTGDSFIREHLRKLAPYQPILPFEVLSARLGRKPEDIVKLDANENPYGPPPEVMEALGSMQFPYVYPDPESRRLRAALAHDSGLEAEYILAGCGADELIDLIMRCVLDPGDKIVDCPPTFTMYEFDAAVNGALVIKVPRRPDFSLNVEQIAEVVKQEKPKCIFLTSPNNPDGSIIDDEVLLKILELPILVILDEAYIEFSAIESRMSWVKKHDNLIVLRTFSKRAGLAGLRVGYGAFPLSIIEYLWRAKQPYNVSVAAEISACAALQNPTYLENVKNALLKERGRLYDLLKEVPFLRPFPSHSNFILCEVTSGKDAKKLKEDLAQMGLMIRHYDKKELKGYVRVTVGKPEQTDTLMKCLKRLS

SEQ ID NO: 1771 - DNA, 1170 bp, Glycine max
  misc_feature: Ceres CLONE ID no. 531587
  misc_feature: Ceres CDNA ID no. 36581738
  CDS (39)..(932): REFERENCED BY SEQ ID NO: 1772
gaaaaccaaaaagctaagagaatacaccaaaacccaacatgaaaacccttaacaaagcctcacttattttattccctctcttgttcctttccctattcaagcattcccatgctgcaggaatcgctgtctactggggccaaaacggtggagaaggcaccttagcagaagcttgcaacactagaaactaccaatatgtgaacatagccttcttgtccacttttggcaacggccaaactccacaactcaaccttgcaggtcattgtgaccccaacaacaatggctgcactgggttgagcagtgacatcaaaacttgccaagaccttggcatcaaagtgttgctctcccttggtggtggtgctggaagctactccctcagctcagctgatgatgccactcaacttgcaaactacctctggcagaatttccttggaggtcaaaccggatcagggccattaggtaatgttatattggatggcattgactttgacattgaatctggtgggagtgaccattatgatgacctagccagggcattaaatagcttcagctcacaaaggaaggtgtacttgtctgcagccccacagtgcataatccctgatgctcacttggatagagccatccaaactgggctttttgactatgtgtgggttcaattctacaacaacccttcatgccaatactccagtggaaacaccaacaatttgatcaattcatggaaccaatggatcacagtgccagcttctcaaatcttcatggggcttcctgcatctgaggcagctgctccaagtggtggctttgtgcccgctgatgtgttgacttctcaggttcttcctgtgattaaacagtcttcaaagtatggtggagtcatgctctggaacagattcaatgatgtccaaaatggttatagtaatgctattattggaagtgtttaatcatgttatagacttatagaaaaactatgtcattaattccattatttaaataatactaatcaccactcgtgattggtttttctactatatatatatatatatatatatatatatatatatatatattcaatgtgttttgaacgctacatatgtttattgtaatatgtcacctacaagttacatatggtataattaccaaaataataaatagttcattgcgaaaaaaaaaaaaaaaaaa

SEQ ID NO: 1772 - protein, 297 aa, Glycine max
  misc_feature: Ceres CLONE ID no. 531587
  misc_feature: Ceres CDNA ID no. 36581738
  misc_feature (26)..(284): Pfam Name: Glyco_hydro_18 PFAM Desc: Glycosyl hydrolases family 18
  misc_feature: Homolog of GI Number: 4835584 NR Desc: acidic chitinase
  misc_feature: Homolog of GI Number: 4835586 NR Desc: acidic chitinase
  misc_feature: Homolog of GI Number: 762879 NR Desc: chitinase
  misc_feature: Homolog of GI Number: 4689374 NR Desc: class III chitinase
  misc_feature: Homolog of GI Number: 2853142 NR Desc: class III chitinase
  misc_feature: Homolog of GI Number: 17942 NR Desc: chitinase
  misc_feature: Homolog of GI Number: 116330 NR Desc: Acidic endochitinase precursor
  misc_feature: Homolog of GI Number: 13560118 NR Desc: chitinase
  misc_feature: Homolog of GI Number: 486991 NR Desc: chitinase
  misc_feature: Homolog of GI Number: 28971736 NR Desc: chitinase III
MKTLNKASLILFPLLFLSLFKHSHAAGIAVYWGQNGGEGTLAEACNTRNYQYVNIAFLSTFGNGQTPQLNLAGHCDPNNNGCTGLSSDIKTCQDLGIKVLLSLGGGAGSYSLSSADDATQLANYLWQNFLGGQTGSGPLGNVILDGIDFDIESGGSDHYDDLARALNSFSSQRKVYLSAAPQCIIPDAHLDRAIQTGLFDYVWVQFYNNPSCQYSSGNTNNLINSWNQWITVPASQIFMGLPASEAAAPSGGFVPADVLTSQVLPVIKQSSKYGGVMLWNRFNDVQNGYSNAIIGSV

SEQ ID NO: 1773 - DNA, 1142 bp, Glycine max
  misc_feature: Ceres CLONE ID no. 531806
  misc_feature: Ceres CDNA ID no. 40041250
  CDS (165)..(968): REFERENCED BY SEQ ID NO: 1774
tggaaactgcaaagcagagcagagcagaggaggttttaatcaatcatttgggattttgggtactataatcaatagaaatagaaccaaatcaaaattggaacctctggctctggatgatgaacgattcacaggccagagaccaataagacagacagagaagaaagatgggtacggattcggattcggatgcgaatggatggaaccgtgctcgagggttggcccttaagactctgctactctttggtggcgcacttctcgtcaagcgcctccgcaagtccaccacgcgctgggaccacgctcatttcgtctccaagtccctcgccggcgaaaagtattccaaggagcaagcttccagagaccctgataactatttcaacattagaatgcttacatgccccgcagcggagctagtggatggttccaaggttttgtattttgaacaggctttttggaggactccacaaaaaccatttcggcagaggctttttatggtgaaaccttgtcctaaagagttgaaatgtgatgttgagttaagtacatatgccattagagacatggaggagtacaaaaatttctgtgatcgaccaagggatcagcgtccacagccggaagaagtcattggggatattgcagaacatttgacaacagtacatcttaagcgttgtccacgtggaaaacgttgcttatataaaggttcaaccccacctggtggatttcctaattcatggaatggagcaacccactgtacttcagaacttgcaattttgaagaacaatgatatacatacctgggataggggttatgatgatgatggaaatcaagtttggggacaaaaagaaggcccttatgagttcaagcctgcaccaacctccagttttagtgatatgttttctcccttgaatttcccccctccaccatccatggagagaagaatagagggttcatttgttttgcaagaacaagaatgaaagcattcaatataaccactgtgtaattctgctatcaatataatgtttttctcgttaattagcgatatcttttttcttagagcatgattgaattatattttgtttagagattataatctgataaataaataaaatatatatatgttggtggtactaaaaaaaaaaaaaaaaaaa

SEQ ID NO: 1774 - protein, 267 aa, Glycine max
  misc_feature: Ceres CLONE ID no. 531806
  misc_feature: Ceres CDNA ID no. 40041250
  misc_feature: Homolog of GI Number: 77551200 NR Desc: CRUMPLED LEAF
MGTDSDSDANGWNRARGLALKTLLLFGGALLVKRLRKSTTRWDHAHFVSKSLAGEKYSKEQASRDPDNYFNIRMLTCPAAELVDGSKVLYFEQAFWRTPQKPFRQRLFMVKPCPKELKCDVELSTYAIRDMEEYKNFCDRPRDQRPQPEEVIGDIAEHLTTVHLKRCPRGKRCLYKGSTPPGGFPNSWNGATHCTSELAILKNNDIHTWDRGYDDDGNQVWGQKEGPYEFKPAPTSSFSDMFSPLNFPPPPSMERRIEGSFVLQEQE

SEQ ID NO: 1775 - DNA, 1463 bp, Glycine max
  misc_feature: Ceres CLONE ID no. 531859
  misc_feature: Ceres CDNA ID no. 29191885
  CDS (61)..(1266): REFERENCED BY SEQ ID NO: 1776
ggcttgcatttctctgtgttcaatcttcaaagacttgaattcttcttacttaggttctgaatggctggaatttgctgtggtgttgtcggagaaggtgacactccggctccactcgagccaactactcgcccctccaggcgccggagtttggacatcttacccttaaaatacatcgctgacatggcggtgccgccgtcggatggttcacggaaacgtcccaagctggatctcagggaccgcgataacgtagttcaaaattgcgacgaatccactggacacaaggtggtgaaaaaagaagccaaagtggaaatccacgacaatatttccgaaacgaaaaacgtaactgttgcggatgcttcggaagttgaagattctcctaagttcggcgtgacgtcagtttgcggcaggagaagagacatggaagattccgtttcggtgcggccttccttcacccaaggcttccactactttggcgttttcgacggtcacggttgctctcatgtcgcgactatgtgcaaggagcggttacacgagatcgtgaatgaagagattgacagcgcgcgcgagaatttggagtggaagctgacgatggagaacggattcgctcgcatggacgacgaggttaatcgcaggagccagagcaaccagaccttcacctgcaggtgcgagctccagactccccactgcgacgccgtcggatccaccgccgtcgtcgccatcgtcacgccggacaaactcgtcgtttccaactgcggcgactcccgcgccgtcctctgccggaaaggcgtagccatccctctctcctccgatcacaagccggatcgacccgacgaactgctccgagtccaatccaagggagggcgcgtgatttactgggacggtcccagagtgcttggtgtgttagccatgtctcgagccataggtgacaattatctgaagccgtacgtgatttctgaaccggaggtgacggtgacggagcggacggaggaggacgagtgtttgatactggcgagtgatgggttgtgggatgtggtgtcgaatgaaaccgcatgtggtgtggtgaggatgtgcctcaaggcgcagaagccgccgtcgccgccgggatctccggggagtgacgtggcggcggacggttccgaccgggcttgctccgatgcgtcgattttgttaaccaagttagcgttggcgaggcatagttcggataatgtgagcgtggtggtggttgatttgaggagagatcaacgacaatcatcaaactccaattaattaacgttggcgagaaacaaaaccaaaaccctttgttttcaggacttcgttaagaacgggaagaccaaatcagagggaggaggggcttgtggcttttgctttatcaaatgttgattgtaatgtaatgggattttaggttaaaaaaacaaaggagcaaggaaattgtaactttggaaaataaaaaaaaaaaaaaaaaa

SEQ ID NO: 1776 - protein, 401 aa, Glycine max
  misc_feature: Ceres CLONE ID no. 531859
  misc_feature: Ceres CDNA ID no. 29191885
  misc_feature (106)..(383): Pfam Name: PP2C PFAM Desc: Protein phosphatase 2C
  misc_feature: Homolog of GI Number: 33309516 NR Desc: protein phosphatase 2C
  misc_feature: Homolog of GI Number: 7768151 NR Desc: protein phpsphatase 2C
  misc_feature: Homolog of GI Number: 10432446 NR Desc: protein phosphatase 2C
  misc_feature: Homolog of GI Number: 21537020 NR Desc: protein phosphatase 2C
  misc_feature: Homolog of GI Number: 16226419 NR Desc: AT5g59220/mnc17_110
  misc_feature: Homolog of GI Number: 10432448 NR Desc: protein phosphatase 2C
  misc_feature: Homolog of GI Number: 50930149 NR Desc: OSJNBb0089K06.2
  misc_feature: Homolog of GI Number: 31711886 NR Desc: At5g57050
  misc_feature: Homolog of GI Number: 3643082 NR Desc: protein phosphatase
  misc_feature: Homolog of GI Number: 10177875 NR Desc: protein phosphatase
MAGICCGVVGEGDTPAPLEPTTRPSRRRSLDILPLKYIADMAVPPSDGSRKRPKLDLRDRDNVVQNCDESTGHKVVKKEAKVEIHDNISETKNVTVADASEVEDSPKFGVTSVCGRRRDMEDSVSVRPSFTQGFHYFGVFDGHGCSHVATMCKERLHEIVNEEIDSARENLEWKLTMENGFARMDDEVNRRSQSNQTFTCRCELQTPHCDAVGSTAVVAIVTPDKLVVSNCGDSRAVLCRKGVAIPLSSDHKPDRPDELLRVQSKGGRVIYWDGPRVLGVLAMSRAIGDNYLKPYVISEPEVTVTERTEEDECLILASDGLWDVVSNETACGVVRMCLKAQKPPSPPGSPGSDVAADGSDRACSDASILLTKLALARHSSDNVSVVVVDLRRDQRQSSNSN

SEQ ID NO: 1777 - DNA, 1127 bp, Glycine max
  misc_feature: Ceres CLONE ID no. 532280
  misc_feature: Ceres CDNA ID no. 36701046
  CDS (256)..(891): REFERENCED BY SEQ ID NO: 1778
gagctttggacaagtgattgtgcctgaactcagccaaagggtggccattttcctttcttttatcttctctctctctctctgtctttatactctcaccccaaataaatgaaagggcttgccccattgcacttccttacagcttagccttccctagcccaaccccataagcctctttctctctctcacccttgcatacgtttctttcactgtactttttgacacacacacctaagacattcatcagaggaagagagaatgagttcatcctcaggtcagagcagtggctatgatctctctttcaagatcttgttgattggagattccggggtgggaaaaagtagcctacttgtcagctttatttcaagttctgttgaagatctttcccccaccattggtgttgattttaagatcaaaactctcacagtaggtggcaagagattgaaattgacgatttgggatactgctgggcaggaaaggttcaggactctaaacagttcctactatagaaaagcacaaggaatcattctcgtttatgatgtcacaaggagagaaacctttacaaacttatcagaagtgtggtctaaggaagtggaactctactcaactaatcaggattgtgtgaagatactagttggaaataaagttgatagagatactgaaagggctgtgagcagagaagagggtttagcacttgctaaagaattggggtgtttgcttcttgaatgtagtgctaaaacaagggaaaatgtggagcagtgctttgaggaacttgctctaaagataatggaagctcctagtcttttggaagaaggatcaacagcagttaaaaggagtgttttaaaaccaaaacaagaatcccaagcatcccaaaatggtggttgttgctcttaaaatgatacaacatcgtggtgtggacattgagtcttcttaactagcaatctttgacaagtcttgtatatgtaagcttcttccttagtttcttctgccactgtcttttgattgcgtaattacttgtattaccggaatggggaaattggcaacaatggcgtctattagcttgtgtaaatttgtttgcctacgaatgactatatcatttatgtgttgctcccaaaaaaaaaaaaaaaaaa

SEQ ID NO: 1778 - protein, 211 aa, Glycine max
  misc_feature: Ceres CLONE ID no. 532280
  misc_feature: Ceres CDNA ID no. 36701046
  misc_feature (16)..(178): Pfam Name: Ras PFAM Desc: Ras family
  misc_feature: Homolog of GI Number: 1370172 NR Desc: RAB1X
  misc_feature: Homolog of GI Number: 6681328 NR Desc: putative Ras
  misc_feature: Homolog of GI Number: 31432458 NR Desc: putative GTP
  misc_feature: Homolog of GI Number: 50919703 NR Desc: Putative GTP
  misc_feature: Homolog of GI Number: 17104731 NR Desc: putative GTP
  misc_feature: Homolog of GI Number: 1370174 NR Desc: RAB1Y
  misc_feature: Homolog of GI Number: 8778652 NR Desc: F9C16.3
  misc_feature: Homolog of GI Number: 549810 NR Desc: GTP
  misc_feature: Homolog of GI Number: 50738954 NR Desc:  similar to ras
MSSSSGQSSGYDLSFKILLIGDSGVGKSSLLVSFISSSVEDLSPTIGVDFKIKTLTVGGKRLKLTIWDTAGQERFRTLNSSYYRKAQGIILVYDVTRRETFTNLSEVWSKEVELYSTNQDCVKILVGNKVDRDTERAVSREEGLALAKELGCLLLECSAKTRENVEQCFEELALKIMEAPSLLEEGSTAVKRSVLKPKQESQASQNGGCCS

SEQ ID NO: 1779 - DNA, 998 bp, Glycine max
  misc_feature: Ceres CLONE ID no. 532329
  misc_feature: Ceres CDNA ID no. 40351038
  CDS (117)..(767): REFERENCED BY SEQ ID NO: 1780
aatactcatcacaatatataagcaggccataacctaatgcttttgcactacaaatcagttttctacttgaatcttcgttatccttctttttttctccttgaactcgaatattcactatggcagatgaggtggttctgctagatttctggccaagtccatttgggatgagggtcaggattgcacttgctgaaaagggtatcaaatatgagtccaaagaagaggacttgcagaacaagagccctttgctcctcaaaatgaacccggttcacaagaaaatcccggttctcatccacaatggcaaacccatttgtgaatctctcgttgctgttcagtacattgaggaggtctggaatgacagaaatcccttgttgccttctgacccttaccagagagctcaggctagattctgggctgactttgttgacaataagatatttgatcttggaagaaagatttggacatcaaagggagaagaaaaagaagctgccaaaaaggagttcatagaggcccttaaattattggaggaacagctgggagacaagacttattttggaggagacgatctaggttttgtggatatagcacttattccattcgacacttggttcaagacttttggcagcctcaacatagagagtgagtgccccaagtttgttgcttgggccaagaggtgcctgcagaaagacagtgttgccaagtctcttcctgatcaacacaaggtctatgagttcattatggacataagaaagaagttcgacattgagtaggttcatgttggattttaatagccatagtgacgtattgatcattcttggcctttcaactaaatagtatttgtgtagtaaattaaaggcacttggatgtaccaaacttcatgctttttgtaggagtgcgtaggttttaaaaattttctgatgtatctttcatgtgtttgttggttttgtaacagaatatttcctatattatacatatatttgagtaaaaaaaaaaaaaaaaaa

SEQ ID NO: 1780 - protein, 216 aa, Glycine max
  misc_feature: Ceres CLONE ID no. 532329
  misc_feature: Ceres CDNA ID no. 40351038
  misc_feature (5)..(76): Pfam Name: GST_N PFAM Desc: Glutathione S
  misc_feature (85)..(190): Pfam Name: GST_C PFAM Desc: Glutathione S
MADEVVLLDFWPSPFGMRVRIALAEKGIKYESKEEDLQNKSPLLLKMNPVHKKIPVLIHNGKPICESLVAVQYIEEVWNDRNPLLPSDPYQRAQARFWADFVDNKIFDLGRKIWTSKGEEKEAAKKEFIEALKLLEEQLGDKTYFGGDDLGFVDIALIPFDTWFKTFGSLNIESECPKFVAWAKRCLQKDSVAKSLPDQHKVYEFIMDIRKKFDIE

SEQ ID NO: 1781 - DNA, 1204 bp, Glycine max
  misc_feature: Ceres CLONE ID no. 533269
  misc_feature: Ceres CDNA ID no. 35383194
  CDS (94)..(957): REFERENCED BY SEQ ID NO: 1782
agttagcacttagcagactctgctgcagtgaggtgaggggaggtttgtttgttgtttcgtttttcctttcctttccgccagaatccgttgagaatggcgttgccggtagtcgtcgatgcagagtacctcaaggaggtcgacaaggctcgccgcgatctccgcgcactcatcgctaacaggaactgcgctcctctcatgctccgattagcctggcacgatgccggaacttacgatgctaagaccaagaccggtggacctaacggttcgatccggaacgaggaagagtattctcacggagccaataatggcttgaagaaagctattgatttctgccaggaagtgaaggcaaaatatcctaaaattacatatgcagatctcttccagcttgcgggtgttgttgcagttgaggttactgggggtccaacaattgatttcgttcctggtagaagagattcaaaagtatctcctaatgaagggcggcttcctgatgctaaaaaaggtgttccacatctccgtgatatcttttatcgaatgggcttgactgaccgagatattgttgcactatctggaggacatacactggggagagcacatccagagagatcagggtttgatggcccttggacggaggaccctctgaagtttgataactcatactttgtggaacttttgaaagaagattctgctgggctgcttaaacttccaacagacaaggctttattggaggatgctgaatttcgctgttatgttgagctatatgcaaaggatgaggatgcattttttcgagattatgctgaatcacataagaaactttcagagctaggctttgtgccaagttcaaagccgatttctattaaggaagggaccatactggcacaaggtgctgtaggagttgtagttgctaccgcagtggtgatcctcagttacttgtatgaagttcgcaaaagagggaagtaaactggatttgttcatctcttggctgttacggttgcgtgaccctgaccctgacccatagtgtgcaaaacagggttcatttttgcagcttcagtttctgtttacttagtaacaataaagaataatgctacagacattcagacttttatatgaatagactaaaaacatccctgagtactcaaattgagagcaacttcattatacgtaaatacaaattttaacattcttagttaaaaaaaaaaaaaaaaaa

SEQ ID NO: 1782 - protein, 287 aa, Glycine max
  misc_feature: Ceres CLONE ID no. 533269
  misc_feature: Ceres CDNA ID no. 35383194
  misc_feature (18)..(225): Pfam Name: peroxidase PFAM Desc: Peroxidase
  misc_feature: Homolog of GI Number: 42795352 NR Desc: peroxisomal ascorbate peroxidase
  misc_feature: Homolog of GI Number: 15430584 NR Desc: peroxisomal ascorbate peroxidase
  misc_feature: Homolog of GI Number: 4835909 NR Desc: cytosolic ascorbate peroxidase
  misc_feature: Homolog of GI Number: 1019946 NR Desc: ascorbate peroxidase
  misc_feature: Homolog of GI Number: 17066705 NR Desc: ascorbate peroxidase
  misc_feature: Homolog of GI Number: 55709892 NR Desc: ascorbate peroxidase
  misc_feature: Homolog of GI Number: 68342454 NR Desc: ascorbate peroxidase
  misc_feature: Homolog of GI Number: 21554292 NR Desc: L
  misc_feature: Homolog of GI Number: 5442410 NR Desc: ascorbate peroxidase
  misc_feature: Homolog of GI Number: 53748453 NR Desc: ascorbate peroxidase
  misc_feature: Useful for delaying flowering time
MALPVVVDAEYLKEVDKARRDLRALIANRNCAPLMLRLAWHDAGTYDAKTKTGGPNGSIRNEEEYSHGANNGLKKAIDFCQEVKAKYPKITYADLFQLAGVVAVEVTGGPTIDFVPGRRDSKVSPNEGRLPDAKKGVPHLRDIFYRMGLTDRDIVALSGGHTLGRAHPERSGFDGPWTEDPLKFDNSYFVELLKEDSAGLLKLPTDKALLEDAEFRCYVELYAKDEDAFFRDYAESHKKLSELGFVPSSKPISIKEGTILAQGAVGVVVATAVVILSYLYEVRKRGK

SEQ ID NO: 1783 - DNA, 800 bp, Glycine max
  misc_feature: Ceres CLONE ID no. 533468
  misc_feature: Ceres CDNA ID no. 35383195
  CDS (68)..(640): REFERENCED BY SEQ ID NO: 1784
atccacatttgtctctcatctttcaatttcaatcaacggttatacccttttctatttgagcatcatcatgtccaccgcagcgcagcccaaggccaagaaaacggcgtcgtccaagaagcccctctcccatcctaccttcgccgtgatgatagcggaggcgatagcgagtctgaaggagagaaccggttcgagccaatacgcgataaccaaattcatcgaaggcaagcacaaggagttgcctccaacctacaagaagcttgttctcgttcatctcaagaagtctgttgctgctggcaagctcgttaaggtcaaaaactctttcaagctcgcaccgactaagtctgctcctgttaaagccgctgctgctcccaagaagcccaccaaagctgcggctaagcccgccgccaagcccgcttccaagcccaaagctgctgcacctaagaagaaggctgttgccaagcccaaggccaaagctgcggccaccaagcccaaggccaagcccgctaaggccgcgccgaagaaggtcgccgctaagcctgcgaagaagactcccgtaaaggccgtgaagaagcccaagagcgtcgtgaagaaacctaaaagcgtgaaatctccagcgaaaaaggccaaggctaagaagtgagggattggagtgggttttagtttggcgttatagtgtttatgtatttcgggttgaatcgtagtataggtggatatatttttagaagagtattgatgtaaattcctttgctagaaattttaacaagtgttcttcttttgcattgaaaaaaaaaaaaaaaaaa

SEQ ID NO: 1784 - protein, 190 aa, Glycine max
  misc_feature: Ceres CLONE ID no. 533468
  misc_feature: Ceres CDNA ID no. 35383195
  misc_feature (20)..(89): Pfam Name: Linker_histone PFAM Desc: linker histone H1 and H5 family
  misc_feature: Homolog of GI Number: 73587458 NR Desc: histone H1 subtype 7
  misc_feature: Homolog of GI Number: 73587460 NR Desc: histone H1 subtype 7
  misc_feature: Homolog of GI Number: 2118974 NR Desc: histone H1.41
  misc_feature: Homolog of GI Number: 73587462 NR Desc: histone H1 subtype 7
  misc_feature: Homolog of GI Number: 3204127 NR Desc: histone H1
  misc_feature: Homolog of GI Number: 81176340 NR Desc: histone H1F
  misc_feature: Homolog of GI Number: 34897182 NR Desc: histone
  misc_feature: Homolog of GI Number: 62286644 NR Desc: Histone H1
  misc_feature: Homolog of GI Number: 21465093 NR Desc: histone H1
  misc_feature: Homolog of GI Number: 13540397 NR Desc: histone H1
  misc_feature: Useful for making bigger plants
  misc_feature: Useful for making ornamental plants with modified leaves
  misc_feature: Useful for making plants with increased biomass
  misc_feature: Useful for making plants with increased biomass and foliage
MSTAAQPKAKKTASSKKPLSHPTFAVMIAEAIASLKERTGSSQYAITKFIEGKHKELPPTYKKLVLVHLKKSVAAGKLVKVKNSFKLAPTKSAPVKAAAAPKKPTKAAAKPAAKPASKPKAAAPKKKAVAKPKAKAAATKPKAKPAKAAPKKVAAKPAKKTPVKAVKKPKSVVKKPKSVKSPAKKAKAKK

SEQ ID NO: 1785 - DNA, 1244 bp, Glycine max
  misc_feature: Ceres CLONE ID no. 533587
  misc_feature: Ceres CDNA ID no. 35383196
  CDS (111)..(998): REFERENCED BY SEQ ID NO: 1786
tctctccttgctccttgctccaaaaccccttcttcagggtcaccgctgtcaggggtttcctctgcaatctcttgtacttgaagctcgttccttcttccggatctcgatctatggatacccgcaagaggggaagacccgaacccggcttcagcttaaatggcggattcaagaaatccaagcaagaaatggagtccttatcaactggtgtaggaagcaaatcgaagccatgtaccaagtttttcagcactgctggttgcccatttggtgagggctgccacttcttgcactatgttcccggtggttataatgcagttgcccatatgatgaatctaacacctgcagcacctccagcatcaagaaatgttgcagctctgcctcctgtaccaaatggttccgcaccacctgccgttaagacccgcatatgcaacaagtttaatactgctgaaggttgcaaatttggtgacaaatgccattttgctcatggtgaatgggagcttggcaagcatattgctccatcatttgatgaccatcgcaccatgggacccactggagtaggtcgtcttgctggtcgaatggagccccctcctggccctgctgcaagttttggggccaatgccacagccaagatcagcgtagaagcttccctggctggagctatcattgggaagggtggcgtgaactcaaaacagatctgccgccaaactggagccaaactttcaattcgagagcatgaatctgacccaaatcttagaaacattgaacttgagggaagttttgagcaaatcaaagaagcaagtaacatggtaaaggatttacttttgaccctgcaaatgtctgcaccacctaaaacaaccccaggtgttcctggcgcacctgcctctcatggaagcaattttaagacgaagctgtgtgagaattttacaaaagggtcttgcacgtttggagatagatgtcactttgcacatggagctgctgaattgcgtaaatcaggagtatgaactttcttagtcaggcacattagctagggttatgattattgttgttgtgcattgctactgacaggacttctgatgttagttttgttgttgagttgctttacataacttgttttatttccgatttcaactctcgcttatatcatgaaactggtgttttctctaggctaccccatttggtcccaaataatgctatgaaaatagtgtgattttagttcaaaaaaaaaaaaagaaaaaaaaaaaaaaaaa

SEQ ID NO: 1786 - protein, 295 aa, Glycine max
  misc_feature: Ceres CLONE ID no. 533587
  misc_feature: Ceres CDNA ID no. 35383196
  misc_feature (170)..(232): Pfam Name: KH_1 PFAM Desc: KH domain
  misc_feature (35)..(61): Pfam Name: zf PFAM Desc: Zinc finger C
  misc_feature: Homolog of GI Number: 50905911 NR Desc: KH domain
  misc_feature: Homolog of GI Number: 50929447 NR Desc: OSJNBa0087O24.9
  misc_feature: Homolog of GI Number: 51090454 NR Desc: KH domain
  misc_feature: Homolog of GI Number: 18129298 NR Desc: similarity to the EST C99174
  misc_feature: Homolog of GI Number: 50941347 NR Desc: putative zinc finger protein
  misc_feature: Homolog of GI Number: 19547999 NR Desc: At1g32359/F27G20.10
  misc_feature: Homolog of GI Number: 56121890 NR Desc: At2g35430
  misc_feature: Useful for delaying flowering time
  misc_feature: Useful for increasing chlorophyll and photosynthetic capacity
  misc_feature: Useful for making ornamental plants with modified flowers
  misc_feature: Useful for making plants that grow better in shade
MDTRKRGRPEPGFSLNGGFKKSKQEMESLSTGVGSKSKPCTKFFSTAGCPFGEGCHFLHYVPGGYNAVAHMMNLTPAAPPASRNVAALPPVPNGSAPPAVKTRICNKFNTAEGCKFGDKCHFAHGEWELGKHIAPSFDDHRTMGPTGVGRLAGRMEPPPGPAASFGANATAKISVEASLAGAIIGKGGVNSKQICRQTGAKLSIREHESDPNLRNIELEGSFEQIKEASNMVKDLLLTLQMSAPPKTTPGVPGAPASHGSNFKTKLCENFTKGSCTFGDRCHFAHGAAELRKSGV

SEQ ID NO: 1787 - DNA, 1203 bp, Glycine max
  misc_feature: Ceres CLONE ID no. 534149
  misc_feature: Ceres CDNA ID no. 40351039
  CDS (208)..(834): REFERENCED BY SEQ ID NO: 1788
gctttggcatggaagagagtagtggggcatgccgaggaaaaggacggtggcatccgaacgaaagcggtagcaaaatccgtttaagttaattcttttgacgcatacaaaggaaaacattttcttattcaaatactcaccaataccaaatccaacacccacacccacaccaataacaagcttggttggtacttatctacaatctgcatcatggaaggtgttattctgagaagggtcattccttcggataacagttgcctcttcaatgcagttggatatgttatggatcatgacaaaaagaaagctgctgagttgagacaggttatagcagcaacagtagcaagtgatccacagaaatattgtgaagcatttcttgggaagccaaacgctgagtattgtaactggattcttgactcggagaagtggggaggtgcaattgaactttcaatattagcagattattatggacgtgaaattgcagcatatgatatccaaacaactcgatgtgatttgtatggtcaggaaagtaactattctgaaagagtgatgctgatttatgatggtctccactacgatgcattagtgatgtctccctttgaggaagctcctgaggagtttgatcagaccatatttgctgtacagaaaaacagaagcattggacctgttgaggggcttgctctaacttttgtgaaggaccagcagaggaaacggagttacactgacacatccaacttcactctccgctgtggggtatgccaaattggagtaattggtgagaaggaggcagtggagcatgcacaagcaactggtcatgttaacttccaagagtacagataatgcactccgttgatttgaatgggatacaaattcatgtgtaatctccgttgatttgaatgagcatcatcgatagaaggtagttgctttgttgcagacaaaaaaaactgaataatttctgcatgagaattgttgtggcaacttgtgttgtaataatagttccttggtcttgttccacaatgactgtgattataagaaactcacctctagtgactctagttgcagactagataaagaaattagtaatcaattattttttttatatttcacttcctttatataacttttagtgcaataactatgtaaacttacgccactattttaaccttgacgagtgttgaatgcttttgataccaaaaaaaaaaaaaaaaa

SEQ ID NO: 1788 - protein, 208 aa, Glycine max
  misc_feature: Ceres CLONE ID no. 534149
  misc_feature: Ceres CDNA ID no. 40351039
  misc_feature (11)..(121): Pfam Name: OTU PFAM Desc: OTU
MEGVILRRVIPSDNSCLFNAVGYVMDHDKKKAAELRQVIAATVASDPQKYCEAFLGKPNAEYCNWILDSEKWGGAIELSILADYYGREIAAYDIQTTRCDLYGQESNYSERVMLIYDGLHYDALVMSPFEEAPEEFDQTIFAVQKNRSIGPVEGLALTFVKDQQRKRSYTDTSNFTLRCGVCQIGVIGEKEAVEHAQATGHVNFQEYR

SEQ ID NO: 1789 - DNA, 1710 bp, Glycine max
  misc_feature: Ceres CLONE ID no. 534352
  misc_feature: Ceres CDNA ID no. 40351040
  CDS (86)..(1501): REFERENCED BY SEQ ID NO: 1790
acctcaacaaacacaacaacactctctcttctcgctcttggcttttcgctcttcactcactctcattcattcatttccaccgttcatggatccagtaagcgtgtggggtaacacgcccttggcgacggtggatcccgagatccatgacctcatcgagaaggagaagcgccgtcaatgccgcggaatcgagctcatcgcctccgagaacttcacctccttcgccgtcatcgaggccctcggcagcgctctcacgaacaaatactccgagggcatgccgggcaaccgctactacggcggcaatgaatacatcgaccagatcgaaaacctctgccgctcacgcgccctccaagccttccacctcgacgcccaatcctggggcgtcaacgtccagccctactccggctccccggccaacttcgccgcctacaccgccgtcctcaacccccacgaccgcatcatggggctagatctcccctccggcggccacctcacccacggctactacacctccggcggaaagaagatctccgccacctccatttacttcgagagtctcccttacaaggtaaactccaccaccggctacatcgactacgaccgcttggaagaaaaagccctagacttcaggccaaaactcataatctgcggtggcagcgcgtaccctcgcgattgggactacaaacgtttcagggaagtcgctgataagtgcggagcattgcttctctgcgacatggcgcacactagcggccttgtggccgcgcaggaagtgaacagccccttcgagtattgcgacattgtgaccaccacgactcacaagagcttgcggggcccacgtgcggggatgatcttttaccggaagggccccaagccgccgaagaaggggcagccggagaacgcggtttatgatttcgaggacaagattaacttcgcggtgttcccttcgctgcagggtgggccccacaaccaccagatcggtgctctcgttgtggcgctgaagcaggccgcgtcgcccgggtttaaggcctacgcgaagcaggttaaggcgaacgccgttgcgcttggaaaatacttgatggggaaagggtacagccttgtcactggcggaacggagaaccatcttgttttgtgggatctgagacctcttggattgactgggaataaggtggagaaactctgtgatctctgtaacattactgttaacaagaacgctgtttttggtgatagcagtgccttggcccctggtggagtgcgaattggtgcccctgccatgacttctaggggtttggttgaaaaagactttgagcagattggtgagttccttcaccgtgctgtgactctcacactggagatccagaaggagcatggcaaacttctcaaggatttcaacaagggtctcgtcaacaacaaggctattgaagatctcaaagctgatgttgagaagttctctgccttgtttgacatgcctggcttcctggtatctgaaatgaagtacaaggattaggttcaaccataccactttctactaaattgtgtcactcaagttcgacacaaagtgcagaaatggagaaaaaggaaatatgtgtcttcctttcctgggagtgatagggtttatcgccatggtgtttcaattcaaaagtttgaagtttctttgtctttgatttcatgtttaattttgttagcctgattgatatcaaaaaaaaaaaaaaaaaa

SEQ ID NO: 1790 - protein, 471 aa, Glycine max
  misc_feature: Ceres CLONE ID no. 534352
  misc_feature: Ceres CDNA ID no. 40351040
  misc_feature (12)..(412): Pfam Name: SHMT PFAM Desc: Serine hydroxymethyltransferase
MDPVSVWGNTPLATVDPEIHDLIEKEKRRQCRGIELIASENFTSFAVIEALGSALTNKYSEGMPGNRYYGGNEYIDQIENLCRSRALQAFHLDAQSWGVNVQPYSGSPANFAAYTAVLNPHDRIMGLDLPSGGHLTHGYYTSGGKKISATSIYFESLPYKVNSTTGYIDYDRLEEKALDFRPKLIICGGSAYPRDWDYKRFREVADKCGALLLCDMAHTSGLVAAQEVNSPFEYCDIVTTTTHKSLRGPRAGMIFYRKGPKPPKKGQPENAVYDFEDKINFAVFPSLQGGPHNHQIGALVVALKQAASPGFKAYAKQVKANAVALGKYLMGKGYSLVTGGTENHLVLWDLRPLGLTGNKVEKLCDLCNITVNKNAVFGDSSALAPGGVRIGAPAMTSRGLVEKDFEQIGEFLHRAVTLTLEIQKEHGKLLKDFNKGLVNNKAIEDLKADVEKFSALFDMPGFLVSEMKYKD

SEQ ID NO: 1791 - DNA, 635 bp, Glycine max
  misc_feature: Ceres CLONE ID no. 534364
  misc_feature: Ceres CDNA ID no. 35383197
  CDS (24)..(317): REFERENCED BY SEQ ID NO: 1792
ggcatcgaacagagagagagagaatggcagcacttggtgggaatcgtgatgtgacaggaagccagaacagcgttgagatcgatgctctagctcgctttgctgttgaagaacacaacaaaaaacagaatgcccttttggagtttgaaaaggtggtaactgcgaaacagcaagtggtttctggtaccttgtacaccatcactttggaggcaaaagatggtgggcaaaagaaggtttatgaagccaaagtttgggagaagtcatggttgaacttcaaggaggtgcaagagttcaagcttgttggagatgcacctgcatagtctagtgcttaattaggttgctgaagagtgaagaatgagacagcctggttcgaaggggaaaagcctaaggatatatcaaaggatcctatatgtataaaataaatgttgcttttttaccttcggtattgatatctgaagtctaatttgacatcctatatatgaatatatgatctatgtgtttctttctctccctacctctctctcttttaaagattcaaatttggttttactttttagccattgtaagtgtattaacatcaatacttaaatctatatctatatctacattataatctaaagaaaaaaaaaaaaaaaaaa

SEQ ID NO: 1792 - protein, 97 aa, Glycine max
  misc_feature: Ceres CLONE ID no. 534364
  misc_feature: Ceres CDNA ID no. 35383197
  misc_feature (5)..(93): Pfam Name: Cystatin PFAM Desc: Cystatin domain
  misc_feature: Homolog of GI Number: 1277164 NR Desc: cysteine proteinase inhibitor
  misc_feature: Homolog of GI Number: 288188 NR Desc: cysteine proteinase inhibitor
  misc_feature: Homolog of GI Number: 74058377 NR Desc: cystatin
  misc_feature: Homolog of GI Number: 4150974 NR Desc: cystatin
  misc_feature: Homolog of GI Number: 18030077 NR Desc: cystatin
  misc_feature: Homolog of GI Number: 15795168 NR Desc: cysteine proteinase inhibitor
  misc_feature: Homolog of GI Number: 24899735 NR Desc: cysteine proteinase inhibitor
  misc_feature: Homolog of GI Number: 21554079 NR Desc: cysteine proteinase inhibitor
  misc_feature: Homolog of GI Number: 11139270 NR Desc: PRLI
  misc_feature: Homolog of GI Number: 8099682 NR Desc: cysteine protease inhibitor
  misc_feature: Useful for making plants with altered leaf shape eg curled leaves
MAALGGNRDVTGSQNSVEIDALARFAVEEHNKKQNALLEFEKVVTAKQQVVSGTLYTITLEAKDGGQKKVYEAKVWEKSWLNFKEVQEFKLVGDAPA

SEQ ID NO: 1793 - DNA, 1466 bp, Glycine max
  misc_feature: Ceres CLONE ID no. 534839
  misc_feature: Ceres CDNA ID no. 24765995
  CDS (146)..(1234): REFERENCED BY SEQ ID NO: 1794
ggcattggcttacaaatctcaaccaccctatcttaaaatcttctgtgcaaccagaaaaaaacggaccttgccctcagtctcttttttccatcatcacttcattaaacattattcactctctttctctgtctctagtttttacaacatggctactgcggtaactgctgcagtgtcctttccagccaccaagtccacttctctttcaagcagaacctctatcactgccccagatagaattgtcttcaagaaggtttcgttgcaatacagagatgtttcaaccagtggaagggtagtttcaatcagagcacaagtgaccacagaggcacctgctaaggttgaaaaggaatcaaagaaacaggaggaaggtgtgatcgtgaacaagttcaaacccaagaacccatatattggtaggtgtcttctcaacacaaagatcactggggatgatgcacctggagaaacttggcacatggtcttcagcactgagggagaagttccttacagagaaggacaatcaatcggggtaattcctgatggggttgacaagaatggcaagcctcacaagctgagattgtattcaattgctagcagtgcccttggtgattttggagattccaaaactgtttctttatgcgtgaaacgtcttgtgtacacaaatgaaaacggagaacttgtcaaaggagtttgctcaaatttcttgtgcgacttgaagccaggagccgaagtaaagattactggacctgttggtaaagaaatgcttatgccaaaagatcctaatgcaaccgtcatcatgttggcaactggaacaggaattgccccattccgctcatttttatggaaaatgttctttgagaagcatgatgattacaagttcaatggtttggcatggctcttcttgggtgtccccacaagcagctcactactttataaggaggaatttgaaaagatgaaggagaaagcacctgacaacttcaggcttgactttgctgtgagcagagagcaaacaaacgaaaaaggagagaaaatgtacatccaaacacgaatggctcaatatgcagaagagttatgggaattactgaagaaagataacacttttgtctatatgtgtggactgaagggaatggaaaagggtatagatgacataatggtttcattggctgcaaaagatggtattgattggattgagtacaagaggcaattgaagaaggcagagcaatggaatgtcgaagtctactaattaatatcacttgcacttgctcagatatcatgccctactttgtgcagcagcaaatctattttgctgtcatgcgctgtgtagatagattacggccctgtaatttttctatgatgggattttttaccttccttatgaacgtacaagcttcattgcaacagccttgcatgaaataattttgaggatctatcaatatagatgaagtcaacttctgtttaaaaaaaaaaaaaaaaaa

SEQ ID NO: 1794 - protein, 362 aa, Glycine max
  misc_feature: Ceres CLONE ID no. 534839
  misc_feature: Ceres CDNA ID no. 24765995
  misc_feature (214)..(331): Pfam Name: NAD_binding_1 PFAM Desc: Oxidoreductase NAD
  misc_feature: Homolog of GI Number: 4930124 NR Desc: Chain B
  misc_feature: Homolog of GI Number: 729479 NR Desc: Ferredoxin
  misc_feature: Homolog of GI Number: 6899972 NR Desc: chloroplast ferredoxin
  misc_feature: Homolog of GI Number: 2225993 NR Desc: ferredoxin
  misc_feature: Homolog of GI Number: 170111 NR Desc: ferredoxin
  misc_feature: Homolog of GI Number: 81898 NR Desc: ferredoxin
  misc_feature: Homolog of GI Number: 5730139 NR Desc: ferredoxin
  misc_feature: Homolog of GI Number: 167256 NR Desc: ferredoxin
  misc_feature: Homolog of GI Number: 20465661 NR Desc: putative ferredoxin
  misc_feature: Homolog of GI Number: 16331051 NR Desc: ferredoxin
  misc_feature: Useful for making lethal plants for genetic confinement systems
  misc_feature: Useful for making ornamental plants with modified leaves
  misc_feature: Useful for making plants with increased biomass
  misc_feature: Useful for making plants with increased biomass and foliage
  misc_feature: Useful for making stronger plants
  misc_feature: Useful for sterility
MATAVTAAVSFPATKSTSLSSRTSITAPDRIVFKKVSLQYRDVSTSGRVVSIRAQVTTEAPAKVEKESKKQEEGVIVNKFKPKNPYIGRCLLNTKITGDDAPGETWHMVFSTEGEVPYREGQSIGVIPDGVDKNGKPHKLRLYSIASSALGDFGDSKTVSLCVKRLVYTNENGELVKGVCSNFLCDLKPGAEVKITGPVGKEMLMPKDPNATVIMLATGTGIAPFRSFLWKMFFEKHDDYKFNGLAWLFLGVPTSSSLLYKEEFEKMKEKAPDNFRLDFAVSREQTNEKGEKMYIQTRMAQYAEELWELLKKDNTFVYMCGLKGMEKGIDDIMVSLAAKDGIDWIEYKRQLKKAEQWNVEVY

SEQ ID NO: 1795 - DNA, 1313 bp, Glycine max
  misc_feature: Ceres CLONE ID no. 534877
  misc_feature: Ceres CDNA ID no. 40351041
  CDS (125)..(1162): REFERENCED BY SEQ ID NO: 1796
gagtgccaaactcttagagcatcatttccttgctttttaagcattgccaccagtttcaaagcacccttctgcgctcctctcttactgctacacatctcaagcatccgtagtttccgtcttcccaatggctgcaactgcacctgcaacagaaacaagagttgaaattaaagaacctcctacagaagaacttttagaacctctcatgtgcaagagctgtgtgttgaaagtctccattcattgtcaaggctgcacaaggaaagttaaaaaaatcctacagagcatagacgatttgaggcaacagaaggttatagtaaagggaaacgtagacagcgacactttgattaagaaactaacagagacagggaaacgcgctgagttatggccagaccaacccgaactgaagaagaagaagaagaaaaagaaaaagaagaagaagaaggcaaacccagagaacaaagagaaaccgagcgaacaagaaagcagcgaagaaagcaaccagagcggcgacgacaacaacaacgaaaaggaagctattaaggttgtcgttcaagacccagccaaaaacaacgaaggattttttaacgtaaacagagttggtgaaggaagcgcaaccggcttaaccggggtgcagttccaggatccgaggatggaggtgaggcaaacggtgatggtaccacccggttaccagtcatcggtgatgggcgagaaaagggttactatcaacgtccctggcatgatggatgagaacgagggtggcagtggagggaaaaggacgaaaagcaaggggcaaaaagggaatgttgtaatcaacggcggcaacgagggtgttactgtggtggaacacgctggtggagattggaaccagatgcctggtggtcatggacatgggccacccaatgagagtcccccacggcatcagtacccaccgcactatcatgcgcccgcatctccagtatacactggaacctaccacacagcgtatcccactgtcacccgctacggtgctgcgtattatacgtccccgcaaccgtattcgtattctcacgtgtatcggtgcgttgggtccgagtcagactcagaaacttatacatcaccttcaccaccgtcttgttccttcgaattattcagcgatgaaaatcctaatgcctgctttatcatgtgagtgttgtcacgaaatttcaaccaccgtaactaactttctttttcttaatctcgttgtgctctcttgaatattaatgcatgaacactgggtgtgtcagtttcaattcagagtaaggaattttattaattttctcaaaaaaaaaaaaaaaaaa

SEQ ID NO: 1796 - protein, 345 aa, Glycine max
  misc_feature: Ceres CLONE ID no. 534877
  misc_feature: Ceres CDNA ID no. 40351041
  misc_feature (32)..(85): Pfam Name: HMA PFAM Desc: Heavy
MAATAPATETRVEIKEPPTEELLEPLMCKSCVLKVSIHCQGCTRKVKKILQSIDDLRQQKVIVKGNVDSDTLIKKLTETGKRAELWPDQPELKKKKKKKKKKKKKANPENKEKPSEQESSEESNQSGDDNNNEKEAIKVVVQDPAKNNEGFFNVNRVGEGSATGLTGVQFQDPRMEVRQTVMVPPGYQSSVMGEKRVTINVPGMMDENEGGSGGKRTKSKGQKGNVVINGGNEGVTVVEHAGGDWNQMPGGHGHGPPNESPPRHQYPPHYHAPASPVYTGTYHTAYPTVTRYGAAYYTSPQPYSYSHVYRCVGSESDSETYTSPSPPSCSFELFSDENPNACFIM

SEQ ID NO: 1797 - DNA, 811 bp, Glycine max
  misc_feature: Ceres CLONE ID no. 534980
  misc_feature: Ceres CDNA ID no. 36701077
  CDS (85)..(576): REFERENCED BY SEQ ID NO: 1798
ataggaaaaccaaccaaagttccaaattttttggtttggggatagatagagtgatacgcgtcacattttcataataataaaaaaatggcagcggcggcggcagtgacggtgctactcccacctaggattccgaccaccaccaacgttacccgctgctctgctttgccttctctccctcctcgcgtctccaacaccaaaaccactttgttctcaccttccctcaacaacttttcagtgtcccgaaaatcttctctgcttcagaccagagcttcttcagaggaatcatcctcagtagatgccaatgaggtgttcacagatttgaaggaaaagtgggatgctcttgaaaacaagtccacagtacttctttatggtggaggggctatagttgctatttggctatcgtcaattcttgtgagcgccatcaactcagttcccttgcttccaaagattatggagttggtagggcttggatacactggatggtttgtctaccgataccttctgtttaagtctagcaggaaggagctagctacagacattgaatcactgaagaagaaaattactggaactgaatagagtggtgttagcaggtatcaagtcaagtttatcttctgagcaccatttgtttttgttgtgctgttatcccctgtataagagtcatatgtatcccttggagtagaatagaattcctctcaacctgtattgcccctgtaatgaacccatttcattgttaaaaataatgtagcaaattttatgtatatggctctgaatggaaaccattatcctttcacttcctaaaaaaaaaaaaaaa

SEQ ID NO: 1798 - protein, 163 aa, Glycine max
  misc_feature: Ceres CLONE ID no. 534980
  misc_feature: Ceres CDNA ID no. 36701077
MAAAAAVTVLLPPRIPTTTNVTRCSALPSLPPRVSNTKTTLFSPSLNNFSVSRKSSLLQTRASSEESSSVDANEVFTDLKEKWDALENKSTVLLYGGGAIVAIWLSSILVSAINSVPLLPKIMELVGLGYTGWFVYRYLLFKSSRKELATDIESLKKKITGTE

SEQ ID NO: 1799 - DNA, 1751 bp, Glycine max
  misc_feature: Ceres CLONE ID no. 535278
  misc_feature: Ceres CDNA ID no. 40351042
  CDS (159)..(1601): REFERENCED BY SEQ ID NO: 1800
atagacatctgcgatgatattgctatcaaacacttcacgtatataccaatgctgtttgtttcagtcgcactctgcaatcctatcttgtttgcatgtcaaaatctcattcatcatcatcttcttcttaaaagttaaaaggttaagagagagagagaaagatgagtagcgtgttggagcatggtgttgtgggatgttgcaaatcagggccaggctatgctaccccactggaagccatgtctggtccaagagagtctcttatttatgtaactgctgtctacacagggacaggaatagagaagccggactatttggccacagtggacatagatccaaactctccaacttattccaaagtcatccataggcttcgtgttccttatttaggtgacgaattgcatcacactggttggaattcatgcagctcttgccatggagacccctcggcagaccgacgatttctcatcgcacctgcactcgtttcaggtcgcatatatgtggttgatgtgaaaacaaatccaagggctccatctttgcacaaagttgttgagcctgccgatatcatacagaagactggattagcttatccacacacatctcactgccttgcttctggtgacataatgatctcatgtcttggagataaagatggaaatgctgcaggaaatggatttcttcttcttgattcagagtttaatgtgaagggaaggtgggagaaaccgggtcacagtccactatttggatatgacttttggtaccaaccacgtcacaataccatgattagcacatcatggggtgctcctagtgcttttacaaaaggttttaacttacagcatctttctgatggattatacgggaggcatctccatgtatatagctggcctgggggcgaactgagacaaacactggaccttggtgattcagggcttttacccttagagataaggttcttgcatgatcctgctaaagatacaggttttgtcgggagtgcattgacaagtaacatgatacgattttttaagacccaagatgaatcatggagccatgaggttgccatatcagtgaaaccactgaaagtgcaaaactggattcttcctgaaatgcctgggcttataactgattttttgatttctcttgatgatcggtttctgtactttgtaaactggcttcatggggatatcagacagtataacattgagaaccttaaaaatcctaaactgaccggacaagtatgggttggtggacttatccagaaaggaagccctgtagtagctataactgatgatggtgaaacttggcaagctgaagtgcctgagattcagggcaacaagttgagagggggccctcagatgattcaattgagtttagatgggaaacggctctatgctaccaactcactatttagtacatgggacaaacagttttatccagagtttgtccagaaaggctcccacataatacagattgatgttgatactgagaaaggtggcctgaaaatcaaccccaacttctttgtggactttggagctgagcctgatggtccttctcttgcccatgagatgagatatcctggtggtgactgcacttcagatatatggatttaagcttacgtgtcgttatttccctttaataaacggtatctgtcatatggttgtaatgagctattatgctttataaataatgctcctgtgaatcttcaacatttcgaagacagtttgcagttgcataaatatatgaaaaaaaaaaaaaaaaaa

SEQ ID NO: 1800 - protein, 480 aa, Glycine max
  misc_feature: Ceres CLONE ID no. 535278
  misc_feature: Ceres CDNA ID no. 40351042
  misc_feature (13)..(480): Pfam Name: SBP56 PFAM Desc: 56kDa selenium binding protein
MSSVLEHGVVGCCKSGPGYATPLEAMSGPRESLIYVTAVYTGTGIEKPDYLATVDIDPNSPTYSKVIHRLRVPYLGDELHHTGWNSCSSCHGDPSADRRFLIAPALVSGRIYVVDVKTNPRAPSLHKVVEPADIIQKTGLAYPHTSHCLASGDIMISCLGDKDGNAAGNGFLLLDSEFNVKGRWEKPGHSPLFGYDFWYQPRHNTMISTSWGAPSAFTKGFNLQHLSDGLYGRHLHVYSWPGGELRQTLDLGDSGLLPLEIRFLHDPAKDTGFVGSALTSNMIRFFKTQDESWSHEVAISVKPLKVQNWILPEMPGLITDFLISLDDRFLYFVNWLHGDIRQYNIENLKNPKLTGQVWVGGLIQKGSPVVAITDDGETWQAEVPEIQGNKLRGGPQMIQLSLDGKRLYATNSLFSTWDKQFYPEFVQKGSHIIQIDVDTEKGGLKINPNFFVDFGAEPDGPSLAHEMRYPGGDCTSDIWI

SEQ ID NO: 1801 - DNA, 960 bp, Glycine max
  misc_feature: Ceres CLONE ID no. 535774
  misc_feature: Ceres CDNA ID no. 40351043
  CDS (446)..(790): REFERENCED BY SEQ ID NO: 1802
ggttggtatacaccaattatatatagacaagaagaaaaaggcatgtaaatgtatgttatgttacatgttacattacgcatgtgtggtgttggcattggggttcagtgtggagcaacttgcaagaccaaacttgtttgtgctgcgctgcgctgttttgtttgtgcccacaacgcaccgtggttgatgtaaacgaggttttaacgttatcatatcatctatcatctcttctccttgtttttttctccatcatttcagggctttctttcttctcttttaccctcactcaccccccatattctattctcctcaaaatatctttctattttcctctcaaccccaacaaaattccaaatttcccccctctccttttcacgtcacttagcacaaccgggatgctccactttctcaaggattatttgctaactgaatcctaagtgtaattgagatggacggtgatatatttggagaattaggcaattcaactcaagtagatagcaggcttttacaggtatttcagaagagcttattgcaagctcaagatattttgaatcaaaaccggttgctgatcaatgagataaaccaaaatcatgagtccaagatgcctgataatctgagtagaaatgtgggtttgattagagagctcaatagcaatatcagaagggtggttgatctctatgctgatctttctaattcctttaccaagtccagagaggcttcttctgaaggtgactccagtgggactttgaagtctgatggaaaagtcaaccagaagagaattagatccagctgattgattgaatttctgctttcacgcaatcaagaagtttattctgaagctggaaggaatttgtttggtgtgaatgtgtaacttcctccaaagttatttttgtgccaagtcttccatattggttttatgtttagaggcccagagatttagttaaaaaaaaaaaaaaaaaaaaa

SEQ ID NO: 1802 - protein, 114 aa, Glycine max
  misc_feature: Ceres CLONE ID no. 535774
  misc_feature: Ceres CDNA ID no. 40351043
MDGDIFGELGNSTQVDSRLLQVFQKSLLQAQDILNQNRLLINEINQNHESKMPDNLSRNVGLIRELNSNIRRVVDLYADLSNSFTKSREASSEGDSSGTLKSDGKVNQKRIRSS

SEQ ID NO: 1803 - DNA, 1384 bp, Glycine max
  misc_feature: Ceres CLONE ID no. 535888
  misc_feature: Ceres CDNA ID no. 40351044
  CDS (116)..(1234): REFERENCED BY SEQ ID NO: 1804
aagcacgatcattgcgtggtttaacatctatagaatggaaaaataaacaagaaagcaactaagtgtactagtttaagcagtagaagtggaaagtggttgcagagtagaagtcgagatggccaaccttccaaattcaaagctttatgggaaagagaagatgaaaggagagcaagaattagaagatgaagaaagcttctcgcgtgctatgctgctttgcagctccgttgtggtttccatggcgctgcaatcggcaacggagctgggcgtatttgacgtgttgcaagaagcgggggctaagctctctgcgaaagagatagcatccaagctttcctgcgacaacaaccctgaagcagactcaatgctggatcgccttctagcccttctagcctctcactccattcttaactgttctctcattctcgaccaccaaaacctggggacctttcagaggctctacaccatcactcccgtcgccagattctttgctcgcaattctgatggggtttccttgggacccttgatggccttgcttcaagacaagatcttcctacatagctggtcggagctgaaagattcaattcgggaagggggtattccattcaacagggtttatggcactcatgcttttgagtatccaaggttggacgcaaggttcaatcaagtttttaacacagcaatgatcaatcacaccactatagtgatgaagaaggttctggagtgctacaaaggttttgagaacataaaaatgcttgtggatgttggtggtggtcttgggatcaacatcaacttgatcacttccaaataccctcatatccagggtatcaattttgacttgcctcatgtcctagaacatgctccttcctatcctggagtggaacacgttggcggagatatgtttgaaaatgtgcctaaaggagacgccatctttatgaagtggatacttcatgattggagtgatgaatactgtctgaagttgttgaagaactgctatgacgcaattcctgatgatggaaaggtgatagttgtggaggcagttcttccaattataccagagacgtcaaatgctgcttggaaggccgtttcccaaacggatgttctgatgatgactcaaaacccgggaggcaaagagcgatctgatcaagaattcatggatttggcaactgcagctggatttagtggcatcagatatgaatgctatgttcgaaccttttggatcatggagttcttcaagtaaacaaccatatactactctgcatgcccctttatgcttttcgtcatttttaattaacaaaacacgctcaggtgtgtattatcataagtttgtttttttttaaataattatctgatgaaatctaattcagtttacaaaaaaaaaaaaaaaaaa

SEQ ID NO: 1804 - protein, 358 aa, Glycine max
  misc_feature: Ceres CLONE ID no. 535888
  misc_feature: Ceres CDNA ID no. 40351044
  misc_feature (27)..(82): Pfam Name: Dimerisation PFAM Desc: Dimerisation domain
  misc_feature (88)..(335): Pfam Name: Methyltransf_2 PFAM Desc: O
MKGEQELEDEESFSRAMLLCSSVVVSMALQSATELGVFDVLQEAGAKLSAKEIASKLSCDNNPEADSMLDRLLALLASHSILNCSLILDHQNLGTFQRLYTITPVARFFARNSDGVSLGPLMALLQDKIFLHSWSELKDSIREGGIPFNRVYGTHAFEYPRLDARFNQVFNTAMINHTTIVMKKVLECYKGFENIKMLVDVGGGLGININLITSKYPHIQGINFDLPHVLEHAPSYPGVEHVGGDMFENVPKGDAIFMKWILHDWSDEYCLKLLKNCYDAIPDDGKVIVVEAVLPIIPETSNAAWKAVSQTDVLMMTQNPGGKERSDQEFMDLATAAGFSGIRYECYVRTFWIMEFFK

SEQ ID NO: 1805 - DNA, 1159 bp, Glycine max
  misc_feature: Ceres CLONE ID no. 536082
  misc_feature: Ceres CDNA ID no. 36705533
  CDS (118)..(1011): REFERENCED BY SEQ ID NO: 1806
gatatatcaactaactttgtgcttcctccgcagaaaaataaaaaaagagtagctagcactagctagctaaacacagtacgagtagtgatcataggcaagcaaaagcatattcataatatggcaaccatggaagacatgaacaacatgagtggtgaaattacacttccaggcttccgattccacccaactgaagaagagcttcttgatttctaccttaaaaacatggttgttggcaagaaacttcgttacgatgtcattggtttcctcaacatctatcagcatgatccatgggacttgcctggtttggcaaaggttggggaaagagagtggtacttcttcgtgccaagggacaaaaagcacggaagcggaggaaggccaaaccgcacaactgaaaaagggttctggaaagccaccggttcagaccggaaaatagtgaccttatctgatccaaagcgcataattgggttaaggaagacactggttttctatcagggaagagctcctaggggatgcaagaccgattgggtcatgaatgagtaccgtttacctgacaattgcaaactacctaaggaaatcgtgttatgcaagatatatcgaaaggcaacttcgttgaaagtgctggagcaaagggcagcactagaggaagagagagagatgaagcaaatggttggttcccctgcttctccttcctccacggacaccatgtcctttagcagcccacaggaagagcaaaacatgcccttgccattgttgcaacatgttcttaagaaagagtctgaaactgaagacatggtagtgcctaaacaagaaaaaataaccaaccaattggtcttaaaagacaccaacaaaagcacttgtggcacatcactacaaatgccctttgggaaggagaagcttccagaccttcagcttcccatgctctcggattggacccaagataccttttgggctcagttgaatagtccatggctccaaaactttactcccaccaatattctaaacttctactgactccactctatatgcatcattactcaaataccatatcaactgcaacttaatcagttattacttatttattttggaatgtatatgcagtgaattagtaattaataacgttttttatattagctcaattaacaaaaaaaaaaaaaaaaaa

SEQ ID NO: 1806 - protein, 294 aa, Glycine max
  misc_feature: Ceres CLONE ID no. 536082
  misc_feature: Ceres CDNA ID no. 36705533
  misc_feature (12)..(141): Pfam Name: NAM PFAM Desc: No apical meristem
  misc_feature: Homolog of GI Number: 62546193 NR Desc: NAC6 protein
  misc_feature: Homolog of GI Number: 2264373 NR Desc: NAM
  misc_feature: Homolog of GI Number: 20857250 NR Desc: At2g17040/At2g17040
  misc_feature: Homolog of GI Number: 54291129 NR Desc: putative NAC transcription factor
  misc_feature: Homolog of GI Number: 20197337 NR Desc: NAM
  misc_feature: Homolog of GI Number: 24030186 NR Desc: putative NAM
  misc_feature: Homolog of GI Number: 56785253 NR Desc: putative NAC transcription factor
  misc_feature: Homolog of GI Number: 52352767 NR Desc: NAC transcription factor
  misc_feature: Homolog of GI Number: 25410986 NR Desc: NAM
  misc_feature: Homolog of GI Number: 53982662 NR Desc: putative no apical meristem
MEDMNNMSGEITLPGFRFHPTEEELLDFYLKNMVVGKKLRYDVIGFLNIYQHDPWDLPGLAKVGEREWYFFVPRDKKHGSGGRPNRTTEKGFWKATGSDRKIVTLSDPKRIIGLRKTLVFYQGRAPRGCKTDWVMNEYRLPDNCKLPKEIVLCKIYRKATSLKVLEQRAALEEEREMKQMVGSPASPSSTDTMSFSSPQEEQNMPLPLLQHVLKKESETEDMVVPKQEKITNQLVLKDTNKSTCGTSLQMPFGKEKLPDLQLPMLSDWTQDTFWAQLNSPWLQNFTPTNILNFY

SEQ ID NO: 1807 - DNA, 1667 bp, Glycine max
  misc_feature: Ceres CLONE ID no. 536302
  misc_feature: Ceres CDNA ID no. 40041251
  CDS (48)..(1448): REFERENCED BY SEQ ID NO: 1808
ggacgatcgaaatctggtaagaggctttaatcaaccaacgaacaacgatgtcgtggtttgcaaggacaatcgcaaactcactcagactcgacgacgacgacgacgaccacaatggcagtgacctaaaatcccctccgaagaaacccgattccgtatccacccccagtcctaccgcgcgcggcgtcaaagaggatttctccgagctcaccaaatccttttcccgccagctctggggcgtcgcctccttcctcgccccgccgcccgatcccctatctgaaaatcccgtcgccgatcccaatcccattcccaccgacgaagaagaagaagacgtaattgcaggtatccgaaacgatttcgcggagattagtggcaagttcaagaacgggatcttcaaaatctccggtaataagactgtatccgaattcaccaagatcgcttccagtttccttcagcttggatccgaagaggaacacgatctcgacggtgtcctcggagttacagaggatgtggttgccttcgccagaagcgtagctttgcatccagaaacttggctcgattttccccttcccgatgatgaggattctgatgattttgatttgtccgatgcacaacaagaacatgctctagctgttgaacatctggcaccaagcttagctgctcttagaatggagctgtgccccggatacatgagtgatggtaacttttggaagatatactttgtactcgtgcaccctagacttagcaaaactgatgctgctattttatccactccacaaataatggaagctagagcgatgttgactcaggctttagacaaaagaagtaaggaaaagaaagaatctgacttatctgcaggagggaatattccctcaaaagaggaggaacagcatctctttgtgccaagcaatgctcaacttgaaccagtacctctccagacatctgctgctgaagctgccccatctgtggttgtttctgatgttgagatggagaaacatgttgttccggagattattgacaagtctgtggttaaagaagcaccagtaatttcatctgcagaacaatcatcatctggttcaaccaatagatttttggatgaaacctatgacgatgatgctgatgattggttgaaagaagaggatacttctgaaatggttggtcccagtggaacttcagttcacaccgggaatgacgaggatgtgtcattcagtgatcttgaggaggatgatggtgatgtacatgaaagttataaaaaaactagatcaggctctgattcttcaacaaaagactctcgagattgggttcagttaggtagaagttcgcctaactctgataaggatataaactctgttgaaggcaaacatgttggctcccagcattcaagtgctcgtaattctgtgaccaaggattccaatgattggcttaatgttgatgatattgatgtaatatgataatgccttggaatatgtcctagaggtaagtttttttattattatgattctcttatattttgtgaatatctgcatatagtctgtactctacgattgacattctgaagaatgtgtttctgtaaataaaaccagtctccactgggcattgtgctatgtatggttatttattgcaccgtacataaactaaatcttctatttgataaaaaaaaaaaaaaaaaa

SEQ ID NO: 1808 - protein, 466 aa, Glycine max
  misc_feature: Ceres CLONE ID no. 536302
  misc_feature: Ceres CDNA ID no. 40041251
  misc_feature (171)..(237): Pfam Name: BSD PFAM Desc: BSD domain
  misc_feature: Homolog of GI Number: 2827699 NR Desc: predicted protein
  misc_feature: Homolog of GI Number: 50918433 NR Desc: putative BSD domain containing protein
  misc_feature: Homolog of GI Number: 53792440 NR Desc: putative BSD protein
  misc_feature: Homolog of GI Number: 34909848 NR Desc: OSJNBb0053G03.5
  misc_feature: Homolog of GI Number: 77551488 NR Desc: BSD domain
MSWFARTIANSLRLDDDDDDHNGSDLKSPPKKPDSVSTPSPTARGVKEDFSELTKSFSRQLWGVASFLAPPPDPLSENPVADPNPIPTDEEEEDVIAGIRNDFAEISGKFKNGIFKISGNKTVSEFTKIASSFLQLGSEEEHDLDGVLGVTEDVVAFARSVALHPETWLDFPLPDDEDSDDFDLSDAQQEHALAVEHLAPSLAALRMELCPGYMSDGNFWKIYFVLVHPRLSKTDAAILSTPQIMEARAMLTQALDKRSKEKKESDLSAGGNIPSKEEEQHLFVPSNAQLEPVPLQTSAAEAAPSVVVSDVEMEKHVVPEIIDKSVVKEAPVISSAEQSSSGSTNRFLDETYDDDADDWLKEEDTSEMVGPSGTSVHTGNDEDVSFSDLEEDDGDVHESYKKTRSGSDSSTKDSRDWVQLGRSSPNSDKDINSVEGKHVGSQHSSARNSVTKDSNDWLNVDDIDVI

SEQ ID NO: 1809 - DNA, 1138 bp, Glycine max
  misc_feature: Ceres CLONE ID no. 536819
  misc_feature: Ceres CDNA ID no. 40351045
  CDS (86)..(901): REFERENCED BY SEQ ID NO: 1810
gatacggcaacctcctttctctgtgactctgagtatcgtatcgttttattattatttttaattctctcttatcaggtcattgaatatgtctccttcgttggatcttcctcccaagggtggcttcagttttgatctatgccgaagaaacgcaatgcttcaaaacaagggcctcaaagccccaacctttctcaaaactggcaccactattgtcggtttagttttccaggatggtgtcattcttggtgctgatactagggcaactgaaggacctatagtggctgataaaaactgtgagaaaattcattatatggcacccaacatatattgctgtggagcaggcacagctgctgatacagaggctgtaacagacatggttagctcacagctgcaattacatcgctaccatactggtcgagaatcaagagttgttacagcgctgacccttcttaagaaacaccttttcaattatcaagggcatgtctcagctgctttggtgcttggtggggttgatatcactggacctcatttgcatactatttatcctcatgggtcaactgacaccctcccatttgctacaatgggatcaggttcacttgctgcaatgtctgtatttgagtccaagtacaaggaaagtttgagtagggatgaaggcattaagctagttgttgaggcgatatgcgctggaatatttaatgacctaggaagtggaagtaatgttgacgtttgtgtgataaccaagggacacaaggaatatctcaggaaccaccttctaccaaatcctcgtacctatgtcaatccaaaaggctttgatttccccaaaaagacagaggtcctcttaacaaagattaccccgttgaaggagaaggtggaagtgattgaaggagatgctatggaagagtaacaatcgttccaaaaaatatttggtgtttgagtataaaacttgattgtgcaatggctgtgatatttagttattgtactttcacaactttggctttcattaccaaaaattatgtgaatttaattagattgttgcaagttatttcctcaaatttcttcatttggttggattttggctagaaaatgcttaacaaaacattaaatatatacaatttgattgatgaaaaaaaaaaaaaaaaaa

SEQ ID NO: 1810 - protein, 271 aa, Glycine max
  misc_feature: Ceres CLONE ID no. 536819
  misc_feature: Ceres CDNA ID no. 40351045
  misc_feature (35)..(216): Pfam Name: Proteasome PFAM Desc: Proteasome A
MSPSLDLPPKGGFSFDLCRRNAMLQNKGLKAPTFLKTGTTIVGLVFQDGVILGADTRATEGPIVADKNCEKIHYMAPNIYCCGAGTAADTEAVTDMVSSQLQLHRYHTGRESRVVTALTLLKKHLFNYQGHVSAALVLGGVDITGPHLHTIYPHGSTDTLPFATMGSGSLAAMSVFESKYKESLSRDEGIKLVVEAICAGIFNDLGSGSNVDVCVITKGHKEYLRNHLLPNPRTYVNPKGFDFPKKTEVLLTKITPLKEKVEVIEGDAMEE

SEQ ID NO: 1811 - DNA, 1408 bp, Glycine max
  misc_feature: Ceres CLONE ID no. 537224
  misc_feature: Ceres CDNA ID no. 29191886
  CDS (434)..(1165): REFERENCED BY SEQ ID NO: 1812
gaataaagctgtgaatgatgactcttccttcattgtcttctgtattcttcttcttcttctcttactctctctgtaacaacaccaccatcaacaaccctttcaagccggcctaaaccccattacccaaaatctgtttttttattttttttcctgcaacactctttattggatcatcttgtatttcattcctcctttacaatttcctttcaaaaaaaatttaaaaaaatattaaaaagtgctcttttttgtgaattttgacccatttggccaccgacagatttcgatcttctccgtgccaaagttgtaatcttttcgacttttggcgaggtgggtcgatccgatttcgctcgaatgattgttggtttgatctgaaaaaggaaaaggaaaaaaaaaattgggttatttcggattcaagattttgtccttttttgaaatggtctatttccatagctcaatctctctctgcaagtccgttgatcaatcatcttccatggcgaattcaatatgttctgctgatttcggttcgaaatcgaggcaaatcaatcaccttcagaagaatcggagaacccctagttcttcatcgtcatcgaattctcttcagataccaccctgtgatcgatctcgatcggctatggttgatgttgtgatgttcattgctgttgtttgtgcctgtggctttttgttcttcccttatgtagagtttttggtgacaaagtgttacgaggttattaaggttgttgtgtttttgattaaggaggaggtttctgtggcaccttggatctatgtttccatagggttgagtgttgtgtttgctgcattggccacgtggggtgtggtggcttgcaccactaggaagtgtgggaatcccaattgcaagggtctgaggaaggctgctgagtttgacattcagttggagactgaggattgtgtgaagaattcggcttcttcgtcgtcgaatgtggcaaaagatggtgctggtggagtgaagaaggggctctttgaattgcctcgtgatcaccatagggagctggaggctgagctcaagaagatggcaccaccaaatggaagggctgtgctcgtgctgcgggcgaggtgtggatgttctgttggtaggttagaggttccgggaccaaggaagcatcttcgaaagatcaacaagaagtagcagctatagtgaccgagacgagtaggacaagggacaggagaggacacccttttgatttattggatggaattaaggaaagggatgataattggatcaaatagaaatttgtacttgttgccctatgttcattgatctagtaggaaattagaatgtctttaaataagccccttggcaataagttgtaaggaactatgggtcatacacagtttagttggttatacctggaaaaaaaaaaaaaaaaaa

SEQ ID NO: 1812 - protein, 243 aa, Glycine max
  misc_feature: Ceres CLONE ID no. 537224
  misc_feature: Ceres CDNA ID no. 29191886
  misc_feature: Homolog of GI Number: 56785060 NR Desc: pentatricopeptide
  misc_feature: Homolog of GI Number: 15239636 NR Desc: pentatricopeptide
  misc_feature: Useful for decreasing plant size
MVYFHSSISLCKSVDQSSSMANSICSADFGSKSRQINHLQKNRRTPSSSSSSNSLQIPPCDRSRSAMVDVVMFIAVVCACGFLFFPYVEFLVTKCYEVIKVVVFLIKEEVSVAPWIYVSIGLSVVFAALATWGVVACTTRKCGNPNCKGLRKAAEFDIQLETEDCVKNSASSSSNVAKDGAGGVKKGLFELPRDHHRELEAELKKMAPPNGRAVLVLRARCGCSVGRLEVPGPRKHLRKINKK

SEQ ID NO: 1813 - DNA, 1130 bp, Glycine max
  misc_feature: Ceres CLONE ID no. 537600
  misc_feature: Ceres CDNA ID no. 35383198
  CDS (74)..(802): REFERENCED BY SEQ ID NO: 1814
gatcgtgtgtttttctccatcttaaactgactgaaattgagttctccggtcgagcgttcttccacaaaccctaatgtcgtttcttgaagaatttcaagccaatttggattcactgccagttattcttcagaagaagtatgcgttgttgcgtgacctagataagagcttacatgatattcaaaggcaaaatgaacagcgttgtgaacaagaaattgaagatattaggcgaggagttaggtctggaaacatcacgcctgatacttcagtaattagattctctgatgaagcgcttgatgagcaaaatcatagtatcagggttgctgatgaaaaagtagccttggctgtccaggcatatgatttggtagatacacacatacaacatcttgatcagtatctgaaaaggtttggtgaggagattcggcgtgaaagagaaaatgctgcaataactggagtgcctgcttcaggttctgagggtaatacaaaatctggaaggggtaatgaaagtggtactggtagaggagggcgaaaaaaaacacgccaaacgactgtcacacccgcagcaacagaagcacaagccactgcaaacccaactggcatggatttagagttaccagttgatccaaatgaacccacatactgcttttgtaatcaagttagctatggagcgatggttgcatgtgataaccccaattgtaaaatagagtggtttcattttggttgtgttggcctgaaagaacaaccaaaaggaaaatggtactgttcgaattgtgcagcaaccaaaaatcggcgtagaggcaaatgaggctggcagaagaataagaataatgttaaaaatgattgaatgtgtatataaattttaatatctctagaagggagttatttatattgggcctagaagctttgttttcgtagctgttattaatcgggaaattatgaaagtacaaatttccaatgacttatagtggctgtgtttgtacattccgttggttttgtacacatttgaaagctatggttcttttttattgtagatctgggttgaaaaggcccggaattattgtgtgtatgtgactatgtgtgtaccatacaatgaagtttctgcactaattatagttaaaaaaaaaaaaaaaaaa

SEQ ID NO: 1814 - protein, 242 aa, Glycine max
  misc_feature: Ceres CLONE ID no. 537600
  misc_feature: Ceres CDNA ID no. 35383198
  misc_feature (188)..(235): Pfam Name: PHD PFAM Desc: PHD
  misc_feature: Homolog of GI Number: 28393138 NR Desc: putative PHD
  misc_feature: Homolog of GI Number: 55236213 NR Desc: ENSANGP00000011912
  misc_feature: Homolog of GI Number: 57012960 NR Desc: Inhibitor of growth protein 5
  misc_feature: Homolog of GI Number: 37362232 NR Desc: inhibitor of growth family
  misc_feature: Homolog of GI Number: 76676640 NR Desc:  similar to inhibitor of growth family
  misc_feature: Homolog of GI Number: 37682153 NR Desc: inhibitor of growth family
  misc_feature: Homolog of GI Number: 73990661 NR Desc:  similar to inhibitor of growth family
  misc_feature: Homolog of GI Number: 66558708 NR Desc:  similar to ENSANGP00000011912
MSFLEEFQANLDSLPVILQKKYALLRDLDKSLHDIQRQNEQRCEQEIEDIRRGVRSGNITPDTSVIRFSDEALDEQNHSIRVADEKVALAVQAYDLVDTHIQHLDQYLKRFGEEIRRERENAAITGVPASGSEGNTKSGRGNESGTGRGGRKKTRQTTVTPAATEAQATANPTGMDLELPVDPNEPTYCFCNQVSYGAMVACDNPNCKIEWFHFGCVGLKEQPKGKWYCSNCAATKNRRRGK

SEQ ID NO: 1815 - DNA, 1124 bp, Glycine max
  misc_feature: Ceres CLONE ID no. 537684
  misc_feature: Ceres CDNA ID no. 40041252
  CDS (273)..(917): REFERENCED BY SEQ ID NO: 1816
atctaataaatactcccttacttgtgttcggagcactagaaaagaaaaccataattaagatgagaacaagcaaccacttgatcggtcttctgaacttcctaacgttcctgctgtcgattccgatcctaggtggcggaatatggctgagcagcagggccaacaacaccgactgcctcaagttcctgcagtggccgctcatcatcatcggagtcagcatcatggtcgtgtccctcgcggggttcgccggcgcgtgctaccgcaacaccttcctcatgcgcctctacctcgtcgtcatgttcctcgtcatcgccgtcctcatcgggttcatcatattcgcctacgttgtcactgacaaaggctccggtcggagggtcatgaaccgcgcgtacttggagtactacctcgaggactattcggggtggttggaggagcgcgtggcgagtgagagctactggggaaagattgcttcgtgtattagggattctaaagtgtgtggtaggatggggagaaccgttaatgggatgccccaaactcctgatatgttctacctcacccacctcacgcctattcagtctggttgctgcaagcccccaacagattgtggatatgtgtatcagaatgagacagtgtggatcccaggatcaggattgatgggaaccaacgcagattgcacaaggtggagcaatgaccaagagcagctttgctatgcctgtgattcttgcaaggctggtgtgctggcaagtctcaagaagagttggaggaaggtctcagtgatcaacattgttgttatgatcatccttgtgattgtttacataattgcttatgcagcatatagaaacaaccgcaagatggataacgatgagccctatggtgaagcaaggatgacaaaggcacaacctagtgcttttcatctttagtggcactatttggatgccaaaacgttaatttcagctacttgtcttatgattttggacctttttctcccttgtaactaggttgctctcatggttttgtatcaaacacccgtgacgtgttttaatcttgaaaggctgaatgtatttaattattattattaaaaaaaaaaaaaaaaaaaaaaaaaaaaaaagaaaaaaaaaaaaaaaaaa

SEQ ID NO: 1816 - protein, 285 aa, Glycine max
  misc_feature: Ceres CLONE ID no. 537684
  misc_feature: Ceres CDNA ID no. 40041252
  misc_feature: null
  misc_feature: Useful for making plants with modulated nitrogen use efficiency
  misc_feature (3)..(247): Pfam Name: Tetraspannin PFAM Desc: Tetraspanin family
  misc_feature: Homolog of GI Number: 47900743 NR Desc: putative senescence
  misc_feature: Homolog of GI Number: 3551954 NR Desc: senescence
  misc_feature: Homolog of GI Number: 51535042 NR Desc: putative senescence
  misc_feature: Homolog of GI Number: 54208706 NR Desc: senescence
  misc_feature: Homolog of GI Number: 51968454 NR Desc: similar to senescence
  misc_feature: Homolog of GI Number: 19699320 NR Desc: AT3g12090/T21B14_110
  misc_feature: Homolog of GI Number: 50912371 NR Desc: putative senescence
  misc_feature: Homolog of GI Number: 77554466 NR Desc: Tetraspanin family
  misc_feature: Homolog of GI Number: 62733591 NR Desc: Tetraspanin family
  misc_feature: Useful for increasing chlorophyll and photosynthetic capacity
  misc_feature: Useful for making ornamental plants with modified leaves
  misc_feature: Useful for making plants with altered leaf shape eg curled leaves
MRTSNHLIGLLNFLTFLLSIPILGGGIWLSSRANNTDCLKFLQWPLIIIGVSIMVVSLAGFAGACYRNTFLMRLYLVVMFLVIAVLIGFIIFAYVVTDKGSGRRVMNRAYLEYYLEDYSGWLEERVASESYWGKIASCIRDSKVCGRMGRTVNGMPQTPDMFYLTHLTPIQSGCCKPPTDCGYVYQNETVWIPGSGLMGTNADCTRWSNDQEQLCYACDSCKAGVLASLKKSWRKVSVINIVVMIILVIVYIIAYAAYRNNRKMDNDEPYGEARMTKAQPSAFHL

SEQ ID NO: 1817 - DNA, 1306 bp, Glycine max
  misc_feature: Ceres CLONE ID no. 537798
  misc_feature: Ceres CDNA ID no. 25445728
  CDS (513)..(1190): REFERENCED BY SEQ ID NO: 1818
aaattgcaattgatcttatgatacgaattgatagctagctgaatcgcatcaaatcatatgattaaaatcatgaatcgtaagattttatgctgaatagttaagttgcaagccgttgacaattcaaaccttttgtttatatgtactggtggttaaaatcagtagattttttagatatgcttctcaatatttgccttttctctatctacactgacacagtatggattagaatgttaattttgtcagaaccttccatgtttttggcagtgctagtatttgctggagtcctgatggaaaagcttatgcaatagagaaattgtatttgaagttgtacaattttgtgtacaacaaagtgagagatggaaagagaagaaagaagagtgtgagataagatggtcgatgtaatatagagggaaaaaatagttatatgaatgatataactgtacatagtattatggaattttagttgtattagtagtttgcatcttcaagcttgcaattcatgtatattgcaaatgattgatagcagaaatctccccctgcccaatcttttgcaggcgagaaaacttgaagctcagttggatgagcagatgaattcttatcgtaaattggtttctgctaatgtttctacaaaagctgacattgcagagagtgatctagggtcttggattgagcgtttactaaagcaactccaacaagtaaacacacagatgcaagcttgggtatcatctggtggttcagaaatggtttctcatacattgactagacaccaagaaattcttcaagatctcacccaggagttttatcgtcttcactcaagtgttaaagctaagcaagaacatgcttcactgctagaagattttaaagaatttgatcgaacaagattagatttggaacaaggtgtagactctgaacagcatgcactcctaaaagagcgctcatctatcagccgaagtgcaggacatatggacaatgtaatttcacaagcacaagcatcactaggagcacttgtcttccaacgttcgacatttggcggtatcaattcaaagcttggcaatgtgagcagtcgcctcccaacggtaaataacatactttcagcaataaagagaaaaaagtcaatggagaccattatactttcccttgtttctgccgtatgcacatttctcattttcatgtactggctatccaagtgaagctgttgtttgtgttgggtgctcaacttttgtaaactcttgtatgttccttgtctattggccttggcagctcgtgccatgctgaaacacattttgcaagtaaaaaaaaaaaaaaa

SEQ ID NO: 1818 - protein, 225 aa, Glycine max
  misc_feature: Ceres CLONE ID no. 537798
  misc_feature: Ceres CDNA ID no. 25445728
  misc_feature (52)..(203): Pfam Name: V PFAM Desc: Vesicle transport v
  misc_feature: Homolog of GI Number: 50946159 NR Desc: putative Golgi SNARE protein
  misc_feature: Homolog of GI Number: 50253013 NR Desc: putative golgi SNAP receptor complex member 1
  misc_feature: Homolog of GI Number: 50904959 NR Desc: putative 28 kDa Golgi SNARE protein
  misc_feature: Homolog of GI Number: 2583133 NR Desc: putative cis
  misc_feature: Homolog of GI Number: 55645129 NR Desc:  similar to 28 kDa Golgi SNARE protein
  misc_feature: Homolog of GI Number: 38112313 NR Desc: golgi SNAP receptor complex member 1
  misc_feature: Homolog of GI Number: 4758456 NR Desc: golgi SNAP receptor complex member 1 isoform 1
  misc_feature: Homolog of GI Number: 55770858 NR Desc: golgi SNAP receptor complex member 1 isoform 2
  misc_feature: Homolog of GI Number: 55770856 NR Desc: golgi SNAP receptor complex member 1 isoform 3
  misc_feature: Homolog of GI Number: 1912453 NR Desc: v
MIDSRNLPLPNLLQARKLEAQLDEQMNSYRKLVSANVSTKADIAESDLGSWIERLLKQLQQVNTQMQAWVSSGGSEMVSHTLTRHQEILQDLTQEFYRLHSSVKAKQEHASLLEDFKEFDRTRLDLEQGVDSEQHALLKERSSISRSAGHMDNVISQAQASLGALVFQRSTFGGINSKLGNVSSRLPTVNNILSAIKRKKSMETIILSLVSAVCTFLIFMYWLSK

SEQ ID NO: 1819 - DNA, 1263 bp, Glycine max
  misc_feature: Ceres CLONE ID no. 538586
  misc_feature: Ceres CDNA ID no. 40351046
  CDS (37)..(1014): REFERENCED BY SEQ ID NO: 1820
gaagcaaacaagagcatatggatctgtggagcctaaatgcctaaaccatgctgctcaatgcacaagcattactataagacaaacctcgccaaccccggaccggacgccaaccggtccaaccaaacatcacaccggttcgaaccggccttttccttccttatatcaatcactctcctacatccccccacttcatcaagctccaattatcaactctttcaaaagggagaagaaaaggaaaggaaacaaaacgcacaaaggattattatagcaatggcagaacaaaaccaaaaccagacaactgaagctggaaggcaccaagaggttggccacaagagccttctccagagtgatgctctttaccagtatattctggagaccagtgtctacccaagagaacctgaatccatgaaagaactgagagagttgacagcaaaacacccatggaacatcatgacaacctctgcagacgaagggcaattcttgaacatgctccttaagctcatcaatgccaagaacaccatggaaattggtgtctacactggatattcacttcttgccaccgctctcgctcttcctgaagatggaaagatcttggccatggatattaacagggagaattatgaattgggtttgccagtaattaagaaagctggtgttgaccacaaaattgaattcagagaaggtcctgctctcccagttcttgatgaaatggttaaagatgagaagaaccatgggagctatgacttcatctttgtggacgcagacaaggacaactacctcaactaccacaagaggttgatagagcttgtcaaagttgggggagtgatcgggtacgacaacaccctatggaacggctctgtggtggcacccccagatgctcctctcaggaagtacgttagatactacagggacttcgtgctcgagctcaacaaggcactcgctgtggaccccaggatcgagatttgcatgctcccggttggtgatggaatcactatatgccgtcggatcaagtgattctgattttctgataatcacacaatcgtggaccaagaccaccgttgcttcttctgcaccctagtgatgattggtcatcattgagtggcacctgctaatgcatttaaaagcaatcgatattttccttttatttttttttcttcaaaatatttgtgtttgtacttttcttttctctattattcatgtggaaaacggtggacaattaattatatgcaaatgactttttttctcaaaaaaaaaaaaaaaaaa

SEQ ID NO: 1820 - protein, 247 aa, Glycine max
  misc_feature: Ceres CLONE ID no. 538586
  misc_feature: Ceres CDNA ID no. 40351046
  misc_feature: null
  misc_feature: Useful for making plants with altered Lignin content
  misc_feature: Useful for making plants with altered cell wall composition
  misc_feature: Useful for making plants with altered cell wall content and/or composition
  misc_feature (34)..(246): Pfam Name: Methyltransf_3 PFAM Desc: O
MAEQNQNQTTEAGRHQEVGHKSLLQSDALYQYILETSVYPREPESMKELRELTAKHPWNIMTTSADEGQFLNMLLKLINAKNTMEIGVYTGYSLLATALALPEDGKILAMDINRENYELGLPVIKKAGVDHKIEFREGPALPVLDEMVKDEKNHGSYDFIFVDADKDNYLNYHKRLIELVKVGGVIGYDNTLWNGSVVAPPDAPLRKYVRYYRDFVLELNKALAVDPRIEICMLPVGDGITICRRIK

SEQ ID NO: 1821 - DNA, 1837 bp, Glycine max
  misc_feature: Ceres CLONE ID no. 539084
  misc_feature: Ceres CDNA ID no. 35383199
  CDS (223)..(1191): REFERENCED BY SEQ ID NO: 1822
gatatcctctctctctctctctctctctgaacaagacccagccagccgttagggaaatcaagcacagctcaatcattgaatcttagcataaacacatacagaagaaggaaaagtggcaccctgggaggagctgatattgaaggagggtttggaagaaaaagaattttgttttgagatatatatacatatatgtgcaagtgcataggaaattaacacaaaaagatgacatggtgcaatgactctgatgaggatagggttattgaatcaacgacgccaacaataactattactcctaacactgatggcataaagctcaccgaagaaattagaaccataacatgcccctcgtgcggccataacattgaattcaaagatcagggtggaatccatgacttgccggggttaccagctggagtgaagtttgacccaaatgaccaagaaatattagaacatttggaggcaaaagtggcgtctgatgcatgcaagcttcatccccttattgacgagttcataccaacgcttgaaggcgaaaatgggatctgttatacacacccagaaaagctaccaggtgttagcaaagatggacagatccgccacttctttcacaggccctcaaaagcatacacaactggaacgaggaaaagaagaaaagttcacactgatgatgaaggaagtgaaacaagatggcacaaaacgggaaaaactagagcagtttttgcagcagccggtggtgcagtaaaaggttttaagaaaatactagtactctacaccaactatggaagacaaaagaagcctgagaaaactaattgggtgatgcatcaataccatcttggcagtactgaagaagagaaagatggagaattagttgtttcaaaggtcttctatcagacacaacctagacaatgtggcaatcccattataataaaggattcatacgaaaaaatgttgaatgatggaagtggccaagacaacattaatatatcattaatacctaaaactactgcaactcttttggattgctacactgctccttacatagattatgatcacgtccatgtgagtcataacagggaaagttcctcacaactaattattcccagctcggttgttcaagttgatggctcttatattcgcttaacaatggatgcaaagaaagcaagatttgaaagtaacactgggaagagattctaggcagagcagcaatgacaaagacttgcatataaatgttctccatattgtttcctttactaattgatcagtacgtaacattatttatatgtgggattagaatgaaggaatttcaagggttggaaaaataagttggcttccttattaagatcaatatggtgcaggcatggtggacttaatttcccataattgaccctggttgaagttgagagacaagcaagttaggtatatatatttgcggtactgtagtttgattttaattttagggtacatgtatattcgtaaaatgtgcttatagatattacaatagtagcagggatatcgtttattgactactcttcagaactatagtcagtctatatactgtattttgtctagaattgaattttgcaccccctcaatcctgaaaaaaatgctgagatgtttcattattattatattatgcgtgtcagctacttaatttgctgggaagtttgtcccttgtagttttcccccctgttttctttgaaaggtcgattgtaaaataaggtgaagacagtagatttatcttatttatggttctaaattgcggttccttgtagtttttctccctctttccaattagtgatgcggattgcagctactatgactcaaaaaaaaaaaaaaaaaa

SEQ ID NO: 1822 - protein, 322 aa, Glycine max
  misc_feature: Ceres CLONE ID no. 539084
  misc_feature: Ceres CDNA ID no. 35383199
  misc_feature: Useful for making plants with modulated growth and phenotype characteristics
  misc_feature: The sequence is a functional homolog of  SEQ ID NO 210 in the  10/666,642 US patent application
  misc_feature (61)..(204): Pfam Name: NAM PFAM Desc: No apical meristem
  misc_feature: Homolog of GI Number: 56202085 NR Desc: no apical meristem
  misc_feature: Homolog of GI Number: 18396807 NR Desc: no apical meristem
  misc_feature: Homolog of GI Number: 21554371 NR Desc: NAM protein
  misc_feature: Homolog of GI Number: 34911014 NR Desc: OJ1125_C04.12
  misc_feature: Homolog of GI Number: 6560767 NR Desc: F3M18.9
  misc_feature: Homolog of GI Number: 34906416 NR Desc: P0710E05.22
  misc_feature: Homolog of GI Number: 50910053 NR Desc: no apical meristem
  misc_feature: Homolog of GI Number: 12751304 NR Desc: CUC2
  misc_feature: Homolog of GI Number: 50925141 NR Desc: OSJNBa0044K18.6
  misc_feature: Homolog of GI Number: 6223650 NR Desc: NAM
MTWCNDSDEDRVIESTTPTITITPNTDGIKLTEEIRTITCPSCGHNIEFKDQGGIHDLPGLPAGVKFDPNDQEILEHLEAKVASDACKLHPLIDEFIPTLEGENGICYTHPEKLPGVSKDGQIRHFFHRPSKAYTTGTRKRRKVHTDDEGSETRWHKTGKTRAVFAAAGGAVKGFKKILVLYTNYGRQKKPEKTNWVMHQYHLGSTEEEKDGELVVSKVFYQTQPRQCGNPIIIKDSYEKMLNDGSGQDNINISLIPKTTATLLDCYTAPYIDYDHVHVSHNRESSSQLIIPSSVVQVDGSYIRLTMDAKKARFESNTGKRF

SEQ ID NO: 1823 - DNA, 1200 bp, Glycine max
  misc_feature: Ceres CLONE ID no. 540134
  misc_feature: Ceres CDNA ID no. 40351047
  CDS (2)..(727): REFERENCED BY SEQ ID NO: 1824
ttacttggaagatgggaagcagggacgccttcattgtcttgtttgcggcactggcactggcaggtctgcaaaagattttccagatatgcatgctctcattatgcacacatacaacccagataatgccgattcacgtattgatcatttgggattacacaaagctctgtgtgttttaatgcgttggaactactcaaagcctcctgataactcaaaggcatatcagtttttacctgctgatgaagcagcagcaaatcaggatgatctgatcatgtggccacctttggtgatcattcataacacaaataccggaaaaaatagagatggtcgtatggagggtttgggaaacaaaatgatggataataaaattagagagcttggatttgtgggtggcaaatcaaagtcattatacggaagagatggtcatttgggcataacactggttaaatttgctggggaccaatcaggctttaaggaggccattcgacttgctgaacactttgagaaggaaaaccatggacgcaaggattgggaccgtgtgcagtcacaaacattaggaaaggatgatgagaataatgcaaaccttgtgaaggtggatgagaaaaaagtagataaaaggagggttttgtatggctatcttgggactgcttttgatcttgacaaagttgattttgacacaaggaagaaggctttcatagagagcaggagagaatacaaaccacccatgtagtttttggactatacatgggaatggctatgtaaaatggaatacatggaaagtttttccagttgcattataatcccgattcctgaagatgataaaaagcttttatgtattgtgctgaccatttcatgtacaataggaggcagcattgccatcatttttattttattccacataatttatgctgaattttcctgccatagtaatatttaggcacattaagaagatttgtttgtctttccaccatctgacaacctggaacgcactactcacttaaagtcaatgactggaatctaaagtcttggtcttgtcctcgcttttctccatgttgtctgggaactgtttgtttacagtttagattttttcaattacaatggtggggcatggaaatttgtacgcatgatttcctgccaactctgtaaatccctcattagtagccctcctagtagttgattgtttgtaaaaaaaaaaaaaaaaaa

SEQ ID NO: 1824 - protein, 208 aa, Glycine max
  misc_feature: Ceres CLONE ID no. 540134
  misc_feature: Ceres CDNA ID no. 40351047
  misc_feature (52)..(162): Pfam Name: XS PFAM Desc: XS domain
MHTYNPDNADSRIDHLGLHKALCVLMRWNYSKPPDNSKAYQFLPADEAAANQDDLIMWPPLVIIHNTNTGKNRDGRMEGLGNKMMDNKIRELGFVGGKSKSLYGRDGHLGITLVKFAGDQSGFKEAIRLAEHFEKENHGRKDWDRVQSQTLGKDDENNANLVKVDEKKVDKRRVLYGYLGTAFDLDKVDFDTRKKAFIESRREYKPPM

SEQ ID NO: 1825 - DNA, 1363 bp, Glycine max
  misc_feature: Ceres CLONE ID no. 540373
  misc_feature: Ceres CDNA ID no. 36581830
  CDS (137)..(964): REFERENCED BY SEQ ID NO: 1826
gaagttgaaggggaaagagagaaaagaactagctagctggagtctgagaactctagcatgtactagtactactcctacattcctccatcttcctttgtactattttttttttaaccataaaagcaagagcacaaagatggtgagagctccttgttgtgaaaagatgggtttgaagaagggtccttgggctcccgaggaagatcaaatcctcacatcttacattgacaaacatggtcatggcaattggcgtgccctcccaaagcaagcaggcttgttaaggtgtgggaaaagctgtagactccgctggattaactatttgaggcctgatattaaaagagggaatttcacaattgaagaagaagaaactatcattaagctgcatgacatgctggggaacaggtggtcagcaattgcagccaaattgccaggaagaactgacaatgagattaaaaatgtttggcacaccaatttgaagaagaggctgctgaaatcagaccagtccaagtccaaaccaagttccaaaagagccattaagccaaaaatcgaacgttctgattcaaattccagcatcataactcaatcagaacctgacaattttaatttcagagaaatggacacaataacatcatcagcatgcactacttctagtagtgatttttcatcggtcacggttggtgacagcaaaaatatcaagagtgaagacacagagtctacggaaacaatgcctgtgattgatgagagcttttggtcagaagctgcaattgatgatgaaacccccaccatgtcatcatctcagtctttgacaatctcaaatgagatgcgacttcaatacccttttgctaactatgaggaaactttccagcagggtcatcatgcttatgattcaaactttgatgatggcatggatttctggtatgacatatttaccaggaccaatgattcaatagaattgctagagttctgaagttttcatgtgacacgttgaacgagggcattattgaatttggcagatagagtagtttaaatggcatggtataacttgaatttgaccgttacaacaaaagggtacgataatttctggtgtggggacagcattatcaccagctgcaagatctagaggcataatccattgacaaagaaactagccagggtaatgcgaaaggctaatgaatgatatgtaatgtacacatgtaatcaagtagtgaaacactgactttctttctttttagtggaaaacagcaatgctctaacatttttgtattttacaaattagagtttaattaggctagagttacttgattgtaatatcaataaatgatgtattatgtgaattattcaaaaaaagaaaaaaaaaaaaaaaaaa

SEQ ID NO: 1826 - protein, 275 aa, Glycine max
  misc_feature: Ceres CLONE ID no. 540373
  misc_feature: Ceres CDNA ID no. 36581830
  misc_feature: null
  misc_feature: Useful for making plants with altered Lignin content
  misc_feature: Useful for making plants with altered alkaloid content
  misc_feature (14)..(61): Pfam Name: Myb_DNA PFAM Desc: Myb
  misc_feature: Homolog of GI Number: 6492385 NR Desc: GmMYB29A2
  misc_feature: Homolog of GI Number: 5139814 NR Desc: GmMYB29B2
  misc_feature: Homolog of GI Number: 5139804 NR Desc: GmMYB29A1
  misc_feature: Homolog of GI Number: 5139806 NR Desc: GmMYB29A2
  misc_feature: Homolog of GI Number: 6552361 NR Desc: myb
  misc_feature: Homolog of GI Number: 1732247 NR Desc: transcription factor Myb1
  misc_feature: Homolog of GI Number: 20561 NR Desc: protein 2
  misc_feature: Homolog of GI Number: 6552359 NR Desc: myb
  misc_feature: Homolog of GI Number: 6552389 NR Desc: myb
  misc_feature: Homolog of GI Number: 7939535 NR Desc: myb
MVRAPCCEKMGLKKGPWAPEEDQILTSYIDKHGHGNWRALPKQAGLLRCGKSCRLRWINYLRPDIKRGNFTIEEEETIIKLHDMLGNRWSAIAAKLPGRTDNEIKNVWHTNLKKRLLKSDQSKSKPSSKRAIKPKIERSDSNSSIITQSEPDNFNFREMDTITSSACTTSSSDFSSVTVGDSKNIKSEDTESTETMPVIDESFWSEAAIDDETPTMSSSQSLTISNEMRLQYPFANYEETFQQGHHAYDSNFDDGMDFWYDIFTRTNDSIELLEF

SEQ ID NO: 1827 - DNA, 1447 bp, Glycine max
  misc_feature: Ceres CLONE ID no. 540600
  misc_feature: Ceres CDNA ID no. 25892958
  CDS (91)..(1152): REFERENCED BY SEQ ID NO: 1828
tctgcatcttcaaacacaacacacacacacacactgtgtttgtgaaactctcacacagacaagtcacaacaacaagtttctgttgttccaatggcatcagcaacaccccttttgaaagatgagctggacatcgtgatcccaacgatcaggaacctggatttcttggagatgtggaggccattctttgagccttaccatctcattattgtgcaagatggagacccttcaaagatcatcaaggtccctgaaggctttgactatgagctctacaaccgcaatgacatcaacaggatccttggccccaaggccaattgcatctccttcaaggactctgcatgccgttgctttggctacatggtctccaagaagaagtacatctacaccattgatgatgactgctttgttgccactgatccatccggacacaagattaatgcacttaagcagcatatagaaaacctgctctgcccatccacaccctactttttcaacaccctctatgaacctttccgagaaggtgcagattttgttcgcggttaccccttcagtctccgggaaggtgtaccaactgcagtttctcatggtctttggctcaacatcccagattacgatgctcctactcagcttgtgaagcctcttgagaggaacactaggtatgtggatgctattttgaccataccaaagggcactttgtttcccatgtgtggaatgaacttggcctttgatcgcgatcttataggagcagcaatgtactttggtctcatgggtgatggtcagcctattggacgctacgacgacatgtgggcaggctggtgctgcaaggtaatctgtgatcacttgggattgggaatcaagactggtctgccctatatctatcacagcaaggccagcaacccatttgtgaacttgaggaaagagtacaaaggcatattctggcaagaagacattatcccgttcttccagagcattgttcttcctaaagaagctaccactgttcagaagtgctacattgagcttgccaagcaagtcaaggaaaagctttccaaggtagatccttactttgacaagttggcagatgccatggtcacttggattgaagcttgggatgagcttaaccctgcgggagcatcagtggccaatggcaaagcgtgaatcggtttttggttaactgcataacagccacaaaacttggaagtggaactatttatatactgtattttttttccttagtatttatcttcaacttagctgttattctcggcttaaaatttgcagcattgttagctgtaattctgtttaataacttcatcatttgagcttagaaacaataagtacacccatagggcgttactttctttttattattgttttatgggtagagatcacatggcagcatttcgttacatgtgaaataatagaaaggttactgaaaaaaaaaaaaaaaaaa

SEQ ID NO: 1828 - protein, 353 aa, Glycine max
  misc_feature: Ceres CLONE ID no. 540600
  misc_feature: Ceres CDNA ID no. 25892958
  misc_feature (3)..(346): Pfam Name: RGP PFAM Desc: Reversibly glycosylated polypeptide
  misc_feature: Homolog of GI Number: 34582500 NR Desc: Alpha
  misc_feature: Homolog of GI Number: 31711848 NR Desc: At3g02230
  misc_feature: Homolog of GI Number: 19913103 NR Desc: UDP
  misc_feature: Homolog of GI Number: 77416931 NR Desc: UDP
  misc_feature: Homolog of GI Number: 48478827 NR Desc: UDP
  misc_feature: Homolog of GI Number: 18077708 NR Desc: reversibly glycosylated polypeptide
  misc_feature: Homolog of GI Number: 4158221 NR Desc: reversibly glycosylated polypeptide
  misc_feature: Homolog of GI Number: 34915190 NR Desc: reversibly glycosylated polypeptide
  misc_feature: Homolog of GI Number: 4158232 NR Desc: reversibly glycosylated polypeptide
  misc_feature: Homolog of GI Number: 2317729 NR Desc: reversibly glycosylated polypeptide
MASATPLLKDELDIVIPTIRNLDFLEMWRPFFEPYHLIIVQDGDPSKIIKVPEGFDYELYNRNDINRILGPKANCISFKDSACRCFGYMVSKKKYIYTIDDDCFVATDPSGHKINALKQHIENLLCPSTPYFFNTLYEPFREGADFVRGYPFSLREGVPTAVSHGLWLNIPDYDAPTQLVKPLERNTRYVDAILTIPKGTLFPMCGMNLAFDRDLIGAAMYFGLMGDGQPIGRYDDMWAGWCCKVICDHLGLGIKTGLPYIYHSKASNPFVNLRKEYKGIFWQEDIIPFFQSIVLPKEATTVQKCYIELAKQVKEKLSKVDPYFDKLADAMVTWIEAWDELNPAGASVANGKA

SEQ ID NO: 1829 - DNA, 1407 bp, Glycine max
  misc_feature: Ceres CLONE ID no. 540702
  misc_feature: Ceres CDNA ID no. 36580676
  CDS (107)..(1063): REFERENCED BY SEQ ID NO: 1830
agacaccattaggttttcattctctttctctctctctctgattcgatcgatttcgattgttgaattcatcccatcgtggagccttcaaatttgtagttgaacaacgatggtgctgccgctatttgctgctttcattctcttttttgcttttattccgaatggattgttagcagttccttccaccgtccccgcattcctttggtcatcacattatgaactggcctctgaaaatggattgaaggaatctgtaaattaccaagtcatttctccaaaagatctagcaaaatctgttttttctgaagcaggctggtcaaattttctgtgcaaaggaaagaaacttcatgagcctctggatctggcactcttatttgttggtagagagttacaatcttcagatttaaacatgaacaaacatgcagactcagctcttttggacctgctcaagatctctttcgccagatccaacacttctgtggcgtttccctatgtttctacatcagaggatgtgcttttggaaaactcattgatttcaggatttgctgaagcctgtggagatatgggaattggcaatgttgctttccatggatcttgctccatggatggggcaaatcatgaagaaatcacaactttgcactcagttcaagactatttgatcaagaggatggaagagagtcacagagggaaaacagatttggttgtgttctgcaatgaaggctctcaagctgttaaaaatgtagacaagacacaatctgaaggggaagttttatccaatcttatcagttctgtggaggaatctggtgcaaaatatgccgttctttatgtgtcggatccctccaggtcaatccagtatccttcttacagggatctgcaaagatttctagcagaaagtacagccgggaatgaatcaaccaattccacaatttgtgatgaagtctgccagcttaaatcatctcttctagagggaattttagtgggtatagttttgctaataattttgatatcgggcctttgctgcatgatgggaattgacaccccaacaagatttgagacgccacaagagtaatgatccgtttgctgaagctaataattgttatgatgcttggcctactggattaaaatattactgctatattatttgcgaattttacgggaggctctgataagtgttctgtagttgatgacttgtctcagggactttttatattgaattttaaaataatttgtatcagtatataaaaataaaacttcatcctaggtttaattttgatcccgccactgtcagttgtaaaatttgaagaagaaatttcagattgtgttgtatttttttaactgtctccaaatttgctccgttcgatgtgcataattgctgatcgatgcagttccaagtttaaaaaaaaaaaaaaaaaa

SEQ ID NO: 1830 - protein, 318 aa, Glycine max
  misc_feature: Ceres CLONE ID no. 540702
  misc_feature: Ceres CDNA ID no. 36580676
MVLPLFAAFILFFAFIPNGLLAVPSTVPAFLWSSHYELASENGLKESVNYQVISPKDLAKSVFSEAGWSNFLCKGKKLHEPLDLALLFVGRELQSSDLNMNKHADSALLDLLKISFARSNTSVAFPYVSTSEDVLLENSLISGFAEACGDMGIGNVAFHGSCSMDGANHEEITTLHSVQDYLIKRMEESHRGKTDLVVFCNEGSQAVKNVDKTQSEGEVLSNLISSVEESGAKYAVLYVSDPSRSIQYPSYRDLQRFLAESTAGNESTNSTICDEVCQLKSSLLEGILVGIVLLIILISGLCCMMGIDTPTRFETPQE

SEQ ID NO: 1831 - DNA, 1178 bp, Glycine max
  misc_feature: Ceres CLONE ID no. 540710
  misc_feature: Ceres CDNA ID no. 40351048
  CDS (103)..(648): REFERENCED BY SEQ ID NO: 1832
tctctctttcactctttctccgagaacaaaaaaaaaaacgtgattcgctcttctcttcgaataaaccacaaaaccaacaaacgagaagaggagtgagagaagatggggttgtcgttcacgaagctgttcagcaggttgtttgcgaagaaggaaatgaggattctgatggtaggtctcgatgctgctggtaagacaaccatcttgtacaagctcaagcttggagaaatcgtcaccaccatccccaccatcggatttaatgttgagactgtggagtacaagaacatcagcttcactgtgtgggatgttggtggtcaggacaagatccgtcctctgtggaggcattatttccagaacactcagggtctcatttttgtggttgatagcaatgatagggatcgagtggttgaggcaagggatgagttgcacaggatgttgaatgaggatgaacttagagatgctgttttgcttgtttttgccaacaagcaagatcttcctaatgcaatgaatgctgcagaaataactgacaagcttggacttcattcactccgtcaacgccactggtatatccaaagcacttgtgcaacttctggagagggtctctatgagggtttggactggctttctaacaacattgccagcaaggcatgagacatttgaaaatttttggtcttgtctggtgatttcctgctgagtatggcggttcttggagaaagatgcttatcctttcttgtcaatgttgtaatagcagaatgcttgctagaagtattctcttcttttgtgtaacttgggtttgtatgattgcttaaattagctaatacttttagctataattggaactcttggatcctcttgtgcgtgccttgtttgtgttcattttgttagtttgatttttggttgaatatttccgtgcgttttgttcttggagtgcttgttggtgatgatagttgaatgaggattagaaaattgcgccagtttttgctcttgggccaagagtcacctgttcaaatattgtctttgcgaaattccagttcagatagacttggtacctgtttgttttaaagttgagcagacctaattttgatagaattggttaattatttattgtgattcagatgtgtgtctaaattaattatagtaataaagtttatattgaaacatgcaaaaaaaaaaaaaaaaaa

SEQ ID NO: 1832 - protein, 181 aa, Glycine max
  misc_feature: Ceres CLONE ID no. 540710
  misc_feature: Ceres CDNA ID no. 40351048
  misc_feature: null
  misc_feature: Useful for making plants with altered Lignin content
  misc_feature: Useful for making plants with altered alkaloid content
  misc_feature (19)..(179): Pfam Name: Ras PFAM Desc: Ras family
MGLSFTKLFSRLFAKKEMRILMVGLDAAGKTTILYKLKLGEIVTTIPTIGFNVETVEYKNISFTVWDVGGQDKIRPLWRHYFQNTQGLIFVVDSNDRDRVVEARDELHRMLNEDELRDAVLLVFANKQDLPNAMNAAEITDKLGLHSLRQRHWYIQSTCATSGEGLYEGLDWLSNNIASKA

SEQ ID NO: 1833 - DNA, 924 bp, Glycine max
  misc_feature: Ceres CLONE ID no. 541448
  misc_feature: Ceres CDNA ID no. 25445831
  CDS (337)..(684): REFERENCED BY SEQ ID NO: 1834
gttacttttattcatttaaaagtattttaattgtttaggatgccaattttttttttttgaagttttgtcatcaaattatttaaaggatttaattttgattcagcaatgatgttaaatagcttaacagtatcagtgaaccctgtggtgccgcttgtttaataaactcctgagaaatgttgtaacaatccttagttactgcaacgagtgacacttgagttttacattaactatggaccccttgtctaaacaagacaatctatctgctctgcaaatatcttccaagcaacaaaacatacctgccatagttaataaagaatagaaaattgtttatttttgatgactgaatgcaattgcaggttgatggaatcggggttgcttcccaaagatttggcaaagaaagtatttgagaagaagaagaaagttccgcagaagctcacttctccagttaagtctgtagctgctgtgaagagcaacactaagtctgtcacagttaagaaaaaaagcccaacctcccctgtctcttctgttaaaaagaagacaacgacaacaacaacaacaacatcaaagcagtccaagaagaggaaggctaaggatctaagctctgaggatgatgatgatgatgacacagactctgatggtgaatttgtattatcatcagtagcaaagaggagaaaaatggcttaactatgcccttctgtgacactcgtatttatttttcgcattttttctttaccatttattgctggtgacacaacttgtatggcatgatgttatataacttttaagatgttgcccgtggtttacagagcagctagttttaatcttggcccaactctcacaactcaaatttttctctaagaatttgggttcagacttaatctcaatagttagtttaaaaaaaaaaaaaaaaaaaaaaaaaaaaaa

SEQ ID NO: 1834 - protein, 115 aa, Glycine max
  misc_feature: Ceres CLONE ID no. 541448
  misc_feature: Ceres CDNA ID no. 25445831
MTECNCRLMESGLLPKDLAKKVFEKKKKVPQKLTSPVKSVAAVKSNTKSVTVKKKSPTSPVSSVKKKTTTTTTTTSKQSKKRKAKDLSSEDDDDDDTDSDGEFVLSSVAKRRKMA

SEQ ID NO: 1835 - DNA, 1271 bp, Glycine max
  misc_feature: Ceres CLONE ID no. 541675
  misc_feature: Ceres CDNA ID no. 35383200
  CDS (211)..(990): REFERENCED BY SEQ ID NO: 1836
gggcatcccttgtctgtcgtttggcatcatatttcaaaggaggctcagaatagctggtcgacacgccagccagatccacaaatcggaaagaatcagagcgccgtcaaaaaccgccgtccacggcggtgaaactcgccttcgaatccagagcctctctcggttcctcactcttctcacatcgagcgcaacgccaaaaaatcgaatttcacgatggaagagttggagcagtggaaggaacaactttctcacttcgctaacctagctttggatcgtcttctcgaggttcctccgaatcagctctacgcagctgctgcaatcgtgattttcacaacgctgcttcttctctcaattcggttgttcaagcgtgcgaagtcaaacactgttgtgttggccgggctcagcgggagtggaaaaactgttatcttctatcagcttagggatggctctactcatcagggtactgttacatcaatggagcctaatgaaggcacttttattcttcacaacgagaaaacaaggaagggcaagataaaacctgttcatgttgttgatgttcctgggcattctcggcttcgacccaaactggatgagtacttgcctcaagcagctgggatagtttttgtggtagatgctttggactttttaccaaactgccgtgctgcttcagagtacctttatgatctattgactaaaggaagtgttgtgaggaagaagattccagtgcttattctctgcaacaaaacagacaaagtcactgctcatactaaagagtttatccgaaaacagatggagaaggaaatagacaaattacgggcatcaaggagtgcaatatcagcagctgacattgcaaatgagttcaccctgggggtacccggtgagccatttttttttacccagtgctctaacaaagtgacaactgcagatgcttctggtttaactggggaaatatctcagctggaagagtttatcagagaacatgtaaagcaatagctggatgttgtgtttaaacttgcggatttttgctgaattgaatgaatgtgtagtgttgttcttcttggttgctatttctttgatttcaaagaactgtctggataagaagaggcaaaaaagagaaaaaggtgttttggggtggggcttggggtgttcggagtaggaatcatgatgttgggatcaataaggatttacttcattgcaagccctggtattttgattggactataatgatttatctaattgtatcgatacttttatttaaaaaaaaaaaaaaaaaa

SEQ ID NO: 1836 - protein, 259 aa, Glycine max
  misc_feature: Ceres CLONE ID no. 541675
  misc_feature: Ceres CDNA ID no. 35383200
  misc_feature: Homolog of GI Number: 50947759 NR Desc: putative signal recognition particle receptor beta subunit
  misc_feature: Homolog of GI Number: 51090418 NR Desc: signal recognition particle receptor beta subunit
  misc_feature: Homolog of GI Number: 66522787 NR Desc:  similar to ENSANGP00000020947
  misc_feature: Homolog of GI Number: 32450191 NR Desc: Apmcf1
  misc_feature: Homolog of GI Number: 33086638 NR Desc: Ba1
  misc_feature: Homolog of GI Number: 33086660 NR Desc: Cc1
MEELEQWKEQLSHFANLALDRLLEVPPNQLYAAAAIVIFTTLLLLSIRLFKRAKSNTVVLAGLSGSGKTVIFYQLRDGSTHQGTVTSMEPNEGTFILHNEKTRKGKIKPVHVVDVPGHSRLRPKLDEYLPQAAGIVFVVDALDFLPNCRAASEYLYDLLTKGSVVRKKIPVLILCNKTDKVTAHTKEFIRKQMEKEIDKLRASRSAISAADIANEFTLGVPGEPFFFTQCSNKVTTADASGLTGEISQLEEFIREHVKQ

SEQ ID NO: 1837 - DNA, 1082 bp, Glycine max
  misc_feature: Ceres CLONE ID no. 541919
  misc_feature: Ceres CDNA ID no. 36571720
  CDS (109)..(903): REFERENCED BY SEQ ID NO: 1838
gaaagattagggttttaaagtgacgcaacctctctctcttcttttcttcagttcggtggagggagggagccgtagcagcggaagctctagcttgggtagcgaatcacaatggcgagaggattaaagaagcatctgaagaggcttaatgccccaaagcattggatgcttgacaaactgggtggtgcatttgctcctaagccctcatctggaccacacaaatcgagggaatgcctgccactcatactcattttgcgaaaccggctgaagtatgctctaacataccgtgaagtcattgctattctgatgcagcgacatgtccttgttgatggcaaagtcaggactgacaaaacataccctgctggttttatggatgttgtatcaatccctaaaacaaatgagaacttccgcctgctgtatgacaccaaaggtcgattccgtctccactcagtcagggatgacgaggctaagttcaagctttgcaaagttcgctcagtgcagtttgggcaaaagggtatcccatacttaaatacctacgacggtcgcactatccgctacccagaccctctcatcagggctaatgacaccattaagctggatttggaggagaacaagattgttgatttcatcaaatttgatgttgggaatgtagtcatggtgacgggtggaaggaataggggtcgtgttggagtgatcaagaacagagagaagcataagggaagctttgagactatccatgttcaggatgctactgggcatgaatttgcaactcgaatgggcaatgtgttcaccattggcaagggaacaaaaccgtggatatctcttcccaagggtaaaggtattaagctatcaatcattgaggaagctaggaaaaggattgccgcccaacaagcaactgctgcttaaatctttaggatatgaatagactttgagtgcttggtagtttttattcaatgtttttggtttgtaatttaatttgtcttttgagattttatccgttgaattttgtctcttaaatgcactatagaacttttatcgcgtctgctatattcatgaaggaatctttccaaaaaaaaaaaaaaaaa

SEQ ID NO: 1838 - protein, 264 aa, Glycine max
  misc_feature: Ceres CLONE ID no. 541919
  misc_feature: Ceres CDNA ID no. 36571720
  misc_feature (175)..(211): Pfam Name: KOW PFAM Desc: KOW motif
  misc_feature (3)..(40): Pfam Name: RS4NT PFAM Desc: RS4NT
  misc_feature (42)..(90): Pfam Name: S4 PFAM Desc: S4 domain
  misc_feature (94)..(170): Pfam Name: Ribosomal_S4e PFAM Desc: Ribosomal family S4e
  misc_feature: Homolog of GI Number: 22138108 NR Desc: 40S ribosomal S4 protein
  misc_feature: Homolog of GI Number: 9759565 NR Desc: 40S ribosomal protein S4
  misc_feature: Homolog of GI Number: 82400118 NR Desc: 40S ribosomal protein S4
  misc_feature: Homolog of GI Number: 23505827 NR Desc: At5g58420/mqj2_10
  misc_feature: Homolog of GI Number: 19310835 NR Desc: putative 40S ribosomal protein S4
  misc_feature: Homolog of GI Number: 17104537 NR Desc: putative ribosomal protein S4
  misc_feature: Homolog of GI Number: 73759787 NR Desc: ribosomal protein S4
  misc_feature: Homolog of GI Number: 457803 NR Desc: ribosomal protein S4
  misc_feature: Homolog of GI Number: 21592333 NR Desc: ribosomal protein S4
  misc_feature: Homolog of GI Number: 488739 NR Desc: ribosomal protein
MARGLKKHLKRLNAPKHWMLDKLGGAFAPKPSSGPHKSRECLPLILILRNRLKYALTYREVIAILMQRHVLVDGKVRTDKTYPAGFMDVVSIPKTNENFRLLYDTKGRFRLHSVRDDEAKFKLCKVRSVQFGQKGIPYLNTYDGRTIRYPDPLIRANDTIKLDLEENKIVDFIKFDVGNVVMVTGGRNRGRVGVIKNREKHKGSFETIHVQDATGHEFATRMGNVFTIGKGTKPWISLPKGKGIKLSIIEEARKRIAAQQATAA

SEQ ID NO: 1839 - DNA, 804 bp, Glycine max
  misc_feature: Ceres CLONE ID no. 541969
  misc_feature: Ceres CDNA ID no. 40041253
  CDS (41)..(208): REFERENCED BY SEQ ID NO: 1840
gagatcgcttaaaaagcatgcggttgaacaaggcaacaacatgatggttatcaaggtgattgtcagtttaagactgagaatgagaatgaagaaaacgtggaaacacagagagggagggaagaaacctgaagaaggaagacattgtgacgggccaggccggaaatggaaagagtgtggtgtgggctttatggcaaaaggtatgcagtaaacaaaaggagggtgtggtggggtttatcaacttgaaatgatgtgggtgatggaactatggaaagagcttgacagggcataatatcagttggagagggttcagactttactggtgtcccaagaaaattctggcagtaaatgacacttcacacatgagcgcttcagactgggcatccatgtgctctccatacccgtcaatcttgatttctcagacttgcaattgttgagattgaaaaaatgctatcagccaagaagaagtcactatattgtaccagtgaacctggaaggtaaccaatcaggttttgctgtctgaggctggatcctccattatagtatcccaaactgttgaagttccacgcacattgaagtttgatatatagtttttaaatacatcttgtatttgcttttctggtaagagacatgggtaaaaagagttaaagtttaatttagtcatcaattcaattttaataaaaatagagttgtatgtaattgtaaagtaattttgtatgatttgattcgtttatggatagagtaatgtgtctcgggaaattaattcaaaaaaaaaaaaaaaaaaaaaagaaaaaaaaaaaaaaaaaa

SEQ ID NO: 1840 - protein, 55 aa, Glycine max
  misc_feature: Ceres CLONE ID no. 541969
  misc_feature: Ceres CDNA ID no. 40041253
MMVIKVIVSLRLRMRMKKTWKHREGGKKPEEGRHCDGPGRKWKECGVGFMAKGMQ

SEQ ID NO: 1841 - DNA, 1124 bp, Glycine max
  misc_feature: Ceres CLONE ID no. 541983
  misc_feature: Ceres CDNA ID no. 40351049
  CDS (311)..(874): REFERENCED BY SEQ ID NO: 1842
aattctcgctaattccacgttttctctttctaccctgctttcttttcgctactttcacctttcttttcttttctttcatgatctaacgttgtaaattgctgcttctccaaagtttatcagctgaaactcttcctctcaccacgagctcgctctctaggtttcacgttaaaatttaaaaccaaaattctatttttctcttacgcttccccaatttagcttcaattttatgtgaaatcagcgtcgtgaattgtgcttcccctggataacgttttcgggttcgagaaggcacttgtgttgtttttcgtacgaaatggagactaaacagagttcggtgacggttacgctcagttacggcgcgttgacgtgcgccgcggaatttctcgcgactttgctagcttctgctgtcgtcaaagcctcgcttttggccccggatctctaccggctgctattgatcaacacgcctactgccaaaggagagagcaaaattcagagtgaagacaagcaacgtgatgcagagggagaagatggtaacgatgatgaaggcgacgatgacgacgatggagatggtggatttggggagggtgaagaggagttgtcatctgaagatggaggtggatatggcaacaattccaacaacaagagcaactcaaagaaggcacccgaaggtggcgcaggaggggcagaagagaatggggaagaggatgaagatgaagatggtgatgatcaagatgacgacgatgaggatgacgatgatgatgacgaagaggacgaggcaggtgaagaagaggatgaagatggtgctgaggatgaggagaatgaagaggacgaggaagatgaggaagcattgcagcccccaaagaaaagaaagaagtgaatttagtttagtaaagcctcctctttgtattgttgtgtacgaatttggcttctaacttccatgtttttacttttttgggtactaaacttccatgttcttatttagtttataaggaggcttatgtaggacatgttttaattgatatctatgtttaccattgcgtaattagaatgctacattattgagcaggcaatgccagatttaagagaggaaaaactatgatcttagttttaaaaaaaaaaaaaaaaaa

SEQ ID NO: 1842 - protein, 187 aa, Glycine max
  misc_feature: Ceres CLONE ID no. 541983
  misc_feature: Ceres CDNA ID no. 40351049
METKQSSVTVTLSYGALTCAAEFLATLLASAVVKASLLAPDLYRLLLINTPTAKGESKIQSEDKQRDAEGEDGNDDEGDDDDDGDGGFGEGEEELSSEDGGGYGNNSNNKSNSKKAPEGGAGGAEENGEEDEDEDGDDQDDDDEDDDDDDEEDEAGEEEDEDGAEDEENEEDEEDEEALQPPKKRKK

SEQ ID NO: 1843 - DNA, 1765 bp, Glycine max
  misc_feature: Ceres CLONE ID no. 542397
  misc_feature: Ceres CDNA ID no. 40351050
  CDS (245)..(1405): REFERENCED BY SEQ ID NO: 1844
gaatatcgaacgaaaataaaaaatactctattttttaatgtgtttctagtgacgatccttgttctgttgtgggatattgtgttgaatgttgtttgcagggcgaaacatacaaaggcgttgcctcgtgtaaactacagtggagaaaaaatgcgacacaagtttcagtacttcctctccatctggcgacgagtcaagagctagagttttgaaaaagttgagggagaaattgaatgttgaagatgtgatgttacaagaggaattgctgatacaagaaggcattctctttgatccttcatcagtagaagaggagtcagacatagaagacctcaccttacaggcgatatcctcactacaagccgccatggaaaagcttacagctactgttgatgagcttaaaggggagaatagcattctcaaggccaaagttgatgcctccatggaatctctgttctacaagggagcagagaatagatcgatttttcaaaatatggtttcagtggatgctatggacttgccattcctaaatgcctatctggattcgttgggtttgccaaattttaggaagggaagcaactttgccgcagcagctgcaactatacttccagccactgcatcatccctctgccccttctcctttggggttcaggtgtctcagttcctccgattcaaagctcgggcccttgaattgatcgctaaaggcaggaaatttgataagtacgtcccagatgaaaatatttttgagaagggattgtacatgtttgacattggccagaatgatctcgctggagcattttattcaaaaacattggaccaaatacttgcgtcaattcccacaattcttttagaacttgaaaagggaataaagaatctctatgaccagggggctagatatttctggatacacaatacaggtcctctcggatgcttgcctcagaatatagccaaatttggaactgattcatcaaagcttgacggactagggtgtgttagttcacacaaccaagctgctaaaacctttaacctacagctacgtgctctctgtactaaattgcagggccaatatccagattcaaatgtcacatacgttgatatcttcactataaaatcaagcctcattgcaaactattctagatacggatttgaacaacctattatggcttgttgtggatacggaggtccaccactaaactatgacagtcgagtttcctgtggggaaacaaagaccttcaacggaaccacaattacagcaaaagcttgtaatgatagcagtgagtacataagctgggatgggattcattacactgagactgcaaatcaatatgtagcatcacaaattctcactggaaagtactcggaccctcctttctcagacaaaatgccattcctacttaagctcaagttttaaataccccattatatttattgttattattatttgattctttacggtatcgtgaaagcaatagctgattgtaactttgaatgacagtcaagctcttactaatgaatatgttttaatgattggtcccattggcatggtaacatggtctgtgtgataatgttcaaggattggtaattgaacacattcagacttcatggttcatttgtatgcatatactatctaagagggccttttgggatacacaaaaaaaaaaaaaaaaaaaaaaaaaaaaaaaaaaaaaaaaaaaaaaaaaaaaaaaaaaaaaaaaaaaaaaaaaaaaaaaaaaaaaaaaaaaaaaaaaaaaaaaaaaaaaaaaaaaaaaaa

SEQ ID NO: 1844 - protein, 299 aa, Glycine max
  misc_feature: Ceres CLONE ID no. 542397
  misc_feature: Ceres CDNA ID no. 40351050
  misc_feature (1)..(277): Pfam Name: Lipase_GDSL PFAM Desc: GDSL
MDLPFLNAYLDSLGLPNFRKGSNFAAAAATILPATASSLCPFSFGVQVSQFLRFKARALELIAKGRKFDKYVPDENIFEKGLYMFDIGQNDLAGAFYSKTLDQILASIPTILLELEKGIKNLYDQGARYFWIHNTGPLGCLPQNIAKFGTDSSKLDGLGCVSSHNQAAKTFNLQLRALCTKLQGQYPDSNVTYVDIFTIKSSLIANYSRYGFEQPIMACCGYGGPPLNYDSRVSCGETKTFNGTTITAKACNDSSEYISWDGIHYTETANQYVASQILTGKYSDPPFSDKMPFLLKLKF

SEQ ID NO: 1845 - DNA, 1295 bp, Glycine max
  misc_feature: Ceres CLONE ID no. 542709
  misc_feature: Ceres CDNA ID no. 40351051
  CDS (91)..(1032): REFERENCED BY SEQ ID NO: 1846
gaactcataatattcatcactagaagtgttggatgcatttctatttctaactaattattgtgcttattattattgttgagaaagaaaagaatggcaaagttaataaaattctttgagttgaacacaggggccaagattccttctgttgggttaggcacttggcaagctgagcctggtgttgttgccaaagctgtcaccacagccattctggttggatacaggcatattgattgtgctcaagcgtataacaatcaagcagagattggttctgctcttaagaagctttttgatgatggtgtggtgaagcgtgaggacttatggatcacctccaaactctggtgttcagatcatgcttcagaagatgtgcccaaagcattggataaaacattgcaggatttgcaacttgattaccttgacctctatctgatccactggccagtgcgcatgaaaagcggatcagttggattcaagaaggaatatctcgatcaaccggacattcccagcacatggaaagcaatggaggcactctatgactcaggcaaggcaagagccataggagttagcaatttctcttcaaaaaagcttcaagatctcatgaatatagcaagagtgcctcctgctgttaaccaagtggaattgcacccaggatggcagcagccaaagctgcatgcattctgtgaatctaaaggagttcatctgtctggatattctccactgggctcaccaggagttctcaaaagtgacattcttaagaatcctgttgtgatagagattgcagagaaattggggaagacaccggcacaagttgcccttaggtggggactgcaaacaggtcatagtgtgctgcctaagagcactaatgagtccagaatcaagggaaactttgatgtgtttgactggtctattccagaagaagtgatggataagttctctgaaattaagcaggatagactaattaagggcactttttttgttgacgagacctatggtgcctttaagaccgttgaagagctttgggatggtgaactctgagcaatatgcttcatagagatgttgacaaatgcactgctcctcaagcagattgattccgccttttacctgttaagatcttaaagctaccagctgtagtgattcaagtatgtttgagattttgagaagagctattgttcataataacacaaagtaaccgagacttatttttcatttataattgttgtatctttaattcaatctaaagaaaccagtgcagtgaattttaaaggtctggtagccaaaacaaaaaaaaaaaaaaaaaa

SEQ ID NO: 1846 - protein, 313 aa, Glycine max
  misc_feature: Ceres CLONE ID no. 542709
  misc_feature: Ceres CDNA ID no. 40351051
  misc_feature (10)..(285): Pfam Name: Aldo_ket_red PFAM Desc: Aldo/keto reductase family
MAKLIKFFELNTGAKIPSVGLGTWQAEPGVVAKAVTTAILVGYRHIDCAQAYNNQAEIGSALKKLFDDGVVKREDLWITSKLWCSDHASEDVPKALDKTLQDLQLDYLDLYLIHWPVRMKSGSVGFKKEYLDQPDIPSTWKAMEALYDSGKARAIGVSNFSSKKLQDLMNIARVPPAVNQVELHPGWQQPKLHAFCESKGVHLSGYSPLGSPGVLKSDILKNPVVIEIAEKLGKTPAQVALRWGLQTGHSVLPKSTNESRIKGNFDVFDWSIPEEVMDKFSEIKQDRLIKGTFFVDETYGAFKTVEELWDGEL

SEQ ID NO: 1847 - DNA, 1440 bp, Glycine max
  misc_feature: Ceres CLONE ID no. 543254
  misc_feature: Ceres CDNA ID no. 25446852
  CDS (117)..(1307): REFERENCED BY SEQ ID NO: 1848
gaatttgaccatatttggtaggaagaacaaaaagcacattacatgagttgacatttttccatgtactcatgttaggtatctgcagctgaactcaagtttcaatctttcacctatccatggcttcctctctctttctttgcagtaactacgtcttccccacttcccaaaaccccttcagaagcaaccatttagctcaattcagaccaaatgggccctccaattttcactcaaagcttcggtttcagagaccccacttggtcagagccatggtttctgattccaacacttccaggagacaaatagagattgtgtatgaccccgaaggaaggattaacaagttggctgatgaagtggacagggaaactcccctttcaaggcttactttgttctctccttgcaagataaatgttttcttgagaataaccaacaagagggaagatgggtatcatgatttggcatccctttttcatgtgataagtctaggtgacataattaagttctctttgtcaccttcaaaaaccaaggatagcctgtcaaccaacgtgtctggggtgccccttgatgatagaaatttgattattaaggcgcttaatctttacaggaagaagactggcagtgacaagtacttttggattcatcttgataaacgggtgcctactggggcagggcttggcggtggaagtagcaacgctgcaactacactatgggcagccaatcaatttagtggctgtcctgcctctgagaaagaactccaagaatggtcaagtgagattggatcagatattcccttctttttctctcagggagcagcctattgcactggtcgaggagaggttgttcagaatattcctccaccagtatctctagatgttccaatggttctcataaagcccccagaagcatgttcaactgccgaagtctacaagcgtctatgtttggaccagactagtaatgttgaacctttaacattgctggagaagatctcaaagattggcatctcacaagatgtttgtattaatgatttagaacctccagcatttgaagttctcccctctctcaaaagactgaagcagcgaattagtgcagctggtcgtggagaatatgatgctgtttttatgtcaggaagcggaagcaccattgttggagttggttctcctgatcctccacaatttgtttatgatgatgacgaatacaaagatgtgttcttatcagatgcctattttctcactcgagaggaaaatcagtggtaccaagagcctacttcaagtccttctgcctcaccttcagttgtttctgagtctgtttgacctacgttcttataagataagaagatagtaatgtagaattgcattatcttgtcttttttcttgcctcatttaatgatgaaaaaaaagttttgccgctggaaatcaataaacattaaaaaaaaaaaaaaaaaaa

SEQ ID NO: 1848 - protein, 396 aa, Glycine max
  misc_feature: Ceres CLONE ID no. 543254
  misc_feature: Ceres CDNA ID no. 25446852
  misc_feature (170)..(349): Pfam Name: GHMP_kinases PFAM Desc: GHMP kinases putative ATP
  misc_feature: Homolog of GI Number: 9864191 NR Desc: 4
  misc_feature: Homolog of GI Number: 8515722 NR Desc: 4
  misc_feature: Homolog of GI Number: 6688843 NR Desc: isopentenyl monophosphate kinase
  misc_feature: Homolog of GI Number: 34908970 NR Desc: putative 4
  misc_feature: Homolog of GI Number: 23198000 NR Desc: putative ripening
  misc_feature: Homolog of GI Number: 1899050 NR Desc: ripening
  misc_feature: Homolog of GI Number: 21435736 NR Desc: 4
  misc_feature: Homolog of GI Number: 46447223 NR Desc: probable isopentenyl monophosphate kinase
  misc_feature: Homolog of GI Number: 51246587 NR Desc: related to 4
  misc_feature: Homolog of GI Number: 56961856 NR Desc: 4
  misc_feature: Useful for making bigger plants
  misc_feature: Useful for sterility
  misc_feature: Useful for sterility
MASSLFLCSNYVFPTSQNPFRSNHLAQFRPNGPSNFHSKLRFQRPHLVRAMVSDSNTSRRQIEIVYDPEGRINKLADEVDRETPLSRLTLFSPCKINVFLRITNKREDGYHDLASLFHVISLGDIIKFSLSPSKTKDSLSTNVSGVPLDDRNLIIKALNLYRKKTGSDKYFWIHLDKRVPTGAGLGGGSSNAATTLWAANQFSGCPASEKELQEWSSEIGSDIPFFFSQGAAYCTGRGEVVQNIPPPVSLDVPMVLIKPPEACSTAEVYKRLCLDQTSNVEPLTLLEKISKIGISQDVCINDLEPPAFEVLPSLKRLKQRISAAGRGEYDAVFMSGSGSTIVGVGSPDPPQFVYDDDEYKDVFLSDAYFLTREENQWYQEPTSSPSASPSVVSESV

SEQ ID NO: 1849 - DNA, 857 bp, Glycine max
  misc_feature: Ceres CLONE ID no. 543461
  misc_feature: Ceres CDNA ID no. 40041254
  CDS (2)..(514): REFERENCED BY SEQ ID NO: 1850
ttctggaactgttggtttgcatgaatgctctatgactgagaagcaacaaaaaatagcatcaaaacactgtgagaagacaatagagagaaacatgctttcatcaagtgattctgtgcgctttaagggttctctgactgaatcacatgtgccaacccgcaaatcaaaaagagctgctgcttgttcatcggagaatgctgtgacaagtagcaaacatactgttgaaccttccaaatgtcgtagaaccaaacggaaagatacatgtggctcaaagaaacaagaaatactagaagatgtgtctaataaaaatcgcttcagcctccatgagcctgatgaatattcttctctcggtagtataaaaactactgttacaagacgcgtagctgctaataagggaacaccacttaataaagaaaatactaatgtaaatgaaagggggaaatgtatagagacatcagcttcagaagttgtcaatacaaatgcatgtgctgttagaagaacaagacggaaagtataaatattgtgccgtgttcccacggacactgggtttaaagactgcatgttttaacccgagttatgcactaaatcaagagcttgtgttatacattttcttttaatcctgcatgcatatatgtttatgctttaagcagttgtctggccttgtatatattattaatatttccatttagatacgatactttaaattgttttaccttaaatctacgattcatattttgtaatctataatatacataatgtagggatttttttaccgtaatgaatcaaatcacgtgtaactccaaaaaaaaaaaaaaaaaaaaaaaaaaaaaaaaaaaaaaaagaaaaaaaaaaaaaaaaaa

SEQ ID NO: 1850 - protein, 160 aa, Glycine max
  misc_feature: Ceres CLONE ID no. 543461
  misc_feature: Ceres CDNA ID no. 40041254
MTEKQQKIASKHCEKTIERNMLSSSDSVRFKGSLTESHVPTRKSKRAAACSSENAVTSSKHTVEPSKCRRTKRKDTCGSKKQEILEDVSNKNRFSLHEPDEYSSLGSIKTTVTRRVAANKGTPLNKENTNVNERGKCIETSASEVVNTNACAVRRTRRKV

SEQ ID NO: 1851 - DNA, 729 bp, Glycine max
  misc_feature: Ceres CLONE ID no. 544375
  misc_feature: Ceres CDNA ID no. 25445620
  CDS (60)..(527): REFERENCED BY SEQ ID NO: 1852
gacccccaaaccctgctgcataggaagaaaccctagcctctcaccctccctgcgacacgatgcagatcttcgtgaaaaccctaacgggtaagacgatcacccttgaggtggagtcttctgacaccatcgacaacgtgaaggccaagatccaggacaaggaaggcatccctccggaccagcagcgcctcatcttcgccggaaagcagctggaggacggccgcaccctcgccgactacaacatccagaaggagtccaccctccacctcgtcctccgtctccgcggtggcgccaagaagcgcaagaagaagacctacaccaagcccaagaagatcaaacacaagcacaagaaggtcaagctcggcattctccagttctacaaggtcgacgattctggaaaagtgcagaggctccgcaaggagtgccccaacgccgagtgtggtgccgggactttcatggccaatcacttcgaccgccactattgcggcaagtgtggcttgacctatgtctaccagaaggccgatgcttaaattcgttggaagtgaattctctgtggttctattttaattttagttatttaaaagttttggttaatgtttttgttcaattagtgttatgactgtttgggctttgattaaacctttatgaatactgtttcgctttggattacttattatttttcgctttaaatatattgttagtttggtttataaagaaaaaaaaaaaaaaaaa

SEQ ID NO: 1852 - protein, 155 aa, Glycine max
  misc_feature: Ceres CLONE ID no. 544375
  misc_feature: Ceres CDNA ID no. 25445620
  misc_feature (1)..(74): Pfam Name: ubiquitin PFAM Desc: Ubiquitin family
  misc_feature (101)..(147): Pfam Name: Ribosomal_S27 PFAM Desc: Ribosomal protein S27a
  misc_feature: Homolog of GI Number: 438111 NR Desc: ubiquitin extension protein
  misc_feature: Homolog of GI Number: 438109 NR Desc: ubiquitin extension protein
  misc_feature: Homolog of GI Number: 34581769 NR Desc: ubiquitin extension protein
  misc_feature: Homolog of GI Number: 18252349 NR Desc: ubiquitin extension protein
  misc_feature: Homolog of GI Number: 1771780 NR Desc: ubiquitin extension protein
  misc_feature: Homolog of GI Number: 2894306 NR Desc: ubiquitin extension protein
  misc_feature: Homolog of GI Number: 71913239 NR Desc: ubiquitin extension protein
  misc_feature: Homolog of GI Number: 28395459 NR Desc: ubiquitin/ribosomal fusion protein
  misc_feature: Homolog of GI Number: 21601 NR Desc: ubiquitin monomer/ribosomal protein
  misc_feature: Homolog of GI Number: 10180023 NR Desc: ubiquitin/ribosomal protein 27a
MQIFVKTLTGKTITLEVESSDTIDNVKAKIQDKEGIPPDQQRLIFAGKQLEDGRTLADYNIQKESTLHLVLRLRGGAKKRKKKTYTKPKKIKHKHKKVKLGILQFYKVDDSGKVQRLRKECPNAECGAGTFMANHFDRHYCGKCGLTYVYQKADA

SEQ ID NO: 1853 - DNA, 1520 bp, Glycine max
  misc_feature: Ceres CLONE ID no. 544695
  misc_feature: Ceres CDNA ID no. 25892959
  CDS (66)..(1334): REFERENCED BY SEQ ID NO: 1854
aaaattccaagtagccacagctctcctctcactttcatttctacatccctggctctgttccgtcgatgacgatggcgtttagggtgcgaaaccctgacctccgctttctcattcttctctctctcttgtccatcacttccgccaaggtcttcttcgaggagcgtttcgatgacggatggggaaatcgttgggttaaatcagattggaaaaaagatgagaacctggctggggagtggaaccacacctctggccaatggaatggagacgctaacgacaaaggtattcaaaccagtgaggattacagattctacgctatttcagctcagtaccctgaattcagcaacaaggataagacactagtcttccaattttctgtcaagcatgaacagaagcttgactgcggtggtggctacatgaagttgctcagtggtgatgttgatcagaagaaatttggtggggatactccttacagtattatgtttggcccagatatctgtggttacagtacaaagaaagtacacgctattcttacctacaatgacacaaaccacttgataaagaaggatgttccttgtgagactgaccaacttactcatgtttacacatttatcctccgtccggatgcaacctacagcatcctgattgataatgtggagaagcaaactggtagtctctactctgattgggatcttctccctccaaagacaatcaaagatcccgaggctaaaaaaccagaagattgggatgacaaagaatttattcctgatcccgaggataagaaaccagaggggtatgatgacatcccaaaagagctcccagatcctgaagccaagaagcctgaagattgggatgatgaggaagatggtgagtggacaccccctaccattgccaaccctgattacaagggcccatggaaggcaaagaaaatcaagaaccccaactataaaggaaaatggaaggcaccattgattgataacccagatttcaaggatgaccccgacctatatgttttccccaacttgaagtacgtgggcattgaattgtggcaggtgaaatctggtactttgtttgacaatgtcttaattactgatgatcctgaatatgccaagcaactggctgaagaaacacggggcaagcacaaggatgttgagaagacagcatttgaagaggctgagaagaagagggaagaggaggaatcaaaggatgacccagttgactctgatgctgatgaggaagaggaagatgctgatgaagctggcaatgactccgatgctgaatcaaagacggaagctggggaagacaccaaggaagagggtgtacatgatgaactctaggaagtttgcaaaacggataaagagtgagcggaagttatattccggatagttatatttcagtcgtagtgttttttgttttccctagataagcagaccgtggaaaactgctagtaaaagctggagcttttgcttcgatcacatttgactatttcactgattagaacaggtaaaaaaaaaaaaaaaaaa

SEQ ID NO: 1854 - protein, 420 aa, Glycine max
  misc_feature: Ceres CLONE ID no. 544695
  misc_feature: Ceres CDNA ID no. 25892959
  misc_feature (26)..(338): Pfam Name: Calreticulin PFAM Desc: Calreticulin family
  misc_feature: Homolog of GI Number: 16974341 NR Desc: At1g09210/T12M4_8
  misc_feature: Homolog of GI Number: 30725696 NR Desc: At1g56340
  misc_feature: Homolog of GI Number: 79320099 NR Desc: CRT1
  misc_feature: Homolog of GI Number: 12643243 NR Desc: Calreticulin 2 precursor
  misc_feature: Homolog of GI Number: 4887133 NR Desc: calcium
  misc_feature: Homolog of GI Number: 3288109 NR Desc: calreticulin
  misc_feature: Homolog of GI Number: 1419088 NR Desc: calreticulin
  misc_feature: Homolog of GI Number: 1763297 NR Desc: calreticulin
  misc_feature: Homolog of GI Number: 21555174 NR Desc: putative calcium
  misc_feature: Homolog of GI Number: 50919601 NR Desc: putative calreticulin precursor
MAFRVRNPDLRFLILLSLLSITSAKVFFEERFDDGWGNRWVKSDWKKDENLAGEWNHTSGQWNGDANDKGIQTSEDYRFYAISAQYPEFSNKDKTLVFQFSVKHEQKLDCGGGYMKLLSGDVDQKKFGGDTPYSIMFGPDICGYSTKKVHAILTYNDTNHLIKKDVPCETDQLTHVYTFILRPDATYSILIDNVEKQTGSLYSDWDLLPPKTIKDPEAKKPEDWDDKEFIPDPEDKKPEGYDDIPKELPDPEAKKPEDWDDEEDGEWTPPTIANPDYKGPWKAKKIKNPNYKGKWKAPLIDNPDFKDDPDLYVFPNLKYVGIELWQVKSGTLFDNVLITDDPEYAKQLAEETRGKHKDVEKTAFEEAEKKREEEESKDDPVDSDADEEEEDADEAGNDSDAESKTEAGEDTKEEGVHDEL

SEQ ID NO: 1855 - DNA, 1368 bp, Glycine max
  misc_feature: Ceres CLONE ID no. 545620
  misc_feature: Ceres CDNA ID no. 36581370
  CDS (92)..(943): REFERENCED BY SEQ ID NO: 1856
gacaccaaacccacaaaacactatagcaatagaaacatttgcttttgaaaaacccctcactcttcatcactacactagctagccacatacaatgtcgaccaaatttaaggtgtttcgtgaattcacaagcgatgactcattcctaaaccaagttatccctgaaaacatcaccgaattccaagtgactctgtccctcgctagagactacgatggcaacaactcaaccaacggaaagttcattccttactgggacactgaaaaggtcactcccgaagtgataaaaaaattcaagaaaaaatacgaacccaccgcactgagggttaaggttcttgtcagcattggaaacaaaaacaaacaatttcctttcaccattggctcggactcgaacagcgaagcatgggtctccgaggccactgcttcgctgaagagcatcattaaaacctacaaccttgatggcatcgatgtcagctacgaggacatcgccgccaacgaagccgactttgttaattccgttggggggcttgtgaggaacctgaagcagaacaagctcattactgtggcttccttcgcaacaagcgctgatgccgccaacaacaaattctacaatctcttgtacgcagaatatgctactttctttgacactgtggtgtttctgagctgggtagggtttactccttctcgcgccaacccagttgcgagcttggaggagaagatccttgccgtggccaacgagtataaggccgtgaaggcctttctggtcgcttacagcaccgttgctgaggattgggctaatttttcgccacctatcttctttatcactctccatggccttctgggtaactctgcggttaagggagcgtccattaaggtcattagtgacgccaccgcctcctttcccgccaagtggatccctgaaattttattgttggctgcctctaaatgaatgaggtatgacatgaagggtgaacacgtatctcagaagtgttatgtgatatgtatgatgtgtgaatcttgaaataatatcttaagggcaagaagttattagttaaaattattagaggtagttttatgaatgggtcataataataaatgctagctatatgtaccactatggaataagattgggtcataataataaagctagcttgctagctatatgtactatacgtaactatggaataagacccatactagtgctataggggcttgctatatgtatgtgtttcatctgcaaattaagagctgagacgcttgccatgcaaggcagacaactattatatatattatgttatgtgtttgaaaaaataatgcatgtgtgtgtcttgtgaataaaatatatttttaagttccaaaaaaaaaaaaaaaaaa

SEQ ID NO: 1856 - protein, 283 aa, Glycine max
  misc_feature: Ceres CLONE ID no. 545620
  misc_feature: Ceres CDNA ID no. 36581370
  misc_feature (77)..(128): Pfam Name: Glyco_hydro_18 PFAM Desc: Glycosyl hydrolases family 18
  misc_feature: Homolog of GI Number: 730692 NR Desc: RuBisCO
  misc_feature: Homolog of GI Number: 7434972 NR Desc: chitinase
  misc_feature: Homolog of GI Number: 11262118 NR Desc: chitinase
  misc_feature: Homolog of GI Number: 7434971 NR Desc: chitinase
  misc_feature: Homolog of GI Number: 7434970 NR Desc: chitinase
  misc_feature: Homolog of GI Number: 396829 NR Desc: narbonin
  misc_feature: Homolog of GI Number: 31432085 NR Desc: putative class III chitinase
  misc_feature: Homolog of GI Number: 27462188 NR Desc: chitinase
  misc_feature: Homolog of GI Number: 31432078 NR Desc: putative class III chitinase RCB4
  misc_feature: Homolog of GI Number: 31432082 NR Desc: putative class III chitinase
MSTKFKVFREFTSDDSFLNQVIPENITEFQVTLSLARDYDGNNSTNGKFIPYWDTEKVTPEVIKKFKKKYEPTALRVKVLVSIGNKNKQFPFTIGSDSNSEAWVSEATASLKSIIKTYNLDGIDVSYEDIAANEADFVNSVGGLVRNLKQNKLITVASFATSADAANNKFYNLLYAEYATFFDTVVFLSWVGFTPSRANPVASLEEKILAVANEYKAVKAFLVAYSTVAEDWANFSPPIFFITLHGLLGNSAVKGASIKVISDATASFPAKWIPEILLLAASK

SEQ ID NO: 1857 - DNA, 695 bp, Glycine max
  misc_feature: Ceres CLONE ID no. 545629
  misc_feature: Ceres CDNA ID no. 29191497
  CDS (53)..(520): REFERENCED BY SEQ ID NO: 1858
aaaccctgctgcataggaagaaaccctagcctctcaccctccctgcgacacgatgcagatcttcgtgaaaaccctaacgggtaagacgatcacccttgaggtggagtcttctgacaccatcgacaacgtgaaggccaagatccaggacaaggaaggcatccctccggaccagcagcgcctcatcttcgccggaaagcagctggaggacggccgcaccctcgccgactacaacatccagaaggagtccaccctccacctcgtcctccgtctccgcggtggcgccaagaagcgcaagaagaagacctacaccaagcccaagaagatcaaacacaagcacaagaaggtcaagctcggcattctccagttctacaaggtcgacgattctggaaaagtgcagaggctccgcaaggagtgccccaacgccgagtgtggtgccgggactttcatggccaatcacttcgaccgccactattgcggcaagtgtggcttgacctatgtctaccagaaggccgatgcttaaattcgttggaagtgaattctctgtggttctattttaattttagttatttaaaagttttggttaatgtttttgttcaattagtgttatgactgtttgggctttgattaaacctttatgaatactgtttcgctttggattacttattatttttcgcttcaaaaaaaaaaaaaaaaaa

SEQ ID NO: 1858 - protein, 155 aa, Glycine max; identical to SEQ ID NO: 1852
  misc_feature: Ceres CLONE ID no. 545629
  misc_feature: Ceres CDNA ID no. 29191497
  misc_feature (1)..(74): Pfam Name: ubiquitin PFAM Desc: Ubiquitin family
  misc_feature (101)..(147): Pfam Name: Ribosomal_S27 PFAM Desc: Ribosomal protein S27a
  misc_feature: Homolog of GI Number: 438111 NR Desc: ubiquitin extension protein
  misc_feature: Homolog of GI Number: 438109 NR Desc: ubiquitin extension protein
  misc_feature: Homolog of GI Number: 34581769 NR Desc: ubiquitin extension protein
  misc_feature: Homolog of GI Number: 18252349 NR Desc: ubiquitin extension protein
  misc_feature: Homolog of GI Number: 1771780 NR Desc: ubiquitin extension protein
  misc_feature: Homolog of GI Number: 2894306 NR Desc: ubiquitin extension protein
  misc_feature: Homolog of GI Number: 71913239 NR Desc: ubiquitin extension protein
  misc_feature: Homolog of GI Number: 28395459 NR Desc: ubiquitin/ribosomal fusion protein
  misc_feature: Homolog of GI Number: 21601 NR Desc: ubiquitin monomer/ribosomal protein
  misc_feature: Homolog of GI Number: 10180023 NR Desc: ubiquitin/ribosomal protein 27a

SEQ ID NO: 1859 - DNA, 774 bp, Glycine max
  misc_feature: Ceres CLONE ID no. 545773
  misc_feature: Ceres CDNA ID no. 25892960
  CDS (158)..(499): REFERENCED BY SEQ ID NO: 1860
acctcaccgagtcgcagcgatcgaagtttcacatcagccttatccagtttagggtttcggttccttaccctacctttgacgtatcgaaaccttaaatttgggattaggtctgagcaatctggttggtagaacctttggtcttagagagtcaagttttatgtctggattagacgatcaaattcctactgccttcgatccttttgctgatgcaaatgctgatgactcgggtgctgggtcaaaggagtatgtgcatattcgcgttcagcagcgaaatggtaggaaaagcctgacaaccgttcagggattgaaaaaagaattcagctataacaagatacttaaagacgttaagaaagagttctgttgcaatggaacagttgttcaggacccagaactaggacaggttattcaacttcaaggtgatcagaggaagaatgtttctactttcctagtacaggctggtatcgtgaagaaggatcatatcaagattcatggtttctgagcgattggagtctcaagtggcaagccttatctgcctgactatgtgttaggcataatagatagataatcggagttgtgtatgtgattgtggtatttctgatctgttcttatgttttactatgtgatgtgggattatggatttcagaacattgcgtgttatttgctttgaagacaaatatgaaaacagttcaatggacctcctattcgatcttatttcatttagaatttaataataattaaaaaaaaactgtaactttcaaaaaaaaaaaaaaaaaa

SEQ ID NO: 1860 - protein, 113 aa, Glycine max
  misc_feature: Ceres CLONE ID no. 545773
  misc_feature: Ceres CDNA ID no. 25892960
  misc_feature: The plant flowers significantly earllier than wild-type.
  misc_feature: The plant is abnormally small.
  misc_feature: null
  misc_feature: Useful for making plants with modulated biomass
  misc_feature: Useful for making plants with modulated flowering time
  misc_feature (25)..(106): Pfam Name: SUI1 PFAM Desc: Translation initiation factor SUI1
  misc_feature: Homolog of GI Number: 20218809 NR Desc: putative translation factor
  misc_feature: Homolog of GI Number: 21593860 NR Desc: translation initiation factor
  misc_feature: Homolog of GI Number: 29028784 NR Desc: At5g54760
  misc_feature: Homolog of GI Number: 50937977 NR Desc: translational initiation factor eIF1
  misc_feature: Homolog of GI Number: 4585973 NR Desc: translation initiation factor
  misc_feature: Homolog of GI Number: 6165638 NR Desc: translation initiation factor nps45
  misc_feature: Homolog of GI Number: 6478142 NR Desc: putative translation initiation factor eIF
  misc_feature: Homolog of GI Number: 2668740 NR Desc: translation initiation factor
  misc_feature: Homolog of GI Number: 3334346 NR Desc: Protein translation factor SUI1 homolog
  misc_feature: Useful for accelerating flowering time
  misc_feature: Useful for increasing chlorophyll and photosynthetic capacity
MSGLDDQIPTAFDPFADANADDSGAGSKEYVHIRVQQRNGRKSLTTVQGLKKEFSYNKILKDVKKEFCCNGTVVQDPELGQVIQLQGDQRKNVSTFLVQAGIVKKDHIKIHGF

SEQ ID NO: 1861 - DNA, 988 bp, Glycine max
  misc_feature: Ceres CLONE ID no. 546001
  misc_feature: Ceres CDNA ID no. 40351052
  CDS (267)..(752): REFERENCED BY SEQ ID NO: 1862
agatataatcgaaaaaaattactgtttggatatattccactatttagaaagcaaaatggactacgaaaacttgagtaacaaggtaagccacacaaatgggaatgactccccattacaatgaagggccaacttcattttcaatgaatcccactataaaaactttagcaatgcaaaagctaaaacatcaaccatttcctcatccactttcactggaatcacaatcctgaaacaaaaacatcttagcatttaacatactactagacaacatgaccaccacattggaaagaggtttctcggaagagcaagaagctctggtggtgaagtcatggaatgtcatgaagaagaattctggagagttgggtctcaagtttttcttgaaaatatttgagattgctccatcagctcagaaattgttctcattcttgagagattcaacggttcctttggagcaaaatcccaagctcaagccccatgccgtgtctgtctttgtaatgacctgtgattcagcagttcagctgcggaaggccgggaaagtcactgtcagagaatcaaacttgaaaaaattaggtgctacccattttagaaccggcgtagcaaacgagcatttcgaggtgacaaagtttgcactgttggagaccataaaagaagctgtaccagaaatgtggtcaccggctatgaagaatgcatggggagaagcttatgatcagctggtcgatgccattaaatctgaaatgaaaccaccctcctcttagactccagtttaagcagttcctttccttccctctcaattctcaaattgttatattaataaaagtgagaaagtttaggcttgtgcttttattttgtgtgaatgtaatatactttgtgtacgtagacttggctattgggagttgctaggttgggaagtgtttcgcattcaacaattctgtagttgaaggtgattaaatgaattatagctatttgtttcttcaaaaaaaaaaaaaaaaaa

SEQ ID NO: 1862 - protein, 161 aa, Glycine max
  misc_feature: Ceres CLONE ID no. 546001
  misc_feature: Ceres CDNA ID no. 40351052
  misc_feature: null
  misc_feature: Useful for making plants with modulated cold sensitivity
  misc_feature (13)..(152): Pfam Name: Globin PFAM Desc: Globin
MTTTLERGFSEEQEALVVKSWNVMKKNSGELGLKFFLKIFEIAPSAQKLFSFLRDSTVPLEQNPKLKPHAVSVFVMTCDSAVQLRKAGKVTVRESNLKKLGATHFRTGVANEHFEVTKFALLETIKEAVPEMWSPAMKNAWGEAYDQLVDAIKSEMKPPSS

SEQ ID NO: 1863 - DNA, 886 bp, Glycine max
  misc_feature: Ceres CLONE ID no. 546345
  misc_feature: Ceres CDNA ID no. 25447101
  CDS (89)..(583): REFERENCED BY SEQ ID NO: 1864
taacaatcaaccctaccattccaaagctcgaaggtgaacagtgagtgagtgagttattcagaacccaggatttggcgaaagtgaagcgatgagcagtgataggaatattggggttgccttggacttttccaaaggaagcaaaatcgctctcaaatgggctattgacaatcttctccgcaacggtgacatactctacatcgtccacatcaagccttccggaggaagtgaattccgaaatcttctctggtccaccactggttcacctctgattccgttgtcggagtttcgtgagaaggaggtgatgcatcactatgaggtggatactgatgctgaggtgttggacttgcttgacaccgcttctagggagaaacaggtgactgtggtggcaaagctatactggggggatgcaagagagaaaattgtggaagctgttggggatttaaagcttgactctttggtcatgggtagcagaggattgggcgccatacagagggtattgctggggagtgtgactaattatgtcaccacaaatgcgagttgccctataacgattgtgaaagactctgccccttctactaactgatatgctactgaatttggttggcctttgtaatcggttgtttttatcttcatcagagaccagactgcttttccctccgttcttacttcttacagatgcttaattgggtttatgaacacacatgatgattaaggattcggcaagcataatgtatattttcggagtctcttttaagtgcttggttataatcacaaaattgtgcttataaataagctttgtgctggatctatttcaaacttactagtgcacatgatgtggtggtgtgaaatgtttgatactttgattctcaaaaaaaaaaaaaaaaaa

SEQ ID NO: 1864 - protein, 164 aa, Glycine max
  misc_feature: Ceres CLONE ID no. 546345
  misc_feature: Ceres CDNA ID no. 25447101
  misc_feature (4)..(157): Pfam Name: Usp PFAM Desc: Universal stress protein family
  misc_feature: Homolog of GI Number: 50931659 NR Desc: putative universal stress protein
  misc_feature: Homolog of GI Number: 50902088 NR Desc: P0414E03.3
  misc_feature: Homolog of GI Number: 11602751 NR Desc: ENOD18 protein
  misc_feature: Homolog of GI Number: 11602747 NR Desc: early nodulin ENOD18
  misc_feature: Homolog of GI Number: 11602749 NR Desc: early nodulin ENOD18
  misc_feature: Homolog of GI Number: 50913251 NR Desc: universal stress protein / early nodulin ENOD18
  misc_feature: Homolog of GI Number: 60100214 NR Desc: USP family protein
  misc_feature: Homolog of GI Number: 50900762 NR Desc: P0583G08.8
  misc_feature: Homolog of GI Number: 25402657 NR Desc: protein T23J18.3
  misc_feature: Homolog of GI Number: 55792398 NR Desc: universal stress protein
  misc_feature: Useful for making bigger plants
  misc_feature: Useful for making ornamental plants with flowers and leaves fused
  misc_feature: Useful for making ornamental plants with modified flowers
MSSDRNIGVALDFSKGSKIALKWAIDNLLRNGDILYIVHIKPSGGSEFRNLLWSTTGSPLIPLSEFREKEVMHHYEVDTDAEVLDLLDTASREKQVTVVAKLYWGDAREKIVEAVGDLKLDSLVMGSRGLGAIQRVLLGSVTNYVTTNASCPITIVKDSAPSTN

SEQ ID NO: 1865 - DNA, 1246 bp, Glycine max
  misc_feature: Ceres CLONE ID no. 546423
  misc_feature: Ceres CDNA ID no. 40351053
  CDS (44)..(913): REFERENCED BY SEQ ID NO: 1866
gcatggaactgctgatcttaacaagaaaaaaggtcctcctaagatggacaaatctctgagagtaagtgcagatcttattgaagatcaagaaagtgagttggttgtcaatgcttctgacttggtcagtcagcattcagatggggacacaatgacacctattcatcagaatgctgctacagaaccagaccctcagatacataaccaattgcaatgcggtgagacagaaaacttggaccaaaatcctacagatggtgaggtcttaacatacacaggagagtcttccataaatataaggaatgaagaagaatcaaccatatcaccttctgcctggttggagacagaagaggatctggaaatgcccaagccatgtgaggatgacaccttccaatctgcatctctagccaatgctgccccagtgggatcagctagtcctcgtgttcgtcattctctgtcacagatgctgcaagaagaaagtagtgaacctgacacatgtgagtggggaaatgctgagaatcctcctgccatgatataccaaaaaaatgcacccaaaggtttgaaaagactcctgaaatttgctcggaagagcaagggcgatacaggttccactggctggtctagcccatatgttttttctgaaggagaggatgatgctgaggaatttaaaaattctaataaaaggaatgctgataatctactgagaaaggccgcacaaaatgtgaaaagctacggacaaccgaaaaattcagtacatgaaggatatgaaagaaatttaggtagagatgatggcaagggttctcacaagatgcgagatggacgagatttaggtgctggttcaaccacaagagcgtcaaggtcattcttttctctttcagcttttaggggaagcaagccctccgagtcaaagtttcattagtgccatgggaaactaccattaattttgccatcatcccggcacatggattttgtcaggtttaatatggagttcttcctatttcttctgctagttgcatcaactacagctaaatcagaaataatttcagtgcgttgatgttataaattatatggcaatgtggggtttggtgggaatgctgtaaattcattaaattgtgacgcggtatttcaaaaattataatttatatcatctggctttccctaggaaattttcctatagctggattctttgttgtaatgttgtcccaaacgttcatgaatatggtgctgttacttcaaaaaaaaaaaaaaaaaa

SEQ ID NO: 1866 - protein, 289 aa, Glycine max
  misc_feature: Ceres CLONE ID no. 546423
  misc_feature: Ceres CDNA ID no. 40351053
MDKSLRVSADLIEDQESELVVNASDLVSQHSDGDTMTPIHQNAATEPDPQIHNQLQCGETENLDQNPTDGEVLTYTGESSINIRNEEESTISPSAWLETEEDLEMPKPCEDDTFQSASLANAAPVGSASPRVRHSLSQMLQEESSEPDTCEWGNAENPPAMIYQKNAPKGLKRLLKFARKSKGDTGSTGWSSPYVFSEGEDDAEEFKNSNKRNADNLLRKAAQNVKSYGQPKNSVHEGYERNLGRDDGKGSHKMRDGRDLGAGSTTRASRSFFSLSAFRGSKPSESKFH

SEQ ID NO: 1867 - DNA, 1449 bp, Glycine max
  misc_feature: Ceres CLONE ID no. 546786
  misc_feature: Ceres CDNA ID no. 25892718
  CDS (62)..(1231): REFERENCED BY SEQ ID NO: 1868
agtgcctccattcgggactgtaactagccgcagcacgaggagcagcctcaggaggagaaggatgtctcacaggaagttcgagcacccaaggcacggttcactgggatttcttcccaggaagcgtgctgctcgtcacaggggaaaagtgaaggcattccccaaggatgacccatccaaggcacccaagctcactgcattcttgggttacaaggccggtatgactcacattgttagagaggtcgagaagccaggatcaaagcttcacaagaaggaaacttgtgagcctgttacaattattgagacccctccaatggttattgttggtgttgtgggttatgtgaaaactccacgtggtctccgaacattgaacactgtctgggctcagcatttgagtgaggaattgaaacgtaggttctacaagaactggtgcaagtccaagaagaaggccttcaccaagtactctaagcagtatgaaactgaggagggaaagaaaaacattggggcgcagctggagaaactgaagaagtatgctactgtggttcgtgttttggctcacactcagatcaggaaaatgaaagggttgaagcagaagaaagcccatatcatggaaattcaggttaatggtggtagtattgcacaaaaggtggactttgcatacagtttctttgagaaacaggttcctattgatgcagtgttccagaaggatgagatgattgacatcattggtgtgaccaagggtaaaggttatgagggtgttgtcactcgttggggtgttacccgccttccccgtaagactcacagaggtttgaggaaggttgcttgtattggtgcctggcatcctgcaagagtttcattcactgttgccagggctggtcagaatggataccaccaccgaactgagttgaacaagaaggtttacaagcttggcaaagctggagatgaatctcactctgctcttactgagtttgataggaccgagaaagacattaccccaatgggtggtttccctcactatggtgttgttaaggatgattttatcatggtcaagggatgctgtgttggtcccaagaagagggtcattacattgcgtcaatccctccttaagcagacttctcgtgttgctcttgaggagatcaaactcaagtttatcgatacctcttcaaagtttgggcatggtcgcttccagaccacacaggagaagcagaagttctttggacgcctcaaagcataattatgttaattggatggaaatgctggaattctatttggttgccatcacttataaactttgtagtgtttctgttttgatattatggattctcgggtagtgagttttttttctccttaagttggccaaacttttgtttcagggaagactgatcgtttatttcaaattttgtttatgagtttatctatattatccgtgtttaacaaaaaaaaaaaaaaaaa

SEQ ID NO: 1868 - protein, 389 aa, Glycine max
  misc_feature: Ceres CLONE ID no. 546786
  misc_feature: Ceres CDNA ID no. 25892718
  misc_feature (50)..(343): Pfam Name: Ribosomal_L3 PFAM Desc: Ribosomal protein L3
  misc_feature: Homolog of GI Number: 71032875 NR Desc: 60S ribosomal protein L3
  misc_feature: Homolog of GI Number: 6688812 NR Desc: L3 Ribosomal protein
  misc_feature: Homolog of GI Number: 57092753 NR Desc:  similar to 60S ribosomal protein L3
  misc_feature: Homolog of GI Number: 57088563 NR Desc:  similar to 60S ribosomal protein L3
  misc_feature: Homolog of GI Number: 62655838 NR Desc:  similar to 60S ribosomal protein L3
  misc_feature: Homolog of GI Number: 55661371 NR Desc:  similar to ribosomal protein L3
  misc_feature: Homolog of GI Number: 40882439 NR Desc: RH62603p
  misc_feature: Homolog of GI Number: 40738798 NR Desc: RL3_NEUCR 60S ribosomal protein L3
  misc_feature: Homolog of GI Number: 23397228 NR Desc: putative ribosomal protein
  misc_feature: Homolog of GI Number: 13487800 NR Desc: putative ribosomal protein
MSHRKFEHPRHGSLGFLPRKRAARHRGKVKAFPKDDPSKAPKLTAFLGYKAGMTHIVREVEKPGSKLHKKETCEPVTIIETPPMVIVGVVGYVKTPRGLRTLNTVWAQHLSEELKRRFYKNWCKSKKKAFTKYSKQYETEEGKKNIGAQLEKLKKYATVVRVLAHTQIRKMKGLKQKKAHIMEIQVNGGSIAQKVDFAYSFFEKQVPIDAVFQKDEMIDIIGVTKGKGYEGVVTRWGVTRLPRKTHRGLRKVACIGAWHPARVSFTVARAGQNGYHHRTELNKKVYKLGKAGDESHSALTEFDRTEKDITPMGGFPHYGVVKDDFIMVKGCCVGPKKRVITLRQSLLKQTSRVALEEIKLKFIDTSSKFGHGRFQTTQEKQKFFGRLKA

SEQ ID NO: 1869 - DNA, 931 bp, Glycine max
  misc_feature: Ceres CLONE ID no. 546879
  misc_feature: Ceres CDNA ID no. 36513679
  CDS (270)..(728): REFERENCED BY SEQ ID NO: 1870
aatcaattgaacataattacacatgggtatcgaaagtttcatagagtttgtaagatctttttgtgtttggattgccttctaactcaattgactcggttaatattgactatttaaatatgatctaatggtccgtattcaccgttcttatttattataataatatccatgagttcttacctgatactatgtatgtcacgtcacgcgtgagtactccagtcttagatgttttgttttaaatggatgttttgttgttcagatcactttgagcaatggtgaaggctgtggcagttcttggcagcagcgagggtgtcactggaactattttcttcactcaggagggaaatggtccaaccaccgtaactggatctcttgctggtcttaagcctggtctccatggcttccatgtccatgccttgggggacactaccaatggttgcctgtcaactggagcgcatttcaatcctaataacaacgagcacggtgcccctgaggacgagaatcgtcatgctggtgatcttgggaatgttaatgtcggtgatgatggtaccgttagcttcagtattaccgacagtcagattcctctcactggaccaaactccatcataggaagggctgttgttgtccatgctgattctgatgaccttggaaaaggtggtcatgagcttagcaaaactactggaaatgctggtggcagagtagcttgtggtatcattggtctgcaaggataaactaatcacatgaggttggaaccgtgctttagaattgtggaataaagtagcacccatttaaacccgtttggttaggtccggtctgtgtacggctgaattctgtgttttgcttgtatcgtatctgagggttatatgtagacacttgatgcttaatcaaattgttactttgcctgaagtaaaaaaaaaaaaaaaaaaaaaaaaaa

SEQ ID NO: 1870 - protein, 152 aa, Glycine max
  misc_feature: Ceres CLONE ID no. 546879
  misc_feature: Ceres CDNA ID no. 36513679
  misc_feature (1)..(152): Pfam Name: Sod_Cu PFAM Desc: Copper/zinc superoxide dismutase
  misc_feature: Homolog of GI Number: 47117142 NR Desc: Superoxide dismutase
  misc_feature: Homolog of GI Number: 71040665 NR Desc: Cu
  misc_feature: Homolog of GI Number: 74229677 NR Desc: cytoplasmic Cu/ZnSOD
  misc_feature: Homolog of GI Number: 3860329 NR Desc: superoxide dismutase
  misc_feature: Homolog of GI Number: 6273423 NR Desc: copper/zinc
  misc_feature: Homolog of GI Number: 4102861 NR Desc: copper/zinc
  misc_feature: Homolog of GI Number: 37051121 NR Desc: superoxide dismutase
  misc_feature: Homolog of GI Number: 6018682 NR Desc: superoxide dismutase
  misc_feature: Homolog of GI Number: 13274150 NR Desc: putative cytosolic CuZn
  misc_feature: Homolog of GI Number: 3201501 NR Desc: copper/zinc
MVKAVAVLGSSEGVTGTIFFTQEGNGPTTVTGSLAGLKPGLHGFHVHALGDTTNGCLSTGAHFNPNNNEHGAPEDENRHAGDLGNVNVGDDGTVSFSITDSQIPLTGPNSIIGRAVVVHADSDDLGKGGHELSKTTGNAGGRVACGIIGLQG

SEQ ID NO: 1871 - DNA, 1430 bp, Glycine max
  misc_feature: Ceres CLONE ID no. 546999
  misc_feature: Ceres CDNA ID no. 25446853
  CDS (146)..(1120): REFERENCED BY SEQ ID NO: 1872
ggtcacggtttggtaacatgtcactttcttaatagctcaattattcatcaaccaagttttgatctggtctatattaacctcctttgtggttgtacatcccaatgtgacatcttggtacaagttcaaactttatggttctgaagctatggaattgtgtaaacctgacttggaggagaggatgaaagtgttggcaatgagtacaacagaagatgaagaaatgggagacacatttgctgatagagcagaaacttactaccaaaagaggcctcagctactgtcccttctgcaggacttgtacaatggctacataaccttatctgaccgttacatccaaacactggccaaacacaagcaccatagtagacactcttctcaagtttcaactgtagatgaaggcttctctgaccaagaagaagaagctagtggtgtgagccacagtgattcagacattgaaagctcaatctcctaccaacacccccaacacatgatgatgccaataggcctcccaaaaagctccatgcttgatgttgatgctattgttgctgagcttttgataaggaatattgagtatgacatgttgatgcatgaagttggtgtcatggagaggaggtactgtgagtcctcaagggaaagtgagcttcaaaagagccttcttgaggtgttggagtctgagaggattgttcttttgaatgagaatgctagcttgggctatagggtcaacactttggtggaagaaaacaaggagcttgcatctgagtcagtgttcatcaagagaaaagccggtgagcttgctaagtgtgtgctgaagatgagggaggatcatagagtgtacttgctgcacaggaaaattgaggatcttcaggctcagatacatgccttggagaagaggaacaaggagtactatgataagcttctgagaagagatggtcatgaagatggtaaaaaaggtgtggctttggaggtttgtgttcagatggacaagcaaaagaggttcaagtggaaagatggcaacacttctgggatgaagaaatttcatgggaagaagtcccccccaagtttgtggaaaaagctgaagaacatggatttgttgttgtgtggtactaatccaacttgtgcttgatgatggatgattcatggctggtagtgtttttttgagtccatagaagttttatttaaagttaaatatgtatactttttggcgattttaaagggtagtagcagtaggttattactaggttaattactcataagccatggtgtacattccaacatgaggcctttaacatagaaatgcatgaagtcacccctctagctaaatcattgacaactaattgtagatcagttcaacatcatcttgtaaaagctagagtggatttgtacttttgcctccgttattttagttgatcttttccaaaaaaaaaaaaaaaaaa

SEQ ID NO: 1872 - protein, 324 aa, Glycine max
  misc_feature: Ceres CLONE ID no. 546999
  misc_feature: Ceres CDNA ID no. 25446853
  misc_feature (1)..(62): Pfam Name: KIP1 PFAM Desc: KIP1
  misc_feature: Homolog of GI Number: 53749473 NR Desc: putative kinase interacting protein
  misc_feature: Homolog of GI Number: 8778711 NR Desc: T1N15.1
  misc_feature: Homolog of GI Number: 9280668 NR Desc: F21B7.9
  misc_feature: Homolog of GI Number: 52421277 NR Desc: At1g03470
MELCKPDLEERMKVLAMSTTEDEEMGDTFADRAETYYQKRPQLLSLLQDLYNGYITLSDRYIQTLAKHKHHSRHSSQVSTVDEGFSDQEEEASGVSHSDSDIESSISYQHPQHMMMPIGLPKSSMLDVDAIVAELLIRNIEYDMLMHEVGVMERRYCESSRESELQKSLLEVLESERIVLLNENASLGYRVNTLVEENKELASESVFIKRKAGELAKCVLKMREDHRVYLLHRKIEDLQAQIHALEKRNKEYYDKLLRRDGHEDGKKGVALEVCVQMDKQKRFKWKDGNTSGMKKFHGKKSPPSLWKKLKNMDLLLCGTNPTCA

SEQ ID NO: 1873 - DNA, 1250 bp, Glycine max
  misc_feature: Ceres CLONE ID no. 547002
  misc_feature: Ceres CDNA ID no. 35383201
  CDS (173)..(1036): REFERENCED BY SEQ ID NO: 1874
gagcagcatttgaactctactatcgttttctccgttctttctcaaagccgcactcaactttctaaaaccaaatcggtttgaatcctcatttcccgcctctcactggaaagcagcaaaatcacctttctctactatctatctgttccttttgtactctgagtgggtagaagtcatggtaaggctcactgctgacttgatttggaaaagccctcatttcttcaacacgattaaagagcgtgagttagatctcagaggcaacaagatagctgtaattgaaaacttgggtgctactgaggaccaatttgacacaatagacttatctgacaatgagattgttaaacttgaaaatgtaccatatcttaaccggttgggcacaatgctcattaacaacaacaggattactagaattaatcccaacatcggagagttcttgccaaatttacacactctagttctcacaaacaacagaattgtaaacttggttgaaattgatcctttagcatctcttccaaagctgcacttccttagtctgctggacaacaatattacaaagaaacctaattacaggctttatgttattaacaacctgaaatccctccgggtgttagatttcaagaaagtgaaaaataaggaacggttggaagccaaaaacttgtttgcttcaaaagaagttatagaagagattcaaaggacaccagcaaaaacattttcaactggtgaaactccaaatgtttctgaagcgattgaggaacaacagacgcccaaagtggttgctcctacacctgagcaaattattgctattaaggctgccattgtgaattctcagactcttgaagaggttgctaggcttgaaaaggcattgaagtctggtcagcttcctgcagatttaaaaagcttgagtgataatataatgttggataatgttgatgaaaaacatgaggacatgattcatgatgatagaagtcaagctgatggcaaatcgaatgatacacaagagcagagaaatactgattctgcttcaatggaacaggattagagtgaaaaggttttcaaatagtcctagcactgtggacttctttaatgtcaggttctagagttagactcttggtaattttccatgaggtgtactttatgaatcttccattacttgagaactggatgtttcaatttcactcgtggtgaatcattgctttggcctttatatatgtgttaaattgtattatttttacactaaaaaaaaaaaaaaaaaa

SEQ ID NO: 1874 - protein, 287 aa, Glycine max
  misc_feature: Ceres CLONE ID no. 547002
  misc_feature: Ceres CDNA ID no. 35383201
  misc_feature: Homolog of GI Number: 50251223 NR Desc: putative U2 snRNP protein A'
  misc_feature: Homolog of GI Number: 17669 NR Desc: U2 small nuclear ribonucleoprotein A'
  misc_feature: Homolog of GI Number: 23197870 NR Desc: SnRNP
  misc_feature: Homolog of GI Number: 3955033 NR Desc: U2 snRNP
  misc_feature: Homolog of GI Number: 50753184 NR Desc:  similar to U2 small nuclear ribonucleoprotein A
  misc_feature: Homolog of GI Number: 62897701 NR Desc: small nuclear ribonucleoprotein polypeptide A' variant
  misc_feature: Homolog of GI Number: 51950159 NR Desc: MGC81833 protein
  misc_feature: Homolog of GI Number: 7263962 NR Desc: bA395L14.12
MVRLTADLIWKSPHFFNTIKERELDLRGNKIAVIENLGATEDQFDTIDLSDNEIVKLENVPYLNRLGTMLINNNRITRINPNIGEFLPNLHTLVLTNNRIVNLVEIDPLASLPKLHFLSLLDNNITKKPNYRLYVINNLKSLRVLDFKKVKNKERLEAKNLFASKEVIEEIQRTPAKTFSTGETPNVSEAIEEQQTPKVVAPTPEQIIAIKAAIVNSQTLEEVARLEKALKSGQLPADLKSLSDNIMLDNVDEKHEDMIHDDRSQADGKSNDTQEQRNTDSASMEQD

SEQ ID NO: 1875 - DNA, 1276 bp, Glycine max
  misc_feature: Ceres CLONE ID no. 547071
  misc_feature: Ceres CDNA ID no. 40351054
  CDS (78)..(836): REFERENCED BY SEQ ID NO: 1876
aaaaaaacataaaaagttcattttcacaatcacggtcgcttcctacgactatcgaattcgcgtcagcctcaattctcatggagtttgggattgatgcctccattaatggtgagacagtaggaaatgctactatagtgcagattaatagcagcacagctgatggaaacaaagtgggctgcagttcttttaatcctgcttataaacaaggtcatgatgataatataactcaagattcttctggaggggacacaatcccatcaggaattcctgcagtatcggttgcgtcagttgatgagccctatgtgggccaggagtttgaatatgaagctgcagcacatgcattctataatgcatatgctaaacgtgttggattcatcatacgtgtaagtaagctctcacgatcaaggcgtgatggaactgctattggacgggctcttgtttgcaacagagaaggttacagaatgcccgacaaacgtgaaaagattgtaaggcaaagggcggagacaagggttggttgcagggcaatgattttggtgaggaaagtaagttctggtaaatgggttattacaaagtttataatggaacacacacatcctttgacacctggaaaaggtagaagagattgcatttatgagcaatatccgaatgaacatgataaaattcgagaactatcccagcagttggctatagagagaaagcgatctgcaacctataaaaggcatcttgaattgatatttgagcaaattgaagagcacaatgatagtctttcaaagaaaatacaacacatagtggacagtgtgaaggagatggaaaccaaagaacagaatcagagatagcttgagctcagttatctagtcttttaattcttttccactggatgaaacatgcaatcaactgttcaggtcaaaagtgctgctagaaatatcgtgcaataatatagttgctgacctaggtatcagctttaggtgtcagctgagttctgtagttcaatttgccaagctcaatggaactcaataatccattggattgctttatatgcagtgatatttatagttcagtcaatgtacaggtcctttgaatccattcttctgaagttacactaacaatgtgtgactcataacaggcatgcaaatgccttgacagaattaaattgttccacttccgttgttaatgttgtacagtttgatccatggctgtgttctttgtataacatttacattaaataatgttgagaatgcacagtccggatgttcatatcaaaaaaaaaaaaaaaaaa

SEQ ID NO: 1876 - protein, 252 aa, Glycine max
  misc_feature: Ceres CLONE ID no. 547071
  misc_feature: Ceres CDNA ID no. 40351054
  misc_feature (88)..(176): Pfam Name: FAR1 PFAM Desc: FAR1 family
MEFGIDASINGETVGNATIVQINSSTADGNKVGCSSFNPAYKQGHDDNITQDSSGGDTIPSGIPAVSVASVDEPYVGQEFEYEAAAHAFYNAYAKRVGFIIRVSKLSRSRRDGTAIGRALVCNREGYRMPDKREKIVRQRAETRVGCRAMILVRKVSSGKWVITKFIMEHTHPLTPGKGRRDCIYEQYPNEHDKIRELSQQLAIERKRSATYKRHLELIFEQIEEHNDSLSKKIQHIVDSVKEMETKEQNQR

SEQ ID NO: 1877 - DNA, 1464 bp, Glycine max
  misc_feature: Ceres CLONE ID no. 547438
  misc_feature: Ceres CDNA ID no. 36580562
  CDS (65)..(1099): REFERENCED BY SEQ ID NO: 1878
aaaaaaaaaacaaaaaccattacttttgcaaaagttgctatttctgggtttattcagctgatacatggctgctacatttcctcaacaacttctggtgaagccaatccactttttcaagatcataaccgctcacaatgttcatgaaggaaagctaatgatcccaaataagtttgtgaagaaatatggaaaacgcttacaaaatactctatttctgaagactccaaatggtgctgaatggaaaatgattttgaaaaaacgtgacggtaaaatatggtttcaaaagggatggaaagagtttgcagagtatcactctctagctcatggccatcttttggttttcagatgggatgtaacttctcattttcaggtacacatctttgatttgagtgccttagagattgagtaccctaccgaaataataaaaggtaaaacagcctccaatagaaaaggaaatgaatctccaggtgatgaacatttggagtgtcacagatcaggtcaaaagagaaaagttaactcagttgaatttcttcaacaatgtcaaatgagaagtcgcaagtgtgttaaagttgagaacacgatgatactgccaaggcaggctctgcatcacactgccacaaaatgcaaaggaaaatcgaaggctatggataaccaagttacagctcttgatagagcaagttctttcaaatcttgtaatccattcttcttgaccgtcatgcatcgaacccacatcagttctcacggtagtctgaacttaccaatgaagttctgtaggagtcaccttgatttgcacaagaagcggagacttatcagccttcaggtgttaagtgggagaatttggcctgcaaagtatcagatccataaacaaaagactgctataagatttaaactctcatggaacgcatttgtcaaggacaataacttgaaagttggtgatgtttgcatctttgaactcgttcatggaactaaactaaccttcctggttcacatcttcagagagacagatagttcaaattgttcaacgtctcaagaatctggtcaaatgagagcagcttgtcaaagtcagagaaaagaattgaaaaccatcactgctaccaaataattatcaacaaagactttcagttctcttgtatgaagcttaacatgggccgggattcaacactttttttgaagcctactaccaaatatttggcttttgtagggattacctgctacttgatgacatatgtatttatgaaagtggagataacttcaggtttttgaatgagtttattcgattcacttaacacctgaaaagttagaaatagctatttttgaaattagaagttattctgtttagatgttgcttttaaacttgtccaataccgacatattgttgctatgtattgtcttatattatgtacgaaagcttgttgacattaacaacttatgatttctgcttgtttttttaaaaaaaaaaaaaaaaaa

SEQ ID NO: 1878 - protein, 344 aa, Glycine max
  misc_feature: Ceres CLONE ID no. 547438
  misc_feature: Ceres CDNA ID no. 36580562
  misc_feature (211)..(314): Pfam Name: B3 PFAM Desc: B3 DNA binding domain
  misc_feature: Homolog of GI Number: 21734796 NR Desc: reduced vernalization response 1
  misc_feature: Homolog of GI Number: 33943517 NR Desc: reduced vernalization response 1
  misc_feature: Homolog of GI Number: 40806799 NR Desc: reduced vernalization response 1
  misc_feature: Homolog of GI Number: 20145851 NR Desc: auxin response factor 36
  misc_feature: Homolog of GI Number: 22330135 NR Desc: transcriptional factor B3 family protein
  misc_feature: Homolog of GI Number: 79583291 NR Desc: DNA binding / transcription factor
  misc_feature: Homolog of GI Number: 50901538 NR Desc: putative auxin response factor
  misc_feature: Homolog of GI Number: 50901518 NR Desc: putative auxin response factor
  misc_feature: Homolog of GI Number: 50901520 NR Desc: putative auxin response factor
  misc_feature: Homolog of GI Number: 50428689 NR Desc: putative transcirption factor
MAATFPQQLLVKPIHFFKIITAHNVHEGKLMIPNKFVKKYGKRLQNTLFLKTPNGAEWKMILKKRDGKIWFQKGWKEFAEYHSLAHGHLLVFRWDVTSHFQVHIFDLSALEIEYPTEIIKGKTASNRKGNESPGDEHLECHRSGQKRKVNSVEFLQQCQMRSRKCVKVENTMILPRQALHHTATKCKGKSKAMDNQVTALDRASSFKSCNPFFLTVMHRTHISSHGSLNLPMKFCRSHLDLHKKRRLISLQVLSGRIWPAKYQIHKQKTAIRFKLSWNAFVKDNNLKVGDVCIFELVHGTKLTFLVHIFRETDSSNCSTSQESGQMRAACQSQRKELKTITATK

SEQ ID NO: 1879 - DNA, 1308 bp, Glycine max
  misc_feature: Ceres CLONE ID no. 547911
  misc_feature: Ceres CDNA ID no. 35383202
  CDS (98)..(1102): REFERENCED BY SEQ ID NO: 1880
aaagcactatccattccattccacgttccaagctaagatctgggctttggcttaaaggaatattccgtggggtgatcatagtttttaccctgttcttatgatgggtgactcagaggtggcaaagttcggcttaaaagtcgggaagaatgagaaaaatgggttcccaaggggactagatcctgcaatatccaagttttttgtgcagctccaaagtgttgttaagtctcgacttagtagattagcaaaacaggatggaatgagtttgatgagttctgtccaaagaaaaggggataagtctttcagttactctgaagctgaactaaatgagcaactgcaagcatggagagaaaatccatcttgggttgacaagcctccactaataaaggtcactgctcccaaaggttctctttgcaaccttgatgtagaagttgatgttggcctaccccctgatgcagtatataatatagtgatagatcctgacaataggagagttttcaaaaatatcaaagaagtggtatccagaaaagtgttggttgatgagggtcataggcaagtggttgatcttgaccaagcagccatttggaaatttctttggtggtctgggactatatcaatcaatgttttggtagatcaaaacagaaaagaccattctatgaagttcaagcaaaccaaggctggattcatgaaaaaatttgagggctgctggagagtagagcctttatttgttgacgaagcaatgtgccatccctttaagccagtgacaaaggaagactattatgcatgtgcaagaggcaaaggaagaattggatctaaagttagcctgaaacaaacacttcagccatccattgtccctccccctcccctatcatggtatttgaggggaattaccgcccggacgactgagatgcttataaatgatatgcttgcagaaactgctagaatcagaggaggatatgaggctgaaaagtctaaggcagaggagcttcagggaaaacctggtgaaaatgtggacctggtttctaacacaagtgacattaaagaaagatggaaattgcgtagagaaaatgcaaagcatagccatagaagactgctgaccaagtgatattcctatgtttgttttattttttcagcaatctatctagattgttacatgtagtccagtttaaaggattctaatgtatgcattacacaatgttaaagtcactaattccagctcattgcatgacatttcagtcggatgagttgatgtatccaatagcatagcaagagggaaacattgcagttcttttcaaaaaaaaaaaaaaaaaa

SEQ ID NO: 1880 - protein, 334 aa, Glycine max
  misc_feature: Ceres CLONE ID no. 547911
  misc_feature: Ceres CDNA ID no. 35383202
  misc_feature: Homolog of GI Number: 8778583 NR Desc: F28C11.19
  misc_feature: Homolog of GI Number: 21536644 NR Desc: OBP32pep protein
MMGDSEVAKFGLKVGKNEKNGFPRGLDPAISKFFVQLQSVVKSRLSRLAKQDGMSLMSSVQRKGDKSFSYSEAELNEQLQAWRENPSWVDKPPLIKVTAPKGSLCNLDVEVDVGLPPDAVYNIVIDPDNRRVFKNIKEVVSRKVLVDEGHRQVVDLDQAAIWKFLWWSGTISINVLVDQNRKDHSMKFKQTKAGFMKKFEGCWRVEPLFVDEAMCHPFKPVTKEDYYACARGKGRIGSKVSLKQTLQPSIVPPPPLSWYLRGITARTTEMLINDMLAETARIRGGYEAEKSKAEELQGKPGENVDLVSNTSDIKERWKLRRENAKHSHRRLLTK

SEQ ID NO: 1881 - DNA, 1213 bp, Glycine max
  misc_feature: Ceres CLONE ID no. 547981
  misc_feature: Ceres CDNA ID no. 35383203
  CDS (1)..(975): REFERENCED BY SEQ ID NO: 1882
gaagaggtaacagtctctcgccagaaaggaggcagagaccgagagagcaactgcacgcactgtaactctctcaccgtttcttccgctttgatggaacagtacgagaaggttgagaagataggcgagggaacatacggcgtcgtttacaagggtcgcgaccgctccaccaacgagaccatcgccttgaagaagattcgcttggagcaggaggatgagggggttcccagcaccgccattcgcgagatttctctcttgaaagaaatgcagcacaggaacattgttaggttgcaggatgtagtacatgatgagaagagtttgtatctggtttttgagtaccttgacttagatctaaagaagcacatggattcatctccagaatttgcaaaagatccacgacaactaaaaatgttcctgtaccaaattctctgtggcatcgcttactgtcattcacgtagagttcttcatcgagacttaaaaccacagaatttgttgatagatagcagcaataatgcactaaaacttgcagattttggattggctagggcttttggaattcctgttaggacatttacacatgaggtggtaacactgtggtacagagctccagaaattttgcttggatcccatcattattctaccccagttgatatttggtcagtgggatgcatatttgcagagatggtaaatcaacgacctcttttccctggggactctgagattgatgaattgtttaaaatattcagaatcatgggtacaccaaatgaagacacatggcctggagtgacatcattgcctgattttaaatcagccttccccaaatggcagcctaaggacctgaaaattgtggttccaaatctcaagccagctggtcttgatcttctttctagcatgctttacttggatcccagcaaaagaattactgctaggagcgctcttgagcatgaatacttcaaagacattaaatttgtaccctgatttcttatcttcaaggctgaggtgtctatattagtatgtgtagcatttatgggttttgactcaaacgtgtgttgtccttgcttttttcttcaatgctttgtaccgaatcatatttcatttatttgttcttacatttttattttagtatgtgtgatcttgttacctattacccgtttaatgttttagtttcgatgcaatgcaacaaggaattcagtttgccaaaaaaaaaaaaaaaaaa

SEQ ID NO: 1882 - protein, 294 aa, Glycine max
  misc_feature: Ceres CLONE ID no. 547981
  misc_feature: Ceres CDNA ID no. 35383203
  misc_feature (4)..(287): Pfam Name: Pkinase_Tyr PFAM Desc: Protein tyrosine kinase
  misc_feature: Homolog of GI Number: 13249052 NR Desc: CDC2 homolog
  misc_feature: Homolog of GI Number: 19583 NR Desc: CDC2 kinase
  misc_feature: Homolog of GI Number: 24636266 NR Desc: Cell division control protein 2 homolog
  misc_feature: Homolog of GI Number: 3608177 NR Desc: cdc2
  misc_feature: Homolog of GI Number: 1835258 NR Desc: cdc2 kinase homologue
  misc_feature: Homolog of GI Number: 9885803 NR Desc: cyclin
  misc_feature: Homolog of GI Number: 1321672 NR Desc: cyclin
  misc_feature: Homolog of GI Number: 25989351 NR Desc: cyclin
  misc_feature: Homolog of GI Number: 3123614 NR Desc: cyclin
  misc_feature: Homolog of GI Number: 2117788 NR Desc: protein kinase
  misc_feature: Useful for delaying flowering time
  misc_feature: Useful for increasing chlorophyll and photosynthetic capacity
  misc_feature: Useful for making ornamental plants with modified leaves
  misc_feature: Useful for making plants with increased biomass and foliage
  misc_feature: Useful for making plants with increased biomass and foliage
  misc_feature: Useful for making shorter plants
MEQYEKVEKIGEGTYGVVYKGRDRSTNETIALKKIRLEQEDEGVPSTAIREISLLKEMQHRNIVRLQDVVHDEKSLYLVFEYLDLDLKKHMDSSPEFAKDPRQLKMFLYQILCGIAYCHSRRVLHRDLKPQNLLIDSSNNALKLADFGLARAFGIPVRTFTHEVVTLWYRAPEILLGSHHYSTPVDIWSVGCIFAEMVNQRPLFPGDSEIDELFKIFRIMGTPNEDTWPGVTSLPDFKSAFPKWQPKDLKIVVPNLKPAGLDLLSSMLYLDPSKRITARSALEHEYFKDIKFVP

SEQ ID NO: 1883 - DNA, 1074 bp, Glycine max
  misc_feature: Ceres CLONE ID no. 548061
  misc_feature: Ceres CDNA ID no. 25447432
  CDS (72)..(869): REFERENCED BY SEQ ID NO: 1884
ataattttctgcagtcggcaacttgaagcttcgattctgtgttgttgcttttacttcccatcagaatcagaatggatggtgcaaagacacatggtgctgtgttggcatgtacagatggagcagttcttcccgtcagtcaagtgtttgatgcaattagagagcttgggaatgaaggagttgagcaatgggatcctctagttcttacttctgcctcactcttgagcaagttgccagtggattcttcctctgttgattttctgattttaatttggctgtcaattgattgtcctgtggaccaactgattcacgaaattcttagagtgttaaaagtagatggtacaattcttattcgcaagtcatctcagtctgctgtgggttcatttgataagataatatctgctcttgagaacaagttattgttggcagggtttacagaaacacaagttttacaattaactgggatcaaagctaaaaagccttcatggaaaattggttcatcttttgcgctaaagaaggtgataaagagttcacctaaaatgcaaattgattttgattcggatctaattgatgaggatagtctcttgactgaagaagatttaaagaaaccccagctgccacctggtgattgtgaaattgggagcacaagaaaagcctgcaaaaattgcacctgtgggagggctgaggaagacgaaaaagtattgaagttaggattgacaacagaacagattaataatcctcaatcagcttgtggcaattgtgggctaggggatgctttcaggtgcagtacctgcccttacaagggactgcctgccttcaaattgggcgagaaggtagcactgtccggtaacttccttgctgctgacatataaatggataaagttgcagtacgctttgtcatgggaatgatattattatagaatttaattatttagtatggaattgtcatcagttatgttaatgctagcagaaccattcatccaagttgtggttttgatacaattttacatatgaccatacgagagattcaagttttccagctattgaagagctgtaatgccaaaaaaaaaaaaaaaa

SEQ ID NO: 1884 - protein, 265 aa, Glycine max
  misc_feature: Ceres CLONE ID no. 548061
  misc_feature: Ceres CDNA ID no. 25447432
  misc_feature: Homolog of GI Number: 50929593 NR Desc: OSJNBa0018M05.11
  misc_feature: Homolog of GI Number: 50929731 NR Desc: OSJNBa0032F06.14
  misc_feature: Homolog of GI Number: 54645685 NR Desc: GA18008
  misc_feature: Homolog of GI Number: 17933742 NR Desc: CG4180
  misc_feature: Homolog of GI Number: 66516193 NR Desc:  similar to ENSANGP00000013898
  misc_feature: Homolog of GI Number: 57012667 NR Desc: Anamorsin
  misc_feature: Homolog of GI Number: 59857649 NR Desc: cytokine induced apoptosis inhibitor 1
  misc_feature: Homolog of GI Number: 58392791 NR Desc: ENSANGP00000013898
  misc_feature: Homolog of GI Number: 49065516 NR Desc: LOC57019
  misc_feature: Useful for making plants with altered leaf shape eg curled leaves
  misc_feature: Useful for making plants with increased biomass and foliage
  misc_feature: Useful for sterility
MDGAKTHGAVLACTDGAVLPVSQVFDAIRELGNEGVEQWDPLVLTSASLLSKLPVDSSSVDFLILIWLSIDCPVDQLIHEILRVLKVDGTILIRKSSQSAVGSFDKIISALENKLLLAGFTETQVLQLTGIKAKKPSWKIGSSFALKKVIKSSPKMQIDFDSDLIDEDSLLTEEDLKKPQLPPGDCEIGSTRKACKNCTCGRAEEDEKVLKLGLTTEQINNPQSACGNCGLGDAFRCSTCPYKGLPAFKLGEKVALSGNFLAADI

SEQ ID NO: 1885 - DNA, 896 bp, Glycine max
  misc_feature: Ceres CLONE ID no. 548353
  misc_feature: Ceres CDNA ID no. 40351055
  CDS (169)..(747): REFERENCED BY SEQ ID NO: 1886
accacatcaactcatcaagggttgtgaaagcagagaagtgagatacactaagttatcctcataaatacactctaattaggtggcaagataagtgtctaaccttagtaacattgccacatattgtgttcattttggaattgtgccactaaaattctattcaattcatctatggctgcctcttcttatgctatgcaatcaatcctggcaaaccctttgatccgcatttccagcgggtctagggtgaaccaatttggcgttcctgctttgcacatgagaaggaatgttggcctgagagttaggtccatggctaaggaagaacaaccaagtgagcctgcaaccccagttacaccgccaccatcagtagaacccaagccacagccagtctctgctccttcaccaaaggtgagcactaagttttctgatgtgttggcattcagtgggccagtacctgagaggatcaatggaaggttggccatgattgggtttgtggctgcaatggcagtggaagtagccaaagggcaaggtgtgttagaacaaatatccaatggtggcatcccatggttcttggggacaagtgtggtccttacccttgcttccttgattccactcttccaaggtgtcagcgtggagtctaagtccaaagggttcatgtcctcagatgcagaactgtggaatgggagatttgctatgttgggtttgattgctctggcttttactgagtatgttaagggtagtactttggtataattcagtcatgaaggcacaccacaatggacttaatctcctttgtgattagagagaccaatgtttatttgtacttcgtgtgtttatttaatctacatatcaaaattatttcgttaatcataaccaaacttcttcacacaaaaaaaaaaaaa

SEQ ID NO: 1886 - protein, 192 aa, Glycine max
  misc_feature: Ceres CLONE ID no. 548353
  misc_feature: Ceres CDNA ID no. 40351055
  misc_feature (98)..(114): Pfam Name: Chloroa_b PFAM Desc: Chlorophyll A
MAASSYAMQSILANPLIRISSGSRVNQFGVPALHMRRNVGLRVRSMAKEEQPSEPATPVTPPPSVEPKPQPVSAPSPKVSTKFSDVLAFSGPVPERINGRLAMIGFVAAMAVEVAKGQGVLEQISNGGIPWFLGTSVVLTLASLIPLFQGVSVESKSKGFMSSDAELWNGRFAMLGLIALAFTEYVKGSTLV

SEQ ID NO: 1887 - DNA, 807 bp, Glycine max
  misc_feature: Ceres CLONE ID no. 548761
  misc_feature: Ceres CDNA ID no. 25446222
  CDS (93)..(509): REFERENCED BY SEQ ID NO: 1888
aaaaaaaaaaaaaaaaacacaacgtcacctgtgcgttcctggaatggtacatcagcagagggttctcttctgttctggttaggttatgctctatgcaaaacagtgccatggaagcctccaaactcagtagcagtgatcaaaacgttcgatgccatcactgcgcaggacccctttccaaagacatggaaaccagtcactggaccgtttcgcctctcattagggatagcttctccatgattggttctgccgttggcggcgttgcaagtgcattttatggattcaatcttgttatgccgattgtccaaagaaggatcaaaggacccatgtggttgcattttctcataggtgcaccacctgtgatagtattctcttcagcctgtgccggactggcgggtggggctgttcctgctgcagcacaacttgtttcctcatcttatcatgcagcttactcttctcctacctcacctccgccatcaaaggatgaaaatattcaaaggtcgagaaaatgatataatggacttctgagtctgaccattcattcatgatgggtgtgctgagagttttgtttttcttgtgtaaatactactctgagattggtatgtttggaacttggatgagaggaaagataatagtaaggagaaaaaacacatatgatgcattttattttgtttgattaaagtgaaagtgaaagatagatagagaaaaaaagtttattgtacttttgttttgcatacactgcgttcttgtttattggatgcaataaaataacaaatcgttggcagtttggttaaaaaaaaaaaaaaaaaa

SEQ ID NO: 1888 - protein, 133 aa, Glycine max
  misc_feature: Ceres CLONE ID no. 548761
  misc_feature: Ceres CDNA ID no. 25446222
  misc_feature: Homolog of GI Number: 38566566 NR Desc: At3g04040
  misc_feature: Homolog of GI Number: 51091152 NR Desc: gb protein
  misc_feature: Homolog of GI Number: 18390108 NR Desc: gb protein
MEASKLSSSDQNVRCHHCAGPLSKDMETSHWTVSPLIRDSFSMIGSAVGGVASAFYGFNLVMPIVQRRIKGPMWLHFLIGAPPVIVFSSACAGLAGGAVPAAAQLVSSSYHAAYSSPTSPPPSKDENIQRSRK

SEQ ID NO: 1889 - DNA, 1349 bp, Glycine max
  misc_feature: Ceres CLONE ID no. 548863
  misc_feature: Ceres CDNA ID no. 40351056
  CDS (1)..(1212): REFERENCED BY SEQ ID NO: 1890
gtggttgaagcagagataagtgatatgcaaaacatgtctctaatagcttcactctcctccacaacttcacaactcacttcccttccttccctcccttcttcctcctctccactttctcgcaaatttcccctcactttccgggaaaaaaacagaactccaatcacacctcacaagctccctttttcagcaaggcctaccaccaccagagtggtgttggtgaagtctcaggccacagcacctgcttcttctgaggctgtggcagtgacacctgtgtcttctgagatgaaggcatgggtctatggggaatatgggggtgtggatgttctgaagctggactccaatgttactgtgcctgatgtgaaggaagatcaggttctaatcaaagttgttgctgctgctcttaaccctgttgatgccaagaggaggcagggaaagtttaaggccactgattctccccttccgactgttccgggctacgatgtagcgggtgtggtggtgaaggttggtagtcaagtgaaggactttaaagtgggtgatgaagtgtatggagatgtaaatgagaaagcactagaaggacctaagcaattcgggtctttggctgagtacacagctgttgaggagaaattgttggcatcaaaaccgaagaatttggactttgctcaagctgctgctcttcctctagcaattgagactgcttatgagggtttggagaggactggattttctcctggtaaatctattcttgttctaaatggttctggaggagttggtagcctagtgattcagctagctaagcaagtttttggagcttcaagagttgctgccacttcgagtactagaaatttggacctattgaaaagcttgggagctgatttggctattgactacacaaaagagaactttgaagatttgccagaaaaatttgatgtagtttatgatgccattgggcaatgtgacagggcagtgaaggctgtgaaagaaggcggcagtgtcgtggcactcacaggtgctgttacaccacctggcttcagatttgtagttacttccaatggagctgttctgaggaaactaaacccttacttagaaagtgggaaggtgaagccaattgtagaccccaaaggtccattctcctttgataagcttgctgaagccttctcttaccttgaaacaaaccgagccactggaaaggttgttatacatccaatcccttgaatcaaataaaagggataggcaatttttctgtgtgtctagtaaacttcacattctgtgcaaatcagagtttagataaaaactcaaaaaaatataatgaacttcatttttacattcttagcaaaaaaaaaaaaaaaaaa

SEQ ID NO: 1890 - protein, 309 aa, Glycine max
  misc_feature: Ceres CLONE ID no. 548863
  misc_feature: Ceres CDNA ID no. 40351056
  misc_feature (149)..(238): Pfam Name: ADH_zinc_N PFAM Desc: Zinc
MKAWVYGEYGGVDVLKLDSNVTVPDVKEDQVLIKVVAAALNPVDAKRRQGKFKATDSPLPTVPGYDVAGVVVKVGSQVKDFKVGDEVYGDVNEKALEGPKQFGSLAEYTAVEEKLLASKPKNLDFAQAAALPLAIETAYEGLERTGFSPGKSILVLNGSGGVGSLVIQLAKQVFGASRVAATSSTRNLDLLKSLGADLAIDYTKENFEDLPEKFDVVYDAIGQCDRAVKAVKEGGSVVALTGAVTPPGFRFVVTSNGAVLRKLNPYLESGKVKPIVDPKGPFSFDKLAEAFSYLETNRATGKVVIHPIP

SEQ ID NO: 1891 - DNA, 1347 bp, Glycine max
  misc_feature: Ceres CLONE ID no. 549218
  misc_feature: Ceres CDNA ID no. 25446223
  CDS (208)..(1197): REFERENCED BY SEQ ID NO: 1892
acagttagagtgaaacaataggcgatccgtaacttacgttgttgttgaacggagcacgatcccaacatctctctcatacactataactacctatttcctccaaatggttttcttcttcagtttcaatcacaccctctttcaggttgtagctgctgactcattggatgaagaattcttgatcaaataactcgtcataattgaattcaaatgaagacaggctccatgattttttcattgttgcatgtacctagatttagaatacaaagcttagctaattgctggggtgaaaccttccacagtttcagtacaacttgtggaaacaattctaacgtcaggctgcttggttctagaatttatggtcttcagggaggacagagaaagaagtggacaagacctataactacaaatatagaaggcaaggggagcaccaaatcaaaaagtatcaagcatgagattttgagtgaaaccattttagcaaatgctacagtaaatgtaaataaaacacagctagataaatcccaagaaattcagtattgtgacatacaacaagagattgctgagaataaagacttgtcgagctatactgttattgtttttgatatcgagaccacagggtttagcagagagaatgaaagaatcattgaaattgcacttcgagatcttcagggtggcgagaacagcacttttcagactcttgtaaaccctcaatgcaaagttcctaattcacatattcatggcattactactcatatggtcaacaaacctggtgttccaaggatggaggacctaattcccattttattgcaatacgttcgaagtcgtgagaagcctgggggagatgttatatttgtagctcataatgctcgctgttttgacgtgcccttcatcattaatgagttacgacgttattctgtagagattcctcctaattggttgtttttggacacccttcctttagcccgtgaactaatcaagtccggaggaacaacactttcttcaacatccctagctgcccttcgtgacctctacggaattaaagtggatggatcagctcacagggctatggtagatgtgaacgcattgtccttgattctttccaggttgacctctgatctgaagttgaccctatctgaccttgtcaaaaaatcattcacagaatcagatattatcaactctaagaataaaaagaagaactagactagttttctgactgtattttgcattgatgttgtgacaaaagaattattttgtaacgaaaatttgaactctaaatttttagttgaagtagaaaagaaacgggttgttctcaataaaatcttacaattatgtaaaaaaaaaaaaaaaaaa

SEQ ID NO: 1892 - protein, 324 aa, Glycine max
  misc_feature: Ceres CLONE ID no. 549218
  misc_feature: Ceres CDNA ID no. 25446223
  misc_feature (122)..(291): Pfam Name: Exonuc_X PFAM Desc: Exonuclease
  misc_feature: Homolog of GI Number: 50928827 NR Desc: OSJNBa0053K19.7
  misc_feature: Homolog of GI Number: 15604982 NR Desc: DNA Pol III Epsilon Chain
  misc_feature: Homolog of GI Number: 18310673 NR Desc: DNA polymerase III alpha subunit
  misc_feature: Homolog of GI Number: 51892851 NR Desc: ATP
  misc_feature: Homolog of GI Number: 46446795 NR Desc: putative DNA polymerase III
  misc_feature: Homolog of GI Number: 28210957 NR Desc: DNA polymerase III
  misc_feature: Homolog of GI Number: 71657888 NR Desc: mitochondrial DNA polymerase I protein B
  misc_feature: Homolog of GI Number: 21929661 NR Desc: DNA polymerase I
  misc_feature: Homolog of GI Number: 71755261 NR Desc: mitochondrial DNA polymerase I protein B
MIFSLLHVPRFRIQSLANCWGETFHSFSTTCGNNSNVRLLGSRIYGLQGGQRKKWTRPITTNIEGKGSTKSKSIKHEILSETILANATVNVNKTQLDKSQEIQYCDIQQEIAENKDLSSYTVIVFDIETTGFSRENERIIEIALRDLQGGENSTFQTLVNPQCKVPNSHIHGITTHMVNKPGVPRMEDLIPILLQYVRSREKPGGDVIFVAHNARCFDVPFIINELRRYSVEIPPNWLFLDTLPLARELIKSGGTTLSSTSLAALRDLYGIKVDGSAHRAMVDVNALSLILSRLTSDLKLTLSDLVKKSFTESDIINSKNKKKN

SEQ ID NO: 1893 - DNA, 1221 bp, Glycine max
  misc_feature: Ceres CLONE ID no. 549329
  misc_feature: Ceres CDNA ID no. 40351057
  CDS (1)..(1035): REFERENCED BY SEQ ID NO: 1894
ggtcaactagcacacttccctattcttaaaggggttcaggatctcaaggtacctgccaaggaacaaaagtctgtcaagttcaacttgccagaggaggatgaatttgatgccagtgatgatggttatgatgaggatggattaggccatggacatccaatgcagaacaagatcatgcccatgatgattaatcacaaccataaagacaattctggtgggagtaggaatattaatggaagtgttaagaaagctgacgtcattgatcaggcaatgctgttcaagggcaaaggtggaaatttcgatgaggcagaagctgacaatgatggaggaaagaaaggtagtagtagccaaaaagatgaaatcaagaagggggatttggataagcctaaggcagtcggtgaggtagattttcataagaaaaagaatgggaaaagtgagaatggattacttggtcggtttctaggctttgggaaaaagagcaagaaaggagaattagaagaaacaacttataccaataagagcaagaaccaaaacagtggtgctgaaaataagaaaggcaaggaagggaaattggaggatcatggtaacaatgactttgattttcatgattacgatgatacccctcctcatcccaaaaatggcaaaagtggtaagggtagtaacaatgtcaaagaaggccagatgggcccgggcccaataatgggtaataatcttccaatgcgtcatcagatggagaatattcaagcagtacaaggacttccggcgatgaatggtgatggtggctattatcaaggggtgcaaatgcaacatgctccatacaataaccttcagcagcactacatgggtatgatgatgaaccagcatcaacatcagcaagcaaatatgaacaacaacatgtacccaacacccatgatgtatggtaggccgcatccatctatgaactacatgccaccacctcctatgccatctcacccaattgccgatcctattactcataccttcagtgatgagaatgttgagagctgcagtatcatgtaattaattaattaattactagtgacaacttgcttttctgctctatgattcggtctttagggagttcattaaattttgtgtaggacggaaaatgtgggatgtttaggattatattattatattatatataaataaatagtatattgtttgctcaaaaaaaaaaaaaaaaagaaaaaaaaaaaaaaaaaa

SEQ ID NO: 1894 - protein, 292 aa, Glycine max
  misc_feature: Ceres CLONE ID no. 549329
  misc_feature: Ceres CDNA ID no. 40351057
MQNKIMPMMINHNHKDNSGGSRNINGSVKKADVIDQAMLFKGKGGNFDEAEADNDGGKKGSSSQKDEIKKGDLDKPKAVGEVDFHKKKNGKSENGLLGRFLGFGKKSKKGELEETTYTNKSKNQNSGAENKKGKEGKLEDHGNNDFDFHDYDDTPPHPKNGKSGKGSNNVKEGQMGPGPIMGNNLPMRHQMENIQAVQGLPAMNGDGGYYQGVQMQHAPYNNLQQHYMGMMMNQHQHQQANMNNNMYPTPMMYGRPHPSMNYMPPPPMPSHPIADPITHTFSDENVESCSIM

SEQ ID NO: 1895 - DNA, 1693 bp, Glycine max
  misc_feature: Ceres CLONE ID no. 553758
  misc_feature: Ceres CDNA ID no. 40041255
  CDS (141)..(1370): REFERENCED BY SEQ ID NO: 1896
ggtagagtgagttttgattgtgggctgctccagccactgccgttggtcttatcttttgctgaaacttgaaattgaatctctctcaagcttccttttttaaaaggctagggatcgaagcagaaggaactaagtaagaagagatgggattggatttgagacaagtggtggcagctgtcctcaccctcacgatgtttgtcatgcttggaaatatgatcaaaagagaccactttgataattcacttcaagaaaagcttccaggaggatcggaggatgccaactttgagactgctaagtttgatgctactcatgtaagaaagaatatagggctttggaagggagatgcggatggcctaaaaccgtgttgggttaagccatctgctgatgatgtggaacagacccaaggatttgttacttttgcgttgaccaatggcccagagtaccatatttctcagatagcagatgcagtgattgttgctagaagtctgggggcaacacttgtcatacctgacatcagaggaagccaacctggtgacaagtggaattttgaggatatttatgatgttgatgtgttcatgaaaagcatggaaggggtggtcagagtggcaaaggatcttcctactcatatatcaacacggaatattgctgctgtgaaagtccctaatcgggttacagaagattacatagcggaacatgtggagccaatatacagaacaaagggaagtataagacttgcaacttacttcccttcaataaacatgagaaaggcagggaaaaaaggtgacactgattctgttgcatgcttagcaatgtttggaagtttagagttgcagccagaaatgcatgaagtggttgattcaatggttgaaagactaagaactttaagccgaaattcagacgggcaattcatagctgtggacttgagggttgatatgttgaataagaagggctgccaaaatagtgatattgagaaaagctgctacaatgcacaagagattgctgtgttttttaggcagattggttttgacaaggataccacagtttatgtgactgaatcaaggtgggatagcagccttgattctctcaaggatttgtttcctaagacttatacaaaggaagccatcatgccggcagataagaagaaaaggttcctagattctgaatttgagaaagtgattgacttttatgtaagtgcagaaagtgatgtgttcgtaccagcaatttcaggtctgttttatgccaatgtagttggaaagagaataggttccggaaaaacacgcatactggttccagctccatctgcttctgcctacaatttcctctctccttatgtctccaacaaaaaccactttgcttattcttgttactgttagcagcaaaaacaacaacttcatttatatattatgctccaagacacaatctcagtttcccaaactacctgcccgttatgaccttttgcttttccaagcgttcaccaaaagggttcaccgtcaaatgtgtacagagtgctttctattcatcacattttctttgtaaaattctggttgccttcatggttatttatcataattggtggtggtgaaactaaagataatgtatttgtttgatctccatggtataatggcatcgcatgtattggatttctttttcgtgataaaaaggtatatttttttcttggaaaaaaaaaaaaaaaaaa

SEQ ID NO: 1896 - protein, 409 aa, Glycine max
  misc_feature: Ceres CLONE ID no. 553758
  misc_feature: Ceres CDNA ID no. 40041255
  misc_feature (345)..(362): Pfam Name: DUF246 PFAM Desc: Plant protein family
  misc_feature: Homolog of GI Number: 8778600 NR Desc: F5M15.13
  misc_feature: Homolog of GI Number: 8886957 NR Desc: F2D10.3
MGLDLRQVVAAVLTLTMFVMLGNMIKRDHFDNSLQEKLPGGSEDANFETAKFDATHVRKNIGLWKGDADGLKPCWVKPSADDVEQTQGFVTFALTNGPEYHISQIADAVIVARSLGATLVIPDIRGSQPGDKWNFEDIYDVDVFMKSMEGVVRVAKDLPTHISTRNIAAVKVPNRVTEDYIAEHVEPIYRTKGSIRLATYFPSINMRKAGKKGDTDSVACLAMFGSLELQPEMHEVVDSMVERLRTLSRNSDGQFIAVDLRVDMLNKKGCQNSDIEKSCYNAQEIAVFFRQIGFDKDTTVYVTESRWDSSLDSLKDLFPKTYTKEAIMPADKKKRFLDSEFEKVIDFYVSAESDVFVPAISGLFYANVVGKRIGSGKTRILVPAPSASAYNFLSPYVSNKNHFAYSCYC

SEQ ID NO: 1897 - DNA, 1310 bp, Glycine max
  misc_feature: Ceres CLONE ID no. 553880
  misc_feature: Ceres CDNA ID no. 40351058
  CDS (105)..(902): REFERENCED BY SEQ ID NO: 1898
agttctgcgccaactgaaacgcagatcgaactccgccgtagccatcatcaccgatcgaacttcgcaagacagagatcaaattctgattccgacacagtaacagtatgagcgtcatcgacattctaacccgagtcgattccatttgcaagaagtacgacaaatacgacgtcgataagcaccgcgatgctaatgtctctggcgacgatgcctttgccagactctacgcctccgtcgacgccgacatcgaggccctacttcagaaagcagaaagtgcttccaaggagaaaggtaaggcatcagctgtagcgatcaatgcagagattcgtcgtactaaggctcggttgctggaggaggttcccaagttgcagagattagctgtgaaaaaggtaaaggggctttcatcacaagaatttgctgcccgtaatgatttggttcttgcattgccggatagaatccaagcaataccagatggggctcctcctgtgccaaaacaaactggaggctgggcagcttctgcttcacgtcctgaaattaagtttgattcagatgggcgatttgatgatgaatacttccaacaaagtgaacaatcaaatcaatttaggcaggaatatgaaatgcgtagaatgaaacaggatcaaggtttggatgtgattgctgaaggattggatacattgaaaaacatggcacatgatatgaatgaggaactggatagacaagttccactgatggatgagattgacactaaggtggacaaggcatcctctgaccttaagaatacaaatgttagacttaaagacacagtgaaccagcttcgatccagtcgaaacttctgtattgatattgttttgttgattataattttgggaattgctgcctacttatacaacgtactaaagaaatgatgtgtacaaaggctgatggatgttcgaatggtttgccttgtattttgaggatatcttctgatttttttattttatttctaccattgtgaaaatttcctgcgacttgagaggcgtgcccttgtgctttataagcagtcctgtgtaatgtgtatgcagtcatgtcagataccattagtatgtgtatgttaaatagttgctgcttattttatacacttgttttggtatatgttatagtattataaattgacgctgatgaattaggaaggatgctttgattgaaattaggaattctagctggagttagctagctacaagcacgacgaaaagataagtatggggacccgcttaataattgaaagaaaattatattcgactaattattttgttgtcaaaaaaaaaaaaaaaaaa

SEQ ID NO: 1898 - protein, 265 aa, Glycine max
  misc_feature: Ceres CLONE ID no. 553880
  misc_feature: Ceres CDNA ID no. 40351058
  misc_feature (175)..(237): Pfam Name: SNARE PFAM Desc: SNARE domain
MSVIDILTRVDSICKKYDKYDVDKHRDANVSGDDAFARLYASVDADIEALLQKAESASKEKGKASAVAINAEIRRTKARLLEEVPKLQRLAVKKVKGLSSQEFAARNDLVLALPDRIQAIPDGAPPVPKQTGGWAASASRPEIKFDSDGRFDDEYFQQSEQSNQFRQEYEMRRMKQDQGLDVIAEGLDTLKNMAHDMNEELDRQVPLMDEIDTKVDKASSDLKNTNVRLKDTVNQLRSSRNFCIDIVLLIIILGIAAYLYNVLKK

SEQ ID NO: 1899 - DNA, 1337 bp, Glycine max
  misc_feature: Ceres CLONE ID no. 554307
  misc_feature: Ceres CDNA ID no. 40351059
  CDS (70)..(981): REFERENCED BY SEQ ID NO: 1900
ggttctctctctctctctcttatttgcttcttcgagtttcacagccaagtcgtaaaagggtttcaagggatggaaaacatgcagagcttctggcaattgggtgatgaactccgtgggcactcaaaagcatcggaggatcacaagtggttaatggttgcctcgaaactggccgaacagacaagattgaagggggagcgtgtgaacaaccttgatctttcaaagggacccattgaaacaaggtcaagggataaatttgggttccaggaagagaacaaatttgattctcttaacttgagcatgttgaacctggactctaaatttactgagaatgtgagcaaaagctcacttcgaaatggtgtttatggtatgaatgcagtgtatcagaaaaacaatgcaaacttggtgagtaatgtgatcagtaacaagtacaatggcagtattcagcataacaaagagatcaacaacaacactggcaacaacatcaacaccaatgaaagcaacaacacaaatgcaactgacaaaaggtttaagaccttgcctgctgcggagacactcccccgcaatgaggtgcttggaggatacatctttgtctgtaacaatgacacaatgcaggaagacttgaaacgtcagctatttggtttgcctccaaggtatcgagattctgttagggcaataacaccagggctacctttatttctttataactatactactcatcagctgcatggtatttttgaggcagcaagttttggtggctctaacatagatccaactgcctgggaggataaaaaatgcaaaggggaatcaaggtttccagctcaggtaagaatccgtgtcaggaagctctgcaaggcattggaagaagattctttcaggccagtattgcatcattatgacgggccaaagtttcgtcttgaactgtcagttccagagactctggatctgttggacctatgtgaacaagctggttcagcagcataagcaagaatcaaacaaagaatgaatgtgcaaaataggtaggttttggtgtgccagctgtgtggttttggcagattttccgtgaagcgtaagcttggaaagtgaatcatcatcatgttttgggggaagtaaagggagcgtgttgttgagagtgagagaccctttgttggtgaataaatggttgttgtggtatctatcccctggaagatgctttgtagctgttacatgacatttaatacctttgtatgattaagtaaagtacagactactgtttgtactgctaaagtatgtatctgttgaaccaagaaaaaaattaaagttaaaaagcttcatgtattaccaaaaaaaaaaaaaaaaaa

SEQ ID NO: 1900 - protein, 303 aa, Glycine max
  misc_feature: Ceres CLONE ID no. 554307
  misc_feature: Ceres CDNA ID no. 40351059
MENMQSFWQLGDELRGHSKASEDHKWLMVASKLAEQTRLKGERVNNLDLSKGPIETRSRDKFGFQEENKFDSLNLSMLNLDSKFTENVSKSSLRNGVYGMNAVYQKNNANLVSNVISNKYNGSIQHNKEINNNTGNNINTNESNNTNATDKRFKTLPAAETLPRNEVLGGYIFVCNNDTMQEDLKRQLFGLPPRYRDSVRAITPGLPLFLYNYTTHQLHGIFEAASFGGSNIDPTAWEDKKCKGESRFPAQVRIRVRKLCKALEEDSFRPVLHHYDGPKFRLELSVPETLDLLDLCEQAGSAA

SEQ ID NO: 1901 - DNA, 1479 bp, Glycine max
  misc_feature: Ceres CLONE ID no. 554308
  misc_feature: Ceres CDNA ID no. 40351060
  CDS (311)..(1039): REFERENCED BY SEQ ID NO: 1902
atattaaaaaaactagaaaactacaattttaatactatttgtgattattcttaattataacatttttattaaaaaaatttaactctttcttttttgagcaattttagtgacatttttttaatactatttgtgattagctgaaatttaacggtaatcactaatttttgtagatcccatatctaaattttgacaaattccaggcaaagagagggttaagaaggaattttgagagcatttctcttgttttgaatttcttcgcttcttatttggcttgtagttatagaaaaacttgtagaatatcgattcatatatgaataggaatatatataatttgtggtgcacgcagttttatttgaactgcatgcagagaatcatggatcctgttccgggtgacgggtgttgctcatgtacacaggtacctgttgcttggctagtgggtaaaacaattggactctacttctcagcggaatggtgcgtcccatgcgccaagttcactccaaaactgatttctgtttacgagaagataaagcacgagctagccggaaagggagaggaagacttcgaagttgtgctaatatccagcgaccgcgaccaagcatcctttgactcctactacagcaccatgccttggttagccttacctttcggtgacccagaaatcaagaacctcgttagacactacaacgtgcaagggattccctggttggtgatcataggccctgatggtaaaacaataaccgtacatggcaggagtttgataaacttgtaccaagaaaatgcgtaccctttcaccaacgccaaagtggaggagctggagaaacagcttgaggaagaggccaagggtcttccggcattggtgtatcatgaagggcaccgccatgatctgaatttggtgtctgatggaaacggtggagggccctttatttgctgcgtatgtgatgagcaagggtctagttgggcctaccagtgtctccaatgtggctatgaagtgcacccaaagtgcgtcagaactgtggaacgtcatgacaataatgtctaggaattttttaattaaattcctgtggcaattaattctatatcctgtgttaccgtccaagaggggcgataacttgacttggctgtatcctaatctgcaccagggaagggactggaatgccctttagataaattagattacgtatctttatggtgcttttctacttgttcagaatatgtgtgactgagagtcataagaaggaaaggtgatacttggggaatcatctatttggttctccatagcttttaagaaaaactgttgttacttgttcgttatcaagtgtctttctataactaacaatgacaataaaatttatagtacgtactgtatttgatatgtttaaaagtgaacaagttgcattgttcgttgatattggtcaatatatggtcatgatgcatgtatctgtaaaaaaaaaaaaaaaaaagaaaaaaaaaaaaaaaaaa

SEQ ID NO: 1902 - protein, 242 aa, Glycine max
  misc_feature: Ceres CLONE ID no. 554308
  misc_feature: Ceres CDNA ID no. 40351060
  misc_feature (204)..(232): Pfam Name: C1_3 PFAM Desc: C1
MNRNIYNLWCTQFYLNCMQRIMDPVPGDGCCSCTQVPVAWLVGKTIGLYFSAEWCVPCAKFTPKLISVYEKIKHELAGKGEEDFEVVLISSDRDQASFDSYYSTMPWLALPFGDPEIKNLVRHYNVQGIPWLVIIGPDGKTITVHGRSLINLYQENAYPFTNAKVEELEKQLEEEAKGLPALVYHEGHRHDLNLVSDGNGGGPFICCVCDEQGSSWAYQCLQCGYEVHPKCVRTVERHDNNV

SEQ ID NO: 1903 - DNA, 1203 bp, Glycine max
  misc_feature: Ceres CLONE ID no. 554743
  misc_feature: Ceres CDNA ID no. 25445686
  CDS (157)..(792): REFERENCED BY SEQ ID NO: 1904
ttttttttatcatcagcttcatttattagtattttggtcggttctatatccttcctttttctttttgtcttctttccactttcccctcactttgttgtgagatcttgacaacaaagtgcgtgcttgaaaactgaagtcccttttaggaatacgagaatgcaggatccaacgttgttccaacccatgaaaccccactttccggaacaggagcagcttaaatgcccgcgctgtgactccaccaacaccaagttctgctactacaacaactacaacctctcgcagccacgccatttttgcaagaactgcagaaggtattggaccaaaggtggtgccttgagaaacatccctgttggtggtggaagcagaaagaacacaaagcgatcatcttcatccaacaacaacaccaaacgcgcttccccatcacccccagtttcctctgcacccgctccagaacccgaccctacccggattggccccaccccggttgttggtggcgggagtttcagttcccttttggcatcaagtggccatttgggcctggggaacctcttggagggtctgaattcaagtgggtctaatctgaaaactgtgcaaatggaagagtttggggagaatgttagttcgggtccggttgcggatccggattcgggtcggaatcccgggttggagatgcaaagcaatgggaacgcagagaattttctgagtttgcaaaatggtgattcaagctgttggaatggtactagtggttggtctcaccttgctattttcactcctgggtcaagctttcagtaatgacaaattaatgaatatgattactctgatctgtatatttagacatatgtcgtactattatggaggatcacaaaccagaaggccactgctataggatcattaggtaaagtttctcctgttttggatttttatatttgtgaattgtggttggtgttcttcagctatatcaatgatggaagagaaatggaaagcaagtcatattttagggcagggtatggggggtatatgaatgttgttgtagtgagattgttttcagtctcatcacgtagaggaagtgttgccatggcttggagattctaatttatttaatctatatatgtgtattttacacgcgcagtttgtcatatgctttttttaataatagctttttcgagtaaaaaaaaaaaaaaaaataaaaaaaaaaaaaaaaaa

SEQ ID NO: 1904 - protein, 211 aa, Glycine max
  misc_feature: Ceres CLONE ID no. 554743
  misc_feature: Ceres CDNA ID no. 25445686
  misc_feature (15)..(77): Pfam Name: zf PFAM Desc: Dof domain
  misc_feature: Homolog of GI Number: 23297302 NR Desc: Dof zinc finger protein
  misc_feature: Homolog of GI Number: 15027981 NR Desc: putative Dof zinc finger protein
  misc_feature: Homolog of GI Number: 3608261 NR Desc: dof zinc finger protein
  misc_feature: Homolog of GI Number: 37051131 NR Desc: DNA binding with one finger 5 protein
  misc_feature: Homolog of GI Number: 50399945 NR Desc: putative Dof zinc finger protein
  misc_feature: Homolog of GI Number: 37051127 NR Desc: DNA binding with one finger 3 protein
  misc_feature: Homolog of GI Number: 30680246 NR Desc: Dof
  misc_feature: Homolog of GI Number: 8439908 NR Desc: Strong similarity to zinc finger protein OBP2 from Arabidopsis thaliana gbAF155816. EST gbN65215 comes from this gene
  misc_feature: Homolog of GI Number: 20260006 NR Desc: strong similarity to zinc finger protein OBP2
  misc_feature: Homolog of GI Number: 5059394 NR Desc: zinc finger protein OBP2
  misc_feature: Useful for delaying flowering time
  misc_feature: Useful for making ornamental plants with modified leaves
  misc_feature: Useful for making plants with altered leaf shape eg curled leaves
  misc_feature: Useful for making plants with altered leaf shape eg curled leaves
  misc_feature: Useful for making plants with altered leaf shape eg curled leaves
  misc_feature: Useful for making plants with increased biomass and foliage
  misc_feature: Useful for making plants with increased biomass and foliage
  misc_feature: Useful for making shorter plants
MQDPTLFQPMKPHFPEQEQLKCPRCDSTNTKFCYYNNYNLSQPRHFCKNCRRYWTKGGALRNIPVGGGSRKNTKRSSSSNNNTKRASPSPPVSSAPAPEPDPTRIGPTPVVGGGSFSSLLASSGHLGLGNLLEGLNSSGSNLKTVQMEEFGENVSSGPVADPDSGRNPGLEMQSNGNAENFLSLQNGDSSCWNGTSGWSHLAIFTPGSSFQ

SEQ ID NO: 1905 - DNA, 1136 bp, Glycine max
  misc_feature: Ceres CLONE ID no. 554773
  misc_feature: Ceres CDNA ID no. 35383204
  CDS (177)..(812): REFERENCED BY SEQ ID NO: 1906
ataaatgagtgataccgatacgtcacttggttggttttggttgggattcaaaccaaccatccgcactgtgcatccctttcttccttcttcgtcttattattctccaaaacttccttcttactcttcttttttctgtttcgcaccctccaaacgacgttgtttctcgtcgttcagccatgtcgtacgactacctcttcaagtacatcatcatcggtgacacaggtgtagggaaatcgtgcctgctcctgcagttcaccgataagaggttccaaccggttcatgatctcaccattggtgtcgagtttggtgctcgcatggtcaccatcgattctcgacccattaagcttcagatatgggatacagctgggcaagagtcttttagatccatcactaggtcttactacagaggagcagcaggagcacttctagtttatgacattacaaggagagacacatttaatcatttagcaagttggctggaagatgcccggcagcatgccaatcctaacatgaccatcatgctcatagggaacaagtgtgatctgtctcatcgacgcgcagtgagcaaagaggagggagagcaatttgcaaaggaaaatggacttctgttcttggaggcttctgctaggacagctcaaaatgtagaagaggcttttataagaactgctggcaagattcttcagaatatccaggaaggtgtgtttgatgtgtccaatgagtcatttggtataaaagttggctatggacgtccccaaggtcaaccaggtgccagagatggaactgtttcagccagaggtgggtgttgcagctgattgagagggaaacaactctgaatctaatcccttttgtgcatcgatttctgaattccctgtctcaaccgagtgtatactctttagacttagacatggaacttttgaatagcactacaatttcatgtatagatctaatctcaaaggccttcttgggacagatttcactacatagtttaatggttggctgttgtgttcaatgccagtttttatttgcctttattgatttattattacttggcttaatataaacatggagtaatttcttagtagcttaactaatacacttcattcagcgttaaagcccttaaaaaaaaaaaaaaaaaa

SEQ ID NO: 1906 - protein, 211 aa, Glycine max
  misc_feature: Ceres CLONE ID no. 554773
  misc_feature: Ceres CDNA ID no. 35383204
  misc_feature (2)..(167): Pfam Name: Arf PFAM Desc: ADP
  misc_feature: Homolog of GI Number: 21436445 NR Desc: putative GTP
  misc_feature: Homolog of GI Number: 6624302 NR Desc: small GTP
  misc_feature: Homolog of GI Number: 16755592 NR Desc: small GTPase Rab2
  misc_feature: Homolog of GI Number: 30023652 NR Desc: At4g17170
  misc_feature: Homolog of GI Number: 1370176 NR Desc: RAB2A
  misc_feature: Homolog of GI Number: 1208537 NR Desc: guanine nucleotide regulatory protein
  misc_feature: Homolog of GI Number: 1346957 NR Desc: Ras
  misc_feature: Homolog of GI Number: 7438379 NR Desc: GTP
  misc_feature: Homolog of GI Number: 50909885 NR Desc: putative GTP
  misc_feature: Homolog of GI Number: 1346956 NR Desc: Ras
MSYDYLFKYIIIGDTGVGKSCLLLQFTDKRFQPVHDLTIGVEFGARMVTIDSRPIKLQIWDTAGQESFRSITRSYYRGAAGALLVYDITRRDTFNHLASWLEDARQHANPNMTIMLIGNKCDLSHRRAVSKEEGEQFAKENGLLFLEASARTAQNVEEAFIRTAGKILQNIQEGVFDVSNESFGIKVGYGRPQGQPGARDGTVSARGGCCS

SEQ ID NO: 1907 - DNA, 1138 bp, Glycine max
  misc_feature: Ceres CLONE ID no. 554842
  misc_feature: Ceres CDNA ID no. 36531819
  CDS (3)..(905): REFERENCED BY SEQ ID NO: 1908
gacgctttaagaccaaaagcaccgtctccgtctccgtctccacctcctgtccttcgttgcacttcgctttttccaaaaccaatcacatcagcatcactctcgtcgccgccgtcgtcgaccaccgcaagagccatcgcactccgccgtcatccgttagggcaaaaatgagtcgaggaagtggaggtggatacgatcgtcacatcactattttctcccctgaaggacgtctcttccaagtcgagtatgctttcaaggctgttaaggccgcaggaatcacctcaattggtgtccgaggaaaggattcgatttgtgttgttactcagaagaaggttccggataagcttttggacaacacaagtgttacacacctctttcccatcaccaagtaccttggtttattggctactggcatgacagctgatgctaggacactggtccaacaagcaagaaatgaagcagctgagtttcgctttacatatggatatgaaatgcctgtagatgtattagctaaatggattgcagacaaatcacaagtctatactcaacatgcttatatgagaccacttggagtagttgccatggttttgggtattgatgatgaatatggacctcagctttacaaatgtgatccagctggtcattactttggtcacaaggcaacaagtgctggattgaaggaccaagaggcaattaatttcttggaaaagaagatgaagaatgacccttcatttacatatgaggagacagttcagactgccatttctgccctgcaatcagttcttcaggaggattttaaggccactgagattgaggttggagtggtgcggaaagaaaatccagaattcagagttttaaccaccgaggaaattgatgagcacttgactgcaataagtgagcgtgactgagttcttgataaggatgtaatggttcaaactttctaatgctagagattaaattatgtacttgtttctggaatcattgaattgatttccttgtgatatttgagtagtaagtttatttaagaatgatgttgaagacggtatttgatttcctattacaagtttacttgggagcaattttatgtttctaccaatgaaatgaaatgaaaattttaaaaaataaaaaaaaaaaaaaaaaa

SEQ ID NO: 1908 - protein, 246 aa, Glycine max
  misc_feature: Ceres CLONE ID no. 554842
  misc_feature: Ceres CDNA ID no. 36531819
  misc_feature (32)..(220): Pfam Name: Proteasome PFAM Desc: Proteasome A
  misc_feature: Homolog of GI Number: 3377794 NR Desc: proteasome IOTA subunit
  misc_feature: Homolog of GI Number: 4539545 NR Desc: PRCI
  misc_feature: Homolog of GI Number: 10176805 NR Desc: multicatalytic endopeptidase complex alpha subunit
  misc_feature: Homolog of GI Number: 21386959 NR Desc: multicatalytic endopeptidase complex alpha subunit
  misc_feature: Homolog of GI Number: 2511588 NR Desc: multicatalytic endopeptidase complex
  misc_feature: Homolog of GI Number: 3421070 NR Desc: 20S proteasome subunit PAA1
  misc_feature: Homolog of GI Number: 23505817 NR Desc: At2g05840/T6P5.4
  misc_feature: Homolog of GI Number: 50920359 NR Desc: Putative alpha 1 subunit of 20S proteasome
  misc_feature: Homolog of GI Number: 11967891 NR Desc: maize 20S proteasome alpha subunit
  misc_feature: Homolog of GI Number: 79322198 NR Desc: PAA2
MSRGSGGGYDRHITIFSPEGRLFQVEYAFKAVKAAGITSIGVRGKDSICVVTQKKVPDKLLDNTSVTHLFPITKYLGLLATGMTADARTLVQQARNEAAEFRFTYGYEMPVDVLAKWIADKSQVYTQHAYMRPLGVVAMVLGIDDEYGPQLYKCDPAGHYFGHKATSAGLKDQEAINFLEKKMKNDPSFTYEETVQTAISALQSVLQEDFKATEIEVGVVRKENPEFRVLTTEEIDEHLTAISERD

SEQ ID NO: 1909 - DNA, 1381 bp, Glycine max
  misc_feature: Ceres CLONE ID no. 554857
  misc_feature: Ceres CDNA ID no. 25446651
  CDS (252)..(1064): REFERENCED BY SEQ ID NO: 1910
aactgtggggaaagagagatacgaagaggtaggtcttgggctcttggccctacgagagttattttcgttgaacaatcgcaattctcgatcacatgaaagtctgagactgaagaatacgtataaattagaaccgattgaaagtgcagagagagagagagagagagaaccgacaagcaaacgaaaagtaaatcaatcaatcgttggaatctctcaacttatcgcttcttcctgatttgggggtttccgtttcaatggacgacggcgagctggatttctcgaaccatgaagtgttttcgagtccgaacatgggggagcttccgagcagcggttcaatggacagtttcttcgacgagcttctcaaggacacgcacgcgtgcacccacacccacacgtgcaaccctcccggccccgatttctcccacactcacacgtgctaccacgtacacaccaaaatcgtccccgcccctgaggaggaccaggtcgctactgatgacaccgccgagtccgccgagaaaaagtcgtcgtcgaagaagcggcctctggggaacaaagaagccgtccggaagtaccgggagaagaagaaggcgcgtgcggcgtcgctggaggatgaggttgtgaagttgagggctctgaaccagcacttgatgaagaagctgcaggggcaggcggctctcgaggccgaaatagccaggctcaagtgtttgttggttgacataagggggaggattgaaggggaaattgggtcctttccgtatcagaaaacaacaacaacaacgccgaatccggtggctggttcttatgtgatgaacccttgtaacttgccgtgtgatgatagggtgtattgccttcaccctgatgggaggattggggagactgcggctttgaatggggaagagtttgatggttgtgaatttgagaacctgcagtgtctggcaagccagaatttggggctcaaggatcttcgcgcttgtggggttggggttggacacacagggtctaatgtaaattcttctgccttatcaaagaaaagaaaagggggatctcgtgctgcaacagctggttgaagaattgataatttggtggttttcatccttggcatgcatttttgctggacaagggtagaaggaactgttgtcctctaactgaagattttgcatattggcatgtcttctacaagttaagacagacaagtgaatggttttgtatttgagggcgcaagtagctgtttcaaatcgatgatgggaaaagcatatgtgcctgtctgcacttagagaacaagtcttgaatagatttcgatagttataaatgctcttgttgatcctcttttaggcatggaatgattaataaaaaacattattacatcaaaaaaaaaaaaaaaaaa

SEQ ID NO: 1910 - protein, 270 aa, Glycine max
  misc_feature: Ceres CLONE ID no. 554857
  misc_feature: Ceres CDNA ID no. 25446651
  misc_feature (87)..(154): Pfam Name: bZIP_1 PFAM Desc: bZIP transcription factor
  misc_feature: Homolog of GI Number: 21554283 NR Desc: putative transcription factor
  misc_feature: Homolog of GI Number: 54291039 NR Desc: transcription factor
  misc_feature: Homolog of GI Number: 18855044 NR Desc: putative transcription factor
  misc_feature: Homolog of GI Number: 77552959 NR Desc: bZIP transcription factor
  misc_feature: Homolog of GI Number: 30693563 NR Desc: bZIP family transcription factor
  misc_feature: Homolog of GI Number: 34908964 NR Desc: P0003D09.19
  misc_feature: Useful for increasing chlorophyll and photosynthetic capacity
  misc_feature: Useful for making ornamental plants with modified flowers
  misc_feature: Useful for making shorter plants
  misc_feature: Useful for sterility
MDDGELDFSNHEVFSSPNMGELPSSGSMDSFFDELLKDTHACTHTHTCNPPGPDFSHTHTCYHVHTKIVPAPEEDQVATDDTAESAEKKSSSKKRPLGNKEAVRKYREKKKARAASLEDEVVKLRALNQHLMKKLQGQAALEAEIARLKCLLVDIRGRIEGEIGSFPYQKTTTTTPNPVAGSYVMNPCNLPCDDRVYCLHPDGRIGETAALNGEEFDGCEFENLQCLASQNLGLKDLRACGVGVGHTGSNVNSSALSKKRKGGSRAATAG

SEQ ID NO: 1911 - DNA, 580 bp, Triticum aestivum
  misc_feature: Ceres CLONE ID no. 554888
  misc_feature: Ceres CDNA ID no. 29191372
  CDS (3)..(218): REFERENCED BY SEQ ID NO: 1912
actacggcacaagcttcgtcttcttcatttccgtcccctgcgctcgtgggatctgcggcggcggcggcgttccacgtttcctctgctgtgcaagttcatacccactagatggggaaggcaaagcgtgcatctatatttatcaggctcgtctcagcagccggaactggatttttctacgtgaagcgcaagaatcctcggcggatcacagagaagcttgagttcaggaagtatgatccgcgtgtaaacaagcatgttctatttacggaagccaagatgaagtgagacgctgcagcctttctttcttaccataagacctctaccgttcattttggtcgaagacgatgatgctacctttattttagcgggctctagataatttagtttcatgtaaacaactctaatgagcacgttttgatctcgtcagcaccgaatcagcatggattttcacttgctctgccttgcctgcttatttgtattgtaactgaaatgagctgcaagcctgcaaatgtactgtcccattttggtgttgtgatttttgtcagtgaatgcctgcttctgaaaaacaaaaaaaaaaaaaaaa

SEQ ID NO: 1912 - protein, 57 aa, Triticum aestivum; identical to SEQ ID NO: 1548
  misc_feature: Ceres CLONE ID no. 554888
  misc_feature: Ceres CDNA ID no. 29191372
  misc_feature (9)..(55): Pfam Name: Ribosomal_L33 PFAM Desc: Ribosomal protein L33
  misc_feature: Homolog of GI Number: 38566500 NR Desc: At5g18790
  misc_feature: Homolog of GI Number: 23016261 NR Desc: COG0267: Ribosomal protein L33
  misc_feature: Homolog of GI Number: 53801500 NR Desc: 50S ribosomal protein L33
  misc_feature: Homolog of GI Number: 61099925 NR Desc: ribosomal protein L33
  misc_feature: Homolog of GI Number: 48850579 NR Desc: COG0267: Ribosomal protein L33
  misc_feature: Homolog of GI Number: 79039501 NR Desc: 50S ribosomal protein L33
  misc_feature: Homolog of GI Number: 57238952 NR Desc: 50S ribosomal protein L33
  misc_feature: Homolog of GI Number: 58417511 NR Desc: 50S ribosomal protein L33
  misc_feature: Homolog of GI Number: 48766246 NR Desc: COG0267: Ribosomal protein L33
  misc_feature: Homolog of GI Number: 56551145 NR Desc: ribosomal protein L33

SEQ ID NO: 1913 - DNA, 660 bp, Triticum aestivum
  misc_feature: Ceres CLONE ID no. 554889
  misc_feature: Ceres CDNA ID no. 25891867
  CDS (105)..(506): REFERENCED BY SEQ ID NO: 1914
ataaacaccgcgccggcttgcaaatagaaccctgccgccgccgccgttcttcttcctcctcgcttcgtgttagagttagggtcgtcagctttctcagatcagagatggcggtgccgcttctgacgaggaagatcgtgaagaagcgggtcaagcacttcaagagggcccatagcgaccgctacatcggcctcaagaccagctggcgcaggccaaagggtattgattcccgtgtcaggagaaagttcaagggatgtactttgatgcccaacattggctatggttctgacaagaagaccaggcattacctgccgaacaagttcaagaagtttgttgtccacaatgtctccgagctggagctgcttatgatgcacaacaggacatactgtgctgagatcgcccacaatgtctctaccaagaagcgaaaggacattgtggagcgtgctgcgcagctggatattgttgtcacaaacaagcttgctaggcttcggagccaggaggacgagtgaaatgtttttcgcactgttgttatggctgttttgcttgttggaaactgtttgctctgggagcttgtctactcatctgttagttttatgatatgaacatgctgttattatcagtaacgagtgacaggctgaaattttgtcaaaaaaaaaaaaaaaa

SEQ ID NO: 1914 - protein, 133 aa, Triticum aestivum
  misc_feature: Ceres CLONE ID no. 554889
  misc_feature: Ceres CDNA ID no. 25891867
  misc_feature (14)..(123): Pfam Name: Ribosomal_L32e PFAM Desc: Ribosomal protein L32
  misc_feature: Homolog of GI Number: 76057835 NR Desc: ribosomal L32
  misc_feature: Homolog of GI Number: 50947773 NR Desc: putative ribosomal protein L32
  misc_feature: Homolog of GI Number: 13899057 NR Desc: ribosomal protein L32
  misc_feature: Homolog of GI Number: 40287540 NR Desc: ly200 protein
  misc_feature: Homolog of GI Number: 77745481 NR Desc: ly200
  misc_feature: Homolog of GI Number: 71534997 NR Desc: ribosomal protein L32
  misc_feature: Homolog of GI Number: 23198054 NR Desc: ribosomal protein L32
  misc_feature: Homolog of GI Number: 21555143 NR Desc: ribosomal protein L32
  misc_feature: Homolog of GI Number: 10177580 NR Desc: ribosomal protein L32
  misc_feature: Homolog of GI Number: 50754636 NR Desc:  similar to 60S ribosomal protein L32
MAVPLLTRKIVKKRVKHFKRAHSDRYIGLKTSWRRPKGIDSRVRRKFKGCTLMPNIGYGSDKKTRHYLPNKFKKFVVHNVSELELLMMHNRTYCAEIAHNVSTKKRKDIVERAAQLDIVVTNKLARLRSQEDE

SEQ ID NO: 1915 - DNA, 855 bp, Triticum aestivum
  misc_feature: Ceres CLONE ID no. 554925
  misc_feature: Ceres CDNA ID no. 36707402
  CDS (96)..(596): REFERENCED BY SEQ ID NO: 1916
accaagtacagcacaggcattgccgcacacactcaccgtctcgccacgtgagaggagaagcccgcagcgccggtgcttgagcggatcgggaaaggatggccggcggcgcggacgcggacggggagcgccggatcggggtggccatggactactcggccagcagcaagcgcgcgctggagtgggccgtccgcaacctgctccgccggggcgacaccgtcgtcgtcctccacgtccagcgtcacggcggggaggacgccaagcacgccgtctgggccaagtccggatccccgctgatccctctgtcggagtaccgggagccggaggtgatgaagaactacggcgtgacctgcgacgccgaggtgctcgacatgctcgacaccgccgcgcgccagctcgagctgaaggtggtggcgaaggtgtactggggcgacgccagggagaagctctgcgacgcggtggaggagcagaggatcgacaccatcgtcatgggcagccgcggcctcggcaccatccagaggattcttctgggaagcgtgaccaactacgtgctgtcgaacgcgtcgtgccctgtgacagtcgtcaagggagaccgttaggtttgccatcggtgtgcatcaggatgcgcttcatcgttctctgctccgttgctgcgtccgaataaagtatggagcctgttgtgttttctgtatgccggaccttggcagattattgtagtcgtgtatgtttctgaacattcgggttcaaattcagtaaagtgtcgttctttttttttttgcatgaaactagggagcttattactcaagtagcatacggttacaatctgcctggaggcaaagttcaaaaaaaaaaaaaaaa

SEQ ID NO: 1916 - protein, 166 aa, Triticum aestivum
  misc_feature: Ceres CLONE ID no. 554925
  misc_feature: Ceres CDNA ID no. 36707402
  misc_feature (9)..(163): Pfam Name: Usp PFAM Desc: Universal stress protein family
  misc_feature: Homolog of GI Number: 50931659 NR Desc: putative universal stress protein
  misc_feature: Homolog of GI Number: 50902088 NR Desc: P0414E03.3
  misc_feature: Homolog of GI Number: 11602751 NR Desc: ENOD18 protein
  misc_feature: Homolog of GI Number: 11602747 NR Desc: early nodulin ENOD18
  misc_feature: Homolog of GI Number: 60100214 NR Desc: USP family protein
  misc_feature: Homolog of GI Number: 11602749 NR Desc: early nodulin ENOD18
  misc_feature: Homolog of GI Number: 50913251 NR Desc: universal stress protein / early nodulin ENOD18
  misc_feature: Homolog of GI Number: 50900762 NR Desc: P0583G08.8
  misc_feature: Homolog of GI Number: 47606411 NR Desc: LRR
  misc_feature: Homolog of GI Number: 52077479 NR Desc: putative ER6 protein
MAGGADADGERRIGVAMDYSASSKRALEWAVRNLLRRGDTVVVLHVQRHGGEDAKHAVWAKSGSPLIPLSEYREPEVMKNYGVTCDAEVLDMLDTAARQLELKVVAKVYWGDAREKLCDAVEEQRIDTIVMGSRGLGTIQRILLGSVTNYVLSNASCPVTVVKGDR

SEQ ID NO: 1917 - DNA, 874 bp, Triticum aestivum
  misc_feature: Ceres CLONE ID no. 554988
  misc_feature: Ceres CDNA ID no. 36707041
  CDS (95)..(628): REFERENCED BY SEQ ID NO: 1918
atccatcgattagccagcgttcccgactcggcgaaaggactgtctcgccgccgccgccgccgccggccgacgaggaggaggaggagaggccgagatgttcttccacatcgtgctggagcggaacatgcagctgcacccgcggcacttcggcccgcacctccgcgacaagctcgtcgccaagctcatgaaggacgtcgagggcacctgcagcgggcggcacggcttcgtggtggcgatcacgggggtggaggacatcggcaaggggctcatccgggagggcacgggcttcgtcacgttccccgtcaagtaccagtgcgtcgtcttccgccccttcaagggcgagatcctcgaggccgtcgtcaccatggtcaacaagatggggttcttcgctgaggctgggcctgtgcagatctttgtgtcaaaccatttgattcctgacgatatggagttccaatctggtgatgtgccaaactacactacttcggatggatcggtgaaaattcaaaaggaaagtgaggttcgtctgaagattataggcactcgtgttgacgcaacagaaattttttgcatcggcacgataaaagacgactttctgggcgttatcagtgatcctggtggagcgctgtaaatgatccaaacaagactcagcatgctctccaacttccgcatcatcatatatctgggaagagtccccaaggaaggttgcgactgatctgtaatttgtgtcctgatgtaaaatgtgatgtcatgcctatctaatggaagtcagggtcctgctagtgttaaaaaaagtaattggcacctgtaatatcataactaggatctttttaactgtggtggttgataagtttagttgtcaaaaaaaaaaaaaaaa

SEQ ID NO: 1918 - protein, 177 aa, Triticum aestivum
  misc_feature: Ceres CLONE ID no. 554988
  misc_feature: Ceres CDNA ID no. 36707041
  misc_feature (1)..(77): Pfam Name: RNA_pol_Rpb7_N PFAM Desc: RNA polymerase Rpb7
  misc_feature (78)..(156): Pfam Name: S1 PFAM Desc: S1 RNA binding domain
  misc_feature: Homolog of GI Number: 50878367 NR Desc: putative RNA polymerase II subunit 5
  misc_feature: Homolog of GI Number: 322700 NR Desc: RNA polymerase II fifth largest subunit
  misc_feature: Homolog of GI Number: 28973525 NR Desc: putative RNA polymerase II
  misc_feature: Homolog of GI Number: 24647020 NR Desc: CG31155
  misc_feature: Homolog of GI Number: 72013666 NR Desc:  similar to polymerase
  misc_feature: Homolog of GI Number: 54639475 NR Desc: GA16051
  misc_feature: Homolog of GI Number: 16758826 NR Desc: polymerase
  misc_feature: Homolog of GI Number: 60466865 NR Desc: RNA polymerase II core subunit
  misc_feature: Homolog of GI Number: 61810043 NR Desc:  similar to polymerase
  misc_feature: Homolog of GI Number: 57863806 NR Desc: putative receptor kinase
MFFHIVLERNMQLHPRHFGPHLRDKLVAKLMKDVEGTCSGRHGFVVAITGVEDIGKGLIREGTGFVTFPVKYQCVVFRPFKGEILEAVVTMVNKMGFFAEAGPVQIFVSNHLIPDDMEFQSGDVPNYTTSDGSVKIQKESEVRLKIIGTRVDATEIFCIGTIKDDFLGVISDPGGAL

SEQ ID NO: 1919 - DNA, 754 bp, Triticum aestivum
  misc_feature: Ceres CLONE ID no. 555014
  misc_feature: Ceres CDNA ID no. 25891868
  CDS (86)..(544): REFERENCED BY SEQ ID NO: 1920
aaacaaattccccaccttcttccagttccagcactcacaacccaccaaggaggagaatccccaatcccgatcagcctcagcagcgatggcccccaaggcggagaagaagccgtcggcgaagaagcccgcggaggaggagccgacgacggagaaggccgagaaggccccggcggcgaagaagcccaaggccgagaagcggctgccggcgggcaagaccgcctccaaggagggcggcgagaagaggggccggaagaagggcaagaagagcgtcgagacctacaagatctacatcttcaaggtgctcaagcaggtgcaccccgacatcggcatctcctccaaggccatgtccatcatgaactccttcatcaacgacatcttcgagaagctcgccggcgaggctgccaagctcgcccgctacaacaagaagcccaccatcacctcccgggagatccagacctccgtccgcctcgtcctccccggcgagctcgccaagcacgccgtctccgagggcaccaaggccgtcaccaagttcacctcctcttagattgccatgtttacatctcagaaactgtagttggctgccgtgtatctaaaactagtgtttattgctcaatggaaattggtggaatgctgttagtttttcgttcgattgctgatgttgccgtgccatgtactgatctgaaatagtaaacgatgtggtgcgcatattttgggaggaaccctcggttctgatttctgaaaaaaaaaaaaaaaa

SEQ ID NO: 1920 - protein, 152 aa, Triticum aestivum
  misc_feature: Ceres CLONE ID no. 555014
  misc_feature: Ceres CDNA ID no. 25891868
  misc_feature: No seed is being produced by the plant
  misc_feature: The plant flowers significantly late compared to wild-type.
  misc_feature: Useful for biocontainment applications
  misc_feature: Useful for making plants with modulated flowering time
  misc_feature (59)..(131): Pfam Name: Histone PFAM Desc: Core histone H2A/H2B/H3/H4
  misc_feature: Homolog of GI Number: 21801 NR Desc: histone H2B
  misc_feature: Homolog of GI Number: 577825 NR Desc: H2B histone
  misc_feature: Homolog of GI Number: 22323 NR Desc: H2B histone
  misc_feature: Homolog of GI Number: 22325 NR Desc: H2B histone
  misc_feature: Homolog of GI Number: 34895900 NR Desc: putative histone H2B
  misc_feature: Homolog of GI Number: 1708107 NR Desc: Histone H2B
  misc_feature: Homolog of GI Number: 34895904 NR Desc: putative histone H2B
  misc_feature: Homolog of GI Number: 34895838 NR Desc: putative histone H2B
  misc_feature: Homolog of GI Number: 34895832 NR Desc: putative histone H2B
  misc_feature: Homolog of GI Number: 34895896 NR Desc: putative histone H2B
MAPKAEKKPSAKKPAEEEPTTEKAEKAPAAKKPKAEKRLPAGKTASKEGGEKRGRKKGKKSVETYKIYIFKVLKQVHPDIGISSKAMSIMNSFINDIFEKLAGEAAKLARYNKKPTITSREIQTSVRLVLPGELAKHAVSEGTKAVTKFTSS

SEQ ID NO: 1921 - DNA, 1857 bp, Triticum aestivum
  misc_feature: Ceres CLONE ID no. 555084
  misc_feature: Ceres CDNA ID no. 24766127
  CDS (127)..(1569): REFERENCED BY SEQ ID NO: 1922
accaccaccaccaattcgcaacctctcctcccccgttctcctcattgtcctcgcgccccgctccgctccgacggccaaccgctccacacaccactagcctgcctgcctgcctgccgccaaggcaagatggtgaagatctgctgccttggggctggctatgtgggtggcccaacaatggcggtcattgccctcaagtgtcctgacattcaggtggttgtggtagatatcaccaagtcccggattgatgcctggaacagtgacacactgccaatctatgagcctggccttgatgaagtcgtgaagcagtgccgtggaaagaacctcttcttcagcaatgacattgagaagcatgttagtgaagctgacatcatctttgtgtcggtaaacaccccaaccaagacccgtggtcttggagctggtaaggctgctgatctcacttactgggaaagtgcagctcgcatgattgctgatgtggccaaatcagacaagatcgtggtggagaagtccactgttccagtcaagactgctgaggcaattgagaagatcttgacccacaacagcaatggcatcaacttccagatcctctccaacccggagttccttgctgagggtactgctatccaagacctatttaaccctgaccgtgttcttattggaggacgtgagacccctgaaggtcagaaggctgttcagacgctgaaggctgtgtatgcgcattgggttcctgaggatcagattctgacaaccaacttatggtctgcggagctgtcgaagcttgcagccaatgcgttcttggcccagaggatctcctctgtgaatgccatgtcagccctctgcgaggccactggtgcaaatgtttctgaggtgtcctatgccgtgggcaaggactctaggattggcccaaagtttttgaatgccagtgttggatttggaggctcttgcttccagaaggatatcctcaacctggtttacatctgtgagtgcaatggcctcccagaggtcgccaactactggaagcaggtgatcaagatcaatgactaccagaagagccggttcgtgaaccgtgttgtttcctctatgttcaacacggttgcgaacaagaagattgcggtgcttggttttgcattcaagaaggatactggtgacactagggagactccagctattgatgtctgcaagggtctgcttggtgacaaggctaagatcagcatttatgatcctcaggtgactgaagaccaaatccagcgtgaccttgcgatgaacaaatttgactgggaccaccctgttcatctccagccaatgagccccaccactacaaagcaagtctcggttacctgggatgcatatgaggcgaccaaggatgcccatggcatctgcatcatgactgagtgggatgagttcaagactctggactacaaaaagatctacaacagcatgcagaagcccgcctttgtttttgatggccgcaacgttgttgactctgagaagctgagggagattggcttcattgtctactccattggcaagccactcgacggttggctcaaggacatgcctgctgtggcttaaataaactctgataaagggaggagatccgcctcgggtgaatccatgagcagctatcgatagggattcagcttgttatttctctttatagtcgctgtttatcttgtgccagaaaatcagatgtcatttatttttcttccttgagtgtttcttcggggtttacagtgttagaatggtatagtcactgggatgtgccattcctttggtccattgtcacagctttgtagctaatgtctgttgttgcatctttatcatgttactggtgttcatcctgcaaaaaaaaaaaaaaaa

SEQ ID NO: 1922 - protein, 480 aa, Triticum aestivum
  misc_feature: Ceres CLONE ID no. 555084
  misc_feature: Ceres CDNA ID no. 24766127
  misc_feature: null
  misc_feature: Useful for making plants with altered cell wall content and/or composition
  misc_feature (2)..(200): Pfam Name: UDPG_MGDP_dh_N PFAM Desc: UDP
  misc_feature (209)..(306): Pfam Name: UDPG_MGDP_dh PFAM Desc: UDP
  misc_feature (328)..(452): Pfam Name: UDPG_MGDP_dh_C PFAM Desc: UDP
  misc_feature: Homolog of GI Number: 15983404 NR Desc: AT3g29360/MUO10_6
  misc_feature: Homolog of GI Number: 53749198 NR Desc: At5g15490
  misc_feature: Homolog of GI Number: 6136119 NR Desc: UDP
  misc_feature: Homolog of GI Number: 32471593 NR Desc: UDP
  misc_feature: Homolog of GI Number: 11994517 NR Desc: UDP
  misc_feature: Homolog of GI Number: 40317278 NR Desc: UDP
  misc_feature: Homolog of GI Number: 29028306 NR Desc: UDP
  misc_feature: Homolog of GI Number: 59805013 NR Desc: UDP
  misc_feature: Homolog of GI Number: 21618158 NR Desc: UDP
  misc_feature: Homolog of GI Number: 48093457 NR Desc: putative UDP
MVKICCLGAGYVGGPTMAVIALKCPDIQVVVVDITKSRIDAWNSDTLPIYEPGLDEVVKQCRGKNLFFSNDIEKHVSEADIIFVSVNTPTKTRGLGAGKAADLTYWESAARMIADVAKSDKIVVEKSTVPVKTAEAIEKILTHNSNGINFQILSNPEFLAEGTAIQDLFNPDRVLIGGRETPEGQKAVQTLKAVYAHWVPEDQILTTNLWSAELSKLAANAFLAQRISSVNAMSALCEATGANVSEVSYAVGKDSRIGPKFLNASVGFGGSCFQKDILNLVYICECNGLPEVANYWKQVIKINDYQKSRFVNRVVSSMFNTVANKKIAVLGFAFKKDTGDTRETPAIDVCKGLLGDKAKISIYDPQVTEDQIQRDLAMNKFDWDHPVHLQPMSPTTTKQVSVTWDAYEATKDAHGICIMTEWDEFKTLDYKKIYNSMQKPAFVFDGRNVVDSEKLREIGFIVYSIGKPLDGWLKDMPAVA

SEQ ID NO: 1923 - DNA, 1489 bp, Triticum aestivum
  misc_feature: Ceres CLONE ID no. 555093
  misc_feature: Ceres CDNA ID no. 40041256
  CDS (115)..(1314): REFERENCED BY SEQ ID NO: 1924
tcactcatctcactcgctacttctccaacaccagaccagggtagccatctcactcattcctccagcaaccttcatctccaccttcggctgcaatctttctgtagatcgttcgagatgacggtggcggtgtgccatgtcatgccggcgctggacgtcgctcctcttcacactcgcactcgcatgccggcgccgatgcctccgccgcagcagctggacatgtggagcgccatccaggccccggccgccgacgactgcggcgccaagccggagcctccggctgtgaagaccaaggccggttacccgatgacggcggtgcggcgttccatgagccacgagagcctcagccgctgcaccgagagcctcggctgcgagaccggcacccgcggcgacatcctcgacctggcgtccctcctctacgcgccgccgacttcccaccagaccgacgatgccgtcgccgccgacttattctcgccaccggcattgcaagacgaagaggaggaggatgagttggagggcgaggaggagaagctgactcttagggaggtgcagtaccaccgcgctcggcggcagcgcgcgttcccgccgccgctgccgtccatgtcccgccggcgcggcgacgatgccgggccgtgcctgcgggtgcgcccgcaccgccgcgacggtcgcctcgtgctggaggccgtggccgccaagccccaggggtacctccacgcccagcgccaggacggccgcctcaagctctgcttcgtcgactgctcctctgcttccgcttctgttcgcgaacacgagaagcagagcatggtgcaaccacagcagaagcagagcatggtggaacagccacatcatgacgagaaggaagcggaagaggaggaggacgaggtggaggtggttgacaggggcacggtggtggaggtggttgcggcgtccggcaaggcgcagcggtgctcgaggatcgtcatcaacaagttcgtgggcggcgcgccggccaccgacgacctgaacgctaccccatccccatcgcgcggctccagagcagacgaggaagaagccgctcagccagcgacgcctgggctgcgccgggtgccgtcgtccacgacgacgctggcggccgcggtggcggccgcgtccacgggcatgcagtccgacgaggaggaagaggaagaggtcgacgaggaggagaaggagagcgcggcgctgctgttcacgtcgcgggtgggggacagggaggagctggtgcagagcgtgcggcggtgccggcagctccggcagaggccgctcttcatcgtggagccatactccatcatcgccgcctgatcattaatccaaataagaggatcatcatacgtaccattgctagtaattaatcaagtgatcaacaactaagattttcaatctagtgcctagttgttgctacgatcatccatcgatggatggatcgatcagtatgtaatgtaccttgctcttgtcctatccgaaaaaaaaaaaaaaa

SEQ ID NO: 1924 - protein, 399 aa, Triticum aestivum
  misc_feature: Ceres CLONE ID no. 555093
  misc_feature: Ceres CDNA ID no. 40041256
  misc_feature: Homolog of GI Number: 66778899 NR Desc: UvrD/REP helicase
  misc_feature: Homolog of GI Number: 66780099 NR Desc: PE
  misc_feature: Homolog of GI Number: 66776365 NR Desc: PE
  misc_feature: Homolog of GI Number: 67986538 NR Desc: Glycoside hydrolase
  misc_feature: Homolog of GI Number: 395147 NR Desc: glycine
  misc_feature: Homolog of GI Number: 17821 NR Desc: glycine
MTVAVCHVMPALDVAPLHTRTRMPAPMPPPQQLDMWSAIQAPAADDCGAKPEPPAVKTKAGYPMTAVRRSMSHESLSRCTESLGCETGTRGDILDLASLLYAPPTSHQTDDAVAADLFSPPALQDEEEEDELEGEEEKLTLREVQYHRARRQRAFPPPLPSMSRRRGDDAGPCLRVRPHRRDGRLVLEAVAAKPQGYLHAQRQDGRLKLCFVDCSSASASVREHEKQSMVQPQQKQSMVEQPHHDEKEAEEEEDEVEVVDRGTVVEVVAASGKAQRCSRIVINKFVGGAPATDDLNATPSPSRGSRADEEEAAQPATPGLRRVPSSTTTLAAAVAAASTGMQSDEEEEEEVDEEEKESAALLFTSRVGDREELVQSVRRCRQLRQRPLFIVEPYSIIAA

SEQ ID NO: 1925 - DNA, 691 bp, Triticum aestivum
  misc_feature: Ceres CLONE ID no. 555112
  misc_feature: Ceres CDNA ID no. 35383205
  CDS (81)..(509): REFERENCED BY SEQ ID NO: 1926
atcaccaaccaccaatccattccccaccagcaccttccggcgaaacacagcacctctccccggcgaagcagcagcgtccaatggcccccaaggcggagaagaagccggctgccgcggagaagaccccggcggccgagaagaccacggccgggaagaagcccaaggccgagaagcggcccccgaagtccaaggagggcggcgctgacaagaagaagaagaaggccaagaagagcgtggagacgtacaagatctacatcttcaaggtgctgaagcaggtgcacccggacatcggcatctcctccaaggccatgtccatcatgaactccttcatcaacgacatcttcgagaagctcgccggcgagtccgccaagctcgcccgctacaacaagaagccaaccatcacgtccagggagatccagacctccgtacgcctcgtcctccccggcgagctcgccaagcacgcagtgtccgagggcaccaaggccgtcaccaagttcacctcctcctagaccacgatggttctctgtaacagtcacctgtttagaccatgtcgtcttgtaacttgcgttggttctgtgggaacacactgtttcattacctcatgaaatggtaatggtgcttctttgatctgtgtcatggttatgtatcatgttcagttcttgtccccgtcgcttcaaaaaaaaaaaaaaaa

SEQ ID NO: 1926 - protein, 142 aa, Triticum aestivum
  misc_feature: Ceres CLONE ID no. 555112
  misc_feature: Ceres CDNA ID no. 35383205
  misc_feature: No seed is being produced by the plant
  misc_feature: The plant flowers significantly late compared to wild-type.
  misc_feature: Useful for biocontainment applications
  misc_feature: Useful for making plants with modulated flowering time
  misc_feature (49)..(121): Pfam Name: Histone PFAM Desc: Core histone H2A/H2B/H3/H4
  misc_feature: Homolog of GI Number: 531058 NR Desc: protein H2B
  misc_feature: Homolog of GI Number: 21801 NR Desc: histone H2B
  misc_feature: Homolog of GI Number: 22323 NR Desc: H2B histone
  misc_feature: Homolog of GI Number: 22325 NR Desc: H2B histone
  misc_feature: Homolog of GI Number: 531056 NR Desc: protein H2B
  misc_feature: Homolog of GI Number: 577825 NR Desc: H2B histone
  misc_feature: Homolog of GI Number: 34908130 NR Desc: putative histone H2B
  misc_feature: Homolog of GI Number: 34895838 NR Desc: putative histone H2B
  misc_feature: Homolog of GI Number: 34895896 NR Desc: putative histone H2B
  misc_feature: Homolog of GI Number: 1708107 NR Desc: Histone H2B
  misc_feature: Useful for delaying flowering time
  misc_feature: Useful for increasing chlorophyll and photosynthetic capacity
  misc_feature: Useful for making plants with altered leaf shape eg curled leaves
  misc_feature: Useful for making plants with altered leaf shape eg curled leaves
  misc_feature: Useful for making plants with increased biomass and foliage
  misc_feature: Useful for making plants with increased biomass and foliage
  misc_feature: Useful for sterility
  misc_feature: Useful for sterility
MAPKAEKKPAAAEKTPAAEKTTAGKKPKAEKRPPKSKEGGADKKKKKAKKSVETYKIYIFKVLKQVHPDIGISSKAMSIMNSFINDIFEKLAGESAKLARYNKKPTITSREIQTSVRLVLPGELAKHAVSEGTKAVTKFTSS

SEQ ID NO: 1927 - DNA, 934 bp, Triticum aestivum
  misc_feature: Ceres CLONE ID no. 555251
  misc_feature: Ceres CDNA ID no. 40351061
  CDS (112)..(639): REFERENCED BY SEQ ID NO: 1928
cccaacaaacctctttcccctccccgcatcccaagcctcccagctccatcgccacacgctcgaacccactcctctcacgctcaagcgcacaccgcaccaaccagagcagccatggctctcaccggcggcgccaccaccgcagcgtgcatcctcgtcctcctcgcgctcgccgacgccgcgggggcggctacccgggcgccagcgccggcgccggcgccggactgcatggaggcgttgattagcctcgcagactgcctcgactatgtgacgcccagcaccaagtcggctcggccttccaaggcttgctgcacggaggtgaagaccgccgtcggcacccccgccaccgtgaagtgcctctgcgctgccatggacgccaagacaactccgataccgatcaacatgacacgggtgctcgctctccccaccgcctgcggccaatccgcctccgtcttgaacaagtgccacgctgcacatgggccgggtggtgctcctgctgaagcaccgtcaccttcagcatccagtggcggcgcgaccgcttcaccaccgaaggcgaatgtggcggcgaggtctccgggcggctccgccaccgttctcttggcaactgtggtgacttcgctgctcgccttctattacctctgagggccaacatctcagcctctctcacgtgttatgttgcacagaccttgtgactctgcgttgcgcggtgttgtaatctgagtttactttgtttatcgggatgggttattatcatgtagtgtcgtggactgaatattgagtgcgtagtaaattgcaatgtaccgtggactgggtattttgaagtcgttgccagttatgacactttatttacttttgaatgcgcaaaaaaaaaaaaaaaaaaaaaaaaaaaaaaaaaaaaaaaaaaaaaaaaaaaaaaaaaaaaaaaaaaaaaaaaaaa

SEQ ID NO: 1928 - protein, 175 aa, Triticum aestivum
  misc_feature: Ceres CLONE ID no. 555251
  misc_feature: Ceres CDNA ID no. 40351061
  misc_feature (38)..(117): Pfam Name: Tryp_alpha_amyl PFAM Desc: Protease inhibitor/seed storage/LTP family
MALTGGATTAACILVLLALADAAGAATRAPAPAPAPDCMEALISLADCLDYVTPSTKSARPSKACCTEVKTAVGTPATVKCLCAAMDAKTTPIPINMTRVLALPTACGQSASVLNKCHAAHGPGGAPAEAPSPSASSGGATASPPKANVAARSPGGSATVLLATVVTSLLAFYYL

SEQ ID NO: 1929 - DNA, 1350 bp, Triticum aestivum
  misc_feature: Ceres CLONE ID no. 555309
  misc_feature: Ceres CDNA ID no. 25892962
  CDS (136)..(1125): REFERENCED BY SEQ ID NO: 1930
actcagtttaccagatcaacaccaacagaaatcacttcccagcaaccaagacttcccattcgatccgatcacaagaaaatattataccctcaagcttttcgaccggcgtattttagtagttcaacagccaacaccatgagctctcggatggccggagccacgctgctgcgccacctgggcccccgcctcttcgccgccgccgagccggcgtccaggctcgccgcgagcgcgaggggcatcatgccggccgccgcgagggtcttccccgcgcggatggccagcaccgaggccgccggcccgcgtgccaagcacgaagaagccactgaaaagccccagggcgcaacagcgccggagcagaacaagaaggccgtgccgagctactggggtatcgagccgcggaagctcgtcaaggacgacggcacggagtggccgtggttctccttcaggccgtgggacacgtacaggccggacacgtccatcgacgtggccaagcaccacgagcccagggcggtggcggacaaggtggcgtacctcatcgtgcggacgctgcgcaagggcagcgacctcttcttccagcgccggcacgccagccacgcgctgctgctggagacggtggcggccgtgccgcccatggtgggcggcgtgctgctgcacctgcgctcgctccgccgcttcgagcacagcggcggctggatccgcgcgctcatggaggaggccgagaacgagcgcatgcacctcatgaccttcatggaggtgacgcagccgctgtggtgggagcgcgcgctcgtgctcgccactcagggcgtcttcttcaacgcctacttcgtcggctacctcgtctcccccaagttcgcgcaccgcttcgttggctacctcgaggaggaggccgtccactcctacaccgaatacctcaaggacctcgaggctggcttgatcgagaacacgcccgcgccggccatcgccatagattactggcgcctccccgccgacgccaggctcaaggacgtcgtcaccgccgtgcgcgccgacgaggcgcatcaccgtgacgccaaccactacgcatcggacatccattaccagggaatgacgctgaatcagacgcctgcgccactcggctaccactgatcagttcaatggacgaccatagatcgatgcctgctcagtccaccgctgtcatctactaccactgtcgccgacgtttgtcccgttagtttgagaagatggattgttgcgcgcagtatgtttatgtctatgagttttgtgtcactttgtacccaaagatatgttttgtaagctggtaattcttgtaaatatgatttgattacttttcttggaaaaaaaaaaaaaaaa

SEQ ID NO: 1930 - protein, 329 aa, Triticum aestivum
  misc_feature: Ceres CLONE ID no. 555309
  misc_feature: Ceres CDNA ID no. 25892962
  misc_feature (52)..(327): Pfam Name: AOX PFAM Desc: Alternative oxidase
  misc_feature: Homolog of GI Number: 50928461 NR Desc: OSJNBa0083N12.12
  misc_feature: Homolog of GI Number: 25989201 NR Desc: alternative oxidase AOX3 precursor
  misc_feature: Homolog of GI Number: 51860697 NR Desc: mitochondrial alternative oxidase 1b
  misc_feature: Homolog of GI Number: 51860701 NR Desc: mitochondrial alternative oxidase 1d
  misc_feature: Homolog of GI Number: 50928459 NR Desc: OSJNBa0083N12.11
  misc_feature: Homolog of GI Number: 25989199 NR Desc: alternative oxidase AOX2 precursor
  misc_feature: Homolog of GI Number: 51860695 NR Desc: mitochondrial alternative oxidase 1
  misc_feature: Homolog of GI Number: 19912725 NR Desc: alternative oxidase
  misc_feature: Homolog of GI Number: 50911823 NR Desc: alternative oxidase 1c
  misc_feature: Homolog of GI Number: 52421168 NR Desc: alternative oxidase
MSSRMAGATLLRHLGPRLFAAAEPASRLAASARGIMPAAARVFPARMASTEAAGPRAKHEEATEKPQGATAPEQNKKAVPSYWGIEPRKLVKDDGTEWPWFSFRPWDTYRPDTSIDVAKHHEPRAVADKVAYLIVRTLRKGSDLFFQRRHASHALLLETVAAVPPMVGGVLLHLRSLRRFEHSGGWIRALMEEAENERMHLMTFMEVTQPLWWERALVLATQGVFFNAYFVGYLVSPKFAHRFVGYLEEEAVHSYTEYLKDLEAGLIENTPAPAIAIDYWRLPADARLKDVVTAVRADEAHHRDANHYASDIHYQGMTLNQTPAPLGYH

SEQ ID NO: 1931 - DNA, 1159 bp, Triticum aestivum
  misc_feature: Ceres CLONE ID no. 555351
  misc_feature: Ceres CDNA ID no. 36528687
  CDS (116)..(727): REFERENCED BY SEQ ID NO: 1932
gaacctcaccaaaaaaaaagcccgcaccacctctcctcccccgccgccaccgccggcaaccaccggatccggagaagaaagaggcagcgcccggcgaagcgaagcgggggaagagatggtgggcactccgtcctcgccggtggtgaacgtgtacccgctcgccaactacacgttcggcaccaaggaggccaagatggagaaggacacctccgtcgccgaccgcctcgctcgcatgaaggtcaactacatgaaagaaggaatgcgaacaagtgttgaagcaatcctattggtgcaagagcacaaccacccccacatactgttgttgcaaattggaaacacattttgcaaacttcccggtggacggttgaagcctggagaaagtgaaattgagggcctgaaaaggaagctgtgcagcaagcttgcagttaactcaccttcctttccacctaactggcaggttggagagtgtgttgctgaatggtggaggccaaactttgaaaccgtgatgtatccttactgccctccacatataacaaagcccaaggagtgcaagaagcttttcattgttcacctaactgaaagggagtatttcgctgttccaaggaacttgaagctacttgctgttccactgtttgaactatatgacaatgttcagcggtacggaccagtgatttccaccatcccgcagcagctgtccaggttccagttcaacatggtgagctcgtaatcaatggtggcgatgagatgcgaggattagtcgagtataagatgtactgagatggatcttggacgaagcaccaaactactagatgctgatcaacttagcatgactcgttatttagtcgccgattttcataaactagatgctcattccgactgccttttatttggcgacgcgtgctgttaatgaagctcaggctggttagatacgtggtgtattattgtttggatggtaatcggttgttcctccggtgcggtgcggtgcgctaatctgttcctgtgtacgtactgtaggcgatggccggagatgtatgcctgtaacgtacgtacgtaggcgatgtatgcctgtaattgctatggtctgctgtagtactagtggctacggtgcatgggttcgtcgtcactgacgctatgcattttaggaaaaaaaaaaaaaaaa

SEQ ID NO: 1932 - protein, 203 aa, Triticum aestivum
  misc_feature: Ceres CLONE ID no. 555351
  misc_feature: Ceres CDNA ID no. 36528687
  misc_feature: Homolog of GI Number: 50929747 NR Desc: OSJNBa0032F06.22
  misc_feature: Homolog of GI Number: 41055411 NR Desc: similar to cleavage and polyadenylation specific factor 5
  misc_feature: Homolog of GI Number: 21554114 NR Desc: mRNA cleavage factor subunit
  misc_feature: Homolog of GI Number: 62859619 NR Desc: Cpsf5_predicted
  misc_feature: Homolog of GI Number: 49522181 NR Desc: MGC84447 protein
  misc_feature: Homolog of GI Number: 61371857 NR Desc: cleavage and polyadenylation specific factor 5
  misc_feature: Homolog of GI Number: 5901926 NR Desc: cleavage and polyadenylation specific factor 5
  misc_feature: Homolog of GI Number: 66845767 NR Desc: cleavage and polyadenylation specific factor 5
  misc_feature: Homolog of GI Number: 62664839 NR Desc:  similar to Autocrine motility factor receptor
  misc_feature: Homolog of GI Number: 66475808 NR Desc: NUDIX domain protein
MVGTPSSPVVNVYPLANYTFGTKEAKMEKDTSVADRLARMKVNYMKEGMRTSVEAILLVQEHNHPHILLLQIGNTFCKLPGGRLKPGESEIEGLKRKLCSKLAVNSPSFPPNWQVGECVAEWWRPNFETVMYPYCPPHITKPKECKKLFIVHLTEREYFAVPRNLKLLAVPLFELYDNVQRYGPVISTIPQQLSRFQFNMVSS

SEQ ID NO: 1933 - DNA, 1469 bp, Triticum aestivum
  misc_feature: Ceres CLONE ID no. 555364
  misc_feature: Ceres CDNA ID no. 24766128
  CDS (108)..(977): REFERENCED BY SEQ ID NO: 1934
attcgactcgacgccctcggttcacacacactgatcagctcagctacagcctacagagtacagacccaacccaactccgggagacaacagagcagagcacggcgagaatgctgctgaacccggcctcggaggcgctggtgctcgacagcatcaggcagcacctcatggaggacacggcggcgccggcgccggaggcgaggaggcagcggccggcctactgccgcagcgccagcttcgggagcctggtggccgaccagtggagcgagtcgctcccgttccgcgccgacgactccgacgacatggtcgtctacggcgcgctccgcgacgccttctcctgcggctggctccccgacggctccttcgccgccgtcaagccggagcccctcctgccttccccggactcctgctacgtcggcttcctcgagccggagacgcctccggccacgtccccgggagagagcgaggaggaggccgccgcggcgttcatgggcgaggcggccgcggccgcggcgagggggaagcactaccgcggggtgaggcagcggccgtggggcaagttcgcggcggagatccgggacccggccaagaacggcgcgcgcgtgtggctcggcacctacgacaccgccgaggacgccgccgtggcctacgaccgcgccgcgtaccgcatgcgcggctcccgcgccctcctcaacttcccgctccgcatcggctccgagatcgccgccgcgcacgccgcggccgcggccgccggggacaagcggccttcccccgagccggcgacctcagactcgtcgtcgtcctcctcctcctccgggtccccgaaaagaaggaagaggggcgaggccgcggccgcgtccatggccatggcgctggtgccgccgccctcgcagctgagccggccggcccaggcgtggtaccccgcggcgccggtggagcaggtggccatggcgccgcgcgcgcagcagctggtcagctaggccccgctcgccagcccccgggcgcacgatcggtcgtaaaagcacacaatgcgcaagtgcaatggattcgccagcaagtgcatggacgcgacagcaacaggagcccgcctttcactggtgcacggtgcaaggtggtgatggcaatggagagcgatggcgagcgagcgagcgagcaatcaggcaaagcaaccttggcgacggctccatttggatatttggatgggtcgagccgtcgacaacggaagataagctcggagcaactgggtgctgcaatttggcctggaatgatagttcctcctctctccactgctcggtgcaactcgcccaagtggatcaaagcgaaactgtgccagtatcggatcgtcgtggttccttctgagtcgtagggttatattttgtcactgtcagagtgcgtgtggtaaaaattacaaactcgtgaatcgtgatcgagcataatggaacttgtgaaactttacaaaaaaaaaaaaaaaa

SEQ ID NO: 1934 - protein, 289 aa, Triticum aestivum
  misc_feature: Ceres CLONE ID no. 555364
  misc_feature: Ceres CDNA ID no. 24766128
  misc_feature: Useful for making plants with modulated growth and phenotype characteristics
  misc_feature: The sequence is a functional homolog of  SEQ ID NO 1000 in the  10/412,699 US patent application
  misc_feature: The sequence is a functional homolog of  SEQ ID NO 501 in the  10/374,780 US patent application
  misc_feature (138)..(202): Pfam Name: AP2 PFAM Desc: AP2 domain
  misc_feature: Homolog of GI Number: 56567585 NR Desc: BTH
  misc_feature: Homolog of GI Number: 14140141 NR Desc: putative AP2
  misc_feature: Homolog of GI Number: 32401273 NR Desc: ethylene responsive protein
  misc_feature: Homolog of GI Number: 8809571 NR Desc: ethylene
  misc_feature: Homolog of GI Number: 1208498 NR Desc: ethylene
  misc_feature: Homolog of GI Number: 25350258 NR Desc: ethylene responsive element binding factor 1
  misc_feature: Homolog of GI Number: 7489123 NR Desc: ethylene
  misc_feature: Homolog of GI Number: 7268502 NR Desc: EREBP
  misc_feature: Homolog of GI Number: 17385636 NR Desc: ethylene
  misc_feature: Homolog of GI Number: 8980315 NR Desc: AP2
MLLNPASEALVLDSIRQHLMEDTAAPAPEARRQRPAYCRSASFGSLVADQWSESLPFRADDSDDMVVYGALRDAFSCGWLPDGSFAAVKPEPLLPSPDSCYVGFLEPETPPATSPGESEEEAAAAFMGEAAAAAARGKHYRGVRQRPWGKFAAEIRDPAKNGARVWLGTYDTAEDAAVAYDRAAYRMRGSRALLNFPLRIGSEIAAAHAAAAAAGDKRPSPEPATSDSSSSSSSSGSPKRRKRGEAAAASMAMALVPPPSQLSRPAQAWYPAAPVEQVAMAPRAQQLVS

SEQ ID NO: 1935 - DNA, 657 bp, Triticum aestivum
  misc_feature: Ceres CLONE ID no. 555422
  misc_feature: Ceres CDNA ID no. 35383206
  CDS (97)..(519): REFERENCED BY SEQ ID NO: 1936
cgaaaaaccaccaatctctcagcccccacaatctcacctactccggccatctctccggcgaccaccgcagcaccacccttccttccgactccagcgatggcgacagcggcagccggcggcgggaggggcaagccgaagggcagcaagtcggtgtcgcggtcggtgaaggcgggcctgcagttccccgtcggccgcgtcgcccggcacctcaaggtcggccgctacgcgaagcgcgtgggcgcgggcgcccccgtctacctctgcgccgtcctcgagtacctcgccgccgaggccctggagctggccggcaacgcggcgcgcgacaacaagaagacccggatctcgccgcgccacatccagctcgccgtccgcaacgacgaggagctcagccggctgctcggcggcgtcaccatcgccgccggcggcgtcctgcccaacatccactccgtgctcctccccaagaaggccggcaagggcgccggcaccggcgggtccgcttcgcagtcccaggagttctagagtaccagagatctgagtatggcgtggtgatggttttaggttggtagattagttcttggccaatgttcttgttggtacatgtatcgagggtggatctggttggaatggaatgcatctggttcaaaaaaaaaaaaaaaa

SEQ ID NO: 1936 - protein, 140 aa, Triticum aestivum
  misc_feature: Ceres CLONE ID no. 555422
  misc_feature: Ceres CDNA ID no. 35383206
  misc_feature (21)..(96): Pfam Name: Histone PFAM Desc: Core histone H2A/H2B/H3/H4
  misc_feature: Homolog of GI Number: 77555982 NR Desc: histone h2a.
  misc_feature: Homolog of GI Number: 3204129 NR Desc: histone H2A
  misc_feature: Homolog of GI Number: 297871 NR Desc: histone H2A
  misc_feature: Homolog of GI Number: 21553797 NR Desc: histone H2A
  misc_feature: Homolog of GI Number: 20334750 NR Desc: At1g08880/F7G19_24
  misc_feature: Homolog of GI Number: 21593507 NR Desc: putative histone H2A
  misc_feature: Homolog of GI Number: 571481 NR Desc: histone H2A
  misc_feature: Homolog of GI Number: 1708102 NR Desc: Histone H2A
  misc_feature: Homolog of GI Number: 121981 NR Desc: Histone H2A
  misc_feature: Homolog of GI Number: 121985 NR Desc: Histone H2A
MATAAAGGGRGKPKGSKSVSRSVKAGLQFPVGRVARHLKVGRYAKRVGAGAPVYLCAVLEYLAAEALELAGNAARDNKKTRISPRHIQLAVRNDEELSRLLGGVTIAAGGVLPNIHSVLLPKKAGKGAGTGGSASQSQEF

SEQ ID NO: 1937 - DNA, 1407 bp, Triticum aestivum
  misc_feature: Ceres CLONE ID no. 555445
  misc_feature: Ceres CDNA ID no. 40351062
  CDS (206)..(1129): REFERENCED BY SEQ ID NO: 1938
gtctgggctgcggctccggctgcgaacctcacgagtccatatcggcggccatacgcccatacccatccatccaatcttcttgccccgcctgcttaaaaaagacaaactgctttgcattcgttgacctgcaactgcaagctccgctttccaatccctgctcttgccctccgtttcttcatcccagctcttgcagcagaggcggccaatggcgcaggacgacccggttgtctctgcgcagtggctgcagcagcacctagggcagcccgatatcaagatactggatgcttcctggtacatgccacacgagagcagggacgcatggcaagaataccaggtggcccatattcctggcgcgctctacttcgacatcgatggaatttctgatcggacgactcatttgccacacatgctgccattggaagaggcattcgcagcagcggtttctgcacttggtatcagtaaccatgataaagtcattgtttatgatgggaaggggttctacagcgcgcctcgtgtttggtggatgttcagaatccttggacatgataaagtttgggtcttagatggaggtttccctcagtggcaagcttctggattcaatattggaagcagctgccctgatgatgcagttctgaaatccaaagctgctaatattgctgttgaaacagcttataatggtgaattggcaaatgctgccacatttcagacagagtttcgacatcagctattgtggacactagaaaaggtcaaacacaatgtagctgctaaggctcaccaagtagttgatgcccgagtaaagggcagatttgatggtgtaatgccagaaccaagggaaggagttagaagtgggcatatacctggaactaaatgtgttccgttccctgagatgtctgatggtgcacaaacgctcctccctgcagatgagctatctaaaaagttcgagcaagcaggcatttcccttgatggcccgattgtcctcacatgtgcatctggtgtaactgcatgcatacttgccctggggctttatagaattgggaagcatgacgttccggtttacgacggatcttggacagaatgggaagcgctgccagataatgattacccaatagttacttccactggctcttaaatcgatcattctgaggtgatgaatgcagctgtcacatcctgtggcattcagcgcagattgtgagcgcaatgatatttctctgtggcaagctttgtaccaaagtcaatacaaaggttataggaaaaataaaatacagtaccattgatgttataggaaagtgtcaacattaagtttatattgatgttgtacttaacgctattattgaagaaatcgtgacttgaaaacaacaataagtttgtattttatatgcagtagtgcagccaaaaaaaaaaaaaaaa

SEQ ID NO: 1938 - protein, 307 aa, Triticum aestivum
  misc_feature: Ceres CLONE ID no. 555445
  misc_feature: Ceres CDNA ID no. 40351062
  misc_feature (9)..(129): Pfam Name: Rhodanese PFAM Desc: Rhodanese
MAQDDPVVSAQWLQQHLGQPDIKILDASWYMPHESRDAWQEYQVAHIPGALYFDIDGISDRTTHLPHMLPLEEAFAAAVSALGISNHDKVIVYDGKGFYSAPRVWWMFRILGHDKVWVLDGGFPQWQASGFNIGSSCPDDAVLKSKAANIAVETAYNGELANAATFQTEFRHQLLWTLEKVKHNVAAKAHQVVDARVKGRFDGVMPEPREGVRSGHIPGTKCVPFPEMSDGAQTLLPADELSKKFEQAGISLDGPIVLTCASGVTACILALGLYRIGKHDVPVYDGSWTEWEALPDNDYPIVTSTGS

SEQ ID NO: 1939 - DNA, 1808 bp, Triticum aestivum
  misc_feature: Ceres CLONE ID no. 555514
  misc_feature: Ceres CDNA ID no. 25445687
  CDS (267)..(1460): REFERENCED BY SEQ ID NO: 1940
aaagaatttcagacagctaaacaaactcggccgcccagcttcctcctcctcctcctccccctccttcccctcgacctgctggtgaccgccgtctgccttctccgacgaatctccccgcgagttcggcctagctccacagggagtctcgaatctcccctttgccgctgagtcgaggaagaagatcggctcgggttcgcttgctcgttcgctcgaggacgagattcagcggcgggactgattgattgattgggcgtgagcgagagcggatgaaggggaagggcggggcgctcgacaggaggtcgtctgcgaggtggaggctgctgctgctctgcgccttcagctttgggctcggcatgctcttcaccaaccgcttctggacagcaccaagtaccaataaccacatcatgtcccaacacaggagacaagaccaggagttgcaacttgtgtcagaggattgcaatacaaagaggaagcatggggagcacaaggatataatgggagaggtaaccaggacccatgaagccatacaattgttggataagtcaatctcaacgctgcagatggagcttgcagcaaagcgaagcacgttggaactggtccgttctggtgtgccagtaacttcagaaactagtcaaccaaggaaaaaagcattcgttgtcgttggagttaacaccgctttcagtagccgcaagcgtcgtgattcagtcagggagacatggatgcctcaaggtgagaagctgctgcagcttgaagaacagaagggaatagttatccgcttcactataggccatagtgctacatccaatagtatattggacaaagcaatagatgcagaagatgaacagcatcacgactttcttagactggaccatgtcgaggggtatcatgaactctccgcaaagacaaaaatcttcttctccacgtccgtgggcatttgggatgctgactttttcgtcaaggtcgatgatgatgtgcatgtgaacttaggaatgcttgccactacccttgcgaggcataaagcgaaaccaagaacttatattggctgcatgaagtcaggcccagttctggctgacaagaatctgaagtaccatgaacctgaggcctggaaatttggggaggatggaaacaagtattttcgccatgctactggacagatatatgctatctcaaaagatcttgcgacctatatctcaataaatcaacctatcttacacaagtatgcgaacgaagatgtatcacttgggtcatggtttatcgggttagaggttaatcatattgatgaaaggaacatgtgctgcggaactccaccagactgtgagtggaaagggcaagctggcaatatctgcgtggcatcctttgattggagctgcagcggcatatgcaagtccgtcgagagactcaaggatgtacatgctcgatgcggcgaaggcgattcttctgtttggagtgatctaatctagctaataccctccctggcgtaaatatgtagcatcctcagtaaaccctgacgatcgtgcctcagtggctacaactgaaatgaccgaaattgcacaacaggtccgcagatggactatatttctggtagttcggtctgaggcaacacatgtagtgtagatgatacttgttcagtcgttgagagatctcagtagatgggaattgctttgtgccatcacctgtgacgtcagtagtgttagaagagagaccaaagcgagcgagttacacagctgctgtgtaccacagattaggggaaaacatctactgcaaattttgatcaattcttttgatgtcggttaaaaaaaaaaaaaaaa

SEQ ID NO: 1940 - protein, 397 aa, Triticum aestivum
  misc_feature: Ceres CLONE ID no. 555514
  misc_feature: Ceres CDNA ID no. 25445687
  misc_feature (142)..(340): Pfam Name: Galactosyl_T PFAM Desc: Galactosyltransferase
  misc_feature: Homolog of GI Number: 21360399 NR Desc: At1g05170/YUP8H12_22
  misc_feature: Homolog of GI Number: 4138265 NR Desc: Avr9 elicitor response protein
  misc_feature: Homolog of GI Number: 42572147 NR Desc: galactosyltransferase family protein
  misc_feature: Homolog of GI Number: 25370622 NR Desc: protein F2E2.6
  misc_feature: Homolog of GI Number: 12323294 NR Desc: putative
  misc_feature: Homolog of GI Number: 51535939 NR Desc: putative Avr9 elicitor response protein
  misc_feature: Homolog of GI Number: 50909623 NR Desc: putative avr9 elicitor response protein
  misc_feature: Homolog of GI Number: 50931451 NR Desc: putative galactosyltransferase
  misc_feature: Homolog of GI Number: 50399982 NR Desc: putative glycosyltransferase
  misc_feature: Homolog of GI Number: 25370617 NR Desc: protein F28K19.2
MKGKGGALDRRSSARWRLLLLCAFSFGLGMLFTNRFWTAPSTNNHIMSQHRRQDQELQLVSEDCNTKRKHGEHKDIMGEVTRTHEAIQLLDKSISTLQMELAAKRSTLELVRSGVPVTSETSQPRKKAFVVVGVNTAFSSRKRRDSVRETWMPQGEKLLQLEEQKGIVIRFTIGHSATSNSILDKAIDAEDEQHHDFLRLDHVEGYHELSAKTKIFFSTSVGIWDADFFVKVDDDVHVNLGMLATTLARHKAKPRTYIGCMKSGPVLADKNLKYHEPEAWKFGEDGNKYFRHATGQIYAISKDLATYISINQPILHKYANEDVSLGSWFIGLEVNHIDERNMCCGTPPDCEWKGQAGNICVASFDWSCSGICKSVERLKDVHARCGEGDSSVWSDLI

SEQ ID NO: 1941 - DNA, 1504 bp, Glycine max
  misc_feature: Ceres CLONE ID no. 555762
  misc_feature: Ceres CDNA ID no. 40351063
  CDS (48)..(1211): REFERENCED BY SEQ ID NO: 1942
aaaagagaaagagtcatggatgcgcgtcactgctcgcgttcattataatggcggaagagataaccaagaacgacgtcggagtaacctccaaaaccaccagaagcagctccaggttctggcctcgttggattcccacttccaccgatcacatcatcgctgccgagaagcgccttctttccgtcgtcaagactggttatgttcaagagcatgttaacattggctctggtcctcctggctccaaagtgaggtggttccgttcatccagcaacgagccgcggtttattaacaccgttacatttgacagtaaaccccattctccaacgcttgtcatgattcatggttatgctgcttcacaggggttcttttttcgcaattttgacgcgcttgcgtctcgatttagagtcattgctgttgatcaacttggatggggtggatcgagcagacctgatttcacatgcaaaagcactgaagaaactgaggcatggtttattgattcttttgaggaatggagaaaagccaaaaacttgagcaattttatactgctcggacattcttttggtggttatgttgctgccaaatatgcgctcaagcaccctgagcatgtacaacacttgattctggttggatctgctggattttcatctgaatcagatgcaaagtctgagtggataacaaggtttcgagcaacatggaagggggcagttttgaaccatctttgggaatcaaatttcacacctcagaaacttgtcaggggtttaggtccttggggtcccaacatagtccgcaagtatacaagtgctaggtttggtacacattcaactggggaaatactgactgaagaggaatcaacattgctgacagactatgtttaccacacattggcggccaaagctagtggagagctgtgcttaaaatatattttttcatttggagcatttgctaggatgccccttcttctcagtgcctcagagtggaaggtgcccaccactttcatgtatggtttccaagactggatgaattatcaaggtgcccaagaagctcgcaagcatatgaaggttccatgcgaaatcatcaggattcctcagggtgggcactttgcgttcattgacaacccaactgccttccattcagctgttttttatgcttgtcgaaggtttcttacacctgatccagacaatgaatctcttcctaaagggctaacctctgcataggttaggtcttaattttgtgctattcctgtctatatgtattttaatattttttttttactaattaaatttcataattgaatgaaatcatatgtatattgtttcagtaaagtggaatttactgaaaatatttgtaatagcaacttcaacaaaaatcgatttgtaggagaaatttcttccctggaaattgttctattttaaatcttgttgctcataagatattatgacttcattcaactaataattcatgtcgtttaggaaaagtaaaaaaaaaaaagaaaaaaaaaaaaaaaaaa

SEQ ID NO: 1942 - protein, 387 aa, Glycine max
  misc_feature: Ceres CLONE ID no. 555762
  misc_feature: Ceres CDNA ID no. 40351063
  misc_feature (117)..(365): Pfam Name: Abhydrolase_1 PFAM Desc: alpha/beta hydrolase fold
MAEEITKNDVGVTSKTTRSSSRFWPRWIPTSTDHIIAAEKRLLSVVKTGYVQEHVNIGSGPPGSKVRWFRSSSNEPRFINTVTFDSKPHSPTLVMIHGYAASQGFFFRNFDALASRFRVIAVDQLGWGGSSRPDFTCKSTEETEAWFIDSFEEWRKAKNLSNFILLGHSFGGYVAAKYALKHPEHVQHLILVGSAGFSSESDAKSEWITRFRATWKGAVLNHLWESNFTPQKLVRGLGPWGPNIVRKYTSARFGTHSTGEILTEEESTLLTDYVYHTLAAKASGELCLKYIFSFGAFARMPLLLSASEWKVPTTFMYGFQDWMNYQGAQEARKHMKVPCEIIRIPQGGHFAFIDNPTAFHSAVFYACRRFLTPDPDNESLPKGLTSA

SEQ ID NO: 1943 - DNA, 433 bp, Glycine max
  misc_feature: Ceres CLONE ID no. 556044
  misc_feature: Ceres CDNA ID no. 36580534
  CDS (83)..(208): REFERENCED BY SEQ ID NO: 1944
acacagctattcctcttaagcttgctactgagtttccacactgcataccttaggtcttccgaattcgaagttaatttgcaagatggctaaggaaaaggctcagatcaacattgtggtggttggtcatgtggaccctgaggaggcaaccaccattaacgagctgaagaagcctgttgtggagaaagaagctccagggcatgccatatgagggcatgcacgtacggcctcggaggggaaccagaaaattatgttaacaaaataatctggaaccctaatgtatcagtgtcatcatcagtgtgtagtttaagctagctttgctatggttacgttctttgagatgagagtcttgatgaacagtaccattctgatgtattgctttccttgaaagttaatgcatgcttcttatcttctgtctaaaaaaaaaaaaaaaaaa

SEQ ID NO: 1944 - protein, 41 aa, Glycine max
  misc_feature: Ceres CLONE ID no. 556044
  misc_feature: Ceres CDNA ID no. 36580534
  misc_feature: Homolog of GI Number: 83286887 NR Desc: auxin down
  misc_feature: Homolog of GI Number: 485513 NR Desc: ADR12
MAKEKAQINIVVVGHVDPEEATTINELKKPVVEKEAPGHAI

SEQ ID NO: 1945 - DNA, 1122 bp, Triticum aestivum
  misc_feature: Ceres CLONE ID no. 557178
  misc_feature: Ceres CDNA ID no. 35383207
  CDS (96)..(932): REFERENCED BY SEQ ID NO: 1946
cttccacccttcaccgccgccagcgccacagcctccaagccctcgatctcccccatcggagctccctgcccacaaccccccacccccacccaaccatggcggaccgcggcggcgagcgtggtggcgaccgcggaggcgagcgcggcgggttcggccgcggcttcgggcgcggcgggcgcggggaccgtggcgggcgccgcggcggtcgtcgtggcccccgccaggaggaggagaagtgggtgcccgtcaccaagctcggccgcctcgtcaaggagggccgcttcaccaagatggaggagctctacctccactcgctccccatcaaggagcaccagatcgtggagcagctctgcccggggctcaaggacgaggtgatgaagatcacccccgtgcagaagcagacccgcgccggccagcggacccgcttcaaggcgttcgtcgtcgtcggcgacagcaacggccacgtcgggctcggcgtcaagtgcgccaaggaggtggccacggccatccgcggcgccatcatcctcgccaagctctccatcgtgcccgtcaggaggggctactgggggaacaagatcggcctgccccacaccgtgccctgcaaggtcaccggcaagtgcggctctgtcaccgtgcgcatggtgcccgccccgaggggttccgggatcgtcgccgcgcgcgtccccaagaaggtgctccagttcgctggtattgatgatgtcttcacttcctcgcgtggatccaccaagacccttggcaacttcgtcaaggcaaccttcgactgcctgatgaagacctatggattcctcacccctgacttctggagggagacgaccttcaccaaggcgccataccaggagttcaccgacattttggtgaagccgaccaaggccctgatgcttgatgcaccagccgagaagatcgaagcttaggatgtcggtgtaaagggtttttacaagctgagagctgtctaatgcactttgctttatttagttattaatactttgaatcgtgctgtttcaggatgtctctttttgccgtcaagtgttggtttgtggaactatgctactctcttttatcgtcaatggaagctacataattatggcaaaaaaaaaaaaaaaa

SEQ ID NO: 1946 - protein, 278 aa, Triticum aestivum
  misc_feature: Ceres CLONE ID no. 557178
  misc_feature: Ceres CDNA ID no. 35383207
  misc_feature (171)..(244): Pfam Name: Ribosomal_S5_C PFAM Desc: Ribosomal protein S5
  misc_feature (88)..(154): Pfam Name: Ribosomal_S5 PFAM Desc: Ribosomal protein S5
  misc_feature: Homolog of GI Number: 50919281 NR Desc: putative 40S ribosomal protein S2
  misc_feature: Homolog of GI Number: 50935111 NR Desc: putative 40S ribosomal protein S2
  misc_feature: Homolog of GI Number: 22137092 NR Desc: At2g41840/T11A7.6
  misc_feature: Homolog of GI Number: 21553851 NR Desc: 40S ribosomal protein S2
  misc_feature: Homolog of GI Number: 22137288 NR Desc: At1g59359/T4M14_3
  misc_feature: Homolog of GI Number: 18181932 NR Desc: ribosomal protein S2
  misc_feature: Homolog of GI Number: 21618011 NR Desc: ribosomal protein S2
  misc_feature: Homolog of GI Number: 30017231 NR Desc: At3g57490
  misc_feature: Homolog of GI Number: 21539457 NR Desc: ribosomal protein S2
  misc_feature: Homolog of GI Number: 51708309 NR Desc:  similar to ribosomal protein S2
  misc_feature: Useful for increasing chlorophyll and photosynthetic capacity
  misc_feature: Useful for sterility
MADRGGERGGDRGGERGGFGRGFGRGGRGDRGGRRGGRRGPRQEEEKWVPVTKLGRLVKEGRFTKMEELYLHSLPIKEHQIVEQLCPGLKDEVMKITPVQKQTRAGQRTRFKAFVVVGDSNGHVGLGVKCAKEVATAIRGAIILAKLSIVPVRRGYWGNKIGLPHTVPCKVTGKCGSVTVRMVPAPRGSGIVAARVPKKVLQFAGIDDVFTSSRGSTKTLGNFVKATFDCLMKTYGFLTPDFWRETTFTKAPYQEFTDILVKPTKALMLDAPAEKIEA

SEQ ID NO: 1947 - DNA, 800 bp, Triticum aestivum
  misc_feature: Ceres CLONE ID no. 557190
  misc_feature: Ceres CDNA ID no. 35383208
  CDS (69)..(563): REFERENCED BY SEQ ID NO: 1948
ctagtcccccccacaccaaccacccttctcccgccgccgccccgcgaagcaaagcaggaggagcagggatgccggcgggccacggtctgctgtcgcggacgcgcgacctgttcgcgcgcccgttccggaagaagggttacatcccgctcaccacctacctgcgcacctacaaggtcggcgagtacgtcgacgtcaaggtgaacggcgccgtgcacaagggtatgccgcacaagttctaccacggccgcaccggacgcgtgtggaacgtcaccaagcgcgccatcggcgtcgagatcaacaagcaggttggaaaccgcattatcaggaaaaggatccatgtccgtgttgagcatgtgcagccatccaggtgtgctgaggagttccgcctgaggaaagtgaagaacgaccagctcaaggcggaagccaaggcgcgcggtgaggtcatcagcaccaagaggcagccactcggccctaaacctgggttcatggtcgagggtaccacaattgagaccgtcactcccattccctacgatgtggtcaatgatctcaagggtggttactagggtgtttgggttatctgcctgcacaaccagttcaaatctatggtgctcttatgagtaggatttgctctctgagcagtagtctgggttgggtctttattcatgtcaagaagatattcggtgtaggttgctatcatgagttttgcagaaatgctatactgtgctatttccttcagaatgatgatgtgctctgttgaactatatagttacattgcttgcctcctaaaaaaaaaaaaaaaa

SEQ ID NO: 1948 - protein, 164 aa, Triticum aestivum
  misc_feature: Ceres CLONE ID no. 557190
  misc_feature: Ceres CDNA ID no. 35383208
  misc_feature: null
  misc_feature: Useful for making plants with modulated flowering time
  misc_feature (2)..(100): Pfam Name: Ribosomal_L21e PFAM Desc: Ribosomal protein L21e
  misc_feature: Homolog of GI Number: 31432571 NR Desc: 60S ribosomal protein L21
  misc_feature: Homolog of GI Number: 3885884 NR Desc: 60S ribosomal protein L21
  misc_feature: Homolog of GI Number: 32400808 NR Desc: 60s ribosomal protein L21
  misc_feature: Homolog of GI Number: 12321346 NR Desc: 60S ribosomal protein L21
  misc_feature: Homolog of GI Number: 3482935 NR Desc: Putative ribosomal protein L21
  misc_feature: Homolog of GI Number: 76161012 NR Desc: 60S ribosomal protein L21
  misc_feature: Homolog of GI Number: 54292803 NR Desc: ribosomal protein L21
  misc_feature: Homolog of GI Number: 45190353 NR Desc: AEL254Wp
  misc_feature: Homolog of GI Number: 15213768 NR Desc: ribosomal protein L21
MPAGHGLLSRTRDLFARPFRKKGYIPLTTYLRTYKVGEYVDVKVNGAVHKGMPHKFYHGRTGRVWNVTKRAIGVEINKQVGNRIIRKRIHVRVEHVQPSRCAEEFRLRKVKNDQLKAEAKARGEVISTKRQPLGPKPGFMVEGTTIETVTPIPYDVVNDLKGGY

SEQ ID NO: 1949 - DNA, 1246 bp, Glycine max
  misc_feature: Ceres CLONE ID no. 557575
  misc_feature: Ceres CDNA ID no. 36582235
  CDS (67)..(936): REFERENCED BY SEQ ID NO: 1950
gttcgcacgccttgttcggtgaagtgagtagtgagtgctgaatcgaatcgaatcgattctccgaacatggcggcgagcgatcgcacagtgttgcaattctcttcatcatcttcttcttcttcgcagatcttgtccgcgaaggtccaccctctggtcatcttcaacatctgcgattgctatgttcgacgccctgaccaagccgaccgcgtcatcggaaccctactcggctccgtccttcccgacggaaccgtcgatatccgaaattcctatgctgttcctcacaacgagtctatcgaacaggttgcattggatatagagtaccaccacaatatgttaatatcccaccaaaaagtgaatccaaaggaaatcatagtaggatggtattcaaccggtcttggagtaactggtggtagtgcattaatccacgagttttattctcgagaagtgcccaatcccatacacttgactgttgatacaggatttacaaatggagcgggtacgattaaagcatacgtgtctaacaatttatctcttggagaacgtcaaattgctgcacagtttcaagaaattccattagatcttcgtatggtggaagctgagcgaattggatttgatatgctgaaggcaactgcagttgacaaaattccctcagatttagaagggatggaagcatcaatgcaacatctgctagtcttgattgatgacatctacaaatatgttgacgatgttgtggaaggacgagtggcaccagacaacaaaatcgggagatttatatcagaagctgtaggttcccttcccaaattgtccccatcagtttttgataagcttgtgaatgacagtttgcaggatcacttgcttttgctgtatttatctagtatcacaagaacgcagcttagcttggctgaaaaattgaacacagctgctcagattctgtgattcttccgcttgtttatcgccgaagtcaaatttttctgagtttcttttcttgtcttatttccagaaacgtggaatgtcagcgttttatacttcacttttacttcgcttatttttttatttatgttttgtgctggtctttgctaggtaagttcacttattgtccaaggtatgcagtgtagcgttcacttgttatttttcatgtaatctgtatttgaaagaaaatgagcaaaaagctttctctccattatctatttatttcttatttattgagattggaaaaaaaaaaaaaaacaaaaaaaaaaaaaaaaaa

SEQ ID NO: 1950 - protein, 289 aa, Glycine max
  misc_feature: Ceres CLONE ID no. 557575
  misc_feature: Ceres CDNA ID no. 36582235
  misc_feature: null
  misc_feature: Useful for making plants with altered alkaloid content
  misc_feature: Useful for making plants with altered terpenoid content
  misc_feature (19)..(129): Pfam Name: Mov34 PFAM Desc: Mov34/MPN/PAD
  misc_feature: Homolog of GI Number: 20259173 NR Desc: putative 26S proteasome regulatory subunit
  misc_feature: Homolog of GI Number: 20260040 NR Desc: 26S proteasome regulatory subunit
  misc_feature: Homolog of GI Number: 50931081 NR Desc: putative 26S proteasome regulatory subunit
  misc_feature: Homolog of GI Number: 16225442 NR Desc: 26S proteasome regulatory subunit S12 isolog
  misc_feature: Homolog of GI Number: 62641108 NR Desc:  similar to eukaryotic translation initiation factor 3
  misc_feature: Homolog of GI Number: 53237082 NR Desc: Eukaryotic translation initiation factor 3
  misc_feature: Homolog of GI Number: 61816288 NR Desc:  similar to eukaryotic translation initiation factor 3
  misc_feature: Homolog of GI Number: 55635271 NR Desc:  similar to eukaryotic translation initiation factor 3
  misc_feature: Homolog of GI Number: 61359529 NR Desc: eukaryotic translation initiation factor 3 subunit 5 epsilon
  misc_feature: Homolog of GI Number: 61369601 NR Desc: eukaryotic translation initiation factor 3 subunit 5 epsilon
MAASDRTVLQFSSSSSSSSQILSAKVHPLVIFNICDCYVRRPDQADRVIGTLLGSVLPDGTVDIRNSYAVPHNESIEQVALDIEYHHNMLISHQKVNPKEIIVGWYSTGLGVTGGSALIHEFYSREVPNPIHLTVDTGFTNGAGTIKAYVSNNLSLGERQIAAQFQEIPLDLRMVEAERIGFDMLKATAVDKIPSDLEGMEASMQHLLVLIDDIYKYVDDVVEGRVAPDNKIGRFISEAVGSLPKLSPSVFDKLVNDSLQDHLLLLYLSSITRTQLSLAEKLNTAAQIL

SEQ ID NO: 1951 - DNA, 1187 bp, Glycine max
  misc_feature: Ceres CLONE ID no. 557710
  misc_feature: Ceres CDNA ID no. 25891130
  CDS (14)..(925): REFERENCED BY SEQ ID NO: 1952
gttttgcgagagaatggagttcctggacgaggacgcaaggccaaggttcgtgttccagtccggtgcagctgcgaggagcagcgagccaccgcacccgatccacaaacctaccaagccattcctcttcgccaccgtttccctctcctcactcttcctcactctctccctcttcttcctcgaagcggagcccttcaaatcgctcctcttctggctcgcactctctctcctcgttggccccttcgcccctccctccatcactggcggcgacgtccgcgtcggccgcggcgaggtcgtcaacttccccgatccggagcccgagcccgacgaggacgccagtaggaagtcctcacaacggcgatccagacagcggagggccgaggaagcctccgccgccgtaggcccggtggtttccgtcagcgcggcggagaagagaaaagaatcttctggaatcgagaagcgtgcgacggtggtggaggaggagaaggggtggagcgaggaggatgtggaggtgctgaagaagcagatggtgaagaatccggtggggaagccagggaggtgggaggcgatagcggcggcgttcggggggaggcacggagtggacagtgtgataaagaaagcgaaggaattgggggagaagagagtggatgattcggagtcgtatgcgttgtttttgaagaagaggaaagcgttggataagagggttgtggaggagaatgcggatgagggtgagaaagttgttgataatggttggagttctgctgaggatatcgcgttgctgaatgctttgaaagcgtttcctaaggaagtttccatgaggtgggaaaaggttgctgctgcggttcccgggagatccaaggctgcttgcatgaaaagattcgccgaattgaagaaagggtttcggactgcaaaagctgcagccgagtgagcactgaacactctcaaagggatcatttttttgtttgattttgatatgttaaggtaaatggattcgtcgacttgtaacttaaacataattttttgtttctagctattttgagttatgatttatgttggcctccttctaggtgacactcaaattgtggttgtgtaactttataaaatgcaatgaaccgatcgagattgtgtattcgggatctcttatagtgcgaataaatatttaatatttcgacttaaaaaaaaaaaaaaaa

SEQ ID NO: 1952 - protein, 303 aa, Glycine max
  misc_feature: Ceres CLONE ID no. 557710
  misc_feature: Ceres CDNA ID no. 25891130
  misc_feature (156)..(192): Pfam Name: Myb_DNA PFAM Desc: Myb
  misc_feature: Homolog of GI Number: 34905190 NR Desc: myb
  misc_feature: Homolog of GI Number: 61871110 NR Desc:  similar to DnaJ
  misc_feature: Homolog of GI Number: 39794437 NR Desc: LOC394933 protein
  misc_feature: Homolog of GI Number: 76615186 NR Desc:  similar to DnaJ
  misc_feature: Homolog of GI Number: 32481976 NR Desc: zuotin related factor 2
  misc_feature: Homolog of GI Number: 4633127 NR Desc: GlsA
  misc_feature: Homolog of GI Number: 73981816 NR Desc:  similar to DnaJ
  misc_feature: Homolog of GI Number: 73981814 NR Desc:  similar to DnaJ
  misc_feature: Homolog of GI Number: 47086411 NR Desc: zgc:85671
MEFLDEDARPRFVFQSGAAARSSEPPHPIHKPTKPFLFATVSLSSLFLTLSLFFLEAEPFKSLLFWLALSLLVGPFAPPSITGGDVRVGRGEVVNFPDPEPEPDEDASRKSSQRRSRQRRAEEASAAVGPVVSVSAAEKRKESSGIEKRATVVEEEKGWSEEDVEVLKKQMVKNPVGKPGRWEAIAAAFGGRHGVDSVIKKAKELGEKRVDDSESYALFLKKRKALDKRVVEENADEGEKVVDNGWSSAEDIALLNALKAFPKEVSMRWEKVAAAVPGRSKAACMKRFAELKKGFRTAKAAAE

SEQ ID NO: 1953 - DNA, 1334 bp, Glycine max
  misc_feature: Ceres CLONE ID no. 557966
  misc_feature: Ceres CDNA ID no. 36581849
  CDS (143)..(949): REFERENCED BY SEQ ID NO: 1954
aaaccaaaccaaaccaaacctctctttctcagtttctctctcttagggttttctcctcccccattgacccaccgtccatcgcaaaggaagtcgcgcccaatttccatggtttgtagattaaatcttaaagcagtaagtcatcatggataaatcagagcagactcagcagcaacatcagcatgggatgggcgttgccacaggtgctagccaaatggcctattcttctcactacccgactgctcccatggtggcttctggcacgcctgctgtagctgttccttccccaactcaggctccagctgccttctctagttctgctcaccagcttgcataccagcaagcacagcatttccaccaccaacagcagcaacaccaacaacagcagcttcaaatgttctggtcaaaccaaatgcaagaaattgagcaaacaattgactttaaaaaccacagtcttcctcttgctcggataaaaaagataatgaaagctgatgaagatgtccggatgatttctgcagaagctccagtcatatttgcaaaagcatgtgaaatgttcatattagagttgacgttgagatcttggatccacacagaagagaacaagaggagaactctacaaaagaatgatatagcagctgctatttcgagaaacgatgtttttgatttcttggttgatattatcccaagagatgagttgaaagaggaaggacttggaataaccaaggctactattccattggtgaattctccagctgatatgccatattactatgtccctccacagcatcctgttgtaggacctcctgggatgatcatgggcaagcccgttggtgctgagcaagcaacgctgtattctacacagcagcctcgacctcccatggcgttcatgccatggccccatacacaaccccagcaacagcagccaccccaacatcaacaaacagactcatgatgacaatgcaattcaattaggtcggaaagtagcatgcaccttatgattattacaaatttacttaatgcctttaagtcagctgtagtttagtgttttgcattgaaaaatgccaaagattgtttgaggtttcttgcactcatttatgattgtatgagctcttatgctgagttacttttggttgtgtttatttgaggtactggtgtggtagttaaattagtttgtagctgtccataagtaaacagcgtagctgcttaattaggaggtctgaaatgatgaaatagtttgtattgttattgcagaaggtaggttttattcagtatttcattctattgcaatggctgaatttaatgctcatccgcttagtaccaaaaaaaaaaaaaaaaaa

SEQ ID NO: 1954 - protein, 268 aa, Glycine max
  misc_feature: Ceres CLONE ID no. 557966
  misc_feature: Ceres CDNA ID no. 36581849
  misc_feature: Useful for making plants with modulated growth and phenotype characteristics
  misc_feature: The sequence is a functional homolog of  SEQ ID NO 712 in the  11/479,226 US patent application
  misc_feature (102)..(166): Pfam Name: CBFD_NFYB_HMF PFAM Desc: Histone
  misc_feature: Homolog of GI Number: 46250703 NR Desc: CCAAT
  misc_feature: Homolog of GI Number: 50905597 NR Desc: putative heme activated protein
  misc_feature: Homolog of GI Number: 45544869 NR Desc: CONSTANS interacting protein 2b
  misc_feature: Homolog of GI Number: 52076535 NR Desc: putative CCAAT
  misc_feature: Homolog of GI Number: 21389649 NR Desc: putative transcription factor
  misc_feature: Homolog of GI Number: 21554704 NR Desc: transcription factor
  misc_feature: Homolog of GI Number: 46250701 NR Desc: CCAAT
  misc_feature: Homolog of GI Number: 23505813 NR Desc: At1g08970/F7G19_16
  misc_feature: Homolog of GI Number: 6289057 NR Desc: heme activated protein
MDKSEQTQQQHQHGMGVATGASQMAYSSHYPTAPMVASGTPAVAVPSPTQAPAAFSSSAHQLAYQQAQHFHHQQQQHQQQQLQMFWSNQMQEIEQTIDFKNHSLPLARIKKIMKADEDVRMISAEAPVIFAKACEMFILELTLRSWIHTEENKRRTLQKNDIAAAISRNDVFDFLVDIIPRDELKEEGLGITKATIPLVNSPADMPYYYVPPQHPVVGPPGMIMGKPVGAEQATLYSTQQPRPPMAFMPWPHTQPQQQQPPQHQQTDS

SEQ ID NO: 1955 - DNA, 1122 bp, Glycine max
  misc_feature: Ceres CLONE ID no. 558051
  misc_feature: Ceres CDNA ID no. 29191498
  CDS (1)..(816): REFERENCED BY SEQ ID NO: 1956
gcttccctctctcatcctctctgccgcttccccgctctccccaaactactctgtgccccgtcagatcgacctggactttggcgacagctacttctcgacgggcggcacgggcgtgctgctacttctgcttcctctcccacgcttgctgagctgatggctacatcagagccagtacaagagagtttggtggtgcactactcacaacctagtaggccccgggtcctccttgctgcttcaggaagtgtagccgctataaaatttgaaagcctttgccgtagcttctctgagtgggcggatgtccgagctgtggccaccacgtcatccttgcacttcgttgatagatcatctctaccaagtggcatcgttctttacactgatgacgatgaatggtctacctggaagaagataggagatgaagtcttacacatcgagctgcggaaatgggcagacgttatggtgattgctccattgtcagcaaataccctggctaagatcgccggtgggttatgcgacaacctcttgacctgcatcgtgagagcgtgggactacagcaaaccgctctttgttgccccagccatgaacacgttaatgtggaacaacccattcacggagcggcatcttcacacaatcaaccaactgggcatagccttgatccccccagttaccaaaaggctggcctgtggcgattacgggaacggcgcaatggccgaaacctcgcagatccatacttccgtgaggctcgcgtgcaagacgcaaccgcacgatgcgagcagttcactcgcgggtcctgtcagtaataaccggccatctagctgatgcagcggttggccacttgattgtcaagcttaggaatttgttttatctgcagtgtgcatctggagtgttgtaccagattttttttcaactagagtttgtgtgtattgaattagggggaaaggttgttgtcacatgataacaataacttccaatgatgactctattcagtttgtaattgtctgtgggagtacaattatgcagctgtattgtctgctacaatattgtttgtttgtgtgtgtgggagtggggggtgctgttgccacagagatagattcctccctgcccagtaaaaaaaaaaaaaaaaaa

SEQ ID NO: 1956 - protein, 220 aa, Glycine max
  misc_feature: Ceres CLONE ID no. 558051
  misc_feature: Ceres CDNA ID no. 29191498
  misc_feature: The plant flowers significantly late compared to wild-type.
  misc_feature: Useful for making plants with modulated flowering time
  misc_feature (21)..(141): Pfam Name: Flavoprotein PFAM Desc: Flavoprotein
  misc_feature: Homolog of GI Number: 51090974 NR Desc: putative HAL3B
  misc_feature: Homolog of GI Number: 52218792 NR Desc: At3g18030
  misc_feature: Homolog of GI Number: 28948674 NR Desc: Chain A
  misc_feature: Homolog of GI Number: 2047324 NR Desc: HAL3B protein
  misc_feature: Homolog of GI Number: 8778701 NR Desc: T1N15.24
  misc_feature: Homolog of GI Number: 72089189 NR Desc:  similar to CG30290
  misc_feature: Homolog of GI Number: 12583571 NR Desc: putative halotolerance protein HAL3 homolog
  misc_feature: Homolog of GI Number: 19115217 NR Desc: thymidylate synthase
  misc_feature: Homolog of GI Number: 45188030 NR Desc: ADR156Cp
MATSEPVQESLVVHYSQPSRPRVLLAASGSVAAIKFESLCRSFSEWADVRAVATTSSLHFVDRSSLPSGIVLYTDDDEWSTWKKIGDEVLHIELRKWADVMVIAPLSANTLAKIAGGLCDNLLTCIVRAWDYSKPLFVAPAMNTLMWNNPFTERHLHTINQLGIALIPPVTKRLACGDYGNGAMAETSQIHTSVRLACKTQPHDASSSLAGPVSNNRPSS

SEQ ID NO: 1957 - DNA, 1526 bp, Glycine max
  misc_feature: Ceres CLONE ID no. 558121
  misc_feature: Ceres CDNA ID no. 35383209
  CDS (451)..(1296): REFERENCED BY SEQ ID NO: 1958
gattccgcagcttgttactctcttctctctcaaaacaaaacttgaatccatccatactctacataccccttgcccttgctttgcttctttctttctcacaagcaccagcagcactcaaatcaatcaatcgtttttaatgcccttgcttctccctctttccgtgtgtatgtaaaatctttgtttttatcagaggtggtgcagaaagttgtatctcagatccctatatacaccgaaaacgatacaactgtgtgctgtgtacactgtgcactgtgcttctccctctctctctctctctctcacaaaatcataatcattttacatattacacctattaccgaatagagtggtcctcaacctcaacctaaaagcctcactttttttgttttccccgataaccctattcaacccaatcctcctttcccttttcctttgacaaaaggaaaggaagaaatgcaagaaccaagcttgggattgatgggtgaggtctccggcgatcaccaccgtcagctgaaggcggagataacgactcatccgctgtacgagcagcttctggcagcacacgtggcatgcctccgtgtggccaccccgatcgaccagcttccactcatcgatgctcagttatctcagtctcaccatcttctacgctcttatgtctcacacaacactcattctctctcccctcatcaccgccaagaacttgacaacttcctggcacaatatttgatagttctgtgtactttcaaagaacagcttcagcaacatgtaagagtccacgccgtcgaggctgtcatggcctgccgtgatatcgaaaatgccttacaagctctaactggagtgagtttgggagaaggaactggtgcaacaatgtcagatgatgaagatgatttacaaatggatatttctttagatcaatctagcgcggaagggcatgacatgatgggatttggtccattacttcctacagaatctgaaaggtcattgatggaaagagttcgccaggaactaaagattgagctgaaacagggtttcaagtcaagaattgaagatgtcagggaagaaatattaaggaaacgtagagctgggaaattaccaggtgacacaacttctgtgttaaagaactggtggcagcaacatgcaaagtggccttacccaactgaagatgacaaggcaaaacttgtggaggagacagggttgcagctgaagcaaattaataattggttcatcaaccaaaggaaacgcaactggcacagtaactctcaatcggttacctctttgaagtcgaagcgcaagaggtagacatattattttgtccctaactatgtggaacagctagcaagcaacacaactatatataaggacatgcttaatattgctgatagagtgtagtcccactaaggatgcaaaagatggtagatgcatgtgggttactgtaatattgtaagatagctgaaacaaattatagactggctgtaaatttgtggaatttaacgtatgcaaacttttcttttaaaaaaaaaaaaaaaaaa

SEQ ID NO: 1958 - protein, 281 aa, Glycine max
  misc_feature: Ceres CLONE ID no. 558121
  misc_feature: Ceres CDNA ID no. 35383209
  misc_feature: Useful for making plants with modulated growth and phenotype characteristics
  misc_feature: null
  misc_feature: The sequence is a functional homolog of  SEQ ID NO 2188 in the  10/374,780 US patent application
  misc_feature: The sequence is a functional homolog of  SEQ ID NO 686 in the  11/435,388 US patent application
  misc_feature: The sequence is a functional homolog of  SEQ ID NO 708 in the  10/374,780 US patent application
  misc_feature: The sequence is a functional homolog of  SEQ ID NO 709 in the  10/374,780 US patent application
  misc_feature: The sequence is a functional homolog of  SEQ ID NO 712 in the  10/374,780 US patent application
  misc_feature: Useful for making plants with altered Lignin content
  misc_feature: Useful for making plants with altered terpenoid content
  misc_feature (18)..(62): Pfam Name: KNOX1 PFAM Desc: KNOX1 domain
  misc_feature (184)..(205): Pfam Name: ELK PFAM Desc: ELK domain
  misc_feature (73)..(128): Pfam Name: KNOX2 PFAM Desc: KNOX2 domain
  misc_feature: Homolog of GI Number: 4098246 NR Desc: homeobox 2 protein
  misc_feature: Homolog of GI Number: 11878230 NR Desc: homeodomain transcription factor KNAT7
  misc_feature: Homolog of GI Number: 453949 NR Desc: homeodomain
  misc_feature: Homolog of GI Number: 8493589 NR Desc: Strong similarity to Homeobox Protein HD1 from Brassica napus gi1170191
  misc_feature: Homolog of GI Number: 26451690 NR Desc: putative homeodomain transcription factor KNAT6
  misc_feature: Homolog of GI Number: 21618231 NR Desc: homeodomain
  misc_feature: Homolog of GI Number: 14149141 NR Desc: KNOX family class 2 homeodomain protein
  misc_feature: Homolog of GI Number: 1946222 NR Desc: knotted1
  misc_feature: Homolog of GI Number: 79328660 NR Desc: KNAT3
  misc_feature: Homolog of GI Number: 1045042 NR Desc: KNAT3 homeobox protein
  misc_feature: Useful for increasing chlorophyll and photosynthetic capacity
  misc_feature: Useful for making lethal plants for genetic confinement systems
  misc_feature: Useful for making ornamental plants with modified leaves
  misc_feature: Useful for making plants with increased biomass
  misc_feature: Useful for making plants with increased biomass and foliage
  misc_feature: Useful for making shorter plants
  misc_feature: Useful for making shorter plants and plants with modified flowers
  misc_feature: Useful for sterility
MQEPSLGLMGEVSGDHHRQLKAEITTHPLYEQLLAAHVACLRVATPIDQLPLIDAQLSQSHHLLRSYVSHNTHSLSPHHRQELDNFLAQYLIVLCTFKEQLQQHVRVHAVEAVMACRDIENALQALTGVSLGEGTGATMSDDEDDLQMDISLDQSSAEGHDMMGFGPLLPTESERSLMERVRQELKIELKQGFKSRIEDVREEILRKRRAGKLPGDTTSVLKNWWQQHAKWPYPTEDDKAKLVEETGLQLKQINNWFINQRKRNWHSNSQSVTSLKSKRKR

SEQ ID NO: 1959 - DNA, 1390 bp, Glycine max
  misc_feature: Ceres CLONE ID no. 559591
  misc_feature: Ceres CDNA ID no. 40351064
  CDS (104)..(1111): REFERENCED BY SEQ ID NO: 1960
agagtgctacttgaaaaattgttctcaccgtgtgtgtgttgtgtgtgtgtgtgagagagagagagagagagagagagaaagagagagagagagaggttaggctatggctgatgagagcgtcgttgagtccccagtgaagaggcagagagatgatgatgaagaaaatgaggtctctgtttccatggatgtggagggtggcaaagaccctcttagtaacggtttatcatctgtgattcctgggtggttctctgaaattagttcaatgtggcctggagaggctcactccttgaaggtggaaaagattttgtttcaaggaaagtctgaataccagaatgtcatggtcttccagtcatcaacatatggcaaggttcttgttttagatggagtaattcagctaacagaaagggatgaatgtgcctaccaagaaatgatcactcatcttcctctttgctctattccaaaccccaaaaaggttttggttatcggtggaggtgatggaggggtcatacgagaagtagcacaccattcttcagttgaaaagatagacatttgtgaaattgacaagatggttgttgatgtctccaaacaatacttccctgatgtagctgttgggtatgatgatcctcgtgtgacacttcatattggtgatggagttgcatttctgaaggaagttcctgaaggaacttatgatgctgttatagtggattcatccgatcctattggtcctgctcaagagctttttgaaaagcccttcttttcgtcagttgcaaaggctcttcgtccaggtggagttgtgtgcactcaggcagaaagcatatggcttcatatggatataattgaggacattgtggctaattgtcgccagatttttaaaggctctgtcaactatgcttggactactgttcctacatacccaagtgggatgattggttttatgctttgctcaactgagggaccacctgttgatttcaagcatccagtgaatcccatagatgaaaatgagagtcagaagtcagtaagaccgctgaaattttacaactctgagattcataccgcagctttctgcttgccgtcgtttgcgaagaggaagattggttctaaagcaaattaagaagattttctaaacctttgaaggagctcatgtggctgttgtagaagtccaacattcatcctttctgtattggtccatctatcaatgagctatggaataagtcagattaaatttggcattgaatattaacgtttatttctggaaatgagttttaggtgataaaggtataattgatggattcagttgtcagtgactttcctcataaacacatttaaaaatgtggaactatgaatatctgtttaggaaaattttgtttaatgcaaaaaaaaaaaaaaaaaa

SEQ ID NO: 1960 - protein, 335 aa, Glycine max
  misc_feature: Ceres CLONE ID no. 559591
  misc_feature: Ceres CDNA ID no. 40351064
  misc_feature (46)..(291): Pfam Name: Spermine_synth PFAM Desc: Spermine/spermidine synthase
MADESVVESPVKRQRDDDEENEVSVSMDVEGGKDPLSNGLSSVIPGWFSEISSMWPGEAHSLKVEKILFQGKSEYQNVMVFQSSTYGKVLVLDGVIQLTERDECAYQEMITHLPLCSIPNPKKVLVIGGGDGGVIREVAHHSSVEKIDICEIDKMVVDVSKQYFPDVAVGYDDPRVTLHIGDGVAFLKEVPEGTYDAVIVDSSDPIGPAQELFEKPFFSSVAKALRPGGVVCTQAESIWLHMDIIEDIVANCRQIFKGSVNYAWTTVPTYPSGMIGFMLCSTEGPPVDFKHPVNPIDENESQKSVRPLKFYNSEIHTAAFCLPSFAKRKIGSKAN

SEQ ID NO: 1961 - DNA, 689 bp, Glycine max
  misc_feature: Ceres CLONE ID no. 560004
  misc_feature: Ceres CDNA ID no. 40351065
  CDS (97)..(336): REFERENCED BY SEQ ID NO: 1962
actcgttctagtgtatgtgattgttgtgactcgttcttcttcgtcgttatcttcttcttttgttgtttgtgtgtttgttttttctctcacctgaaaatgtcttgctgcggtggtaactgtggttgcggaagcgcctgcaagtgcggcaacggctgcggaggctgcaagatgtacccagacttgagctacaccgagtcaaccaccaccgagaccttggtcatgggagtggcaccagttaaggctcaattcgagagtgctgaaatgggtgttcccgctgagaacgatggctgcaaatgtggagctaactgcacctgcaacccctgcacttgcaagtgaggtgttggagagctaaagcttcaagcagaaatggcccttagaaataatgataaaaactatatgtagtttcaaaacttcaaaattatgtagtatgtattatgttgcactctggtgttttgtgtctaaacaaacacccttagaataaagtggtcatttcttgcccttgagcaagttcaagtgttttggacttgtgatgggtgtgttaaggtcatggttgccttttttatatatatatatatatataaatgtttggtaattggtcgcttctgtataaagttcggctagttaatctgaattatgaatctctgcttataatattaaactagtactattgctgaaaaaaaaaaaaaaaa

SEQ ID NO: 1962 - protein, 79 aa, Glycine max
  misc_feature: Ceres CLONE ID no. 560004
  misc_feature: Ceres CDNA ID no. 40351065
  misc_feature (1)..(78): Pfam Name: Metallothio_2 PFAM Desc: Metallothionein
MSCCGGNCGCGSACKCGNGCGGCKMYPDLSYTESTTTETLVMGVAPVKAQFESAEMGVPAENDGCKCGANCTCNPCTCK

SEQ ID NO: 1963 - DNA, 770 bp, Glycine max
  misc_feature: Ceres CLONE ID no. 560304
  misc_feature: Ceres CDNA ID no. 25445688
  CDS (110)..(532): REFERENCED BY SEQ ID NO: 1964
ctcatataagatcgattatactcacaagttttgttctttcctagcaattcggcgcaatcgtcttctgcttcaaggaaggagagcttgttattctctatcaacaaggaaaatgtcaggtgaagaggttgttgttgcagctgagccagctgctgccatcccaggcgagcctatggatatcatgactgccttgcaacttgtgctcagaaaatctctggcttatggtggtcttgcacgaggccttcacgaaggggcaaaagtgattgagaagcatgctgcacaactctgtgttctagcagaagactgtgaccagcctgactatgttaaactggttaaggccctttgtgcagagcacaatgttagcctgctgacagttccgagtgcaaagacccttggagaatgggctggtttgtgcaagattgattccgaaggaaaagctaggaaggttactggttgctcctgtgtggttgtgaaggattttggtgaggagcatgaagcctataacgtcgttctgcagcatgtgaaatctcaatgagttgcaagattcatagattttatgcatttcattttgggttattccatgagaatgaattttgccttgtagctggattatatctaccttgagttttgattgtttaatatgactgccacattctaaatgttgttccttttttctttctttctttgatgcattgctgttactctaattaggaactcttgtttcacatttaatcattaaagaagggaaagttacatgaaaaaaaaaaaaaaaa

SEQ ID NO: 1964 - protein, 140 aa, Glycine max
  misc_feature: Ceres CLONE ID no. 560304
  misc_feature: Ceres CDNA ID no. 25445688
  misc_feature (25)..(120): Pfam Name: Ribosomal_L7Ae PFAM Desc: Ribosomal protein L7Ae/L30e/S12e/Gadd45 family
  misc_feature: Homolog of GI Number: 50935291 NR Desc: putative 40S ribosomal protein S12
  misc_feature: Homolog of GI Number: 50934241 NR Desc: putative ribosomal protein S12
  misc_feature: Homolog of GI Number: 5106775 NR Desc: ribosomal protein S12
  misc_feature: Homolog of GI Number: 21537373 NR Desc: 40S ribosomal protein S12
  misc_feature: Homolog of GI Number: 21536844 NR Desc: 40S ribosomal protein S12
  misc_feature: Homolog of GI Number: 30025643 NR Desc: 40S ribosomal protein S12
  misc_feature: Homolog of GI Number: 67083929 NR Desc: ribosomal protein S12
  misc_feature: Homolog of GI Number: 18845074 NR Desc: 40S ribosomal protein S12
  misc_feature: Homolog of GI Number: 24266978 NR Desc: ribosomal protein S12
  misc_feature: Homolog of GI Number: 66548338 NR Desc:  similar to ribosomal protein S12
MSGEEVVVAAEPAAAIPGEPMDIMTALQLVLRKSLAYGGLARGLHEGAKVIEKHAAQLCVLAEDCDQPDYVKLVKALCAEHNVSLLTVPSAKTLGEWAGLCKIDSEGKARKVTGCSCVVVKDFGEEHEAYNVVLQHVKSQ

SEQ ID NO: 1965 - DNA, 678 bp, Glycine max
  misc_feature: Ceres CLONE ID no. 561338
  misc_feature: Ceres CDNA ID no. 29191857
  CDS (54)..(416): REFERENCED BY SEQ ID NO: 1966
ttttcgccgaaaaccctaacaacacaggcgcagagcgtgatccattgacgaagatggtgcagcgtctcacctaccgcaagaggcacagctatgccaccaaatccaaccaacacagggtcgtcaaaacccctggtgggaagctcgtttatcagaccaccaagaagagggccagcgggcccaagtgccccgtcactggcaagaggattcaggggattccacacttgaggcctgcagagtacaagagatcaaggttacccagaaaccgtaggactgtcaaccgtgcatatggcggagttttgtctggaagtgctgtcagggagaggattatccgagctttcttagttgaagagcaaaagattgtgaagaaggtcttgaagatccagaaggcaaaggaaaagcaagcctcaaaggcttgaatttgaacaacacaatgagacatctttttggaggacttttaggtttgagtggttatagttaatcacaaattttattagagttgtcatgttaattgtcttttattattttgcctgtttgaactctttctagagcaagtgttaactttgtcgacaatgtcattatgatacagttttgtttctcattttcttttgatggtttattggtatcttgtttaacttgaaaaaattacttctgttttcatctcaaaaaaaaaaaaaaaaa

SEQ ID NO: 1966 - protein, 120 aa, Glycine max
  misc_feature: Ceres CLONE ID no. 561338
  misc_feature: Ceres CDNA ID no. 29191857
  misc_feature (5)..(103): Pfam Name: Ribosomal_L34e PFAM Desc: Ribosomal protein L34e
  misc_feature: Homolog of GI Number: 47824936 NR Desc: Ribosomal protein L34e
  misc_feature: Homolog of GI Number: 1076636 NR Desc: ribosomal protein L34
  misc_feature: Homolog of GI Number: 2119150 NR Desc: ribosomal protein L34
  misc_feature: Homolog of GI Number: 21436403 NR Desc: putative 60S ribosomal protein L34
  misc_feature: Homolog of GI Number: 21594659 NR Desc: 60s ribosomal protein L34
  misc_feature: Homolog of GI Number: 13194822 NR Desc: putative 60S ribosomal protein L34
  misc_feature: Homolog of GI Number: 20259165 NR Desc: putative 60S ribosomal protein L34
  misc_feature: Homolog of GI Number: 50941301 NR Desc: putative ribosomal protein L34
  misc_feature: Homolog of GI Number: 50946109 NR Desc: putative ribosomal protein
  misc_feature: Homolog of GI Number: 57471712 NR Desc: ribosomal protein l34
MVQRLTYRKRHSYATKSNQHRVVKTPGGKLVYQTTKKRASGPKCPVTGKRIQGIPHLRPAEYKRSRLPRNRRTVNRAYGGVLSGSAVRERIIRAFLVEEQKIVKKVLKIQKAKEKQASKA

SEQ ID NO: 1967 - DNA, 1096 bp, Glycine max
  misc_feature: Ceres CLONE ID no. 561703
  misc_feature: Ceres CDNA ID no. 35383210
  CDS (91)..(702): REFERENCED BY SEQ ID NO: 1968
atttctatgtatcgtcaacgttagtgctttatttaggtgacaaaactactcacagagaaagacactcggagaccttgcaagacttcatcaatggctgtcaaagtttatattgtgtactactccatgtatgggcatgttgagaaactagcagaagaaataaagaaaggggcttcctctgtggaaggtgttgaggccaaattatggcaggtacctgagacgctgcaggatgaggtgctcggtaagatgagtgcaccacccaagagcgatgtaccagtcattaccccgaatgaactatccgaggctgatggctttgtatttggcttcccaacaaggtttggaatgatggctgctcagtttaaagcttttctagatgctactggaggcttatggagagcacaacagcttgcaggcaagcctgctggcatcttctacagcactggttcacaaggcggcggacaagagactacagcgctcactgctatcactcaactggttcatcatgggatgatattcattccaatcggttacacgtttggtgctggcatgttcgagatggagaaagtgaaaggtggaagtccatatggtgccggaacttatgccggtgacggctcaagacagccaagtgagcttgagttacagcaagcattccaccaaggcaagtacattgccggcatcacaaagaagctcaagcaagctgcataatgtttgccttcatatatatagattatactattattattaaaccataccacaatattgcttgaaaatcattaccgattttttagtcttgaaatatattgacttttgtttttctgagcttgcaagtatttttttttttcttttctaatcttcgtgaaggaaatgctttgtaagagtgttacatgttgcagtggatgttgcaatttgttgaatgaggaaagtttgtgtgtgttgtcctttcgtgttaagctgaaacaatacttgttcccatcttttgtattaccccgttacgcacataaacattgcaacgtttgcaacgaacaatttgagtagagaattggctttattattctctcgtatacaataaagattgcgtgtttgaaaaaaaaaaaaaaaa

SEQ ID NO: 1968 - protein, 203 aa, Glycine max
  misc_feature: Ceres CLONE ID no. 561703
  misc_feature: Ceres CDNA ID no. 35383210
  misc_feature (7)..(138): Pfam Name: Flavodoxin_1 PFAM Desc: Flavodoxin
  misc_feature: Homolog of GI Number: 21539481 NR Desc: 1
  misc_feature: Homolog of GI Number: 21068664 NR Desc: putative quinone oxidoreductase
  misc_feature: Homolog of GI Number: 50940963 NR Desc: putative quinone
  misc_feature: Homolog of GI Number: 12484052 NR Desc: quinone
  misc_feature: Homolog of GI Number: 53749369 NR Desc: 'putative 1
  misc_feature: Homolog of GI Number: 34910128 NR Desc: putative 1
  misc_feature: Homolog of GI Number: 58500257 NR Desc: quinone reductase 2
  misc_feature: Homolog of GI Number: 21593010 NR Desc: minor allergen
  misc_feature: Homolog of GI Number: 2464905 NR Desc: minor allergen
MAVKVYIVYYSMYGHVEKLAEEIKKGASSVEGVEAKLWQVPETLQDEVLGKMSAPPKSDVPVITPNELSEADGFVFGFPTRFGMMAAQFKAFLDATGGLWRAQQLAGKPAGIFYSTGSQGGGQETTALTAITQLVHHGMIFIPIGYTFGAGMFEMEKVKGGSPYGAGTYAGDGSRQPSELELQQAFHQGKYIAGITKKLKQAA

SEQ ID NO: 1969 - DNA, 1623 bp, Glycine max
  misc_feature: Ceres CLONE ID no. 562292
  misc_feature: Ceres CDNA ID no. 40351066
  CDS (380)..(1420): REFERENCED BY SEQ ID NO: 1970
aataatagtgcagtgcgtttcagtggtggaaagtggaaaccgtaatcgccaagctggaaagaaaacgctccatttctgcgccactctctgccttatcgccccatttccgttccaacattgtcagagagcaacacagattagtcgtagcagtgagaggcatcggagggggaataaaacatggtttcaacagcaacagaaacagagcaagattagaaagcgccagggtgcgcacgttagcaccgaaccccgtgggttcctctcccctaactcgcttcgcccccacggcattcctacgctgatccacactcaaaacgcatcacaaaaaacaccgtttcgcaaccctaacggaggaggggggtaaaaaaaaaaactgaaaaaaatgtttcggataacgagattctcggggtttttctccgccgcaatgtttgtgattgttcttgttattctctccccctccttccaatccgaagccattcgatcctcccaccgattttccttccggaaagcccctccgttccgcaatgccgccgaatgcggttcaatttccggtgaaaccaccaccgtctgcgacccttccttggtccacgtcgccataaccctcgacgtcgactacctccgcggctcaatcgccgccgtgcactccatcctccacaactccctctgtccggagaacatcttcttccatttcctcgtctccgacaccaacctccaaaccctagttgaatccacgttccctaacttgaagttcaacgtctattacttcgatccgaacatcgtcgctcacttgatctcctcctccgtgcggcaggcgttggagcagcctctcaattacgcgagaaattacctcgttgaccttctggagagttgcgtggagagggtgatctacttggactccgatctggtggtagtggatgacgtggcgaaactgtggagcgcgagtctggactcacgcgccatcggcgcgccggagtactgccacgcgaacttcacgaagtatttcacggcggggttctggtcggagccgaggttgtcggggacgttcgcgcagcggagggcgtgctacttcaacacgggggtgatggtgatggatctggtgaagtggaggaaggaagggtacaccaagagaatcgagaggtggatggagattcagaagagtgataggatctacgagcttggttctctgccgccgtttttgctggtgtttgcgggacacgtggcgcccattgagcaccggtggaaccagcatggtttgggcggggataacgtgaagggtagttgccgtgacttgcaccctggtccggttagtttgttgcattggtctggtagtgggaagccatggatccgtttaagttccaaacgcccctgtcctctggattctctatgggctccctttgatttgtatgcacactcttcctcttaaactaattcttccctctcatttaattcaatttctctttgcttgtcatttttcgctagttagatgttattcatctatttcttctccctaaactttttctccggaaaatttgtatgtcatttctattctattattttcctgtcattcctgatttgaaaataaaagaaaaagaaaagaaagcggattttctaaaaaaaaaaaaaaaa

SEQ ID NO: 1970 - protein, 346 aa, Glycine max
  misc_feature: Ceres CLONE ID no. 562292
  misc_feature: Ceres CDNA ID no. 40351066
  misc_feature: null
  misc_feature: Useful for making plants with altered cell wall content and/or composition
  misc_feature (69)..(324): Pfam Name: Glyco_transf_8 PFAM Desc: Glycosyl transferase family 8
MFRITRFSGFFSAAMFVIVLVILSPSFQSEAIRSSHRFSFRKAPPFRNAAECGSISGETTTVCDPSLVHVAITLDVDYLRGSIAAVHSILHNSLCPENIFFHFLVSDTNLQTLVESTFPNLKFNVYYFDPNIVAHLISSSVRQALEQPLNYARNYLVDLLESCVERVIYLDSDLVVVDDVAKLWSASLDSRAIGAPEYCHANFTKYFTAGFWSEPRLSGTFAQRRACYFNTGVMVMDLVKWRKEGYTKRIERWMEIQKSDRIYELGSLPPFLLVFAGHVAPIEHRWNQHGLGGDNVKGSCRDLHPGPVSLLHWSGSGKPWIRLSSKRPCPLDSLWAPFDLYAHSSS

SEQ ID NO: 1971 - DNA, 1191 bp, Glycine max
  misc_feature: Ceres CLONE ID no. 562682
  misc_feature: Ceres CDNA ID no. 36581737
  CDS (42)..(935): REFERENCED BY SEQ ID NO: 1972
aaaccaaaccaaaaagctaagagaatacaccaaaacccaacatgaaaacccttaacaaagcctcacttattttattccctctcttgttcctttccctattcaagcattcccatgctgcaggaatcgctgtctactggggccaaaacggtggagaaggcaccttagcagaagcttgcaacactagaaactaccaatatgtgaacatagccttcttgtccacttttggcaacggccaaactccacaactcaaccttgcaggtcattgtgaccccaacaacaatggctgcactgggttgagcagtgacatcaaaacttgccaagaccttggcatcaaagtgttgctctcccttggtggtggtgctggaagctactccctcagctcagctgatgatgccactcaacttgcaaactacctctggcagaatttccttggaggtcaaaccggatcagggccattaggtaatgttatattggatggcattgactttgacattgaatctggtgggagtgaccattatgatgacctagccagggcattaaatagcttcagctcacaaaggaaggtgtacttgtctgcagccccacagtgcataatccctgatgctcacttggatagagccatccaaactgggctttttgactatgtgtgggttcaattctacaacaacccttcatgccaatactccagtggaaacaccaacaatttgatcaattcatggaaccaatggatcacagtgccagcttctcaaatcttcatggggcttcctgcatctgaggcagctgctccaagtggtggctttgtgcccgctgatgtgttgacttctcaggttcttcctgtgattaaacagtcttcaaagtatggtggagtcatgctctggaacagattcaatgatgtccaaaatggttatagtaatgctattattggaagtgtttaatcatgttatagacttatagaaaaactatgtcattaattccattatttaaataatactaatcaccactcgtgattggtttttctactatatatatatatatatatatatatatatatatatatattcaatgtgttttgaacgctacatatgtttattgtaatatgtcacctacaagttacatatggtataattaccaaaataataaatagttcattgcgcaatatgtcattttcaacccaaaaaaaaaaaaaaaaaa

SEQ ID NO: 1972 - protein, 297 aa, Glycine max; identical to SEQ ID NO: 1772
  misc_feature: Ceres CLONE ID no. 562682
  misc_feature: Ceres CDNA ID no. 36581737
  misc_feature (26)..(284): Pfam Name: Glyco_hydro_18 PFAM Desc: Glycosyl hydrolases family 18
  misc_feature: Homolog of GI Number: 4835584 NR Desc: acidic chitinase
  misc_feature: Homolog of GI Number: 4835586 NR Desc: acidic chitinase
  misc_feature: Homolog of GI Number: 762879 NR Desc: chitinase
  misc_feature: Homolog of GI Number: 4689374 NR Desc: class III chitinase
  misc_feature: Homolog of GI Number: 2853142 NR Desc: class III chitinase
  misc_feature: Homolog of GI Number: 17942 NR Desc: chitinase
  misc_feature: Homolog of GI Number: 116330 NR Desc: Acidic endochitinase precursor
  misc_feature: Homolog of GI Number: 13560118 NR Desc: chitinase
  misc_feature: Homolog of GI Number: 486991 NR Desc: chitinase
  misc_feature: Homolog of GI Number: 28971736 NR Desc: chitinase III

SEQ ID NO: 1973 - DNA, 1158 bp, Glycine max
  misc_feature: Ceres CLONE ID no. 562928
  misc_feature: Ceres CDNA ID no. 40351067
  CDS (114)..(893): REFERENCED BY SEQ ID NO: 1974
gaaaaactacccttccctttcgtcgttctccgtctccctcatttgttcactttctctctctaaatccctaaaccagatctcgcactcgcgctttctctctctaggattcgacaatggcggccgctccctcgcctcgcgaagagaacgtgtacatggcgaagctcgccgagcaggccgagcgctacgaagagatggtggagttcatggagaaggtctccgccgccgccgacaacgaggagctcaccgtcgaggagaggaacctcctctccgtcgcgtacaagaacgtgatcggagcgcgccgcgcctcgtggcgcatcatctcctcgatcgagcagaaggaggagagccgcggcaacgaggaccacgtctccgtcatccgcgactaccgatccaagatcgagtccgagctctccaacatctgcgacggtattctcaagctcctcgactctcgcttcattccctccgcttcctccggcgattccaaggtcttctacctcaagatgaagggagattaccacaggtacctcgccgagttcaagaccggcgccgagcgtaaggaggctgccgagagcactctctctgcatacaaagccgctcaggacattgcaaatgccgaactgcctccaactcatccaattaggcttggccttgcacttaacttctctgtattttactacgaaatccttaactctcccgatcgtgcctgcaaccttgcaaaacaggcttttgatgaagctattgctgaattggatacactgggagaggagtcatacaaggatagcactctgatcatgcaactccttcgtgataacctcaccctttggacctctgacatgcaggatgatggagcagatgaaattaaagaagcagcaccgaaacaggatgaccagtaaaaatattttactgctaattagaattgaacttctcctccatatctttttgaagggagaaggtgtttgttgctaatatctctttggtactgagattttaggcattcatgtttgttatgattgtggatgtactgggccgtttttagtttgtccttccattttcaagtgttttccaaattgcctattttattaaggacgctgaagtttttattatatggaattggaattttaagattctaaaaaaaaaaaaaaaaaaaaaaaaaaaaaa

SEQ ID NO: 1974 - protein, 259 aa, Glycine max
  misc_feature: Ceres CLONE ID no. 562928
  misc_feature: Ceres CDNA ID no. 40351067
  misc_feature: Useful for making plants with modulated growth and phenotype characteristics
  misc_feature: null
  misc_feature: The sequence is a functional homolog of  SEQ ID NO 1777 in the  11/479,226 US patent application
  misc_feature: The sequence is a functional homolog of  SEQ ID NO 2350 in the  10/374,780 US patent application
  misc_feature: The sequence is a functional homolog of  SEQ ID NO 342 in the  10/412,699 US patent application
  misc_feature: The sequence is a functional homolog of  SEQ ID NO 344 in the  10/412,699 US patent application
  misc_feature: The sequence is a functional homolog of  SEQ ID NO 782 in the  11/479,226 US patent application
  misc_feature: The sequence is a functional homolog of  SEQ ID NO 786 in the  11/479,226 US patent application
  misc_feature: The sequence is a functional homolog of  SEQ ID NO 789 in the  11/479,226 US patent application
  misc_feature: The sequence is a functional homolog of  SEQ ID NO 790 in the  10/225,066 US patent application
  misc_feature: The sequence is a functional homolog of  SEQ ID NO 797 in the  11/479,226 US patent application
  misc_feature: The sequence is a functional homolog of  SEQ ID NO 801 in the  11/479,226 US patent application
  misc_feature: The sequence is a functional homolog of  SEQ ID NO 805 in the  11/479,226 US patent application
  misc_feature: Useful for making plants with modulated drought sensitivity
  misc_feature (8)..(245): Pfam Name: 14 PFAM Desc: 14
MAAAPSPREENVYMAKLAEQAERYEEMVEFMEKVSAAADNEELTVEERNLLSVAYKNVIGARRASWRIISSIEQKEESRGNEDHVSVIRDYRSKIESELSNICDGILKLLDSRFIPSASSGDSKVFYLKMKGDYHRYLAEFKTGAERKEAAESTLSAYKAAQDIANAELPPTHPIRLGLALNFSVFYYEILNSPDRACNLAKQAFDEAIAELDTLGEESYKDSTLIMQLLRDNLTLWTSDMQDDGADEIKEAAPKQDDQ

SEQ ID NO: 1975 - DNA, 1368 bp, Glycine max
  misc_feature: Ceres CLONE ID no. 562997
  misc_feature: Ceres CDNA ID no. 25446910
  CDS (84)..(1058): REFERENCED BY SEQ ID NO: 1976
gcattccttttcaactaccttctccgctctcctctctctctctctctccttcccagcattctacgtcgtcgtttcgatacaaaatgctgggttcacgtttctgcgtccgcacgttatccggcgtgggctctgccgcagcggatcacacgaatgtcgccaccaccgcccgctccgttccgtgctccgtcgccgtcgacttctcgccgctccacctctcaccgctccggtcccgccgccgcttccgctgccgcagatctatcctcatttcctgcaattcctctcgccgcagatccagctccgacaactctcacgacaacaacaacaaaaacgattatctcgaagcttctctccttctctcagaaacattctcccactatcatatgtggaagcatagatttcaaccggagtttcaatggaaatcgtctacaccgtcaattcctttgtccagaacggatagtagtttattgagacatggcttcttacagcgtttcaaaaatcctacgatttttctcaggatttcttgcgatggagactatattctgcccattgttgtagggcagattgctattgagaaacttatggatgcggaatctgaacaagaaagtgtggaatgtcctgaccagtaccagtttgtggaaaacctagttggaagactagaccatgaagtgataatggtgagaattacagagagagtagtcagcacttactttgccagattataccttagccagccagggaaaactgatcttatcagtgtggatgcacgtccctcagatgccattaatgttgcaaatagatgcaaggctccaatatatgtaagtaaagaaattgttttcacagatgctatcagaatcggttatggaatgggcggagcgcataataaaaaggctatttatgatgtattgctcgacagtgctatagatggtccagatttggtagctcaagaactaagtatgatgcataatatgcattcagctatcaaacaggaaagatttaaagatgcagctatatggcgagacaaacttgcaaatcttcgtaaatcaacccatgagctctaaatagcttgttagggtcagttctgaagaatatggggtattatgcgtatcttattcctgataatttttcatcaggtatatattggggtataagttacagaaatgaaggaaactagcaaaattaactgttgtacagctgtttattatagtcgtcgaccccgcgttgtgtacaccaaatgtatttgaaagtcctaaaacatgtagaagattgtcgtgcttctaccaatactcaaacgacgacgatgatcttgtatgtatgcaatcccggaaatgatcatctatgagaattagctctaaaaaaaaaaaaaaaaaa

SEQ ID NO: 1976 - protein, 324 aa, Glycine max
  misc_feature: Ceres CLONE ID no. 562997
  misc_feature: Ceres CDNA ID no. 25446910
  misc_feature (123)..(260): Pfam Name: DUF151 PFAM Desc: Uncharacterised ACR
  misc_feature: Homolog of GI Number: 21593594 NR Desc: wound
  misc_feature: Homolog of GI Number: 50944775 NR Desc: putative wound inductive gene
  misc_feature: Homolog of GI Number: 50944773 NR Desc: putative wound inductive gene
  misc_feature: Homolog of GI Number: 8096273 NR Desc: wound inducive gene
  misc_feature: Homolog of GI Number: 56785299 NR Desc: putative wound inducive gene
  misc_feature: Homolog of GI Number: 53795462 NR Desc: COG1259: Uncharacterized conserved protein
MLGSRFCVRTLSGVGSAAADHTNVATTARSVPCSVAVDFSPLHLSPLRSRRRFRCRRSILISCNSSRRRSSSDNSHDNNNKNDYLEASLLLSETFSHYHMWKHRFQPEFQWKSSTPSIPLSRTDSSLLRHGFLQRFKNPTIFLRISCDGDYILPIVVGQIAIEKLMDAESEQESVECPDQYQFVENLVGRLDHEVIMVRITERVVSTYFARLYLSQPGKTDLISVDARPSDAINVANRCKAPIYVSKEIVFTDAIRIGYGMGGAHNKKAIYDVLLDSAIDGPDLVAQELSMMHNMHSAIKQERFKDAAIWRDKLANLRKSTHEL

SEQ ID NO: 1977 - DNA, 1330 bp, Glycine max
  misc_feature: Ceres CLONE ID no. 563014
  misc_feature: Ceres CDNA ID no. 40351068
  CDS (421)..(1143): REFERENCED BY SEQ ID NO: 1978
atcaaacactgcacttcatttggttggttcatatctcacttaattttgtgtcctttccatttacatattccacattcattaattttgagaaacatttagtgtatgttacatctggggaaggcttaaagtagatttactttgggtccatggtatccactgacttaaattactttgccaaaccatcattctcaacctcaatccacaaggaaaataattgtaccatagatagaaggctgacatttttaatttgaacctttgattttgagtggtttgtaaaatttaaaccccctcatcctaactaaactttatttgtgaatgtaatcccttctgagacactcataattcatgcatggtgtgcttgtacatttcaggttcaggtacttgcagtaagagaacatattgtaaaactaaaagggaaaaatggccttagatcactttgaggagactgtgcaccaaaaaggaaattggaaatcttccagtgaaatcattgcagattctgatagaaatgcctctggtgactttgactgcaacatctgcctggagtgtgtgcaagatccagtggtgacactttgtggtcatctttattgctggccctgcatatacaaatggcttcattttcaaagcacctctttggatgatgaagaacaacagaggccacaatgtcctgtatgcaaatcagaagtttctcaatcctcccttgttccattatacggccgtggccaaaccacattaccttctaaagggaagccacgtcaagtaggcactgtcataccacaaagacctcatggtccaagaacacttaacactagaagtgtttcacaacctatttctcaaagttaccatccctatagtaatccttatcatcctcaacaacacttcaactcgattccaagcggttacacctcacctatgattagaacaactggttcaatagacaacacatttggaatctttggtgagatgatatatgcaagggtctttggtaaccacgtgtcaaacattcatacatacgccaattcgtacaatctttcggggaccagtaacccaaggatgagaagacatttaatgcaagttgataaatcactcagcagaataagttgtttcctcctttgctgcctagttttgtgtctgctcttattctgattgctacttcattttcatcattagttatagtgcatccttacatagaatacattcactcattgatccagatgtattctatgttagagaagctgcaaattgatgctgagttatgtgtaaattaccaatctctctacgagctatatgaagtgaataatgatattctcataccaaaaaaaaaaaaaaaaaa

SEQ ID NO: 1978 - protein, 240 aa, Glycine max
  misc_feature: Ceres CLONE ID no. 563014
  misc_feature: Ceres CDNA ID no. 40351068
  misc_feature (36)..(84): Pfam Name: zf PFAM Desc: Zinc finger
MALDHFEETVHQKGNWKSSSEIIADSDRNASGDFDCNICLECVQDPVVTLCGHLYCWPCIYKWLHFQSTSLDDEEQQRPQCPVCKSEVSQSSLVPLYGRGQTTLPSKGKPRQVGTVIPQRPHGPRTLNTRSVSQPISQSYHPYSNPYHPQQHFNSIPSGYTSPMIRTTGSIDNTFGIFGEMIYARVFGNHVSNIHTYANSYNLSGTSNPRMRRHLMQVDKSLSRISCFLLCCLVLCLLLF

SEQ ID NO: 1979 - DNA, 1360 bp, Glycine max
  misc_feature: Ceres CLONE ID no. 563420
  misc_feature: Ceres CDNA ID no. 40351069
  CDS (372)..(1235): REFERENCED BY SEQ ID NO: 1980
aacctcttccattcacaaaatttcacacacaaatatcacctcaccatgtaaaagttttcttttcctaacaaaaacgtctctctctctccatcatccatctttcttccctctcaaacacttgccccatcttatgtcttttgcttatgactttttattaatgtaatcatcaacatggccatttcccacttcaacattaaagaattataatatctgaatctctccatttcctttttacaatggaatcatagactatggaaagcatctagctgcattgccaatttgccaattccatcattatattttaaagacaattgtctttgtaaagaagaacccccctcctcttgtctcctaagcataaaacctgcaatgagatggctttcttcccagcaaatttcatgctccaaacccctcaccatgatgatcaccatcatcatcaacctccaccttctctcacctcaattctaccaacgtgtgcacctcaagaatatcatgggggagtgaccattctaggaaagagatccatgtcattttcatcagggattgagcatggagaagaggccaataatgctgaggaagatttgtctgatgatggatcacaagcaggggagaagaagagaaggctcaacatggagcaagtgaagacacttgagaagagctttgagttggggaacaagcttgagccagagagaaaaatgcagcttgcaagagcacttggcttgcaaccaagacaaattgctatatggttccagaatagaagggccaggtggaagaccaagcagttggagaaagactatgatgttctcaaaagacagtatgaagctgtcaagtcagataatgatgcacttcaagctcagaaccaaaaacttcaggctgagatattggcactgaaaagtagagagccaacagaatccataaaccttaacaaagaaacagaaggatcctgcagcaatagaagtgagaacagctcagacatcaagttggatatctcaaggacaccagctattgacagtcctcattctacacatcagcaacagccaagcagacccttctttcctccttcttctgttaggcctgcaggagttgctcagcttttccaaacttcttcaagaccagaacttgcatcatgccaaaagattgaccaaatggtcaaagaagaaagcctaagcaacatgttttgtggcatggatgatcaatctgggttttggccttggttggagcagcagcatttcaattgaatcaaatcaaagggagagagagagagagagagttaattaattttaaaaatttggatgtagtagtttttccctgtgaaatcaagagggtgtccatcaatttatcacataaaaaaaaaaaaaaaaaa

SEQ ID NO: 1980 - protein, 287 aa, Glycine max
  misc_feature: Ceres CLONE ID no. 563420
  misc_feature: Ceres CDNA ID no. 40351069
  misc_feature (135)..(179): Pfam Name: HALZ PFAM Desc: Homeobox associated leucine zipper
  misc_feature (80)..(134): Pfam Name: Homeobox PFAM Desc: Homeobox domain
MAFFPANFMLQTPHHDDHHHHQPPPSLTSILPTCAPQEYHGGVTILGKRSMSFSSGIEHGEEANNAEEDLSDDGSQAGEKKRRLNMEQVKTLEKSFELGNKLEPERKMQLARALGLQPRQIAIWFQNRRARWKTKQLEKDYDVLKRQYEAVKSDNDALQAQNQKLQAEILALKSREPTESINLNKETEGSCSNRSENSSDIKLDISRTPAIDSPHSTHQQQPSRPFFPPSSVRPAGVAQLFQTSSRPELASCQKIDQMVKEESLSNMFCGMDDQSGFWPWLEQQHFN

SEQ ID NO: 1981 - DNA, 745 bp, Glycine max
  misc_feature: Ceres CLONE ID no. 563601
  misc_feature: Ceres CDNA ID no. 24766595
  CDS (1)..(534): REFERENCED BY SEQ ID NO: 1982
gcaattcaaactctcactggagtaacatttgaagcctccaaaaactcgcaaacttcttccaacttaagaaacagccagcattccaaaacttctgctcccaccctcgccagtggcaaaggcgatgataagaaaagcaatgatggattaggtgaccgtgtgttatcatctctagagaaccttgctattccaaaagaacatgccggtgatgacaaaactgattcaaaggccaagaatgagaatgcaggaccatcttctgaaaagacacttgacatgtcatggatggatccatgcattgaatttgcaataaaaacactcactgacaccatcccatcagactctgctgatcaaaatcccaagaactgcatccaattgtcaagtgtctgtttagataacatttaccaaactgactactcttgcagacaatactttggcacacagaaaccaatgtttcataaacagtcttttgtggatccatcactgcagcacactagaaatattggtattgtaaattctgctgctgaagccagactctaaggaatgtttgttagatcagtaaaccatcttgtgcttgaactaacataagattgtacagttatgaaaactctataaaaagcttcctaccccatgaaagcttttaacctatctccctttgttgttattttgttctgtgaatcctttaattagctgattttgtagaacatgctatgggtagttgtcagttactattaaaaaaaaaaaaaaaaaa

SEQ ID NO: 1982 - protein, 87 aa, Glycine max
  misc_feature: Ceres CLONE ID no. 563601
  misc_feature: Ceres CDNA ID no. 24766595
MSWMDPCIEFAIKTLTDTIPSDSADQNPKNCIQLSSVCLDNIYQTDYSCRQYFGTQKPMFHKQSFVDPSLQHTRNIGIVNSAAEARL

SEQ ID NO: 1983 - DNA, 1449 bp, Glycine max
  misc_feature: Ceres CLONE ID no. 563875
  misc_feature: Ceres CDNA ID no. 25446854
  CDS (139)..(1254): REFERENCED BY SEQ ID NO: 1984
agcgatatcgtgtaagtgaagaggaagagaggatccaaatccaagtacggttggcgagaaaatccgtccctgaaacacaccaaaccctaaaacgcgaaataggttctcagaatttgcgaaggaaagagcgtagcggagatggagattcactacagtaacagctacttcgagaggcgccccatcctcaagtccaaggctcccgcagttaaatgggtcaaagaatgggttccccaagatcttgtgacgacgggagggaagtgcatgatcttaaaatgggtaacagaggataccttgaagaccttgaaagaaaaggtgaaagagccttcagtgccagagccagaaccagagccaactactgaagtactttttctttgcagctatgatggctgtggaaagacattcatagatgctggtgcgttgaggaaacattctcacatccatggagagaggcaatatgtttgtcactacgatggatgtggaaagaaatttctggatagctcaaagttgaaaagacattttctcattcatacaggggagagggattttgtgtgtcctcatgaaggctgtggtaaggccttctccctggatttcaacttaaggtctcacatgaaaacacattctcaagagaactatcatatctgcccatatccagattgtggaaagagatatgctcatgaatacaagctaaagaatcacattgcatctcatcatgaaaagaatgcacccttggatgtggcaaagtacactactccacctccagagaagcaaacaaaaacttctaaaccatctggaggggcatacggttctgcatcatctgaccgtccctatgcatgtccctatgatgggtgtgaaaaggcatacatccatgaatacaagcttagactccatttgaagagggagcacccggggcttatggctgatgaaaatgcagagcatgctcaggctaatgttggcaatgaaatggatgaagcgagtgaccatgatgcctatgttgcgaaacggtcaaatggtaaaattcagaagcagagtaagccaaaaccaaacctcaagttgcctccttccaaaattgcaaaacgcaaagtctccactcccactttaactgtaaataaaaattcttggcccgtgaaagatgaacctttcgatgaagaagatagtgaagaaacagaagaggatcgtgacaatgttgaagatggttggagatatgcaggaggaaacaatgaagatgatgatgaagaaacagaatatgaagactgaatcagttatggcatcctctatggaacttacctttttcaagaagtatatttctcttctacaattgttttttgggttgtcgcttttttatttggctttggaaatgacatcttgtcaaactgtgtgttggctgttacaagcattaggaagaatttatataaataaaatgcgatttaaaataaaaaaaaaaaaaaaaaa

SEQ ID NO: 1984 - protein, 371 aa, Glycine max
  misc_feature: Ceres CLONE ID no. 563875
  misc_feature: Ceres CDNA ID no. 25446854
  misc_feature (230)..(255): Pfam Name: zf PFAM Desc: Zinc finger
  misc_feature: Homolog of GI Number: 4519673 NR Desc: WREBP
  misc_feature: Homolog of GI Number: 30680251 NR Desc: zinc finger
  misc_feature: Homolog of GI Number: 79325009 NR Desc: nucleic acid binding / zinc ion binding
  misc_feature: Homolog of GI Number: 50909357 NR Desc: putative WREBP
  misc_feature: Homolog of GI Number: 4927259 NR Desc: putative transcription repressor maize TRM protein
  misc_feature: Homolog of GI Number: 46048458 NR Desc: YY2 transcription factor
  misc_feature: Homolog of GI Number: 2565032 NR Desc: transcription activator/repressor protein delta/YY1
  misc_feature: Homolog of GI Number: 72111464 NR Desc:  similar to YY1 transcription factor
  misc_feature: Homolog of GI Number: 57111945 NR Desc:  similar to YY1 transcription factor
  misc_feature: Homolog of GI Number: 31419009 NR Desc: YY1 transcription factor
MEIHYSNSYFERRPILKSKAPAVKWVKEWVPQDLVTTGGKCMILKWVTEDTLKTLKEKVKEPSVPEPEPEPTTEVLFLCSYDGCGKTFIDAGALRKHSHIHGERQYVCHYDGCGKKFLDSSKLKRHFLIHTGERDFVCPHEGCGKAFSLDFNLRSHMKTHSQENYHICPYPDCGKRYAHEYKLKNHIASHHEKNAPLDVAKYTTPPPEKQTKTSKPSGGAYGSASSDRPYACPYDGCEKAYIHEYKLRLHLKREHPGLMADENAEHAQANVGNEMDEASDHDAYVAKRSNGKIQKQSKPKPNLKLPPSKIAKRKVSTPTLTVNKNSWPVKDEPFDEEDSEETEEDRDNVEDGWRYAGGNNEDDDEETEYED

SEQ ID NO: 1985 - DNA, 1197 bp, Glycine max
  misc_feature: Ceres CLONE ID no. 563959
  misc_feature: Ceres CDNA ID no. 29191499
  CDS (69)..(1070): REFERENCED BY SEQ ID NO: 1986
acgtataagatgcacttccggtcatcattttaccaacatgcagattttgagttggtttctgaatataaatggacgccaaacggttcatccagctggttgaggagaagaagaagaaaattatggagagaaaggaagctcctttgaaatgggagcagaagctggaagctgctgctgaagctaaagagaggaagctgaaggttgcaaagcatacaaaaagatctggctctgatagtgacagcgattatgacagtgatgatgagagtagaaagacaagtaaaagatctcacaggaagcacagaaagcattctcactacgactctggtgaccatgagaaaaggaaagaaaaaagttccaaacggaaaacaaagaaatggtcctctgaatctagtgattatagtagtgatgactctgagagtagctttgaggaggagagaagaagaaagaagaagcaaagcaagaagctgagagatcggggttcaagatcagattctagcaactatgattctactgctgatgaattaagcaagaggaaaagacagcacaaacggcaacgcccatcaaaatttagtggatcagactactctactgatgaaggagatagtctagttcagaaaagaaatcatggaatgcatagcaaacgccatcgacaatcagaatctagtgaatctgacttgtcaagtgatgacgctccccataagaaaggccacagaaagcaccataaacatcacaagcgatcacataatgtggagctgaggttgtctgattctgattatcgcagtcatggtcaaagaagcagatcaaagtcattggaagaaaattctgaagatgaaagcaaaaaaagatcaatggataagaagtctggtcgccatcaccaccatcgtcaccaccaccatcgccaccaccaccatcgccaccacttggatgatgagagaaactacatgcagcaacactctcctaaattcaatggaaagcatggcgaggagttagacaaaactgaaactgagaaaaaggatggtggtcatcatgaaagtagagctatggttgagaataatgatggtcaaattttttgatttttgagaatctgtcctgctatctgtttgtggtgcttctgtactggaattggtaacttactatttgatattcaaattaaagttaaaggaacaatttcattatttaaaaaaaaaaaaaaaaaaaaaa

SEQ ID NO: 1986 - protein, 333 aa, Glycine max
  misc_feature: Ceres CLONE ID no. 563959
  misc_feature: Ceres CDNA ID no. 29191499
  misc_feature: Homolog of GI Number: 34895374 NR Desc: putative histidine
  misc_feature: Homolog of GI Number: 134874 NR Desc: Sarcoplasmic reticulum histidine
  misc_feature: Homolog of GI Number: 5901659 NR Desc: XNP
  misc_feature: Homolog of GI Number: 17509687 NR Desc: human XNP gene related
  misc_feature: Homolog of GI Number: 34784456 NR Desc: LOC402866 protein
  misc_feature: Homolog of GI Number: 23510226 NR Desc: Plasmodium falciparum trophozoite antigen r45
  misc_feature: Homolog of GI Number: 53792619 NR Desc: putative CBF1 interacting corepressor CIR
  misc_feature: Homolog of GI Number: 47087297 NR Desc: zgc:63496
MDAKRFIQLVEEKKKKIMERKEAPLKWEQKLEAAAEAKERKLKVAKHTKRSGSDSDSDYDSDDESRKTSKRSHRKHRKHSHYDSGDHEKRKEKSSKRKTKKWSSESSDYSSDDSESSFEEERRRKKKQSKKLRDRGSRSDSSNYDSTADELSKRKRQHKRQRPSKFSGSDYSTDEGDSLVQKRNHGMHSKRHRQSESSESDLSSDDAPHKKGHRKHHKHHKRSHNVELRLSDSDYRSHGQRSRSKSLEENSEDESKKRSMDKKSGRHHHHRHHHHRHHHHRHHLDDERNYMQQHSPKFNGKHGEELDKTETEKKDGGHHESRAMVENNDGQIF

SEQ ID NO: 1987 - DNA, 1114 bp, Glycine max
  misc_feature: Ceres CLONE ID no. 564372
  misc_feature: Ceres CDNA ID no. 36580421
  CDS (3)..(908): REFERENCED BY SEQ ID NO: 1988
attctgtacaatctgcccctgttgctgctgtttgtgcacctgttcctatacaacctagtgaaagccatatttcagttgctaattacatccatccctctacaagtggatgtgctggattgacctctgtatcatgtgtatcagaattgatgccatcttgctcgacacatccttcagcacctagcaatccagttggcactgtatcatgtgtatcagaattgattccctcttgctcggaaccacatcatttgccatcaaacaatcaagttggctctgtttcatgtgtttcagaattcatgccctcttgctcggcacatccttcagcaccaaacagtcaagttggctctgtttcacgtgtttcagaattcatgccatcttgctcggcacatccttcagcaccaaactgtcaagttggctctgtgtcatctgcatcagaattgatgccctcattctcagaccatccttcagcaccaagcaatcaagttggctctgtatcttgtgtaccagaattgatgacctcttgctcagcacatccttcagctccaaataatcaagttgacaatgacattctatctttgcttgattgtttctttgaagatgatgacacattggctgtgaaagaaaacaacagaattgagaacattgatgatcctgatcaggcaaacaatgccgatggtgcactgtgttcagatccaaatgctatttttgaggagttaggagaccttaacagcttggttggattgggtgaaggcagtttttcctgtggccagaaaaatgaatatactacaagcgaaatgctttatactgttgatatattcgggtcttgtgaccatgacttcttggagttgcttgacctagagacaccgcagctctggctgaataaacatggaagtggtagccaagataagtaaggctaaaaaattgagggaagtatcacagcaaattgattgaactatagccccaagtacctaaccttgattagaataaacaaaggattctcttcctgttcttcatttaaaaaccatcatggcaccagttacttcgcatcatatcaactgacaagaatgttgattaaaatctagtgatgttctttgattgtgttaaaaaaaaaaaaaaa

SEQ ID NO: 1988 - protein, 253 aa, Glycine max
  misc_feature: Ceres CLONE ID no. 564372
  misc_feature: Ceres CDNA ID no. 36580421
MPSCSTHPSAPSNPVGTVSCVSELIPSCSEPHHLPSNNQVGSVSCVSEFMPSCSAHPSAPNSQVGSVSRVSEFMPSCSAHPSAPNCQVGSVSSASELMPSFSDHPSAPSNQVGSVSCVPELMTSCSAHPSAPNNQVDNDILSLLDCFFEDDDTLAVKENNRIENIDDPDQANNADGALCSDPNAIFEELGDLNSLVGLGEGSFSCGQKNEYTTSEMLYTVDIFGSCDHDFLELLDLETPQLWLNKHGSGSQDK

SEQ ID NO: 1989 - DNA, 1305 bp, Glycine max
  misc_feature: Ceres CLONE ID no. 564467
  misc_feature: Ceres CDNA ID no. 25446224
  CDS (37)..(1116): REFERENCED BY SEQ ID NO: 1990
agtcatctttgtgttgtaatcgcgaaaccttttccgatgaaaattcagccaatcgactctcaggttctggccgaggggactcagcttgagctcgccaagccggttgtgaagtcgcggctgaagcggctcctcgagcgccagttctccggtgttcttagaaattcggcgccggaaaagatcgccggagacgatgaaacgcttaacggctccaatgattttgagccgagctcggcgtgtttagcgaaaatggtgcagagtttcatcgaggagagccacgagaagcactccgcttcacaccaccgcaaccgatgtaactgcttcaacaggaactacgacgacagctctgacgaagattcgaactcgttcggcggttccggcgactccaatttctcctccggcgaggcgtgcgaaactctcaaaggtttggtagcgtgtgccagtgtgcgcgaaaggaatttgcttgcggataccgcgaagatcgttgagaagaataagatctgcaagcgcaaagacaatttctgcagaaagatcctcacggacgaattgttaacccttggatacgatgcctcaatttgcaaatctcgctgggaaaaatctccctcatatcccgctggggaatatgaatacatagatgtgatgatggggaaagaacgaattctaattgacattgacttcaggtcagaattcgagattgctcgatccacgaaggcgtacaagacgattcttcagaaccttccctacatattcgttggcacgtgcgagcggttgcagagcatcgtggcgctcgtgtcggaggcagcgaagcagagtctgaagaagaagggaatgcacgtgccgccgtggaggagagccgagtacgtgaaagcgaagtggctctctccttacacgcgcactactaattctgcgaacgatatcaaagaggagaagaagaaggaagaagaacaacaacagcttttgaaggagaatttattcgctgcggagtcagagagttccggcgaagataacacggcggtggtcgaatggaagccaccggagctgaaacctaagggttcgctttccggcgtgaaggttgtgactggtttggcggtggcttttcataatgacaataacccataaaattttgaatttttttcggctttttctattttctaaagtgaggattaaaatctatataactatataactgtaacagttctgtgacttctatccccttctgtttttttttcttacacacggggtggatttgactaatatcaataaaataaagctgaaatatagaagtgatataaaaaaaaaaaaaaaaaa

SEQ ID NO: 1990 - protein, 359 aa, Glycine max
  misc_feature: Ceres CLONE ID no. 564467
  misc_feature: Ceres CDNA ID no. 25446224
  misc_feature: Homolog of GI Number: 34906052 NR Desc: P0698H10.19
  misc_feature: Homolog of GI Number: 34907382 NR Desc: P0471B04.25
MKIQPIDSQVLAEGTQLELAKPVVKSRLKRLLERQFSGVLRNSAPEKIAGDDETLNGSNDFEPSSACLAKMVQSFIEESHEKHSASHHRNRCNCFNRNYDDSSDEDSNSFGGSGDSNFSSGEACETLKGLVACASVRERNLLADTAKIVEKNKICKRKDNFCRKILTDELLTLGYDASICKSRWEKSPSYPAGEYEYIDVMMGKERILIDIDFRSEFEIARSTKAYKTILQNLPYIFVGTCERLQSIVALVSEAAKQSLKKKGMHVPPWRRAEYVKAKWLSPYTRTTNSANDIKEEKKKEEEQQQLLKENLFAAESESSGEDNTAVVEWKPPELKPKGSLSGVKVVTGLAVAFHNDNNP

SEQ ID NO: 1991 - DNA, 937 bp, Glycine max
  misc_feature: Ceres CLONE ID no. 564577
  misc_feature: Ceres CDNA ID no. 29191810
  CDS (98)..(592): REFERENCED BY SEQ ID NO: 1992
ggaagaccgacaagaaggaaacgttatcacaaattggattgttcctccgaacagtgaaccctcacctaacaatcagaacccaggatttggtgaaacgatgaacagtgataggaaaattggggttgccttggacttttccaaaggaagcaaaatcgctctgaaatgggctattgacaatcttatcagcaacggtgacactctctacatcgtccacaccaagccttccggaggaagtgaatcaggaaatcttctctggtccaccactggttcacctctgattccattgtcggagtttcgtgaaaaggaggtgatgcgtcactatgaggtggatactgatgctgaggtgttggacttgcttgacaccgcttctaggcagaaacaggtgaatgtggtggcaaagctatactggggggatgcaagagagaaaattgtggaagccgttggggatttgaagcttgactctttggtcatgggtagcagaggcttgggtgccatacaaagggtattactggggagtgtgactaattatgtcaccgcaaatgcgagttgccctataacgattgtgaaagactctgccccttctactatctgataagctactgaatttggttggcctttgcaatcggttgtttttatcttcatcagtgaccagagtgtgtttccctccgttcttacttcttacacatgtttaattgggattatgaacacacttgaatgattaaggatttggcaagcataatgtatattttcagagtctcttttaagcgcatggttatagccacaaaattgtgcttataaataagctttgtgctgaatctggttcaaacttactagaacacatgatgtggtggtgtgaaatgtttgatacttaaacatgatgcgtcacataattatcaatctgatgctttctggatatttgaaaaaaaaaaaaaaaaaa

SEQ ID NO: 1992 - protein, 164 aa, Glycine max
  misc_feature: Ceres CLONE ID no. 564577
  misc_feature: Ceres CDNA ID no. 29191810
  misc_feature (4)..(157): Pfam Name: Usp PFAM Desc: Universal stress protein family
  misc_feature: Homolog of GI Number: 50931659 NR Desc: putative universal stress protein
  misc_feature: Homolog of GI Number: 50902088 NR Desc: P0414E03.3
  misc_feature: Homolog of GI Number: 11602751 NR Desc: ENOD18 protein
  misc_feature: Homolog of GI Number: 11602747 NR Desc: early nodulin ENOD18
  misc_feature: Homolog of GI Number: 11602749 NR Desc: early nodulin ENOD18
  misc_feature: Homolog of GI Number: 50913251 NR Desc: universal stress protein / early nodulin ENOD18
  misc_feature: Homolog of GI Number: 60100214 NR Desc: USP family protein
  misc_feature: Homolog of GI Number: 50900762 NR Desc: P0583G08.8
  misc_feature: Homolog of GI Number: 30682191 NR Desc: universal stress protein
  misc_feature: Homolog of GI Number: 25402657 NR Desc: protein T23J18.3
  misc_feature: Useful for making bigger plants
  misc_feature: Useful for making ornamental plants with flowers and leaves fused
  misc_feature: Useful for making ornamental plants with modified flowers
MNSDRKIGVALDFSKGSKIALKWAIDNLISNGDTLYIVHTKPSGGSESGNLLWSTTGSPLIPLSEFREKEVMRHYEVDTDAEVLDLLDTASRQKQVNVVAKLYWGDAREKIVEAVGDLKLDSLVMGSRGLGAIQRVLLGSVTNYVTANASCPITIVKDSAPSTI

SEQ ID NO: 1993 - DNA, 875 bp, Glycine max
  misc_feature: Ceres CLONE ID no. 565035
  misc_feature: Ceres CDNA ID no. 25891674
  CDS (96)..(608): REFERENCED BY SEQ ID NO: 1994
ataaaaggatcccgcgggtgttccctttttcttcgtgctaatcttatcttatccctctaatcactctagctgttgcaaatttctactatttttcaatggcttctgcagatgttgagttccgttgctttgttggtgggcttgcttgggtcaccggcaacgatgccctcgagaaagccttttcaatctacggcgacatcgttgaatcgaaggttatcaacgaccgtgagactggaaggtccagaggattcggatttgtgaccttcgcctcagagcagtcaatgaaagatgcgatcgcaggaatgaacggccaggaccttgacggtcgtaacatcactgtcaacgaagctcagacccgcgccagccgtggtggtggtggaggcggtggtttcggaagtggtggtggatacaaccgcggtagcggtggatatggtggtggtggtggcggcggcggatacggtggtcgtcgtgaaggtggatacaaccgtaatggtgggggtggaggtggaggatacggcggtggtagagaccgtggttacggtggtgatggtggttctcgctactctcgcggtggggaaggcggtggatccgatggaaactggagaaattaggcatatgaccctgtaaattagggtttatgattaagttcaattattttaaggtgttgtctgtgtgtggtttaagtttcggtatctgtgttggtttcgtttcgtgttcctgtggttttcgtttttgacctacaattctagttgtgtttatagtcgatcgaatgaaatgatagtaagaaattatcgcatcaaatttctatggattttgctatctgtttgctggacgtggaaatcgaattggattaaaaaaaaaaaaaaaaaaaaaaaaaa

SEQ ID NO: 1994 - protein, 170 aa, Glycine max
  misc_feature: Ceres CLONE ID no. 565035
  misc_feature: Ceres CDNA ID no. 25891674
  misc_feature: The plant flowers significantly late compared to wild-type.
  misc_feature: null
  misc_feature: Useful for making plants with altered Lignin content
  misc_feature: Useful for making plants with modulated flowering time
  misc_feature: Useful for making plants with modulated nitrogen use efficiency
  misc_feature (10)..(81): Pfam Name: RRM_1 PFAM Desc: RNA recognition motif.
  misc_feature: Homolog of GI Number: 5726567 NR Desc: glycine
  misc_feature: Homolog of GI Number: 18076086 NR Desc: glycine
  misc_feature: Homolog of GI Number: 2331133 NR Desc: glycine
  misc_feature: Homolog of GI Number: 34851124 NR Desc: putative glycine
  misc_feature: Homolog of GI Number: 2267593 NR Desc: glycine
  misc_feature: Homolog of GI Number: 2674201 NR Desc: glycine
  misc_feature: Homolog of GI Number: 7439982 NR Desc: RNA
  misc_feature: Homolog of GI Number: 50881454 NR Desc: glycine
  misc_feature: Homolog of GI Number: 2119043 NR Desc: glycine
  misc_feature: Homolog of GI Number: 77557139 NR Desc: glycine
  misc_feature: Useful for delaying flowering time
  misc_feature: Useful for increasing chlorophyll and photosynthetic capacity
  misc_feature: Useful for making bigger plants
  misc_feature: Useful for making ornamental plants with modified flowers
  misc_feature: Useful for making plants with increased biomass and foliage
  misc_feature: Useful for making plants with increased biomass and foliage
  misc_feature: Useful for making plants with increased biomass and foliage
  misc_feature: Useful for making shorter plants
  misc_feature: Useful for making stronger plants
  misc_feature: Useful for sterility
MASADVEFRCFVGGLAWVTGNDALEKAFSIYGDIVESKVINDRETGRSRGFGFVTFASEQSMKDAIAGMNGQDLDGRNITVNEAQTRASRGGGGGGGFGSGGGYNRGSGGYGGGGGGGGYGGRREGGYNRNGGGGGGGYGGGRDRGYGGDGGSRYSRGGEGGGSDGNWRN

SEQ ID NO: 1995 - DNA, 658 bp, Glycine max
  misc_feature: Ceres CLONE ID no. 565831
  misc_feature: Ceres CDNA ID no. 40351070
  CDS (2)..(421): REFERENCED BY SEQ ID NO: 1996
ctttttcagctctcggcggcggcggtgcacttgtgacctcaaccaggcgagcactcctcctcctcgccgtcgtcgtctccgatccaccgccgcttccgcagccatggtgaacgttccgaagaccaagaagacctactgcaagaacaaggagtgcaagaagcacaccctccacaaggttacccagtacaagaaaggcaaggacagcctttctgctcaggggaagcgtcgttatgaccgcaagcagtctggatatggtggccagacaaagcctgttttccacaagaaggccaagacaacaaagaagattgtgctgaagctgcagtgccagagctgcaagcattactcacagcgtgccatcaagaggtgcaagcactttgaaatcggtggagacaagaagggcaagggaacatctctcttctaatctgatgatatcaccgttatgtttagaatgttgtgccagaacttctcacaagaagaatgtattatctttaatattctggttataaccctatggactatggagcatatgttttgctattgtgttgactactttctccagatctaatcgacaagtaaaatgttttttaaaaaaaaaaaaaaaaaaaaaaaaaaaaaaaaaaaaaaaaaaaaaaaaaaaaaaaaaaaaaaaaaaaaaaaa

SEQ ID NO: 1996 - protein, 105 aa, Glycine max
  misc_feature: Ceres CLONE ID no. 565831
  misc_feature: Ceres CDNA ID no. 40351070
  misc_feature (19)..(95): Pfam Name: Ribosomal_L44 PFAM Desc: Ribosomal protein L44
MVNVPKTKKTYCKNKECKKHTLHKVTQYKKGKDSLSAQGKRRYDRKQSGYGGQTKPVFHKKAKTTKKIVLKLQCQSCKHYSQRAIKRCKHFEIGGDKKGKGTSLF

SEQ ID NO: 1997 - DNA, 1647 bp, Glycine max
  misc_feature: Ceres CLONE ID no. 566683
  misc_feature: Ceres CDNA ID no. 36571705
  CDS (376)..(1344): REFERENCED BY SEQ ID NO: 1998
aatgaaaaattagtagcttcttgttgtgctttttattttgtttgtgttgagataaatttgtttgtttgtttggtattgttttgtgttttatgaattatttgatgggtgaagaaggagaagtggtgagaaagcaaggacaaaggggtgttggtggagataagtggtacttgtatagctgcttacaagactgtaaatattggtgctgtttaatacacgagactagttctctttcgatggtcccttttgagtgaaaaaccttgtcttctcagctttctttggagagatcttaaagacattgactaacaacaataaagtggatcaatcaaaagacttacttcttcttctaacaacaataagatcacatctttcccactcatgaagagacttagcagctcagattcttccagtgccctcatgacaatttgtccatcaacagaggaacatagtccgaggaacagccaacacatgtatggtagggagttccaatcgatgttggacggactcgacgaggaagggtgtgttgaagaaccggggtatcaatctgagaagaagcgtcgtctaagtgtggatcaagtgaaggctttggagaagaactttgaggttgaaaacaagcttgaacctgagaggaaggtgaagcttgcccaagaacttgggttgcaacctagacaggtagccgtatggttccaaaaccgtcgagccagatggaaaaccaaacaattggagagagattatggtgtactcaaagccaattatgatgctcttaagcttaactttgacaccctcgatcaggacaacgaagccttacgaaagcaggttaaggaattgaaatcgaggctgctgcaagaagagaacacaggaggaagcggtgtttcggtgaaggaagagataataacgaggcctgcagactcagaagacaaaacgatggaacaaagtaagagtgacccatcttctgaaacctcaaatattaatcctagttcggagtcggaggaggatcacttgaactacgagtgtttcaacaacaacgacgactgcgtcggaggaaccgccgcatcgcttttgcaagtggacttcaaagacggttcttccgacagcgacggatcaagcgcgattttgaacgaagacaacatgtactctcccttgaaattcaacaattgctccatatcaacctcgccgtcatcgtcttcgatgatgaactgttttcagttccagaaaccgtatcatcaccacgcgcagtacgtgaagatggaggagcacaatttcctcagcgcggatgaggcctgcaatttcttctcggatgaacaagcaccgacccttcaatggtactgtccagaacagtggagctgagaaaagaaacatggaaattaaaccgcttttagaaatttttgtttgaaggtagaaaatgaaatactgtgcaaaagaaaaagagagaacagagatcaatggctgcatggcgtggggtcggagatggaaggttgattattactactctcgaccgtgcggcagggggtaatattaataattattcaatcgtaaagcaaaccatgctgtaaaaacaaatttccattcaagtatggaataacggtgtagtacttttttaataaataaaaaaaacaacaacaacggtgtactaaaaaaaaaaaaaaaaaa

SEQ ID NO: 1998 - protein, 284 aa, Glycine max
  misc_feature: Ceres CLONE ID no. 566683
  misc_feature: Ceres CDNA ID no. 36571705
  misc_feature (20)..(74): Pfam Name: Homeobox PFAM Desc: Homeobox domain
  misc_feature (75)..(119): Pfam Name: HALZ PFAM Desc: Homeobox associated leucine zipper
  misc_feature: Homolog of GI Number: 6091551 NR Desc: homeodomain
  misc_feature: Homolog of GI Number: 49659431 NR Desc: SlHDL1
  misc_feature: Homolog of GI Number: 17380690 NR Desc: putative homeodomain transcription factor ATHB
  misc_feature: Homolog of GI Number: 37911268 NR Desc: homeodomain
  misc_feature: Homolog of GI Number: 22651698 NR Desc: homeodomain protein Hfi22
  misc_feature: Homolog of GI Number: 15148916 NR Desc: homeodomain leucine zipper protein HDZ1
  misc_feature: Homolog of GI Number: 11231065 NR Desc: homeobox
  misc_feature: Homolog of GI Number: 4433048 NR Desc: DNA
  misc_feature: Homolog of GI Number: 5305602 NR Desc: homeobox protein ATHB6
  misc_feature: Homolog of GI Number: 7271061 NR Desc: homeodomain
MLDGLDEEGCVEEPGYQSEKKRRLSVDQVKALEKNFEVENKLEPERKVKLAQELGLQPRQVAVWFQNRRARWKTKQLERDYGVLKANYDALKLNFDTLDQDNEALRKQVKELKSRLLQEENTGGSGVSVKEEIITRPADSEDKTMEQSKSDPSSETSNINPSSESEEDHLNYECFNNNDDCVGGTAASLLQVDFKDGSSDSDGSSAILNEDNMYSPLKFNNCSISTSPSSSSMMNCFQFQKPYHHHAQYVKMEEHNFLSADEACNFFSDEQAPTLQWYCPEQWS

SEQ ID NO: 1999 - DNA, 1453 bp, Glycine max
  misc_feature: Ceres CLONE ID no. 566783
  misc_feature: Ceres CDNA ID no. 40351071
  CDS (243)..(1142): REFERENCED BY SEQ ID NO: 2000
gcaagacgttttaggatatccaagggaaagtgaatcccaactctctcgagagccacgaaaccagaacttcgagtgactcaacctcaaaaaagctaaatcctttgatgaagaaaaagcagcagaaaaagaccgaagaatctacaacagtttcttgatccctcttatagcctttgagcattgaaagggttttcctcaaattgccatgatttgattcctcaacaccccacacacacgtagttaaaatgggttttactaggaaacccatgtttcctgtgttgctggttttgttcatcacaagtcttcttgagccgccccatgttgcagaatctacttcttctgattactccactttggtctacaagggctgctcaaaggagcctttcacagatcccaatggggtgtactctcaggcactttcagcactctttggctcattggtttcacaatccaccaaagccaagttctacaaaaccacttctggctctggccagaacaccataactggcctcttccaatgcagaggggatctcaccaattctgattgctacaactgtgtcagcaggctcccagttctgtgtgacaaactttgtggcaaaaccactgctgccagagtccaacttctaggatgttatattctctatgaggttgcagggttctcccaaatctcaggtatgcagatgttgtacaagacctgtggggcaacaaatgctgctgggagggggtttgaagagaggagggacactgctttctcagtgatggaaaatggggtggttagtggccatggcttctacactaccagctaccagtccttgtatgtcatggggcagtgtgagggagatgttggtgactcagattgtggggagtgtgtgaagaatgctgtgcagagagctcaggttgaatgcggtagctctatttcaggacaagtgtttttgcacaagtgcttcattagttatagctattacccaaatggggttccttctagatcatcttcttcatcatcagcttcatactcttcatcttcttcagggcaaaatccagggaaaacagctgctataatattaggaggtgcagttgcggtggcttttctggttatattgttgctatttgcaaggagtttgaagaagaaacatgatgattattgacagcagaaaatgaattctgagaaggcaaaattattctttgtgatgcattgtttttacaagattagttgatggatgaggggtggaaaatggaagttttgtggtaaatagagtttttgcttgatgcagaaacaatactacaggatggttcactgtaatgattgttgtagctaggtagttaagattttgttgttgggaagagcaatataattagaacctgaaagtgagattttttttctgactagggtgtaactgtaaattacccaacagaatgaatgtttgtcaaaattttgggtccaaaaaaaaaaaaaaaa

SEQ ID NO: 2000 - protein, 292 aa, Glycine max
  misc_feature: Ceres CLONE ID no. 566783
  misc_feature: Ceres CDNA ID no. 40351071
MFPVLLVLFITSLLEPPHVAESTSSDYSTLVYKGCSKEPFTDPNGVYSQALSALFGSLVSQSTKAKFYKTTSGSGQNTITGLFQCRGDLTNSDCYNCVSRLPVLCDKLCGKTTAARVQLLGCYILYEVAGFSQISGMQMLYKTCGATNAAGRGFEERRDTAFSVMENGVVSGHGFYTTSYQSLYVMGQCEGDVGDSDCGECVKNAVQRAQVECGSSISGQVFLHKCFISYSYYPNGVPSRSSSSSSASYSSSSSGQNPGKTAAIILGGAVAVAFLVILLLFARSLKKKHDDY

SEQ ID NO: 2001 - DNA, 1018 bp, Glycine max
  misc_feature: Ceres CLONE ID no. 566846
  misc_feature: Ceres CDNA ID no. 36581853
  CDS (79)..(819): REFERENCED BY SEQ ID NO: 2002
ggtgttgttgagattctaaaaattgccagttacattcccttcacaagattctcacaaacaactcttgagaaagaaagaatggctgccaacacattgatgagttctgccatctcagccttcccatctctcctttcctcctcaaaatccagatttgccgcagcagttcctctttccagctttgttgtcaccaatgcctcttcttctcgcttttccatgagtgctgactggatgcctggccagcctagacccccctaccttgatggttcagcacctggtgactttggattcgaccctcttcgtcttggtgaagtaccagagaatcttgagaggttcaaagagtcagaactcattcactgcagatgggccatgcttgctgttccagggattttggttccagaggcattgggcttaggcaactgggtaaaggctcaggaatgggctgcagttcctggtggccaagcaacctacctaggcaacccagttccatggggcaccctacccaccattctggccattgaattccttgctatttccttcgtggagcaccaaaggagcatggagaaggaccctaaaaagaagaaataccctggtggtgcttttgatcctttgggatactctaaggaccctaaaacattccacgaatacaaagtcaaagaaattaaaaatggacgtcttgctttgttggcttttgtgggattctgtgttcaacaatcagcttatcccggcactggacctttggagaacttggctgctcacttggctgacccatggcacaacaacattggaaacgtcattattccacaatcgattttgccttgaaaaaaaatatatatttgtttcaatagctacctgtataactccgtgtaacaatttgtaatgaatcggatcgatcttgctacgttggtatcgctgtgctgtaattaaactttgaattcaaactcatagatactctggcaactagttggtatgaaagagaggcttgaagcaaacttccaagtccaaaaaaaaaaaaaaaaaa

SEQ ID NO: 2002 - protein, 246 aa, Glycine max
  misc_feature: Ceres CLONE ID no. 566846
  misc_feature: Ceres CDNA ID no. 36581853
  misc_feature (55)..(212): Pfam Name: Chloroa_b PFAM Desc: Chlorophyll A
  misc_feature: Homolog of GI Number: 493723 NR Desc: photosystem I light
  misc_feature: Homolog of GI Number: 170388 NR Desc: chlorophyll a/b
  misc_feature: Homolog of GI Number: 82079 NR Desc: chlorophyll a/b
  misc_feature: Homolog of GI Number: 115764 NR Desc: Chlorophyll a
  misc_feature: Homolog of GI Number: 23507771 NR Desc: At3g54890/F28P10_130
  misc_feature: Homolog of GI Number: 13265501 NR Desc: AT3g54890
  misc_feature: Homolog of GI Number: 54290899 NR Desc: chlorophyll a/b
  misc_feature: Homolog of GI Number: 6685157 NR Desc: chlorophyll a/b binding protein precursor
  misc_feature: Homolog of GI Number: 20788 NR Desc: Type 1 chlorophyll a /b
  misc_feature: Homolog of GI Number: 20790 NR Desc: Type 1 chlorophyll a /b
MAANTLMSSAISAFPSLLSSSKSRFAAAVPLSSFVVTNASSSRFSMSADWMPGQPRPPYLDGSAPGDFGFDPLRLGEVPENLERFKESELIHCRWAMLAVPGILVPEALGLGNWVKAQEWAAVPGGQATYLGNPVPWGTLPTILAIEFLAISFVEHQRSMEKDPKKKKYPGGAFDPLGYSKDPKTFHEYKVKEIKNGRLALLAFVGFCVQQSAYPGTGPLENLAAHLADPWHNNIGNVIIPQSILP

SEQ ID NO: 2003 - DNA, 1460 bp, Glycine max
  misc_feature: Ceres CLONE ID no. 567024
  misc_feature: Ceres CDNA ID no. 40351072
  CDS (94)..(1164): REFERENCED BY SEQ ID NO: 2004
gacatcttcttttacgtattgaatctcagaattctctaaaagagatctttttctgctctttgaagaaagaagggtctttgcttgattttggagatgtctctgctctcagatctcatcaaccttaacctctccgataccaccgagaaggtgatcgcagagtacatatggatcggtggatcaggaatggacctgaggagcaaagcaaggactctcccaggaccagttagcgacccttcagagcttcccaagtggaactatgatggttccagcacaggtcaagctcctggtgaagacagtgaagtgattttatacccacaagccattttcagggatccattcagaaggggtaacaatatcttggttatctgtgatgcctacactcctgctggagaacctattcccactaacaagaggcacgctgctgccaaggttttcagccatcctgatgttgttgctgaagtgccatggtacggtattgaacaagaatacaccttgttgcagaaagatatccaatggcctcttgggtggcctgttggtggtttccctggacctcagggtccatactactgtggtgttggcgctgacaaggcttttggccgtgacattgttgacgcacactacaaagcctgtatttatgctggcatcaacatcagtggaattaatggagaagtgatgcccggtcagtgggaattccaagttggaccttcagttggaatctcagctggtgatgagatttgggcagctcgttacatcttggagaggatcactgagattgctggtgtggtggtttcctttgaccccaagccaattaagggtgattggaatggtgctggtgctcacacaaactacagcaccaagtccatgagagaagatggtggctatgaagtgatcaaagcagcaattgacaagttggggaagaagcacaaggagcacattgctgcttatggagaaggcaacgaacgtcgtttgacaggacgccacgaaaccgctgacatcaacaccttcttatggggagttgcaaaccgtggagcttctgttagggttgggagagacacagagaaagcagggaagggatattttgaggacagaaggccagcttccaacatggacccatacgtggttacttccatgattgcagacacaaccattctgtggaagccatgagcaaaacctgcatgttttctccctttggatggaaaggaacagttatgcttttcttagtaggatttggtctctctctctttttaccttttgattggtactatggttggtgccttgttggttggtgcaactaactggcaagggttgttcattgttttcttctattcctttccctcgttttccgattgttacaatgacaataatttaatggttattatcagtcttgaacaaagaaatgctgattgtgaagtataataataatatatgaaattgtcatgtttaaaaaaaaaaaaaaaaaa

SEQ ID NO: 2004 - protein, 356 aa, Glycine max
  misc_feature: Ceres CLONE ID no. 567024
  misc_feature: Ceres CDNA ID no. 40351072
  misc_feature (103)..(355): Pfam Name: Gln PFAM Desc: Glutamine synthetase
  misc_feature (17)..(98): Pfam Name: Gln PFAM Desc: Glutamine synthetase
MSLLSDLINLNLSDTTEKVIAEYIWIGGSGMDLRSKARTLPGPVSDPSELPKWNYDGSSTGQAPGEDSEVILYPQAIFRDPFRRGNNILVICDAYTPAGEPIPTNKRHAAAKVFSHPDVVAEVPWYGIEQEYTLLQKDIQWPLGWPVGGFPGPQGPYYCGVGADKAFGRDIVDAHYKACIYAGINISGINGEVMPGQWEFQVGPSVGISAGDEIWAARYILERITEIAGVVVSFDPKPIKGDWNGAGAHTNYSTKSMREDGGYEVIKAAIDKLGKKHKEHIAAYGEGNERRLTGRHETADINTFLWGVANRGASVRVGRDTEKAGKGYFEDRRPASNMDPYVVTSMIADTTILWKP

SEQ ID NO: 2005 - DNA, 562 bp, Triticum aestivum
  misc_feature: Ceres CLONE ID no. 567338
  misc_feature: Ceres CDNA ID no. 36699891
  CDS (81)..(308): REFERENCED BY SEQ ID NO: 2006
aagctcactcaaacacagccacacaacactatctcctctgtagtagtactactattaccagagccgcctcccagttagcaatggcaaagtgtctcgccgtcgcgctcctgctgctggtggtgctcgcgtcatgcgaagggagggagctgaatgagaaggttgcagcgacgcgtggcgcaggtgcgggtggtggcgtcggcgagtctaaggcgttggacttgcctttgctcgggggaaccggtacgggaaccagcaccattaccggcccgctggtggtgcttcctgggatccctgctattggcccatgatcatctctggctcatgtgctggcttacaaggagctaaagctcgccttgtcgctttagattctgtaggtagcaccgccgggaaggaaaaagcggacgttttgctcatttccatgttcggtactgagcgcctgtatcaactgtcatctgtactatctatttccagttcatgttctcgtatttttcgttccttgatgtgctacatgtaccatcaataaataataattactatgttagtgttaaaaaaaaaaaaaaaa

SEQ ID NO: 2006 - protein, 75 aa, Triticum aestivum
  misc_feature: Ceres CLONE ID no. 567338
  misc_feature: Ceres CDNA ID no. 36699891
  misc_feature: Homolog of GI Number: 18938 NR Desc: BLT14 protein
  misc_feature: Homolog of GI Number: 12054814 NR Desc: Lt1.1 protein
  misc_feature: Homolog of GI Number: 167028 NR Desc: cold
  misc_feature: Homolog of GI Number: 1418970 NR Desc: BLT14.2 protein
  misc_feature: Homolog of GI Number: 1418968 NR Desc: BLT14.1 protein
  misc_feature: Homolog of GI Number: 313752 NR Desc: acclimation protein
  misc_feature: Homolog of GI Number: 7690288 NR Desc: low temperature induced protein
  misc_feature: Homolog of GI Number: 12656895 NR Desc: pTACR7
  misc_feature: Homolog of GI Number: 313730 NR Desc: acclimation protein
  misc_feature: Homolog of GI Number: 8468624 NR Desc: cold
MAKCLAVALLLLVVLASCEGRELNEKVAATRGAGAGGGVGESKALDLPLLGGTGTGTSTITGPLVVLPGIPAIGP

SEQ ID NO: 2007 - DNA, 905 bp, Triticum aestivum
  misc_feature: Ceres CLONE ID no. 567519
  misc_feature: Ceres CDNA ID no. 40351073
  CDS (118)..(465): REFERENCED BY SEQ ID NO: 2008
aaaaaaaagggaaaatctcaaggtcgcatccctaaaaaaaaacagcttctcaaggccgcacgacgctcccgaacgccgccctcggccctcgcctacctctcttcctcgccggcggcgatgaccccgcagggtaagagcagctcgctggagcgcctccacgacgttgagcagcggatagtgcgggtggtggagctgtcgggcgcggtcatggaggagctcggaaactcgcagggtccccgcgccgaggccgtagccgcccactgccgcgagttcatgctctatatgaaggaaatacaaacaactatgcgcgaggaaataaaaagtgcttgtgaatatcgtccatttgagaagtgcgactatagtgcaagaatcgctaacgagatttgttgcaaaaagctggagtatgtaattgagaagatggatgccatgcaactaaacatggagcaaagttctaatggagtttagctagttaactggcactctagtacccggtggtgaggcggttatctacagagctacagcttggatccgtatgtggtcgttactcactcatgcagattttagggagcttttggatattggatgcaaccgctaggagacggttgcacgggctatcttcagccgatttggatggcgagctaataatagactaggtgtgtaggcatcgtagtctgttctttatcgccggatgtggcgcgttattgctggatgtggcactttacagatttattttttctcttgactcggtttatgagctttcttggaacctaagaccttgttacgctttttaataatatggctgcatgcatcgattgatgcagaggccggaggtcaacctccttttctaaagaataaataaataaagcatttcagctctttcagacccttcaaaaaaaaaaaaaaaa

SEQ ID NO: 2008 - protein, 115 aa, Triticum aestivum
  misc_feature: Ceres CLONE ID no. 567519
  misc_feature: Ceres CDNA ID no. 40351073
MTPQGKSSSLERLHDVEQRIVRVVELSGAVMEELGNSQGPRAEAVAAHCREFMLYMKEIQTTMREEIKSACEYRPFEKCDYSARIANEICCKKLEYVIEKMDAMQLNMEQSSNGV

SEQ ID NO: 2009 - DNA, 919 bp, Triticum aestivum
  misc_feature: Ceres CLONE ID no. 567547
  misc_feature: Ceres CDNA ID no. 25891869
  CDS (70)..(747): REFERENCED BY SEQ ID NO: 2010
accattcaccagcgctgcacgcacactaccatcacaactcgtccgagaataccaagagcggcatcatccatggcgtcctctcgcgtcctccacctcatcgccctagtcctcgccgtcaccaccgccgcagatgcggccaccatcaccgtcgtcaaccgctgctcctacacggtgtggccgggcgcgctcccaggcggcggctcgcgtctcgacccgggcaagtcgtggcagctcaacatgcctgccggcaccgcgggcgccagggtgtggccgcgcaccgggtgcaccttcgacggcagcggccgcgggcggtgcatcacgggcgactgcggcggcgcgctggcctgcagtgtgtccggccagcagcccaccacgctggcggagtacaccctgggccagggcgggaacaaggacttcttcgacctgtccgtcatcgacgggttcaacgtgcccatgagcttcgagcccgtcggcgggtcgtgccgcgctgcgcgctgcgccacggacatcaccaaggagtgcctcaaggagctgcaggtgcctggagggtgcgctagcgcgtgcggcaagttcggcggcgacacgtactgctgccggggccagttcgagcacaactgcccgccgacaaactactcgaggttcttcaagggcaagtgcccggacgcctacagctacgccaaggacgaccagaccagcaccttcacctgcccacctggaaccaactaccagatcgtcctctgcccttagaataggacgcgttgaaggatcaaaagtataataaccgggatcaataaggaacaatgactactctgagtagtctacttatatgtatgtgccatgtcacgtatatgcatatgcatgactgtgcttgtatgttgaccaataataaataaatggttaaataaaaaaaaaaaaaaaa

SEQ ID NO: 2010 - protein, 225 aa, Triticum aestivum
  misc_feature: Ceres CLONE ID no. 567547
  misc_feature: Ceres CDNA ID no. 25891869
  misc_feature (29)..(225): Pfam Name: Thaumatin PFAM Desc: Thaumatin family
  misc_feature: Homolog of GI Number: 20257409 NR Desc: thaumatin
  misc_feature: Homolog of GI Number: 14164981 NR Desc: thaumatin
  misc_feature: Homolog of GI Number: 14164979 NR Desc: thaumatin
  misc_feature: Homolog of GI Number: 56682582 NR Desc: thaumatin
  misc_feature: Homolog of GI Number: 2454602 NR Desc: Barperm1
  misc_feature: Homolog of GI Number: 2344818 NR Desc: basic pathogenesis
  misc_feature: Homolog of GI Number: 1373392 NR Desc: permatin precursor
  misc_feature: Homolog of GI Number: 77557128 NR Desc: thaumatin
  misc_feature: Homolog of GI Number: 77557124 NR Desc: thaumatin
  misc_feature: Homolog of GI Number: 50917505 NR Desc: putative antifungal zeamatin
  misc_feature: Utility: Seed Bleaching Useful for making low fiber seeds with increased digestability
MASSRVLHLIALVLAVTTAADAATITVVNRCSYTVWPGALPGGGSRLDPGKSWQLNMPAGTAGARVWPRTGCTFDGSGRGRCITGDCGGALACSVSGQQPTTLAEYTLGQGGNKDFFDLSVIDGFNVPMSFEPVGGSCRAARCATDITKECLKELQVPGGCASACGKFGGDTYCCRGQFEHNCPPTNYSRFFKGKCPDAYSYAKDDQTSTFTCPPGTNYQIVLCP

SEQ ID NO: 2011 - DNA, 769 bp, Triticum aestivum
  misc_feature: Ceres CLONE ID no. 567692
  misc_feature: Ceres CDNA ID no. 36707658
  CDS (89)..(550): REFERENCED BY SEQ ID NO: 2012
cacaccatcccagcccccacctcccctccctccagcaaactcacgcatcccaccaccgaagctcccaaccccacccgaagcggcagccatggcccccaaggcagacaagaagccggccgccgagaacaaggtcgagaaggcggcggagaagacccccgcgggcaagaagcccaaggccgagaagcggctgccggcgggcaagacggcgtccaaggaggccggcggcgagggcaagacccggggccgcaagaagggcagcaaggccaagaagggcgtggagacgtacaagatctacatcttcaaggtgctgaagcaggtgcaccccgacatcggcatctcctccaaggccatgtccatcatgaactccttcatcaacgacatcttcgagaagctcgccggggagtcggccaagctcgcccgctacaacaagaagcccaccatcacctcccgggagatccagacctccgtccgcctcgtcctccccggggagctcgccaagcacgccgtctccgagggcaccaaggccgtcaccaagttcacctcctcctagactgaagatgcgccgcttgttgtgccagatgtggctgtctgatgtatctctgctgttgactctgcttacctgcaagtagaagtagtggtagtagttcgtgtggtagaagattgccaacgctttgttggcttcttggttgtgagaactgaacgtgttgcttttgcaaaatgaaatctatctagaaaatgttgcggttgtggcaaaaaaaaaaaaaaaaaa

SEQ ID NO: 2012 - protein, 153 aa, Triticum aestivum
  misc_feature: Ceres CLONE ID no. 567692
  misc_feature: Ceres CDNA ID no. 36707658
  misc_feature: No seed is being produced by the plant
  misc_feature: The plant flowers significantly late compared to wild-type.
  misc_feature: Useful for biocontainment applications
  misc_feature: Useful for making plants with modulated flowering time
  misc_feature (60)..(132): Pfam Name: Histone PFAM Desc: Core histone H2A/H2B/H3/H4
  misc_feature: Homolog of GI Number: 122033 NR Desc: Histone H2B.2
  misc_feature: Homolog of GI Number: 22325 NR Desc: H2B histone
  misc_feature: Homolog of GI Number: 577825 NR Desc: H2B histone
  misc_feature: Homolog of GI Number: 21801 NR Desc: histone H2B
  misc_feature: Homolog of GI Number: 34895900 NR Desc: putative histone H2B
  misc_feature: Homolog of GI Number: 34895838 NR Desc: putative histone H2B
  misc_feature: Homolog of GI Number: 34895896 NR Desc: putative histone H2B
  misc_feature: Homolog of GI Number: 34895832 NR Desc: putative histone H2B
  misc_feature: Homolog of GI Number: 50932769 NR Desc: putative histone H2B
  misc_feature: Homolog of GI Number: 1708107 NR Desc: Histone H2B
MAPKADKKPAAENKVEKAAEKTPAGKKPKAEKRLPAGKTASKEAGGEGKTRGRKKGSKAKKGVETYKIYIFKVLKQVHPDIGISSKAMSIMNSFINDIFEKLAGESAKLARYNKKPTITSREIQTSVRLVLPGELAKHAVSEGTKAVTKFTSS

SEQ ID NO: 2013 - DNA, 719 bp, Triticum aestivum
  misc_feature: Ceres CLONE ID no. 567711
  misc_feature: Ceres CDNA ID no. 25445497
  CDS (1)..(558): REFERENCED BY SEQ ID NO: 2014
aacccaaatcaatcgcttccgttacgaattcccccaaatccatccccaacccggtcccgtcggatccatcgccgccgccgccatgtcgtcgtcgcagccgcagcagcgctactactgccaccagtgcgaccgcgccgtcgccatcgccgcccccgcctcccgcgacgacgaggtcttctgcccgctctgcgccggggggttcgtcgaggagctcctcgacgacgaggacccccctcaccacatgccgccgcggcggaggccgactccaaggacctgcagcagcagagcaaggccctcgacaagctcaccgaccacgtcgaggatcgccagctcgactcctcccgcgtccaatccgccatggcagctcttgcttcatctaaagaggctgactggaatgccatgagactgagggagaaagaattagctgctgtcaagatcaaccccaccgacgttgaaatcatcgccaacgagcttgagttggacaagaagatcgcagagaggacgctccgagagcacaagggcgatgctgttgccgcggtccggttcttgcttcgctgatcctgaacacatgccgcctgcgtgcgtgcaagtgatttcgtttgatcagtaaaccgtgcggatgggcctgtactttgccttcctgtatcacagtgaaacgaccgtttttgtcgcgcttgcggaacttatatttccatggttgcagaaaaaaaaaaaaaaaa

SEQ ID NO: 2014 - protein, 66 aa, Triticum aestivum
  misc_feature: Ceres CLONE ID no. 567711
  misc_feature: Ceres CDNA ID no. 25445497
  misc_feature: Homolog of GI Number: 61815734 NR Desc:  similar to Huntingtin interacting protein K
  misc_feature: Homolog of GI Number: 68439841 NR Desc:  similar to Huntingtin interacting protein K
  misc_feature: Homolog of GI Number: 51593146 NR Desc: MGC85228 protein
  misc_feature: Homolog of GI Number: 34861312 NR Desc: similar to RIKEN cDNA 2310003F16
  misc_feature: Homolog of GI Number: 62645673 NR Desc:  similar to Huntingtin interacting protein K
  misc_feature: Homolog of GI Number: 27734984 NR Desc: Huntingtin interacting protein K
  misc_feature: Homolog of GI Number: 61862440 NR Desc:  similar to Huntingtin interacting protein K
  misc_feature: Homolog of GI Number: 3329429 NR Desc: huntingtin interacting protein HYPK
  misc_feature: Homolog of GI Number: 66539173 NR Desc:  similar to Huntingtin interacting protein K
  misc_feature: Homolog of GI Number: 55296745 NR Desc: putative ring finger protein 126 isoform 1
MAALASSKEADWNAMRLREKELAAVKINPTDVEIIANELELDKKIAERTLREHKGDAVAAVRFLLR

SEQ ID NO: 2015 - DNA, 654 bp, Triticum aestivum
  misc_feature: Ceres CLONE ID no. 567720
  misc_feature: Ceres CDNA ID no. 40351074
  CDS (92)..(436): REFERENCED BY SEQ ID NO: 2016
gtcctccgctcccaatccgaatccaccaacgcagaggagtggagagagaaactccggagaagaagcaggagcgggtgcggcggcgaggtcgatgtcgacgacggcggggtacctggcgcggcgcgcggggcagaaggagcgggtgcggctgctctaccgccgcgcgctcaaggacaccctcaactgggccgtccaccgccacctcttctaccaggacgcgtccgagctcagggacaagttcgaggccaacagaaatgtggagaacctggacgtgatcgataggctcatcgaggacgcggaggcgcagcagaggaacttccagcacccggatccttacattgttccatgggctcctggtggcactaaattcacaaggaaccctcctccacctgaagggattgagattatctacaactatggcaaagaagaccaatgaacaagaatcatgcatttgtgagcagagcctggcaccggcggagtgcaaaggacttacttttgcttttccagatgatagcatgcaactgagctgctgtattgttaagaacaaaataaaattactcgcctccttccatgtgtttcttttatcatggatgttgtatgccaactattttgtgctcatcagctagttcattgtttacaaaaaaaaaaaaaaaa

SEQ ID NO: 2016 - protein, 114 aa, Triticum aestivum [sequence omitted]

SEQ ID NO: 2017 - DNA, 642 bp, Triticum aestivum
  misc_feature: Ceres CLONE ID no. 567730
  misc_feature: Ceres CDNA ID no. 40351075
  CDS (159)..(368): REFERENCED BY SEQ ID NO: 2018
ataggtcgagctgtccttcccgtctctcttcccctccattcctcctcttctccgcatccacccgaacggaaccctagtctcccatcacttggatccggtctttgacattctccggtgcaggacgccgtaagaatttcgctagagatcttgcagctgccatggcggacaatgaacctattgacccaaagaattaccttgaggaacgctgcaagccgcagtgtgtaaaatcactgtatgactatgagagatgtgtgaagagagtcgagaacgatgaaactgggcagaagcactgcaccgggcaattctttgactactggtcatgcgttgacaaatgtgtagcaccaaagctctttgagaagctcaaatgatggatgggatggcgctgattgccccagaccccaataaatcgatccactgtcctgatttctgattgtgctgaccctgtaacaaggagctttgttctatctgttgctaaaacttgtcaaaacaagcaaacacaattattttggcagtgggaacaattacttttattttgcttgtgtaatgttcattctgttctgttatacttggacagatgaaagcatttctgctttaaaaaaaaaaaaaaaaaaaaaaaaaaaaaaaagaaaaaaaaaaaaaaaa

SEQ ID NO: 2018 - protein, 69 aa, Triticum aestivum
  misc_feature: Ceres CLONE ID no. 567730
  misc_feature: Ceres CDNA ID no. 40351075
  misc_feature (7)..(69): Pfam Name: UCR_hinge PFAM Desc: Ubiquinol
MADNEPIDPKNYLEERCKPQCVKSLYDYERCVKRVENDETGQKHCTGQFFDYWSCVDKCVAPKLFEKLK

SEQ ID NO: 2019 - DNA, 798 bp, Triticum aestivum
  misc_feature: Ceres CLONE ID no. 567862
  misc_feature: Ceres CDNA ID no. 40041257
  CDS (75)..(575): REFERENCED BY SEQ ID NO: 2020
actccccattctccattcccccctcccacgccgtctcgtcccagctcgccctccagaggttttagtcttcctccatggcggccctcatcaagctcggaagccttcttaggcagagtgctttggcgagcagtgcctcgaccggctcggctcctgccctgttcaacgctgcccgcttcatgtgcgccggccagccagctggtggcaataagcttttcgtcggcggtctggcctgggctactgacgatcattcgctgaaggaggcgttccaaagctttggagaggtcgttgaggcacgtgtcatcactgatcgagagactggaaggtctagagggtttggttttgtgagctttgcgaatgaagctgatgcagatagcgctgcaaaaggcatggacggtcaggagcttgcagggaggaacgtccgtgtgaacttcgccaatgagagaccttcgggtggtggcggcttctcacgcggcggcggtggctatggaggaggtggtggctttggcggcggcggcggctacggcggtggtggccgaggtggcggtggctatggtggtgaccgtgaagctttctaaggagagcgcagactatcaaatttaaaataatgcgcttttaggacagtgtcttgattatgtggaacctatgtcacgtctgtctgttatctgcgatagttgaactcaataggggcagagatgtggttctagtatttttgtttttggttcgtttcttgatggtgcaagagtttaagtcatgctgcttcgaggcttggatgagtctcaacgaaaaaaaaaaaaaaaa

SEQ ID NO: 2020 - protein, 166 aa, Triticum aestivum
  misc_feature: Ceres CLONE ID no. 567862
  misc_feature: Ceres CDNA ID no. 40041257
  misc_feature (46)..(117): Pfam Name: RRM_1 PFAM Desc: RNA recognition motif.
  misc_feature: Homolog of GI Number: 34906972 NR Desc: putative glycine
  misc_feature: Homolog of GI Number: 21553749 NR Desc: glycine
  misc_feature: Homolog of GI Number: 77555842 NR Desc: RNA
  misc_feature: Homolog of GI Number: 829254 NR Desc: glycine
  misc_feature: Homolog of GI Number: 2267569 NR Desc: glycine
  misc_feature: Homolog of GI Number: 30682622 NR Desc: glycine
  misc_feature: Homolog of GI Number: 82623423 NR Desc: putative glycine
  misc_feature: Homolog of GI Number: 76160996 NR Desc: RNA binding protein
  misc_feature: Homolog of GI Number: 1778374 NR Desc: glycine
  misc_feature: Homolog of GI Number: 624925 NR Desc: RNA
MAALIKLGSLLRQSALASSASTGSAPALFNAARFMCAGQPAGGNKLFVGGLAWATDDHSLKEAFQSFGEVVEARVITDRETGRSRGFGFVSFANEADADSAAKGMDGQELAGRNVRVNFANERPSGGGGFSRGGGGYGGGGGFGGGGGYGGGGRGGGGYGGDREAF

SEQ ID NO: 2021 - DNA, 1131 bp, Triticum aestivum
  misc_feature: Ceres CLONE ID no. 567902
  misc_feature: Ceres CDNA ID no. 35383211
  CDS (118)..(741): REFERENCED BY SEQ ID NO: 2022
ctactgaataaacgccagaggcggcggcaccacgaaagcgaagccccctccccgtctacagtctctccacgcggggcacagatcaccactcgccgccgcacctccacgccggcggatatggagcgcgccggcgccgcgccgggggtccctgcggcaggggagggcgcggcggcggcggccgcagcgccgaccccggtggcaggggcaggggtggtgaaggggaggtcctgcaagggctgcctcttctactcgtcggtgctcaggtccaaagggcgcggccccgtctgcgtcggcgtcacccgcggcatcccccaagttcctgatcgtatggttggagaaattgagctgggagctatccaagaaggtcgcaacctttccaacttcaaatatgcatgtgctggatattccatatacctagatgacaaggatacctctacagtgaagggagagaagcatgcagagctccctatctgtgttggagttgagctattgacagacagagctccaactaaacaagctccagctcacgtaactaaacaagctccaggtcacatgaaaaaagaagctactcaagcacatggacacaaacctgcgctgacacaagccgatttcataaccaaatttcagaggaatgctggacttgtggccagtggtgtggtcaggaacatgaataaaattgggacttacgtcaaagacacggtggatgacatcctgtacccataccgcaagcgtcccaagtaaaacctagctcttgttctccttcaatcctggagtagaatagagaaaaatgtgggagcatgtaatctattacttccggagacactggcgcaggagtagcctcgcttggtttctgaggctgtggctgggatttcactgcctgtcagttcatgcctaacgctagcaggctgttgtatgcctgcctgttttggattcttgccatgttcctttggtagagcctctccgctccccagcttgcaatgcgatcttcattctgctggttcctccagcaatgtataggatgcaatgtaacaaagctataaaggagctcatcttttgcctatttgaggctatcctttggagaataataaattaataataggccgtcatttggctccaaaaaaaaaaaaaaaa

SEQ ID NO: 2022 - protein, 207 aa, Triticum aestivum
  misc_feature: Ceres CLONE ID no. 567902
  misc_feature: Ceres CDNA ID no. 35383211
  misc_feature: Useful for delaying flowering time
  misc_feature: Useful for making plants with altered leaf shape eg curled leaves
  misc_feature: Useful for making plants with increased biomass and foliage
  misc_feature: Useful for making plants with increased biomass and foliage
  misc_feature: Useful for making shorter plants
  misc_feature: Useful for making smaller plants
  misc_feature: Useful for sterility
MERAGAAPGVPAAGEGAAAAAAAPTPVAGAGVVKGRSCKGCLFYSSVLRSKGRGPVCVGVTRGIPQVPDRMVGEIELGAIQEGRNLSNFKYACAGYSIYLDDKDTSTVKGEKHAELPICVGVELLTDRAPTKQAPAHVTKQAPGHMKKEATQAHGHKPALTQADFITKFQRNAGLVASGVVRNMNKIGTYVKDTVDDILYPYRKRPK

SEQ ID NO: 2023 - DNA, 680 bp, Triticum aestivum
  misc_feature: Ceres CLONE ID no. 567999
  misc_feature: Ceres CDNA ID no. 36582716
  CDS (86)..(457): REFERENCED BY SEQ ID NO: 2024
aatcgaaaacactagggtttatctcctatcgccgcagcctccaccgaagccaagagaggagcagggcgaaaggaggccgtcggagatgtcggagaagaagcgcgcccccggcccgcgcaaggacgaggtggtgacccgcgagtacaccgtcaacctccacaagcgcctccatggatgcaccttcaagaagaaggcaccaaatgccatcaaggagatcaggaagtttgcacagaaggccatgggaaccaacgatgtccgcattgacgtgaagctcaacaagcacatctggagcagcggcatcaggagtgtccctaggagagtccgtgtcaggattgcccgcaagaggaacgacgaggaggatgctaaggaggagctgtactctctggtcacagttgctgaagccccccaggaaggtcttaaaggtttgggtaccaaggttgtggaggatgaggactaaaccccctgtctgtcgtatcgatcagttagaacttaatacatatctgctgagagcatattgggaagtcttgctttagcttattgttatctactgttcatgatgttccatgacttcttgatagaagatttaagacgttggatattttgttcaagtgcttgaagttttgacttgttgtttgactctggtcaaaaaaaaaaaaaaaaaaagaaaaaaaaaaaaaaaa

SEQ ID NO: 2024 - protein, 123 aa, Triticum aestivum
  misc_feature: Ceres CLONE ID no. 567999
  misc_feature: Ceres CDNA ID no. 36582716
  misc_feature (11)..(105): Pfam Name: Ribosomal_L31e PFAM Desc: Ribosomal protein L31e
  misc_feature: Homolog of GI Number: 54290930 NR Desc: putative 60S ribosomal protein L31
  misc_feature: Homolog of GI Number: 54111529 NR Desc: putative 60S ribosomal protein L31
  misc_feature: Homolog of GI Number: 50912155 NR Desc: putative 60S ribosomal protein L31
  misc_feature: Homolog of GI Number: 50947419 NR Desc: putative 60S ribosomal protein L31
  misc_feature: Homolog of GI Number: 915313 NR Desc: ribosomal protein L31
  misc_feature: Homolog of GI Number: 7229709 NR Desc: 80S ribosomal protein L31
  misc_feature: Homolog of GI Number: 56481165 NR Desc: 60S ribosomal protein L31a
  misc_feature: Homolog of GI Number: 14423899 NR Desc: 60S ribosomal protein L31
  misc_feature: Homolog of GI Number: 21553532 NR Desc: 60S ribosomal protein L31
  misc_feature: Homolog of GI Number: 21700813 NR Desc: AT5g56710/MIK19_16
MSEKKRAPGPRKDEVVTREYTVNLHKRLHGCTFKKKAPNAIKEIRKFAQKAMGTNDVRIDVKLNKHIWSSGIRSVPRRVRVRIARKRNDEEDAKEELYSLVTVAEAPQEGLKGLGTKVVEDED

SEQ ID NO: 2025 - DNA, 1332 bp, Triticum aestivum
  misc_feature: Ceres CLONE ID no. 568078
  misc_feature: Ceres CDNA ID no. 24766121
  CDS (144)..(1214): REFERENCED BY SEQ ID NO: 2026
ttttttcttgacgcccccaaaaccctagccgcttcttctctctgcccactccccgcgcgagccacagacggccgccgcctcacaccgctgagacctcctcctccccagtcaagcgcgagagtataccccagaataacaccaccatggccggcggcaagatccagaagaagcgacacggcggaggtggcggcggcggcggcgcgcggctgcagggcgggatcccgttcgagaagtccaagggccagcacatcctgcggaacccggcgctggtggactccatcatcgccaaggccggcctcaagccgaccgacaccgtcctcgagatcgggcccggaacgggaaatctcaccaagcggctgctcgaggccggcgtcaaggccgttgtcgccgtcgagctcgacccgcggatggttctcgagctgagccgccggttccaggggcaccccctctcctcacgcctcaaggttatccaaggagatgttcttaaatgtgatcttccgtacttcgatatctgcgtggcaaacatcccataccagatatcgtccccccttacattcaagcttctgtcacaccgtccgatcttcaggtgtgctgtgatcatgtttcaacgtgaatttgccatgagacttgtagcacagcctggagacactctgtactgccgtctgtcagtgaacgtgcagctcctatctcgcgtgtcacatctgctgaaggttgggcggaataacttcaggcctccacccaaggtagattcttcagttgttcgcatcgagccaaggaaacccctccctcctgtcagcttcaaagagtgggatggacttgtaaggatttgtttcaatcggaaaaacaaaactctgggctcccttttcaagcagaagcgcgtccttgagttgctagagaagaattacaagacaatgcaatctctccaacttgcccaagaatctgaaatgggcgaggagaagatgtcacctgatgatgttgcggtgctagccaatatggtcgaggacctgagcatggagatgagtgatgagaaagaggacgacgacatggaaatggatgatgctgacgtggcagatggccgtgctagcttcagagaaaagattatgggtatattgcagcagggtgattttgcagagaagaggtcttccaagctgagccaagttgatttcctctacttgctgtctctgttcaacaaagcaggtatacatttttcgtgagggcccgcttagtcagctagcttgagatggatcttgaaaagccatgtttattttttggtttatgttatgtaagtcctatataagttaaaagtcatctttgtgaaaaaaaaaaaaaaaa

SEQ ID NO: 2026 - protein, 356 aa, Triticum aestivum
  misc_feature: Ceres CLONE ID no. 568078
  misc_feature: Ceres CDNA ID no. 24766121
  misc_feature (25)..(237): Pfam Name: RrnaAD PFAM Desc: Ribosomal RNA adenine dimethylase
  misc_feature: Homolog of GI Number: 21280901 NR Desc: putative dimethyladenosine transferase
  misc_feature: Homolog of GI Number: 62642979 NR Desc:  similar to RIKEN cDNA 1500031M22
  misc_feature: Homolog of GI Number: 21313560 NR Desc: RIKEN cDNA 1500031M22
  misc_feature: Homolog of GI Number: 76646158 NR Desc:  similar to Probable dimethyladenosine transferase
  misc_feature: Homolog of GI Number: 72008162 NR Desc:  similar to dimethyladenosine transferase
  misc_feature: Homolog of GI Number: 7657198 NR Desc: putative dimethyladenosine transferase
  misc_feature: Homolog of GI Number: 57104886 NR Desc:  similar to Probable dimethyladenosine transferase
  misc_feature: Homolog of GI Number: 67463767 NR Desc: Chain B
  misc_feature: Homolog of GI Number: 50417873 NR Desc: Zgc:101122 protein
  misc_feature: Homolog of GI Number: 54638406 NR Desc: GA11224
MAGGKIQKKRHGGGGGGGGARLQGGIPFEKSKGQHILRNPALVDSIIAKAGLKPTDTVLEIGPGTGNLTKRLLEAGVKAVVAVELDPRMVLELSRRFQGHPLSSRLKVIQGDVLKCDLPYFDICVANIPYQISSPLTFKLLSHRPIFRCAVIMFQREFAMRLVAQPGDTLYCRLSVNVQLLSRVSHLLKVGRNNFRPPPKVDSSVVRIEPRKPLPPVSFKEWDGLVRICFNRKNKTLGSLFKQKRVLELLEKNYKTMQSLQLAQESEMGEEKMSPDDVAVLANMVEDLSMEMSDEKEDDDMEMDDADVADGRASFREKIMGILQQGDFAEKRSSKLSQVDFLYLLSLFNKAGIHFS

SEQ ID NO: 2027 - DNA, 1222 bp, Triticum aestivum
  misc_feature: Ceres CLONE ID no. 568244
  misc_feature: Ceres CDNA ID no. 25445999
  CDS (49)..(1005): REFERENCED BY SEQ ID NO: 2028
aaaaaaaaaacaaaaaggcgcggcgtaaccatcactcctccttccccgatggaggcagcagcagcagcagcctcgccacgcccgcgcgccactggctgcctcaccgcctccaccgcaggcccgcagcgcgcgagccgctggtgccctcgccaaccgcgcaccgcctcttcctcatcctcctcctcttcaagcggcggaagcccagcggatctagggttgctccgcccgcgcctccgcctctcgccctcctccccggggaggatagcaggcggggcgccgccggtccgagcccgggacccccgcgccgaatgcgcgggcggccggtccagtgcggagcacatcggggtcagcctagaaggcgagaacagagttttggagatgtcgtcaactgtgcccaagtcatcaaatatcttctggcatgattgcccagtgggcaagactgaccggcaaaatctactgaagcagaaagggtgtgttgtttggattacaggccttagtggttcaggtaaaagtaccttggcatgcacattaggtcgagagctccatacaagagggaagcttgcgtatgttcttgatggcgataacttaagacatggtcttaacaaggatcttggcttcgcagctgaagatcgtgctgaaaatatacgcagagttggtgaagttgcaaagctatttgcagatgcaggtctagtgtgcattgctagttttatatctccgtataggagagaccgagagtcttgtcgtgcactgttgtcagacggtagttttattgaagttttcttgaacatgtccttggaattgtgtgaagcaagggatccgaagggcctttataagcttgctcgtgcaggaaaaataaaggggtttactggtattgatgacccatatgaagcgccattaaattgcgagattgagataaaggaagtggatggcgtgtgcccttcgccatccgacatggcggcacaagtgattgcttatctcgaggacaaaggctttctgcacgagtagaccgtgacggaagccatgagcctgttgtcatgctagagggtatttccaccagattagcggcgcggcaggataagtcaagcgctggctgtttttattttattttctgtgcttgttcagattggttgtgtgcgttgatctgtctactcgtagtttctgtgtttgttaacttctgttagctgcggcaggaaaatgtagtgtgtgaaaaaaaaaaaaaaaa

SEQ ID NO: 2028 - protein, 208 aa, Triticum aestivum
  misc_feature: Ceres CLONE ID no. 568244
  misc_feature: Ceres CDNA ID no. 25445999
  misc_feature (30)..(185): Pfam Name: APS_kinase PFAM Desc: Adenylylsulphate kinase
  misc_feature: Homolog of GI Number: 50938537 NR Desc: putative adenosine
  misc_feature: Homolog of GI Number: 6563285 NR Desc: adenosine
  misc_feature: Homolog of GI Number: 6006852 NR Desc: putative adenylylsulfate kinase
  misc_feature: Homolog of GI Number: 77552100 NR Desc: adenylylsulfate kinase
  misc_feature: Homolog of GI Number: 2832300 NR Desc: adenosine
  misc_feature: Homolog of GI Number: 22135773 NR Desc: At2g14750/F26C24.11
  misc_feature: Homolog of GI Number: 21553403 NR Desc: putative adenosine phosphosulfate kinase
  misc_feature: Homolog of GI Number: 9757873 NR Desc: adenylylsulfate kinase
  misc_feature: Homolog of GI Number: 20453397 NR Desc: AT4g39940/T5J17_110
  misc_feature: Homolog of GI Number: 28827764 NR Desc: putative adenylylsulfate kinase
  misc_feature: Useful for increasing chlorophyll and photosynthetic capacity
  misc_feature: Useful for making plants with increased biomass and foliage
  misc_feature: Useful for making plants with increased biomass and foliage
  misc_feature: Utility: Heat Useful for making plants with enhanced tolerance to heat
MSSTVPKSSNIFWHDCPVGKTDRQNLLKQKGCVVWITGLSGSGKSTLACTLGRELHTRGKLAYVLDGDNLRHGLNKDLGFAAEDRAENIRRVGEVAKLFADAGLVCIASFISPYRRDRESCRALLSDGSFIEVFLNMSLELCEARDPKGLYKLARAGKIKGFTGIDDPYEAPLNCEIEIKEVDGVCPSPSDMAAQVIAYLEDKGFLHE

SEQ ID NO: 2029 - DNA, 1426 bp, Triticum aestivum
  misc_feature: Ceres CLONE ID no. 568285
  misc_feature: Ceres CDNA ID no. 25445791
  CDS (54)..(1268): REFERENCED BY SEQ ID NO: 2030
ctctctccccgcagccgccgcaccccagcccctaccccgcagccgccgccgccatggccaccaccgcgcgcccgctcgtctccgtcaaggccctggacggggacatggccaccgacgcggccggcgtcccgatgccgcacgtcatgaaggcgccgatccgccccgacgtcattaccttcgtccacaggctcgtctcctgcaacagccgccagccctacgccgtctcccgcaaggccggtcaccagacctcggccgagtcctggggcacgggtcgcgccgtctcgcgtatcccgcgtgtcggcggcggcggtacccaccgcgccgggcagggagccttcggcaacatgtgccgtggcggacgcatgttcgcgcccacccggatctggcgcaagtggcaccgtcgcgtcaacgtccgcctccgccgcgtcgccgtcgcctccgccctcgccgccaccgccgtcccggctatcgtcaccgcccgcggccaccgcatcgagtccgtccccgagttcccgctcgtcgtctccgactcggccgagggcatcgagaagacctcccaggccatcaaggtcctcaagcagctgggcgcctacgctgatgccgagaaggccaaggactccgtcggcatccgccccggcaagggtaagatgcgcaaccgcaggtacatcaaccgtaagggccccctcatcgtctacggcaccgagggctccaagatcgtcaaggctttccgcaacctccctggtgtggatgttgccaacgtcgagcgcctcaacctgctcgaccttgcccctggtggccaccttggccggttcgttatctggactgagtctgccttcaagaagctggacgaggtgtacggctcctttgaggcgtcttcctccaagaagaagggcttcgtgctcccaaggcctaagatgaccaatgctgaccttggccgcctcatcaactctgatgaggtccagtccgtggtgaagcccatcaacaaggaggtgaagcgcagggaggccaggaagaaccctctgaagaatgctgctgccgtgcttaagctcaacccctacttcggaactgcccgcaggatggcagttcttgctgaggcagcccgtgtcaaggccaggaaggagaagatcaactccaagaggaccaagctcagtgcggaggaggcatctaagatcaaggctgctgggaaggcctggtaccaaacgatgatctctgacagcgactacacggagttcgacgtcttctccaagtggcttggcgtcagccagtgatcatctcgttgtagtagcagtttatcgtccctaaagtatgattttgtcattaccgtgtcatgtaatcgattatcccgagtctgagacatcgaatgctgttttgctagctgtttatctggagtgttttatctgtggacgcaataaaaaaaaaaaaaaaa

SEQ ID NO: 2030 - protein, 404 aa, Triticum aestivum
  misc_feature: Ceres CLONE ID no. 568285
  misc_feature: Ceres CDNA ID no. 25445791
  misc_feature: The plant is abnormally small.
  misc_feature: Useful for making plants with modulated biomass
  misc_feature (23)..(267): Pfam Name: Ribosomal_L4 PFAM Desc: Ribosomal protein L4/L1 family
  misc_feature: Homolog of GI Number: 4887131 NR Desc: 60S ribosomal protein L1
  misc_feature: Homolog of GI Number: 21593543 NR Desc: 60S ribosomal protein L4
  misc_feature: Homolog of GI Number: 22530964 NR Desc: 60S ribosomal protein
  misc_feature: Homolog of GI Number: 30725664 NR Desc: At3g09630
  misc_feature: Homolog of GI Number: 51978958 NR Desc: PREDICTED OJ1014_E09.28 gene product
  misc_feature: Homolog of GI Number: 34897236 NR Desc: putative 60S ribosomal protein L1
  misc_feature: Homolog of GI Number: 26450328 NR Desc: putative 60S ribosomal protein
  misc_feature: Homolog of GI Number: 79313167 NR Desc: structural constituent of ribosome
  misc_feature: Homolog of GI Number: 22137186 NR Desc: AT5g02870/F9G14_180
MATTARPLVSVKALDGDMATDAAGVPMPHVMKAPIRPDVITFVHRLVSCNSRQPYAVSRKAGHQTSAESWGTGRAVSRIPRVGGGGTHRAGQGAFGNMCRGGRMFAPTRIWRKWHRRVNVRLRRVAVASALAATAVPAIVTARGHRIESVPEFPLVVSDSAEGIEKTSQAIKVLKQLGAYADAEKAKDSVGIRPGKGKMRNRRYINRKGPLIVYGTEGSKIVKAFRNLPGVDVANVERLNLLDLAPGGHLGRFVIWTESAFKKLDEVYGSFEASSSKKKGFVLPRPKMTNADLGRLINSDEVQSVVKPINKEVKRREARKNPLKNAAAVLKLNPYFGTARRMAVLAEAARVKARKEKINSKRTKLSAEEASKIKAAGKAWYQTMISDSDYTEFDVFSKWLGVSQ

SEQ ID NO: 2031 - DNA, 996 bp, Triticum aestivum
  misc_feature: Ceres CLONE ID no. 568390
  misc_feature: Ceres CDNA ID no. 40351076
  CDS (282)..(686): REFERENCED BY SEQ ID NO: 2032
cccgattacttcagccgccggccgccgccactgccgccagcctcggccagagcttctccgtcccctacccctacagaccgcgatctcgtcctgaaccaccggccgcgactgctgctccgcttgctctcccccgtcggagatccgcccggagcgactttcgtctttctgggtagtgccgacgctacagaaagcccaaacccggaaacagagaagacgacgccacatctacatttgcactcccacgcttaaagccggaggcggcgtaggaagcagcgatagccatggcgtcgtcgttggcaacggcaccggctgctgtacgtgaaatgcagagcgaccttgagtcccaggccaacgccctcagcaagatccagaaagacatctccaagaaccacgaggtccgcaagcagttcaccatccaggtcggcgagaatgaactcgtcctcaaggagctggagctgctgaatgaaggggcaaacgtgtacaagctgattgggccagtgttggtcaagcaggacaatgcagaggcgaaggccaacatcaagaagcgcatcgagtacatcacggctgagctagagagaatggatcgggcgctcaaggacttggaggagaaacagaatagcaagaaggaatcgataatcaagctgcaacagaagatgcaggctgtacaagcgaaggctcaggcgtaaatgaagggttccctgcattagggcctttgtcctcccaaatgttgggtcgtgttatctatcccctaaaaaggtgaaagaaatctgtagtgttcagagattgagagaagttcaaggtttgtgtagtgagagattttgtttgggagtggatacttggttgaagatgtacctcttgctggtttctagtaatatgcttgaaatgacttttattttgagaaggaattggatcaatcttttcatgtaccattttatttcttctatctttgcttatgttgattaatagattcatttttagcgaaaaaaaaaaaaaaaa

SEQ ID NO: 2032 - protein, 134 aa, Triticum aestivum
  misc_feature: Ceres CLONE ID no. 568390
  misc_feature: Ceres CDNA ID no. 40351076
  misc_feature (20)..(125): Pfam Name: KE2 PFAM Desc: KE2 family protein
MASSLATAPAAVREMQSDLESQANALSKIQKDISKNHEVRKQFTIQVGENELVLKELELLNEGANVYKLIGPVLVKQDNAEAKANIKKRIEYITAELERMDRALKDLEEKQNSKKESIIKLQQKMQAVQAKAQA

SEQ ID NO: 2033 - DNA, 525 bp, Triticum aestivum
  misc_feature: Ceres CLONE ID no. 568484
  misc_feature: Ceres CDNA ID no. 36582698
  CDS (3)..(443): REFERENCED BY SEQ ID NO: 2034
actcaagccagcaagcaagaagcacacaggaagctcctagccaacaccaatcaaagcctccatccaatcccaagcaacctcgaggatgtcttgctgcggaggaaactgcggctgcggcagcgcctgcaagtgcggcaacggctgcggcggctgcaacatgtacccggaggttgaggccgccggcgccaccctcctcgtctccgccaccgccacccacaaggcgagctcgggcgggatggagatggcggcggagaacggcggctgcggctgcacccagtgcaagtgcggcaccagctgcggctgctcctgctgcagctgctagatctatcatcggtcatgcatgcaccgcgcgcatcatatctatgatctatctacaatctacttaccatgtaacgccacctgatcgagggtctttgtatgtatgtaagcacctgccagcatgagcagagcaggtgcactgccatgcatgtaaaccgacccctaaataaaatctcccgtggtttaaccagaaaaaaaaaaaaaaaa

SEQ ID NO: 2034 - protein, 78 aa, Triticum aestivum
  misc_feature: Ceres CLONE ID no. 568484
  misc_feature: Ceres CDNA ID no. 36582698
  misc_feature (1)..(78): Pfam Name: Metallothio_2 PFAM Desc: Metallothionein
  misc_feature: Homolog of GI Number: 23954355 NR Desc: metallothioneine type2
  misc_feature: Homolog of GI Number: 52353641 NR Desc: putative type
  misc_feature: Homolog of GI Number: 53148401 NR Desc: metallothionein
  misc_feature: Homolog of GI Number: 2407285 NR Desc: metallothionein
  misc_feature: Homolog of GI Number: 53748911 NR Desc: metallothionein
  misc_feature: Homolog of GI Number: 13516859 NR Desc: metallothionein
  misc_feature: Homolog of GI Number: 53748919 NR Desc: metallothionein
  misc_feature: Homolog of GI Number: 53748899 NR Desc: metallothionein
  misc_feature: Homolog of GI Number: 234815 NR Desc: B22EL8
  misc_feature: Homolog of GI Number: 32400768 NR Desc: metallothionein
MSCCGGNCGCGSACKCGNGCGGCNMYPEVEAAGATLLVSATATHKASSGGMEMAAENGGCGCTQCKCGTSCGCSCCSC

SEQ ID NO: 2035 - DNA, 1992 bp, Triticum aestivum
  misc_feature: Ceres CLONE ID no. 568563
  misc_feature: Ceres CDNA ID no. 24727373
  CDS (129)..(1598): REFERENCED BY SEQ ID NO: 2036
ctctcgtagtcgcgtatctccacctccactacaccacaccatcagaagcccggccggcacggtcggtgcaaggatagctgcagacacacgcccacacagacacggtgtgacagcaattgccaccggcgatgtccgtttcttggccggcgccgtcgacgtgcgcggccgccggggccctgctggccgccgcatggctgctgtgcttcaggctgctcccggccgcggccaggccgagaaggcgggcgatgaagacagaggcgcagctccctcccggcagcttcgggtggccggtcgtcggcgagacgctggacttcgtctcctgcgcctactccccgcgccccgaggcgttcgtggacaagcgccgcctccggtacggcggcgcggtgttccggtcgcacctgttcgggtcggcgacggtggtgacggcggacgcggaggtgaaccggttcgtgctgcagagcgacgcgcggtcgttcgtgccgtggtacccgcggtcgctgacggagctcatgggcaagtcctccatcctgctcatcaacggcagcctgcagcgccgcgtccacggcctcgtcggcgccttcttcaagtcgccgcagctcaaggcgcaggtcaccgccgacatgcagcgccgcctcgcccccgcgctcgcctcctggcgccaccagggccccggcgcccgcctccgcatccaggaccacgccaagacgatagtgttcccgatcctggtgcggggtctgatcgggctggaggcaggcccagagatgcagcagctcaagcagcaattccaggaatttattgtcggactcatgtcccttcccattaagctgccagggactaggctctacagatccctccaggccaagaagaggatggccagggtgatacagaggatcatacaggagaagaggaggaggagggccctcgacggcggcggcgggccgagggacgccatcgacgtgctcatgggcgacggcagcgaggagctcaccgacgagctcatatccgacaacatgatcgacttcatgatccccgccgaggactccgtgccagtgctcatcacgctcgccgtcaagttcctcagcgagtgccccctcgccctgcagcagctcgaggaggagaacatggagctcaagatgaggaaaaccgacctgggtgaaaccttgcaatggactgactacatgtccttgtcattcacgcagcatgtgataacggagacgctgcggatcgggaacatcatcagcgggatcatgcgcaaggcggtccgcgacgtcgaggtgaaggggcatctcatccccaaaggatggcgcgtgttcatgtacttccggtcggtccacctcgacgacatgctctacgaggatccctgcaagttcaatccatggaggtggaaggagaaggacatgagcactagcagcttcaccccttttggcggtgggcagaggctgtgcccgggcctggatctggccaggctggaagcttccatctttctccaccacttggtcaccagcttcaggtgggtggccgaggaggaccacatcgtcaacttccccaccgtgcgcctcaagggaggcatgcccatcagggtcaccgccaaagactagctgcctgtcaatcagacggtcgtccttgatcaactccccgcagcagccaagccagccatgcatatacatgatgctgctgctgcaagtatggtatcttccatagcaaggttgaaaggatccttaaaacaagctagctaggcaacatctgatctgagagtacatagttatgggcatgcatgtataagtgttgtagggaagggttaattagccatggagtaggtgccactcatcaccgtggctcgttaatcatagccgaggaagaagactctgaccgatgatgcatgctgttatactagtataagtagtatagtgcttatgtcacaaggaatagatatctcatccctgtacatggaagaactttgccatctggtctgctccaaaaaaaaaaaaaaaa

SEQ ID NO: 2036 - protein, 489 aa, Triticum aestivum
  misc_feature: Ceres CLONE ID no. 568563
  misc_feature: Ceres CDNA ID no. 24727373
  misc_feature (47)..(117): Pfam Name: p450 PFAM Desc: Cytochrome P450
  misc_feature: Homolog of GI Number: 9294019 NR Desc: cytochrome P450
  misc_feature: Homolog of GI Number: 34903584 NR Desc: cytochrome P450
  misc_feature: Homolog of GI Number: 48475241 NR Desc: putative cytochrome P450
  misc_feature: Homolog of GI Number: 13878393 NR Desc: Cytochrome P450 90C1
  misc_feature: Homolog of GI Number: 18419825 NR Desc: cytochrome P450 90C1
  misc_feature: Homolog of GI Number: 4006922 NR Desc: cytochrome P450 like protein
  misc_feature: Homolog of GI Number: 45260636 NR Desc: cytochrome P450
  misc_feature: Homolog of GI Number: 21593119 NR Desc: cytochrome P450 90A1
  misc_feature: Homolog of GI Number: 60677683 NR Desc: cytochrome P450
  misc_feature: Homolog of GI Number: 60677685 NR Desc: cytochrome P450
  misc_feature: Useful for delaying flowering time
  misc_feature: Useful for increasing chlorophyll and photosynthetic capacity
  misc_feature: Useful for making larger plants
  misc_feature: Useful for making lethal plants for genetic confinement systems
  misc_feature: Useful for making ornamental plants with modified leaves
  misc_feature: Useful for making plants that grow better in shade
  misc_feature: Useful for making plants with altered leaf shape eg curled leaves
  misc_feature: Useful for making plants with increased biomass and foliage
  misc_feature: Useful for making plants with increased biomass and foliage
  misc_feature: Useful for making plants with increased biomass and foliage
MSVSWPAPSTCAAAGALLAAAWLLCFRLLPAAARPRRRAMKTEAQLPPGSFGWPVVGETLDFVSCAYSPRPEAFVDKRRLRYGGAVFRSHLFGSATVVTADAEVNRFVLQSDARSFVPWYPRSLTELMGKSSILLINGSLQRRVHGLVGAFFKSPQLKAQVTADMQRRLAPALASWRHQGPGARLRIQDHAKTIVFPILVRGLIGLEAGPEMQQLKQQFQEFIVGLMSLPIKLPGTRLYRSLQAKKRMARVIQRIIQEKRRRRALDGGGGPRDAIDVLMGDGSEELTDELISDNMIDFMIPAEDSVPVLITLAVKFLSECPLALQQLEEENMELKMRKTDLGETLQWTDYMSLSFTQHVITETLRIGNIISGIMRKAVRDVEVKGHLIPKGWRVFMYFRSVHLDDMLYEDPCKFNPWRWKEKDMSTSSFTPFGGGQRLCPGLDLARLEASIFLHHLVTSFRWVAEEDHIVNFPTVRLKGGMPIRVTAKD

SEQ ID NO: 2037 - DNA, 593 bp, Triticum aestivum
  misc_feature: Ceres CLONE ID no. 568741
  misc_feature: Ceres CDNA ID no. 40351077
  CDS (82)..(342): REFERENCED BY SEQ ID NO: 2038
agtgtagggacatcgtgactgaccaccggagagagagaagaagaggctgccaaggtcgacgacggagaagaagaagaggcgatggcgtccgggtggggcatcaacgggaacaaggggcggtgctacgacttctggctggacttcagctcgtgcatgagccgctgccgccagccctccgattgcggcctcctccgcgaggactacctcgagtgcctccaccactccaaggagttccagcgcaggaacaggatctacaaggaggagcaacgtcagataagagctgctgctcgcaaggccaaggaggaagccgaaggagctcctgctgttgcagctcaccactagcatccgtttttatttgctgcaagtgcttccatgttcggctatgagcaaggcaataatttcctaaacattctaccctcccactccatgacttgttctaaaatcatgagttcgataaacaaccttggtcaacaagtttgtgcatgtttgagatattaagcgataataaacgcttgattcaaccatgaaacatgatgtttgtgcatgtttgcataccttgtagcaatttcatggcattaaaaaaaaaaaaaaaa

SEQ ID NO: 2038 - protein, 86 aa, Triticum aestivum
  misc_feature: Ceres CLONE ID no. 568741
  misc_feature: Ceres CDNA ID no. 40351077
MASGWGINGNKGRCYDFWLDFSSCMSRCRQPSDCGLLREDYLECLHHSKEFQRRNRIYKEEQRQIRAAARKAKEEAEGAPAVAAHH

SEQ ID NO: 2039 - DNA, 909 bp, Triticum aestivum
  misc_feature: Ceres CLONE ID no. 568791
  misc_feature: Ceres CDNA ID no. 40351078
  CDS (58)..(693): REFERENCED BY SEQ ID NO: 2040
aaaaccctagcgccacaaccagacggcaggtaagggaggaggagagcggcggcgaagatggtgtcgctgaagctgcagaagcgcctggcctcgagcgtcctcaagtgcggcaagggcaaggtctggctcgaccccaatgaggtcaacgagatctccatggccaactcccggcagaacatccggaagctggtaaaggatggtttcatcatcaggaagcctcagaagatccactccaggtctcgtgcaaggagggcacatgaggccaagcagaagggccgtcactctggatatggtaagcgtaggggtaccagggaggctaggctccccaccaagatcctgtggatgcggaggatgcgcgtcctgaggcgccttctgcgcaagtaccgtgaggccaagaagatcgacaagcacatgtaccatgacatgtacctgaaggtcaagggtaacatgttcaagaacaagagggtcctcatggagagtatccacaagtccaaggctgagaaggcaagagagaagaccctctctgatcagtttgaggccaagcgcgccaagagcaaggcaagcagggagaggaagcatgccaggagggaggagagattggctcagggccccagagatcatgcaccagcaccagcggctgcagctccagctccagcagcagcggcaccaaagaaggccaaggccaagaagtgaaggtctgacatgaagctttagctttctggtatcatgaagggttagcctgattttggagcatctgaagttcagaactgttttctgtgcaatatctgtgtgccgcgtatgagataccttaaatatcatatcgtgtttgttctgttggatgttgcttatgcagagtttctttaaacatttcggttcaccgaacctagttttacaaaaaaaaaaaaaaaa

SEQ ID NO: 2040 - protein, 211 aa, Triticum aestivum
  misc_feature: Ceres CLONE ID no. 568791
  misc_feature: Ceres CDNA ID no. 40351078
  misc_feature (2)..(149): Pfam Name: Ribosomal_L19e PFAM Desc: Ribosomal protein L19e
MVSLKLQKRLASSVLKCGKGKVWLDPNEVNEISMANSRQNIRKLVKDGFIIRKPQKIHSRSRARRAHEAKQKGRHSGYGKRRGTREARLPTKILWMRRMRVLRRLLRKYREAKKIDKHMYHDMYLKVKGNMFKNKRVLMESIHKSKAEKAREKTLSDQFEAKRAKSKASRERKHARREERLAQGPRDHAPAPAAAAPAPAAAAPKKAKAKK

SEQ ID NO: 2041 - DNA, 1705 bp, Triticum aestivum
  misc_feature: Ceres CLONE ID no. 568804
  misc_feature: Ceres CDNA ID no. 25445629
  CDS (96)..(1520): REFERENCED BY SEQ ID NO: 2042
aaaccctagctcgttccccttctagccttaaaccttcttcccccatctcacgaaaaagggcaacatctaagcggcggcggcggcgggcggtgaccatggcggagctgaagcggctgtcggagagccgcgacctaacccgcatcgagcggataggtgcgcactcccacatccgggggctggggctggactcctccatcgaggcccgcgatgcctcggaggggatggtcggccagctccccgcgcgccgcgccgctggactcatcctccagctcatccgccaggggaagatcgccggccgcgccgtcctcctcgcagggcagccggggaccggcaagaccgccctcgccatgggcatcgccaagtcgctcggcgccgagacgcccttcgcctccgtcgctgcctccgagctcttctccctcgacctctccaagaccgaggcgctcacccaggcgttccgccgcgccattggcgttcgcatcaaggaggaagcggagatcattgagggcgaggtcgttgagatctcaatcgaccgccctgtctccgccagtagctcgggcataccttcaggtgctaccgcggccggcaagactggaaggctcactttgaagaccacggacatggagacggtgtacgagctgggtgggaagatgattgaggccctggggaaggagaaggtacagagcggggatgtgattgcgctcgacaaggcctccgggaaggttactaagcttggccgctccatcgggaggtcacgggattatgatgccgttggtgcccacaccaagtttgtgaagtgccctgaaggagagctccagaagcgcaaggaggttatgcactgcgttaccttacatgagattgatgtcatcaatagcaggacacaaggcttccttgcacttttcactggtgacaccggtgagattcgtgcagaggttagggagcagatcgacacaaaagttgccgagtggagagaggaagggaaggctgagattgtccctggcgttctgtttattgatgaagtccacatgctagacattgaatgcttctccttcctgaaccgtgctttggagaatgacatggctccgatcctcgttattgcaacgaatcgaggcatcacaaccatacgcgggaccaactaccggtcaccacatggtataccgtcggatttcctcgaccgcctcttgatcatcacaacacaaccatacacggcggaggagatccggaagatcttagacatcaggtgtgaggaagaagacgttgaaatgtctgctgagggcaaggatctgctcacaaagattggcaccgagacctccctcaggtacgcgatccagctgatcacttcggccggcttggcttgccagaagcgcaagggcaaggtggtggagatggaggacataagccgggtgtaccacctgtttctggacgtgaagagatcgacgcagttcttgatcgacagccagagcgactacatgttcagtgaagtgcaaggggattcagatggggatgacgccatgcagtcctagacggagaattttgcaatgtaactggggttggcttgatggttcgtgtatcttggatacttgttgctcgtttagattagttaagcgtgagaagttgttacctgacaagcacacttgatgggtgcagtgagctatgttaacggctgtaaccggtgacttcacaattgagtgtaaaaaaaaaaaaaaaa

SEQ ID NO: 2042 - protein, 474 aa, Triticum aestivum
  misc_feature: Ceres CLONE ID no. 568804
  misc_feature: Ceres CDNA ID no. 25445629
  misc_feature (300)..(422): Pfam Name: AAA PFAM Desc: ATPase family associated with various cellular activities
  misc_feature (70)..(94): Pfam Name: AAA_3 PFAM Desc: ATPase family associated with various cellular activities
  misc_feature: Homolog of GI Number: 22136550 NR Desc: AT5g67630/K9I9_20
  misc_feature: Homolog of GI Number: 23480914 NR Desc: Arabidopsis thaliana At5g67630/K9I9_20
  misc_feature: Homolog of GI Number: 65303275 NR Desc: DNA helicase
  misc_feature: Homolog of GI Number: 55649683 NR Desc:  RuvB
  misc_feature: Homolog of GI Number: 6723428 NR Desc: RuvB DNA helicase
  misc_feature: Homolog of GI Number: 30316328 NR Desc: RuvB
  misc_feature: Homolog of GI Number: 5730023 NR Desc: RuvB
  misc_feature: Homolog of GI Number: 60652923 NR Desc: RuvB
  misc_feature: Homolog of GI Number: 27819634 NR Desc: RuvB
  misc_feature: Homolog of GI Number: 29126859 NR Desc: Ruvbl2
MAELKRLSESRDLTRIERIGAHSHIRGLGLDSSIEARDASEGMVGQLPARRAAGLILQLIRQGKIAGRAVLLAGQPGTGKTALAMGIAKSLGAETPFASVAASELFSLDLSKTEALTQAFRRAIGVRIKEEAEIIEGEVVEISIDRPVSASSSGIPSGATAAGKTGRLTLKTTDMETVYELGGKMIEALGKEKVQSGDVIALDKASGKVTKLGRSIGRSRDYDAVGAHTKFVKCPEGELQKRKEVMHCVTLHEIDVINSRTQGFLALFTGDTGEIRAEVREQIDTKVAEWREEGKAEIVPGVLFIDEVHMLDIECFSFLNRALENDMAPILVIATNRGITTIRGTNYRSPHGIPSDFLDRLLIITTQPYTAEEIRKILDIRCEEEDVEMSAEGKDLLTKIGTETSLRYAIQLITSAGLACQKRKGKVVEMEDISRVYHLFLDVKRSTQFLIDSQSDYMFSEVQGDSDGDDAMQS

SEQ ID NO: 2043 - DNA, 533 bp, Triticum aestivum
  misc_feature: Ceres CLONE ID no. 569003
  misc_feature: Ceres CDNA ID no. 25445921
  CDS (1)..(285): REFERENCED BY SEQ ID NO: 2044
actcatcacccacacagcgtgcacaacacaaacacaaacacagatcgatcgagatccagagcaaccaggagcaatggcgggcgagaaggcgcggcagctgcgggcgcggatggtggagacggagagcttccacgatgccatgtaccactccgccatcgcctcccgcctcgcgcgctccacctagctaggccgccggacagaccgccagccaacccgccgacactagcagacaagttgatgtgcctgtgtgtcctttctgctataattgttgttgtcatgtgttaaagtttagaggagagaggtcggaaatgagatctagttttagggttgatccattccctccgtctccggccaccgcgacgctcgccggcctgcttgttttaccggcgcagatgtttcaatctgattccccgcatttgtagtaacattagggatctgcatttaacatgctgtcccagatctgtgatacttgtgctggtggctcttttggttctgaacaccgattaattctggatctaaaaaaaaaaaaaaaa

SEQ ID NO: 2044 - protein, 36 aa, Triticum aestivum
  misc_feature: Ceres CLONE ID no. 569003
  misc_feature: Ceres CDNA ID no. 25445921
MAGEKARQLRARMVETESFHDAMYHSAIASRLARST

SEQ ID NO: 2045 - DNA, 1429 bp, Triticum aestivum
  misc_feature: Ceres CLONE ID no. 569227
  misc_feature: Ceres CDNA ID no. 35383212
  CDS (45)..(1181): REFERENCED BY SEQ ID NO: 2046
atcgaataattaatcccgaggcgtcttgaaaaatatatcccaggatggcgatgtcgacggcgacgcggatgctggcgcgccgcgccgcccccgccctcctccgctccgccgccagccccggcctcctccgctcccccgccgccggcacaggccccagccccgccctcgcgctgccggcgctgctgcaggcgcaaggccggtggtaccgcgcatcaggaggggacccgtcaccgtcgttctacgagccgccgccgaccccggccaacctgggcctgagcatcgtcccggagaagaaggcgttcgtggtggagcgctttggcaagtacctcaagacactgtcgtcggggatccacctcctgatgcccggcgtggaccgcatcgcctacgtgcactcgctcaaggaggaggcaatccccatcccggacaactcggcaatcacaaaggacaacgtctcgatacagatcggaggagtgctatacgtcaagatcgtcgacccctacaaggcctcgtacggcgtggagaaccccatctatgctgtcatccagcttgcgcagacaaccatgaggagtgaacttggcaagattaccctcgacaagacctttgaggagagggacacgctcaacaccaacattgtgaagtcaatcaatgaggcagcagaaacttggggtttgaagtgtcttcgctacgaaatcagggacatcactcctccagatggagtcaagaaggccatggagatgcaggcagcagcagagcgcaagaaacgtgctcagatcctcgagtctgaaggtgctatgatggagaatgcaaacaaagcaaagggtgaagctgaagcgattcttgccaggtcacaggccactgctgaagggatcaggatggtctcggagtcgtttaaaactgaaggcagcacagaggctgccagcttgaggattgctgaacagtacatcagagcattcagtgaactggctagaaatacgaacacgatgcttcttcccagcgacgcaggcaacccggggacaatgattgctcaggccctccagatatacaaccacacgtacaagcagaaactgaccctgggaagccccagccccagccagcggggggcggtggcggcagaagaggctgatttgcccctcgggatgccatccatgagcgacctcggggcctttccgcacaagaagtaaagtagtgagtgtggaatcttgttgatgaggccctttttttttcttcttcttttctgttagggaggaatgaatagctagactggatagatagattggtagggaggcagcgcaactttgtcatgagtgaagatttactgattaggtcggtcgtttggtcggataaaacacaatactctgttggttagggacagctttgagagcaagctttttgtctgtctaaaaaaaaaaaaagaaaaaaaaaaaaaaaa

SEQ ID NO: 2046 - protein, 378 aa, Triticum aestivum
  misc_feature: Ceres CLONE ID no. 569227
  misc_feature: Ceres CDNA ID no. 35383212
  misc_feature (77)..(250): Pfam Name: Band_7 PFAM Desc: SPFH domain / Band 7 family
  misc_feature: Homolog of GI Number: 50941331 NR Desc: putative Band 7 protein
  misc_feature: Homolog of GI Number: 7716464 NR Desc: stomatin
  misc_feature: Homolog of GI Number: 51340090 NR Desc: stomatin
  misc_feature: Homolog of GI Number: 21554125 NR Desc: stomatin
  misc_feature: Homolog of GI Number: 23491123 NR Desc: SPFH domain / Band 7 family
  misc_feature: Homolog of GI Number: 55633149 NR Desc:  similar to stomatin
  misc_feature: Homolog of GI Number: 61824637 NR Desc:  similar to stomatin
  misc_feature: Homolog of GI Number: 42526219 NR Desc: SPFH domain/Band 7 family protein
  misc_feature: Homolog of GI Number: 71750844 NR Desc: stomatin
MAMSTATRMLARRAAPALLRSAASPGLLRSPAAGTGPSPALALPALLQAQGRWYRASGGDPSPSFYEPPPTPANLGLSIVPEKKAFVVERFGKYLKTLSSGIHLLMPGVDRIAYVHSLKEEAIPIPDNSAITKDNVSIQIGGVLYVKIVDPYKASYGVENPIYAVIQLAQTTMRSELGKITLDKTFEERDTLNTNIVKSINEAAETWGLKCLRYEIRDITPPDGVKKAMEMQAAAERKKRAQILESEGAMMENANKAKGEAEAILARSQATAEGIRMVSESFKTEGSTEAASLRIAEQYIRAFSELARNTNTMLLPSDAGNPGTMIAQALQIYNHTYKQKLTLGSPSPSQRGAVAAEEADLPLGMPSMSDLGAFPHKK

SEQ ID NO: 2047 - DNA, 1049 bp, Triticum aestivum
  misc_feature: Ceres CLONE ID no. 569327
  misc_feature: Ceres CDNA ID no. 35383213
  CDS (126)..(833): REFERENCED BY SEQ ID NO: 2048
aacccaatatacacggagaagagatcgtcatcatccgccaaaccagatcggctcggctgcttcctcttcttcaacttcgcagaatcgctggtcttctcgtcctctagttaagtccctcgacagcaatgggaggaggcaacgacggtcatgggtacccacccggtggccaggggggataccctccgcaagggtacccgccgcagcagggaggttaccctccacagcaaggatacccgcctgcacctggagcttacccacctgcacctggggcataccctcctgcacctggggcataccctcctgcgcccggagcgggtggcagtgacggggagaaggggctcctctccaacatcatgcacggtgttgccggtgctcatggtggtggccatggctacccatctggtggccacgggtaccccccgcagcagcatggataccctcagcaaggctaccctcctcagcatggctacccaccgcaacagcatggctaccctccacagcagcatggctatccccctgctggctaccctggctcatctggtcacagtggtagccatggaggaggaggcatgggcatgggcggcatgctagctggaggcgcagcagctgctgccgccgcttacggagcacacaagatttctcacggcggccacggtggaggtggacacatgatgggaggcatgatgggcggccatggaggctatggcggcgggtacggccaccacggcggcaagttcaagcacgggaagcacggccacggcaagttcaagcacggcaagcatgggaagcacggcatgttcggcggcggcggaaagttcaagaagtggaagtaatgcgctagctagtagcttcaccatggctgatgaatcaaaaaaatacctaaactcttcgtgtaggcttccagaacttggtttggtcagggaaagcctttgagatgtatctaagcagggtgtggtgtggttgctgcccggatctcgtggagcttccatcctttcctctatatgatttggcactctagtctgcgtctgtgacgaaaaaaaaaaaaaaaa

SEQ ID NO: 2048 - protein, 235 aa, Triticum aestivum
  misc_feature: Ceres CLONE ID no. 569327
  misc_feature: Ceres CDNA ID no. 35383213
  misc_feature (9)..(13): Pfam Name: XYPPX PFAM Desc: XYPPX repeat
  misc_feature: Homolog of GI Number: 33668156 NR Desc: GPRP
  misc_feature: Homolog of GI Number: 6478148 NR Desc: putative glycine and proline
  misc_feature: Homolog of GI Number: 9755790 NR Desc: glycine/proline
  misc_feature: Homolog of GI Number: 21553447 NR Desc: putative glycine and proline
  misc_feature: Homolog of GI Number: 113965 NR Desc: Annexin A7
  misc_feature: Homolog of GI Number: 671859 NR Desc: annexin VII
  misc_feature: Homolog of GI Number: 3288572 NR Desc: annexin max4
  misc_feature: Homolog of GI Number: 34536830 NR Desc: annexin 11a isoform 2
MGGGNDGHGYPPGGQGGYPPQGYPPQQGGYPPQQGYPPAPGAYPPAPGAYPPAPGAYPPAPGAGGSDGEKGLLSNIMHGVAGAHGGGHGYPSGGHGYPPQQHGYPQQGYPPQHGYPPQQHGYPPQQHGYPPAGYPGSSGHSGSHGGGGMGMGGMLAGGAAAAAAAYGAHKISHGGHGGGGHMMGGMMGGHGGYGGGYGHHGGKFKHGKHGHGKFKHGKHGKHGMFGGGGKFKKWK

SEQ ID NO: 2049 - DNA, 1453 bp, Triticum aestivum
  misc_feature: Ceres CLONE ID no. 569376
  misc_feature: Ceres CDNA ID no. 35383214
  CDS (100)..(1191): REFERENCED BY SEQ ID NO: 2050
ctctctaagtttcagatgatatcaaaattcttcagaaagtctcgctgtctcaggtgatcgaaacaccgatccacgacagtaaggagggaagaatcaagaatggcggatgatgaccagcagtggaagatcccacccaacgtgcaggagctggcggcagctggcccggaggagccgccgagccggtacgtggtccgcgaccatgaccgccccgcgctcgccggcgctggcagcgacgtcacggaccccatccccgtcgtcgacctcggccgcctgtcctccggcgacgcagacgaggcggccaagctgcggtccgccctccagacctggggcctcttcctggccgtcgggcatgggatcgagccggctctcctgggcgagatgatggccgtgacgagggagttcttcaacctcccgctggaagagaagcagaggtacaccaacctggtcggcgacaagaaagagtacaggatcgaggggtacggcggcgacatggtcctgtcggagacccaggtcctggactggtgcgaccggttctacctcgtcgtggacccggagtcgcggcgcctccacgacctctggccgacgcggccgccctccttccgggacgtcctgcaccggtactccgcgcggtgcagggagctcgccgacgccgtgctccgggaggccgccggcgcggcggggctccccgaccaggggcgcctggccgacatgctggacgagaaggccgtgacctacgtccggctcaactgctaccccccatgcccgcgccccgaccgcgtgctcgggttcaggccccactccgacggcggcgcgctcaccgtcctcctcgccgagaccgccgggctccaggtgcgccgcgacgacgacgcaggcggcggtggatggcacgacgtgcccgtggtgcccggcgcgctggtggtgaacctcggggacacggtggaggtggtgagcaacggggtgctgaggagccccgtgcacagggtggtggcgggcgcggagagggggcgggtgtccatggcgatgttctacacggtggacccggagagggaggtggagccggcgccggagctggtgagcgaggagaggccgaggcggtacgagaagaccaagaagagcggcgactacgtcaggaagctgctggagagcttggcgcgaggggagcgggccatcgacaaggtgaaggtcgtctgatcgagcagctttgatccacggttcgctgcatgcatgcgcgcgcggtgggcatggtggctagttgacgtgcactgtgcacactacttactttacttttttttaggggcacgctttacgtacggtaaaatatatgggtctggcaataagctactccagtagccggttcaaaaatacgagtagtaattaagctagtcgcctcgaaaataaatatccttttcaaaaaaaaaaaaaaaaaaaaaaaaaaataaaaaaaaaaaaaaaa

SEQ ID NO: 2050 - protein, 363 aa, Triticum aestivum
  misc_feature: Ceres CLONE ID no. 569376
  misc_feature: Ceres CDNA ID no. 35383214
  misc_feature (209)..(312): Pfam Name: 2OG PFAM Desc: 2OG
  misc_feature: Homolog of GI Number: 50933563 NR Desc: ethylene
  misc_feature: Homolog of GI Number: 33115140 NR Desc: iron/ascorbate
  misc_feature: Homolog of GI Number: 50252393 NR Desc: putative iron/ascorbate
  misc_feature: Homolog of GI Number: 34898470 NR Desc: ESTs D47168
  misc_feature: Homolog of GI Number: 50933567 NR Desc: ethylene
  misc_feature: Homolog of GI Number: 34898488 NR Desc: Similar to Prunus armeniaca ethylene
  misc_feature: Homolog of GI Number: 24413981 NR Desc: putative iron/ascorbate
  misc_feature: Homolog of GI Number: 34898472 NR Desc: Similar to Prunus armeniaca ethylene
  misc_feature: Homolog of GI Number: 34907194 NR Desc: putative ethylene
  misc_feature: Homolog of GI Number: 2688828 NR Desc: ethylene
MADDDQQWKIPPNVQELAAAGPEEPPSRYVVRDHDRPALAGAGSDVTDPIPVVDLGRLSSGDADEAAKLRSALQTWGLFLAVGHGIEPALLGEMMAVTREFFNLPLEEKQRYTNLVGDKKEYRIEGYGGDMVLSETQVLDWCDRFYLVVDPESRRLHDLWPTRPPSFRDVLHRYSARCRELADAVLREAAGAAGLPDQGRLADMLDEKAVTYVRLNCYPPCPRPDRVLGFRPHSDGGALTVLLAETAGLQVRRDDDAGGGGWHDVPVVPGALVVNLGDTVEVVSNGVLRSPVHRVVAGAERGRVSMAMFYTVDPEREVEPAPELVSEERPRRYEKTKKSGDYVRKLLESLARGERAIDKVKVV

SEQ ID NO: 2051 - DNA, 1788 bp, Triticum aestivum
  misc_feature: Ceres CLONE ID no. 569380
  misc_feature: Ceres CDNA ID no. 29191811
  CDS (368)..(1534): REFERENCED BY SEQ ID NO: 2052
caaacgtggtaatttctgagttttttaggaagattttgacaaggggggctgctaatcctaatccaaagttcccgtcgctgcgttcaggcagccgccggcgaccagtgaatgcttccgcatcccaccgcgcgtcaggaagcagagaggccagcgtccagccgccagctcgcccaccctacccgagctcacccacatcggcagccgccgccgcgacgccaccgctatgcgcagaggagcgccattattttgatcctctgattctttccccacgttgggcgatacttcctatgcgccaccgccgcccgcggatcacacagcggcggcagtagcgcgagggaggcggtcagaggccgaaagatttggatcgatggagatccgcgcccgcgcgcccggcaagatcatcctcgccggcgagcacgccgtcgtccacggctctgccgccgtcgccgccgccatcgacctctacacgcagtcctccctccacctgcccccctcaggtgagggcggcgccggcgaagtggaggttgacctgacggactcgggcctcgccttctcctggccatgctcgcgcctcctcgaggcgctgggggagacctcccgcaaggcggagctgcaggccccgaggccctgctccccggaggagctggccgccattgccaggctcgtggagctgcacgagatacccgaggccaagatctggctctccgccggcctctccgcgttcctctacctctacacctccatcctggggtgtaggcctgggaaggtcgtggtgagctctggcctgccgatgggcgccgggcttggctcgtcggctgcgttctccgtgtcgttgtcgggcgcgctgctgacagcggcaggtgtggtttctgctgagggcgccgttggcggaacggagtggcagttgttggggaaggatcatcttgagctggttaacacgtgggcgttccagggggaaaagattattcatggcaagccttctggcattgataacgctgtcagcacttttggaagcatgatcaaattcaagaagggagaattgacgaacctcaaatctggcaatccagtcaaaatgctcattactgatacaagggttggtaggaacaccaaggctctggttgctggtgtgtctgaaagagcatctaggcatcccgatgctatggcttccgtcttccatgcagtcaacactattagtgaagagctttccagcattgttgagttagctgctactgatgagatagccatgacctcaaaggaagaaaagctagcagaactcatggagatgaaccaaggtttgctccagtgcatgggagtcagtcatgcttctatagaaaccgtgctgcgctcgacattgaagtataacttggtctcgaagctcaccggagctggtggtggaggctgtgttttgacgttgataccaactctattgtccaagttagttttggagaaggtcaccacggagctagaatcgcatggtttccgctgcttcaaagtcgaggtcggtggacaaggtcttcagattcaccaaggataagataatgctcgctcctgtttcaatggagatgttgtacactatttttaggtttgcttgaccttccgagatgaaagcattcttcctattctgtgcctagcagaccactcactgtatcagtcaataagcgagtttgccagtcgcatgattgttgttgtatcaaatcaataaaccctgttccatagtcgggcgatgggcgtggttggaaggaatatttgaggtgccatgttgcatctgatttaaaaaaaaaaaaaaaa

SEQ ID NO: 2052 - protein, 388 aa, Triticum aestivum
  misc_feature: Ceres CLONE ID no. 569380
  misc_feature: Ceres CDNA ID no. 29191811
  misc_feature (131)..(352): Pfam Name: GHMP_kinases PFAM Desc: GHMP kinases putative ATP
  misc_feature: Homolog of GI Number: 78708201 NR Desc: mevalonate kinase
  misc_feature: Homolog of GI Number: 31431195 NR Desc: putative mevalonate kinase
  misc_feature: Homolog of GI Number: 16417946 NR Desc: mevalonate kinase
  misc_feature: Homolog of GI Number: 21536584 NR Desc: mevalonate kinase
  misc_feature: Homolog of GI Number: 5578718 NR Desc: mevalonate kinase
  misc_feature: Homolog of GI Number: 62089024 NR Desc: mevalonate kinase variant
  misc_feature: Homolog of GI Number: 33303805 NR Desc: mevalonate kinase
  misc_feature: Homolog of GI Number: 55250855 NR Desc: Zgc:103473
  misc_feature: Homolog of GI Number: 12963731 NR Desc: mevalonate kinase
  misc_feature: Homolog of GI Number: 61555432 NR Desc: mevalonate kinase
  misc_feature: Useful for making taller plants and plants with longer inflorescences
  misc_feature: Useful for sterility
MEIRARAPGKIILAGEHAVVHGSAAVAAAIDLYTQSSLHLPPSGEGGAGEVEVDLTDSGLAFSWPCSRLLEALGETSRKAELQAPRPCSPEELAAIARLVELHEIPEAKIWLSAGLSAFLYLYTSILGCRPGKVVVSSGLPMGAGLGSSAAFSVSLSGALLTAAGVVSAEGAVGGTEWQLLGKDHLELVNTWAFQGEKIIHGKPSGIDNAVSTFGSMIKFKKGELTNLKSGNPVKMLITDTRVGRNTKALVAGVSERASRHPDAMASVFHAVNTISEELSSIVELAATDEIAMTSKEEKLAELMEMNQGLLQCMGVSHASIETVLRSTLKYNLVSKLTGAGGGGCVLTLIPTLLSKLVLEKVTTELESHGFRCFKVEVGGQGLQIHQG

SEQ ID NO: 2053 - DNA, 1065 bp, Triticum aestivum
  misc_feature: Ceres CLONE ID no. 569419
  misc_feature: Ceres CDNA ID no. 35383215
  CDS (94)..(912): REFERENCED BY SEQ ID NO: 2054
ctaccgaagcgcaaaaagaaactcgaagcacaggaacacgaagcaagctgctccccctcctcatctccgactcactcacgatccgagatcaggatggccggatcgatggaactccctaccaagggcggcttcagcttcgacctgtgccgcaggaacgccatgctggagaagaatggcctcaagatgcccgggttcaggaagaccggaactaccatcgtcggcctcgtgtttgcggatggagttgttcttggggcagacacaagggcaaccgagggtcctatagttgctgataagaactgcgagaaaattcattttatggcaccaaacatatattgctgtggtgctggaactgctgctgacacagaggctgtgacagatatggtcagctcccagctacaacttcaccgttatgctactagccgtgagtcaagagttgtaaccgctcttacactactgaagacacatctttttaactaccaaggtcatgtcagtgctgctcttgttcttggcggagtggatgtcactggaccacatctgcacactgtttatccgcatggctccaccgatactcttccttttgccacgatgggttctggatcccttgctgcaatgtcagtgtttgagtcgaagtacagagaaggcctcacaagggaggaaggaattgcacttgtagccgaggcaatccgtgctggtatcttcaatgacttgggaagtggcagcaatgtggatgtttgtgtgataactaaggggaacacagagtacttgagaaaccacgagttaccaaacccaaggacttttgtcagctcgaagggatacagcttcaacaaggggcataccgaggtgttgtctacaaacatcacgcagctgaagctgaagccagaggtcgctgatagtgatgcaatggaagagtgatcttgtgtgcttacgttcaggcaagcagtcatgctaagaatttgcgccatttcttcttttttctcatcgtgggtgctagaacggaaaaatggatgtattttgttgtacttgctggatttaatgcagacctttatgttaaaaaaaaaaaaaaaa

SEQ ID NO: 2054 - protein, 272 aa, Triticum aestivum
  misc_feature: Ceres CLONE ID no. 569419
  misc_feature: Ceres CDNA ID no. 35383215
  misc_feature (35)..(216): Pfam Name: Proteasome PFAM Desc: Proteasome A
  misc_feature: Homolog of GI Number: 50933089 NR Desc: 20S proteasome beta subunit
  misc_feature: Homolog of GI Number: 9758084 NR Desc: 20S proteasome beta subunit PBB2
  misc_feature: Homolog of GI Number: 30023762 NR Desc: At3g27430
  misc_feature: Homolog of GI Number: 2511578 NR Desc: multicatalytic endopeptidase
  misc_feature: Homolog of GI Number: 21387013 NR Desc: 20S proteasome beta subunit PBB2
  misc_feature: Homolog of GI Number: 21593337 NR Desc: 20S proteasome beta subunit PBB2
  misc_feature: Homolog of GI Number: 30688785 NR Desc: 20S proteasome beta subunit B
  misc_feature: Homolog of GI Number: 2511576 NR Desc: multicatalytic endopeptidase
  misc_feature: Homolog of GI Number: 24664391 NR Desc: CG3329
  misc_feature: Homolog of GI Number: 55632297 NR Desc:  similar to Proteasome beta 7 subunit
MAGSMELPTKGGFSFDLCRRNAMLEKNGLKMPGFRKTGTTIVGLVFADGVVLGADTRATEGPIVADKNCEKIHFMAPNIYCCGAGTAADTEAVTDMVSSQLQLHRYATSRESRVVTALTLLKTHLFNYQGHVSAALVLGGVDVTGPHLHTVYPHGSTDTLPFATMGSGSLAAMSVFESKYREGLTREEGIALVAEAIRAGIFNDLGSGSNVDVCVITKGNTEYLRNHELPNPRTFVSSKGYSFNKGHTEVLSTNITQLKLKPEVADSDAMEE

SEQ ID NO: 2055 - DNA, 657 bp, Triticum aestivum
  misc_feature: Ceres CLONE ID no. 569426
  misc_feature: Ceres CDNA ID no. 40351079
  CDS (78)..(497): REFERENCED BY SEQ ID NO: 2056
acacatcgcagcatccgcatccccatcccctctcagcacacaccttccaaccaaactccaccgccgtcgaagcacccatggcacccaaggcggagaagaagccggcgccggagaagaccccggcggggaagaagccggcggcggagaagaggcccgcggccgggaagacggcgtccaaggagggcggcgagaagaaggggaagaagaaggccaagaagagcgtggagacgtacaagatctacatcttcaaggtgctcaagcaggtgcaccccgacatcggcatctcctccaaggccatgtccatcatgaactccttcatcaacgacatcttcgagaagctcgccggcgagtccgccaagctggcccgctacaacaagaagcccaccatcacctcccgggagatccagacctccgtccgcctcgtcctccccggcgagctcgccaagcacgccgtctccgagggcaccaaggccgtcaccaagttcacctcagcctaggcgtcttcctcgtttcatgagctgatggcggcgttctgtgtgtagttagcagtgcgatgttacaatctctgtaagaattgtgctgcttgttggtttgaagaattagtgatgttgctgtctgaaaaaaaaaaaaaaaaaaaaaagaaaaaaaaaaaaaaaa

SEQ ID NO: 2056 - protein, 139 aa, Triticum aestivum
  misc_feature: Ceres CLONE ID no. 569426
  misc_feature: Ceres CDNA ID no. 40351079
  misc_feature: No seed is being produced by the plant
  misc_feature: The plant flowers significantly late compared to wild-type.
  misc_feature: Useful for biocontainment applications
  misc_feature: Useful for making plants with modulated flowering time
  misc_feature (46)..(118): Pfam Name: Histone PFAM Desc: Core histone H2A/H2B/H3/H4
MAPKAEKKPAPEKTPAGKKPAAEKRPAAGKTASKEGGEKKGKKKAKKSVETYKIYIFKVLKQVHPDIGISSKAMSIMNSFINDIFEKLAGESAKLARYNKKPTITSREIQTSVRLVLPGELAKHAVSEGTKAVTKFTSA

SEQ ID NO: 2057 - DNA, 1330 bp, Triticum aestivum
  misc_feature: Ceres CLONE ID no. 569514
  misc_feature: Ceres CDNA ID no. 29191714
  CDS (133)..(1053): REFERENCED BY SEQ ID NO: 2058
accccaccacaccgcgcactgacacagcaagatcgaccgatcagtcagtcaagagggcgaggcgtgcactgctggtcctcctcctccctctcccgcgcatggtgccccgtccccgccggccggcgccgacacatgttgcatgagcggcacgcaccaccctccgcgtccgacgacgaggacgatgccccaggggccaacgacgaggagggcactctggtgaccagcaccaccaacaccaccttccacgacgtggacgaggtcatcgaggtgcgcgaggtccgccccctgtcgccgccgcggcagcacccgcccttcacgccgcccacgcgcaccgtctccgccgcgtccaccgcctgggacagcgccagcagccaccgctccgtcacctccgaggagcagttcatgacgatgagccgcgagttcacggccatggtcgccgccggcgccggcgccggggcggccaacaacaacgccaacggcaacaacagcaacagcaaccaccccgtcgggccctacgacggcggggccgaccagctgaccagcatcggcgaggacgagctggaggagcacaacccgctggccatcgtgccggacagcggccgccccttcgccacgccgcccagcaggagcggcggcagcagcggcagggcggcgcggctcgacctggaggtggtccccgccgccggcccgccggtggaggcgagccaggtgaagaaggaggaggtggagaccaaggtgtcggcgtggcagacggcggagatcgccaagatcaacaaccggttcaagcgggaggaggtggtcatcaacggctgggagacggagcaggtcgacaaggcctccgcctggctcaagaagattgagaggaagctggacgagcagcgcgccaaggcggtggagaagacgcagaacgacgtggccaaggcgcggcacaaggcggaggagaagcgggcgtcggcggaggccaagcgggggctcaagctggccaaggtgctggagctggccaacttcatgaaggccgtcggcagggtgcccaccaagcgctccttcttctagcctcccccagccggaggaggggagaaatcctatgtgtttttgcctatgggtagtacgtaaaaagtaagggcgtgtgctgctgctgctgcatccgatcggtcgggaaacctaattgtaaaaagggatttgaaaacttgctgctgctgctgctgcctccgttgtatactagccgccggtggtgatcacacggcggcgcttttttgtttggcttgtatgtgcacgaaaaaactggtgtgagaatggaatgaatagcgtgtttgcaaaaaaaaaaaaaaaa

SEQ ID NO: 2058 - protein, 306 aa, Triticum aestivum
  misc_feature: Ceres CLONE ID no. 569514
  misc_feature: Ceres CDNA ID no. 29191714
  misc_feature (193)..(304): Pfam Name: Remorin_C PFAM Desc: Remorin
  misc_feature: Homolog of GI Number: 50919291 NR Desc: remorin
  misc_feature: Homolog of GI Number: 50938461 NR Desc: remorin
  misc_feature: Homolog of GI Number: 12642886 NR Desc: putative DNA binding protein
  misc_feature: Homolog of GI Number: 50935133 NR Desc: DNA binding protein
  misc_feature: Homolog of GI Number: 23397301 NR Desc: putative DNA binding protein
  misc_feature: Homolog of GI Number: 66780099 NR Desc: PE
  misc_feature: Homolog of GI Number: 41400384 NR Desc: plus agglutinin
  misc_feature: Homolog of GI Number: 67987177 NR Desc: 4Fe
  misc_feature: Homolog of GI Number: 23480318 NR Desc: Drosophila melanogaster CG8797 gene product
MLHERHAPPSASDDEDDAPGANDEEGTLVTSTTNTTFHDVDEVIEVREVRPLSPPRQHPPFTPPTRTVSAASTAWDSASSHRSVTSEEQFMTMSREFTAMVAAGAGAGAANNNANGNNSNSNHPVGPYDGGADQLTSIGEDELEEHNPLAIVPDSGRPFATPPSRSGGSSGRAARLDLEVVPAAGPPVEASQVKKEEVETKVSAWQTAEIAKINNRFKREEVVINGWETEQVDKASAWLKKIERKLDEQRAKAVEKTQNDVAKARHKAEEKRASAEAKRGLKLAKVLELANFMKAVGRVPTKRSFF

SEQ ID NO: 2059 - DNA, 1529 bp, Triticum aestivum
  misc_feature: Ceres CLONE ID no. 569635
  misc_feature: Ceres CDNA ID no. 40351080
  CDS (64)..(1176): REFERENCED BY SEQ ID NO: 2060
accgagtccgccgccgccgccgcccacctttcttcttctcccaaaccctagtctccggcggcgatggcccccaagcgcgccgcgaagaaggcggcacccccgcctccgcctccgcctccggctgcctcctctgaggagagcgaatcccgctcgcgctccgaggagtcggagggcgaagacgccgagtcccctccccccgcccccaccccggcccccaagagcacgccggcgcccccgcaggagggagaggaggaggaggaggagtctgaagaggaagacgaggaggagactgatgaggagcccgcccacgcggccccagccgccgccgccacccccaagaacaagcctccgccgccgcaacagggaggtgactccgattcttcttccgacgaggaggaggaggagcccaccaaggcggcccctccctccgccctgaagaaacaacccccgccgccgccgccgccgcggcagagcgaggaatcggacgcctccgacgaggaagaagaggagggtgagtccgaggaggaggcgccgccgccgccgccgccgaagcttgctccaaagcaggcgccagagggccggaagccccaggcagcggcggagaccaagaagccggccgctttcaaccgcatctggtccaccgacgacgaggtgcgtatcctcgaggcccttgctgctcaccaaaagcagcacggcacgctgccgcagccggacgccctcgtggacgcccttgcaggaaagctcgacaaccgtgcctacggcagcaaggagctccaggggaaggtcttggccctgaggcgtcgttacctccttctcagcaagaagggcgagcccccgagcaaggagcatgaccgccgggtgctggaactttccaagatggtctgggaaggcggtgacacggccgcagctgcccctgcgaaggcggcaaatggccaggagccaaaggggttcgaggagatgtgcgagctgtatccgtacctggcggagcaggtgagggagctggatgcggcgaacccgggcatcttcaagaggcagttcgggatgatggacgacgacaaggcgcgcgcgatggacgagaagatcaagaggcagagggtggcgcagatgaaggtggagctgcgccgccacgacctggccagggaggtgaccaaggcgatcatcgacctggtcgactgatcggagcgtcatgggcttacaagttagtacaaactgaaactgtatctgtgatcacctgaagttggtgcgatgaaatgcggcgttttggtggagcaagaatgtttctgaaactatgatctagagtctgcggattgggctggctcgatgcatcagacatgtggtggaactgcaaattgtgcctcctgtttgtaagaatgcttttctcgtgtggccagagcaaatgctagaaatagcaaattaggggtgtctttatagtgtaagcatgatgagacatgtgctggaactgcaaattgtgctggtggattaagaatattttccgaagtgcgctagaactgacaaaaaaaaaaaaaaaa

SEQ ID NO: 2060 - protein, 370 aa, Triticum aestivum
  misc_feature: Ceres CLONE ID no. 569635
  misc_feature: Ceres CDNA ID no. 40351080
MAPKRAAKKAAPPPPPPPPAASSEESESRSRSEESEGEDAESPPPAPTPAPKSTPAPPQEGEEEEEESEEEDEEETDEEPAHAAPAAAATPKNKPPPPQQGGDSDSSSDEEEEEPTKAAPPSALKKQPPPPPPPRQSEESDASDEEEEEGESEEEAPPPPPPKLAPKQAPEGRKPQAAAETKKPAAFNRIWSTDDEVRILEALAAHQKQHGTLPQPDALVDALAGKLDNRAYGSKELQGKVLALRRRYLLLSKKGEPPSKEHDRRVLELSKMVWEGGDTAAAAPAKAANGQEPKGFEEMCELYPYLAEQVRELDAANPGIFKRQFGMMDDDKARAMDEKIKRQRVAQMKVELRRHDLAREVTKAIIDLVD

SEQ ID NO: 2061 - DNA, 1171 bp, Triticum aestivum
  misc_feature: Ceres CLONE ID no. 569666
  misc_feature: Ceres CDNA ID no. 24766124
  CDS (108)..(890): REFERENCED BY SEQ ID NO: 2062
acgagaagccacagggaggcgaaccgaaagcaaaaccgcaggactagcaggagagacagagatcccccgaaccctaaccctaccagcacctcccgtcgccggttgagatggcgatggacgcggagcggaggcaggcggagctgatcgagcagttctcggcgcaggcggcggcgctctcctcggctcctcagctggcggcgctcgtgctcgaggccacctcccacccggcgctctttgccttctccgagctcctcacccttccagccctctccaagctaacgggcacgcagtacgcctcgtcgctggacctgctccgcctcttcgcctacggcaccctcaaggactacaagagtaattctagcgccctccctgcattgttgcctgatcaagcccggaagctgaagcaactcagcgtgctaactttggctgagtcaaccaaggtacttccatatgatcagctcatgcaagagctagacgtttccaatgtgagagaacttgaagatttcctcatcaacgagtgcatgtactcaggtattgtcagaggcaagttggaccaactgcggcggtgctttgaagtacaatttgcagctggaagggacctcacacctgatcagctaaccaacatgattgagaccttgtctgactggttgggaacatcagataatttattacaccacattcaggagaaaatcaagtgggctgatacaacaagtgaattgaacaagaagcaccagaaagaatttgaagacagagtggaagaagccaagaagtcagtcaaggcagacaatgacttacgggggcatgacgactttctctctgaatctggaggaataatggattttgaggaggaccgcatccgaccaaaaaggaggcgacaaccaatggcgtagtttgactgaagtatcacacctatggtccctgctcgcagaagtgccgatgctgttcttgagacattttgtcaccggagtttaggagcatcaattagggtgcttcccatgaagcgagtctctgttgagaaaacgcttgtttttggtatgagatgttacaaagagatgatttactgccgtatttatttagtagcacgaagggcatatgggtgacttcgcactgtaaagattatggttctgaaaagtttggtgacctaaggtgttcgccaaaaaaaaaaaaaaaa

SEQ ID NO: 2062 - protein, 258 aa, Triticum aestivum
  misc_feature: Ceres CLONE ID no. 569666
  misc_feature: Ceres CDNA ID no. 24766124
  misc_feature (61)..(157): Pfam Name: PCI PFAM Desc: PCI domain
  misc_feature: Homolog of GI Number: 50509216 NR Desc: putative COP9 complex subunit
  misc_feature: Homolog of GI Number: 21593551 NR Desc: FUS5
  misc_feature: Homolog of GI Number: 42571297 NR Desc: COP9 signalosome complex subunit 7ii / CSN complex subunit 7ii
  misc_feature: Homolog of GI Number: 18056669 NR Desc: CSN complex subunit 7i
  misc_feature: Homolog of GI Number: 37589772 NR Desc: Cops7a protein
  misc_feature: Homolog of GI Number: 68383150 NR Desc:  similar to Cops7a protein
  misc_feature: Homolog of GI Number: 62655356 NR Desc:  similar to Cops7b protein
  misc_feature: Homolog of GI Number: 15215085 NR Desc: Cops7b protein
  misc_feature: Homolog of GI Number: 34877558 NR Desc: similar to Cops7b protein
MDAERRQAELIEQFSAQAAALSSAPQLAALVLEATSHPALFAFSELLTLPALSKLTGTQYASSLDLLRLFAYGTLKDYKSNSSALPALLPDQARKLKQLSVLTLAESTKVLPYDQLMQELDVSNVRELEDFLINECMYSGIVRGKLDQLRRCFEVQFAAGRDLTPDQLTNMIETLSDWLGTSDNLLHHIQEKIKWADTTSELNKKHQKEFEDRVEEAKKSVKADNDLRGHDDFLSESGGIMDFEEDRIRPKRRRQPMA

SEQ ID NO: 2063 - DNA, 981 bp, Triticum aestivum
  misc_feature: Ceres CLONE ID no. 569718
  misc_feature: Ceres CDNA ID no. 24766125
  CDS (75)..(764): REFERENCED BY SEQ ID NO: 2064
aaaccatcgtcactcacgacagaaacagaaataggaagacgagagaacagaagagccagagacactaaaacgaaatggcatcctcctcttccttccttctcattgctgcacttcttgcgttggtctcatggcaggccactgcttttgatcctagcccactccaggacttttgtgtcgccgacatgaattcaccagtccgtgtcaatgggtttgtttgcaagaacccgttggaggttaatgcagatgacttcttcaaggcggccaacctcgacaagcctagggtgcccaacaaggttggatccaacgtcactttgatcaacgccatgcagattgctggactcaacaccctcggcatctcaattgcacgcatcgactatgctcccttgggtcaaaacccaccacacacgcaccctcgcgccactgagatcctcacggtgctcgaggggacactgtatgttggatttgtcacatccaaccagcccgcccccaacagaaacaagttcctctccaaggtgctcaacaaaggtgatgtgtttgtcttccccgtggggctcatccacttccaattcaaccccaacccccaccagcctgctgttgcaattgccgcgctaagcagccagaacccaggggctatcacaattgccaatgcagtgtttgggtcagacccaccaatatcagatgatgttcttgccaaggcatttcaggtggaaaagaatacaattgactatctccaggctcagttctgggagaacaaccactactaagtcagacctttgttaattagccggaagaccagtgcacaagcgaaggacatggttgagttcctagatatgcatcctaatctataaaataaatggagcatatgtcatgccattgtgtgtctgtaatcagtgaatgtatttctaccttctgaataattgacaatattgtatttatcacactaatatgatctcatttgcttctttaaaaaaaaaaaaaaaa

SEQ ID NO: 2064 - protein, 229 aa, Triticum aestivum
  misc_feature: Ceres CLONE ID no. 569718
  misc_feature: Ceres CDNA ID no. 24766125
  misc_feature (63)..(217): Pfam Name: Cupin_1 PFAM Desc: Cupin
  misc_feature: Homolog of GI Number: 5869975 NR Desc: germin
  misc_feature: Homolog of GI Number: 9837111 NR Desc: germin A
  misc_feature: Homolog of GI Number: 29468300 NR Desc: germin
  misc_feature: Homolog of GI Number: 5869973 NR Desc: germin
  misc_feature: Homolog of GI Number: 49615735 NR Desc: germin
  misc_feature: Homolog of GI Number: 50941853 NR Desc: putative germin A
  misc_feature: Homolog of GI Number: 50941873 NR Desc: putative germin A
  misc_feature: Homolog of GI Number: 50941859 NR Desc: putative germin A
  misc_feature: Homolog of GI Number: 50941857 NR Desc: putative germin A
  misc_feature: Homolog of GI Number: 50941871 NR Desc: putative germin A
  misc_feature: Useful for increasing chlorophyll and photosynthetic capacity
MASSSSFLLIAALLALVSWQATAFDPSPLQDFCVADMNSPVRVNGFVCKNPLEVNADDFFKAANLDKPRVPNKVGSNVTLINAMQIAGLNTLGISIARIDYAPLGQNPPHTHPRATEILTVLEGTLYVGFVTSNQPAPNRNKFLSKVLNKGDVFVFPVGLIHFQFNPNPHQPAVAIAALSSQNPGAITIANAVFGSDPPISDDVLAKAFQVEKNTIDYLQAQFWENNHY

SEQ ID NO: 2065 - DNA, 1015 bp, Triticum aestivum
  misc_feature: Ceres CLONE ID no. 569852
  misc_feature: Ceres CDNA ID no. 40351081
  CDS (101)..(646): REFERENCED BY SEQ ID NO: 2066
cattcagacccatcccagccaaaagcacctggccatcagcgttccttctcctagctttgtctcagttgtcttccggtcttctgctctgctctttggactaatggcccatgggaagaggtctaggcagcaggccgagtcgacctcggtcagcctgctggacctggacagcggcgacatggcgcgcatcctgctgctcttctccggccaccaccagcaccacgcccactacgggccttcgtcgcctgagagggtgttcgagtgcaagacctgcaaccggcggttcccgtccttccaggcgctcggtgggcaccgcgccagccacaagaagccgcgcctggcggacggcgccggcgccgagccgcccaagcccaaggtgcacggctgctccatctgcgggctcgagttcgccgtcggccaggcgctcggcggccacatgcgccgccaccgcgctgtcgcggcggcagggcccggcgtcgggcttgggctcagcctcggcctcggtctcgggccgaacgaggacggcaacaagaaggcggcggcggcggccgagctggcgctcgacctgaacgagccggcactggaggaggagccggccgatcgcgccatgcttgggctcgccgtgggattccggccccgtggtggttgactttcgacgttaggttgaacagaagaaatttgcgtctgaaccatacaaattttttgtagttcaatactatttgcattgagctgctcgagaagtcaacgacccttggaacattagaaatgctggctcgcgtatagtataacatttctaaagtctcaggggcaggggctctatatttacaaggtttgacttctggcggtatttgtagtactagacgggtttttctcttctgctccccctttttccacggggagttcagtttttttatgctccttggccttgaggcatatctactacggagtacgtatgaatatggttgtaaacctctcgaattacgcgaatattatacaaggattaaaaaaaaaaaaaaaa

SEQ ID NO: 2066 - protein, 156 aa, Triticum aestivum
  misc_feature: Ceres CLONE ID no. 569852
  misc_feature: Ceres CDNA ID no. 40351081
  misc_feature (27)..(49): Pfam Name: zf PFAM Desc: Zinc finger
MARILLLFSGHHQHHAHYGPSSPERVFECKTCNRRFPSFQALGGHRASHKKPRLADGAGAEPPKPKVHGCSICGLEFAVGQALGGHMRRHRAVAAAGPGVGLGLSLGLGLGPNEDGNKKAAAAAELALDLNEPALEEEPADRAMLGLAVGFRPRGG

SEQ ID NO: 2067 - DNA, 1132 bp, Triticum aestivum
  misc_feature: Ceres CLONE ID no. 570007
  misc_feature: Ceres CDNA ID no. 36582431
  CDS (238)..(972): REFERENCED BY SEQ ID NO: 2068
agcatccaggctttcaataggatatcatagcagtatcgtcggtgttctgttggcgttgggttgttaggcgagagggacggagggcgtgctccctccctccaatcttcttcccttctttttcatctttctcttgtgctgtgtgccaagccagacccatacatacacccaacccaacccaccaatcactgccagcagcgacgacggagtgagggaagcaagcacggaaggaacgctcggatggcgatgggaacggctgtgcgggaggcggcggcggacggcgtcgtgaccttcctctgggtgctctgcgtctccacgctcggcgcctccacggccgccgtcaccacctacctcagcctgcacgaggggatccactacgccctcctcgtcaccgtctccatcctcgccctcctcctcttcgccttcaacctcctctgcgacgccctcggcggcgccagcttcaaccccaccggcgtcgccgccttctacgccgcgggcctcaccagcccctcgctattctccatcgcgctccgcctaccagcgcaggccgccggagccgtgggcggagctctggccatctccgagctgatgccggagcagtacaagcacatgctcggcggaccctcgctcaaggtggatccccacaccggcgccgtcgctgaaggggtgctcaccttcgtcatcacctttgccgtcctctgcatcatcgtcaagggaccccgcaaccccatcgtcaagacagcgatgctctcagtctccaccgtcagcctcgtcctcaccggcgccgcgtacaccggcccctccatgaaccctgccaacgcctttggttgggcgtatgttaacaatctgcacaacacctgggagcagctgtacgtgtactggatatgccccttcatcggtgccattctcgctgcgtggaccttcagggccgtgttcccgccaccggcccctaagcccaagaccaagaaagcatgatgaactcaagcacaaactttgacttagcaattgggggacctgaagaagggaacatggtttgctagggaataatttggaaggcctgtatttaatcccctcaacattacatcgatgtttaacttaaaagtgataatttatcagtcgaaaaaaaaaaaaaaaa

SEQ ID NO: 2068 - protein, 244 aa, Triticum aestivum
  misc_feature: Ceres CLONE ID no. 570007
  misc_feature: Ceres CDNA ID no. 36582431
  misc_feature (177)..(228): Pfam Name: MIP PFAM Desc: Major intrinsic protein
  misc_feature: Homolog of GI Number: 34906220 NR Desc: putative small basic membrane integral protein
  misc_feature: Homolog of GI Number: 13447815 NR Desc: small basic membrane integral protein ZmSIP1
  misc_feature: Homolog of GI Number: 13447813 NR Desc: small basic membrane integral protein ZmSIP1
  misc_feature: Homolog of GI Number: 55770735 NR Desc: putative small basic membrane integral protein
  misc_feature: Homolog of GI Number: 13447817 NR Desc: small basic membrane integral protein ZmSIP2
  misc_feature: Homolog of GI Number: 55740439 NR Desc: hydroxyproline
  misc_feature: Homolog of GI Number: 45190779 NR Desc: AER176Wp
  misc_feature: Homolog of GI Number: 12018147 NR Desc: vegetative cell wall protein gp1
  misc_feature: Homolog of GI Number: 60678627 NR Desc: plus agglutinin
  misc_feature: Homolog of GI Number: 11359723 NR Desc: proteophosphoglycan
MAMGTAVREAAADGVVTFLWVLCVSTLGASTAAVTTYLSLHEGIHYALLVTVSILALLLFAFNLLCDALGGASFNPTGVAAFYAAGLTSPSLFSIALRLPAQAAGAVGGALAISELMPEQYKHMLGGPSLKVDPHTGAVAEGVLTFVITFAVLCIIVKGPRNPIVKTAMLSVSTVSLVLTGAAYTGPSMNPANAFGWAYVNNLHNTWEQLYVYWICPFIGAILAAWTFRAVFPPPAPKPKTKKA

SEQ ID NO: 2069 - DNA, 1325 bp, Triticum aestivum
  misc_feature: Ceres CLONE ID no. 570027
  misc_feature: Ceres CDNA ID no. 40351082
  CDS (79)..(1116): REFERENCED BY SEQ ID NO: 2070
atcacatcgtctcaccaagcagcagctagctaagctaagcctagccaaagcttctctagcttcggtagtccaggaaacatgaggctcgcggtggttctcctctgcgccctggtggccgtccaggtcgcgctcctcgccgccccggcggaggccggcgagctggtggtcgggtactacgacaagaaatgcaggggcgtggagaacgtcgtccagtggcacgtcaggagggcgctcaagaccaaccgccgcgccggtgccgccctcgtccgcctcctcttccacgactgcttcgtcaggggttgcgatgcctctgtgctccttgacgcgtcccccgagaaccctcacccggagaaggaggcgccggtgaacatcgggctggccgccttcgacctcctggaggagatcaaggcggccgtcgaggacaggtgccccggcgtggtgtcctgctctgacatcctcatttacgcagcccgtgacgcggcccacgccctcagcaatggcaacatccacttcgacgtccctgccgggcgcctcgacggcctcgtctcctcggccgccgaggcccaggcggagctcccggactccaccttcaccgtgcagcagctcatcgacaacttcgcacgcaaggacttcgacgtggaggagctggtcatcctgtccggcgcgcactccatcggcgtcggccactgctcctccttcaccggccgcctcaccgcgccgccggagcagatcaacccggcctaccgcaaccttctcaaccacaagtgccaccagggcgccaacccggccgtcgtcaacaacgtccgcgatgaggactacgagacggtgtccaagttcatgcccgggttcaccagccgggtgcgcaagatcagcgacttcctcgacaacaccttctaccacaacaacctcgccaggatcgtcagcttcaactccgactggcagctcatgacccacaccgaggccaggggccacgtccacgagtacgccgacaacgccacgctctgggacggcgacttcgcggaatccctgctcaagctcagcaagctgtccatgcccgccgggagcaagggcggcatcaggaagaagtgcagcatcgccacccaccctctctactaaacaagtcgtatgcatgcatgaacaaggtcgatccaacgaagaagagaacctttgcccctggcggtgtgcggatttcttcaataatcatgtgatttttctggttcaatccattcttttgattcccattggttgtgtattttatttatggcaacatatatgtatcacggaaataaagttacggtctttcaaatgcaaaaaaaaaaaaaaaa

SEQ ID NO: 2070 - protein, 345 aa, Triticum aestivum
  misc_feature: Ceres CLONE ID no. 570027
  misc_feature: Ceres CDNA ID no. 40351082
  misc_feature (44)..(305): Pfam Name: peroxidase PFAM Desc: Peroxidase
MRLAVVLLCALVAVQVALLAAPAEAGELVVGYYDKKCRGVENVVQWHVRRALKTNRRAGAALVRLLFHDCFVRGCDASVLLDASPENPHPEKEAPVNIGLAAFDLLEEIKAAVEDRCPGVVSCSDILIYAARDAAHALSNGNIHFDVPAGRLDGLVSSAAEAQAELPDSTFTVQQLIDNFARKDFDVEELVILSGAHSIGVGHCSSFTGRLTAPPEQINPAYRNLLNHKCHQGANPAVVNNVRDEDYETVSKFMPGFTSRVRKISDFLDNTFYHNNLARIVSFNSDWQLMTHTEARGHVHEYADNATLWDGDFAESLLKLSKLSMPAGSKGGIRKKCSIATHPLY

SEQ ID NO: 2071 - DNA, 1335 bp, Triticum aestivum
  misc_feature: Ceres CLONE ID no. 570086
  misc_feature: Ceres CDNA ID no. 40041258
  CDS (100)..(1182): REFERENCED BY SEQ ID NO: 2072
attccccaatctcgccgccgccgccgccgccgcttcgtcgagtcccgctgcagttcgtccggatccggaagaaagaagaggaggagcaaattcggacagatgaaggcacggcagttggtgaacgtggtgatgcggaggtacggcatgggcagcagcctctatgcggtgagccgcatcaagcccgaggagcagctcttctacccatctaccaaggaggcgcaagcatccagcacgggggagatggagaccatctccatctccaggatgcccgcgcccagcctgaggctggagctctccgtctccaaggaggacaagaggctggatttcctgcctttctacgagcgcggcagcggcgggcacagcaagatcctctgcgtggacgccgagggccgcaccgtcctgtacgacaccgacgccggcctcctccactcgatgccctgcctcggcacccccaaggggcccaaccctgtctccttctccatcctggacagggagccccgggatcccgggcgggcggacgccttgtacgtcatgggcaggtgctgcgactactttgacttcgaggccctcatgtattgcgacccctccagcggcaggaaaggctggcggtggcatcagctcccgccgccgcctgtgcctcgcgccgccgcctccgccgtcgggtgccacgcgctcatccacgacgaaggcgaccccatcctcgtcgtctcgtccgccaagacgagcggcgttggcacccactgcttcaacacgtccaccaataggtggttcaaggctggacgctggacgctgcctctcgtcggccgcgccgagcgtgttagcgagctcgacaacctctggtttggcatcggcggcggctggccctacgacctgtgcgcgatggacctctactccctccgcgccgccggcgccgaggctccggggctggcgtacagctggggagaccttagcctgccggacgactgggtgatgatggactgcagcatggtgtacctgggcggcggcaagttctgcgtcgcgaaaatctttgagttctgcgtcggcgatgaccgattggggatgggtgctgtcatctctggcttggaggtggtgcgccgcggcgagccatccaaactcgtgatggtcaagcacaagtccaagttctacaagtttaccagggatgagatcgagtgtatcctctagaacaatgctaagtagtactagcaggggagcaaacaatttctagacgagtgctatgtgatgtgaggattgactagtttcttgtacagcagcacttgtgtgcgatttgatttggttgtaatgtaaatttcctcctgcacaaaaaaaaaaaaaaaa

SEQ ID NO: 2072 - protein, 360 aa, Triticum aestivum
  misc_feature: Ceres CLONE ID no. 570086
  misc_feature: Ceres CDNA ID no. 40041258
  misc_feature: Homolog of GI Number: 72547036 NR Desc: proteophosphoglycan 5
  misc_feature: Homolog of GI Number: 72547018 NR Desc: proteophosphoglycan ppg3
  misc_feature: Homolog of GI Number: 72547023 NR Desc: proteophosphoglycan ppg4
  misc_feature: Homolog of GI Number: 72547041 NR Desc: proteophosphoglycan ppg1
  misc_feature: Homolog of GI Number: 5420387 NR Desc: proteophosphoglycan
  misc_feature: Homolog of GI Number: 5420389 NR Desc: proteophosphoglycan
  misc_feature: Homolog of GI Number: 67987177 NR Desc: 4Fe
  misc_feature: Homolog of GI Number: 82958562 NR Desc:  similar to mucin 19
  misc_feature: Homolog of GI Number: 30313663 NR Desc: sublingual apomucin
  misc_feature: Homolog of GI Number: 82957823 NR Desc:  mucin 19
MKARQLVNVVMRRYGMGSSLYAVSRIKPEEQLFYPSTKEAQASSTGEMETISISRMPAPSLRLELSVSKEDKRLDFLPFYERGSGGHSKILCVDAEGRTVLYDTDAGLLHSMPCLGTPKGPNPVSFSILDREPRDPGRADALYVMGRCCDYFDFEALMYCDPSSGRKGWRWHQLPPPPVPRAAASAVGCHALIHDEGDPILVVSSAKTSGVGTHCFNTSTNRWFKAGRWTLPLVGRAERVSELDNLWFGIGGGWPYDLCAMDLYSLRAAGAEAPGLAYSWGDLSLPDDWVMMDCSMVYLGGGKFCVAKIFEFCVGDDRLGMGAVISGLEVVRRGEPSKLVMVKHKSKFYKFTRDEIECIL

SEQ ID NO: 2073 - DNA, 1210 bp, Triticum aestivum
  misc_feature: Ceres CLONE ID no. 570138
  misc_feature: Ceres CDNA ID no. 35383216
  CDS (99)..(944): REFERENCED BY SEQ ID NO: 2074
gtactagtactacgctcagctcggaaactacgacccacccggcagccagagggagggaaggaaagggggagaaggagacaccgcggcgggcggaggcaatggcgacggcgacggcgacggcgacgtgcctgctggcggtctgggcgctggtcgccgccggcctgttcggcacgggcctcgcccgggcgtccgtggccccggccgcggtggggaaggagcagcgcgagttcgactacttcgcgctggcgctgcagtggccaggcaccatctgctcctccacccgccactgctgcgccgtcaacggctgctgccggtcggaggcgctccacaccttcacgatccacgggctgtggccggactacgatgacgggacctggccgtcgtgctgccgccacaccagcttcgacatggacaagttaacgcctctgaagcccactctggacaaatactggccgtccctctactgttcgacctcttccacctgcttcagtggcaggggccccttctgggctcatgagtgggagaagcatggaacatgctcggcccctgttgttcatgaagaattacagtacttcaccaccgcccttgatctctactacaaatataacgttacagaaatgctggcgactggagatatcctggtctccaacggtaaagaatatgcactgagtgatgtcattgataccatcaagcatgcttttgggggctcaccgcagatcatatgcaagaagggctcagttgaagaactaaggttatgcttcaccaaggatttgaagcctcgcgattgccttactacttcggcaatgtacaagaacctatcgaagtcgaagcattgccctaaaaaaatctccctgccaacatatgatcccatcgtactcacaaattcgacactggagattgtcccagaagccagcgacaacgggttgtacttctttacatcctaagataccgagcattgctgggctatgaggaaacagatgccttcacggttctgactgcttgcaagaccgtagccacaggtgctgggcactggagatccggctaaaacgggtttctggtttgtccatactatttgtaaaggacaacattccacgtttgaacaacatggttcgattatgttctgatttgtaaaaccgctggatatcaaactcatgttactcattgcatgtatgaataatggatgttaaatgtactaaaaaaaaaaaaaaaa

SEQ ID NO: 2074 - protein, 281 aa, Triticum aestivum
  misc_feature: Ceres CLONE ID no. 570138
  misc_feature: Ceres CDNA ID no. 35383216
  misc_feature (44)..(250): Pfam Name: Ribonuclease_T2 PFAM Desc: Ribonuclease T2 family
  misc_feature: Homolog of GI Number: 56785269 NR Desc: putative S
  misc_feature: Homolog of GI Number: 56785270 NR Desc: putative ribonuclease NGR2
  misc_feature: Homolog of GI Number: 2642160 NR Desc: S
  misc_feature: Homolog of GI Number: 15149819 NR Desc: S
  misc_feature: Homolog of GI Number: 21615405 NR Desc: S
  misc_feature: Homolog of GI Number: 56785271 NR Desc: putative ribonuclease NGR2
  misc_feature: Homolog of GI Number: 31621000 NR Desc: ribonuclease NGR2
  misc_feature: Homolog of GI Number: 34907632 NR Desc: putative S
  misc_feature: Homolog of GI Number: 7288208 NR Desc: RNase
  misc_feature: Homolog of GI Number: 20663976 NR Desc: Chain B
  misc_feature: Useful for increasing chlorophyll and photosynthetic capacity
MATATATATCLLAVWALVAAGLFGTGLARASVAPAAVGKEQREFDYFALALQWPGTICSSTRHCCAVNGCCRSEALHTFTIHGLWPDYDDGTWPSCCRHTSFDMDKLTPLKPTLDKYWPSLYCSTSSTCFSGRGPFWAHEWEKHGTCSAPVVHEELQYFTTALDLYYKYNVTEMLATGDILVSNGKEYALSDVIDTIKHAFGGSPQIICKKGSVEELRLCFTKDLKPRDCLTTSAMYKNLSKSKHCPKKISLPTYDPIVLTNSTLEIVPEASDNGLYFFTS

SEQ ID NO: 2075 - DNA, 1699 bp, Triticum aestivum
  misc_feature: Ceres CLONE ID no. 570180
  misc_feature: Ceres CDNA ID no. 40351083
  CDS (438)..(1397): REFERENCED BY SEQ ID NO: 2076
cccccgtgtcagccgctcccagttgcccatcctctctctcaggccaaaaagcacacgcagagacgccagggagcatcgtcgaaatcaatccgagaaacggaccggctccaacttcccaatcggcggcgcggcggacgacaccggagccccggagggcggagaaacgcaggaatccaagaaacagaggcaccgaggccggcaggacattgagccgccacacacaccgcgcggctcgccccgttcagctcgcggccgctttccctgcagcgaaggaggaggaggagtaggaggtggtggtgctcgtccctgaagccgccgttgacttccgaccgccggctccggcaggaggaatctctgctcttcgcccttcccgcccggcaggggatccgcccggcgaatccaccgaatccccgctcctgcccgcgccggagaccaagatgccgccaccggtgccggccgtccggctcggggcgccgccgccgcccccgtgcctcaggacccacggggccaagatggcgcgccggcacatgtacgactggatcgtgctgctcctcctcgccgccatcgaggtcgcgctcaacctcatcacgcccttccaccgcttcgtcgccgagttcatgatggaggacctccgctaccccatgaagcccaacaccatccccgtctgggccgtcccgatatacgccgtcatcctgccgatgctcatcttcgccgccatctatgtcaagaagaagaatgcctacgacctgcatcacgccatactaggcctgctgttctccgtgctcatcaccggcgtcctcaccgatgcgatcaaggacggcgtcggccggcctcgccccaacttctactatcgatgctttcctgacggagtgccgaactatgaggcggtcactcgacaagtcatatgccacggagacgcaaaagtcatcaaagaagggcacaagagcttccccagtggccacacttcatggtcctttgccgggctgggcttcctgtcgtggtaccttgccggcaagatcagggtgtttgaccggggcggacacattgccaagctctgtgtcgtgatcctgccactgctcttcgctgcgatggtcggcgtgtcgcgggtcgcagactactggcaccactggcaggacgtgtttgccggtgggatcctcgggctggttgttgcttcgttctgctatctgcagttcttcccgcatccggctagcaaacacgggctgtggcctcatgcattccggcatcaggatcctaacccggaaactgagaaccaaggaacaacagatccccatcagtcggtgctgccgtccatggtacaacatgttgcctccatggagatgagaaccaatggccgagcgttggataacatggaggctggcagcggcagagcctggtaactgaatacgaccaccatggggatggggccaggcacgcaccaccatgagagacatcaccttgtaggtaggtaggtactagtagaactcttgttttgtagtatatgtttcttgtaaagacaaatgaaattgcgcgatttggttcgttgttggaccgaagtagatctagtccttgagttttcagaatcaatccgttgatctagtcctaaacaagtgcattttctgttcatgcaaatgcagtatatacttttgctatcacttgcatcaaaataaaataagtattttgtacaaaaaaaaaaaaaaaa

SEQ ID NO: 2076 - protein, 319 aa, Triticum aestivum
  misc_feature: Ceres CLONE ID no. 570180
  misc_feature: Ceres CDNA ID no. 40351083
  misc_feature (107)..(257): Pfam Name: PAP2 PFAM Desc: PAP2 superfamily
MPPPVPAVRLGAPPPPPCLRTHGAKMARRHMYDWIVLLLLAAIEVALNLITPFHRFVAEFMMEDLRYPMKPNTIPVWAVPIYAVILPMLIFAAIYVKKKNAYDLHHAILGLLFSVLITGVLTDAIKDGVGRPRPNFYYRCFPDGVPNYEAVTRQVICHGDAKVIKEGHKSFPSGHTSWSFAGLGFLSWYLAGKIRVFDRGGHIAKLCVVILPLLFAAMVGVSRVADYWHHWQDVFAGGILGLVVASFCYLQFFPHPASKHGLWPHAFRHQDPNPETENQGTTDPHQSVLPSMVQHVASMEMRTNGRALDNMEAGSGRAW

SEQ ID NO: 2077 - DNA, 1255 bp, Triticum aestivum
  misc_feature: Ceres CLONE ID no. 570209
  misc_feature: Ceres CDNA ID no. 35383217
  CDS (131)..(1000): REFERENCED BY SEQ ID NO: 2078
acacagcccaccgccccctccaaccccacctcaaattacacttcagcccccccgcctcgccgcgaccgacgagcgcctaggagggacccctagggtttgtctgtctgagccgcccgtctcgtcggcggcgatggcgtcggagtccgccgccgcggcggcttcgtccccggcggcgcgggccgggggcgggaaggacgaggagctggccgatctggtgcggcgcatcgtcgacgtcctctcccgctactccgatcgcctccccttcgacctcgaccgccagaagcttcgctcgcttaccacacttgctgcaattgccatcacaattgtatttgcctggaaactgttgagagctcctccagagcaacctcggaggccacggagacgggatgctccatcatctagcaacacaagcagtagatcacagccaggtgctttggtcggaacgaatgcctgctcatcggtagattcaagagcacatgaagcgatcaatcagcttttccaaccagtaaatctgactcttgagcagcttgtcaggcataaactgagcgaagggcgaagggttacctgccggttacttggtgtgattttggaggaaacaactccagaggagctccagaatcatgtcacagtgagaccttctgtcttggaggttcttctagaaattgcaaaaatttgtgatgtctatctgatggagcatgttcttgatgatgaaagtgaggaaaaggtactgtctgccctaagtgaagctgggctttttaccggtggcggtttggtgagagataaggttctcttctgcagtacggaaattggccgcacctctttcgtccggcaactggaacctgactggcacattgactcgagtcctgaaattgttcaccagttatctaggtttatcaagtatcagctgcacatttcgccacagcaaacggaaagggtgtcacccaatgttttcagctctgcaagcttggaacagttctttggaggccttgatcagagatgacaaagtgaggtcagactcaagtgagccgtggcatagtgagagcgcagaggaacatcattgttcaatttattttcttgaatggtgcaattcgtttttcttgtattgtgtgtaaaagtcttgttgtggctagtactaaacttgttctgcaatgccccataagctatggatagaaagacagtacctgtagattcatgtatcaacattgtccctgtataaccaaagtaaacagctgtcaagataaaaaaaaaaaaaaaa

SEQ ID NO: 2078 - protein, 289 aa, Triticum aestivum
  misc_feature: Ceres CLONE ID no. 570209
  misc_feature: Ceres CDNA ID no. 35383217
  misc_feature: Homolog of GI Number: 50928923 NR Desc: OSJNBa0089N06.11
  misc_feature: Homolog of GI Number: 50929569 NR Desc: OSJNBb0004A17.10
  misc_feature: Homolog of GI Number: 70663949 NR Desc: OSJNBb0004A17.13
MASESAAAAASSPAARAGGGKDEELADLVRRIVDVLSRYSDRLPFDLDRQKLRSLTTLAAIAITIVFAWKLLRAPPEQPRRPRRRDAPSSSNTSSRSQPGALVGTNACSSVDSRAHEAINQLFQPVNLTLEQLVRHKLSEGRRVTCRLLGVILEETTPEELQNHVTVRPSVLEVLLEIAKICDVYLMEHVLDDESEEKVLSALSEAGLFTGGGLVRDKVLFCSTEIGRTSFVRQLEPDWHIDSSPEIVHQLSRFIKYQLHISPQQTERVSPNVFSSASLEQFFGGLDQR

SEQ ID NO: 2079 - DNA, 554 bp, Triticum aestivum
  misc_feature: Ceres CLONE ID no. 570256
  misc_feature: Ceres CDNA ID no. 25445685
  CDS (117)..(308): REFERENCED BY SEQ ID NO: 2080
gactatgtctcaaaaaaattggattctttgacttgttggttcgatttctcttctcaaaggaacccccaacaccgccgtcggagcagcggcggcagcaagaggagaggaggagcgagatggcgccgcccagcaaggagccgtgcaagaaggaggcgtgcgacatccaggcctgcctctccaagaacctcttcgattccaagaagtgtttgaaagttattcagtcactacaatcttgttgtgagcaatgcgagtacaaatcaacacattgtggttctttgtcgggcttgctcaaaaacatttcaaagtgatgtaataagactatcactcaataaagtatgactgggaaaaataataatgcgccatcctcaacctgcagaaaggtgctgtggttgctagttgttcggtgctgagtttgtcaacacatttctttaagagggatactgatattgccgtatagctgtattatcctttgtatttcttattatgcccatgtgcagatataattcaagaaaataagtgaaccctggccttgttgtacaaaaaaaaaaaaaaaa

SEQ ID NO: 2080 - protein, 63 aa, Triticum aestivum
  misc_feature: Ceres CLONE ID no. 570256
  misc_feature: Ceres CDNA ID no. 25445685
  misc_feature: Homolog of GI Number: 30584747 NR Desc: Homo sapiens mature T
  misc_feature: Homolog of GI Number: 12803541 NR Desc: MTCP1 protein
MAPPSKEPCKKEACDIQACLSKNLFDSKKCLKVIQSLQSCCEQCEYKSTHCGSLSGLLKNISK

SEQ ID NO: 2081 - DNA, 1148 bp, Triticum aestivum
  misc_feature: Ceres CLONE ID no. 570721
  misc_feature: Ceres CDNA ID no. 35383218
  CDS (49)..(972): REFERENCED BY SEQ ID NO: 2082
ctacaccatcacacaatatccagaaccatctcactgccaacctccgccatggcgttccgacgccctctcgctctccacccgctcgtgatcgccttcgtgctggtctcctgtctcgccggcgccgccacggcgaagcagacgggccagctgaccgtgttctggggccggaacgccggcgagggcacgctgcgcgaggcctgcgacacggggctctactccaccgtcgtcatctccttctacagcgtcttcgggcacggccgctactggggcgacctctctggccaccctctcgccggcgtcggtgccgacatcaagcactgccagtccacgaacatcctcgtcctcctctccatcggcgggcccgggaacggctactccctcccgtcctccgcctccgccgcagccgtcgccgacaacctctggaacgcgcacctcggcgggcgccggaacggcgtgtaccgcccgttcggcgacgccgccgtcgacggcatcgacttctacatcgaccagggcgcccccgaccactacgacgagctggccagccgcctcgacgggtacaaccggttctaccgcggccggaagggtgtgcgcctgacggcgacgccgcggtgcgggttgcccgaccgccgcctgggggcggcgctccggacggggctgttcgagcgcatccacgtcaggttctacggcaatgacacatgctcgctggggaagggcgggacgtacggcgtggtagagcagtgggagaagtggacggcggcgttcccaaggacccaggtgtacctgggcctcgcgccggcggagagcggcgtgccggagggggcgcagggcaccgtcgccgtttacctcaagtacctctactacgacctgctgcccaaggtgcagaaggcgaacaactatggcggggtcatggtctgggacagattcgccgacaagaagacacgctggagcagcgtcgtcaacggatgggcctgatcgtttatatcgctagctggtttacagctacggatccgagtatatactacttctactgtgtatgcgtgtgtatgaataaaacggcatccatatgataatgatatatggatgtgaactcaagttgtttcttgttctagtcaatgagataaggaatatgaccaaaaaaaaaaaaaaaa

SEQ ID NO: 2082 - protein, 307 aa, Triticum aestivum
  misc_feature: Ceres CLONE ID no. 570721
  misc_feature: Ceres CDNA ID no. 35383218
  misc_feature (32)..(294): Pfam Name: Glyco_hydro_18 PFAM Desc: Glycosyl hydrolases family 18
  misc_feature: Homolog of GI Number: 18693099 NR Desc: putative xylanase inhibitor protein
  misc_feature: Homolog of GI Number: 2696229 NR Desc: chitinase
  misc_feature: Homolog of GI Number: 62733213 NR Desc: Glycosyl hydrolases family 18
  misc_feature: Homolog of GI Number: 7451381 NR Desc: chitinase
  misc_feature: Homolog of GI Number: 62733220 NR Desc: chitinase
  misc_feature: Homolog of GI Number: 55168113 NR Desc: putative chitinase
  misc_feature: Homolog of GI Number: 7451377 NR Desc: chitinase
  misc_feature: Homolog of GI Number: 7451380 NR Desc: chitinase
  misc_feature: Homolog of GI Number: 4884516 NR Desc: class III chitinase homologue
  misc_feature: Homolog of GI Number: 50947647 NR Desc: chitinase
MAFRRPLALHPLVIAFVLVSCLAGAATAKQTGQLTVFWGRNAGEGTLREACDTGLYSTVVISFYSVFGHGRYWGDLSGHPLAGVGADIKHCQSTNILVLLSIGGPGNGYSLPSSASAAAVADNLWNAHLGGRRNGVYRPFGDAAVDGIDFYIDQGAPDHYDELASRLDGYNRFYRGRKGVRLTATPRCGLPDRRLGAALRTGLFERIHVRFYGNDTCSLGKGGTYGVVEQWEKWTAAFPRTQVYLGLAPAESGVPEGAQGTVAVYLKYLYYDLLPKVQKANNYGGVMVWDRFADKKTRWSSVVNGWA

SEQ ID NO: 2083 - DNA, 1387 bp, Triticum aestivum
  misc_feature: Ceres CLONE ID no. 570748
  misc_feature: Ceres CDNA ID no. 25403214
  CDS (2)..(967): REFERENCED BY SEQ ID NO: 2084
acccaaacgggccctaaagtccacacctttttccggacaggctagaaatgccgctgtctctcgtctagtccctacagccgccgccgccgtcgccgtcgccgccgaccaacggctcaatcccgccggcctgccggccgacgcctcagccccactcccagccgccccaatcacacgccccgtgccgcccccgcccctcacgcgcgtcgccgccgccgccgccgccgcgggctccgttcttcctcgtctggacaccgcgctcccgccgcctccgctccgccccgcccacccattgggtttcgagaggtcgtgcttcgctcctatggcggcatccgacgaaatggctcagaaggacgaagatgatatgaaggacgaaaaacaggctgagaaggagtacgctgatttcgaggcgagggtcaagaggacgatatacatcgaccacctctcccctctggtcaccagccaggtcatcaaggcgtctctcgcccagtgcgccaatgtcgtcaacacggagttcatcgagaactacacgatcgagtacgagatccccgccgctgcgttggtggaggtggacaacgtgtcgcaggcccaggctgctgtggacctgatgaacaacttccctttcatgctcggcgggatgcccaggcctgtgagggctgcctttgcaaagcccgagatgtttccggaccgccctaggaagcctggcttgaagattgagttcagctgggtaaagcagggagatccggggtatgatgggatgaataagctcaagggccttatgaggaggcaagaagcagaaaatatggcactcatcaagaatcaattggaagaggagaaggagctggcggcgcagcagcaggaaaccctggtagcaaacagcaataagtacgacatgctggagaacctcgtgaacaacggggaaatcactaaactcgctcagcattacaaggtcaagctgggcgacgactgatgggttcccgacgttcaagctcctccctcggagactgactgcagtcaccagtgcaagcagattcttgttccgcccagggcatccccactcacagatgcgatggcgtgatagtgataatccattggctagttctcatcttgtgctgggatgatagtaataaagcattgatttgtttggtgcgtccgtgctctagttgtggccagctgcaaagcagcagttccttagtgtaacaactgtcgatacattatgatccgatcagttgatggtacgcttggtgtaataataatctttgtatgacctccaagcttagcatgtcagcaagatgatccaacgatgtctgatattgtctcctgcattgcttgaaacttgcttgatatcggataaaaaaaaaaaaaaaaaaaaataaaaaaaaaaaaaaaa

SEQ ID NO: 2084 - protein, 201 aa, Triticum aestivum
  misc_feature: Ceres CLONE ID no. 570748
  misc_feature: Ceres CDNA ID no. 25403214
  misc_feature: Homolog of GI Number: 50929867 NR Desc: OSJNBa0039K24.21
  misc_feature: Homolog of GI Number: 5777619 NR Desc: CAA30377.1 protein
  misc_feature: Homolog of GI Number: 44917519 NR Desc: At1g02405
  misc_feature: Homolog of GI Number: 46396546 NR Desc: Chitin
MKDEKQAEKEYADFEARVKRTIYIDHLSPLVTSQVIKASLAQCANVVNTEFIENYTIEYEIPAAALVEVDNVSQAQAAVDLMNNFPFMLGGMPRPVRAAFAKPEMFPDRPRKPGLKIEFSWVKQGDPGYDGMNKLKGLMRRQEAENMALIKNQLEEEKELAAQQQETLVANSNKYDMLENLVNNGEITKLAQHYKVKLGDD

SEQ ID NO: 2085 - DNA, 1789 bp, Triticum aestivum
  misc_feature: Ceres CLONE ID no. 570890
  misc_feature: Ceres CDNA ID no. 36582438
  CDS (94)..(1431): REFERENCED BY SEQ ID NO: 2086
aaaaaaaaaaatccgaattcccgaatcccccacctccaccccctcccccgcaaccaccaccaccggaccaccgtcaccggcggcgaaggcacgatgagggagatcctgcacatacagggcgggcagtgcgggaaccagatcggggccaagttctgggaggtgatctgcgacgagcacgggatcgacgggacggggcgctacgcgggggactcggacctgcagctggagcggatcaacgtctactacaacgaggcgagcgggggccggttcgtgccccgcgccgtgctcatggacctcgagccggggaccatggactcggtgcgctccggccccttcggccagatcttccgccccgacaacttcgtcttcggccagtccggcgccggcaacaactgggccaagggacactacaccgagggcgccgagctcatcgattccgtcctcgacgtcgtccgcaaggaggccgagaactgcgactgcctccagggattccaagtttgccattccttgggaggaggcactggatctgggatgggcacccttcttatttctaagattagggaggagtaccctgaccgaatgatgctgacattctctgtcttcccatcaccaaaggtctccgacaccgttgttgagccatacaatgctacactttctgttcaccaacttgttgagaacgctgatgagtgtatggtgcttgacaatgaagctctatacgacatatgcttccgcacactaaagcttgccaccccttcctttggtgacctgaaccatcttatctctgctaccatgagcggtgtcacatgctgcctgaggttccctggacaactcaactccgatcttcgcaagcttgctgtgaatctcatcccattcccccgcctccacttcttcatggttggcttcgcaccactgacgtcgcgtgggtcacaaatgtaccgtgctctcacagtccctgagctgacccagcaaatgtgggatgccaagaacatgatgtgcgccgcagacccccgccatggccgctacctcaccgcctcggcctgcttccgagggaagatgagcaccaaggaggtggacgagcagatgctcaacgtccagaacaagaactcgtcgtactttgtggagtggatccccaacaacgtcaagtcgagcgtgtgcgacatgccgcccagggggctgaagatggcgggcaccttcgtcggcaactccacgtccatccaggagatgttccgcagggtgagcgagcagttcacggccatgttcaggaggaaggccttcctgcactggtacacgggcgagggcatggacgagatggagttcaccgaggccgagagcaacatgaacgacctcgtcgccgagtaccagcagtaccaggacgcgaccgccgacgaggagtacgacgaggaggaggaagaggaacgcgacgcggagtagtggcgccgtgccctgctccaccccagctatatgtcccccggttcaggtctgtcgccatgtccaggtcgcgtttcctccggtgagggtttgtgtggtttcctcctgtggcttggatgagtcgaggttgcgtcttgtgctccgttttgtaatttgctacggctagtagtgcgttgcagtctgtcgtgttcagcatcatttggtcagtcggtccatagctgacgatggcctgaactgtcgagtgctctccttgagctagtcgtcgccttgtaagttctgacaagtattattgttagtcgttcgcttcagcaaccaaaaaatgagtattggtagtggtttctcattaaaaaaaaaaaaaaaa

SEQ ID NO: 2086 - protein, 445 aa, Triticum aestivum
  misc_feature: Ceres CLONE ID no. 570890
  misc_feature: Ceres CDNA ID no. 36582438
  misc_feature: The plant flowers significantly late compared to wild-type.
  misc_feature: Useful for making plants with modulated flowering time
  misc_feature (246)..(383): Pfam Name: Tubulin_C PFAM Desc: Tubulin/FtsZ family
  misc_feature (45)..(244): Pfam Name: Tubulin PFAM Desc: Tubulin/FtsZ family
  misc_feature: Homolog of GI Number: 61877091 NR Desc:  similar to tubulin beta
  misc_feature: Homolog of GI Number: 74003992 NR Desc:  similar to tubulin
  misc_feature: Homolog of GI Number: 62663465 NR Desc:  similar to tubulin
  misc_feature: Homolog of GI Number: 73987242 NR Desc:  similar to tubulin
  misc_feature: Homolog of GI Number: 55644501 NR Desc:  tubulin
  misc_feature: Homolog of GI Number: 74053562 NR Desc: Tubulin beta
  misc_feature: Homolog of GI Number: 8928415 NR Desc: Tubulin beta
  misc_feature: Homolog of GI Number: 10242164 NR Desc: beta tubulin
  misc_feature: Homolog of GI Number: 4415990 NR Desc: beta
  misc_feature: Homolog of GI Number: 4098323 NR Desc: beta
MREILHIQGGQCGNQIGAKFWEVICDEHGIDGTGRYAGDSDLQLERINVYYNEASGGRFVPRAVLMDLEPGTMDSVRSGPFGQIFRPDNFVFGQSGAGNNWAKGHYTEGAELIDSVLDVVRKEAENCDCLQGFQVCHSLGGGTGSGMGTLLISKIREEYPDRMMLTFSVFPSPKVSDTVVEPYNATLSVHQLVENADECMVLDNEALYDICFRTLKLATPSFGDLNHLISATMSGVTCCLRFPGQLNSDLRKLAVNLIPFPRLHFFMVGFAPLTSRGSQMYRALTVPELTQQMWDAKNMMCAADPRHGRYLTASACFRGKMSTKEVDEQMLNVQNKNSSYFVEWIPNNVKSSVCDMPPRGLKMAGTFVGNSTSIQEMFRRVSEQFTAMFRRKAFLHWYTGEGMDEMEFTEAESNMNDLVAEYQQYQDATADEEYDEEEEEERDAE

SEQ ID NO: 2087 - DNA, 1920 bp, Triticum aestivum
  misc_feature: Ceres CLONE ID no. 570922
  misc_feature: Ceres CDNA ID no. 24766223
  CDS (221)..(1558): REFERENCED BY SEQ ID NO: 2088
acgcataaccgccgtgccgtgtttctggggatcgacatcgcacgcacgcacctggcacctccctccccgaatccatccatcccaccgctcttttagcagctgcccccgttgcttgcgtccaactcaaccccactcctccgcctcccccctctcccatctgctgccgctgctctgctctgctctgctcgcccctacccgcgatcgccgcggccagcccgccatggacgaggagtacgacgtgatcgtgctgggcacggggctcaaggagtgcatcctcagcggcctcctctccgtcgacggcctcaaggttttgcacatggatagaaatgactactatggaggagattccacctccctcaacttgaaccagctctggaagaagttcaggggggaagaaaaaccaccggcgcatttaggtgcgagcagagactacaatgtagacatggttccaaagtttatgatggcgaacggaactttggttcgtactctcattcacactgatgtaacgaagtatctgtctttcaaagctgttgatggaagctttgtcttcagcaaagggaagattcacaaggttcctgccactgacatggaggctctaaaatcccctttaatgggcatatttgagaaacgtagagcaaggaacttcttcatttatgtccaagattacaatgatgctgatccaagaacacatcaaggattggaccttacaaggatgacaactagagaattgatcgcgaaacacggattgagtgatgatactatagatttcattggccatgcgcttgctcttcacagggacgatcgctacctaagcgagccagcaattgatactgttaaaagaatgaaactctattctgagtctcttgcacggttccaaggaggctcaccttatatttacccattgtatgggttgggtgagctgccacaggcttttgcacgtctaagtgctgtttatggtggcacttatatgttaaataagccagagtgcaaggttgaatttgatatggaggggaaagtgtgtggtgttacatcagaaggtgaaactgccaagtgcaagaaggttgtctgtgatccttcttacttggccaacaaggtaaggaagattggaaaagttgcacgagcaattgctattatgagccacccaattccaaatgcaaatgattcccactcgattcagattattttaccacaaaagcaacttgggcgcaagtcagacatgtatgtcttctgttgctcgtacacccacaatgtcgcaccaaaagggaagttcattgcatttgtgtctgcagaagcagagactgataacccacagtccgaactaaagcctggaatcgatctacttggtccagtagatgaattgttttttgatatgtatgacagatatgaacccgtcaatgaaccttctcttgataattgctttgtctcatcgagttatgatgccactactcactttgagacaactgtcacagatgttcttaatatgtacacactgattactggaaagactgttgatcttagcgttgatctcagcgctgccagcgctgcagaagagtactagatctcatcaaaccaagcattttcttcaagactatactaaatggaggaacaccaccggaatcctactgcaggatggtcatgtgtgacatgagctgcatactgcgtagggggttcaggtgcgtagggggttcaggtccacgcctgccagcagcactatgcgaaattattatatgtggaatggtgctgatttccttcgttaacttccatattgatccactgggttgtaaacgttattctatcgtaacgatggctttagcatgttcatgttcgtcttgttgatgtattctacagttatacatattggtgtcttggatgtattttccttccgagtaaggtcaatgtggtttaaaaaaaaaaaaaaaa

SEQ ID NO: 2088 - protein, 445 aa, Triticum aestivum
  misc_feature: Ceres CLONE ID no. 570922
  misc_feature: Ceres CDNA ID no. 24766223
  misc_feature (1)..(438): Pfam Name: GDI PFAM Desc: GDP dissociation inhibitor
  misc_feature: Homolog of GI Number: 21360457 NR Desc: At2g44100/F6E13.23
  misc_feature: Homolog of GI Number: 58465454 NR Desc: GDP dissociation inhibitor 1
  misc_feature: Homolog of GI Number: 33354069 NR Desc: GDP dissociation inhibitor 1
  misc_feature: Homolog of GI Number: 17473582 NR Desc: GDP dissociation inhibitor
  misc_feature: Homolog of GI Number: 3175990 NR Desc: GDP dissociation inhibitor
  misc_feature: Homolog of GI Number: 40204891 NR Desc: GDP dissociation inhibitor
  misc_feature: Homolog of GI Number: 2501850 NR Desc: GDP dissociation inhibitor
  misc_feature: Homolog of GI Number: 2384758 NR Desc: GDP dissociation inhibitor protein OsGDI1
  misc_feature: Homolog of GI Number: 2384760 NR Desc: GDP dissociation inhibitor protein OsGDI2
  misc_feature: Homolog of GI Number: 1550740 NR Desc: GDP
MDEEYDVIVLGTGLKECILSGLLSVDGLKVLHMDRNDYYGGDSTSLNLNQLWKKFRGEEKPPAHLGASRDYNVDMVPKFMMANGTLVRTLIHTDVTKYLSFKAVDGSFVFSKGKIHKVPATDMEALKSPLMGIFEKRRARNFFIYVQDYNDADPRTHQGLDLTRMTTRELIAKHGLSDDTIDFIGHALALHRDDRYLSEPAIDTVKRMKLYSESLARFQGGSPYIYPLYGLGELPQAFARLSAVYGGTYMLNKPECKVEFDMEGKVCGVTSEGETAKCKKVVCDPSYLANKVRKIGKVARAIAIMSHPIPNANDSHSIQIILPQKQLGRKSDMYVFCCSYTHNVAPKGKFIAFVSAEAETDNPQSELKPGIDLLGPVDELFFDMYDRYEPVNEPSLDNCFVSSSYDATTHFETTVTDVLNMYTLITGKTVDLSVDLSAASAAEEY

SEQ ID NO: 2089 - DNA, 1013 bp, Zea mays
  misc_feature: Ceres CLONE ID no. 570959
  misc_feature: Ceres CDNA ID no. 29191887
  CDS (188)..(796): REFERENCED BY SEQ ID NO: 2090
gagctaaccgcctgcctgccttttcttctctcgtccaccctaggtctcagtctctgtctctgtctctgctcgcgctcttgtggagctactaggtgaccgtcgcggccgccctacgccacgtgctcgatccagcctcgtcggcttcttcgcacccgtcaccggcggtcagcacccaccaggttcatagatggcagagacggtgttcaccccctctttggaagggatgaagcatgtgaaggcggagaacggagtcattctcaccaagcccttccttgatgtctgcaagcaaatcttgcctgtcctggataaatttggagctgctatggcaattgtaaagaatgatatcagcggcaatatcacaaggctggaaaacaagtattcttcagatccatcgaagtatggacacttgtacagcatggttcaggaagaagttcaaaacaagaccgcgaaaggttcctcaagctgcacaaatggtcttctgtggctcacgagggccatggatttccttgttgagttgttccgtaacctgcttgagcatccagactggaccatgactcaagcttgcactgattcatacaccaagaccctcaagaaatttcatggctggcttgccagttctagttttacggtggccatgaagctctctcctaatagagataaatttatggaggtcattagtggaactggtgatatcaatgcagatatggagaaattttgcacaaccttctctccttttctcaaagaaaatcacgagtttctggcgagcgttggtcttgatgatatgaaggcttcgtagagcgatctccaaggtggtgattacaacaaaataagcgtgtcttatcaaactcaagtgttgcagaggatatacctgttttctgtagccatctccccattgaaaattatacagggtgataataatttttccgcatgattaaccatggctacttacacagcgacttgacagtactctacaaatttactttccaaagttaaagaaaaaaaaaaaaaaaaaa

SEQ ID NO: 2090 - protein, 202 aa, Zea mays
  misc_feature: Ceres CLONE ID no. 570959
  misc_feature: Ceres CDNA ID no. 29191887
  misc_feature: null
  misc_feature: Useful for making plants with modulated oxidative stress sensitivity
  misc_feature: Homolog of GI Number: 50910651 NR Desc: glycolipid transfer protein
  misc_feature: Homolog of GI Number: 50924476 NR Desc: OSJNBa0006B20.21
  misc_feature: Homolog of GI Number: 39545646 NR Desc: OJ000114_01.1
  misc_feature: Homolog of GI Number: 72037348 NR Desc:  similar to pleckstrin homology domain containing
  misc_feature: Homolog of GI Number: 45185166 NR Desc: ABL064Wp
  misc_feature: Homolog of GI Number: 55250041 NR Desc: Zgc:101886
  misc_feature: Homolog of GI Number: 50732732 NR Desc:  similar to CDNA sequence BC052360
  misc_feature: Homolog of GI Number: 62647308 NR Desc:  similar to phosphoinositol 4
  misc_feature: Homolog of GI Number: 30481662 NR Desc: Pleckstrin homology domain containing
  misc_feature: Homolog of GI Number: 57096452 NR Desc:  similar to phosphoinositol 4
MAETVFTPSLEGMKHVKAENGVILTKPFLDVCKQILPVLDKFGAAMAIVKNDISGNITRLENKYSSDPSKYGHLYSMVQEEVQNKTAKGSSSCTNGLLWLTRAMDFLVELFRNLLEHPDWTMTQACTDSYTKTLKKFHGWLASSSFTVAMKLSPNRDKFMEVISGTGDINADMEKFCTTFSPFLKENHEFLASVGLDDMKAS

SEQ ID NO: 2091 - DNA, 1021 bp, Glycine max
  misc_feature: Ceres CLONE ID no. 571276
  misc_feature: Ceres CDNA ID no. 29191858
  CDS (166)..(747): REFERENCED BY SEQ ID NO: 2092
ataacattagcgcattcccaccacatgcgcagacacgtgatctaggatctctctctatctgggatctgcttccttctcttctctttctcaattctcattcataattctaattcattcctccgatctgcgactttctatttctccctcaacacaacacgagacaacatgttcctctttgactggttctatggcattctcgcttccctcggtctctggcagaaagaagccaaaattctcttccttggtctcgataatgccggcaaaaccaccctccttcacatgctcaaagacgagagattagttcagcaccagccgacccagcaccccacttcggaggaattgagcattgggaagatcaagtttaaggctttcgatttggggggccatcaagttgctcgcagggtctggaaagactattatgccaaggtggatgctgttgtgtacctggttgacgcctttgacaaagagaggttcgcagaatctaagaaggagctcgatgccttgctttcagatgaatccttggcaaatgttccttttcttgtgctaggcaacaagattgacatcccttacgcagcttcagaagacgagctgcgatatcatctaggcctgaccaatttcaccacaggcaagggaaagatgaacctcacagactccaaccttcgaccccttgaagtgttcatgtgcagcattgtgcgcaagatggggtatggtgaaggcttccagtggctaagccaatacatcaagtagagtccttattcattcttagttcccctttctcttgtcaactagccctgtctgcagttacatcagaagataattgacctttgtttttgcttttgatgatttttgattggattatttgatacaactgcagtgatattacatgataaaatttgtatcttcaaagattttttggggggaatgttctcctttgaaatacttaattctgctgtaggatggtatggcttggaaggaacaataataaatctggaagaatgttagttcaaaaaaaaaaaaaaaa

SEQ ID NO: 2092 - protein, 193 aa, Glycine max
  misc_feature: Ceres CLONE ID no. 571276
  misc_feature: Ceres CDNA ID no. 29191858
  misc_feature (5)..(192): Pfam Name: Arf PFAM Desc: ADP
  misc_feature: Homolog of GI Number: 20465729 NR Desc: putative SAR1/GTP
  misc_feature: Homolog of GI Number: 20465533 NR Desc: putative GTP
  misc_feature: Homolog of GI Number: 2108345 NR Desc: small GTP
  misc_feature: Homolog of GI Number: 21436475 NR Desc: putative Sar1 GTP binding protein
  misc_feature: Homolog of GI Number: 3450893 NR Desc: ras
  misc_feature: Homolog of GI Number: 6563322 NR Desc: small GTP
  misc_feature: Homolog of GI Number: 34894960 NR Desc: putative GTP
  misc_feature: Homolog of GI Number: 77416955 NR Desc: NtSar1 protein
  misc_feature: Homolog of GI Number: 76573331 NR Desc: small GTP
  misc_feature: Homolog of GI Number: 1616612 NR Desc: small GTP
MFLFDWFYGILASLGLWQKEAKILFLGLDNAGKTTLLHMLKDERLVQHQPTQHPTSEELSIGKIKFKAFDLGGHQVARRVWKDYYAKVDAVVYLVDAFDKERFAESKKELDALLSDESLANVPFLVLGNKIDIPYAASEDELRYHLGLTNFTTGKGKMNLTDSNLRPLEVFMCSIVRKMGYGEGFQWLSQYIK

SEQ ID NO: 2093 - DNA, 1323 bp, Glycine max
  misc_feature: Ceres CLONE ID no. 571291
  misc_feature: Ceres CDNA ID no. 25891411
  CDS (117)..(995): REFERENCED BY SEQ ID NO: 2094
aaaaacatgtgtgtccccttagccaagctcgcgtctcacttctctctcttatattaatcactcccgcacacagagcataattcacctttcttttccgaccaaaggttcgccagaaaatgcttctatcctcctcctgctccgccgccggctccgccgtctccggcgagatcatgctgttcggcgtgagagtcgtagtggactccatgaggaagagcgtgagtatgaacaacctctcgcagtacgagctccctcgcgacgccgccaacgccaaagacgacgtcgctgccggctacgcctccgctgacgatgccgctccgataaactccggcaagaaccgcgaccgcaagcgagggattccatggacggaggaagagcacaagctattcttggtggggttgcagaaagtggggaaaggtgattggagagggatctcaaggaactatgtcaaaacgaggacgccaacacaggttgctagccatgctcagaagtactttctccgccgcaccaacctcaatcgccggcgccggagatccagcctctttgacatcaccaccgactcggtctctacaacccctgtggaggaaggacagatccagcatcaagataatgtgtctctctttcgtcccgtttaccctgtaacccctgaaggaagctacatgaatggttttccaatgatgtccatgtatccaaaggatgttggttctcgagtcatgtcagttcaagctgggaatccaatggaaacactcactttagaacaaggaaatgtggaacagaatgatccaagtactaagcttgtttgtacaatccctattgttccagatcatagtggctccacagtgtctgatatcactgcaagtttgagttccattgatccaccaacactgtctctcgggttatctttgtcatctagtcaaagacaaacatcatcaacacattctgctttacatgcactgccatgcttcaacaatcaagatagcatcataagtgttgcttaagaaagataacatatctctgtggcccattatctagagctacattggattcacagagatgtttatctcttatttcctttctcttttggtgggagaaggataaaagatgttaaaggaaaggacgatgaatcagagaaggcaaggtaataagtcatgagaccaatttgatccttctgttccttgtacggaccctggaaaggtcctgtcatgtttttgtttattgtttattggccctttttttgtttgtagttactataactgaaaataaccaagtacttgctgttaatttttatgaatataaatatgggctataccaaaaaaaaaaaaaaaa

SEQ ID NO: 2094 - protein, 292 aa, Glycine max
  misc_feature: Ceres CLONE ID no. 571291
  misc_feature: Ceres CDNA ID no. 25891411
  misc_feature: Useful for making plants with modulated growth and phenotype characteristics
  misc_feature: The sequence is a functional homolog of  SEQ ID NO 1064 in the  11/479,226 US patent application
  misc_feature: The sequence is a functional homolog of  SEQ ID NO 462 in the  10/412,699 US patent application
  misc_feature (79)..(126): Pfam Name: Myb_DNA PFAM Desc: Myb
  misc_feature: Homolog of GI Number: 28629811 NR Desc: transcription factor Myb1
  misc_feature: Homolog of GI Number: 82621140 NR Desc: putative DNA binding protein
  misc_feature: Homolog of GI Number: 62733650 NR Desc: putative DNA binding protein
  misc_feature: Homolog of GI Number: 20465857 NR Desc: putative myb
  misc_feature: Homolog of GI Number: 19310831 NR Desc: putative Myb
  misc_feature: Homolog of GI Number: 21593684 NR Desc: Myb
  misc_feature: Homolog of GI Number: 20465653 NR Desc: putative Myb
  misc_feature: Homolog of GI Number: 37536856 NR Desc: putative Myb
  misc_feature: Homolog of GI Number: 24850307 NR Desc: transcription factor MYBS3
  misc_feature: Homolog of GI Number: 7705206 NR Desc: MybSt1
  misc_feature: Useful for making plants with increased biomass and foliage
  misc_feature: Useful for making shorter plants
MLLSSSCSAAGSAVSGEIMLFGVRVVVDSMRKSVSMNNLSQYELPRDAANAKDDVAAGYASADDAAPINSGKNRDRKRGIPWTEEEHKLFLVGLQKVGKGDWRGISRNYVKTRTPTQVASHAQKYFLRRTNLNRRRRRSSLFDITTDSVSTTPVEEGQIQHQDNVSLFRPVYPVTPEGSYMNGFPMMSMYPKDVGSRVMSVQAGNPMETLTLEQGNVEQNDPSTKLVCTIPIVPDHSGSTVSDITASLSSIDPPTLSLGLSLSSSQRQTSSTHSALHALPCFNNQDSIISVA

SEQ ID NO: 2095 - DNA, 1032 bp, Glycine max
  misc_feature: Ceres CLONE ID no. 571329
  misc_feature: Ceres CDNA ID no. 40351084
  CDS (118)..(909): REFERENCED BY SEQ ID NO: 2096
aaaacctcacatattttcgtccattaccacttccacttttcctctctctcgttttggtcactccaaagtccaaatcgatcactcttcactctcattattcccaacctaacaacaacaatgatcccagaacactactccgactcatctctcttccacagctccctccttaccctcttcctaatcgcaccccccaccttcctctccctcaccttcctccaggccccctacggcaagcaccacaggcccggctgggggcccaacctccctccccccttagcctggctcctcatggaaagcccaaccctctggctcaccctcctgctcttcccactgggcctccactcccacaaccccaaagcccaggccctcatcacccccttcctaatccactacttcaaccgcaccatcctctaccctctccacctcctcctcactccttcaaagaaaaccacaccgggcttccccctcagcgtagccctaatggcattcgccttcaacgttctcaattcctacctccaggcccgaacggtctctcactacaacaatcaccatgatgactcgggctttttctggttccggtttttgtgtgggcttttggtgtttttattggggatggggattaatgtatgggctgatagggttttgttgcggctcaagagcgagggaaagggctacgtggtgccgcgcggtgggttgttcgagctcgtggcgtgtccgaattactttggggagattgtcgagtggctcggctgggccgtgatgacttggtcatgggccgggctgggcttttttgtttacacttttgcgaatttgggtccaagggcccgggccaaccgtaggtggtatttggagaagtttggggaggattatccaaaggagagaaaggctgttattccttacttgtattgagtttttttttaatgattttcttttattggatttggaattgggaatgtgggtaaaatgatgaataattgaatgtggtgatgaatgatgcaatgcagctcaacttgctcaaaaaaaaaaaaaaaa

SEQ ID NO: 2096 - protein, 263 aa, Glycine max
  misc_feature: Ceres CLONE ID no. 571329
  misc_feature: Ceres CDNA ID no. 40351084
  misc_feature (113)..(263): Pfam Name: Steroid_dh PFAM Desc: 3
MIPEHYSDSSLFHSSLLTLFLIAPPTFLSLTFLQAPYGKHHRPGWGPNLPPPLAWLLMESPTLWLTLLLFPLGLHSHNPKAQALITPFLIHYFNRTILYPLHLLLTPSKKTTPGFPLSVALMAFAFNVLNSYLQARTVSHYNNHHDDSGFFWFRFLCGLLVFLLGMGINVWADRVLLRLKSEGKGYVVPRGGLFELVACPNYFGEIVEWLGWAVMTWSWAGLGFFVYTFANLGPRARANRRWYLEKFGEDYPKERKAVIPYLY

SEQ ID NO: 2097 - DNA, 1700 bp, Glycine max
  misc_feature: Ceres CLONE ID no. 571788
  misc_feature: Ceres CDNA ID no. 25401478
  CDS (47)..(1480): REFERENCED BY SEQ ID NO: 2098
cactgtttaatttctgagcttagcatcgtatagttcggatcgatgaatgaacgaggttcgggttttcaattttcacgggcatgagatggatcgggaagaatatttgcggaagtgttccaatatgaaatgccaaagagttcaggtggatgaatcatttgtacctgctcttcaagatgaagtaatggaagttgagcatttgcttgcagaacctagaaacgttcatgcttccctggatggtagtttggattctcatacaactttgaatgacaaggatgatttggaactggaggtccttgatggattgctggatgatgttgaaattgatgatcttgaaggaactggtggttttgctggtgcatgtgaagaatattttttggattttggatttgccgacaaatttgaggaggtactaggctcaggtccttttgaaggttcactcttgcaaatttcaagttctgaaagtcattcttccggattaagcggaagtagcattgttggtggggttttagaatcaaccaaagtacctattgcaaaatctgaatgcaaaaatgattctctagatgagacaataacctatgaagcacatggtgccttcaggaacaatccaagtcaaccatcaaaagtaaattgcagatacaacatttcacttgatatacaacatctgcaagagttggaaaacaatagtcatttagctgctggtatattgacttgtaagaagggaaaaggtcctgttgaaaaaggccaacctgctgtacttagagagaagagattccgaaagcctacccagaggtacattgaagaattttcaaattcaaggtcaaaggaaaaggcaccaactgctgttacaaaaactgaacatttaagtgactcatcatgtgatgtacttcatataagaattaaagcattgaaaaagagtccaagcgagaagtctagtaatgaaaatagtgatgtgatgcttcctgagttgcaagttcgcaaaaggcgtctggagaaagagaaacttgagtatgacaaggagttatttccctcggaatccgaggatgaatgttcgacatcaaaaagatctagaaggaaagatcgaagaaagcatcagaagatgtggactctccctgaagtgttgaagttggttgaaggcatatctgaatatggagttggtcgatggactgacataaagaggtttctgttttcttcttcaagctaccgaactcccatagatctcagggacaagtggcggaaccttttgagagccagttctgcacagaaaacctcgagagaggctgagcaaaatgacgagcttgccctgcgtcccttgccatttaatgtggtacatcgtgtgcgagaattggctaaaattcacccatacccaaggcaacgtgggtcaaagaggttgcgtgttagccaagctggctcttctatcattgctaaagattctcctccccttagtcttagcaaaagaaatgtacgtaggaagtttacttagaagtccatatgtaaaacaatccatggaaatctatagtcaaaagaatcttgttgaaatttaggtattacatttgcacaattttatatctacaaaggcacagaaattttgaattgtaaacatgaggaatcattagttgtcctacaatagtttgcgatgcttaatgccttacacccttatagtatgattttcttagtgcactaatcgaaaaaaaaaaaaaaaa

SEQ ID NO: 2098 - protein, 477 aa, Glycine max
  misc_feature: Ceres CLONE ID no. 571788
  misc_feature: Ceres CDNA ID no. 25401478
  misc_feature (349)..(399): Pfam Name: Myb_DNA PFAM Desc: Myb
  misc_feature: Homolog of GI Number: 30687001 NR Desc: pathogen
  misc_feature: Homolog of GI Number: 50913321 NR Desc: MYB transcription factor
  misc_feature: Homolog of GI Number: 50913319 NR Desc: MYB transcription factor
  misc_feature: Homolog of GI Number: 21700907 NR Desc: At1g72650/F28P22_16
  misc_feature: Homolog of GI Number: 42572085 NR Desc: myb family transcription factor
  misc_feature: Homolog of GI Number: 8778456 NR Desc: F1L3.16
MNEVRVFNFHGHEMDREEYLRKCSNMKCQRVQVDESFVPALQDEVMEVEHLLAEPRNVHASLDGSLDSHTTLNDKDDLELEVLDGLLDDVEIDDLEGTGGFAGACEEYFLDFGFADKFEEVLGSGPFEGSLLQISSSESHSSGLSGSSIVGGVLESTKVPIAKSECKNDSLDETITYEAHGAFRNNPSQPSKVNCRYNISLDIQHLQELENNSHLAAGILTCKKGKGPVEKGQPAVLREKRFRKPTQRYIEEFSNSRSKEKAPTAVTKTEHLSDSSCDVLHIRIKALKKSPSEKSSNENSDVMLPELQVRKRRLEKEKLEYDKELFPSESEDECSTSKRSRRKDRRKHQKMWTLPEVLKLVEGISEYGVGRWTDIKRFLFSSSSYRTPIDLRDKWRNLLRASSAQKTSREAEQNDELALRPLPFNVVHRVRELAKIHPYPRQRGSKRLRVSQAGSSIIAKDSPPLSLSKRNVRRKFT

SEQ ID NO: 2099 - DNA, 1334 bp, Glycine max
  misc_feature: Ceres CLONE ID no. 572179
  misc_feature: Ceres CDNA ID no. 36706430
  CDS (98)..(1078): REFERENCED BY SEQ ID NO: 2100
aaaagagaaatgaaattgcctctttcaagaagcatctgagtgcttattatttgtaatatatatagtcactcaagcttctaggatttgtgccagctacatgaaaatgggaagcaacttcaggtttttgagtctttgcctcttggcattgattgcatcaacccatgctcaacttcagcttggtttttatgccaagagttgcccaaacgctgagcaaatcgttttgaaatttgtccatgaccatatccacaatgctccatcactagcagctgcattgataagaatgcacttccatgactgttttgtaaggggatgtgatgcatcagtccttctgaactcaacaaccaatcaagctgaaaagaatgctcctccaaatctcacagtaagaggctttgacttcattgacagaataaagagccttgttgaggcagaatgccctggtgtggtctcttgtgctgatatcctcactttgtctgccagagacactattgtagccacaggtggaccattttggaaagttccaacaggtcgaagagatggggtcatctctaacttgacggaagccagagataacattcctgctccatcttctaactttaccaccctacaaacactctttgccaaccaaggacttgatttgaaggacttggtcctgctctctggtgctcacacaattggtatcgctcattgctcatcattgtcaaaccgcttgttcaatttcactggcaagggtgatcaagacccgtcattagacagtgaatatgctgcaaatctgaaagccttcaagtgcacggacctcaataagttgaacaccacaaaaattgagatggaccctggaagtcgcaagacatttgatcttagctactatagtcatgtgattaagagaaggggtctatttgagtcagatgctgcattgttgacaaactcagttacaaaggctcaaatcattgaattgcttgaagggtcagttgaaaatttctttgctgagtttgcaacctccatggagaaaatgggaagaattaatgtaaagacagggacagaaggagagatcaggaagcattgtgcatttgtaaatagctaagaatcttgtcttgttcatggatgaatcttgtatcatttattttttgggtttggttatttatgctatgccatgtttttttattagttatgctatgccatgtggtgtctgtctacatatgagtgatcccgtatggtatggttgttgtatgtgcgatggaataagtgggttccattgttattcttataatttccaactttgctggtagatcttgtaataagaagcagaatttcttgtgctaccaaaaaaaaaaaaaaaa

SEQ ID NO: 2100 - protein, 326 aa, Glycine max
  misc_feature: Ceres CLONE ID no. 572179
  misc_feature: Ceres CDNA ID no. 36706430
  misc_feature (41)..(288): Pfam Name: peroxidase PFAM Desc: Peroxidase
  misc_feature: Homolog of GI Number: 4204759 NR Desc: peroxidase precursor
  misc_feature: Homolog of GI Number: 4204761 NR Desc: peroxidase precursor
  misc_feature: Homolog of GI Number: 50261255 NR Desc: CBRCI35
  misc_feature: Homolog of GI Number: 2738254 NR Desc: peroxidase precursor
  misc_feature: Homolog of GI Number: 21536908 NR Desc: putative peroxidase
  misc_feature: Homolog of GI Number: 7267828 NR Desc: peroxidase ATP19a
  misc_feature: Homolog of GI Number: 1546692 NR Desc: peroxidase
  misc_feature: Homolog of GI Number: 51511062 NR Desc: peroxidase a
  misc_feature: Homolog of GI Number: 678547 NR Desc: peroxidase
  misc_feature: Homolog of GI Number: 21537041 NR Desc: putative peroxidase
MKMGSNFRFLSLCLLALIASTHAQLQLGFYAKSCPNAEQIVLKFVHDHIHNAPSLAAALIRMHFHDCFVRGCDASVLLNSTTNQAEKNAPPNLTVRGFDFIDRIKSLVEAECPGVVSCADILTLSARDTIVATGGPFWKVPTGRRDGVISNLTEARDNIPAPSSNFTTLQTLFANQGLDLKDLVLLSGAHTIGIAHCSSLSNRLFNFTGKGDQDPSLDSEYAANLKAFKCTDLNKLNTTKIEMDPGSRKTFDLSYYSHVIKRRGLFESDAALLTNSVTKAQIIELLEGSVENFFAEFATSMEKMGRINVKTGTEGEIRKHCAFVNS

SEQ ID NO: 2101 - DNA, 1267 bp, Glycine max
  misc_feature: Ceres CLONE ID no. 573215
  misc_feature: Ceres CDNA ID no. 40351085
  CDS (223)..(999): REFERENCED BY SEQ ID NO: 2102
atcgatcacacagcttttgttctcgcacttcgctgtctgaggttctggattctcagtgtttgcgaagcgctgcatcatcctttggggaaggtaacaaaaaaagatatgcctgtttctttcttgcatggagctcatgtcatcttccatcacatgattgagagcaccgcattagaggcacatattttcattccttccacgtttacattgaatattttatcatgaatggatcatcaagggcatagccagaacccatctatgggggtggttggtagtggtgctcaattagcatatggttctaacccatatcagccaggccaaataactgggccaccggggtctgttgtgacatcagttggtaccattcaatccacacctgctggagctcagctaggacagcatcaacttgcttatcagcatattcatcagcaacaacaacaccagcttcagcaacagctccaacaattttggtcaaaccagtaccaagaaattgagaaggttactgatttcaagaaccacagtcttcccctggcaaggatcaagaagattatgaaggctgacgaggatgttaggatgatatcagccgaagcaccagtcatctttgcaagggcatgtgaaatgttcatattagagttaaccctgcgttcttggaatcacactgaagagaacaaaaggcgaacacttcaaaaaaatgatattgctgctgcaatcacaaggactgacatctttgatttcttggttgacattgtgcctcgtgaggacttgaaagatgaagtgcttgcatcaatcccaagaggaacaatgcctgttgcagggcctgctgatgcccttccatattgctacatgccgcctcagcatgcgtcccaagttggagctgctggtgttataatgggtaagcctgtgatggacccaaacatgtatgctcagcagtctcacccctacatggcaccacaaatgtggccacagccaccagaccaacgacagtcgtccccagaacattagctgatgtgtcgtggaaattaagataaccaggcaccggaatcagttgtgaatgtcaaactgaatggttgggaagatccatactacattgcgagcagaagctgtagctgatagtttacatgcaatgcagactataaacatatgtagataatgtgctagggaaaacttaaccttatctttgatttagctggataaaatggtatttttcatgtttaaatttacaggtcatcagatgataatatttatttactggtgaaaaaaaaaaaaaaaa

SEQ ID NO: 2102 - protein, 247 aa, Glycine max
  misc_feature: Ceres CLONE ID no. 573215
  misc_feature: Ceres CDNA ID no. 40351085
  misc_feature: Useful for making plants with modulated growth and phenotype characteristics
  misc_feature: The sequence is a functional homolog of  SEQ ID NO 1109 in the  10/374,780 US patent application
  misc_feature: The sequence is a functional homolog of  SEQ ID NO 712 in the  11/479,226 US patent application
  misc_feature (87)..(151): Pfam Name: CBFD_NFYB_HMF PFAM Desc: Histone
MGVVGSGAQLAYGSNPYQPGQITGPPGSVVTSVGTIQSTPAGAQLGQHQLAYQHIHQQQQHQLQQQLQQFWSNQYQEIEKVTDFKNHSLPLARIKKIMKADEDVRMISAEAPVIFARACEMFILELTLRSWNHTEENKRRTLQKNDIAAAITRTDIFDFLVDIVPREDLKDEVLASIPRGTMPVAGPADALPYCYMPPQHASQVGAAGVIMGKPVMDPNMYAQQSHPYMAPQMWPQPPDQRQSSPEH

SEQ ID NO: 2103 - DNA, 1437 bp, Triticum aestivum
  misc_feature: Ceres CLONE ID no. 575342
  misc_feature: Ceres CDNA ID no. 24766226
  CDS (113)..(1090): REFERENCED BY SEQ ID NO: 2104
attcccaggcacatcccatttccaatcccccacccttcctctctctctcccccgcccctagccgtcgccggagagagagagggacgcggccgcgggagaagaaggagggaagatgatgatgacacgggcctccatgggggccatggagggcgcggcgctggacgaggtggtgcggcgattggtcgagggcggccgcggcgggcggcaggtgcagctgtccgaggcggagatccggcagctctgcgtcgacgccaagcgggttttcctgtcccagccgaacctcctccgcatccaggcccccgtcaagatctgcggtgatatccatggtcagtttgttgatcttctgaggttgtttgatttgggtggttatcctccaacctcaacctatgtattcctcggagactacgtagatagaggcaaacagagcttggaaactatatgcttactgctggcctacaaaataaggtaccctgacaaggttttcctgttaaggggtaaccatgaagatgcaaaaatcaacagagtttatggtttctatgatgaatgcaagaggaggttcaatgttcgactgtggaagatattctctgattgcttcaactgcctgcctattgcagcactcattgacgacaagatactgtgcatgcatggtggcctttcacctgaactgactaacctggaccaaataaaggatattgagaggccggctgagattcctgattatggtctcctgtgtgatttgctttggtctgatcctagccctgacggagaagggtggggggagagtgacagaggtgtttcatgtacgtttggtgcagatatgcttatagagttcttggagaaaaatgatcttgatcttatctgccgagcccatcaggtggtagaagatggttatgagttcttcgcacagcggagattagtcaccatcttctcagctccaaattactgcggggaattcgataatgtaggtgctctgttgagcatagatgaaaatctaatgtgctcatttcaaatcttgaagccaaatgaaacaggcacatcgcgggtaaaaagacaaattccaaataagccagcaaccgggggaagtgcctgatctgatcaacatccattccttcaatattagcatcgtcggctcgaagggggtgatctgatctattgtttggatccaccatggcatggcaatattcatccaccagccaattgtcttgcttaaccaccctttgccgagcatttgtaaatgtccattggctctgcactcgttttctctgtacagaattaggccggatttaacagcaccacctattctggttgttcttcctggttgcgcggcatctgtttttgtaagttacttttgtggtacatttttgcctgtggatgttgatagcttctgtttgtgagcatctattatttgccttatgtttgtcaaaaaaaaaaaaaaaa

SEQ ID NO: 2104 - protein, 318 aa, Triticum aestivum
  misc_feature: Ceres CLONE ID no. 575342
  misc_feature: Ceres CDNA ID no. 24766226
  misc_feature (55)..(250): Pfam Name: Metallophos PFAM Desc: Calcineurin
  misc_feature: Homolog of GI Number: 34365687 NR Desc: At3g05580
  misc_feature: Homolog of GI Number: 38503411 NR Desc: Serine/threonine protein phosphatase PP1 isozyme 8
  misc_feature: Homolog of GI Number: 21593410 NR Desc: TOPP8 serine/threonine protein phosphatase type one
  misc_feature: Homolog of GI Number: 667049 NR Desc: protein phosphatase PP1
  misc_feature: Homolog of GI Number: 29290586 NR Desc: serine threonine protein phosphatase
  misc_feature: Homolog of GI Number: 3153205 NR Desc: serine/threonine protein phosphatase type one
  misc_feature: Homolog of GI Number: 55296130 NR Desc: putative serine/threonine protein phosphatase PP1
  misc_feature: Homolog of GI Number: 5917726 NR Desc: serine/threonine protein phosphatase 1
  misc_feature: Homolog of GI Number: 23296753 NR Desc: putative phosphoprotein phosphatase type 1 catalytic subunit
  misc_feature: Homolog of GI Number: 47419837 NR Desc: putative serine/threonine protein phosphatase
MGAMEGAALDEVVRRLVEGGRGGRQVQLSEAEIRQLCVDAKRVFLSQPNLLRIQAPVKICGDIHGQFVDLLRLFDLGGYPPTSTYVFLGDYVDRGKQSLETICLLLAYKIRYPDKVFLLRGNHEDAKINRVYGFYDECKRRFNVRLWKIFSDCFNCLPIAALIDDKILCMHGGLSPELTNLDQIKDIERPAEIPDYGLLCDLLWSDPSPDGEGWGESDRGVSCTFGADMLIEFLEKNDLDLICRAHQVVEDGYEFFAQRRLVTIFSAPNYCGEFDNVGALLSIDENLMCSFQILKPNETGTSRVKRQIPNKPATGGSA

SEQ ID NO: 2105 - DNA, 2305 bp, Triticum aestivum
  misc_feature: Ceres CLONE ID no. 575457
  misc_feature: Ceres CDNA ID no. 40041259
  CDS (118)..(2073): REFERENCED BY SEQ ID NO: 2106
agagggcgttcctcttctctgccgaccaaaaccctaaaccctagcccgactaaaccccctcccccctcctcctccggcggcggcgccagccaccggcagcccacacaccaggcgaagatgccgctggggcagcgcgccggggacaagagcgactcccgctactgcggggtcgaggtgctcgacttccccgccggcgacggcctccccgccgtcctcacccactccctctcctccgccttcgacttcctcctcgccccgctcgtcgatcccgactaccggcccacgcccggcgccgtcctgccggtggcggcctcggacctcgtcctcagcccgtcccagtggagcagccacatcgtcgggaagatcagcgagtggattgatttggattccgaggacgagcagctccggctcgactcggagctcacgctcaagcaggagatcgcctgggcgactcatctctccttgcaggcgtgtgttattcctcctcccaagaggtcgacctgtgccaattatgctagagttgtaaataatattttgcaaggcctgaccaatatgcagttgtggcttaggatacctctggagaagtctgaatctatggatgaagaccatgacaaagtaaataataataaccccacgagtgaaacagtagactcgtgggaatggtggaattcattcagactgttatgcgagcatagcagtcaactgtatgtagcacttgatatcttgagctcgctgccatcaatgaactctctagggcgctggtttggggagcctgtaagagctgcgattcttcaaacagatgcttttctaacaaatgcaagaggttatccttgcttgtccaaacgccaccagactctgcttactggtttttttaaccattcagttcaggtaattatctctgggagatcaaatcataatgtttcccaagtatctgaaggagtgctctcacgtgatgaaaaccacaccgaagatacccccactcagcatgcattgagcccgtaccttgactacatggcctacctctatcagaggatggatccacttcctgagcaagaacgctttgagatcaactatagggatttcttgcaatctcctctccagcctctgatggataatttggaagctcagacgtatgagactttcgagaaagacactgtgaagtatacacagtatcaaagagcaatcgctaaggcgttggttgataaggtctcagatgatgaagtttccacaactaggacggtcttgatggttgttggagcaggccgagggcctctcgtaagagcatcattgcaggctgcagaagaaactggtcggatgctaaaagtatatgcagtggagaaaaatcctaacgcagttattactcttcatagtttgatcaaattggaagggtgggaaagcatggttactattatttctagtgacatgcggtgctgggatgctcctgaaaaagctgatattttggtcagcgagttgcttgggtcctttggtgataatgagttatctcctgagtgtctagatggtgcccaaagattcttgaagcctgatgggatttctattccttcatcttacacaagctttatccaaccagtaactgcatcgaaactacacaatgacattaaagcacacaaagatattgcacattttgaaacggcatatgttgtcaagctacaccgagtagcaagacttgcacctccacaagaggttttctctttcgcacatccaaacttctcaccaaaggccaccaaccaaaggtataccaagttacagtttgaactaccacaagacacaggatcatgccttgtgcacggattcgctggatattttgatgccgtactatataaagatgtccatctaggaattgagccgaacacatgtacaccaaacatgtttagctggttcccaatctttttcccactgaggaagcccatatacgtgccgtcagagtcgcccatagaagtgcacttttggcgatgctgtggtgccaccaaggtgtggtacgagtgggctctggtggctccgtctccatccccgatccataacagcaatggccggtcatattgggtcggtctataagttggaaaatcagaatactctgtgtcggttttttgagagagaagaaattgtcgatcatatgcttggtttttgagtgtgtccagctacctggatcaaagaaacagatcttagaacctggatacaggcacatgctgtaactcgcaagcttttgctttgtaacatcttttacttcttattgttgttgccgcgctaatccttgtgcgtgctagggttttgaaaaaaaaaaaaaaaa

SEQ ID NO: 2106 - protein, 651 aa, Triticum aestivum
  misc_feature: Ceres CLONE ID no. 575457
  misc_feature: Ceres CDNA ID no. 40041259
  misc_feature (175)..(633): Pfam Name: Skb1 PFAM Desc: Skb1 methyltransferase
  misc_feature: Homolog of GI Number: 29028926 NR Desc: At4g31120
  misc_feature: Homolog of GI Number: 66499433 NR Desc:  similar to SKB1 homolog
  misc_feature: Homolog of GI Number: 30688918 NR Desc: Skb1 methyltransferase family protein
  misc_feature: Homolog of GI Number: 42573101 NR Desc: Skb1 methyltransferase family protein
  misc_feature: Homolog of GI Number: 7270014 NR Desc: kinase binding protein
  misc_feature: Homolog of GI Number: 50905191 NR Desc: putative kinase
  misc_feature: Homolog of GI Number: 76626906 NR Desc:  similar to SKB1 homolog isoform 13
  misc_feature: Homolog of GI Number: 73962365 NR Desc:  similar to SKB1 homolog isoform 5
  misc_feature: Homolog of GI Number: 73962359 NR Desc:  similar to SKB1 homolog isoform 1
  misc_feature: Homolog of GI Number: 73962375 NR Desc:  similar to SKB1 homolog isoform 10
  misc_feature: Useful for delaying flowering time
  misc_feature: Useful for making ornamental plants with modified flowers
  misc_feature: Useful for making ornamental plants with modified flowers
  misc_feature: Useful for making ornamental plants with modified leaves
  misc_feature: Useful for making taller plants and plants with longer inflorescences
  misc_feature: Useful for sterility
MPLGQRAGDKSDSRYCGVEVLDFPAGDGLPAVLTHSLSSAFDFLLAPLVDPDYRPTPGAVLPVAASDLVLSPSQWSSHIVGKISEWIDLDSEDEQLRLDSELTLKQEIAWATHLSLQACVIPPPKRSTCANYARVVNNILQGLTNMQLWLRIPLEKSESMDEDHDKVNNNNPTSETVDSWEWWNSFRLLCEHSSQLYVALDILSSLPSMNSLGRWFGEPVRAAILQTDAFLTNARGYPCLSKRHQTLLTGFFNHSVQVIISGRSNHNVSQVSEGVLSRDENHTEDTPTQHALSPYLDYMAYLYQRMDPLPEQERFEINYRDFLQSPLQPLMDNLEAQTYETFEKDTVKYTQYQRAIAKALVDKVSDDEVSTTRTVLMVVGAGRGPLVRASLQAAEETGRMLKVYAVEKNPNAVITLHSLIKLEGWESMVTIISSDMRCWDAPEKADILVSELLGSFGDNELSPECLDGAQRFLKPDGISIPSSYTSFIQPVTASKLHNDIKAHKDIAHFETAYVVKLHRVARLAPPQEVFSFAHPNFSPKATNQRYTKLQFELPQDTGSCLVHGFAGYFDAVLYKDVHLGIEPNTCTPNMFSWFPIFFPLRKPIYVPSESPIEVHFWRCCGATKVWYEWALVAPSPSPIHNSNGRSYWVGL

SEQ ID NO: 2107 - DNA, 1903 bp, Triticum aestivum
  misc_feature: Ceres CLONE ID no. 575601
  misc_feature: Ceres CDNA ID no. 24766227
  CDS (140)..(1582): REFERENCED BY SEQ ID NO: 2108
aaaaaacaacccgtgggcagcagcagcttctctgcatacaccaagaagtcgcctcccttgctttccttcctccagcagtgcgcgcccctcctctcgagatcttccccgagttcctgagatctggttgtaagcagccaagatggtgaagatctgctgcatcggagctggctacgtcggcggcccaaccatggccgtcattgccatcaagtgcccggcgatcgaggttgttgtcgtcgacatctccaagccccgcattgacgcctggaacagcgacaccctccccatctacgagcccggcctcgacgacgttgtcaaggcctgcaggggcaagaacctcttcttcagcactgatgttgagaagcatgtcgccgaggccgacatcatctttgtgtccgtgaacacccccaccaagacccgcggcctgggagccggcaaggccgccgacctcacctactgggagagcgccgcccggatgatcgccgacgtgtccaagtcggacaagatcgtcgtcgagaagtccaccgtgcctgtcaagaccgccgaggccatcgagaagatcctgacccacaacagcaagggcatcaactaccagatcctgtccaacccggagttcctcgccgagggcacggcgatcgaggacctgttcaagcccgacagggtgctcatcggcggccgggagacccccgggggccagaaggccgtccaggccctcaaggaggtgtacgcccactgggtgcccgaggcgaacatcatcaccaccaacctgtggtcggccgagctctccaagctggccgccaacgcgttcctggcgcagaggatctcgtccgtgaacgccatgtcggcgctgtgcgaggccaccggcgccaacgtgtcggaggtgtcgtacgccatcggcaaggactcgcggatcgggcccaagttcctgaacgccagcgtggggttcggcgggtcgtgcttccagaaggacatcctgaacctggtgtacatctgcgagtgcaacggcctgccggaggtggccaactactggaagcaggtgatcaagatcaacgactaccagaagagccggttcgtgaaccgggtggtgtcgtccatgttcaacacggtgtccggcaagaagatcgcggtgctcgggttcgcgttcaagaaggacacgggcgacacccgggagacgccggcgatcgacgtgtgcaagggcctggtgggcgacaaggcccaggtgagcatctacgacccgcaggtgacggaggagcagatccagcgggacctggccatgaacaagttcgactgggaccacccgatgcacctgcagccgaccagccccacggcggtgaagcaggtgagcgtggtgtgggacgcgtacgaggcctgcaagggcgcccacggcgtgtgcatcctcaccgagtgggacgagttcaagaagctcgactaccagaagatcttcgacaacatgcagaagccggccttcgtcttcgacggccgcaacgtggtcgacgccgagaagctcagggagatgggcttcatcgtctactccatcggcaagccgctcgacggctggctcaaggacatgcccgccgtggcctaagttcacctcgtcgccccgccggatcggaggaagagcaagaagtggtttgaccatcattcattatttatagtttgcattttgcaggagaagcatctacattttctctgtcggccataaaattttagcaaatcttcatgtcttgtcaagtttcgattcgatacatgtttgcgtctgtagatcttacttataatcaaatcctcgggcccctgtgctgcctgaggaggttttccgttgtatcccatgaacgaactttgtagcctgttttgctgaaatcattacagaatcaatgtgttttttcgccaaacaaaaaaaaaaaaaaaa

SEQ ID NO: 2108 - protein, 480 aa, Triticum aestivum
  misc_feature: Ceres CLONE ID no. 575601
  misc_feature: Ceres CDNA ID no. 24766227
  misc_feature: null
  misc_feature: Useful for making plants with altered cell wall content and/or composition
  misc_feature (209)..(306): Pfam Name: UDPG_MGDP_dh PFAM Desc: UDP
  misc_feature (328)..(452): Pfam Name: UDPG_MGDP_dh_C PFAM Desc: UDP
  misc_feature (4)..(41): Pfam Name: Saccharop_dh PFAM Desc: Saccharopine dehydrogenase
  misc_feature: Homolog of GI Number: 15983404 NR Desc: AT3g29360/MUO10_6
  misc_feature: Homolog of GI Number: 53749198 NR Desc: At5g15490
  misc_feature: Homolog of GI Number: 6136119 NR Desc: UDP
  misc_feature: Homolog of GI Number: 11994517 NR Desc: UDP
  misc_feature: Homolog of GI Number: 40317278 NR Desc: UDP
  misc_feature: Homolog of GI Number: 29028306 NR Desc: UDP
  misc_feature: Homolog of GI Number: 18859525 NR Desc: UDP
  misc_feature: Homolog of GI Number: 59805013 NR Desc: UDP
  misc_feature: Homolog of GI Number: 21618158 NR Desc: UDP
  misc_feature: Homolog of GI Number: 48093457 NR Desc: putative UDP
MVKICCIGAGYVGGPTMAVIAIKCPAIEVVVVDISKPRIDAWNSDTLPIYEPGLDDVVKACRGKNLFFSTDVEKHVAEADIIFVSVNTPTKTRGLGAGKAADLTYWESAARMIADVSKSDKIVVEKSTVPVKTAEAIEKILTHNSKGINYQILSNPEFLAEGTAIEDLFKPDRVLIGGRETPGGQKAVQALKEVYAHWVPEANIITTNLWSAELSKLAANAFLAQRISSVNAMSALCEATGANVSEVSYAIGKDSRIGPKFLNASVGFGGSCFQKDILNLVYICECNGLPEVANYWKQVIKINDYQKSRFVNRVVSSMFNTVSGKKIAVLGFAFKKDTGDTRETPAIDVCKGLVGDKAQVSIYDPQVTEEQIQRDLAMNKFDWDHPMHLQPTSPTAVKQVSVVWDAYEACKGAHGVCILTEWDEFKKLDYQKIFDNMQKPAFVFDGRNVVDAEKLREMGFIVYSIGKPLDGWLKDMPAVA

SEQ ID NO: 2109 - DNA, 1354 bp, Triticum aestivum
  misc_feature: Ceres CLONE ID no. 575888
  misc_feature: Ceres CDNA ID no. 24766027
  CDS (84)..(1142): REFERENCED BY SEQ ID NO: 2110
atcaaagcaactactcctggcagcagcagctagccagctacccctgcttgctttgctttgcttccccgtcgaggaagaagaagatggggggcgtgggcgtctcccttgcgctgctcgccgccgtcgtcctctccgccgctgctgctgccccgcagctagcgggagcagccaaggcagagcattccctaggaatcatccagaaggacatcattcagacggtcaacaagcatcccaatgccgggtggacggctggacacaacccctacttcgcaaactacactattgagcaattcaagcatatcctgggtgtgaagccaacgcctccgggtttgctcgctggtgttccaatccaaacccatccagaatcagtggatctccccaaggagtttgacgctagaactcaatggtccagttgcagcacaattgggaacatacttgatcaaggtcactgtggtgcctgttgggcctttgctgccgtggaagctctccaggatcgtttctgtattcatctcaacatgagcgtcacactttcggtcaatgacctactggcttgctgtggttttctgtgtggtagcggttgtaatggaggatatcctatcagcgcatggcgctacttccgtcgcagtggtatcgtcactgaggagtgcgatccatacttcgatcagactggttgccagcatcctggatgcgagccagcttatcctacaccaaaatgtcaaaggaaatgcaaggtgcagaaccaagtgtggaaggaaaagaagcatttcagtgttaatgcgtacagagtacattctgatccccatgacatcatggcagaggtctacaaaaatggccctgtagaagttgctttcaccgtttatgaggacttcgcacactacaagtcaggagtgtacaagcacatcacaggtggcgtgatgggaggtcacgccgtcaagttgattggttggggaaccagtgatgctggcgaggattactggcttcttgcaaatcagtggaacagaggctggggtgatgacgggtacttcaagatcataaggggcaagaatgaatgtggcatcgaagaagatgttactgccggtatgccctcgacaaagaacacggccagaaacaatgatgtcgcctttggaacggccatactttgagcagcgccctggttacaaacacggttgaagttagctgtttgcatgtcaaatgaagccagtaaattagctttgatggttccaggatactgtattatgtacactagcgcaaacgctgatatgttgctgaaacaacaccttgttcagaaacaaaagggagtaataataataccaacaaaaccataaggctgtcatctcgaaaaaaaaaaaaaaaa

SEQ ID NO: 2110 - protein, 352 aa, Triticum aestivum
  misc_feature: Ceres CLONE ID no. 575888
  misc_feature: Ceres CDNA ID no. 24766027
  misc_feature (38)..(81): Pfam Name: Propeptide_C1 PFAM Desc: Propeptide_C1
  misc_feature (98)..(333): Pfam Name: Peptidase_C1 PFAM Desc: Papain family cysteine protease
  misc_feature: Homolog of GI Number: 16226808 NR Desc: At1g02300/T6A9_10
  misc_feature: Homolog of GI Number: 40643250 NR Desc: cathepsin B
  misc_feature: Homolog of GI Number: 21695 NR Desc: cathepsin B
  misc_feature: Homolog of GI Number: 21699 NR Desc: cathepsin B
  misc_feature: Homolog of GI Number: 21693 NR Desc: cathepsin B
  misc_feature: Homolog of GI Number: 59895951 NR Desc: cathepsin B
  misc_feature: Homolog of GI Number: 2129942 NR Desc: cathepsin B
  misc_feature: Homolog of GI Number: 609175 NR Desc: cathepsin B
  misc_feature: Homolog of GI Number: 38639325 NR Desc: cathepsin B
  misc_feature: Homolog of GI Number: 14582576 NR Desc: cathepsin B
MGGVGVSLALLAAVVLSAAAAAPQLAGAAKAEHSLGIIQKDIIQTVNKHPNAGWTAGHNPYFANYTIEQFKHILGVKPTPPGLLAGVPIQTHPESVDLPKEFDARTQWSSCSTIGNILDQGHCGACWAFAAVEALQDRFCIHLNMSVTLSVNDLLACCGFLCGSGCNGGYPISAWRYFRRSGIVTEECDPYFDQTGCQHPGCEPAYPTPKCQRKCKVQNQVWKEKKHFSVNAYRVHSDPHDIMAEVYKNGPVEVAFTVYEDFAHYKSGVYKHITGGVMGGHAVKLIGWGTSDAGEDYWLLANQWNRGWGDDGYFKIIRGKNECGIEEDVTAGMPSTKNTARNNDVAFGTAIL

SEQ ID NO: 2111 - DNA, 1467 bp, Triticum aestivum
  misc_feature: Ceres CLONE ID no. 575894
  misc_feature: Ceres CDNA ID no. 36505869
  CDS (111)..(1157): REFERENCED BY SEQ ID NO: 2112
tccacctcgcctcgtcgtccgcccacggtctaatccgattcaaacgcaccgcttcctcgtgtccgaactaagccccaatcccgtcaccaccgccgctggtgctcggcgcgatggcgcagaaggacgccgccaatggcaacggcgccaccacgcgcccgccgcccactccctcccccatccgcttctccaagttcttccaggccaacatgcggatcctggtcaccggcggagctggcttcatcggctcgcacctcgtcgacaagctcatggagaacgagaagaacgaggtcattgttgctgacaactttttcactgggtcaaaagacaacctgaagaagtggatcggacaccctagatttgaactcatccgtcacgatgtcaccgaaccactgctcgtggaggttgaccaaatctaccaccttgcttgtcctgcctcaccaatcttctacaagcacaaccctgtcaagaccatcaagacgaatgtcattggaaccttgaacatgcttggacttgcaaagagagttggagctagaatattgttgacttcgacctctgaagtttatggtgatccccttgagcatcctcagacggaggcatactggggcaatgttaacccaattggagtcaggagctgctacgatgagggtaagcgtgtagctgagacactgatgttcgactaccacaggcagcatggcattgagatccgtattgccaggattttcaacacctacggacctaggatgaacattgatgatggccgtgttgttagtaacttcattgctcaggccattcgtggtgaagcactgactgtccagaagcctggaacacagactaggagcttctgctacgtcgctgatatggtcaatggtcttatgaagctgatgaatggagacaacaccggacccattaacattgggaacccaggtgaattcaccatgctggaacttgccgagaatgtgaaggagttgatcaacccagaagtgacagtgacgatgactgagaacactcctgatgaccctcgccagaggaagcctgacatcaccaaggccaaggaggttctcgactgggagcccaaggtcgtcctgcgcgacggcttggtgctcatggaggacgatttcagggagcgcttggcagtgcccaagaagaccaaggcctaagccccctccccgcgtttggcgtacaacatcaccaatttgccagagcatactcatagttgggtgggttcgtcaatattcgttgctgcgtttcgttacggaatttgagttccaataaaccaattacaccttcgttgttcacttgaaagattgtattattagaaacttcatacaaggcctggctgtttgtattaccgtctctttttgtggaacttgtgctccttacgttttagcctatgcacttccctaaatcaattatagcaatgttggtgccattttgggtttgttattaatttgaaaaaaaaaaaaaaaa

SEQ ID NO: 2112 - protein, 348 aa, Triticum aestivum
  misc_feature: Ceres CLONE ID no. 575894
  misc_feature: Ceres CDNA ID no. 36505869
  misc_feature: null
  misc_feature: Useful for making plants with altered cell wall content and/or composition
  misc_feature (35)..(315): Pfam Name: Polysacc_synt_2 PFAM Desc: Polysaccharide biosynthesis protein
  misc_feature: Homolog of GI Number: 13591616 NR Desc: UDP
  misc_feature: Homolog of GI Number: 50659026 NR Desc: UDP
  misc_feature: Homolog of GI Number: 48093461 NR Desc: UDP
  misc_feature: Homolog of GI Number: 18447934 NR Desc: UDP
  misc_feature: Homolog of GI Number: 11121508 NR Desc: d
  misc_feature: Homolog of GI Number: 6469141 NR Desc: dTDP
  misc_feature: Homolog of GI Number: 21594196 NR Desc: dTDP
  misc_feature: Homolog of GI Number: 48093463 NR Desc: putative UDP
  misc_feature: Homolog of GI Number: 20465507 NR Desc: putative dTDP
  misc_feature: Homolog of GI Number: 22136442 NR Desc: putative nucleotide
MAQKDAANGNGATTRPPPTPSPIRFSKFFQANMRILVTGGAGFIGSHLVDKLMENEKNEVIVADNFFTGSKDNLKKWIGHPRFELIRHDVTEPLLVEVDQIYHLACPASPIFYKHNPVKTIKTNVIGTLNMLGLAKRVGARILLTSTSEVYGDPLEHPQTEAYWGNVNPIGVRSCYDEGKRVAETLMFDYHRQHGIEIRIARIFNTYGPRMNIDDGRVVSNFIAQAIRGEALTVQKPGTQTRSFCYVADMVNGLMKLMNGDNTGPINIGNPGEFTMLELAENVKELINPEVTVTMTENTPDDPRQRKPDITKAKEVLDWEPKVVLRDGLVLMEDDFRERLAVPKKTKA

SEQ ID NO: 2113 - DNA, 442 bp, Triticum aestivum
  misc_feature: Ceres CLONE ID no. 576020
  misc_feature: Ceres CDNA ID no. 24766028
  CDS (98)..(304): REFERENCED BY SEQ ID NO: 2114
cgaaaacgaaaacacaacaccgagtccaaactaacccccggctgcaccagctcccattcctcgccggcgagctcaccggacacagcccgaagccaagatgactacttccaggcgccttgctgacaggaagacagcgaagttccagaagaacatcaccgagaggggttcggtgcctgaaaccactgtgaagaaggggaatgactatcctgttggacctatagtgcttggattcttcatctttgtggtcgtcggatcatctctgtttcagataatcaggacagcgagcagtggtgggatggcctgaacgccgtcatacattaatacagttgcagctaaattcgtttgatgtcgtcatagtttgtcttacttaaaagtacccagtttcagctgatgttgtaagaactgtaagagttatcaatcttatacaaaaaaaaaaaaaaaa

SEQ ID NO: 2114 - protein, 68 aa, Triticum aestivum
  misc_feature: Ceres CLONE ID no. 576020
  misc_feature: Ceres CDNA ID no. 24766028
  misc_feature (1)..(65): Pfam Name: RAMP4 PFAM Desc: Ribosome associated membrane protein RAMP4
  misc_feature: Homolog of GI Number: 25403305 NR Desc: protein F17L21.12
  misc_feature: Homolog of GI Number: 77552122 NR Desc: sorbitol transporter
  misc_feature: Homolog of GI Number: 23479574 NR Desc: Arabidopsis thaliana F17L21.12
  misc_feature: Homolog of GI Number: 62661741 NR Desc:  similar to Chromosome 13 open reading frame 21
  misc_feature: Homolog of GI Number: 67084013 NR Desc: ribosome associated membrane protein 4
  misc_feature: Homolog of GI Number: 67866982 NR Desc: ribosome
  misc_feature: Homolog of GI Number: 54642231 NR Desc: GA16804
  misc_feature: Homolog of GI Number: 31242287 NR Desc: ENSANGP00000025348
MTTSRRLADRKTAKFQKNITERGSVPETTVKKGNDYPVGPIVLGFFIFVVVGSSLFQIIRTASSGGMA

SEQ ID NO: 2115 - DNA, 1385 bp, Triticum aestivum
  misc_feature: Ceres CLONE ID no. 576128
  misc_feature: Ceres CDNA ID no. 25445628
  CDS (178)..(1146): REFERENCED BY SEQ ID NO: 2116
gtccccgtcccctcgcttccaagctactaccccgagcgcgcgagagcgagagcgagccagccagcgccacttgactccagctccttccttccctccccatccttccgtcctcggcttgcacatcacatcgcgtcaccggagccagctacgagcgcgtgagaccagcagcgggacagcatggaggggggcggcgaggggaagggccgggcggcgccggcgacggcggcggggggagggttcggagggtacgagtcggccggggaccgcaagtggtggccctggctcgtgcccaccgtcatcgtcgcctgcgtcgccgtcttcgtcgtcgagatgtgggtcaacgactgccccaggcacggcagcgcgctcggcggcggctgcgtcgcgggattcctccggcgattctccttccagccgctccgcgagaacccgctcctcgggccctcctccaccactttggggaaaatgggagctctggactggaacaaggttgtccatcagcaccaggggtggcgtctcattagctgcatctggctccatgctggcctgatccatttggttgtgaacatgctaagtctgctgtttattgggattcgtcttgagcagcaatttgggtttgttcgcattggcgctatctacctactgtctggtttcggtggcagcgtgatgtctgcactcttcctacgaaataactacatctctgttggtgcatctggagctttatttgggctgcttggatctatgctttctgagctacttatgaactggactatttactccaacaaggttgcagccataataacccttctgtttataatcgcgatcaacgtggcaatcgggatactaccgcatgctgataactttgctcacattggtggattcctgaccgggttccttttggggttcgttctgctggcaaggccacaattcggttggttggaacgcagcgagctgccccataccaatcagccccccaagtacaaaccataccaatatgtcctgtgggttgtggcactcgtcttgctgcttgtcgggttcacgctttcgttggtgatgctcttcaagggcaagaacgggaatgacggctgccactggtgccactacctgaactgtgtgccgacgtcgaggtggaagtgcgatacctaggcggttccttctttcggttttcgacgaaaacccgtagtgttgtgaggaccattttcatgcttttatgtttgtagataggaacttgttctttagtgaactctgtaaatttgtttggcaggctctgtaagtttgtaactcgagcactctccagtgatttcatgcgtgtttttgtgtaaaaaaaaaaaaaaaaaaaaaaaaaaaaaaaaaaaaaaaaaaaaaaaagaaaaaaaaaaaaaaaa

SEQ ID NO: 2116 - protein, 322 aa, Triticum aestivum
  misc_feature: Ceres CLONE ID no. 576128
  misc_feature: Ceres CDNA ID no. 25445628
  misc_feature (106)..(250): Pfam Name: Rhomboid PFAM Desc: Rhomboid family
  misc_feature: Homolog of GI Number: 294845 NR Desc: membrane protein
  misc_feature: Homolog of GI Number: 50948211 NR Desc: putative membrane protein
  misc_feature: Homolog of GI Number: 52077312 NR Desc: putative membrane protein
  misc_feature: Homolog of GI Number: 20466143 NR Desc: AT5g07250/T28J14_190
  misc_feature: Homolog of GI Number: 28827620 NR Desc: putative membrane protein
  misc_feature: Homolog of GI Number: 62733172 NR Desc: Rhomboid family
  misc_feature: Homolog of GI Number: 42569431 NR Desc: rhomboid family protein
  misc_feature: Homolog of GI Number: 9502383 NR Desc: T12C24.28
  misc_feature: Homolog of GI Number: 20259083 NR Desc: putative membrane protein
  misc_feature: Homolog of GI Number: 30693911 NR Desc: rhomboid family protein
MEGGGEGKGRAAPATAAGGGFGGYESAGDRKWWPWLVPTVIVACVAVFVVEMWVNDCPRHGSALGGGCVAGFLRRFSFQPLRENPLLGPSSTTLGKMGALDWNKVVHQHQGWRLISCIWLHAGLIHLVVNMLSLLFIGIRLEQQFGFVRIGAIYLLSGFGGSVMSALFLRNNYISVGASGALFGLLGSMLSELLMNWTIYSNKVAAIITLLFIIAINVAIGILPHADNFAHIGGFLTGFLLGFVLLARPQFGWLERSELPHTNQPPKYKPYQYVLWVVALVLLLVGFTLSLVMLFKGKNGNDGCHWCHYLNCVPTSRWKCDT

SEQ ID NO: 2117 - DNA, 1346 bp, Triticum aestivum
  misc_feature: Ceres CLONE ID no. 576314
  misc_feature: Ceres CDNA ID no. 35383219
  CDS (76)..(1029): REFERENCED BY SEQ ID NO: 2118
acacacacacacaccaccaccaccaccaccaccaccacacttggatcacaagatagtggttcgttgctacccacgatgagagcgttcgcgttgtttgccgtgcttgccatggcggccgccatggccgtcgccgagcagtgcggctcccaggccggcggggcgacctgccccaactgcctctgctgcagccgcttcggctggtgcggctccacctcggactactgcggcgacggatgccagagccagtgctccggttgcggcagcacgcccgtcacccccacaccctccggcggtggcggcgtgtcctccatcatctcccgcgccctcttcgaccgcatgctactgcaccgcaacgacggcgcctgccaggccaagggcttctacacctacgacgccttcgtcgcggccgccggcaccttccggggcttcagcaccacgggcagcacggacacccggaagcgcgaggtggccgccttcctggcccagacctcccacgagaccaccggtgggtgggcgacggcgccggacggagccttcgcgtggggctactgcttcaagcaggagcgtggcgccacctccaactattgcactccgagcgcgcaatggccgtgcgccccagggaagagctactacggccgtgggccgatccagctctcccacaactacaactacgggccggcaggccgggccattggggtcgatctgctgcgcaacccagacctggttgccacggacccgacggtgtcttttaagacagcgatgtggttttggatgacggcacaggcgccaaagccgtcgagccatgctgtgatcacgggccaatggagcccatcagggacggaccgggctgcagggcgggtgcccgggtttggcgtgatcaccaacatagttaacggcgggatcgagtgcgggcatgggcaggacagccgagtcgccgatcggataggattttacaagcgctactgtgacatcctcggtgttggctatggtgacaacctcgactgctacaatcagaggcccttcgcttaactaattagttatatttatataacccctccaaacaaaatacaataagagcatcctctctcatctagatgttggaagttgtaactatggttacatctcataaggaactcaataaaagcatccagtatagatgctttgtattgagggcgtgtttggttgagaagtcttatgactttttctagtcccagggactaatcaaaaaagactctctagtagagtctttttctagtccctgtagaaaaagtccctcctgtttggttcctagtgactttttctagtctctgggactaaaaagtccctgaatcaaaaaaaaaaaaaaa

SEQ ID NO: 2118 - protein, 317 aa, Triticum aestivum
  misc_feature: Ceres CLONE ID no. 576314
  misc_feature: Ceres CDNA ID no. 35383219
  misc_feature (156)..(179): Pfam Name: Chitin_bind_1 PFAM Desc: Chitin recognition protein
  misc_feature: Homolog of GI Number: 2506281 NR Desc: 26 kDa endochitinase 1 precursor
  misc_feature: Homolog of GI Number: 12407647 NR Desc: 31.7 kDa class I endochitinase
  misc_feature: Homolog of GI Number: 481896 NR Desc: chitinase
  misc_feature: Homolog of GI Number: 542173 NR Desc: chitinase
  misc_feature: Homolog of GI Number: 18146829 NR Desc: chitinase 3
  misc_feature: Homolog of GI Number: 6164585 NR Desc: chitinase
  misc_feature: Homolog of GI Number: 6164588 NR Desc: chitinase
  misc_feature: Homolog of GI Number: 741317 NR Desc: chitinase a
  misc_feature: Homolog of GI Number: 38112709 NR Desc: class I chitinase
  misc_feature: Homolog of GI Number: 416029 NR Desc: endochitinase
  misc_feature: Useful for making plants with increased biomass and foliage
  misc_feature: Useful for making shorter plants
  misc_feature: Useful for making stronger plants
  misc_feature: Useful for sterility
MRAFALFAVLAMAAAMAVAEQCGSQAGGATCPNCLCCSRFGWCGSTSDYCGDGCQSQCSGCGSTPVTPTPSGGGGVSSIISRALFDRMLLHRNDGACQAKGFYTYDAFVAAAGTFRGFSTTGSTDTRKREVAAFLAQTSHETTGGWATAPDGAFAWGYCFKQERGATSNYCTPSAQWPCAPGKSYYGRGPIQLSHNYNYGPAGRAIGVDLLRNPDLVATDPTVSFKTAMWFWMTAQAPKPSSHAVITGQWSPSGTDRAAGRVPGFGVITNIVNGGIECGHGQDSRVADRIGFYKRYCDILGVGYGDNLDCYNQRPFA

SEQ ID NO: 2119 - DNA, 577 bp, Glycine max
  misc_feature: Ceres CLONE ID no. 577159
  misc_feature: Ceres CDNA ID no. 25891132
  CDS (113)..(403): REFERENCED BY SEQ ID NO: 2120
ttttcagaaaagtcgaacggcgagcgtagtcgcaagagacgcaacagaatagaacgacgaataggcgtgcagggaaaccatttcattttcgagcgcgtcgctttcgaatccaatggccttcaacaacgcactgagatctgccgcgaagctcgtcgcttcttccgaatcttccttctctaactcagtgagcagaggttttcattcaactggcatgaagaggatgggaggtggacatggtcatgatgagccctactatcttcatgcaaagcacatgtacaacttggacaagatgaagcaccaggggttgaaaatgtcccttgctgtgttcactgctttcagcattggtgttgcagttcctgtgtatgctgtcattttccagcaaaagaaaacagcttctgcctaggctcatcttttacttctatttgcaataaggtggatttggggattctagactagcctattggttctggtgttcattactgctttgaactttatttatgttcaaccttctatatagatttttcatatatatctgataataatcaacttctctgcactatcaaaaaaaaaaaaaaaa

SEQ ID NO: 2120 - protein, 96 aa, Glycine max
  misc_feature: Ceres CLONE ID no. 577159
  misc_feature: Ceres CDNA ID no. 25891132
  misc_feature: Homolog of GI Number: 68611229 NR Desc: OSJNBa0084A10.18
MAFNNALRSAAKLVASSESSFSNSVSRGFHSTGMKRMGGGHGHDEPYYLHAKHMYNLDKMKHQGLKMSLAVFTAFSIGVAVPVYAVIFQQKKTASA

SEQ ID NO: 2121 - DNA, 811 bp, Glycine max
  misc_feature: Ceres CLONE ID no. 578351
  misc_feature: Ceres CDNA ID no. 29191859
  CDS (75)..(545): REFERENCED BY SEQ ID NO: 2122
cccacttccctcaccgctccgaattagggttttccaattcgcagagcaactcaacacaacgaaccaaaccaacaatgtcgcagccgcagcctcagtcgcagccgcaacacgggcaagcggcgctggagcaggtgcagtgcttcggtcgcaagaagacggcggtggccgtgacctactgcaagcgcgggcgcggcctcatcaagatcaacggctgccccatcgagctcgtcgagccggagatcctccgctttaaggccttcgagcccatcctcctgttgggaaagagccgcttcgccggcgtcgacatgcgcatccgcgtcaagggcggcggccacacctcccagatctacgccattcgccagagcatcgccaaggcgctcgtcgcgttctaccagaagtacgttgatgaacagagtaagaaggagatcaaggacattctggtgaggtacgatcgtaccttgctcgtcgcggatcccaggcgctgcgagcccaagaagtttggtgggcgtggcgcacgtgcgaggttccagaagtcttaccgttgaaggagaatggtggtgtttttgtgtttttttgtttttggttcggttcatgttttatgctgtggaaaaaatgaaaacttttgttggtggttttggtagttttataattttgatcgttttttttataatggttggattatggattcttgttttgattcaactttttctgtttaggtaatatgaaggtacggattattattgttataaattctagtttgaaatgttagggcattttcttgtgcctgttggaattaaaaaaaaaaaaaaaa

SEQ ID NO: 2122 - protein, 156 aa, Glycine max
  misc_feature: Ceres CLONE ID no. 578351
  misc_feature: Ceres CDNA ID no. 29191859
  misc_feature (24)..(156): Pfam Name: Ribosomal_S9 PFAM Desc: Ribosomal protein S9/S16
  misc_feature: Homolog of GI Number: 6984222 NR Desc: 40S ribosomal protein S16
  misc_feature: Homolog of GI Number: 439654 NR Desc: RS16 protein
  misc_feature: Homolog of GI Number: 21555842 NR Desc: 40S ribosomal protein S16
  misc_feature: Homolog of GI Number: 16323500 NR Desc: putative 40S ribosomal protein S16
  misc_feature: Homolog of GI Number: 2641209 NR Desc: ribosomal protein S16
  misc_feature: Homolog of GI Number: 4574242 NR Desc: ribosomal protein S16
  misc_feature: Homolog of GI Number: 6721162 NR Desc: putative 40S ribosomal protein S16
  misc_feature: Homolog of GI Number: 77552917 NR Desc: ribosomal protein S9
  misc_feature: Homolog of GI Number: 7440266 NR Desc: probable ribosomal protein S16
  misc_feature: Homolog of GI Number: 40556671 NR Desc: small subunit ribosomal protein S16
MSQPQPQSQPQHGQAALEQVQCFGRKKTAVAVTYCKRGRGLIKINGCPIELVEPEILRFKAFEPILLLGKSRFAGVDMRIRVKGGGHTSQIYAIRQSIAKALVAFYQKYVDEQSKKEIKDILVRYDRTLLVADPRRCEPKKFGGRGARARFQKSYR

SEQ ID NO: 2123 - DNA, 1013 bp, Glycine max
  misc_feature: Ceres CLONE ID no. 578821
  misc_feature: Ceres CDNA ID no. 36580748
  CDS (81)..(773): REFERENCED BY SEQ ID NO: 2124
atttttctatttccgtctctcgcttgtgctgccttcgtttgcgtttttatcacagaggaattaacatatatatagcaagcatggcagtcacactctacgaccttagctcttcctctgggttgaagaaacttgatgagtaccttctcccacgcagttacatcaccgggtaccaagctacaaaggatgatcttactgtttatgcagctttgccaactgctccatcagatgaatatggaaatgtttccaggtggtacaagcacattgatgctttgttgagaatctctggtgttactggcgagggatctggtgttattgttgagggatctctagttgcagagcctgttgcaactccccctgctgcagacacaaaggctgctgttgctgaggatgacgatgatgatgatgtggatttgttcggtgaagagacagaagaagagaagaaggcagcagaggaacgggcagctgcagtgaaggcatctacaaaaaaaaaagagtctgggaaatcatctgttctgttggatgtgaaaccatgggacgatgaaactgacatgaagaagctcgaagaagcagtgagatctgttcagatggaagggttgctttggggtgcatccaaacttgtacctgttgggtacggtatcaagaaactgcaaattatgcttactattgtggatgacctagtttctgttgatactcttattgaggaacatctcacagttgagcccatcaatgaatatgtccagagttgtgacattgtggccttcaataaaatataaactacaattgtgggacttggagatcatggcaacgggaggaattgcaagttttaaaaactatgatattgggaaactaccctgaattgagaatttttgtctttagaaacccgcttgttatttgtttttatatatcagtctttgtgatgtcatcggctatttggataataatcatctttcctttgttgtgtcatccgtattatttggatagtaatcattttacctttaaaaaaaaaaaaaaaa

SEQ ID NO: 2124 - protein, 230 aa, Glycine max
  misc_feature: Ceres CLONE ID no. 578821
  misc_feature: Ceres CDNA ID no. 36580748
  misc_feature (141)..(230): Pfam Name: EF1_GNE PFAM Desc: EF
  misc_feature: Homolog of GI Number: 38232568 NR Desc: translational elongation factor 1 subunit Bbeta
  misc_feature: Homolog of GI Number: 78191406 NR Desc: ripening regulated protein DDTFR10
  misc_feature: Homolog of GI Number: 21593028 NR Desc: putative  elongation factor beta
  misc_feature: Homolog of GI Number: 13124717 NR Desc: Elongation factor 1
  misc_feature: Homolog of GI Number: 12320854 NR Desc: elongation factor 1
  misc_feature: Homolog of GI Number: 4874292 NR Desc: putative  elongation factor beta
  misc_feature: Homolog of GI Number: 1841870 NR Desc: elongation factor 1
  misc_feature: Homolog of GI Number: 3288113 NR Desc: elongation factor 1
  misc_feature: Homolog of GI Number: 398608 NR Desc: elongation factor
  misc_feature: Homolog of GI Number: 398606 NR Desc: eEF
MAVTLYDLSSSSGLKKLDEYLLPRSYITGYQATKDDLTVYAALPTAPSDEYGNVSRWYKHIDALLRISGVTGEGSGVIVEGSLVAEPVATPPAADTKAAVAEDDDDDDVDLFGEETEEEKKAAEERAAAVKASTKKKESGKSSVLLDVKPWDDETDMKKLEEAVRSVQMEGLLWGASKLVPVGYGIKKLQIMLTIVDDLVSVDTLIEEHLTVEPINEYVQSCDIVAFNKI

SEQ ID NO: 2125 - DNA, 1696 bp, Glycine max
  misc_feature: Ceres CLONE ID no. 578931
  misc_feature: Ceres CDNA ID no. 24766030
  CDS (228)..(1073): REFERENCED BY SEQ ID NO: 2126
aaaaattcagagagaactgtccaccctttttcgtttttctccttattacagaccccccttaattgatggtgctctgtatcccctttttcttctgcaagaactacaccaactaaaacctccttcttctttttttttttttttttttggaggctggtgtgtgtttttctttttcttcttcttcttcttccaatccttaaggaaaaaaactaaagaaaaaaaagtgagccatgtcaggcttgtataatcccaacttctctcctgctagagcagcttctcctcagattaggagcaatccagaagtggacagtcagtacctatcagagttgctggcagaacatcagaagcttggacccttcatgcaagtgcttcccatatgcagccgcctcctaaatcaagaaatattaagggtttctggaatgttgtccaatcaaggttttggtgacttcgatagactgcgacatagaagccctagtcctatggcttcttcaaaccttatgtccaatgtcagtgggactgggttgggtggatggaatagtctccagcaagagagattatgtggaccccctggaatgacgatggactggcaaagtgctcctgcaagtcctagttcgttcactgttaagagaatcttgcgcttggaaattccagtagatacatatcccaatttcaattttgttggaagacttctgggccctagaggcaattctttgaaacgggtagaagctacaactggttgtcgtgtgtatattagaggaaaaggatcgataaaggatccagacaaggaagagaaattacgaggaagaccaggttatgagcatctcaatgaaccactgcacattttgattgaggctgaattacctgctaatgttgttgacataaggctcaggcaggctcaggaaattattgaagaactgctcaagcctgtggatgaatcacaggactatatcaagaggcagcagttgcgtgaactcgccatgctgaattcaaatttcagagaagagagtcccgggcccagtggtagtgtgtccccattcaactctagtggaatgaaacgtgcaaagacgggtcgctgaaagttgtccttgattgttggtgtagatgatgagtatcgtggtcctccagctattgattgctgggaatatcttccagtacatgtctcattcaatgcaagctataaaagaataggctaacaattcttgctggttagcactctggtggtttttccttcccctttgtccctacctttttctttttgaacagacaggagacaaagctggaatgaagaatttttaaaagagaacaattatatagttggggtattgagaataggtttgttcaaaccaaccctttttttttctcccttgcaaacttaatacattcattggatttattcatgcgtcagttactttttgagaagtgtggaatatatacatatgatggttggtggtgatgaagttttaggtcctatgacaatgcagtgtttattggcatgtgacattgtcaaagtctcatggtattttaatatttattataagttagcataggctggattctttttagttgtttgtcacaggcatttgtattctcttcggaggactatgcactgtagttggaatgatgcatgccagataaacttcttaccatgtaccattaaagaacaaatgtggtatttgtttatataaaaaaaaaaaaaaaa

SEQ ID NO: 2126 - protein, 281 aa, Glycine max
  misc_feature: Ceres CLONE ID no. 578931
  misc_feature: Ceres CDNA ID no. 24766030
  misc_feature: Homolog of GI Number: 23197752 NR Desc: putative RNA
  misc_feature: Homolog of GI Number: 34900448 NR Desc: KH domain
  misc_feature: Homolog of GI Number: 34909270 NR Desc: P0454H12.18
  misc_feature: Homolog of GI Number: 56785233 NR Desc: QUAKING isoform 5
  misc_feature: Homolog of GI Number: 50912257 NR Desc: putative KH domain protein
  misc_feature: Homolog of GI Number: 42571419 NR Desc: KH domain
  misc_feature: Homolog of GI Number: 57863816 NR Desc: putative KH domain
  misc_feature: Homolog of GI Number: 20378859 NR Desc: QKI isoform 7B
  misc_feature: Homolog of GI Number: 42476220 NR Desc: Qkr protein
  misc_feature: Homolog of GI Number: 4092671 NR Desc: KH domain RNA binding protein QKI
  misc_feature: Useful for delaying flowering time
  misc_feature: Useful for increasing chlorophyll and photosynthetic capacity
  misc_feature: Useful for making ornamental plants with modified leaves
  misc_feature: Useful for making plants with increased biomass and foliage
  misc_feature: Useful for making shorter plants
MSGLYNPNFSPARAASPQIRSNPEVDSQYLSELLAEHQKLGPFMQVLPICSRLLNQEILRVSGMLSNQGFGDFDRLRHRSPSPMASSNLMSNVSGTGLGGWNSLQQERLCGPPGMTMDWQSAPASPSSFTVKRILRLEIPVDTYPNFNFVGRLLGPRGNSLKRVEATTGCRVYIRGKGSIKDPDKEEKLRGRPGYEHLNEPLHILIEAELPANVVDIRLRQAQEIIEELLKPVDESQDYIKRQQLRELAMLNSNFREESPGPSGSVSPFNSSGMKRAKTGR

SEQ ID NO: 2127 - DNA, 652 bp, Triticum aestivum
  misc_feature: Ceres CLONE ID no. 579142
  misc_feature: Ceres CDNA ID no. 35385344
  CDS (87)..(434): REFERENCED BY SEQ ID NO: 2128
ctcaccagtacaatcacttggcaaatctagccatcttatcatctccagctgagctcagcatcactagtactgcaaactcgatcgggatggctcgcgctgcagctactcagctcgtgctggtcgccttggtggccgctatgctcctcgtagccacggacgcggccatctcctgcggtcaggtgagctctgccttgagcccctgcatctcctatgcccgcggcaatggcgccaacccgactgcggcctgctgcagcggtgtcaggagtctggccggcgcagcccggagcaccgctgacaagcaagcggcgtgcaagtgcatcaagagcgctgccggtgggctcaacgctggcaaggccgccggcatcccctccaagtgcggcgttagcgtcccatatgccatcagcgcttcggtcgactgctctaagattcgctgatcaaccactgcccaccatggctgccgctcatagcgccatccatcaccgcttagtatgctgaggtctctaatacatatgaataaatgctctatctgatctccatgtgagggagaaaggagtgcgtacgccgagctagctctgcatggccggccactattgtactactactatggttgtttttactttcactacctttgaggataaaaaaaaaaaaaaaa

SEQ ID NO: 2128 - protein, 115 aa, Triticum aestivum
  misc_feature: Ceres CLONE ID no. 579142
  misc_feature: Ceres CDNA ID no. 35385344
  misc_feature (29)..(111): Pfam Name: Tryp_alpha_amyl PFAM Desc: Protease inhibitor/seed storage/LTP family
  misc_feature: Homolog of GI Number: 1045199 NR Desc: lipid transfer protein
  misc_feature: Homolog of GI Number: 1098265 NR Desc: lipid transfer protein
  misc_feature: Homolog of GI Number: 1045201 NR Desc: lipid transfer protein
  misc_feature: Homolog of GI Number: 443799 NR Desc: Cw
  misc_feature: Homolog of GI Number: 1098266 NR Desc: lipid transfer protein
  misc_feature: Homolog of GI Number: 56713113 NR Desc: type 1 non
  misc_feature: Homolog of GI Number: 587446 NR Desc: lipid transfer protein precursor
  misc_feature: Homolog of GI Number: 55792862 NR Desc: lipid transfer protein
  misc_feature: Homolog of GI Number: 642017 NR Desc: phospholipid transfer protein precursor
  misc_feature: Homolog of GI Number: 54111986 NR Desc: lipid transfer protein
MARAAATQLVLVALVAAMLLVATDAAISCGQVSSALSPCISYARGNGANPTAACCSGVRSLAGAARSTADKQAACKCIKSAAGGLNAGKAAGIPSKCGVSVPYAISASVDCSKIR

SEQ ID NO: 2129 - DNA, 1387 bp, Triticum aestivum
  misc_feature: Ceres CLONE ID no. 579208
  misc_feature: Ceres CDNA ID no. 24766152
  CDS (89)..(1171): REFERENCED BY SEQ ID NO: 2130
acaatccacatcaaccttccagttcgtccgtaagcctcagcgccggaagtaccgcgatcgagcgagcgagtttcccgggcccacactgatggctctggttccctcgggctcaggcagcgcgccggtgatcgccgaggtggagatgaacggcggcgccgaccagagcgccaccaccgtgcgagccaccgtcgtgcaggcctccaccgtcttctacgacacccccgccactctcgataaagcagagagattaatagcagaggctgctggatatggttcacagttggtggtgttcccggaagcttttgttggtggttatcctcgtggatccacctttggatttgggatcagtattagtatcactaatccaaaagacaagggaaagggtgaattccagaagtattatgcagccgccatagacgtgcctggtccagaggtcacactcttagctgctatggctgggaaatataaggtctttctggtaatgggtgtgattgagagagaaggttacacactatattgttcagtgctcttctttgaccctctaggtcggtacctgggtaagcaccgcaagctcatgccgacggcattagaacggataatatggggatttggagatggatcaacaattcctgtttatgacactccacttggaaagattggagcccttatttgctgggaaaataagatgccactcttgaggacagcactgtatggtaaaggtattgagatatactgcgctcccacggccgattcaaggccagtgtggcaagcttccatgacacacatcgccatggaggggggatgctttgtgctgtcggcgaaccagttctgccgcagacaggactaccctccgccgtccgagtacgcctttgccggtttaggagaagagccttccccagacaccgtcgtttgccctggaggcagcgttatcatttcgccgtcaggcgaagtcctggcaggtcccaactacgacggagaggcgctgatcacagccgaccttgacatgggagagatcgtccgggccaagtttgattttgacgtggtgggccactactctcggcctgaggtgctgagcttggtggtggatgaccagccgcaccgcccggtgtccttcacctctgccgctgagaaggctccggctgccaagagcgacgacaccgcaaagccctgacgaccttcagctcagtcacaagcagttgatttctatcgatggttctcttttttgtgtgaactgcgaaaagatttctgtcgatagcttaataaagccgatgaaatgtaggctcgggtcgcccgcatgtctgaccgacgcccctgtaactttggctgcttgtaaaaaaaatgccttccggaacaatcagccgaggtccgttcaaaaaaaaaaaaaaaa

SEQ ID NO: 2130 - protein, 360 aa, Triticum aestivum
  misc_feature: Ceres CLONE ID no. 579208
  misc_feature: Ceres CDNA ID no. 24766152
  misc_feature (31)..(220): Pfam Name: CN_hydrolase PFAM Desc: Carbon
  misc_feature: Homolog of GI Number: 75766684 NR Desc: NIT4B
  misc_feature: Homolog of GI Number: 51964188 NR Desc: PREDICTED OJ1626_B09.5 gene product
  misc_feature: Homolog of GI Number: 7435979 NR Desc: nitrilase
  misc_feature: Homolog of GI Number: 7435980 NR Desc: nitrilase
  misc_feature: Homolog of GI Number: 37654216 NR Desc: nitrilase 1
  misc_feature: Homolog of GI Number: 37654214 NR Desc: nitrilase 2
  misc_feature: Homolog of GI Number: 25290269 NR Desc: nitrilase
  misc_feature: Homolog of GI Number: 50910984 NR Desc: putative nitrilase 2
  misc_feature: Homolog of GI Number: 21593970 NR Desc: Nitrilase 4
  misc_feature: Homolog of GI Number: 508737 NR Desc: nitrilase
  misc_feature: Useful for making bigger plants
  misc_feature: Useful for making lethal plants for genetic confinement systems
  misc_feature: Useful for making plants with altered leaf shape eg curled leaves
  misc_feature: Useful for making plants with altered leaf shape eg curled leaves
  misc_feature: Useful for making plants with increased biomass and foliage
  misc_feature: Useful for making plants with increased biomass and foliage
MALVPSGSGSAPVIAEVEMNGGADQSATTVRATVVQASTVFYDTPATLDKAERLIAEAAGYGSQLVVFPEAFVGGYPRGSTFGFGISISITNPKDKGKGEFQKYYAAAIDVPGPEVTLLAAMAGKYKVFLVMGVIEREGYTLYCSVLFFDPLGRYLGKHRKLMPTALERIIWGFGDGSTIPVYDTPLGKIGALICWENKMPLLRTALYGKGIEIYCAPTADSRPVWQASMTHIAMEGGCFVLSANQFCRRQDYPPPSEYAFAGLGEEPSPDTVVCPGGSVIISPSGEVLAGPNYDGEALITADLDMGEIVRAKFDFDVVGHYSRPEVLSLVVDDQPHRPVSFTSAAEKAPAAKSDDTAKP

SEQ ID NO: 2131 - DNA, 1613 bp, Triticum aestivum
  misc_feature: Ceres CLONE ID no. 579361
  misc_feature: Ceres CDNA ID no. 24766153
  CDS (293)..(1366): REFERENCED BY SEQ ID NO: 2132
ataatctaatcaccaaataaaactagtactactcctcggagcagcagcactgcagcagtggtggtattaattaatcgaacccatcccagcggagaagaagaaaagaagaaggctctccttctcctttaagcttcgaatcatccttccttcccccctccccctccctccctcccacttcatctctccgcgacgaagcttccaaaacccccaaaaggatcccccaatcttcgcctctgcctccggcccgatcaagctctcagcagcggctgccgcgcggctcggcccgggatccatggagaggtacgagctgctcaaggacatcggcgccggcaacttcggcgtcgcgcggctgatgcgcaacaaggagaccaaggagctcgtcgccatgaagtacatcccacggggcctcaagattgacgagaatgtggcgagggagatcataaaccaccggtcgctgcggcaccccaacataatccgattcaaggaggtggtggtcacgccgacgcacctggcgattgtgatggagtacgcggcgggcggcgagctcttcgaccggatctgcaacgccgggaggttcagcgaggacgaggccaggtacttcttccagcagctcatctgcggcgtgagttactgccacttcatgcaaatttgccaccgggacctgaagctggagaacactctgctggacggcagcccggcgccccgcctcaagatctgcgacttcggttattcaaagtcgtcgttgctgcactcgaagcccaagtcgacggtcggcacgccggcgtacatcgccccggaggtgctctcccgccgggaatacgacggcaagacagccgatgtgtggtcttgtggagtgaccctttatgtgatgctagtcggcggttacccttttgaggatcctgatgaccccaagaacttcagaaagaccattgggagaataatgtcaatccaatacaaaataccggagtatgtccacgtatcccaagactgcaagcaactccttgccagtatttttgtcgcaaaccctgcaaagagaataacaatgagggagatcaggaaccacccttggttcttgaagaacttaccaagagagctcacggaagctgcccaagcaatgtactacaagagagacaacagcgccccgacctactcggtccagtccgtggaggggatcatgaagatcgtggaggaggcgcagaaaccgcctccttccaccactccggtggcgggtttcgggtgggcggaggaggacgagcaggaggatggcaagaagccagaggaggaagcggaggaggaagacgaagaaaatgagtatgagaagcagttgaatgaggtccgtgccagcggcgagttccacatcagctagctgatgggggtgcttcactggcgtgagaaggccacagaccggggataaaatttgtcatatagtttgtagtttgtgttttgttctcgagtttttctcttcattctcgtctccggttctgcaacagtgtaaattaccaaagtggttccgtcgctgtctttacaatgactgattaagctagcattgcggaaacataatgtatggaataaatcatcttattgagcatgttcttacaaaaaaaaaaaaaaaa

SEQ ID NO: 2132 - protein, 357 aa, Triticum aestivum
  misc_feature: Ceres CLONE ID no. 579361
  misc_feature: Ceres CDNA ID no. 24766153
  misc_feature: No seed is being produced by the plant
  misc_feature: The plant is abnormally small.
  misc_feature: The plant senesces significantly late copared to wild-type.
  misc_feature: Useful for biocontainment applications
  misc_feature: Useful for making plants with modulated biomass
  misc_feature: Useful for making plants with modulated time to senescence
  misc_feature (4)..(260): Pfam Name: Pkinase PFAM Desc: Protein kinase domain
  misc_feature: Homolog of GI Number: 68611223 NR Desc: OSJNBa0084A10.12
  misc_feature: Homolog of GI Number: 19568098 NR Desc: osmotic stress
  misc_feature: Homolog of GI Number: 2129803 NR Desc: probable serine/threonine
  misc_feature: Homolog of GI Number: 310582 NR Desc: protein kinase 3
  misc_feature: Homolog of GI Number: 3046731 NR Desc: protein kinase
  misc_feature: Homolog of GI Number: 1161254 NR Desc: protein kinase
  misc_feature: Homolog of GI Number: 50909339 NR Desc: putative osmotic stress
  misc_feature: Homolog of GI Number: 52352565 NR Desc: putative salt
  misc_feature: Homolog of GI Number: 38343920 NR Desc: serin/threonine protein kinase
  misc_feature: Homolog of GI Number: 38228677 NR Desc: serine/threonine
  misc_feature: Useful for making ornamental plants with modified leaves
  misc_feature: Useful for making plants with  enhanced chemical composition
MERYELLKDIGAGNFGVARLMRNKETKELVAMKYIPRGLKIDENVAREIINHRSLRHPNIIRFKEVVVTPTHLAIVMEYAAGGELFDRICNAGRFSEDEARYFFQQLICGVSYCHFMQICHRDLKLENTLLDGSPAPRLKICDFGYSKSSLLHSKPKSTVGTPAYIAPEVLSRREYDGKTADVWSCGVTLYVMLVGGYPFEDPDDPKNFRKTIGRIMSIQYKIPEYVHVSQDCKQLLASIFVANPAKRITMREIRNHPWFLKNLPRELTEAAQAMYYKRDNSAPTYSVQSVEGIMKIVEEAQKPPPSTTPVAGFGWAEEDEQEDGKKPEEEAEEEDEENEYEKQLNEVRASGEFHIS

SEQ ID NO: 2133 - DNA, 1013 bp, Triticum aestivum
  misc_feature: Ceres CLONE ID no. 579391
  misc_feature: Ceres CDNA ID no. 36505870
  CDS (81)..(800): REFERENCED BY SEQ ID NO: 2134
aaccagactcgtcttagaaagaggacgccgacactcgccgccaccatccacatccagatgcatcctcgttagctttcgccatgccggcagcttccacgctcatgcggttcgctagtgccggtcgctcagctgcggcgaccgcatctctcttcgcccgtttagctgaacgagcggccctctccacgaaggcggtggcggtcgaatgtcacgctcccaccttgggttcccaccgtgcagcctccgtagatctgcgtctgcaccgtcctcccgtcgtcgttcctccccccgccatgaccgcacctgcctcccagacgctcagctacttaaaagaacaaacgccggaaggtaaggtgaaatttgtggcagaggagaaagaccttgagtcagatgaaaccctttgggccttgtacgagcgctggtgcgaggctttcaaccaaaagcgtgaccatgatgagaaggttcgccggttcagcacattcaagaagaccgttctgcacatccacaacaagcccaatgtgggctacagaaggggaataacccaattcgctgatggaaagctaaggaagccctgttgcactgatctgcttgatcgtaagattgcagagcaggttgacggctataatgttgaatttgtaacagatgacagtggcaaactttacaagcgagtctacgctgattataaggtggttcaagacagactttatgtccatttacccaagggggttgatgtgaaaaccatcaccagcaaccctgaatgggctgagctggaaaagtatgactccaccaaccctgaatgctaagctgttctagtgctatgctgtattggttggtcttccttctgccaaagaagacatctgtactaagttgtgctttggcaatgcatccgtatgcttaataatatgtgtaagctatgtgtatgcagactataataatgcttttgtaagatatttatgaagtttgcctaaggtgttaagataatctgggactcgtcatttggttgaaaaaaaaaaaaa

SEQ ID NO: 2134 - protein, 239 aa, Triticum aestivum
  misc_feature: Ceres CLONE ID no. 579391
  misc_feature: Ceres CDNA ID no. 36505870
  misc_feature: Homolog of GI Number: 50925151 NR Desc: OSJNBa0044K18.10
  misc_feature: Homolog of GI Number: 77554324 NR Desc: endopeptidase
  misc_feature: Homolog of GI Number: 50919343 NR Desc: putative cysteine proteinase
  misc_feature: Homolog of GI Number: 70664001 NR Desc: OSJNBa0042I15.4
  misc_feature: Homolog of GI Number: 1336648 NR Desc: endopeptidase
  misc_feature: Homolog of GI Number: 1336650 NR Desc: endopeptidase
  misc_feature: Homolog of GI Number: 50902294 NR Desc: cysteine endopeptidase
  misc_feature: Homolog of GI Number: 1146116 NR Desc: cysteine proteinase EPB1 precursor
  misc_feature: Homolog of GI Number: 1146118 NR Desc: cysteine proteinase EPB2 precursor
  misc_feature: Homolog of GI Number: 7435804 NR Desc: cysteine proteinase
MPAASTLMRFASAGRSAAATASLFARLAERAALSTKAVAVECHAPTLGSHRAASVDLRLHRPPVVVPPPAMTAPASQTLSYLKEQTPEGKVKFVAEEKDLESDETLWALYERWCEAFNQKRDHDEKVRRFSTFKKTVLHIHNKPNVGYRRGITQFADGKLRKPCCTDLLDRKIAEQVDGYNVEFVTDDSGKLYKRVYADYKVVQDRLYVHLPKGVDVKTITSNPEWAELEKYDSTNPEC

SEQ ID NO: 2135 - DNA, 1763 bp, Triticum aestivum
  misc_feature: Ceres CLONE ID no. 579570
  misc_feature: Ceres CDNA ID no. 24766154
  CDS (52)..(1368): REFERENCED BY SEQ ID NO: 2136
acgccagtctcggcgacgccaaaccctcgcccgctctccagaaacccccctatggccgccaccggcgctgccgcgcccgcgcccgcggccgtgcagccgccgcggcagttcaagctcgacccgcagagcgagctccgcgtggaggtgctcccggacgcgaccctccgcgtgcgcctcgtctccggcacggcggagatcttcggcaccgagctcccgcccgagggctggctcaccatcccgccccgctccaagatcgccattttcacgtggcacggcgcgacggtggagctggacggggtcagcgagagcgagtacacgtccgacgagacgccgatggtaatttatgtcaacacgcatgcgattctcgatgcacggagggcgagggcgagggcagcgcagggaggcgacttggaggcctcacagggacctagagtgattgttgtggggccaactgattctggaaaaagcactctgtgcaaaatgctccttagctgggctgccaaactgggatggaagcctacatatgtggatttagatattggccagggttccataaccatacctggatgtatttctgctacaccaatagagaaacccatagatatagttgatgggattcctttggagatgccgcttgcatacttttatggccatccaaatccaagtattaatccagatgtttacaaagcgctcatgagagagctagctcaaacattagagacacagttctctgggaatgctgaatctagggcggccggtatggttattaacacaatggggtgggttgaaggccttggctatgagttacttcttaatgcaattgacatcttcaaggctaatgtagtgctggtattgggacaggagaagctctggaagatgttaaaagatgcagtacaaagtaagcccaatatcgatgtcgtaaaacttcataaatctgagggtgttgtcctaaggaattcaaaatatcgtcaaaagactaggagctttcgtatcaaggagtacttttatgggattgcaaacgatctggcaccacattcaaatgtagtcaactttagtgatgtttctgttttcagaattggtagtggacatcaagctccacggtcagctttaccaattggtgcagagcctgtggcagatcccactcggcttgttgctgtcaacatcagcactgatatggtccacacagtgcttgctgtttcttatgcgaaggaacctgatgaaataatttcgagcaacgttgccggattcatccatgtcacagatgttgacatccaaaggaagaagctgacgtacatcgcgccttgcccaggagacctgccaagcaggctgttaatcgcgagctccctgacatggtacgagcaggcttgacccggttcgaggttggacattgtaggtaggtaaccagatggctgatgacatgttgtaacgccgaaatggatactctgtgcatttgataactggaacactgctggtaaagctgaaaagctgaatgggttggacgatatctcaggcatcttgctgcgaagctttctgctgacttgcttatgctttctatgctgctgtggcggcgaagatacaaatagttaggtcaatgaaagattggtgtgctcttttgtacgctgttgggaactaagatatactagaagacgagtcctttggcctcttctcaactgtatccagatataaacatcggaactagttattactagaagaacgtccgtgcgttgcaatggggccacattaaaataaaaaaaaaaaaaaaa

SEQ ID NO: 2136 - protein, 438 aa, Triticum aestivum
  misc_feature: Ceres CLONE ID no. 579570
  misc_feature: Ceres CDNA ID no. 24766154
  misc_feature (163)..(436): Pfam Name: Clp1 PFAM Desc: Pre
  misc_feature: Homolog of GI Number: 50906345 NR Desc: putative ATP/GTP
  misc_feature: Homolog of GI Number: 10176985 NR Desc: ATP/GTP
  misc_feature: Homolog of GI Number: 50747970 NR Desc:  similar to Pre
  misc_feature: Homolog of GI Number: 59709481 NR Desc: ATP/GTP
  misc_feature: Homolog of GI Number: 55245198 NR Desc: ENSANGP00000020766
  misc_feature: Homolog of GI Number: 31198453 NR Desc: ENSANGP00000020766
  misc_feature: Homolog of GI Number: 5803029 NR Desc: ATP/GTP
  misc_feature: Homolog of GI Number: 61819707 NR Desc:  similar to Pre
  misc_feature: Homolog of GI Number: 34856236 NR Desc: similar to ATP/GTP
  misc_feature: Homolog of GI Number: 66851145 NR Desc: mRNA cleavage factor complex II protein Clp1
MAATGAAAPAPAAVQPPRQFKLDPQSELRVEVLPDATLRVRLVSGTAEIFGTELPPEGWLTIPPRSKIAIFTWHGATVELDGVSESEYTSDETPMVIYVNTHAILDARRARARAAQGGDLEASQGPRVIVVGPTDSGKSTLCKMLLSWAAKLGWKPTYVDLDIGQGSITIPGCISATPIEKPIDIVDGIPLEMPLAYFYGHPNPSINPDVYKALMRELAQTLETQFSGNAESRAAGMVINTMGWVEGLGYELLLNAIDIFKANVVLVLGQEKLWKMLKDAVQSKPNIDVVKLHKSEGVVLRNSKYRQKTRSFRIKEYFYGIANDLAPHSNVVNFSDVSVFRIGSGHQAPRSALPIGAEPVADPTRLVAVNISTDMVHTVLAVSYAKEPDEIISSNVAGFIHVTDVDIQRKKLTYIAPCPGDLPSRLLIASSLTWYEQA

SEQ ID NO: 2137 - DNA, 592 bp, Triticum aestivum
  misc_feature: Ceres CLONE ID no. 579633
  misc_feature: Ceres CDNA ID no. 40351086
  CDS (90)..(389): REFERENCED BY SEQ ID NO: 2138
aaaaagaagggctcgtgaggcgcatcgcattctatcacgcgacccaccaggcggcggcggcgtctcggctcgcaccccacagcacacccatggcggcggagggcggcggcggcggaggaggagggaaggtgtcgttcaaggtgatcctcacctccgaccccaagctccccttcaaagtgttcagcgtgccggaggcggcgcccttcaccgcggtgctcaagttcgccgccgaggagttcaaggtcccgccccagaccagcgccatcatcaccaacgatggagtaggcatcaacccacagcaaagtgcaggcaacgtgttcttgaagcatggctcggagctgcgactcatcccccgcgacagagttggagcgactgcggcgtctttctagtcagtcattgttagagccaacaatgaagaaacctatataacaggaataaaagcatgtccatgctcggttgtataatggatgtaacatggtcgagtataatttaccatcaacagccagccagccctatgattgacaggatgaatatagcttggcaggcagtgccatgtgttgctgtctttgtttgcataaaaaaaaaaaaaaaa

SEQ ID NO: 2138 - protein, 99 aa, Triticum aestivum
  misc_feature: Ceres CLONE ID no. 579633
  misc_feature: Ceres CDNA ID no. 40351086
  misc_feature (12)..(87): Pfam Name: UPF0185 PFAM Desc: Uncharacterised protein family
MAAEGGGGGGGGKVSFKVILTSDPKLPFKVFSVPEAAPFTAVLKFAAEEFKVPPQTSAIITNDGVGINPQQSAGNVFLKHGSELRLIPRDRVGATAASF

SEQ ID NO: 2139 - DNA, 2195 bp, Triticum aestivum
  misc_feature: Ceres CLONE ID no. 579678
  misc_feature: Ceres CDNA ID no. 36582545
  CDS (111)..(1547): REFERENCED BY SEQ ID NO: 2140
acacccagcaaccaccaccacccgtctcctctcctctcctctcctcctcgtcttcctccttcggcctcctcctttgcagctaacggaaccgaagaaagcctttcgttgacatggctgctttcatcctcttcctctgcttgctcgtgccgctcgtcctcgcgtgcgccgtccgcgccaggaagggcgccgccgggcgggcgtcgtcgggcggcggcggcaaaaagggcggcaccagcctgccgctgccgccggggtcgatggggtggccgtacgtgggcgagaccacgcagctctactcctccaagaaccccaacgtcttcttcgccaggaagcggaacaagtacgggcccatcttcaagacgcacatcctcgggtgcccctgcgtcatggtgtccagcccggaggccgccaagttcgtgctcgtcactcaggcgcacctcttcaagcctaccttcccggccagcaaggagcggatgctgggcccccaggccatcttcttccagcagggggactaccatgcccacctccgccgtctcgtctcacgcgccttctctcccgaggccatccgcggttccgtccctgccatcgaggctatcgccctccgctccctcggctcctgggaagacctgcaagtcaacaccttccaagagatgaagacttacgctctgaatgtggcattgctgtccatcttcggcgaggaggagatgcagtacatcgaggagctgaagcagtgctacctgacgctggagaaggggtacaactcgatgccggtgaacctgccgggcacgctgttccacaaggccatgaaggcccgaaagcggctgggcgccattgtggcccacatcatctccgcccggcgcgagcgcgagcgcgggagcgacctcctgggctccttcatggacggccgcgaggcgctcaccgacgaccagatcgccgacaacgccatcggcgtcatcttcgccgcgcgcgacaccaccgccagcgtgctcacgtggatggtcaagttcctcggcgacaaccccgccgtcctcaaagccgtcaccgaagagcacgctgagatcgcgagggagaaggcgttgtccggcgagccactgtcgtgggccgacacgcggcggatgcggatgacgggccgggtgatccaggagacgatgcgggtggcgtccatcctctccttcaccttcagggaggccgtggaggacgtggagtaccaagggtacctgattcccaagggctggaaagtgcttcccctgttccggaacatccaccacaaccccgaccacttcccctcccctgaaaagttcgatccttcacgattcgaggtggcccccaagcccaacacgttcatgccgttcgggaacgggacccactcgtgccccggcaacgagctggccaagctggagatgctcgtcctctgccaccacctcgccaccaagtacagatggtccacctccaagtccgagagcggcgtccagttcggccccttcgccctccccatcaacggcctccccatgaccttcacccgcaaggacgacaagaacaaagcctgagccatccatccatccatccatccatcgcctcctcctcgttcccaaagggaaatcaacagcgcgatagaggcgacggcgtggcacatgcgagcgagctggatcggctccgtccgtgtccgtgccggtcgccgtcggaggggacacttgtagccgtgggcgccgcggcgggagcgggagcgggctggcggaggccgatcggagagagcacgggccgtcaaagtcctttgtacagattcttcagccaggaccatgacggctgggcgagacaagaccaagaaaaatcccactcttcaaaaacacacacacgtaggcattctcagctagggagatccggcgccacaaagaagtggcgccgaactgtaaaaccaaccattttttatccttttttccttcagatttttatttttttggcaacacctatactagtataggaggaggagagaagacagcagactgacaggccctgattgggatgtaagataggctgcccgcctgaaagcaggctggcagctaggccgaataatcaatggatcgatcgctcgcggcaaagggccaaaaggaggcccccgggagagcgacccctctgtattgtttgttacacgtcaatgcagctggaaatggctttcttgtggaaaaaaaaaaaaaaaa

SEQ ID NO: 2140 - protein, 478 aa, Triticum aestivum
  misc_feature: Ceres CLONE ID no. 579678
  misc_feature: Ceres CDNA ID no. 36582545
  misc_feature (46)..(469): Pfam Name: p450 PFAM Desc: Cytochrome P450
  misc_feature: Homolog of GI Number: 20857158 NR Desc: AT5g45340/K9E15_12
  misc_feature: Homolog of GI Number: 7268718 NR Desc: cytochrome P450
  misc_feature: Homolog of GI Number: 30694744 NR Desc: cytochrome P450 family protein
  misc_feature: Homolog of GI Number: 42572955 NR Desc: cytochrome P450 family protein
  misc_feature: Homolog of GI Number: 71081902 NR Desc: cytochrome P450 monooxygenase
  misc_feature: Homolog of GI Number: 21537283 NR Desc: cytochrome P450
  misc_feature: Homolog of GI Number: 3461849 NR Desc: putative cytochrome P450
  misc_feature: Homolog of GI Number: 51536307 NR Desc: putative cytochrome P450
  misc_feature: Homolog of GI Number: 50911885 NR Desc: putative cytochrome P450
  misc_feature: Homolog of GI Number: 50946763 NR Desc: putative cytochrome P450
MAAFILFLCLLVPLVLACAVRARKGAAGRASSGGGGKKGGTSLPLPPGSMGWPYVGETTQLYSSKNPNVFFARKRNKYGPIFKTHILGCPCVMVSSPEAAKFVLVTQAHLFKPTFPASKERMLGPQAIFFQQGDYHAHLRRLVSRAFSPEAIRGSVPAIEAIALRSLGSWEDLQVNTFQEMKTYALNVALLSIFGEEEMQYIEELKQCYLTLEKGYNSMPVNLPGTLFHKAMKARKRLGAIVAHIISARRERERGSDLLGSFMDGREALTDDQIADNAIGVIFAARDTTASVLTWMVKFLGDNPAVLKAVTEEHAEIAREKALSGEPLSWADTRRMRMTGRVIQETMRVASILSFTFREAVEDVEYQGYLIPKGWKVLPLFRNIHHNPDHFPSPEKFDPSRFEVAPKPNTFMPFGNGTHSCPGNELAKLEMLVLCHHLATKYRWSTSKSESGVQFGPFALPINGLPMTFTRKDDKNKA

SEQ ID NO: 2141 - DNA, 1505 bp, Triticum aestivum
  misc_feature: Ceres CLONE ID no. 579819
  misc_feature: Ceres CDNA ID no. 24765981
  CDS (91)..(1395): REFERENCED BY SEQ ID NO: 2142
atctccatcaactccttccccaagccgcaacctgccgcaaatctccgcctcccctccccttccgacccgcccaggccgcagcagagcgccatgtcgtcctcccctacccccgcgccagacgccggcgccgccgcgatggccgtcgacgactcgtcggagaccgaccagctcgactccatgtccacggaggacatcgtccgggccacccgcctcctcgacaacgaggtccgcgtcctcaaggacgagctgcagcggaacaacctggagctcgagaacgtcaaggacaagatcaaggagaaccaggagaagataaagctcaacaagcagctgccctacctcgtcggcaacatcgtcgagattttggaaatgaaccctgaagatgaggctgaagaggatggtgctaatatagatctggactcacagaggaaaggaaaatgtgttgttcttaagacatccacaagacagactatattccttcctgtgatcgggctagttgaccctgacaacctcaagcctggtgatttggttggagtcaacaaggacagctacttgatattagacacgctaccttcggagtatgactctcgagtaaaggcaatggaggtagatgaaaagcctacggaggattataatgacattggcggccttgagaaagagattcaggaactcgttgaagctatagtgttgccaatgacacacaaggagcaatttcagaagttgggaatccgtcccccgaaaggagttcttttatatggaccacctgggacgggaaagacgttgatggctcgtgcatgtgctgcacaaaccaatgcaacctttctgaaacttgctggtccgcagctagtccagatgttcatcggtgatggggcaaagcttgtccgagatgcctttgagttggcaaaggagaaggccccctgcatcatttttattgatgagattgatgcaattggaacaaagcgttttgacagtgaagtgagtggtgacagagaagtgcaacgaactatgttggagttgctgaatcagctagatggatttagcagtgatgagaggataaaggtgatagctgcaaccaatcgtgcagatattctcgatcctgctttactccgttctggtcgcctggacagaaagattgagttccctcatccgacggaagaagcaagagctcggattttgcaaattcactcaagaaagatgaacgtacatcctgatgtcaactttgaggagctggctcgttcaactgatgatttcaacggtgcacaactgaaggctgtttgtgtggaagctggcatgcttgctctacgcagggacgctacagaggtgatccatgaagatttcaacgaaggcattatccaagtgcaagcaaagaagaagtccagcttgaattattacgcttagtttcccttgagtaatcagaacgcttggtcctgtgatggccgctgtttgtaacactcggctaccatttttatttggagtatagtttaagtctcggaaaaaaaaaaaaaaaa

SEQ ID NO: 2142 - protein, 434 aa, Triticum aestivum
  misc_feature: Ceres CLONE ID no. 579819
  misc_feature: Ceres CDNA ID no. 24765981
  misc_feature (217)..(244): Pfam Name: AAA_5 PFAM Desc: ATPase family associated with various cellular activities
  misc_feature: Homolog of GI Number: 5669047 NR Desc: 19S proteasome regulatory complex subunit S6A
  misc_feature: Homolog of GI Number: 2492523 NR Desc: 26S PROTEASE REGULATORY SUBUNIT 6A
  misc_feature: Homolog of GI Number: 3024434 NR Desc: 26S PROTEASE REGULATORY SUBUNIT 6A HOMOLOG
  misc_feature: Homolog of GI Number: 1174613 NR Desc: 26S PROTEASE REGULATORY SUBUNIT 6A HOMOLOG
  misc_feature: Homolog of GI Number: 23197864 NR Desc: 26S proteasome AAA
  misc_feature: Homolog of GI Number: 7596759 NR Desc: 26S proteasome AAA
  misc_feature: Homolog of GI Number: 51090590 NR Desc: 26S proteasome regulatory particle triple
  misc_feature: Homolog of GI Number: 21700797 NR Desc: At1g09100/F7G19_2
  misc_feature: Homolog of GI Number: 732815 NR Desc: Mg
  misc_feature: Homolog of GI Number: 61824066 NR Desc:  similar to PSMC3 protein
  misc_feature: Useful for making plants with increased biomass and foliage
MSSSPTPAPDAGAAAMAVDDSSETDQLDSMSTEDIVRATRLLDNEVRVLKDELQRNNLELENVKDKIKENQEKIKLNKQLPYLVGNIVEILEMNPEDEAEEDGANIDLDSQRKGKCVVLKTSTRQTIFLPVIGLVDPDNLKPGDLVGVNKDSYLILDTLPSEYDSRVKAMEVDEKPTEDYNDIGGLEKEIQELVEAIVLPMTHKEQFQKLGIRPPKGVLLYGPPGTGKTLMARACAAQTNATFLKLAGPQLVQMFIGDGAKLVRDAFELAKEKAPCIIFIDEIDAIGTKRFDSEVSGDREVQRTMLELLNQLDGFSSDERIKVIAATNRADILDPALLRSGRLDRKIEFPHPTEEARARILQIHSRKMNVHPDVNFEELARSTDDFNGAQLKAVCVEAGMLALRRDATEVIHEDFNEGIIQVQAKKKSSLNYYA

SEQ ID NO: 2143 - DNA, 2089 bp, Triticum aestivum
  misc_feature: Ceres CLONE ID no. 579833
  misc_feature: Ceres CDNA ID no. 24765982
  CDS (146)..(1924): REFERENCED BY SEQ ID NO: 2144
ctctctccacaccacaagccgccgccaccgcccgctgggaggggaatagaaatcgtgtgtatcgtagggttgcgcgaatcgccgtctccagcaaccaatccccaaccctcgagctatctaactatcccgatcccgatctcctaccatggtgtccgatgccagcaagaagaaagccgcgcagaagaaggccgccgccgccgcaaagaggggagccaagtccagcgccgctgcctcgtcctcgtcggcgtcgtcagcggccgataaggccgccaatggcatagcggcccttaacttatccgatcggacatgtaccggggtcctggcttcgcatccgctctcccgtgatatccacattgagtccctttcattaacatttcatggacatgaccttattgtggattcagaattggagcttaactacgggaggcggtatggtttgctcggcttaaatggttgtgggaaatctacccttctcaccgcaataggctgcagggaactccccattcctgaacacatggacatacatcatcttactcgtgagattgaggcttctgacatgtctgcgctgcaagctgttatctgttgtgatgaagaaagagtgaagttggaaaaggaagctgaaattttggctgcacaggatgatggtggcggtgaagctttggatcttgtatatgagcggttagaagcaatggatgcatcaactgctgaaaagcgtgctgctgagatattgtttggtctaggttttgacaagcaaatgcaagcaaagccaacacgagatttttctgggggttggcgtatgaggattgcattggcaagggcgctgttcatgaacccgaccatccttttgcttgatgagccaaccaaccatcttgatctcgaggcttgtgtctggctggaagagaaattaaagaattttgagcgtatacttgttgttatctcgcattcccaagattttctaaatggagtgtgcactaacatcatccacatgcagaacaagaccctcaagttatatactggaaattatgaccagtatgttcaaactcgctctgagcttgaagagaatcaaatgaagcagtacaaatgggaacaggaacagatagctaatatgaaggagtacattgcacgatttggtcatggatctgcgaagcttgctcgtcaggctcagagcaaagagaagactcttgcaaagatggagcgtggtggtcttgctgagaaggttgtcaatgacaggattcttgtattccgctttacagatgttggcaaactcccaccaccagtgctgcagtttgctgatgtcacatttggttacactccggataatctcatctacaagaaccttgacttcggtgttgaccttgactcgagagttgcactggtcggtcccaatggggctggtaagagcacacttctgaagctcatgacaggtgacctatctccgttggatggcatggtcagacgccacaaccacctacgcattgcacaattccatcaacatctcactgagaagctggacctggacatgccggccctgcagtacatgatgagggagtaccctgggaatgaagaggagaagatgagagctgcaattggcaagtttggcctgtcaggaaaggcacaggtgatgccaatgaaaaacctgtctgatgggcagaaggcccgtgtcatttttgcttggctagcatttaggcagccacagatgctgttgcttgatgagccgacaaatcatcttgacattgagaccattgactcacttgctgaggcactgaaggaatgggacggggggttggtcctggtgagccatgacttcaggctgatcaatcaggttgctcaagagatctgggtctgtgagaaccaggcggtgactaggtgggaaggcgatatcatggatttcaagcaacacttgaagaaaagggctggtctctagattttctgtcttttcattctctcggctctttggagatctagacaaccccaaagttttgcctgtatcagaaaagtttccatcatttagcgtgacaagtatgagtactattgtatcgcttaaaacatatcttctctacactattttaccagaaaaaaaaaaaaaaaa

SEQ ID NO: 2144 - protein, 592 aa, Triticum aestivum
  misc_feature: Ceres CLONE ID no. 579833
  misc_feature: Ceres CDNA ID no. 24765982
  misc_feature (406)..(423): Pfam Name: NACHT PFAM Desc: NACHT domain
  misc_feature (93)..(284): Pfam Name: ABC_tran PFAM Desc: ABC transporter
  misc_feature: Homolog of GI Number: 7573600 NR Desc: ABC transporter homolog
  misc_feature: Homolog of GI Number: 45198750 NR Desc: AFR232Cp
  misc_feature: Homolog of GI Number: 41152002 NR Desc: ATP
  misc_feature: Homolog of GI Number: 23956078 NR Desc: ATP
  misc_feature: Homolog of GI Number: 42542861 NR Desc: Abcf2 protein
  misc_feature: Homolog of GI Number: 28436765 NR Desc: Abcf2
  misc_feature: Homolog of GI Number: 30725400 NR Desc: At5g60790
  misc_feature: Homolog of GI Number: 31206531 NR Desc: ENSANGP00000010790
  misc_feature: Homolog of GI Number: 10179836 NR Desc: iron inhibited ABC transporter 1
  misc_feature: Homolog of GI Number: 50948579 NR Desc: putative iron inhibited ABC transporter 2
MVSDASKKKAAQKKAAAAAKRGAKSSAAASSSSASSAADKAANGIAALNLSDRTCTGVLASHPLSRDIHIESLSLTFHGHDLIVDSELELNYGRRYGLLGLNGCGKSTLLTAIGCRELPIPEHMDIHHLTREIEASDMSALQAVICCDEERVKLEKEAEILAAQDDGGGEALDLVYERLEAMDASTAEKRAAEILFGLGFDKQMQAKPTRDFSGGWRMRIALARALFMNPTILLLDEPTNHLDLEACVWLEEKLKNFERILVVISHSQDFLNGVCTNIIHMQNKTLKLYTGNYDQYVQTRSELEENQMKQYKWEQEQIANMKEYIARFGHGSAKLARQAQSKEKTLAKMERGGLAEKVVNDRILVFRFTDVGKLPPPVLQFADVTFGYTPDNLIYKNLDFGVDLDSRVALVGPNGAGKSTLLKLMTGDLSPLDGMVRRHNHLRIAQFHQHLTEKLDLDMPALQYMMREYPGNEEEKMRAAIGKFGLSGKAQVMPMKNLSDGQKARVIFAWLAFRQPQMLLLDEPTNHLDIETIDSLAEALKEWDGGLVLVSHDFRLINQVAQEIWVCENQAVTRWEGDIMDFKQHLKKRAGL

SEQ ID NO: 2145 - DNA, 996 bp, Triticum aestivum
  misc_feature: Ceres CLONE ID no. 579850
  misc_feature: Ceres CDNA ID no. 40351087
  CDS (198)..(704): REFERENCED BY SEQ ID NO: 2146
tagctagttccccaccagagcacacccgccgccgccgccgccgcaacaagagccgccgctagctcgccgccgtccgcctccttccctctgggcagccagcaccgcagcagtgttgagtccagcaccagaagcagaaccttccctctgtcggtgggctgcggcgccgtccgtccgtccgtccgttgaggagggcaagaatgaagggcggtaggaagaacctgcggcgcgcgtgcgaggagggcaccgcggtgacgctggcggagggcgagagcatcatgcaggtcgtcacgctgcgcggctcaaacctcatcgaggtgaccgacggcgagggcgtcaagtctctcgccctcttccccgccaagttccagaagagcttctggatcaagaacgggaatttcgtggttgtggatgctagtggcagggacgaggctctcgaatctggaagcaagatagcctgtgtcgtctcgcgcgtcctctttcacgaccaggttcgcgccctcgagaaatccggccaatggccggctatcttcaagtcaactcccaatgggtgggcgacagggccacaaggaacgacatcacaggctgaggaagagcacaactctgatgaagacgacgatgatgatatgccgccacttgaggcaaacacgaacagaaatagaccgtttgacgtgcattccgatacagaaagtgattctgattcttgaactggtagacgacttgggaatagtcatcatcctatggttaccgtccacctgtacacctaatgtatttatgcttgttgaatttgggcatgacatcataaacttacggcccaatctgtcaaagatatagtagtcagtgcgttttgtcgacattaagtggcagggcatgtggaggcctgtcacctgtagtgtaatatgaagaaaacaagaatgttgcacctaaaaaaaaaaaaaaaaaaaaaaaaaaaaaaaaaaaaaaaaaaaaaaaaaaaaaaaaaaaaaaaaaaaaaaaaaa

SEQ ID NO: 2146 - protein, 168 aa, Triticum aestivum
  misc_feature: Ceres CLONE ID no. 579850
  misc_feature: Ceres CDNA ID no. 40351087
MKGGRKNLRRACEEGTAVTLAEGESIMQVVTLRGSNLIEVTDGEGVKSLALFPAKFQKSFWIKNGNFVVVDASGRDEALESGSKIACVVSRVLFHDQVRALEKSGQWPAIFKSTPNGWATGPQGTTSQAEEEHNSDEDDDDDMPPLEANTNRNRPFDVHSDTESDSDS

SEQ ID NO: 2147 - DNA, 1127 bp, Triticum aestivum
  misc_feature: Ceres CLONE ID no. 579913
  misc_feature: Ceres CDNA ID no. 25892303
  CDS (44)..(994): REFERENCED BY SEQ ID NO: 2148
atcccaaagccgaaaggtgagccccgagacacttagatctctcatggctcgtctcccaccttttctcttgctcctcgcagcaacttgtgcggcggtagcgaacgcgcagctgtcggagaactactacggttcttcttgccccgcggcgcttctcaccgtcaggacaaccgtggcgacggcggtgctgctcgaccgccgcatgggcgcctcccttctccggctatacttccacgactgctttgtgcaagggtgcgacgcgtcggtgctgctggacgacacgcccagcttcaccggcgaaaagggggcggggccgaacgcagggtcgctgcgcggcttcgaggtgattgacaggatcaaactgctgctggagctgatttgcccgcggaccgtctcttgcgccgacatcctcgccgtcgctgcccacgacgccgtcgtcgacctaggggggccatcatggacggttctacttgggaggagggacgccaccaccgcaagtgcgtccttggccaacagtgacctccccggccccaactccaaccttaatgatctcctcgccgctttctccaagaagggattaagcagcaccgacatggttgctctctcaggggggcacaccatcggccgggcgcaatgccagaattaccgaaaccggatctacgccgacaccgacatcgacgggaccttcacggcgtcgctgcgaggcgactgcccacagggtggtggcaacgacggcaacctcgcgcctctcgacgcgtcctcgcccgactacttcgacaacagctacttctccggcctcctcagccatcgggggctgctccactccgaccaggcgctgtacgacggcggctccacggacggtctggttagcagctacgcgtccaacaatgatcagttcggcagcgacttcgcggccgcgatggtgaagctgggcaatctcggtgtgctcacgggggcgtacggtgaaatcagggtcaactgccgggcggtaaactgaggatagatcctgggtatccatcttacaaaatgaactttgtccgttacggaaacgggaagtgagactgggtctttatgtacatgcactatgtaccgagttaaatgcattggttcctataaaaaaaaaaaaaaaa

SEQ ID NO: 2148 - protein, 316 aa, Triticum aestivum
  misc_feature: Ceres CLONE ID no. 579913
  misc_feature: Ceres CDNA ID no. 25892303
  misc_feature (39)..(280): Pfam Name: peroxidase PFAM Desc: Peroxidase
  misc_feature: Homolog of GI Number: 50939965 NR Desc: putative peroxidase precursor
  misc_feature: Homolog of GI Number: 55701085 NR Desc: TPA: class III peroxidase 109 precursor
  misc_feature: Homolog of GI Number: 732976 NR Desc: peroxidase
  misc_feature: Homolog of GI Number: 50939971 NR Desc: peroxidase
  misc_feature: Homolog of GI Number: 2429292 NR Desc: peroxidase
  misc_feature: Homolog of GI Number: 50939969 NR Desc: peroxidase
  misc_feature: Homolog of GI Number: 20286 NR Desc: peroxidase
  misc_feature: Homolog of GI Number: 55701129 NR Desc: TPA: class III peroxidase 131 precursor
  misc_feature: Homolog of GI Number: 55701139 NR Desc: TPA: class III peroxidase 136 precursor
  misc_feature: Homolog of GI Number: 2429286 NR Desc: peroxidase
  misc_feature: Useful for making ornamental plants with modified flowers
MARLPPFLLLLAATCAAVANAQLSENYYGSSCPAALLTVRTTVATAVLLDRRMGASLLRLYFHDCFVQGCDASVLLDDTPSFTGEKGAGPNAGSLRGFEVIDRIKLLLELICPRTVSCADILAVAAHDAVVDLGGPSWTVLLGRRDATTASASLANSDLPGPNSNLNDLLAAFSKKGLSSTDMVALSGGHTIGRAQCQNYRNRIYADTDIDGTFTASLRGDCPQGGGNDGNLAPLDASSPDYFDNSYFSGLLSHRGLLHSDQALYDGGSTDGLVSSYASNNDQFGSDFAAAMVKLGNLGVLTGAYGEIRVNCRAVN

SEQ ID NO: 2149 - DNA, 1493 bp, Triticum aestivum
  misc_feature: Ceres CLONE ID no. 579964
  misc_feature: Ceres CDNA ID no. 24765983
  CDS (36)..(1235): REFERENCED BY SEQ ID NO: 2150
agtctacccaaagtccgacgagcaaccacccggccatggcgaccaccgacatccgcctctccatcgggcaccagacccgcttcgccctccgcctcgcctccgccatctcctcgccctcccacgccaagggatccgccggcaacgccgccttctccccgctctcgctccacgtcgcgctcagcctcgtcgcggcgggcgccggcggcgccacccgcgaccagctcgccgccgcgcttgggtccgcggagaaaggcgaggccgagggcctccacgcgctcgccgagcaggtggttcaggtcgtgctcgccgacgcgtcgggcgccggcggcccgcgcgtcgccttcgccaacggcgtcttcgtcgacgcgtcgctcaagctcaagccttccttcaaggatctcactgtgggcaagtacaaggccgagacacagtccgtggacttccaaactaaggctgctgaagttgctggtcaagtgaactcctgggtagagaaaatcacaacaggtctcatcaaagagatcctccctgcaggatctgttgataacaccactagactggttcttggtaatgccctttatttcaaaggagcttggactgagaagtttgatgcatctaagacaaaagacgagaagttccacctccttgatgggagctcagttcaaacaccgttcatgtccagtacaaagaagcaatatatttcgtcttctgacagcttgaaggtactgaagcttccttaccagcaaggcgaggacaagaggcagttctccatgtacattcttcttccagaagcacaggatggtctctggaacttggccaacaagttgagcaccgaaccagagttcttggaaaaccatatcccaatgcagaaggttcctgtcgggcagttcaagcttccgaagttcaagatatcatttggatttgaagcgtctgatatgctcaaaggtttgggtctccagctgccgttcagcgcagaggcagatctttcggagatggtggattcaccggcgggcttatacgtctcatccgttttccacaagtcgtttgtcgaggtgaacgaagaaggcaccgaggctgccgctgcaactgcttcagtggtcacacttaggtcactgccagtggagcccgtgaaggtggatttcgtcgcggatcaccctttcctcttccttatccgagaagacctcacaggggtggtgctattcgtcggccatgtgttcaatcccttggtgtctgcatgatgtgtttgctctggatcgctgccttggcagtgacctcaactgtcacatgtaagtgaagggtttcgactttagatcatgctgcctgtgcaataaatccggtgcatgtttttgttttcgaataacggcttgcttgatgtatggaggttatggtgagttggtgacaataatccagggttgccgtggagttttgtgctttcagttgaatgatactcctacatgagatggccaaatgcttcttggtcaaaaaaaaaaaaaaaa

SEQ ID NO: 2150 - protein, 399 aa, Triticum aestivum
  misc_feature: Ceres CLONE ID no. 579964
  misc_feature: Ceres CDNA ID no. 24765983
  misc_feature (3)..(395): Pfam Name: Serpin PFAM Desc: Serpin
  misc_feature: Homolog of GI Number: 19068 NR Desc: protein Z
  misc_feature: Homolog of GI Number: 1310677 NR Desc: protein z
  misc_feature: Homolog of GI Number: 19071 NR Desc: protein zx
  misc_feature: Homolog of GI Number: 50901446 NR Desc: putative serine protease inhibitor
  misc_feature: Homolog of GI Number: 37700305 NR Desc: putative serpin
  misc_feature: Homolog of GI Number: 1197577 NR Desc: serpin
  misc_feature: Homolog of GI Number: 5734504 NR Desc: serpin
  misc_feature: Homolog of GI Number: 5734506 NR Desc: serpin
  misc_feature: Homolog of GI Number: 1885350 NR Desc: serpin
  misc_feature: Homolog of GI Number: 1885346 NR Desc: serpin
MATTDIRLSIGHQTRFALRLASAISSPSHAKGSAGNAAFSPLSLHVALSLVAAGAGGATRDQLAAALGSAEKGEAEGLHALAEQVVQVVLADASGAGGPRVAFANGVFVDASLKLKPSFKDLTVGKYKAETQSVDFQTKAAEVAGQVNSWVEKITTGLIKEILPAGSVDNTTRLVLGNALYFKGAWTEKFDASKTKDEKFHLLDGSSVQTPFMSSTKKQYISSSDSLKVLKLPYQQGEDKRQFSMYILLPEAQDGLWNLANKLSTEPEFLENHIPMQKVPVGQFKLPKFKISFGFEASDMLKGLGLQLPFSAEADLSEMVDSPAGLYVSSVFHKSFVEVNEEGTEAAAATASVVTLRSLPVEPVKVDFVADHPFLFLIREDLTGVVLFVGHVFNPLVSA

SEQ ID NO: 2151 - DNA, 1445 bp, Triticum aestivum
  misc_feature: Ceres CLONE ID no. 579969
  misc_feature: Ceres CDNA ID no. 36505868
  CDS (250)..(1170): REFERENCED BY SEQ ID NO: 2152
aaaaccaaaacaaataccaacacacacacagccagccagccagccaggaagcaaaaaaatccccccaccctccctgcaatagcaaacacgcggaaaaaaatggaggcatgaacacgcccccctcctcctccgtccccgcctcctccgtccccgatcccgtcgacagcccagcggccccgcccccgccccctcctcgccggcggcacccttgctcgtaggcgggcgtgaggggagcggcgcgcagcgacgatgccgtcgcactcggatctggaccggcagatctcgctgctgcgggactgcaagttcctgccggacgccgaggtcaaggccctctgcgagcaggccaaggcgatcctcatggaggagtggaacgtgcagcccgtgcgctgccccgtcaccgtctgcggcgacatccacggccagttctacgacctcatcgagctcttccgcatcgggggcgacacccccgacaccaactaccttttcatgggcgactacgtcgaccgtggctactattcagtggagactgtttcattattagtggctctcaaagttcgttatagagacagaatcacaatcttgagaggaaatcacgagagccgacaaatcactcaagtgtatggcttctatgatgaatgcttacggaagtacggaaatgcaaatgtctggaagtacttcacagatttgtttgattatttgcctctcacagctcttatagaaaaccaggtgttttgcctccatggtggtctctctccatcattagatacattggacaatattcgttctcttgatcgcatacaagaggtcccgcatgaaggacctatgtgtgatcttttgtggtctgatccggatgaccgatgcgggtggggaatttcaccaagaggagcaggctacacatttggacaagatatagcacaacaatttaaccatacaaatggtcttagccttatttcaagggcccatcaacttgtgatggaagggttcaactgggcacaggagaagaatgttgtcacagttttcagtgcgccaaactactgttaccggtgtggtaacatggctgcgattctcgaaattggggagaacatggatcagaacttcctccaattcgatccagcgccgcggcaaatcgagccagacacaacgcgcaagacccccgactactttttgtaatcgtggtgttgactttttttaactcttctgctgcctggctggatctgtagatctctgtccttagaaaatgggattccttgagctgagttgtgtaccccccctctcattcttttgtttggagattttggttgccgcttctcaggacctcataggacatgttaaaagtacattgcattggtattttttttgtatctccattttgtattatttccgagacagagaagggaagctgcaatagaatcgtctcgtaacatattacaaaaaaaaaaaaaaaa

SEQ ID NO: 2152 - protein, 306 aa, Triticum aestivum
  misc_feature: Ceres CLONE ID no. 579969
  misc_feature: Ceres CDNA ID no. 36505868
  misc_feature (47)..(242): Pfam Name: Metallophos PFAM Desc: Calcineurin
  misc_feature: Homolog of GI Number: 29611957 NR Desc: Serine/threonine protein phosphatase PP2A catalytic subunit
  misc_feature: Homolog of GI Number: 50906349 NR Desc: Serine/threonine protein phosphatase PP2A
  misc_feature: Homolog of GI Number: 10638985 NR Desc: protein phosphatase 2A
  misc_feature: Homolog of GI Number: 1218054 NR Desc: protein phosphatase 2A
  misc_feature: Homolog of GI Number: 34398261 NR Desc: protein phosphatase 2A catalytic subunit
  misc_feature: Homolog of GI Number: 34398263 NR Desc: protein phosphatase 2A catalytic subunit
  misc_feature: Homolog of GI Number: 3859548 NR Desc: protein phosphatase 2A catalytic subunit
  misc_feature: Homolog of GI Number: 18448708 NR Desc: protein phosphatase type 2A
  misc_feature: Homolog of GI Number: 54291182 NR Desc: serine/threonine protein phosphatase PP2A
  misc_feature: Homolog of GI Number: 20259838 NR Desc: similar to protein phosphatase type 2A
MPSHSDLDRQISLLRDCKFLPDAEVKALCEQAKAILMEEWNVQPVRCPVTVCGDIHGQFYDLIELFRIGGDTPDTNYLFMGDYVDRGYYSVETVSLLVALKVRYRDRITILRGNHESRQITQVYGFYDECLRKYGNANVWKYFTDLFDYLPLTALIENQVFCLHGGLSPSLDTLDNIRSLDRIQEVPHEGPMCDLLWSDPDDRCGWGISPRGAGYTFGQDIAQQFNHTNGLSLISRAHQLVMEGFNWAQEKNVVTVFSAPNYCYRCGNMAAILEIGENMDQNFLQFDPAPRQIEPDTTRKTPDYFL

SEQ ID NO: 2153 - DNA, 1570 bp, Glycine max
  misc_feature: Ceres CLONE ID no. 580003
  misc_feature: Ceres CDNA ID no. 25446225
  CDS (436)..(1365): REFERENCED BY SEQ ID NO: 2154
atgagacggtgttctcgagttatgccggaaatcaatttttgctacggcgtgcggtggtcggagagtagaaagaaagaacaagaataagggtttcaggtcttgtattctcccaaattggattcaaatatgagtgtaaaagggcacaaaatcaacacaagacaacccagactatgaggtaaccatttctcaaaggtttttctccggtcgccgccgcaccgccgcgccgttaagacgaagagtagaagacgggaataagaaggttttacagagttcccttcccttcaaagcctttcttcgacccatattcactctttcaagcgcaacgacacgataaatataatcagaatcattccaattgcgaaatcgaaactcattgaatagtatcgtattgtatcgcacgataatttggttcctttgctttctctgaattgagagatgggaaaagcaagggacaggaccgaagatttcaaagacgccgtgcgccacaccgctcgctctttgggctacgatgaggctaaattggcgtccgttatggcttctttcattattcataaaccgccgcaaaagtccccgttttccaaagctgcattgaagacgttggagagtattggagagctggatcagtttttgttgaagcacagaaaggactacacggatctgcatcgcacaactgaaaaggagagagatagcattgagcatgaagttagtacttttattaaaacttgccaggaacaaattgatattcttaagaatagtataaatcaagaggaggaaacttcgaaaggttggcttggcattgcaaccacaaaatctaatgccgacatcattgcccacaaacatggggtggttctaattttaagtgagaggctccattcagttacggcacagtttgatcagctcagagctgtacgcttccaggatgctattaacaaagcaataccacgaagaaaacttaaccgtgtagccaggaatgattctgcagaaacctctaagtcaggtgacatggagctcagagaaccagaggagttacgcgctgagcctctaagagtccaacaacaactcttggatgatgaaacacgtgcccttcaggtggaattgactagtcttctcgatacagttcaagaaaccgaaactaagatggtggagatgtctgcactaaatcacctcatgtctacacatgttttgcatcaagctcagcaaattgagcatctgtatgatcaggctgttgaagctactaacaatgttgagcttggtaacaaagaactctcacaagccattcagcggaatagcagcagcaggacatttcttttactatttctatttgtgcttactttttcaattctctttcttgattggtatagttaaatgcttttggtttcctgctgtcacggtgtatcctatagatactctctgcccccctttctcatttttctagatgcgatgcttattggagaaagaattttagtaatcaatttatgaagggaatgacaaaagagacatgcctactgttgggtggaggcatgggaaaaaaaaaaaaaaaaaaaaaaaaaaaataaaaaaaaaaaaaaaa

SEQ ID NO: 2154 - protein, 309 aa, Glycine max
  misc_feature: Ceres CLONE ID no. 580003
  misc_feature: Ceres CDNA ID no. 25446225
  misc_feature: Homolog of GI Number: 50926650 NR Desc: OSJNBa0074L08.20
  misc_feature: Homolog of GI Number: 77553055 NR Desc: syntaxin 81
  misc_feature: Homolog of GI Number: 73951488 NR Desc:  similar to Syntaxin
  misc_feature: Homolog of GI Number: 73951484 NR Desc:  similar to Syntaxin
  misc_feature: Homolog of GI Number: 18203931 NR Desc: Stx18 protein
  misc_feature: Homolog of GI Number: 49115664 NR Desc: LOC443606 protein
  misc_feature: Homolog of GI Number: 50747226 NR Desc:  similar to Syntaxin 18
  misc_feature: Homolog of GI Number: 54697130 NR Desc: syntaxin 18
MGKARDRTEDFKDAVRHTARSLGYDEAKLASVMASFIIHKPPQKSPFSKAALKTLESIGELDQFLLKHRKDYTDLHRTTEKERDSIEHEVSTFIKTCQEQIDILKNSINQEEETSKGWLGIATTKSNADIIAHKHGVVLILSERLHSVTAQFDQLRAVRFQDAINKAIPRRKLNRVARNDSAETSKSGDMELREPEELRAEPLRVQQQLLDDETRALQVELTSLLDTVQETETKMVEMSALNHLMSTHVLHQAQQIEHLYDQAVEATNNVELGNKELSQAIQRNSSSRTFLLLFLFVLTFSILFLDWYS

SEQ ID NO: 2155 - DNA, 1261 bp, Glycine max
  misc_feature: Ceres CLONE ID no. 581430
  misc_feature: Ceres CDNA ID no. 25446648
  CDS (49)..(954): REFERENCED BY SEQ ID NO: 2156
ttttctttcttcttcgcttctcggtggggcttcaagtttcaccataggatgttttctaggttgatacatcctcatgaagggcaggaagacatgcagggtggctccaatcacgctcacctcggagacccttgtcttgttttaacctccgatcccaaacctcgtcttcgttggaccgctgaccttcatgaacgctttgttgatgctgtcactcaacttgggggtgccagtaccactccaaaagcaatcatgaggaccatgaatgtcaagggtttgacgctctatcatttgaagagtcatcttcagaagtacaggctaggtaagcaatcaggaaaagattctgatgagggatgcaaagatgcttcatatcttcaagaaagccctggtactgataactcttctccaaagttaccagatgctaacgagggtcatgaagtcaaggaggcattaagagcacagatggaagtgcaaagtaaactacacttactagtggaggcagagaagcacttgcaaattcgccaggatgcagagcgaagatacatgggcatgcttgagcgagcgtgtaagatgttggcagatcaatttattggggatgtaactattgacatggacggccaaaaatttcaagggctggaaagcaaaacatccagaagttccctagttgatcacgttggcttttatccccaagcgtgtactgaggtcggcggaatgcatgcttcagtagtatcacctattcttcaacctcaaggggctgactgtttcactgaaagttgcctaacatcacttgagagtctgggagggttgacactagaaggatctcctggcggatcgaagaagaggatgctgaacttggactcgatggtagcacctttgatctggagtgaagccaacaccagaactcaaggaattcatttagccaaagttaatccttcaggaatgactaggtacggcatgtaggtagggtagggaaggttagttcctcatgaagagagttcatgacattgtgctttgtcccaagcttttaggattaagtactgagtagggaaggttagctcctcatgaagagagttcatgacattgtgctttgccccaagcttttaggattaagtactgagttagattattatcggttgttgtccattaagttggtgagaatcaacttatctcacatcattgtgtaaattgaaatactatatggcttaacttggcccgtcactaaatgttggcgctgaccatttatgatcaaataaaaaaaaaaaaaaaa

SEQ ID NO: 2156 - protein, 301 aa, Glycine max
  misc_feature: Ceres CLONE ID no. 581430
  misc_feature: Ceres CDNA ID no. 25446648
  misc_feature (38)..(88): Pfam Name: Myb_DNA PFAM Desc: Myb
  misc_feature: Homolog of GI Number: 50944571 NR Desc: transfactor
  misc_feature: Homolog of GI Number: 21594046 NR Desc: transfactor
  misc_feature: Homolog of GI Number: 42572521 NR Desc: myb family transcription factor
  misc_feature: Homolog of GI Number: 21593358 NR Desc: transfactor
  misc_feature: Homolog of GI Number: 50905647 NR Desc: myb family transcription factor
  misc_feature: Homolog of GI Number: 56269839 NR Desc: myb family transcription factor
  misc_feature: Homolog of GI Number: 4835766 NR Desc: Contains similarity to gbAB017693 transfactor
  misc_feature: Homolog of GI Number: 42572243 NR Desc: myb family transcription factor
  misc_feature: Homolog of GI Number: 30699418 NR Desc: myb family transcription factor
  misc_feature: Homolog of GI Number: 6223653 NR Desc: transfactor
MFSRLIHPHEGQEDMQGGSNHAHLGDPCLVLTSDPKPRLRWTADLHERFVDAVTQLGGASTTPKAIMRTMNVKGLTLYHLKSHLQKYRLGKQSGKDSDEGCKDASYLQESPGTDNSSPKLPDANEGHEVKEALRAQMEVQSKLHLLVEAEKHLQIRQDAERRYMGMLERACKMLADQFIGDVTIDMDGQKFQGLESKTSRSSLVDHVGFYPQACTEVGGMHASVVSPILQPQGADCFTESCLTSLESLGGLTLEGSPGGSKKRMLNLDSMVAPLIWSEANTRTQGIHLAKVNPSGMTRYGM

SEQ ID NO: 2157 - DNA, 1331 bp, Glycine max
  misc_feature: Ceres CLONE ID no. 582049
  misc_feature: Ceres CDNA ID no. 25445625
  CDS (298)..(1176): REFERENCED BY SEQ ID NO: 2158
acctaaatgtgttaaaatcaagctccgctacttactagtgttatttgtcattatgctttagacaaggtctaatctatagcctttggacttatgctgtttctcatgtgtataaacaaacgaaacttttcttcaggtggggtttgtgcaactaaagtttagtggcaagcaagacaacaacaaaaaaggaagtaatattcttctgtggttgctttattttctggccactttccacaagcatagattctcatagagagtccagagagagccctctctcctagctgtgcagcagaggaatggatgattgtgctctgctctgctttgattctctctgctcataaagaacctcttcatactcattgcagttgcagtacgtggggggtgctttcaacactttcttcaatcagcaaaatgagtcatgcacattctcatatgggctctggtagtagaaccactcgaagagcttttgagtttgggaagacacatgtagtgaggccaaaaggaaaacaccaagccactatagtttggctgcatggtcttggtgataatggtttgagctcatctcagctcctggaatcccttccacttccaaatataaaatggatttgcccaactgctcctacccgtcctgtggcgatacttggtggttttccctgcactgcatggtttgatgtgggagaactttcagaagatggtccagatgattgggagggtttagatgcctcagcagcacacattgctaacttgttgtccacagagccagctgatgtgaaagttggtattggaggcttcagcatgggtgcagcaatagctctgtactcttcaacttgttttgccatgggaaggtatggaaatggcattccataccctctcaacttaagaacagtggttggactaagtggttggcttcccggatcaaggagcttaaggaacaagatagaagtgtcacatgaagcaagaaggcgagcagcttcattacccattttgctgtgccatggaatcagtgatgatgtagtcctttgcaaatacggagaaaaatctgctcaatccttatgttcagcagggtttcgatatgttgcattcaaatcttatgatgggcttggtcattacacagttcctagagaaatggatgaggtttgcacttggcttagttcaaggctgggacttgaaggtatataggaggatttattttcttggtccctttttgtcatgttcctcgggcaataaagatctgcatatgttttttaagaattttcctagggactggattagttgtattattgaagagatttttagttattattattattattctaacaaaaaaaaaaaaaaaa

SEQ ID NO: 2158 - protein, 255 aa, Glycine max
  misc_feature: Ceres CLONE ID no. 582049
  misc_feature: Ceres CDNA ID no. 25445625
  misc_feature (21)..(250): Pfam Name: Abhydrolase_2 PFAM Desc: Phospholipase/Carboxylesterase
  misc_feature: Homolog of GI Number: 34146820 NR Desc: At3g15650
  misc_feature: Homolog of GI Number: 42562707 NR Desc: phospholipase/carboxylesterase family protein
  misc_feature: Homolog of GI Number: 34910274 NR Desc: putative lysophospholipase 2
  misc_feature: Homolog of GI Number: 29409364 NR Desc: biostress
  misc_feature: Homolog of GI Number: 55770623 NR Desc: putative lysophospholipase 2
  misc_feature: Homolog of GI Number: 54290844 NR Desc: lysophospholipase 2
  misc_feature: Homolog of GI Number: 5903036 NR Desc: F6D8.5
  misc_feature: Homolog of GI Number: 34912598 NR Desc: P0046B10.16
  misc_feature: Homolog of GI Number: 73950621 NR Desc:  similar to Acyl
  misc_feature: Homolog of GI Number: 57044188 NR Desc:  similar to Acyl
MSHAHSHMGSGSRTTRRAFEFGKTHVVRPKGKHQATIVWLHGLGDNGLSSSQLLESLPLPNIKWICPTAPTRPVAILGGFPCTAWFDVGELSEDGPDDWEGLDASAAHIANLLSTEPADVKVGIGGFSMGAAIALYSSTCFAMGRYGNGIPYPLNLRTVVGLSGWLPGSRSLRNKIEVSHEARRRAASLPILLCHGISDDVVLCKYGEKSAQSLCSAGFRYVAFKSYDGLGHYTVPREMDEVCTWLSSRLGLEGI

SEQ ID NO: 2159 - DNA, 1068 bp, Triticum aestivum
  misc_feature: Ceres CLONE ID no. 584777
  misc_feature: Ceres CDNA ID no. 36707406
  CDS (64)..(807): REFERENCED BY SEQ ID NO: 2160
atacactcgatcgaaccaactcattcctcctaccacctcggcaccaccagcccaagcagagccatggcgcccaacggagacaacaccgtggccaacgtccacagcggcatcgacagcaccaacaagacgctgctcaagagcgacgccctctacacctacatcctcgacaccaccgtcttcccccgtgagcacgagtgcatgcgcgacctgcgcctcatcaccgacaagcacccatggggctacatgcagtcgtcgtcggacgaggcacagctgctggggatgctgatcaagatggcgggcgccaagaagacgatcgaggtgggcgtgttcacgggctactcgctgctggccaccgcgctggcgctcccggaggacggcaaggtggtggccatcgacaccgaccgcgagtgctacgaggtgggccgccccttcatcgagaaggccggcatggcgcacaaggtggacttccgcgagggcaccggcctggcgcgcctggacgagctgctcgtcgaggacgagggcgcggccagctacgacttcgcgttcgtggacgcggacaagcccaactacgtgcgctaccacgagcagctgctgaagctggtccgcgtcggcggcaccatcatctacgacaacacgctgtggggcggcacggtggcgctgccggcgggcacgcccatgtccgacctcgacacccgcttctccgccgccctcagggacctcaacgccaagctcgccgccgacccgcgcatcgaggtctgccagctcgccatcgccgacggcgtcaccatctgccgccgcctcgtctaggcgggcgggcgtccggcccggcccgtcccggcgtgatcgtgatccgccgcgcgcctgccggcctgcgtgcgtgcctggagtccatttccttaccagccgcttatcctaatcaattgtattatttttccctgccagcgctggtttagcgtgaagcatccgatggtttcgaattttcaataacttttttggcttttcaactttgagaggagtggctgtacttactgtactatatatggtgttccgataaaaaaaaaaaaaaaa

SEQ ID NO: 2160 - protein, 247 aa, Triticum aestivum
  misc_feature: Ceres CLONE ID no. 584777
  misc_feature: Ceres CDNA ID no. 36707406
  misc_feature (34)..(246): Pfam Name: Methyltransf_3 PFAM Desc: O
  misc_feature: Homolog of GI Number: 50947279 NR Desc: putative caffeoyl
  misc_feature: Homolog of GI Number: 37221605 NR Desc: caffeoyl
  misc_feature: Homolog of GI Number: 5101868 NR Desc: Caffeoyl CoA O
  misc_feature: Homolog of GI Number: 32347451 NR Desc: caffeoyl CoA 3
  misc_feature: Homolog of GI Number: 32347487 NR Desc: caffeoyl CoA 3
  misc_feature: Homolog of GI Number: 32347461 NR Desc: caffeoyl CoA 3
  misc_feature: Homolog of GI Number: 32347447 NR Desc: caffeoyl CoA 3
  misc_feature: Homolog of GI Number: 32347439 NR Desc: caffeoyl CoA 3
  misc_feature: Homolog of GI Number: 49618875 NR Desc: caffeoyl
  misc_feature: Homolog of GI Number: 32347489 NR Desc: caffeoyl CoA 3
MAPNGDNTVANVHSGIDSTNKTLLKSDALYTYILDTTVFPREHECMRDLRLITDKHPWGYMQSSSDEAQLLGMLIKMAGAKKTIEVGVFTGYSLLATALALPEDGKVVAIDTDRECYEVGRPFIEKAGMAHKVDFREGTGLARLDELLVEDEGAASYDFAFVDADKPNYVRYHEQLLKLVRVGGTIIYDNTLWGGTVALPAGTPMSDLDTRFSAALRDLNAKLAADPRIEVCQLAIADGVTICRRLV

SEQ ID NO: 2161 - DNA, 827 bp, Triticum aestivum
  misc_feature: Ceres CLONE ID no. 584912
  misc_feature: Ceres CDNA ID no. 29191543
  CDS (122)..(619): REFERENCED BY SEQ ID NO: 2162
actcacacacagcctcacagcaaccagaacaatccagcaaactcatcgcacgagcatcagcagcagccgggggggaggagaagagagaggcgggcagaggggccggccggcgagaagcgagatggcgcaggagagcctgaggctggtgtgcccgccggtgtcggcgcacgaggggcggctgccgcggcagtacacgctggaggggcagggcgcgaagaaggacatctcgccgccgctggagtggtacggggtgcccgacggcacgcggtcgctggcggtggtggtgcaggacgtggacgcggacgagcgggtgccctggacgcactgggtggtcgtcaacatctcgcccgaggagaagggcctgcccgagggcttctccggcgccgggggcaacgccaacgccggcgggggcgacggcggcgtccaggagggggtcaacgactggaagcagcccgggtggcgcggccccgtccccgactcccacggccaccgcatccagttccgtctctacgcgctcgacgacctgctcagcctcggcaacaaggtgacagtggacaaggtcatggaggccatcgaggggcacgtgctgggggaggccgagatcacggctgtgttctaaggagctctgtggattttggcactcggctctgtgtgtctgaccttgttacttctccttgccaatcgtgtgtggtctgttctgtagcgtgcctgtatacgcatggcaacgaccagcctttgtaattttgatccaataagtgaagtaacctcttatgagctgggtactgttgcactaaagatctttgtgattgcgaaaaaaaaaaaaaaaa

SEQ ID NO: 2162 - protein, 165 aa, Triticum aestivum
  misc_feature: Ceres CLONE ID no. 584912
  misc_feature: Ceres CDNA ID no. 29191543
  misc_feature (12)..(164): Pfam Name: PBP PFAM Desc: Phosphatidylethanolamine
  misc_feature: Homolog of GI Number: 26017213 NR Desc: cold regulated protein
  misc_feature: Homolog of GI Number: 10799810 NR Desc: cold
  misc_feature: Homolog of GI Number: 50931765 NR Desc: putative cold regulated protein
  misc_feature: Homolog of GI Number: 83749503 NR Desc: ATP/GTP binding protein
  misc_feature: Homolog of GI Number: 55377691 NR Desc: phosphatidylethanolamine
  misc_feature: Homolog of GI Number: 66776365 NR Desc: PE
  misc_feature: Homolog of GI Number: 67987371 NR Desc: Aldehyde dehydrogenase
  misc_feature: Homolog of GI Number: 66780099 NR Desc: PE
  misc_feature: Homolog of GI Number: 66776633 NR Desc: Response regulator receiver
  misc_feature: Homolog of GI Number: 66776103 NR Desc: LigA
MAQESLRLVCPPVSAHEGRLPRQYTLEGQGAKKDISPPLEWYGVPDGTRSLAVVVQDVDADERVPWTHWVVVNISPEEKGLPEGFSGAGGNANAGGGDGGVQEGVNDWKQPGWRGPVPDSHGHRIQFRLYALDDLLSLGNKVTVDKVMEAIEGHVLGEAEITAVF

SEQ ID NO: 2163 - DNA, 550 bp, Triticum aestivum
  misc_feature: Ceres CLONE ID no. 585020
  misc_feature: Ceres CDNA ID no. 25447405
  CDS (70)..(309): REFERENCED BY SEQ ID NO: 2164
ttacctcctcaaacacagccacacaaggaccatctcctcagtagtactaccagagcctcccagctagcaatggcaaagtgcctcgctgtcgcgctactgctactggtggtgctcgcgtactgcaacgggagggagttgaaccagaaggacggcgcacttgcagcgacacgcggtgccggtgccggtgctggcgtcggggagtcgaagattttggggttgccagacttgccggttgtgggaaccactaccggtaccagtaccattaacggcccgctggtggtgattccggggatccctgctcacccgtgatcatctctagttcatgtgctggcttacatacatacaagctgaagctgaagctgaacttaattgtggttttagatttgtgtagctagcaccacccggaagaaaaacactggcttttcgcccatgtccatgttccttaatgagcgtgtgtatctgtgtttctcttcagtttatgttggttcctttgtgtgttgcatgtatcatcaacgtaatacatactactttgtcaaaaaaaaaaaaaaaa

SEQ ID NO: 2164 - protein, 79 aa, Triticum aestivum
  misc_feature: Ceres CLONE ID no. 585020
  misc_feature: Ceres CDNA ID no. 25447405
  misc_feature: Homolog of GI Number: 7690288 NR Desc: low temperature induced protein
  misc_feature: Homolog of GI Number: 1418968 NR Desc: BLT14.1 protein
  misc_feature: Homolog of GI Number: 313730 NR Desc: acclimation protein
  misc_feature: Homolog of GI Number: 1418970 NR Desc: BLT14.2 protein
  misc_feature: Homolog of GI Number: 313752 NR Desc: acclimation protein
  misc_feature: Homolog of GI Number: 18938 NR Desc: BLT14 protein
  misc_feature: Homolog of GI Number: 12656895 NR Desc: pTACR7
  misc_feature: Homolog of GI Number: 8468624 NR Desc: cold
  misc_feature: Homolog of GI Number: 12054814 NR Desc: Lt1.1 protein
  misc_feature: Homolog of GI Number: 167028 NR Desc: cold
MAKCLAVALLLLVVLAYCNGRELNQKDGALAATRGAGAGAGVGESKILGLPDLPVVGTTTGTSTINGPLVVIPGIPAHP

SEQ ID NO: 2165 - DNA, 1107 bp, Triticum aestivum
  misc_feature: Ceres CLONE ID no. 585054
  misc_feature: Ceres CDNA ID no. 35383220
  CDS (128)..(808): REFERENCED BY SEQ ID NO: 2166
acgcgaacccggaaacccttccagccatcacttcccctcctccctctgcgccgccacttctctcccctcgcgtgtctcccagggtttgccgatccagcgcgcgttagggttccctattccggcgaccatggcgaacgagcagccggcggagacctacacggtggaggagctcgtggcggtgaacccctacaaccccgacatcctcaacgacctcgaggtctttgtcaacgagcaggtttcttctaaaacatataacctggatgcaaatctcagccttctacgcctttaccagtttgagccagaaaggttgagcgtacaaattgtagcccgcatattgatcaaggctctcatggcaatgccagcacccgacttcagcctatgcttgttcttaattcctgaacacgtgcaaatggaggagcagttcaagacgttgatagttctttctcactacctggagactggtaggttccgccagttttgggatgaggcatcaaagagccgtaacatactggatgttgtaccaggttttgagcaggcaatccaaagctatgcgattcatgtgctttccttgacataccagaaagttcctaggccagttctagccgaggccatcaacattgaagggcttgcattggacaagtttatggagtatcatgctgcaaactcaggatgggtcattgagaagggtgcacgctcccaactgattgtccttccgcgcaacgagttcaatcaccctgaactcaagaagaacacagctgacacagttcccttcgagcacgtgacccgcatattccccatcttgagctgattcagcaaccatgatcagattgacatcaagcacttttgtctgtctcggctgcacccagaccaactgaggaggtttaatagaacttgagccagtgaagaagctagtcttggcaattgtattctctcttgtatggtgtaccgcattttgaccactcggagtatcggatgcgcctgttttagctaaatgagtaccagattatgttttcttattcatttctgccgaatgttgcaattgcctgacatttcctgagcgcacctttcctgtcaaatgttgcaatcgcctgaaaaaaaaaaaaaaaa

SEQ ID NO: 2166 - protein, 226 aa, Triticum aestivum
  misc_feature: Ceres CLONE ID no. 585054
  misc_feature: Ceres CDNA ID no. 35383220
  misc_feature (1)..(226): Pfam Name: eIF PFAM Desc: Eukaryotic translation initiation factor 3 subunit 11
  misc_feature: Homolog of GI Number: 54635543 NR Desc: GA10234
  misc_feature: Homolog of GI Number: 61881975 NR Desc:  similar to eukaryotic translation initiation factor 3
  misc_feature: Homolog of GI Number: 31322564 NR Desc: eukaryotic translation initiation factor 3 subunit k
  misc_feature: Homolog of GI Number: 5114051 NR Desc: HSPC029
  misc_feature: Homolog of GI Number: 27730981 NR Desc: similar to RIKEN cDNA 1200009C21
  misc_feature: Homolog of GI Number: 55649025 NR Desc:  similar to eukaryotic translation initiation factor 3 subunit k
  misc_feature: Homolog of GI Number: 54635542 NR Desc: GA15733
  misc_feature: Homolog of GI Number: 66852329 NR Desc: eukaryotic translation initiation factor 3 subunit EifCk
MANEQPAETYTVEELVAVNPYNPDILNDLEVFVNEQVSSKTYNLDANLSLLRLYQFEPERLSVQIVARILIKALMAMPAPDFSLCLFLIPEHVQMEEQFKTLIVLSHYLETGRFRQFWDEASKSRNILDVVPGFEQAIQSYAIHVLSLTYQKVPRPVLAEAINIEGLALDKFMEYHAANSGWVIEKGARSQLIVLPRNEFNHPELKKNTADTVPFEHVTRIFPILS

SEQ ID NO: 2167 - DNA, 977 bp, Triticum aestivum
  misc_feature: Ceres CLONE ID no. 585074
  misc_feature: Ceres CDNA ID no. 25445816
  CDS (64)..(756): REFERENCED BY SEQ ID NO: 2168
atctcatctccgaggaaccatcaatccgagatagctctacaaccagcaaagccatccaaagccatgaggttgcagtgctccctggtcctcctgatcgccctgagcgtcggctgcgcggcagcgcaggagagcgggaaacaggcgggctacgatttcttctacctcgtgctgcagtggccggggtcgtactgcgacacgaagcagagctgctgctacccgcggtccggcaaaccggcggcggacttcgggatccacgggctgtggcccaaccgcgacgacgggtcctacccgcagaactgcaaccccgacagcgccttcgatccctccaaggtgagcgacatcctgagcagcctgcgcagcagctggccgacgctggcgtgcccgaccaacgacggcctccgcttctgggcgcacgagtgggagaagcacggcacctgcgcgcagaacctcttcaacgagcacggctacttccaggccgccctccgcctgcgcggccagctccgcgtcctcgacgccctcgccaccgcgggcatctcccccgacggcgggtactacacgatgggggccatcaagggcgccatccaggaggggaccgggttcgcgcctcacgtcgactgcaaccgcgacgagtccggcaacagccagctcttccagctctacttctgcgtccacgccgacgcctcccgcttcgtcgagtgccccgtccagcccggcggcaggccctgtggcaacaggatcgagttcccggctttctgatcattatctcctccaacccaaggagttatcatgtgttccttaatttgcctcccgattcctagatattcatttggttttcatttcttgccgctggcagaataaactgagggtgcatattcgaacatgtgctcgttttctttctttcccccccttaattttcatgttaatgacctgatctcaggcagcaattgaagttacgacgagcaaaaaaaaaaaaaaaa

SEQ ID NO: 2168 - protein, 230 aa, Triticum aestivum
  misc_feature: Ceres CLONE ID no. 585074
  misc_feature: Ceres CDNA ID no. 25445816
  misc_feature (29)..(218): Pfam Name: Ribonuclease_T2 PFAM Desc: Ribonuclease T2 family
  misc_feature: Homolog of GI Number: 41400293 NR Desc: S
  misc_feature: Homolog of GI Number: 41387691 NR Desc: S
  misc_feature: Homolog of GI Number: 2150002 NR Desc: ribonuclease
  misc_feature: Homolog of GI Number: 50946049 NR Desc: ribonuclease
  misc_feature: Homolog of GI Number: 11990470 NR Desc: ribonuclease
  misc_feature: Homolog of GI Number: 31621002 NR Desc: ribonuclease NW
  misc_feature: Homolog of GI Number: 7435266 NR Desc: ribonuclease M5
  misc_feature: Homolog of GI Number: 7768564 NR Desc: RNase
  misc_feature: Homolog of GI Number: 11141363 NR Desc: RNase PD2
  misc_feature: Homolog of GI Number: 34810727 NR Desc: Chain B
MRLQCSLVLLIALSVGCAAAQESGKQAGYDFFYLVLQWPGSYCDTKQSCCYPRSGKPAADFGIHGLWPNRDDGSYPQNCNPDSAFDPSKVSDILSSLRSSWPTLACPTNDGLRFWAHEWEKHGTCAQNLFNEHGYFQAALRLRGQLRVLDALATAGISPDGGYYTMGAIKGAIQEGTGFAPHVDCNRDESGNSQLFQLYFCVHADASRFVECPVQPGGRPCGNRIEFPAF

SEQ ID NO: 2169 - DNA, 757 bp, Glycine max
  misc_feature: Ceres CLONE ID no. 586804
  misc_feature: Ceres CDNA ID no. 29191860
  CDS (142)..(600): REFERENCED BY SEQ ID NO: 2170
agtactgataatcatggaagcacttttcaaatgatcaaatcaaattctctgttcacgttcacatcttttataagccgttccatcttttgctttctcctgggactgcacccttcaccacaagtcacaagttgacttgtgagaatgtccactccagcaaggaagagactcatgagagatttcaaaagattgcaactagatcctcctgctggcatcagtggggctccccaagacaataatattatgctttggaatgcagttatctttggaccagatgacaccccttgggatggaggcacatttaagctaacacttcagttcattgaggattatcctaataaaccaccagcagtgcgctttgtttctcaaatgtttcatccaaacatttatgcagatggaagcatatgtttggacattttacaaaatcaatggagtccgatttatgatgttgctgcaatacttacctcaattcagagcttgctttgtgatccaaacccaaactctccagcaaattcagaagctgctcggatatttagtgaaaacaaacgtgaatacaacagaagagtacgagacattgttgagcagagttggactgctgattaattatcttggagcctctattgctgttaaaaggttgtcaaaggatctgattgaataacaatataagtacttaaaagaacaattgtgttttgtaacccttgagaatgtgtttgttcaaacttatatgaatggacattccaccccaaaaaaaaaaaaaaaa

SEQ ID NO: 2170 - protein, 152 aa, Glycine max
  misc_feature: Ceres CLONE ID no. 586804
  misc_feature: Ceres CDNA ID no. 29191860
  misc_feature (8)..(145): Pfam Name: UQ_con PFAM Desc: Ubiquitin
  misc_feature: Homolog of GI Number: 56236462 NR Desc: ubiquitin carrier protein
  misc_feature: Homolog of GI Number: 8118527 NR Desc: ubiquitin conjugating protein
  misc_feature: Homolog of GI Number: 83283991 NR Desc: ubiquitin carrier
  misc_feature: Homolog of GI Number: 50934403 NR Desc: OsRad6
  misc_feature: Homolog of GI Number: 464980 NR Desc: Ubiquitin
  misc_feature: Homolog of GI Number: 50919097 NR Desc: ubiquitin carrier protein
  misc_feature: Homolog of GI Number: 12083310 NR Desc: putative E2
  misc_feature: Homolog of GI Number: 2947065 NR Desc: E2
  misc_feature: Homolog of GI Number: 13516451 NR Desc: ubiquitin
MSTPARKRLMRDFKRLQLDPPAGISGAPQDNNIMLWNAVIFGPDDTPWDGGTFKLTLQFIEDYPNKPPAVRFVSQMFHPNIYADGSICLDILQNQWSPIYDVAAILTSIQSLLCDPNPNSPANSEAARIFSENKREYNRRVRDIVEQSWTAD

SEQ ID NO: 2171 - DNA, 599 bp, Glycine max
  misc_feature: Ceres CLONE ID no. 587227
  misc_feature: Ceres CDNA ID no. 40351088
  CDS (85)..(324): REFERENCED BY SEQ ID NO: 2172
aaaaccctaacaagtgacctcaaatttctcaaccagaggttctgtcggtgttctctcccttccgtttcgtggcgtgtgttccaaatggcgaagcgtttgattccactgttcaatcgggttttggtggagaaaatcgtgcctccatcaaagaccaacgctggcattttgttacccgagaaatcctccaagctaaattctggaaaagttattgctgttggccctggctttcacagtaaggatgggaagctaattcctgtggctgttaaggaaggtgatactgttcttttgcctgaatatgggggaactgaggtatcatctgtttagagacgatgatattctggggacattgcatgattgatgtcaaaatgatccgcggaaatttacatgctaggtgttctgctacatttgaggagtttctttctgttctgatttttatgtatgatgtctaaatcaacattttgttgtggagcaaaacactttaactttttttttaaaaacttacaatgaatgttattttctgcaacaactgggaaaactattttgttgctcatgaaatttattgtcttaacaaaaaaaaaaaaagaaaaaaaaaaaaaaaa

SEQ ID NO: 2172 - protein, 79 aa, Glycine max
  misc_feature: Ceres CLONE ID no. 587227
  misc_feature: Ceres CDNA ID no. 40351088
  misc_feature (4)..(76): Pfam Name: Cpn10 PFAM Desc: Chaperonin 10 Kd subunit
MAKRLIPLFNRVLVEKIVPPSKTNAGILLPEKSSKLNSGKVIAVGPGFHSKDGKLIPVAVKEGDTVLLPEYGGTEVSSV

SEQ ID NO: 2173 - DNA, 608 bp, Glycine max
  misc_feature: Ceres CLONE ID no. 589019
  misc_feature: Ceres CDNA ID no. 36517559
  CDS (53)..(424): REFERENCED BY SEQ ID NO: 2174
accgatattagggtttcggagtcgttgcagagctgcgcgttgatctagaaaaatggcgaggataaaggtgtacgagttgaggaataagacgaaggcggagctactgaaccagctcaaggatctcaaggcggagctagccctgctccgcgtcgccaaggttaccggcggcgccccaaacaagctctccaaaattaaggtggtgaggctatcgatagcgcaggttttgacggttatttcccagaagcagaaagcggcgctgagagaggcttacaagaagaagaagtatttgccccttgacctccgtcccaagaagacccgcgccattcgcagacgccttaccaaacaccaggtgtctttgaagacggaacgtgagaagaagaaggagctgtactttccactaagaaagtatgcgatcaaagtttaggttagaattggtttcaagttgcattttttaggacagttacttgtattgaaattttaaggttttgatgcctgccgctggggcagcattccaattattagtaccagagttgtttcaatgcttgcattaagtttccaaggtctatatgttaaaaactagagttgtttcgacaaaaagaaaaaaaaaa

SEQ ID NO: 2174 - protein, 123 aa, Glycine max
  misc_feature: Ceres CLONE ID no. 589019
  misc_feature: Ceres CDNA ID no. 36517559
  misc_feature (6)..(64): Pfam Name: Ribosomal_L29 PFAM Desc: Ribosomal L29 protein
  misc_feature: Homolog of GI Number: 6984224 NR Desc: 60S ribosomal protein L35
  misc_feature: Homolog of GI Number: 62751093 NR Desc: similar to 60S ribosomal protein L35
  misc_feature: Homolog of GI Number: 71535092 NR Desc: putative 60S ribosomal protein L35
  misc_feature: Homolog of GI Number: 33589770 NR Desc: At5g02610
  misc_feature: Homolog of GI Number: 21592412 NR Desc: putative 60S ribosomal protein L35
  misc_feature: Homolog of GI Number: 17104643 NR Desc: putative 60S ribosomal protein L35
  misc_feature: Homolog of GI Number: 50923665 NR Desc: OSJNBb0006N15.8
  misc_feature: Homolog of GI Number: 30102548 NR Desc: At3g55170
  misc_feature: Homolog of GI Number: 51979244 NR Desc: PREDICTED OJ1126_B06.24 gene product
MARIKVYELRNKTKAELLNQLKDLKAELALLRVAKVTGGAPNKLSKIKVVRLSIAQVLTVISQKQKAALREAYKKKKYLPLDLRPKKTRAIRRRLTKHQVSLKTEREKKKELYFPLRKYAIKV

SEQ ID NO: 2175 - DNA, 819 bp, Glycine max
  misc_feature: Ceres CLONE ID no. 589335
  misc_feature: Ceres CDNA ID no. 29191861
  CDS (94)..(603): REFERENCED BY SEQ ID NO: 2176
actattccgtttctctcttcactcttctttcgccacacactcactctctctctctctctctctctctctctctctgctcccattaatttcacgatggcaacactcttcgactctctcgccgtcgtgcgtctccccaccgccgcccgccggacctccgttatgctcccgcactgcgctggcctcaggctcagacccgccgccgcttcgcgcctagttgcgtcccccgctcgcaggatcgcttctcgcgcagcgcgcgtcgcctgcgaggctcaggacaccgccgtggaagtggctcctattactgatgcaaactggcaatcccttgtccttgaatccgaatctgctgttttggttgaattctgggcgccatggtgtggtccctgccgaatgattcaccctataattgatgaacttgcaaagcaatatgctgggaagctcaagtgttacaaactcaacactgatgagagcccttcaaccgctactcggtatggaattcgaagcatcccaactgttatgatcttcaagagtggtgagaagaaagatacagttattggtgctgtgcccaagtcaacattgaccacgagcatagaaaaattcgtatgaggtggtaagtaaagaaggcctttgctggaagtaaagcagtttttcctattagcttcttttcttctgagccccatgtctcaagtttcgatattttgtttacccaaatactcatttatgctcctgtacagtgatcagatgctacctaattttatgtttttagattattctagttaccaatatgctaagtgaattttccattgaaaaaaaaaaaaaaaa

SEQ ID NO: 2176 - protein, 169 aa, Glycine max
  misc_feature: Ceres CLONE ID no. 589335
  misc_feature: Ceres CDNA ID no. 29191861
  misc_feature (65)..(167): Pfam Name: Thioredoxin PFAM Desc: Thioredoxin
  misc_feature: Homolog of GI Number: 15594012 NR Desc: putative thioredoxin m2
  misc_feature: Homolog of GI Number: 7021721 NR Desc: thioredoxin m4
  misc_feature: Homolog of GI Number: 6539614 NR Desc: thioredoxin m4
  misc_feature: Homolog of GI Number: 62320065 NR Desc: putative M
  misc_feature: Homolog of GI Number: 6539610 NR Desc: thioredoxin m2
  misc_feature: Homolog of GI Number: 21618235 NR Desc: putative M
  misc_feature: Homolog of GI Number: 5566283 NR Desc: thioredoxin
  misc_feature: Homolog of GI Number: 50926654 NR Desc: OSJNBa0074L08.22
  misc_feature: Homolog of GI Number: 50911078 NR Desc: putative Thioredoxin M
  misc_feature: Homolog of GI Number: 28973241 NR Desc: putative thioredoxin
  misc_feature: Useful for delaying flowering time
  misc_feature: Useful for increasing chlorophyll and photosynthetic capacity
  misc_feature: Useful for making ornamental plants with modified leaves
  misc_feature: Useful for making plants with altered leaf shape eg curled leaves
  misc_feature: Useful for making plants with increased biomass
  misc_feature: Useful for making plants with increased biomass and foliage
  misc_feature: Useful for making plants with increased biomass and foliage
  misc_feature: Useful for sterility
MATLFDSLAVVRLPTAARRTSVMLPHCAGLRLRPAAASRLVASPARRIASRAARVACEAQDTAVEVAPITDANWQSLVLESESAVLVEFWAPWCGPCRMIHPIIDELAKQYAGKLKCYKLNTDESPSTATRYGIRSIPTVMIFKSGEKKDTVIGAVPKSTLTTSIEKFV

SEQ ID NO: 2177 - DNA, 1014 bp, Glycine max
  misc_feature: Ceres CLONE ID no. 589672
  misc_feature: Ceres CDNA ID no. 25446226
  CDS (48)..(911): REFERENCED BY SEQ ID NO: 2178
catgcatatagcttagctagctccttcacctccttagtttcgaaagcatggcttccctggcggcttccaccgcggctatgtcagaaatccttggaaaccccgttaacctcagatgcgcaaccaggtctgctccatcaccaactacacctgccaccttcaagaccgtcgcacttttctccaagaagaagccagctccacctccaaagaaaaagcctgccgctgtatcccccgccaatgaggaactcgccaagtggtatggtcctgacagaaggatcttcttgcctgagggtctcttggaccgatctgagatccccgagtacttgaccggagaagtgcctggagattatggttatgatccgtttggtcttagcaagaagccagaggacttcgccaagtaccaggcgtttgagttgattcatgccagatgggcaatgcttggtgctgctggattcatcattcctgaggcctttaacaaatacggagctaactgtggtcctgaggctgtttggttcaagactggagctttgcttcttgatgggggtacattgaactacttcgggaaacctatccccatcaatcttattcttgctgttgttgctgagatagttcttgtgggtggtgctgagtactacagaattattaatggcctggacttggaagacaagcttcatccgggtggtccattcgacccattgggactagcaaaggatccagaccaagctgcacttctaaaggtgaaggaaattaagaatggtagactagctatgtttgcaatgcttggtttctacttccaagcatatgtcactggagaaggtccagttgagaacttagcaaaacatctcagtgacccttttggtaacaacttgctcactgtgattgctggctccgctgagagggctccaactctgtaaatcaatcatctttatgctcttctccactcttaaatgtacaatacatctcactatataagacttaaggcattttactttattccttggaaaaaaaaaaaaaaaa

SEQ ID NO: 2178 - protein, 287 aa, Glycine max
  misc_feature: Ceres CLONE ID no. 589672
  misc_feature: Ceres CDNA ID no. 25446226
  misc_feature (87)..(251): Pfam Name: Chloroa_b PFAM Desc: Chlorophyll A
  misc_feature: Homolog of GI Number: 100200 NR Desc: chlorophyll a/b
  misc_feature: Homolog of GI Number: 19184 NR Desc: Type I
  misc_feature: Homolog of GI Number: 12642916 NR Desc: putative chlorophyll a/b
  misc_feature: Homolog of GI Number: 1644289 NR Desc: chlorophyll a/b
  misc_feature: Homolog of GI Number: 21593520 NR Desc: chlorophyll a/b
  misc_feature: Homolog of GI Number: 62733869 NR Desc: chlorophyll a/b
  misc_feature: Homolog of GI Number: 22750 NR Desc: Lhcb5 protein
  misc_feature: Homolog of GI Number: 7443227 NR Desc: chlorophyll a/b
  misc_feature: Homolog of GI Number: 18958 NR Desc: Precursor of CP29
  misc_feature: Homolog of GI Number: 7443226 NR Desc: chlorophyll a/b
MASLAASTAAMSEILGNPVNLRCATRSAPSPTTPATFKTVALFSKKKPAPPPKKKPAAVSPANEELAKWYGPDRRIFLPEGLLDRSEIPEYLTGEVPGDYGYDPFGLSKKPEDFAKYQAFELIHARWAMLGAAGFIIPEAFNKYGANCGPEAVWFKTGALLLDGGTLNYFGKPIPINLILAVVAEIVLVGGAEYYRIINGLDLEDKLHPGGPFDPLGLAKDPDQAALLKVKEIKNGRLAMFAMLGFYFQAYVTGEGPVENLAKHLSDPFGNNLLTVIAGSAERAPTL

SEQ ID NO: 2179 - DNA, 1519 bp, Glycine max
  misc_feature: Ceres CLONE ID no. 590304
  misc_feature: Ceres CDNA ID no. 40041260
  CDS (161)..(1156): REFERENCED BY SEQ ID NO: 2180
gttatgtgcatattcttaggaactctaagtctccctcccccctctctctttctctcgctctctctctcactatatcaatattaatatgaacctctctcaattcaattccagatagactttgttggcatttgagttttgttgaattgaaccaaaaaaaaaaatgggaaggcaaccttgctgtgacaaagtggggttgaagaaggggccatggactgcagaggaggataagaaactcatcaatttcatcctcactaatggtcaatgttgctggagagctctccctaaactagcagggctgttaagatgtggaaaaagttgcaggctcaggtggacaaattacctgaggccagacctgaagagaggccttctatcagaatatgaagagaaaatggtcattgatcttcatgctcaacttggcaatagatggtctaagattgcttctcatctcccaggaagaaccgataatgagatcaagaatcactggaatacccacataaagaaaaagctcaagaaaatgggaattgatcctgttactcacaagccactttccaataaaactgaggaaactcaagcccaaccagatgaacaaacccatcaaccattgcaagaacaacaacaacaacaacatcaacatcaacaacaacctatcccagttgagaaagacctcaaatttgaacctgaaaaggagcaaaacagggagccagagacttcagttgaatcatcaaccatcactgaagaagttaaggaggaagaccaaatcatgacacccctatttgactcatgggaactaatgaatgagttctgcactgatgaagctcccataatagaaccaaatgagattctagttccttctgctccttcttccgcttcaccaaccactactactatatcatcttcaacatcaacatcctcttattcaaattcatccaacttccttgaagacctgctgctcccagatttggagtggtctgatgattacaatgatactaattttgacaacaatagcagcatggccttgtgggatgatgactttattggaagttggaattcgcttattaatggtgatggtgatagaaagcaagtgtttgacgctcctatcaatcagtacccaagtgtgatcatggattcagattcttgggactatggcttgttttgatttgaaaattatttttcctctccccactgcttacttgtaatgtgcttgtaagttgttgcaaagaataaagtaaatcaggattcttgtttagtatatttatatccacttttttgttccccaacttttcaccctataataaagggaaacgatatcttgtatatggtagtgcaaaggtgttaatttgttgttgctggtcagggcatactttattaaatgaaactttatctggtttcttataaaaaaaaaaaaaaaaaaaaaaaaaaaaaaaaaaaaaaaaaaaaaaaaaaaaaaaaaaaaaaaaaaaaaaaaaaaaaaaaaaaaaaaaaaaaaaaaaaaaaaaaaaaaaaaaaaaaaaaaaaaaaa

SEQ ID NO: 2180 - protein, 331 aa, Glycine max
  misc_feature: Ceres CLONE ID no. 590304
  misc_feature: Ceres CDNA ID no. 40041260
  misc_feature: Useful for making plants with modulated growth and phenotype characteristics
  misc_feature: null
  misc_feature: The sequence is a functional homolog of  SEQ ID NO 1060 in the  11/479,226 US patent application
  misc_feature: The sequence is a functional homolog of  SEQ ID NO 1094 in the  10/225,066 US patent application
  misc_feature: The sequence is a functional homolog of  SEQ ID NO 386 in the  10/374,780 US patent application
  misc_feature: The sequence is a functional homolog of  SEQ ID NO 460 in the  10/412,699 US patent application
  misc_feature: Useful for making plants with altered cell wall content and/or composition
  misc_feature: Useful for making plants with modulated nitrogen use efficiency
  misc_feature (14)..(61): Pfam Name: Myb_DNA PFAM Desc: Myb
  misc_feature: Homolog of GI Number: 1430846 NR Desc: myb
  misc_feature: Homolog of GI Number: 12323572 NR Desc: myb
  misc_feature: Homolog of GI Number: 68052409 NR Desc: ODORANT1 protein
  misc_feature: Homolog of GI Number: 3941430 NR Desc: putative transcription factor
  misc_feature: Homolog of GI Number: 50945939 NR Desc: Myb51 protein
  misc_feature: Homolog of GI Number: 6651292 NR Desc: myb
  misc_feature: Homolog of GI Number: 1945283 NR Desc: myb factor
  misc_feature: Homolog of GI Number: 52077279 NR Desc: putative myb factor
  misc_feature: Homolog of GI Number: 50912457 NR Desc: putative Myb51 protein
  misc_feature: Homolog of GI Number: 42794338 NR Desc: MYB
  misc_feature: Useful for delaying flowering time
  misc_feature: Useful for delaying senescence
  misc_feature: Useful for increasing chlorophyll and photosynthetic capacity
  misc_feature: Useful for making larger plants
  misc_feature: Useful for making ornamental plants with modified flowers
  misc_feature: Useful for making ornamental plants with modified leaves
  misc_feature: Useful for making stronger plants
  misc_feature: Useful for making taller plants and plants with longer inflorescences
  misc_feature: Useful for sterility
  misc_feature: Utility: Low Nitrate Useful for making plants tolerant to low nitrogen
MGRQPCCDKVGLKKGPWTAEEDKKLINFILTNGQCCWRALPKLAGLLRCGKSCRLRWTNYLRPDLKRGLLSEYEEKMVIDLHAQLGNRWSKIASHLPGRTDNEIKNHWNTHIKKKLKKMGIDPVTHKPLSNKTEETQAQPDEQTHQPLQEQQQQQHQHQQQPIPVEKDLKFEPEKEQNREPETSVESSTITEEVKEEDQIMTPLFDSWELMNEFCTDEAPIIEPNEILVPSAPSSASPTTTTISSSTSTSSYSNSSNFLEDLLLPDLEWSDDYNDTNFDNNSSMALWDDDFIGSWNSLINGDGDRKQVFDAPINQYPSVIMDSDSWDYGLF

SEQ ID NO: 2181 - DNA, 793 bp, Glycine max
  misc_feature: Ceres CLONE ID no. 590416
  misc_feature: Ceres CDNA ID no. 29191722
  CDS (24)..(470): REFERENCED BY SEQ ID NO: 2182
gaaaattgactagtatcagggtgatggcagcgacggcggtgacggagacggaggcggtgtggtccgttaagtgctattgctgtgggttaacggaggagtgcacgccgcgttacattgacggcgttagggagaggtatcagggtcgttggatttgtggtttgtgtgctgaggcagtgaaggaagagggtttgaaattgaaagatgatgatgttgatgttgatgttgatgttagcaccgatgaagcactgaagcgccacatgaagttcagatcttccacttctagccctccaaacaaacccacccttgacttgattctcgcaatgaagcaccttcttgttcgctctttggattctccgaggaaggagcctttgactttttccccacttgcaacatcacgcacgtgcttttcacctggatcctcaaagggggagccgcaagaggctagaaaggtagttaccagtgagtggtaataactgctgagtgacttgttcggtgaataactgaatttgcaatggcaatgacaatggcagggttaggtttaatttatttatcttggtttagttgtttaatttgtatttctcagttaccttgttgtttaggttggttaattggcttgttttgtttgttttctattttgtgacattttcgactgaacggataatttggtaggagtataaatgttccttccttgacttcagtctaaaaatgtcatggaatttcccttctttatctctatgttgacccaattcagactatgtatgactttttttctatgtttaaaaaaaaaaaaaaa

SEQ ID NO: 2182 - protein, 148 aa, Glycine max
  misc_feature: Ceres CLONE ID no. 590416
  misc_feature: Ceres CDNA ID no. 29191722
  misc_feature: Homolog of GI Number: 34909436 NR Desc: OSJNBa0014K08.12
  misc_feature: Homolog of GI Number: 34909432 NR Desc: OSJNBa0014K08.9
  misc_feature: Homolog of GI Number: 7715593 NR Desc: F20B17.20
MAATAVTETEAVWSVKCYCCGLTEECTPRYIDGVRERYQGRWICGLCAEAVKEEGLKLKDDDVDVDVDVSTDEALKRHMKFRSSTSSPPNKPTLDLILAMKHLLVRSLDSPRKEPLTFSPLATSRTCFSPGSSKGEPQEARKVVTSEW

SEQ ID NO: 2183 - DNA, 717 bp, Glycine max
  misc_feature: Ceres CLONE ID no. 590512
  misc_feature: Ceres CDNA ID no. 25891413
  CDS (1)..(435): REFERENCED BY SEQ ID NO: 2184
ccaattagtttatgtgtcttcaggcgagagtgcagcgcctctacagctagcgtccggtggggtgcgattcgtgagctgcacctctctctctcgataatcagaggcaacttatttgctttggaattgatggaggccaaattttttcgctttctcaagattgtgggtgttggatacaaagccagagctgaagctgcagggcgtctattgtatctcaaattgggatacagtcatgaggtggaactagccgtccctcctgctgtccgagttttctgcttcaaaaacaatgtaatttgctgtactggaatagacaaacaaagggtgcaccagtttgctgctactgttcggacttgtaagccacctgaagtttacaaaggcaagggcataatgtatgttgatgaagtgatcaagaaaaaacaaggaaagaaatctaaataatcatataatctaagttgatttcatgaagtttaggactcagatgtacattggctacatcttgctgctcaatgattcactctaggtctctctctagccttcaaacagtttcagttttggaatccttgaacatagcattatggtaatcatgtatgctttgaaataacaataatttcttgcttctgtatgattgatatgtaccttttagcgtttatcttgcttttcttgagacattttgtctaaggatataatattgttttgaaagtctcaaaaaaaaaaaaaaaa

SEQ ID NO: 2184 - protein, 102 aa, Glycine max
  misc_feature: Ceres CLONE ID no. 590512
  misc_feature: Ceres CDNA ID no. 25891413
  misc_feature (12)..(89): Pfam Name: Ribosomal_L6 PFAM Desc: Ribosomal protein L6
  misc_feature: Homolog of GI Number: 25411865 NR Desc: probable ribosomal protein L6
  misc_feature: Homolog of GI Number: 21594402 NR Desc: putative ribosomal protein L6
  misc_feature: Homolog of GI Number: 50428724 NR Desc: putative ribosomal protein L6
  misc_feature: Homolog of GI Number: 50946987 NR Desc: putative ribosomal protein L6
  misc_feature: Homolog of GI Number: 786209 NR Desc: rpl6
  misc_feature: Homolog of GI Number: 32966605 NR Desc: ribosomal protein L6
  misc_feature: Homolog of GI Number: 22417017 NR Desc: ribosomal protein L6
  misc_feature: Homolog of GI Number: 78611006 NR Desc: 50S ribosomal protein L6
  misc_feature: Homolog of GI Number: 50918761 NR Desc: putative  ribosomal protein L6
  misc_feature: Homolog of GI Number: 31712045 NR Desc: putative ribosomal protein CtrL6e
MEAKFFRFLKIVGVGYKARAEAAGRLLYLKLGYSHEVELAVPPAVRVFCFKNNVICCTGIDKQRVHQFAATVRTCKPPEVYKGKGIMYVDEVIKKKQGKKSK

SEQ ID NO: 2185 - DNA, 1155 bp, Glycine max
  misc_feature: Ceres CLONE ID no. 590795
  misc_feature: Ceres CDNA ID no. 36527530
  CDS (196)..(846): REFERENCED BY SEQ ID NO: 2186
agaatagagtgtgcgcaggagtatggaagaagaagtgtggtggcaatgatatgataggcgcagagcagagagagagagaaggcaaaggcatttggatccgacgacctcgttggttttcctttgtaagttgtaagcatttggcaccagcaagccctgtcttcttcttcgatcagattagggcatttcatttctgcgatggccgcagcacccgctagagctcgtgccgattacgattacctcatcaagcttcttcttatcggcgacagcggtgtcgggaagagttgtctgcttttgagattttctgatggctcattcacaaccagttttatcaccaccattggtatcgattttaagataagaaccattgaactagacggcaaacggattaagttacaaatctgggatactgctggtcaggaacggtttcgaactattaccacagcttattaccgtggagccatgggtatcttgctggtttatgatgttactgatgaagcatctttcaataatattaggaattggattcgcaatattgaacaacatgcttctgacaatgtaaacaagatacttgttggcaacaaggctgatatggatgaaagtaaaagggctgtacctacctccaaagggcaagcacttgctgatgagtatggtatcaagttctttgaaactagtgcaaaaaccaacatgaatgtggaagaggttttcttttcaatagcaagagatatcaagcaaaggcttgcagacacagattcaagagctgagcctcagactatcaagattaaccaaccagaccaggcagccagtggtggtcaacctgcacaaaagtcggcttgctgcggttcatgaaaagaatcagtatctgtagcaagaggtgcaggtttctgcaatagcactcttctgggtgctaatgttattctgatgacattagaaagtgggagcatgtatttgtccctctgtatctcccaactgcagatgtcgtgttttaaagttaatattttaaattctttgctcattgagttggtggaatttgttgtgactagttaatttgcttcactttcctatttcatttgtagtgtgacacttaaaaaggatatcttgattagatgcggatagattatcacaacagcttgatcatttgcaaaaaaaaaaaaaaaa

SEQ ID NO: 2186 - protein, 216 aa, Glycine max
  misc_feature: Ceres CLONE ID no. 590795
  misc_feature: Ceres CDNA ID no. 36527530
  misc_feature: null
  misc_feature: Useful for making plants with altered Lignin content
  misc_feature (17)..(179): Pfam Name: Ras PFAM Desc: Ras family
  misc_feature: Homolog of GI Number: 871508 NR Desc: small GTP
  misc_feature: Homolog of GI Number: 18447913 NR Desc: ras
  misc_feature: Homolog of GI Number: 18447917 NR Desc: ras
  misc_feature: Homolog of GI Number: 871506 NR Desc: small GTP
  misc_feature: Homolog of GI Number: 1370190 NR Desc: RAB8A
  misc_feature: Homolog of GI Number: 18447921 NR Desc: ras
  misc_feature: Homolog of GI Number: 28973447 NR Desc: putative GTP
  misc_feature: Homolog of GI Number: 871510 NR Desc: small GTP
  misc_feature: Homolog of GI Number: 871514 NR Desc: small G protein
  misc_feature: Homolog of GI Number: 14334918 NR Desc: putative GTP
MAAAPARARADYDYLIKLLLIGDSGVGKSCLLLRFSDGSFTTSFITTIGIDFKIRTIELDGKRIKLQIWDTAGQERFRTITTAYYRGAMGILLVYDVTDEASFNNIRNWIRNIEQHASDNVNKILVGNKADMDESKRAVPTSKGQALADEYGIKFFETSAKTNMNVEEVFFSIARDIKQRLADTDSRAEPQTIKINQPDQAASGGQPAQKSACCGS

SEQ ID NO: 2187 - DNA, 1758 bp, Glycine max
  misc_feature: Ceres CLONE ID no. 592276
  misc_feature: Ceres CDNA ID no. 40041261
  CDS (72)..(1367): REFERENCED BY SEQ ID NO: 2188
aactacttgaactcactcctgcagtgtccttcttcaatcccattcattcattctcccccgaaaacaacgccatgccttcatggtcgtcttcttcttccgctctaaccgctcccaatttgcgtcttcgcactctcagaatttggtcctccaaggactatgcaatcgccgcattcattttcctcattctcttctctctccttctcttctcccacttggattcccgttcccattcccgttacgattcccagccccatcactccaagctcgttccgttaaccctcctccgcaacgccaaccaaacgcgcgcgctttgcttggacgggagcgctcccggttaccatttccaaagcgggttcggatccggatcccgcaattggctgatccacattgagggaggagggtggtgcaattcgataccttcttgctaccagcgaaaattcactcatttggggtcttccgatcatatggagaagcttattcctttttcaggaattttgagctctgaccctgctcagaaccctgatttctttaactggaacaaggtgaagatacgttattgtgacggtgcatcttttgcgggtcatccagagagtgagagaggaagtgggttgttcttcagaggccaggtcatatgggaagctattatggatgaactcttatcaactggcctgtctaatgcaaagcaggctttgctttcaggatgctctgctggagggttggcaactcttatacactgtgatagtttccgacaagtacttccaaaggaagcaactgtcaagtgtcttgctgatgcaggcttcttcctagatgagaaggatattagtggaaacagtacaatgagatctttctatcatgatgttgcccagcttcagggtcttgcaaaaagtttgcacaaagattgcattgctaaaatggaaccatctaagtgtctctttccatcagaaattgctaaaaacataaagactccactgttccttgttcatccagcttatgatttctggcagatacgcaatattttggtgcctcaaggatcagatcctgatggtcactggcaaaggtgcagactggacattcgcagttgtaatgctaatatgattgataaacttgacagttaccgtggctctttgctgaaggctgtgaatgaattccaacaacgaaaggagattggaatgtttatagattcatgcttcgtccattgccagactgagatggaagtgacgtggcattcacccaactctcctaaaataaatgataagacaattgcggaatctgttggtgattggtactttgaccgagaagcggtaaagcgcattgactgctcttctttttcgtgcaaccccacttgccacaacatggatttcacctgaatataaaataaagctatgagccccattttttattgcaacttttatcccggatcttggttgcttgaagttcatgaaggaatatcctcatttatatccgttacgtgaatttggcttcaattgatttagagttagagaatatgctggggagttcatcttattcacttgtatgatatgggttctacagtctatagattattaagccatgcagcatgtgtccccttgatcaagtgattcaattgttatataaatcaattgtgtaattgatttgttagtttcttcttaactttgtaatttttttatggatccctaatccagcacattagatttttgtgaattacaaatttattatattgatgctctattagcaaaaaaaataaaaaaaaaaaaaaaa

SEQ ID NO: 2188 - protein, 431 aa, Glycine max
  misc_feature: Ceres CLONE ID no. 592276
  misc_feature: Ceres CDNA ID no. 40041261
  misc_feature (37)..(414): Pfam Name: PAE PFAM Desc: Pectinacetylesterase
  misc_feature: Homolog of GI Number: 6478931 NR Desc: putative pectinacetylesterase
  misc_feature: Homolog of GI Number: 57899925 NR Desc: putative pectinacetylesterase precursor
  misc_feature: Homolog of GI Number: 6478941 NR Desc: putative pectinacetylesterase
  misc_feature: Homolog of GI Number: 28827554 NR Desc: putative pectinacetylesterase
  misc_feature: Homolog of GI Number: 3522956 NR Desc: putative pectinesterase
  misc_feature: Homolog of GI Number: 51963586 NR Desc: PREDICTED P0455H11.118
  misc_feature: Homolog of GI Number: 10176854 NR Desc: pectinacetylesterase
  misc_feature: Homolog of GI Number: 42573459 NR Desc: pectinacetylesterase family protein
  misc_feature: Homolog of GI Number: 42573461 NR Desc: pectinacetylesterase family protein
  misc_feature: Homolog of GI Number: 79366428 NR Desc: carboxylic ester hydrolase
MPSWSSSSSALTAPNLRLRTLRIWSSKDYAIAAFIFLILFSLLLFSHLDSRSHSRYDSQPHHSKLVPLTLLRNANQTRALCLDGSAPGYHFQSGFGSGSRNWLIHIEGGGWCNSIPSCYQRKFTHLGSSDHMEKLIPFSGILSSDPAQNPDFFNWNKVKIRYCDGASFAGHPESERGSGLFFRGQVIWEAIMDELLSTGLSNAKQALLSGCSAGGLATLIHCDSFRQVLPKEATVKCLADAGFFLDEKDISGNSTMRSFYHDVAQLQGLAKSLHKDCIAKMEPSKCLFPSEIAKNIKTPLFLVHPAYDFWQIRNILVPQGSDPDGHWQRCRLDIRSCNANMIDKLDSYRGSLLKAVNEFQQRKEIGMFIDSCFVHCQTEMEVTWHSPNSPKINDKTIAESVGDWYFDREAVKRIDCSSFSCNPTCHNMDFT

SEQ ID NO: 2189 - DNA, 777 bp, Glycine max
  misc_feature: Ceres CLONE ID no. 593926
  misc_feature: Ceres CDNA ID no. 40351089
  CDS (279)..(650): REFERENCED BY SEQ ID NO: 2190
gaaaactcaaagatgtcataaggtcactcaaggtatcatcaataggcatagttatattaatgtgtgatgtgttagaggatatgcgcattggtgaagattgaaattagaagcaagaatgaggagggcatgcaggaaaatatggcgatcggtgccttgcacgagcaggaaaagcttgcgaaatgactctaggaaggacatggaggagattctgagggctaagctttcaactattaaggaagagccagaattgtgtgatgagaacttagcatcaccaagacatgtgtgtatggccaagaaacaagggaagaaggttcaaggaagtattcaacatctcgggagataagtatgtcacatttgatggattagcaagagcatgtgctaaggctggtgggttcccagagccagagatcattcactacaaccctaaagattttgattttgggaaaaagaaatcatttccattccgtgaccagcatttctttgcatcagttgagaaagcaaagagcgtgcttggattggaacctgaatttggacttgtagagggtctagcagactcgtacaacctggactttggtagaggaacatatcggaaagaggctgatttctcaacagatgacataattcttggcaagagtcttgttagcgtataaacttttctatttcaattttaagtatttcacttgtatttagaaaagctgttcggatttgctacattatgaagtcgtgaaatattcatgagcttttcgttcagtattttttccaaaaaaaaaaaaaaaa

SEQ ID NO: 2190 - protein, 123 aa, Glycine max
  misc_feature: Ceres CLONE ID no. 593926
  misc_feature: Ceres CDNA ID no. 40351089
MCVWPRNKGRRFKEVFNISGDKYVTFDGLARACAKAGGFPEPEIIHYNPKDFDFGKKKSFPFRDQHFFASVEKAKSVLGLEPEFGLVEGLADSYNLDFGRGTYRKEADFSTDDIILGKSLVSV

SEQ ID NO: 2191 - DNA, 1591 bp, Glycine max
  misc_feature: Ceres CLONE ID no. 597808
  misc_feature: Ceres CDNA ID no. 40351090
  CDS (128)..(1075): REFERENCED BY SEQ ID NO: 2192
acttttccttcttccatggtttgcctctctctctctctctctctctactctcctttcatttcagaaatcatggggaaataaacataattaatctccgaaataaacaaaacatttttcgtgacattcgatgaatgatatgaaggtgagaagtgggttgtgcgtgtggccaaatgtgagacaactttgctttagaaaaggcattctatatgggtttatgcgattgttttctactccgttgaaaacgctgcgtggagctagccgctcgctgagagtggctcaattttgcagtgttgccaatatgtcttcctcattgcagattgaattggtaccttgcctgaaggacaattatgcatatctgttacatgatgtagatacgggtacagttggtgttgttgatccttctgaagctgtgcctgtcatagatgccttgagtaggaaaaatcgaaatttgacatacatactcaacactcaccatcatcatgatcacacgggtggaaatgtagaattgaaagcaagatacggggcaaaggtgattggttcaggaactgacaagaaaaggattcctggcattgatatccacttgaacgatggtgataagtggatgtttgctggccatgaggtgcgtgtaatggacactcctggtcacacccaaggccatataagcttctattttcctggatctggggcaatttttactggagacactttgttcagcttatcatgtggcaagctctttgaaggaaccccacagcagatgctatcttctcttaaaaagatcatgtctttgccagataatacaaatatatactgtggacacgagtatacattgaataatacaaagtttgcattgtctatcgaacctgaaaacgaggaacttcaatcctatgctgcccaagtagcttaccttcgaagtaaaggcctgcccacgattcccaccacactgaagatggaaaaggcttgtaatccattccttcgtacatccagtgctgcaatccggcaatcactaaacattgcagccacagcaaatgatgcagaagcccttggtggcatccggcaagcaaaggataatttttagatttttgacttacaatattttgaacgtttgaagaaacttgttctatgtagggtaggatataaatccatccgtggaataatatatgcttgatgctatgttctcgatgtatatgatttcagaaattttggttctatttggaagtgtgtgtacttggtgcctaagaaagttgtggtgcgatttagaggggtacaatgcacacatgacactcactcagtgttctgttcagttgaggatgtgtggcgggaagaagggtagctagaagtttaaagtaaactccttgtccttggccaatggccacccaccccacttccctcagaagaacaagaaccttgtaaatgtatgggtctgtactctggacttagagcgcgtatatttggcttcttcaggatctatctgcaagtctcaacatacaaataaaataaatcaattagtaatataaattatactattttaaaaaaaaaaaaaaaaaaaaaaaaaaaaaaaaaaaaaaaaaaaaaaagaaaaaaaaaaaaaaaa

SEQ ID NO: 2192 - protein, 312 aa, Glycine max
  misc_feature: Ceres CLONE ID no. 597808
  misc_feature: Ceres CDNA ID no. 40351090
  misc_feature (69)..(227): Pfam Name: Lactamase_B PFAM Desc: Metallo
MKVRSGLCVWPNVRQLCFRKGILYGFMRLFSTPLKTLRGASRSLRVAQFCSVANMSSSLQIELVPCLKDNYAYLLHDVDTGTVGVVDPSEAVPVIDALSRKNRNLTYILNTHHHHDHTGGNVELKARYGAKVIGSGTDKKRIPGIDIHLNDGDKWMFAGHEVRVMDTPGHTQGHISFYFPGSGAIFTGDTLFSLSCGKLFEGTPQQMLSSLKKIMSLPDNTNIYCGHEYTLNNTKFALSIEPENEELQSYAAQVAYLRSKGLPTIPTTLKMEKACNPFLRTSSAAIRQSLNIAATANDAEALGGIRQAKDNF

SEQ ID NO: 2193 - DNA, 1409 bp, Glycine max
  misc_feature: Ceres CLONE ID no. 598095
  misc_feature: Ceres CDNA ID no. 40351091
  CDS (87)..(1124): REFERENCED BY SEQ ID NO: 2194
tcatttataattcaaaaacctctctctctctctctctctctctctcaattcttcaggcaccttcaaaatttctctctagagtcacgatgcttgcgacgctcaaatccgaagagtccagtggtcagttacagctcgtcgaacgagaagacatagacgacgatgaagatctcttcgaagccatcgacaaactgattgctcaaggcatcaatgccggagatgtgaagaagcttcaggacgcagggatatatacttgcaatggcttgatgatgcacacgaagaagaatttgactggaatcaaaggtctatccgaggctaaggttgataagatctgcgaggctgctgagaagcttgtgaatttcggttatattaccggaagtgatgctctgctcaaaagaaagtcagtgatccgaattactactggaagtcaagcgcttgatgaattgctaggaggcggggtcgagacatcggcaattacagaggcgtttggagaattccgatctgggaaaacacagctagctcacactctctgtgtttccactcagctgccaactaatatgcgtggaggcaacggaaaagttgcttacattgacacagaaggaactttccgaccagaccgaattgttcccatagctgagagatttggcatggatcctggggctgtactggacaatattatatatgctcgtgcctacacttatgagcatcagtacaacctcctccttggtttggctgcaaaaatgtccgaagaaccattcagacttctgattgtggattcggtgattgctctgtttcgagtggacttctcaggaagaggagagcttgcagatcgccagcaaaaattggcacagatgctttctcgattaataaagatagctgaggaatttaatgttgccgtctatatgacaaatcaggtcatatctgatccaggaggtggcgtgtttgtaactgatccaaagaaaccagcaggagggcatgtgctagcccatgcagccacggtaaggttgatgttcagaaaagggaaaggggaacagcgcatttgcaaagtgtttgacgcccccaacctgccagaggctgaagcagtgttccagataacagcagggggaattgcagacgctaaggactaaagagtcgcttctgagttgtgacttctgggccgaatccacaaaagaaacagtagtggctgaatatttctggtaaccttaatcttccagatatttgctacagtttgtatgaaaagtgttgttccttgaacacttttactattttccagtgatatgatatgagttccccttagttatacttatacacgtttcctttattgtaagttgcgatacattttgcaatttgaacgtttcacaaacattgaaaatcttgctgcaagtttctactttctaaaaaaaaaaaaaaaa

SEQ ID NO: 2194 - protein, 345 aa, Glycine max
  misc_feature: Ceres CLONE ID no. 598095
  misc_feature: Ceres CDNA ID no. 40351091
MLATLKSEESSGQLQLVEREDIDDDEDLFEAIDKLIAQGINAGDVKKLQDAGIYTCNGLMMHTKKNLTGIKGLSEAKVDKICEAAEKLVNFGYITGSDALLKRKSVIRITTGSQALDELLGGGVETSAITEAFGEFRSGKTQLAHTLCVSTQLPTNMRGGNGKVAYIDTEGTFRPDRIVPIAERFGMDPGAVLDNIIYARAYTYEHQYNLLLGLAAKMSEEPFRLLIVDSVIALFRVDFSGRGELADRQQKLAQMLSRLIKIAEEFNVAVYMTNQVISDPGGGVFVTDPKKPAGGHVLAHAATVRLMFRKGKGEQRICKVFDAPNLPEAEAVFQITAGGIADAKD

SEQ ID NO: 2195 - DNA, 1655 bp, Glycine max
  misc_feature: Ceres CLONE ID no. 598102
  misc_feature: Ceres CDNA ID no. 29191812
  CDS (117)..(1430): REFERENCED BY SEQ ID NO: 2196
atttttaaaccctattctcgaatccgagtagtgttgcgtctctgtatctatcttctctcggagccgctattatccccagacgccaccgccgcagcaccagaagaagaagaagagtgatggctgagtacgacctaactccgcggatggcgccgaatctcgacaggcaccttgtgttccctctcctggagttcctgcaggagcggcagctctacgacgacgaccacatcctgaaggcgaagatcgaccttctcaacaacaccaacatggttgactacgctatggacatccacaagagcctctaccacaccgaggacgtcccgaacgatatggtcgaccgccgcgccgaggtcgttgcccgccttaagtcgctcgaggaggccgccgcccccctcgtcgccttcctccagaacgaggctgctgtgcaggagctccgagcggacaagcagtacaatctccagatgctcaacgaccgatatcagattggtcctgcacagatagaagcgttgtaccaatatgccaaattccagtttgagtgtggaaactactctggtgctgctgactatctttatcagtacagagctttgtgcacaaatagtgaaaggagtttgagtgcattgtgggggaagctggcagctgaaattttgatgcagaactgggacatcgctcttgaagagctcaaccgcttgaaggaaatcattgactcaaagaattttgcatcacctttgaaccaggtgcaaagcagaatatggctgatgcattggagtctgttcatcttttttaatcatgacaatgggagaacacaaataattgatctgttcaatcaggacaagtatctaaatgctatccaaactagtgctccacaccttttgcgatacttggccacagcattcattgttaacaagaggaggaggcctcaattcaaagattttattaaagttattcaacaggagcagcattcctataaggaccccatcactgagtttttggcttgtgtttatgttaactatgactttgatggggcacaaaagaagatgagggaatgtgaagaagtcatacttaatgatcccttccttggtaaaagagttgaagaaagcaacttttcaactgtaccgctaagggatgagttccttgaaaatgctaggctatttatcttcgagacatactgtagaatacaccaacgcattgacatgggagtgcttgctgagaagttaaatttgaattatgaggaggctgagagatggattgttaatctcatccggagctcaaagcttgatgccaaaattgactccgaaactggagcagttatcatggaacctaatcatctaaatgtgtatgagcaactgatagaccataccaaggcccttaacggacgcacttacaagttggttagtcaacttctggaacatgcacaagctcaaacaacacgatgattgtgtaggtagatcaatgagagtatttgttttatctatccggatgcatcaaattgtttttggctgtttattttggatttagaattacattcaaatttatgggctgtatacctcttggagtagtaggggttctcctgtgttacttgtggatccaaacaagtagtattgataacgattttgcttaaaatgtttgccataagcttcctctcaaaaaaaaaaaaaaaa

SEQ ID NO: 2196 - protein, 437 aa, Glycine max
  misc_feature: Ceres CLONE ID no. 598102
  misc_feature: Ceres CDNA ID no. 29191812
  misc_feature (284)..(400): Pfam Name: PCI PFAM Desc: PCI domain
  misc_feature: Homolog of GI Number: 7689381 NR Desc: eIF3e
  misc_feature: Homolog of GI Number: 34900328 NR Desc: putative eIF3e
  misc_feature: Homolog of GI Number: 50509964 NR Desc: putative eIF3e
  misc_feature: Homolog of GI Number: 50509965 NR Desc: putative eIF3e
  misc_feature: Homolog of GI Number: 50937511 NR Desc: putative eukaryotic initiation factor 3E
  misc_feature: Homolog of GI Number: 19310715 NR Desc: putative translation initiation factor 3
  misc_feature: Homolog of GI Number: 57095296 NR Desc:  similar to Eukaryotic translation initiation factor 3 subunit 6
  misc_feature: Homolog of GI Number: 62652368 NR Desc:  eukaryotic translation initiation factor 3
  misc_feature: Homolog of GI Number: 60654157 NR Desc: eukaryotic translation initiation factor 3 subunit 6 48kDa
MAEYDLTPRMAPNLDRHLVFPLLEFLQERQLYDDDHILKAKIDLLNNTNMVDYAMDIHKSLYHTEDVPNDMVDRRAEVVARLKSLEEAAAPLVAFLQNEAAVQELRADKQYNLQMLNDRYQIGPAQIEALYQYAKFQFECGNYSGAADYLYQYRALCTNSERSLSALWGKLAAEILMQNWDIALEELNRLKEIIDSKNFASPLNQVQSRIWLMHWSLFIFFNHDNGRTQIIDLFNQDKYLNAIQTSAPHLLRYLATAFIVNKRRRPQFKDFIKVIQQEQHSYKDPITEFLACVYVNYDFDGAQKKMRECEEVILNDPFLGKRVEESNFSTVPLRDEFLENARLFIFETYCRIHQRIDMGVLAEKLNLNYEEAERWIVNLIRSSKLDAKIDSETGAVIMEPNHLNVYEQLIDHTKALNGRTYKLVSQLLEHAQAQTTR

SEQ ID NO: 2197 - DNA, 629 bp, Glycine max
  misc_feature: Ceres CLONE ID no. 598164
  misc_feature: Ceres CDNA ID no. 25446227
  CDS (87)..(410): REFERENCED BY SEQ ID NO: 2198
atccaaagctacttcagttattcatctctttattactaacatttcttccattcttagcttttgtttgtcccatcaaatttttgaagatggccaagagaagtgttgctgctaattcttcttttgagagtactagcttggcttctctggatcaaaagttggccatggccaagcgctgctctcatgagggtgcgatggcaggagccaaggcagctgttgctgctactattgccactgccattccaactctggctagtgtaaggatgctaccttgggcaagagcaaatctcaatcacactgctcaagctctcataatttccacagtggcgggagcagcatatttcattgtagctgacaagactgtcttggcaactgcaagaaagaactccttcaaccgaccctccaaagcatgaattccaaatagataacttggatgctggattcagcttcaccttggattatcttggcataaacccgatcatcgaacttatcatatatgtaaatgtaattatgtattgataataatgaagagtttgcatttcaatagtgagatggaacatatgtactaattatcagttaattatatgaatgcaaatcattcaccttaatttcttccaaaaaaaaaaaaaaaa

SEQ ID NO: 2198 - protein, 107 aa, Glycine max
  misc_feature: Ceres CLONE ID no. 598164
  misc_feature: Ceres CDNA ID no. 25446227
  misc_feature (22)..(100): Pfam Name: ENOD93 PFAM Desc: Early nodulin 93 ENOD93 protein
  misc_feature: Homolog of GI Number: 218262 NR Desc: early nodulin
  misc_feature: Homolog of GI Number: 4731119 NR Desc: root
  misc_feature: Homolog of GI Number: 50948739 NR Desc: putative early nodulin
  misc_feature: Homolog of GI Number: 50948751 NR Desc: putative early nodulin
  misc_feature: Homolog of GI Number: 50948737 NR Desc: putative early nodulin
  misc_feature: Homolog of GI Number: 4809191 NR Desc: early nodulin
  misc_feature: Homolog of GI Number: 50948753 NR Desc: putative early nodulin
  misc_feature: Homolog of GI Number: 50948749 NR Desc: putative early nodulin
  misc_feature: Homolog of GI Number: 50948755 NR Desc: putative early nodulin
  misc_feature: Homolog of GI Number: 30793889 NR Desc: putative nodulin protein
MAKRSVAANSSFESTSLASLDQKLAMAKRCSHEGAMAGAKAAVAATIATAIPTLASVRMLPWARANLNHTAQALIISTVAGAAYFIVADKTVLATARKNSFNRPSKA

SEQ ID NO: 2199 - DNA, 1190 bp, Glycine max
  misc_feature: Ceres CLONE ID no. 598468
  misc_feature: Ceres CDNA ID no. 40351092
  CDS (167)..(1129): REFERENCED BY SEQ ID NO: 2200
aataacctcacacactttctctctctctctttctctttctcactcactctcactctctgtcacggacagacagagaaaaactcagacacccacgttcacacttccctcacaccatcccttactgttccttcttcttcttcttcctttttttttttctcttaatggaatgatggaacacaacatcatcgttaacaacaacaacgtgatcgcaccgtttgtcataaaaacctacaacatggtgaacgatcccaccaccgataaactcatcatgtggggcccagccaacaacagcttcatcgtcctcgaccccctcgacttctctcactccctcctccctgctttcttcaagcacaacaacttctccagcttcgttcgacaactcaacacttatggtttcagaaaggtggatccggatcggtgggaattcgcaaatgagtggttcctgcgaggacagaagcacttgttgagaaacatcgcgcggaggaagcacggtggagctgggaggagcaatttcaatttgcattcgcatcatcatccgttgaaggtggaggaattggacgacgaagccatggtgatggagatagcgaggttgaaggaggagcaaaaagcgttggaggaagagcttcaaggaatgaacaagaggttagagacaacagaaaaacgaccacaacaaatgatggcttttctgtccaaggttgtcgaggacccgcaggttctttctcggattctccgagaaagagaaaagaaacacctgggcgagaaaaagcgccgcctaattccgccgccaacaacgacggcagcgacgacgtcgtcgtcgtcgtcctccggcatcaagacggagttcgaagaagacgaaggtaattataatatcatgtcttcgtcgccggagacagggttggaaatcgataataataatatttgttcgcctctggcggcggggtattggggggaacagggttgtcatgggtacaatcgtggcgccgtgacggcgccgttgacggtggtggcgccggcggttccgacgatgggaggagggtatttggggcgtggggttttttttggggaaatggcggcggaggggaatgcggtgccgccttatccgttttcgttgttggaaggtggcttttagatttatttgttttaggttatgaaatgaatgaattattactgccacaaaaaaaaaaaaaaaa

SEQ ID NO: 2200 - protein, 320 aa, Glycine max
  misc_feature: Ceres CLONE ID no. 598468
  misc_feature: Ceres CDNA ID no. 40351092
  misc_feature (138)..(174): Pfam Name: HSF_DNA PFAM Desc: HSF
MMEHNIIVNNNNVIAPFVIKTYNMVNDPTTDKLIMWGPANNSFIVLDPLDFSHSLLPAFFKHNNFSSFVRQLNTYGFRKVDPDRWEFANEWFLRGQKHLLRNIARRKHGGAGRSNFNLHSHHHPLKVEELDDEAMVMEIARLKEEQKALEEELQGMNKRLETTEKRPQQMMAFLSKVVEDPQVLSRILREREKKHLGEKKRRLIPPPTTTAATTSSSSSSGIKTEFEEDEGNYNIMSSSPETGLEIDNNNICSPLAAGYWGEQGCHGYNRGAVTAPLTVVAPAVPTMGGGYLGRGVFFGEMAAEGNAVPPYPFSLLEGGF

SEQ ID NO: 2201 - DNA, 542 bp, Glycine max
  misc_feature: Ceres CLONE ID no. 601804
  misc_feature: Ceres CDNA ID no. 40351093
  CDS (112)..(327): REFERENCED BY SEQ ID NO: 2202
accctataaaccaaattcgcaatcccgtgttatctacacttcccttcccattcctttcaatttggagaggaattcatttgaattagggtttctcttttcctttgtttcattatggacgctcagagggctttactcgacgaactcatgggtgcagcgcgcaacttgacggaggaagagagaaaggggtacaaggaagtgagttgggacgataaggaagtgtgtggattctacatggtgcgcttttgccctcacgatctcttcgtcaacacgcgcagtgatctcggaccttgcccgagaatacatgacccgaagttgaaagaaaggtgaacaagtaaatttatgttcatatagttcaggttttgtaaatgaactgtatgagatttctaatgatgagctgtatggaacttctttagtcttgctgcaaatattcgctaataaattagtgtgaaaactattacgtttctgattgtaaggcatacctgtatgaaaatgtaattttatattattttaatgttagacagtggtcaaaaaaaaaaaaaaaa

SEQ ID NO: 2202 - protein, 71 aa, Glycine max
  misc_feature: Ceres CLONE ID no. 601804
  misc_feature: Ceres CDNA ID no. 40351093
  misc_feature (1)..(70): Pfam Name: LUC7 PFAM Desc: LUC7 N_terminus
MDAQRALLDELMGAARNLTEEERKGYKEVSWDDKEVCGFYMVRFCPHDLFVNTRSDLGPCPRIHDPKLKER

SEQ ID NO: 2203 - DNA, 1595 bp, Glycine max
  misc_feature: Ceres CLONE ID no. 603441
  misc_feature: Ceres CDNA ID no. 40041262
  CDS (139)..(1278): REFERENCED BY SEQ ID NO: 2204
atttttttagattagagattgagagggaggagtacgtggaaggcattttgacctatcgctcgcgcgaaaccaaatctctttgtttctcttaattcctttatagtagcaagtgaagttgaagttgcaggtgtgtgtctcatggcgtctgttattcctcgatgccttcctcccccaattccaattgcacaccgacgaaaggcgcaggtggtgaaatcgtgtcaccaaaacgagagctctgcttcggctcacacagaccactcctcaaatccaaaggaactccgagtaacagtttccaggcgtaattgtctctcatgtttgtgttctactatagttttgattagtgattgcgccatgcctatttttttaccaaaggcatccgctgctgatggaaatggaatcatggaaaaacctgtgtgcagaaattgcttgggaagcggtgctgtgctttgtgatatgtgtggtggcacaggaaaatggaaagctcttaaccggaagcgagctaaagatgtttatgaatttactgagtgtccaaattgttatgcaatggcagcatcttcggcaggttctccagtcattggggtcattgatgggaagtttgaaagtgggtatctagttacagtcacaattggttctgagaaactcaaaggcgtgctttatcaagctccacaaaaccctgtattggttgcatcccatcatagtgcctcagctaagaacaacaatgcttctgcttcattgggtgtccatcgtcgacgacgcaggaagaaatcagaaataaaaaggagagatcctgctcatccaaaacccaacagaagtgggtacaatttcttctttgctgagcagcatgcaagactaaagctacttcatcatggaaaggacagagagattagtaggatgattggtgaactttggaacaagttaaaagaatcagaaaagactgtttatcaagagaaggccatgaaggataaagagaggtacagagcagaaatggaggattatcgggagaaacagaagatgggccaagttatcagcgatgctgtgccacttcaacaacgacttcccgaaccggatgcagacatgttggatgttgacataaaaatggatgaagctgagggagattcacctcaaactccagaggagagttctggtggaagtgactatgaagattataataaaactgcagagagaggctttgatatggatgcattgcctgttataggaatgggagcagaaacaagctatttgggttcggaagagaagtcatctaaggggggtttatgagcttctccaggagagagagattttcttatgataatttagatgcagtggagatttgaggtaggattaaggttgcagtgcttacttggttgctcacacagggcttaactgtgagttttgtcgttttaattaatgttttaatttaaggtgttcatgttggcttcatgctatattgctattgtacatctggcaagctgacatggatgatatgatggcaacttgttaattaggtccttgggagtccgctcttcctatgttattaggtccatcgagaccaaaagaataaaatgcctcttttcattttaaaaaaaaaaaaaaaa

SEQ ID NO: 2204 - protein, 379 aa, Glycine max
  misc_feature: Ceres CLONE ID no. 603441
  misc_feature: Ceres CDNA ID no. 40041262
  misc_feature (220)..(287): Pfam Name: HMG_box PFAM Desc: HMG
  misc_feature: Homolog of GI Number: 56236040 NR Desc: At1g04880
  misc_feature: Homolog of GI Number: 50908159 NR Desc: glutathione S
  misc_feature: Homolog of GI Number: 50898814 NR Desc: glutathione S
  misc_feature: Homolog of GI Number: 8778487 NR Desc: F20N2.8
  misc_feature: Homolog of GI Number: 15222755 NR Desc: high mobility group
  misc_feature: Homolog of GI Number: 19114226 NR Desc: nonhistone chromosomal protein
MASVIPRCLPPPIPIAHRRKAQVVKSCHQNESSASAHTDHSSNPKELRVTVSRRNCLSCLCSTIVLISDCAMPIFLPKASAADGNGIMEKPVCRNCLGSGAVLCDMCGGTGKWKALNRKRAKDVYEFTECPNCYAMAASSAGSPVIGVIDGKFESGYLVTVTIGSEKLKGVLYQAPQNPVLVASHHSASAKNNNASASLGVHRRRRRKKSEIKRRDPAHPKPNRSGYNFFFAEQHARLKLLHHGKDREISRMIGELWNKLKESEKTVYQEKAMKDKERYRAEMEDYREKQKMGQVISDAVPLQQRLPEPDADMLDVDIKMDEAEGDSPQTPEESSGGSDYEDYNKTAERGFDMDALPVIGMGAETSYLGSEEKSSKGGL

SEQ ID NO: 2205 - DNA, 2223 bp, Glycine max
  misc_feature: Ceres CLONE ID no. 604442
  misc_feature: Ceres CDNA ID no. 40041263
  CDS (84)..(1913): REFERENCED BY SEQ ID NO: 2206
atcctcaatcttaaagtttttctcttccaaacaaaaaccacaacaacaacaactactgtgatggccatttcaagttctgcagaatgaatactcaattttgcagaacaccaccaccccatcacgtgcatgcacccatcatccccacgtgccacttcccttctttgcacactgtctcaccctcccaccaccaccgacgtttcttcttcttccatgccaatttctcagcttctcccacacccatcttggaagaagaaccttcttcttccaacacccccaccatcatccatgttgtagatgttaacttcgctgctgatgttcagaaacaatattccaagccagaacctgagaacttgaacgagttcttatgtgggttgtttgaggatccaaagactaaagaacttgcttttgactactaccaaaggttgaaagagagaccagagtttagacccgagaagccaacactgaagcacgtgatcaggtacttggtgagtttgaagagttggggttccattttgtctgtttcagaagactttaaggtttaccatgtgttgcctgatagggctacttgctctaggttggttaagttttgcattgagcataggaaattcagggttgctgagtctctgctttatgtttttaaagatgatagtaaggttgctttcttggcttttagttctgccatgagaagttacaacaagctgcatatgtttaggaacactgttttggtgtttgaaagaatgaaatcgagtaatgttgttctcgattcgagaggttatttacacattatggaagcttactctaagctcaatgagtgtgagaaggtggttcagttgtttcgtgaatttgagagtaggaagttaagaggttcaagttatttggctcagatatatgtgattctatgtgagtcattagcgaggcatggaagagctttcgaagcgcttgatttctttacagagatggctaagaaaggaatttctgaatactcaatttactctaaattgatatactcgtttgcgagtttgcgtgaggttgtcgtggctgaggaacttctaagagaagctaaaggaaaaatgacgataaaggatcctgaggtctatttgaagcttgtgcatatgtatattgaagaaggtttgttggagaagactttggaagttgtcaaggaaatggaggatgcagatgtcaaggtttctgattgtatactatgtactgttgtcaatggcttcagcaagaaaagagggtttttggctgcggttaaggtttttgaggagctgatttccaagggctatgaatcgggtcaagtcacctatgcttcggttataaatgcatattggcgtctcgggcaatatagcaaagcagaagaggtgtttttagagatggagcaaaaggggtttgataaatgtgtttatgcttactctaccatgattgtgatgtatggaagaacggggagggtgagaagcgcgatgaagttggtggccaagatgaaagaaagagggtgcaaaccaaatgtgtggatctataactccttgatagacatgcatgggagggacaagaatttgaagcagcttgagaagctgtggaaagaaatgaagagaagaagggtagcaccggataaggtgagttatactagcatcattggtgcttatagtaaagcaggtgagtttgaaacctgtgtgaagtttttcaatgagtataggatgaatggagggcttattgatagggccatggcaggtataatggttggtgtgttctctaaagttggtctggttgatgaattggtgaaacttttacaagacatgaaagcagaaggaacaagactagatcagaggttgtaccaatctgcttggaatgcttttaaagatgccgggttgcaaattcaggcaaggtggatgaaagagagcttccttgtgacatagtgttctttcaattttgcaaacagtggccaaatctgaagctgaaatattcgaaaccggtgagtaatttgatgcttgcttcttcaggcactttgaggtgtacaaaaagatctatcatagatatatatcatgtataggttttggtgatgaaaggctcttgcttgtacaatttttagctttataccctttctattgtatgcttccaaaatcagattgtactcaagaaacgtctttttaattatgacttccataatcaaagtaaaaggccattagtagcagcacaagatggaactgcgtaaaaaaaaaaaaaaaa

SEQ ID NO: 2206 - protein, 609 aa, Glycine max
  misc_feature: Ceres CLONE ID no. 604442
  misc_feature: Ceres CDNA ID no. 40041263
  misc_feature (546)..(580): Pfam Name: PPR PFAM Desc: PPR repeat
  misc_feature: Homolog of GI Number: 53850491 NR Desc: At5g13770
  misc_feature: Homolog of GI Number: 50928251 NR Desc: OSJNBa0088A01.11
  misc_feature: Homolog of GI Number: 50905575 NR Desc: putative pentatricopeptide
  misc_feature: Homolog of GI Number: 4220445 NR Desc: Similar to gi3004555 F19F24. Fourteen salt inducible protein homolog from Arabidopsis thaliana BAC gbAC003673
  misc_feature: Homolog of GI Number: 20197234 NR Desc: putative salt
  misc_feature: Homolog of GI Number: 50726131 NR Desc: putative fertility restorer
  misc_feature: Homolog of GI Number: 50253069 NR Desc: putative pentatricopeptide
  misc_feature: Homolog of GI Number: 50938865 NR Desc: putative pentatricopeptide
  misc_feature: Homolog of GI Number: 50945513 NR Desc: putative fertility restorer homologue
  misc_feature: Homolog of GI Number: 50906527 NR Desc: putative pentatricopeptide
MNTQFCRTPPPHHVHAPIIPTCHFPSLHTVSPSHHHRRFFFFHANFSASPTPILEEEPSSSNTPTIIHVVDVNFAADVQKQYSKPEPENLNEFLCGLFEDPKTKELAFDYYQRLKERPEFRPEKPTLKHVIRYLVSLKSWGSILSVSEDFKVYHVLPDRATCSRLVKFCIEHRKFRVAESLLYVFKDDSKVAFLAFSSAMRSYNKLHMFRNTVLVFERMKSSNVVLDSRGYLHIMEAYSKLNECEKVVQLFREFESRKLRGSSYLAQIYVILCESLARHGRAFEALDFFTEMAKKGISEYSIYSKLIYSFASLREVVVAEELLREAKGKMTIKDPEVYLKLVHMYIEEGLLEKTLEVVKEMEDADVKVSDCILCTVVNGFSKKRGFLAAVKVFEELISKGYESGQVTYASVINAYWRLGQYSKAEEVFLEMEQKGFDKCVYAYSTMIVMYGRTGRVRSAMKLVAKMKERGCKPNVWIYNSLIDMHGRDKNLKQLEKLWKEMKRRRVAPDKVSYTSIIGAYSKAGEFETCVKFFNEYRMNGGLIDRAMAGIMVGVFSKVGLVDELVKLLQDMKAEGTRLDQRLYQSAWNAFKDAGLQIQARWMKESFLVT

SEQ ID NO: 2207 - DNA, 1729 bp, Glycine max
  misc_feature: Ceres CLONE ID no. 604729
  misc_feature: Ceres CDNA ID no. 29191500
  CDS (2)..(1507): REFERENCED BY SEQ ID NO: 2208
acctctcccttccagtcatctgacatctgctcccgtcctctcctcttctcttccccccgaagcagcagcgtccctcctctccgcccggatcgcgatggccgccgccgccgactccaagatcgacaacctccgcgacgccgtcgccaagctcggcgagatcagcgagaacgagaaggccggcttcatcagcctcgtctcgcgctacctcagcggcgaggcggagcagatcgagtggagcaagatccagacccccaccgatgaggtggtggtgccctacgacaccctcgcgccccctcccgaagatctcgacgccatgaaggctctgctcgacaagctcgtggtgctcaagctcaacggaggcctcggcaccaccatgggctgcaccggccccaagtccgtcattgaagttcgcaatgggtttacatttcttgaccttattgtgattcagattgagtccctgaacaagaagtatggatgcagtgttcctttgcttctaatgaactctttcaacactcatgacgacacacagaagattgttgagaagtactccaactccaacattgaaattcacactttcaaccagagccaataccctcgcattgttactgaagacttcttgccacttccaagcaaagggcagacagggaaggatggctggtaccccccaggccacggtgatgtgttcccctctttgaacaacagtggaaaactcgataccttactgtcacagggaaaggagtatgtcttcatggcgaactcagacaacttgggtgctatagttgacatcaagatactaaaccacctgatcactaaccagaatgagtactgcatggaagttactccaaaaacattggctgatgtcaaaggtggtaccctcatctcatacgaaggaagagtccagctcttggagattgcccaagtccctgatgagcatgtgaatgaattcaagtcgattgagaagttcaagatatttaacaccaacaacctgtgggtgaacttgaaggcgatcaagaggcttgtagatgctgaagcacttaagatggaaatcattcccaaccctaaggaagttgatggcgtgaaagtcctgcagctagaaaccgcagctggagcagcgatcaggttctttgagaaagcaatcggcatcaacgttccccgctcaaggtttctgcccgtgaaggctacatctgatttgttgcttgtgcagtctgatctctataccttggttgatggctacgtcatccgcaacccagccagagtgaagccatcgaacccttcaattgagcttggtcctgagttcaaaaaggttgccaacttccttgcccgtttcaagtcgatccccagcatcgttgagctcgacagcttgaaggtctctggtgatgtctcgtttggctctggagtcgtactcaagggcaacgtgaccatcgctgccaaggctggagtcaagttggagatcccagacggagctgtgctcgagaacaaggacatcaacggccctgaggatctttgagcgacgcccgccgccatcgccagtcgcattcccagaaaccttccggtcctccttcgctgagttaaccgtcctgtaattttcgtgtgcattctgctggagtgttgtcctgggatagcccctttacataataattgtaatcccctctgtgatgttcatctacacttgttcttcctgggtgtgccagggacgtaaaatttcttttggtcaaaaaaaaaaaaaaaa

SEQ ID NO: 2208 - protein, 470 aa, Glycine max
  misc_feature: Ceres CLONE ID no. 604729
  misc_feature: Ceres CDNA ID no. 29191500
  misc_feature (26)..(438): Pfam Name: UDPGP PFAM Desc: UTP
  misc_feature: Homolog of GI Number: 17026394 NR Desc: UDP
  misc_feature: Homolog of GI Number: 37729658 NR Desc: UDP
  misc_feature: Homolog of GI Number: 1212996 NR Desc: UDP
  misc_feature: Homolog of GI Number: 6625908 NR Desc: UDP
  misc_feature: Homolog of GI Number: 15823775 NR Desc: UDP
  misc_feature: Homolog of GI Number: 32527831 NR Desc: UDP
  misc_feature: Homolog of GI Number: 1388021 NR Desc: UDP
  misc_feature: Homolog of GI Number: 76160958 NR Desc: UDP
  misc_feature: Homolog of GI Number: 28863913 NR Desc: UTP:alpha
  misc_feature: Homolog of GI Number: 28863907 NR Desc: UTP:alpha
MAAAADSKIDNLRDAVAKLGEISENEKAGFISLVSRYLSGEAEQIEWSKIQTPTDEVVVPYDTLAPPPEDLDAMKALLDKLVVLKLNGGLGTTMGCTGPKSVIEVRNGFTFLDLIVIQIESLNKKYGCSVPLLLMNSFNTHDDTQKIVEKYSNSNIEIHTFNQSQYPRIVTEDFLPLPSKGQTGKDGWYPPGHGDVFPSLNNSGKLDTLLSQGKEYVFMANSDNLGAIVDIKILNHLITNQNEYCMEVTPKTLADVKGGTLISYEGRVQLLEIAQVPDEHVNEFKSIEKFKIFNTNNLWVNLKAIKRLVDAEALKMEIIPNPKEVDGVKVLQLETAAGAAIRFFEKAIGINVPRSRFLPVKATSDLLLVQSDLYTLVDGYVIRNPARVKPSNPSIELGPEFKKVANFLARFKSIPSIVELDSLKVSGDVSFGSGVVLKGNVTIAAKAGVKLEIPDGAVLENKDINGPEDL

SEQ ID NO: 2209 - DNA, 982 bp, Triticum aestivum
  misc_feature: Ceres CLONE ID no. 605672
  misc_feature: Ceres CDNA ID no. 40351094
  CDS (5)..(730): REFERENCED BY SEQ ID NO: 2210
atggatggctgattctccaccggtacatcccgtcaccggtaaaaaaacttattcggcagctcccagccgtgcgccgtctcaactctcaagcgccgctcgccagcgaaacccgatccaagacaacaatacccactcccaaccttctgtggcgatggcagcactggcgaggagggcgggaggatcccctgcggcggcgctgtgggccgcggccaggggattcgcgtcggtcggctccgacatcgtctccgcggcgcccggcgtgtcgctgcagaaggcgcggtcctgggacgagggggtcgccaccaagttctccaccacccctctcaaggacatcttccatgggaagaaagtcgtcatcttcgggttgccgggtgcatacacaggagtatgttcgcagtcccacgttcctagttacaagaacaacattgataagttgaaagcaaaagggatcgactctgttatctgtgtagctgtaaatgatccctatgtgctgaatggatgggcagaaaaattacaggcaaaagatgcaattgagttttatggtgaccttgacgggagcttccacaaaagcttggatttggaaatagatctctctgctgctttgcttggtcgacgctcccacaggtggtcggcctttgtcgatgatgggaagatcaaggcattcaacgttgagaaagccccttctgacttcaaggtttctggtgctgaggtgatcttggatcaaatctgagctgatcggtaatcggtgctctgttttgcttttgtgatgcaaataagtgacagctcgagaatctgtgtgaagatgttgctgtctgtcgtgctagttccaggacagtcattttgctgctgcaaatctttatttcttttgttccagaacagtcatcgaattagtcaccggttcgtgtatgcgacagtttctgttatttggcgtttgatgaagagctgtgctcgcgtgcaggtaatccgaaaaaaaaaaaaaaaa

SEQ ID NO: 2210 - protein, 192 aa, Triticum aestivum
  misc_feature: Ceres CLONE ID no. 605672
  misc_feature: Ceres CDNA ID no. 40351094
  misc_feature (62)..(169): Pfam Name: AhpC PFAM Desc: AhpC/TSA family
MAALARRAGGSPAAALWAAARGFASVGSDIVSAAPGVSLQKARSWDEGVATKFSTTPLKDIFHGKKVVIFGLPGAYTGVCSQSHVPSYKNNIDKLKAKGIDSVICVAVNDPYVLNGWAEKLQAKDAIEFYGDLDGSFHKSLDLEIDLSAALLGRRSHRWSAFVDDGKIKAFNVEKAPSDFKVSGAEVILDQI

SEQ ID NO: 2211 - DNA, 523 bp, Triticum aestivum
  misc_feature: Ceres CLONE ID no. 605824
  misc_feature: Ceres CDNA ID no. 36706315
  CDS (243)..(374): REFERENCED BY SEQ ID NO: 2212
atcacaaactcgagagcagagagcacctgcacagcaatcgccactgtcttgcgtttctctgtgatttcgaccgcggcgtcgaccatgagctacccgccaccgggcaccgcgtacccgcagccgggccaggaggcctacccgccgccggcgtacggcgctccgccgcctgttgccgccaactactaccagcagcaggccccgccgccggaaccggaggacagcggcgacggcttctggaaaggatgttgtgctgcgatttgctgctgctgtctgctcgacacgtgttgctgatcacaagacttcgtaccgccaacaccaggcaatcctacgacgatctacatcagctgctcgtatatagtttctttctatcgtagtagtatttgtgctgttcggatcgagatttgtatgacggtgtaggtcactacatcgagttgtactattacctgccccgcaaaaaaaaactgtactattacctccgttcgaaaataaatgacgttgttttagtttaaaaaaaaaaaaaaaa

SEQ ID NO: 2212 - protein, 68 aa, Triticum aestivum
  misc_feature: Ceres CLONE ID no. 605824
  misc_feature: Ceres CDNA ID no. 36706315
  misc_feature: Homolog of GI Number: 50928713 NR Desc: OSJNBa0008M17.8
  misc_feature: Homolog of GI Number: 32420017 NR Desc: predicted protein
  misc_feature: Homolog of GI Number: 50948019 NR Desc: proline
  misc_feature: Homolog of GI Number: 50938779 NR Desc: adhesive/proline
  misc_feature: Homolog of GI Number: 8515092 NR Desc: adhesive/proline
  misc_feature: Homolog of GI Number: 42565788 NR Desc: proline
  misc_feature: Homolog of GI Number: 8698728 NR Desc: Contains weak similarity to GATA
MSYPPPGTAYPQPGQEAYPPPAYGAPPPVAANYYQQQAPPPEPEDSGDGFWKGCCAAICCCCLLDTCC

SEQ ID NO: 2213 - DNA, 698 bp, Triticum aestivum
  misc_feature: Ceres CLONE ID no. 605874
  misc_feature: Ceres CDNA ID no. 35383221
  CDS (1)..(522): REFERENCED BY SEQ ID NO: 2214
aaagcaatcccaggacctgcagctaatcataacagccactcgagcactcgattcgatcctctctcgagctctccgttcttcgatctccgtccatggcgccgtccatctccattgccgccgcgccgccggcctctggctggaagagcggccggaaggccgtggcggcgccggcggagggcgaggcggaggcggaggcgctgctgctgcgtcgccggaacgccgagctggagcgggaggtggcgctgctgcgggcggagctggaggccgcgcggctgcgcgccgaggccgcggaggaggccgaggagcggctgtgcgcgcagctcggcgaggccgagtgcgaggccctcgagctcgcgcgcgcgtaccagggccacgtccaggagctcgcgcgggagctcgccgccgcacgcagcagctagcggagcgtggcactggacccgcttggaggaggcgaagaggcaggcagagcgcgtggccgagctcgtcggtgatgctttgacgatcgatgaagaggttaattagtttcttgtacgagcaagatgtcagtgtttgtaacttgtactctacgtacgactagtacaattgaatagcaggcgcggaagtatatattcgtaaatacttgtaggataaatgggtgtatgtagacgtgttttaattctatatacatttatttttacctctcaaaaaaaaaaaaaaaa

SEQ ID NO: 2214 - protein, 108 aa, Triticum aestivum
  misc_feature: Ceres CLONE ID no. 605874
  misc_feature: Ceres CDNA ID no. 35383221
  misc_feature: Homolog of GI Number: 66780099 NR Desc: PE
  misc_feature: Homolog of GI Number: 9453857 NR Desc: EBNA
  misc_feature: Homolog of GI Number: 66776365 NR Desc: PE
  misc_feature: Homolog of GI Number: 66777243 NR Desc: Ribonuclease PH
  misc_feature: Homolog of GI Number: 66778899 NR Desc: UvrD/REP helicase
  misc_feature: Homolog of GI Number: 9453859 NR Desc: EBNA
  misc_feature: Homolog of GI Number: 67987301 NR Desc: similar to multitransmembrane protein
  misc_feature: Homolog of GI Number: 66779698 NR Desc: Oxidoreductase
  misc_feature: Homolog of GI Number: 67986706 NR Desc: Acyltransferase 3
  misc_feature: Homolog of GI Number: 24641772 NR Desc: CG1987
MAPSISIAAAPPASGWKSGRKAVAAPAEGEAEAEALLLRRRNAELEREVALLRAELEAARLRAEAAEEAEERLCAQLGEAECEALELARAYQGHVQELARELAAARSS

SEQ ID NO: 2215 - DNA, 698 bp, Triticum aestivum
  misc_feature: Ceres CLONE ID no. 605926
  misc_feature: Ceres CDNA ID no. 40351095
  CDS (86)..(436): REFERENCED BY SEQ ID NO: 2216
ccacacaaccacgagttgctcatctctccacccaatcatcactagctaatacggtgcactgttagctacagaccaagaagtgatcatggcccgcgctcaggtaatgctcatggccgtcgccttggtgctcatgctcgcggcggtcccgcgcgctgccgtggccatcgactgcggccacgttgacagcttggtgagaccctgcctgagctacgttcagggcggccccggcccgtctgggcagtgctgcgacggcgtcaagaacctccataaccaggcgcgatcccagagcgatcgccaaagcgcttgcaactgcctcaaggggatcgctcgtggcatccacaatctcaacgaggacaacgcccgcagcatcccccccaagtgcggtgtcaacctcccatacaccatcagtctcaacatcgactgcagcagggtgtaatgggcgacgatccgtcaagctggtgctcagctcatccatccacgtggagttgaagcgcgcagcctctatccctatgtagtatggtcactagttatgcgagtttatactgaatatgaataagaactctctccagctggcttgctggtactcctctggaggagatcagtatctgtgtacctgagagttgagagtttgtaccatgggcactcccagtgtttatggactttaatacatacaactccttctaaaaaaaaaaaaaaaa

SEQ ID NO: 2216 - protein, 116 aa, Triticum aestivum
  misc_feature: Ceres CLONE ID no. 605926
  misc_feature: Ceres CDNA ID no. 40351095
  misc_feature (29)..(113): Pfam Name: Tryp_alpha_amyl PFAM Desc: Protease inhibitor/seed storage/LTP family
MARAQVMLMAVALVLMLAAVPRAAVAIDCGHVDSLVRPCLSYVQGGPGPSGQCCDGVKNLHNQARSQSDRQSACNCLKGIARGIHNLNEDNARSIPPKCGVNLPYTISLNIDCSRV

SEQ ID NO: 2217 - DNA, 815 bp, Triticum aestivum
  misc_feature: Ceres CLONE ID no. 606063
  misc_feature: Ceres CDNA ID no. 36582366
  CDS (239)..(508): REFERENCED BY SEQ ID NO: 2218
attcctttcccctgcccaccttcctctcccctcgcaccccctttcccttccaaccccgggcagcggatctacctgccgccgcctcgatcccgcctctcggcgaccttgcgcagtccttcttactcgggccccggggcgtcctgcggctgactccaccccgtcccagtcttcgtccggccaccggatctcctccctccctctgagtctgagattttgaaggaaggacagaagccgaaccatggggaagaggaaggcggccgctaagccaccccctaggaagcggatggacaagctcgataccgtcttttcctgcccattctgcaaccatgggagcagcgttgaatgccggattgatctgaagaatctgattggtgaggccaattgtcaaatctgccaggaaagcttcagcaccactgcaaatgcgctcactgaagctattgatgtatacagcgaatggatcgatgagtgcgagcgtgtcaacactgttgaagatgacgatggtgcatgagcaagtgtaactataatactctatgatctcaacgtgttgatgtcatttactgccaccgtcagccatatctgtagtagcattgtaacaatgtactggctgacttaaacgttagtaggcagtttgtcccgtgcttaatacacaaccgatgatattgtgtacctgtatttgtaaaccttggtatagcggctgagattacacctaatctcggtacctgcaaagaatgtgtacttgagacatgatgtttgtgaggctgttctgtgaaccgtcaagtcaagaatttatacttatggcaaaaaaaaaaaaaaaa

SEQ ID NO: 2218 - protein, 89 aa, Triticum aestivum
  misc_feature: Ceres CLONE ID no. 606063
  misc_feature: Ceres CDNA ID no. 36582366
  misc_feature (8)..(68): Pfam Name: DUF701 PFAM Desc: Putative zinc binding domain
  misc_feature: Homolog of GI Number: 49255948 NR Desc: MGC78969 protein
  misc_feature: Homolog of GI Number: 51771080 NR Desc: similar to RIKEN cDNA 1110011K10
  misc_feature: Homolog of GI Number: 51771364 NR Desc: similar to RIKEN cDNA 1110011K10
  misc_feature: Homolog of GI Number: 45190840 NR Desc: AER237Wp
  misc_feature: Homolog of GI Number: 51771082 NR Desc: similar to RIKEN cDNA 1110011K10
  misc_feature: Homolog of GI Number: 51771084 NR Desc: similar to RIKEN cDNA 1110011K10
  misc_feature: Homolog of GI Number: 62653408 NR Desc:  similar to RIKEN cDNA 1110011K10
MGKRKAAAKPPPRKRMDKLDTVFSCPFCNHGSSVECRIDLKNLIGEANCQICQESFSTTANALTEAIDVYSEWIDECERVNTVEDDDGA

SEQ ID NO: 2219 - DNA, 609 bp, Glycine max
  misc_feature: Ceres CLONE ID no. 606691
  misc_feature: Ceres CDNA ID no. 29191501
  CDS (27)..(515): REFERENCED BY SEQ ID NO: 2220
ccttcactctcttctccgatctcaaaatgcccgccgtttatggagctcgcttgaccaccttcgaagactccgagaaggagagtgaatacggttacgttcgcaaggtatcaggaccagtcgtcgttgcagatggcatggctggggctgctatgtatgaactcgtgcgtgttggtcatgataatctcattggtgaaattattcgtctcgaagggaattctgctaccatccaagtttatgaggaaactgctggcttgatggttaatgatccggtgttacggactcacaagcctttatccgtggagttgggacctggaatactggggaatattttcgatggaattcagaggcctttgaaaactattgctaaacgatctggtgatgtctatattcctcgtggtgtctctgttccagcactcgacaaagatacactttgggaatttcaacctaagaaaattggtgaaggcgaccttttaactggtggagatatggtagctttgtttagtttaattaattaacctaattaatgaaattcgaagtttatctctatgaacaatgtagacttggtccacattttgtggctggtgtaaaaaaaaaaaaaaaaaaaaaaaa

SEQ ID NO: 2220 - protein, 162 aa, Glycine max
  misc_feature: Ceres CLONE ID no. 606691
  misc_feature: Ceres CDNA ID no. 29191501
  misc_feature (24)..(86): Pfam Name: ATP PFAM Desc: ATP synthase alpha/beta family
  misc_feature: Homolog of GI Number: 3169287 NR Desc: vacuolar H+
  misc_feature: Homolog of GI Number: 849136 NR Desc: vacuolar H+
  misc_feature: Homolog of GI Number: 401322 NR Desc: Vacuolar ATP synthase catalytic subunit A
  misc_feature: Homolog of GI Number: 137460 NR Desc: Vacuolar ATP synthase catalytic subunit A
  misc_feature: Homolog of GI Number: 12585490 NR Desc: Vacuolar ATP synthase catalytic subunit A
  misc_feature: Homolog of GI Number: 60592630 NR Desc: vacuolar H+
  misc_feature: Homolog of GI Number: 60592632 NR Desc: vacuolar H+
  misc_feature: Homolog of GI Number: 15982954 NR Desc: V
  misc_feature: Homolog of GI Number: 13235340 NR Desc: putative vacuolar ATP Synthase subunit A
  misc_feature: Homolog of GI Number: 27883932 NR Desc: vacuolar H+
MPAVYGARLTTFEDSEKESEYGYVRKVSGPVVVADGMAGAAMYELVRVGHDNLIGEIIRLEGNSATIQVYEETAGLMVNDPVLRTHKPLSVELGPGILGNIFDGIQRPLKTIAKRSGDVYIPRGVSVPALDKDTLWEFQPKKIGEGDLLTGGDMVALFSLIN

SEQ ID NO: 2221 - DNA, 1162 bp, Glycine max
  misc_feature: Ceres CLONE ID no. 606798
  misc_feature: Ceres CDNA ID no. 40351096
  CDS (9)..(1001): REFERENCED BY SEQ ID NO: 2222
acatccaaatgtcttctttcctcttagcttcgcttgcacttttgttttgcatctcctccttggagaagagctttgcctttcaagcaacaaaggaaagcaacaatcttcgtcaatatcattttgttcacctcaactctctatttccatcatcttcttgcagctcttctgccaaaggatgctcctcatccacagatgcatcatgcatatatgacgtcaaatacggtgacaattccatctcccgcggcttcttgagtcaggagcgccttaccatcaccgccaccgacatcgtccacgacttcctctttggctgtggccaagacaacgagggcctcttcaggggcaccgccggcctcatgggcctcagccgccaccccatttcctttgtccaacaaacctcctcaatttacaacaaaattttctcctactgtctcccctccacccccagctcccttggccacctcaccttcggcgcttccgccgccaccaatgctaacctcaaatacactcccttttccacaatctccggcgaaaactccttctacggtctcgacatcgtcggcatctccgttggcggcaccaaactccctgctgtctcctcctccaccttctccgccggtggctccatcatcgactccggcaccgtgatcacgcggttgcctccgaccgcgtacgccgcgctccggtcggcatttcggcagtttatgatgaagtaccccgttgcctatgggacccgcctacttgacacgtgttatgatttcagtgggtataaggagatttcagttccgaggatagattttgaatttgccggtggcgtcaaggtggagttgccattggtggggatactctatggggaaagtgcgcaacaactgtgtttggcttttgctgcaaatgggaatggcaatgatattacgatatttgggaatgtgcaacaaaagacactagaggtcgtgtatgatgttgagggtgggaggatagggtttggtgctgctgggtgcaactgaagttagtttgattaatagtggtgttaattaaacatgctttgggcttgttagggaggaagaaatcttaattggctctggcatttttaattactattgttgttgttactggaaagtactctaaaacatatgaaaaaataaataaagcaaaaaaaaaaaaaaaa

SEQ ID NO: 2222 - protein, 330 aa, Glycine max
  misc_feature: Ceres CLONE ID no. 606798
  misc_feature: Ceres CDNA ID no. 40351096
  misc_feature (46)..(327): Pfam Name: Asp PFAM Desc: Eukaryotic aspartyl protease
MSSFLLASLALLFCISSLEKSFAFQATKESNNLRQYHFVHLNSLFPSSSCSSSAKGCSSSTDASCIYDVKYGDNSISRGFLSQERLTITATDIVHDFLFGCGQDNEGLFRGTAGLMGLSRHPISFVQQTSSIYNKIFSYCLPSTPSSLGHLTFGASAATNANLKYTPFSTISGENSFYGLDIVGISVGGTKLPAVSSSTFSAGGSIIDSGTVITRLPPTAYAALRSAFRQFMMKYPVAYGTRLLDTCYDFSGYKEISVPRIDFEFAGGVKVELPLVGILYGESAQQLCLAFAANGNGNDITIFGNVQQKTLEVVYDVEGGRIGFGAAGCN

SEQ ID NO: 2223 - DNA, 1658 bp, Glycine max
  misc_feature: Ceres CLONE ID no. 607179
  misc_feature: Ceres CDNA ID no. 40041264
  CDS (209)..(1294): REFERENCED BY SEQ ID NO: 2224
gataaaaataaaaatcattgtaactcatgtctaataatgcactaataactctgtaacaccaccttcataattccgattccagttcaaagcgactcaagcacttgttcgactcttttatcctacgcactcctccctgcttatcctgcgcatctttcacctagatcctccccttcactccttcactttcctatttcagtgggaaagaatcatgagttgtttcagctgttgcgaagaggatgacctccataaggctgctgaaagtggaggaccctatgttgtaaaaaatccagcagggaatgatggaaattatcatgcttctcaaactgcaaagcagggcactcagcctgttaaacctcagcccattgaagttcctaatatatcagcagatgaactgaaagaagttacggataactttggtcaagattctctgattggagagggatcctatggaagagtatattatggtgttcttaaaagtgggcaggctgcagcaatcaagaatttggatgccagtaaacagcctgatgaggaatttttagcccaggtttcaatggtatcaaggctgaagcatgaaaattttgttcagttgcttggatattgcattgatggaacctcccgtattcttgcttatcagtttgcatctaatgggtctcttcatgatattttacacggcagaaaaggtgttaaaggagcacagcctggtccagttttgacatgggcacaaagagtaaaaattgctgtaggggctgcaagaggacttgaatacttgcatgagaaggctgatccacacattattcaccgggacatcaagtcaagcaatgtgctaatctttgatgatgatgttgctaaaattgcagattttgatttatcaaatcaggctcccgacatggctgcacgtcttcattctactcgtgtccttggaacctttggttatcatgctccggaatatgcaatgactggacaattgaatgctaagagtgatgtatacagttttggcgttgtccttctggaacttctgactggaaggaaacccgttgatcatacactaccacgtggacaacagagtctggttacttgggctacaccaaaactcagtgaggataaagtcaggcagtgtgttgatacaagactaggaggagaatacccacccaaagctgttgctaagatggccgctgttgctgcactgtgtgtgcaatatgaagctgatttcagaccaaacatgagcattgtagtcaaagctcttcaacctttgttgactgcacgacctggacctgccggtgaaacaccaaattaatctttgtatcactttctctctatatttgtgagtatgtgcacaagtgtgcatgcaaaatataagagactgcttcagaagctggtggtaaattgctcagacatgactctatatcccattgtttacactgcattcattttgttcataatccatgaggttctttgcggttttcttgcttttattcattttattgtatttgctttctctattttttcccccttctatccttttacttctgggatgattgtcatctttacgatgaagtgttgggaaaaactacaaaacagaattgtgtatactcaaagctaagagcaagtcaatggactatctctactggaaacagttattcacaaaaaaaaaaaaaaaa

SEQ ID NO: 2224 - protein, 361 aa, Glycine max
  misc_feature: Ceres CLONE ID no. 607179
  misc_feature: Ceres CDNA ID no. 40041264
  misc_feature (69)..(288): Pfam Name: Pkinase PFAM Desc: Protein kinase domain
  misc_feature: Homolog of GI Number: 79324937 NR Desc: ATP binding / kinase/ protein kinase/ protein serine/threonine kinase/ protein
  misc_feature: Homolog of GI Number: 34365699 NR Desc: At3g62220
  misc_feature: Homolog of GI Number: 9651971 NR Desc: Pti1 kinase
  misc_feature: Homolog of GI Number: 3668069 NR Desc: Pto kinase interactor 1
  misc_feature: Homolog of GI Number: 1586940 NR Desc: Ser/Thr kinase
  misc_feature: Homolog of GI Number: 15221111 NR Desc: serine/threonine protein kinase
  misc_feature: Homolog of GI Number: 20148447 NR Desc: similar to Pto kinase interactor 1
  misc_feature: Homolog of GI Number: 32815839 NR Desc: At4g02010/T10M13_2
  misc_feature: Homolog of GI Number: 7268585 NR Desc: putative NAK
  misc_feature: Homolog of GI Number: 34894506 NR Desc: OJ1116_C07.16
MSCFSCCEEDDLHKAAESGGPYVVKNPAGNDGNYHASQTAKQGTQPVKPQPIEVPNISADELKEVTDNFGQDSLIGEGSYGRVYYGVLKSGQAAAIKNLDASKQPDEEFLAQVSMVSRLKHENFVQLLGYCIDGTSRILAYQFASNGSLHDILHGRKGVKGAQPGPVLTWAQRVKIAVGAARGLEYLHEKADPHIIHRDIKSSNVLIFDDDVAKIADFDLSNQAPDMAARLHSTRVLGTFGYHAPEYAMTGQLNAKSDVYSFGVVLLELLTGRKPVDHTLPRGQQSLVTWATPKLSEDKVRQCVDTRLGGEYPPKAVAKMAAVAALCVQYEADFRPNMSIVVKALQPLLTARPGPAGETPN

SEQ ID NO: 2225 - DNA, 460 bp, Glycine max
  misc_feature: Ceres CLONE ID no. 609259
  misc_feature: Ceres CDNA ID no. 25891118
  CDS (39)..(245): REFERENCED BY SEQ ID NO: 2226
tttttcgcacactacacacagaaaaaaagagagagaagatgacgcggggaaagcagaagatcgaagcgcagaagcgaaacgcagagaggaatcagaagggaaagggctctcagctcgaggccagagccgttggcctcaaagtcatctgccccatctgcaaggcccaacttgcaaatcaaaaccaactggttgatcattatgctttcaaacatccgaaggagaaacctcctgcagagtcaagctagttatatttgagcaaatggtacaaaaagtccccaaaaaaaattgctctctaggtgtgccttcgtgcttttaatgtaattctccctgcttgcaggcaggttgcaacatgttttaagttaatcatgttaatgtgcattattgtgagatcctaaaggatcataaaaactgcgtctatcattataagaatatcatcatgttgctaaaaaaaaaaaaaaaa

SEQ ID NO: 2226 - protein, 68 aa, Glycine max
  misc_feature: Ceres CLONE ID no. 609259
  misc_feature: Ceres CDNA ID no. 25891118
  misc_feature: Homolog of GI Number: 49256088 NR Desc: MGC81992 protein
  misc_feature: Homolog of GI Number: 62857829 NR Desc: LOC549498
  misc_feature: Homolog of GI Number: 51230539 NR Desc: zgc:91910
MTRGKQKIEAQKRNAERNQKGKGSQLEARAVGLKVICPICKAQLANQNQLVDHYAFKHPKEKPPAESS

SEQ ID NO: 2227 - DNA, 1301 bp, Glycine max
  misc_feature: Ceres CLONE ID no. 609661
  misc_feature: Ceres CDNA ID no. 40351097
  CDS (45)..(1001): REFERENCED BY SEQ ID NO: 2228
acaccacacaacaaacaatattattcaatagaaaagaaagaaagatgagtccaacatgggtttttgtgttaggtattattgcagcaatgttggtggttgtgaatggacaatcatcagtgaagccattggtgaagacagtgaaggggaagaaggtgtgtgacaaagggtgggagtgcaagggttggtctgcttattgctgcaatgagactatctccgattactttcagacataccagtttgagaacctcttcgcgaagcgcaattcgccggtggcacatgcagtcggattctgggactaccgttctttcatcactgctgcagcactgtatcagcctcttggctttggcaccactggaggaaagaccagtggccagaaggagcttgctgctttctttggccatgttggcagcaagacctcttgtggttatggggtggctacagggggacccttagcctggggcttatgctacaataaggaattgagtcctgataaattctactgcgatgactactacaaattaacctacccttgtactcctggtgcagcatactatggccgtggtgccatcccactttactggaactacaactatggaaaagctggggaagccttgaaggtggatctgttgaaccatccagaatacatagaacaaaatgccaccttagccttccaggctgcactctggcagtggatgaacccaccagagaagcacctaccatcaccccacgatgtctttgttggcaactggaaacccacaaaaaatgacacattgtccaaaagggtgcctggatttggtgccacaataaacttgctctatggggaccaaacttgtggccagggatcagataatgaggccatgaacaacatcatttcacactatctttattaccttgatctcataggtgttggcagagaagaggcaggacctaatgaagtactctcatgtgctgaacaagctgcttttaagccccctggctcaccatcttctgccacaaattgagccttgccttgcttggctgaaattcttggccgttccattcttgaatcctgcaaaaaattcttaataaaggaggcaacaagtagacaagatacttcaattactttggccttcaaatgagagtgaaacgagtttggagtggacactcattgttaatttgtgtatagattatattactttgccatatattttggcttttgatgttttctttctcttgtataatttgaatatattttggtatataatgtatgtatacaattgagtatttgatcattaaggattgcccgaaaaaaaaaaaaaaaa

SEQ ID NO: 2228 - protein, 304 aa, Glycine max
  misc_feature: Ceres CLONE ID no. 609661
  misc_feature: Ceres CDNA ID no. 40351097
  misc_feature: null
  misc_feature: Useful for making plants with altered cell wall content and/or composition
  misc_feature (46)..(287): Pfam Name: Glyco_hydro_19 PFAM Desc: Chitinase class I
MLVVVNGQSSVKPLVKTVKGKKVCDKGWECKGWSAYCCNETISDYFQTYQFENLFAKRNSPVAHAVGFWDYRSFITAAALYQPLGFGTTGGKTSGQKELAAFFGHVGSKTSCGYGVATGGPLAWGLCYNKELSPDKFYCDDYYKLTYPCTPGAAYYGRGAIPLYWNYNYGKAGEALKVDLLNHPEYIEQNATLAFQAALWQWMNPPEKHLPSPHDVFVGNWKPTKNDTLSKRVPGFGATINLLYGDQTCGQGSDNEAMNNIISHYLYYLDLIGVGREEAGPNEVLSCAEQAAFKPPGSPSSATN

SEQ ID NO: 2229 - DNA, 1272 bp, Glycine max
  misc_feature: Ceres CLONE ID no. 614725
  misc_feature: Ceres CDNA ID no. 40041265
  CDS (78)..(989): REFERENCED BY SEQ ID NO: 2230
gtaacagataggaatgagatagaatagagcataactttcactccctacactctcagtctgagaagcagtaaaagaaaatggcttcactttccctctccacaccaacctctctttccttcgcatcatcctccatcttcttctcttcacgccaattccacactttctcttcttccaaatccaacaacaagtttcccattttaccctccaaaaaacccctatccatttcctgcaaggcctcccctcctcttcccgtcctcaacttctccggcgagagggtcggcgagtcctttctcgacctccgctccgcccctcccgacaccgcccgcgccgtcgtccaccgcgccgtcgtcaccgacttgcagaacaagcgccgcggcaccgcctccaccctcacccgcggcgaggtccgcggcggcggccgcaagcccttcccacagaagaagaccggccgcgcccgccgcggctccaaccgcacgcccctccgccccggcggaggcgtcgtcttcggcccgaagccccgcgactggtctatcaagatcaaccgcaaggagaagcgcctcgccatctccaccgccgtcgcaagcgccgccgccagcgccgtcgtggtggaggacttcgcgacggagttcgcggagaagccgaagacgaaggagttcatcgcggcaatgaagcggtgggggcttgatccgaaggagaaggcgatgttcttgatgacggaggtgccggagaacgtgaggctttccagcaggaacattgggaccttgaagatgcacacgccgaggacgctgaatttgtatgatattcttgacgcggataagctcgtgctcacgcagggtgctgtggattacttgaatcagaggtatgggggtgattatgaagggagtgatgatgaagatgaagaagaagaagaatatgaagagggtgaggaggaaggtgcagtgaatggtgaagaaggacctgacgaagaggatggtaatgtggtaaattgagggtttaaagtcttctttgtgccattttacagaggaaattgctgatacaggggatggaaggtctgaagttcttgtttatttttaccaatttatgtttctttcctttccatcacgtaggatcctaatcctggtaacctgtaaggatatttgcctgtgctccactttcaatcatattagcttgcaggctcctttgtataatttattgaatcaattttgtagcttgttttgtgcaaatgcatgtatatggataactcaattgttttgaacaaaaaaaaaaaaaaaa

SEQ ID NO: 2230 - protein, 303 aa, Glycine max
  misc_feature: Ceres CLONE ID no. 614725
  misc_feature: Ceres CDNA ID no. 40041265
  misc_feature (69)..(261): Pfam Name: Ribosomal_L4 PFAM Desc: Ribosomal protein L4/L1 family
  misc_feature: Homolog of GI Number: 2792007 NR Desc: chloroplast ribosomal protein L4
  misc_feature: Homolog of GI Number: 30680078 NR Desc: 50S ribosomal protein L4
  misc_feature: Homolog of GI Number: 2792020 NR Desc: ribosomal protein L4
  misc_feature: Homolog of GI Number: 8778555 NR Desc: F22G5.34
  misc_feature: Homolog of GI Number: 21537296 NR Desc: ribosomal protein L4
  misc_feature: Homolog of GI Number: 2791998 NR Desc: ribosomal protein L4
  misc_feature: Homolog of GI Number: 6919958 NR Desc: 50S ribosomal protein L4
  misc_feature: Homolog of GI Number: 45507567 NR Desc: COG0088: Ribosomal protein L4
  misc_feature: Homolog of GI Number: 32307492 NR Desc: ribosomal protein rpL4
  misc_feature: Homolog of GI Number: 50843317 NR Desc: 50S ribosomal protein L4
MASLSLSTPTSLSFASSSIFFSSRQFHTFSSSKSNNKFPILPSKKPLSISCKASPPLPVLNFSGERVGESFLDLRSAPPDTARAVVHRAVVTDLQNKRRGTASTLTRGEVRGGGRKPFPQKKTGRARRGSNRTPLRPGGGVVFGPKPRDWSIKINRKEKRLAISTAVASAAASAVVVEDFATEFAEKPKTKEFIAAMKRWGLDPKEKAMFLMTEVPENVRLSSRNIGTLKMHTPRTLNLYDILDADKLVLTQGAVDYLNQRYGGDYEGSDDEDEEEEEYEEGEEEGAVNGEEGPDEEDGNVVN

SEQ ID NO: 2231 - DNA, 967 bp, Glycine max
  misc_feature: Ceres CLONE ID no. 614864
  misc_feature: Ceres CDNA ID no. 36703495
  CDS (44)..(784): REFERENCED BY SEQ ID NO: 2232
agtgaaggaaaactctctctctctcaaaaagagaatcttcaaaatgtcaatcacaacaggaatatgtcaagtagttgctgtttcattgcttttgggattactgagtgtgtattccttggaatgtgatgatgatcgctgcaaaactgggctgtgcaacaacactggtgcctgcatttgcaacctccctgatccttccaccatcttgaatggtgatagaactttcttcggggggaagttttgtgacgaagaaatgaccatgtgtgatgggacaaactccttctggtgtgaacatggggcaacttgtgaggagattgttcaaggagagaagtactcttgcaaatgtcccctaggatttgctggggagcattgtgagcattctggagcaccctgtggtcatactttttgtttccataatgctgaatgcttggctgaaacaggtgatgtttgccagtgcccttctgaatggaaaggcagtgctgattgctctcttccaaccacaccaacagatttttactcaatttcaactgacacaaaatcatctaaagtcagcagcagcagtgactccaataaggcactggctgtcttggcagtttcttcagtgggaggagctgctgctggtgccatttatggcaagaaactattcaacaagaaaaaaagagaggcaaggttccagcaattatctgaaatgcagactcaagggatattggatgatgatggtgatgaggaggatgaaaaccacaatatggtaccccaaagggtccatggtgatatttcacacaattagtgggcacttccttttccagcatcagaacattttagcactcttagctcaagtagttttttttgtcagttttcataattggcagtagcattttatttggtaagcttgagtagtactaatatttatatgattgtgcttaataaaaagatggcatgcaagcacatttttctaaaaaaaaaaaaaaaa

SEQ ID NO: 2232 - protein, 246 aa, Glycine max
  misc_feature: Ceres CLONE ID no. 614864
  misc_feature: Ceres CDNA ID no. 36703495
  misc_feature (27)..(66): Pfam Name: EGF PFAM Desc: EGF
  misc_feature: Homolog of GI Number: 18858543 NR Desc: deltaB
  misc_feature: Homolog of GI Number: 73967531 NR Desc:  similar to notch1 preproprotein
  misc_feature: Homolog of GI Number: 31339069 NR Desc: transmembrane receptor Notch1 B
  misc_feature: Homolog of GI Number: 31543332 NR Desc: Notch gene homolog 1
  misc_feature: Homolog of GI Number: 288503 NR Desc: notch
  misc_feature: Homolog of GI Number: 31339070 NR Desc: transmembrane receptor Notch1 D
  misc_feature: Homolog of GI Number: 31339071 NR Desc: transmembrane receptor Notch1
  misc_feature: Homolog of GI Number: 61811985 NR Desc:  similar to Neurogenic locus notch homolog protein 2 precursor
  misc_feature: Homolog of GI Number: 112074 NR Desc: notch protein homolog
  misc_feature: Homolog of GI Number: 3123675 NR Desc: rat notch protein
MSITTGICQVVAVSLLLGLLSVYSLECDDDRCKTGLCNNTGACICNLPDPSTILNGDRTFFGGKFCDEEMTMCDGTNSFWCEHGATCEEIVQGEKYSCKCPLGFAGEHCEHSGAPCGHTFCFHNAECLAETGDVCQCPSEWKGSADCSLPTTPTDFYSISTDTKSSKVSSSSDSNKALAVLAVSSVGGAAAGAIYGKKLFNKKKREARFQQLSEMQTQGILDDDGDEEDENHNMVPQRVHGDISHN

SEQ ID NO: 2233 - DNA, 784 bp, Glycine max
  misc_feature: Ceres CLONE ID no. 614880
  misc_feature: Ceres CDNA ID no. 35383222
  CDS (68)..(394): REFERENCED BY SEQ ID NO: 2234
gaaaataattgagaagataaagaagcatcaagcatacacacacaaccacctcaaaaagaagaagaacatgtcaaactccacacaaatggaaaaggatctcacaatgacagtgcagcgatcctcttacttccccaggtgcatgatgtccccttcgtgcttgccaatccacaacgagtacgagtactcgcgaatccactacaaccccagaaagagggtgagaaggtggaggaacatcctcagaaggttcatgagggagagcaagaccttgtgtagatccaaacctatgtcatttcaatatgatcctgttagctactcccagaacttcgatgagggctgccatcttgatgaacctaggccagggttgcaagatgttaagtgggattcacatcattgattttgtgtaactgtggttattacatgtttaggcttgaatgtaagaaggacaatgaaatagccttttatttttgacacatgggaggttttagttactgtatggtacaactacaaagaaattaattcttctttaagtttgtatatggtgtatctcattcatactttttcgtaataccaaagttctgttaattgaaaattaatgtctttttgtatatatggtggatctaccagtagtactgatgtagtgatgccatttacttttcttactttactgtgcaatcttttgattgctgcaattctgtttgtgttaatgtgtagtgctgctgtgttctattggttggattctcaaatgaaaaattgaagcagtgcttggttaaaaaaaaaaaaaaaa

SEQ ID NO: 2234 - protein, 102 aa, Glycine max
  misc_feature: Ceres CLONE ID no. 614880
  misc_feature: Ceres CDNA ID no. 35383222
MEKDLTMTVQRSSYFPRCMMSPSCLPIHNEYEYSRIHYNPRKRVRRWRNILRRFMRESKTLCRSKPMSFQYDPVSYSQNFDEGCHLDEPRPGLQDVKWDSHH

SEQ ID NO: 2235 - DNA, 709 bp, Glycine max
  misc_feature: Ceres CLONE ID no. 614920
  misc_feature: Ceres CDNA ID no. 29191862
  CDS (47)..(541): REFERENCED BY SEQ ID NO: 2236
aggtttttagggtttacactgaggaggcacaccttcaggagcagtcatggttctcaaaaccgagctgtgccgattcagcggtgccaagatctacccagggaaaggcatcagatttgttcgtggtgattctcaggttttcctgtttgctaactcaaaatgtaagaggtatttccacaacaggttgaagccgtcaaagctcacgtggactgcaatgtaccgaaagcagcataagaaggatattgctcaagaagctgtgaagaagagaagacgtgctaccaaaaaaccttactctaggtctattgttggtgctactttagaagttatccagaaaaagagaaccgagaagccagaagttcgagatgcagctagggaagcacagcttcgtgaaattaaggagaggatcaagaaaactaaggatgacaagaaagctaagaaagcagaagttgcagctaagtcccaaaaatcacaagggaaaggaagtatttcgaagggtgccatgcccaaaggtcccaaacttggtgggggaggtgggaaacgctgagcttttaagttttgttcttatttttggctacaatttaaatagagctgttttgaaacttctgtactgatattttatttgcatgattaatatgttttattaaaaaacccatgtttggagcttctgaagttaccttttattgaattaattctgtcaaaaaaaaaaaaaaaa

SEQ ID NO: 2236 - protein, 164 aa, Glycine max
  misc_feature: Ceres CLONE ID no. 614920
  misc_feature: Ceres CDNA ID no. 29191862
  misc_feature (3)..(73): Pfam Name: Ribosomal_L24e PFAM Desc: Ribosomal protein L24e
  misc_feature: Homolog of GI Number: 2961300 NR Desc: ribosomal protein L24
  misc_feature: Homolog of GI Number: 10180025 NR Desc: 60S ribosomal protein L24
  misc_feature: Homolog of GI Number: 21553461 NR Desc: 60S ribosomal protein L24
  misc_feature: Homolog of GI Number: 1154859 NR Desc: L24 ribosomal protein
  misc_feature: Homolog of GI Number: 56785063 NR Desc: putative 60S ribosomal protein L24
  misc_feature: Homolog of GI Number: 50931851 NR Desc: putative 60S ribosomal protein L24
  misc_feature: Homolog of GI Number: 34900364 NR Desc: putative 60S ribosomal protein L24
  misc_feature: Homolog of GI Number: 25295112 NR Desc: 60S ribosomal protein L24
  misc_feature: Homolog of GI Number: 82400154 NR Desc: ribosomal protein L24
  misc_feature: Homolog of GI Number: 30102870 NR Desc: At3g53020
MVLKTELCRFSGAKIYPGKGIRFVRGDSQVFLFANSKCKRYFHNRLKPSKLTWTAMYRKQHKKDIAQEAVKKRRRATKKPYSRSIVGATLEVIQKKRTEKPEVRDAAREAQLREIKERIKKTKDDKKAKKAEVAAKSQKSQGKGSISKGAMPKGPKLGGGGGKR

SEQ ID NO: 2237 - DNA, 937 bp, Glycine max
  misc_feature: Ceres CLONE ID no. 615044
  misc_feature: Ceres CDNA ID no. 35383223
  CDS (132)..(551): REFERENCED BY SEQ ID NO: 2238
attccttccttccttcctcaacccaacccaatcttcaccttcgcccacaacaaatcccattcctgcatctcctccttcagcatcgctgcaaactttactttccatttttgtccttcctccccgagaaaaaaatggcgaacgcagcatctggtatggccgtccatgatgactgcaagctaaagtttttggagctcaaggcgaagaggacgtaccggtttatcgtttttaagattgaggagaagcagaagcaagttattgtggagaagctgggtgagcctgcaaatggttatgatgatttcgctgccagtcttcctgccgacgagtgtcgatatgctgtttatgattttgattttgtcactgaagagaattgccaaaagagcagaattttcttcattgcttggtcccctgatacatctagggttaggagcaagatgatttatgccagctccaaagatagattcaagagggagcttgatgggattcagattgagctgcaagcaactgatcctactgagatgggtcttgatgtgttcaaaagccgtgccaattaaatgattctgattatgcataataggagttgtgatggggatggtcaacttggctaatttggactcaattttccaagttttgacatgaggtctatagcagcttcaacaaagcttttcttgttccagtgtatcttgtggtttgtgacatataacccgtgtttgggtgtcatcttagccctattcctactagttaattttgtaactgttctttgtgtgattggacgaaaatttgggatcaggtattgatgtaatattgccagttgccatcttattaatgtcttgtgacttaaattaactaaaatactttcttgaaaacaatttaatacctactatgtcatccataacaaaatggaggggtaagttttgtggatgcaaaaaaaaaaaaaaaa

SEQ ID NO: 2238 - protein, 139 aa, Glycine max
  misc_feature: Ceres CLONE ID no. 615044
  misc_feature: Ceres CDNA ID no. 35383223
  misc_feature: The plant senesces significantly late copared to wild-type.
  misc_feature: Useful for making plants with modulated time to senescence
  misc_feature (12)..(139): Pfam Name: Cofilin_ADF PFAM Desc: Cofilin/tropomyosin
  misc_feature: Homolog of GI Number: 68166241 NR Desc: actin depolymerizing factor
  misc_feature: Homolog of GI Number: 14906210 NR Desc: actin
  misc_feature: Homolog of GI Number: 14906219 NR Desc: actin
  misc_feature: Homolog of GI Number: 21536985 NR Desc: actin depolymerizing factor 4
  misc_feature: Homolog of GI Number: 17065584 NR Desc: putative actin depolymerizing factor 1
  misc_feature: Homolog of GI Number: 23198338 NR Desc: actin depolymerizing factor 2
  misc_feature: Homolog of GI Number: 4185511 NR Desc: actin depolymerizing factor 4
  misc_feature: Homolog of GI Number: 15810613 NR Desc: putative actin depolymerizing factor 3
  misc_feature: Homolog of GI Number: 19699262 NR Desc: At1g05180/YUP8H12_21
  misc_feature: Homolog of GI Number: 38564721 NR Desc: putative actin
MANAASGMAVHDDCKLKFLELKAKRTYRFIVFKIEEKQKQVIVEKLGEPANGYDDFAASLPADECRYAVYDFDFVTEENCQKSRIFFIAWSPDTSRVRSKMIYASSKDRFKRELDGIQIELQATDPTEMGLDVFKSRAN

SEQ ID NO: 2239 - DNA, 740 bp, Glycine max
  misc_feature: Ceres CLONE ID no. 615046
  misc_feature: Ceres CDNA ID no. 25891993
  CDS (75)..(416): REFERENCED BY SEQ ID NO: 2240
attcttcattgcaagttttccgcacaactctttcacctcttgttttccccaatccttttcgcctttgtctgcgaatggcgtcgttcgatcaggcacctcccggcgatgtcaaatccggtgacaaaatcttcaggaccaagtgcgctcagtgccacaccgtcgaaaaaggtgccggtcacaagcaaggacccaatctgaatggtttgtttggaaggcaatctggcacaactcccggatattcctactcttcagctaacaagaacatggctgtgacttgggaagaaaagacactatacgattacttgcttaaccccaaaaagtatattccagggacaaagatggtatttcctggtcttaagaagcctcaggaacgtgctgatcttattgcatatctgaaagaatccactgcacagtgattatgcactttcatacattcaattttgcagcgtgctttcaaatttctggagatttaattttcggtcatttagttctgtcatgcaggaagtgctgtatctttggctaataatgtaggctacattggtctgcaatgctattttgttcattttgcattgcttctgaaaaaaaaacagccgaatattggctatatctcttgaaaattgaaacattcttatcagcatttgatttaattggaccacagttcattattatgcttaaaaaaaaaaaaaaaaaaaaaaaaaaaaaaaaaaaaaaaaaaaaaaaaaagaaaaaaaaaaaaaaaa

SEQ ID NO: 2240 - protein, 113 aa, Glycine max
  misc_feature: Ceres CLONE ID no. 615046
  misc_feature: Ceres CDNA ID no. 25891993
  misc_feature (13)..(111): Pfam Name: Cytochrom_C PFAM Desc: Cytochrome c
  misc_feature: Homolog of GI Number: 19310747 NR Desc: putative cytochrome c protein
  misc_feature: Homolog of GI Number: 118022 NR Desc: Cytochrome c
  misc_feature: Homolog of GI Number: 118013 NR Desc: Cytochrome c
  misc_feature: Homolog of GI Number: 117952 NR Desc: Cytochrome c
  misc_feature: Homolog of GI Number: 117976 NR Desc: Cytochrome c
  misc_feature: Homolog of GI Number: 21592717 NR Desc: putative cytochrome C
  misc_feature: Homolog of GI Number: 53982673 NR Desc: putative cytochrome c
  misc_feature: Homolog of GI Number: 118016 NR Desc: Cytochrome c
  misc_feature: Homolog of GI Number: 117968 NR Desc: Cytochrome c
  misc_feature: Homolog of GI Number: 51317000 NR Desc: Cytochrome c
MASFDQAPPGDVKSGDKIFRTKCAQCHTVEKGAGHKQGPNLNGLFGRQSGTTPGYSYSSANKNMAVTWEEKTLYDYLLNPKKYIPGTKMVFPGLKKPQERADLIAYLKESTAQ

SEQ ID NO: 2241 - DNA, 889 bp, Glycine max
  misc_feature: Ceres CLONE ID no. 615080
  misc_feature: Ceres CDNA ID no. 29191863
  CDS (122)..(616): REFERENCED BY SEQ ID NO: 2242
gacttggcggggtccactcaagaaacttccctttggtttggtccaaaaaaacgaagcctgagacggaagaggcaaagcaaataagcagtaatagatctgactctgattttcagaaagcaaaatgcctggtttcagcggcgatgaaactgctccgttcttcggcttcctgggcgcggcggccgccctagtattctcctgtatgggagcggcgtacggcacggccaagagcggggtcggcgttgcgtcgatgggcgtcatgagaccggagctggtcatgaaatccatcgtcccggttgttatggccggagtgttgggaatctacggcttgatcatcgccgtcatcatcagcaccggtattaaccctaaggccaaatcctattacctcttcgacggctacgctcacctctcctccggcctcgcttgcggcctcgctggcctctccgctggcatggccattggcattgttggcgatgccggtgttagagcaaatgcccaacagccaaagctttttgttgggatgattctcattctcatctttgctgaggcgttggcattgtatggactcattgttggcatcatcctctcttcacgtgctggccaatccagagctgattagtataaaatttcctgtttgctgcgcacagaaccatgaattggatggtgaatgtcgccggggactaggtcatgttaagagtgtagctttgtgatgctctgcatccgtcttatgataaaattgaggttatcctgaaataaagtgtctcaaacgatttattttccatttattgtatttaatttgagtccaaactagattagagatctctgtaataaaacatgtttgtgtttatttcaataacatttagtattgtgtcgtagaaaaaaaaaaaaaaaa

SEQ ID NO: 2242 - protein, 164 aa, Glycine max
  misc_feature: Ceres CLONE ID no. 615080
  misc_feature: Ceres CDNA ID no. 29191863
  misc_feature (92)..(157): Pfam Name: ATP PFAM Desc: ATP synthase subunit C
  misc_feature: Homolog of GI Number: 6164957 NR Desc: vacuolar H+
  misc_feature: Homolog of GI Number: 2502087 NR Desc: adenosine triphosphatase
  misc_feature: Homolog of GI Number: 20466147 NR Desc: At1g75630/F10A5_17
  misc_feature: Homolog of GI Number: 3334412 NR Desc: Vacuolar ATP synthase 16 kDa proteolipid subunit
  misc_feature: Homolog of GI Number: 4519260 NR Desc: vacuolar H+
  misc_feature: Homolog of GI Number: 4519262 NR Desc: vacuolar H+
  misc_feature: Homolog of GI Number: 30144705 NR Desc: vacuolar H
  misc_feature: Homolog of GI Number: 21592721 NR Desc: vacuolar H+
  misc_feature: Homolog of GI Number: 1429264 NR Desc: subunit c of V
  misc_feature: Homolog of GI Number: 52851178 NR Desc: vacuolar H+
  misc_feature: Useful for making plants with altered leaf shape eg curled leaves
  misc_feature: Useful for making plants with increased biomass and foliage
  misc_feature: Useful for modifying fruit shape and seed yield
  misc_feature: Useful for sterility
MPGFSGDETAPFFGFLGAAAALVFSCMGAAYGTAKSGVGVASMGVMRPELVMKSIVPVVMAGVLGIYGLIIAVIISTGINPKAKSYYLFDGYAHLSSGLACGLAGLSAGMAIGIVGDAGVRANAQQPKLFVGMILILIFAEALALYGLIVGIILSSRAGQSRAD

SEQ ID NO: 2243 - DNA, 1521 bp, Triticum aestivum
  misc_feature: Ceres CLONE ID no. 615135
  misc_feature: Ceres CDNA ID no. 24727262
  CDS (82)..(1089): REFERENCED BY SEQ ID NO: 2244
cccgtttgaggtttgacctctccccagctccagagccccgcaagtctccccctcctcccctcgcgacgaccgtcgccggcaatggcggccgcctcggaggaggccatcaagcagttctccgtgctcatggagcagttggaggagcccctcaagaccacattccagaatgtgcaccaaggatatccaagagggactctgctgcgctttctcaaggccagagaatggaacgttccgaaagcatataaaatgctaatggattgcttgaattggaggcttcagaatgagattgacagcgttctagctaaaccaatattgcccgctgatttgtatagatctattcgtgatacactgcttgttggattaacaggatattccaagcagggtcaacctgtctatgcatttggtgttgggctcagtacctttgacagagcatcggtgaactactatttgcagtctcacatacagatgaatgagtatcgagatcgtgttgtcctgccaggtgcatctgagatgtccggaaaacagattaacacctgcttgaaagttatggatatgactggcctgaagctttctgctttgaaccaaataaagatgttgagcacgataacagctgttgatgacctcaattatcctgagaaaaccgagacgtattacattgtgaacgctccatatgttttttcggcatgttggaaggttgtgaagcctcttttacaagagcgaactaaaaagaagatcaaagtcttgtatggccctggaagagatgaattactgaaggttatggactacgcgtcactcccgcacttctgcaagagggaagggtccggttcgggttcgtcgtcggatgaagtcgactgctactcgtatgatcatccattccaccaggagctgtacaactatgtgaagcagcaagctctgaggaaccaggacagcgtcggccccgcgaagcaagggtcgatgcatgtgagggtgccgacgccggacctggaggaggccaagatcatggagacgatccagtcggagctccacaacctcaaggggggcgacggcatttcccgctccttcagcaggatcaccatcgaaggtccatgatatcttatttcctgctcgtatccaagatcgtcgtggatgtgatccatgatgatcggagtgcctcgagatgcgcggagcaggtaatcgcttattttatcttatttgacgccagaagattattctggggtttataacggttcttgcttgcgttgtaaccgctggctgcaaagctcgagtaggatcatatcagtagaggaagtagcagcagtagcatcggattctaataaccgagtgagtctgtatcgtggtgtcgaagatggtagtaattagtttgattaacctgtctaatggatgtaccatttgcgagttactgtttccatgcttctcatggcagggaaattgccatgctcccagacatgagtaacaccagcactatgtatcggaccaatcagtatatagtatatgtatgtatatgtaaaaaaaaaaaaaaaa

SEQ ID NO: 2244 - protein, 335 aa, Triticum aestivum
  misc_feature: Ceres CLONE ID no. 615135
  misc_feature: Ceres CDNA ID no. 24727262
  misc_feature (135)..(239): Pfam Name: CRAL_TRIO PFAM Desc: CRAL/TRIO domain
  misc_feature (32)..(69): Pfam Name: CRAL_TRIO_N PFAM Desc: CRAL/TRIO
  misc_feature: Homolog of GI Number: 51963722 NR Desc: PREDICTED P0523B07.38
  misc_feature: Homolog of GI Number: 2739044 NR Desc: polyphosphoinositide binding protein Ssh1p
  misc_feature: Homolog of GI Number: 50906041 NR Desc: putative SEC14 cytosolic factor
  misc_feature: Homolog of GI Number: 19310517 NR Desc: At1g55840/F14J16_2
  misc_feature: Homolog of GI Number: 8778303 NR Desc: F14J16.8
  misc_feature: Homolog of GI Number: 51091383 NR Desc: putative phosphatidylinositol
  misc_feature: Homolog of GI Number: 14532536 NR Desc: AT5g47730/MCA23_5
  misc_feature: Homolog of GI Number: 45549582 NR Desc: Sec14
  misc_feature: Homolog of GI Number: 45549579 NR Desc: Sec14
  misc_feature: Homolog of GI Number: 42565169 NR Desc: SEC14 cytosolic factor
MAAASEEAIKQFSVLMEQLEEPLKTTFQNVHQGYPRGTLLRFLKAREWNVPKAYKMLMDCLNWRLQNEIDSVLAKPILPADLYRSIRDTLLVGLTGYSKQGQPVYAFGVGLSTFDRASVNYYLQSHIQMNEYRDRVVLPGASEMSGKQINTCLKVMDMTGLKLSALNQIKMLSTITAVDDLNYPEKTETYYIVNAPYVFSACWKVVKPLLQERTKKKIKVLYGPGRDELLKVMDYASLPHFCKREGSGSGSSSDEVDCYSYDHPFHQELYNYVKQQALRNQDSVGPAKQGSMHVRVPTPDLEEAKIMETIQSELHNLKGGDGISRSFSRITIEGP

SEQ ID NO: 2245 - DNA, 1054 bp, Triticum aestivum
  misc_feature: Ceres CLONE ID no. 615259
  misc_feature: Ceres CDNA ID no. 24765987
  CDS (49)..(822): REFERENCED BY SEQ ID NO: 2246
ccaccgattccgccggcgggactcctgtccgggaaacgccgatctagaatggcggccaacttctggacgtcgtcgcacagcaagcagctgctggacccggaggaggtggacgtggtgccggcgcaagaccgggagcggggcgtcacgcccgtggagttccgcctcgtcaagatccacatgtccttccatatatggcggttggcccagcaggtcaaagttagacaaagagtcatagctactgcaatcacgtacttcaggtgtgtgtacacaagaaagagcatgacagagtatgatcctcgtttggtagcaccagcttgtttgtatttggcatcaaaggtagaggaaagcacagtgcaagcaaggcttcttgtattttacataaagaagatgtgtggttcggatgacaagtaccgatttgaaatcaaagatatccttgaaatggaaatgaagctcctggaagcacttgactattatttggttgtttaccatccataccgtcctcttctacagttattgcaggatgctggcataacagatctgacacaatttgcctggggcctcgtcaatgatacttacaagatggatctcattctcatatatcctccttatatgattgcattggcctgcatatacattgcaagcgttcttaaagataaggacacaacctcatggtttgaagaactccgtgttgacatgaacattgttaagaatatctcaatggaaatcttggacttctacgacacctacaagattgatcctcaaaggggcctccaggaggataagatcatccctgtgatgaacaagttgccatcaaaggcctgaaggccgatttgacacctgaccatttaaccaccttacaccgcctcatctggattgtgtaaccccgtagccctgaacatcttcggaggcgagagatccagggaatggcatcaaattgttaggcgccgcgatggcaatcccaatgttagggggttatctgtaatacttaagcatctgatttctgtatcatacaaaacccaagtggaattgtttcaacttgaaaaaaaaaaaaaaa

SEQ ID NO: 2246 - protein, 257 aa, Triticum aestivum
  misc_feature: Ceres CLONE ID no. 615259
  misc_feature: Ceres CDNA ID no. 24765987
  misc_feature (4)..(144): Pfam Name: Cyclin_N PFAM Desc: Cyclin
  misc_feature: Homolog of GI Number: 7489457 NR Desc: C
  misc_feature: Homolog of GI Number: 21554107 NR Desc: cyclin C
  misc_feature: Homolog of GI Number: 10177354 NR Desc: cyclin C
  misc_feature: Homolog of GI Number: 42568400 NR Desc: cyclin family protein
  misc_feature: Homolog of GI Number: 28828497 NR Desc: similar to Mus musculus
  misc_feature: Homolog of GI Number: 52632418 NR Desc: Ccnc protein
  misc_feature: Homolog of GI Number: 71679932 NR Desc: Ccnc protein
  misc_feature: Homolog of GI Number: 73973596 NR Desc:  similar to Cyclin C isoform 1
  misc_feature: Homolog of GI Number: 73973584 NR Desc:  similar to Cyclin C isoform 2
MAANFWTSSHSKQLLDPEEVDVVPAQDRERGVTPVEFRLVKIHMSFHIWRLAQQVKVRQRVIATAITYFRCVYTRKSMTEYDPRLVAPACLYLASKVEESTVQARLLVFYIKKMCGSDDKYRFEIKDILEMEMKLLEALDYYLVVYHPYRPLLQLLQDAGITDLTQFAWGLVNDTYKMDLILIYPPYMIALACIYIASVLKDKDTTSWFEELRVDMNIVKNISMEILDFYDTYKIDPQRGLQEDKIIPVMNKLPSKA

SEQ ID NO: 2247 - DNA, 1639 bp, Triticum aestivum
  misc_feature: Ceres CLONE ID no. 615281
  misc_feature: Ceres CDNA ID no. 40351098
  CDS (145)..(1296): REFERENCED BY SEQ ID NO: 2248
attgagacgagacgagaggaggagaggtgtatctctgcccggccacccaagccaagcccctcccgaatctctctctcctcccctaccattgccttgccccccgctccccctcccccacgcacacgcacagatccatccgcggccatggcccccgcaatgaggccggagcaggaggcgagctgcaaggccaccgaggaccaccgctccgagttcgacgccgccaagccgccgcccttccgcatcggcgacgtccgcgccgccgtgccggcccactgctggcgcaagagccccctgcgctccctctcctacgtcgcccgcgacgtcgccgtcgtggcggcgctggccgccgccgcgtggcgggccgacagctgggccctctggccgctctactgggccgtccagggcaccatgttctgggcgctcttcgtcctcggacacgactgtggtcacgggagcttctcggacagcggcacgctcaacagcgtcgtcggccacctgctgcacacatttattctcgtcccgtacaatggctggaggatcagccacagaacgcaccatcagaaccatggccacatcgaaaaggacgagtcatggcacccgatcactgagaaggtgtaccagaaattggaaccacggacaaagacactgcgcttctcagtaccgttcccactgctggctttccctgtttacctctggtacagaagcccgggcaaggagggctcacacttcaatccgagcagcgatctgtttactcccaaggagaggcgtgatgtgatcatctccaccacctgctggttcacgatgattgcgctgctcatcggcatggcgtgtgtctttggcctggtaccggtgctcaagctgtacggggttccatatattgtgaatgtcatgtggcttgatttggtgacgtatcttcaccaccatggtcaccaggacctcccatggtaccgcggcgaggaatggagctacctccgtggtggcctgacgaccgtggatcgggactatggatggatcaataacatccaccatgacattggcacccatgtcatccaccacctcttcccccaaatacctcactaccacctagtagaagcaaccaaggcagcaaggccagtactgggcagatactaccgggagccagagaagtcaggcccgcttccaatgcacctcatcaccgtcctcctcaagagcttgagagtcgatcactttgtcagcgacgtgggagatgtcgtcttctaccaaaccgaccccagcttgagcggcgacaagtggaccggaaccgacaagcagaagtgatgagagactggaaactgaagttactactgttcaaggaagaatgcatgatagagatagagacatcgatagcctgctgagaataagcagagggtgcttccagctgaaaccaaagcatggaagctccgcagccaacaaacaggatgcgttgattggttcatcatgagacgagattcagatcatttattagatctagcattctcccattgcggttgtaactagcagatgttgtttcaactttattacaaattttgaatggaatgcggaacagtgtaacagattgattaattattatccaaatcgatattctggaatctgtgacccctttttctgaaaaaaaaaaaaa

SEQ ID NO: 2248 - protein, 383 aa, Triticum aestivum
  misc_feature: Ceres CLONE ID no. 615281
  misc_feature: Ceres CDNA ID no. 40351098
  misc_feature (82)..(325): Pfam Name: FA_desaturase PFAM Desc: Fatty acid desaturase
MAPAMRPEQEASCKATEDHRSEFDAAKPPPFRIGDVRAAVPAHCWRKSPLRSLSYVARDVAVVAALAAAAWRADSWALWPLYWAVQGTMFWALFVLGHDCGHGSFSDSGTLNSVVGHLLHTFILVPYNGWRISHRTHHQNHGHIEKDESWHPITEKVYQKLEPRTKTLRFSVPFPLLAFPVYLWYRSPGKEGSHFNPSSDLFTPKERRDVIISTTCWFTMIALLIGMACVFGLVPVLKLYGVPYIVNVMWLDLVTYLHHHGHQDLPWYRGEEWSYLRGGLTTVDRDYGWINNIHHDIGTHVIHHLFPQIPHYHLVEATKAARPVLGRYYREPEKSGPLPMHLITVLLKSLRVDHFVSDVGDVVFYQTDPSLSGDKWTGTDKQK

SEQ ID NO: 2249 - DNA, 736 bp, Triticum aestivum
  misc_feature: Ceres CLONE ID no. 615310
  misc_feature: Ceres CDNA ID no. 35383224
  CDS (67)..(471): REFERENCED BY SEQ ID NO: 2250
cggcctacccaccccctgccgctccctgcctagggttttgagtcccgcccccctccgccgcgcaccatgggccccgacgagctccccaaggccgccgccgccggtgccgaggaggccgccccgttctccttcagcatctggccgccgacgcagcggacgcgggacgccgtggtgcggcgcctggtggacacgctggccggcgacaccctcctctgcaagcgctacggcgccgtgccggccgccgacgccgagcccgccgcgcgggccatcgaggccgaggccttcgacgccgccgccgtcaccggcggggccgccgcctccgtcgaggagggcatcgaggcgctgcagctctactccaaggaggtcagccgccgcctcctcgacttcgtcaagtcccgctccgccgccgccaaggccgagccgccggccgaggaggcgctcgccgtcaaggaggagacctcccaggcctgagccccggacgagaaccgttcgtttcgattatgcttcgagataaaattcatttgcatctagagttcgtgtgcggcgttggcctctgcttgggatgagttgcctgtaggttgttcgcgtgcctgtgctgttattgttctttcagtagctgctggttacctttttttttagtgtgttcgtttattacttccgtttgtatctgtgaacaagaattatcttcaccttgtcgtggcaatgatccaagatttgaccgaaaaaaaaaaaaaaa

SEQ ID NO: 2250 - protein, 134 aa, Triticum aestivum
  misc_feature: Ceres CLONE ID no. 615310
  misc_feature: Ceres CDNA ID no. 35383224
  misc_feature: Homolog of GI Number: 7546727 NR Desc: MFP1 attachment factor 1
  misc_feature: Homolog of GI Number: 50938911 NR Desc: putative MFP1 attachment factor 1
  misc_feature: Homolog of GI Number: 7546735 NR Desc: MFP1 attachment factor 1
  misc_feature: Homolog of GI Number: 7546729 NR Desc: MFP1 attachment factor 1
  misc_feature: Homolog of GI Number: 78708241 NR Desc: retrotransposon protein
  misc_feature: Homolog of GI Number: 7546725 NR Desc: MFP1 attachment factor 1
  misc_feature: Homolog of GI Number: 7546731 NR Desc: MFP1 attachment factor 1
  misc_feature: Homolog of GI Number: 14253159 NR Desc: VMP3 protein
  misc_feature: Homolog of GI Number: 21992 NR Desc: extensin
MGPDELPKAAAAGAEEAAPFSFSIWPPTQRTRDAVVRRLVDTLAGDTLLCKRYGAVPAADAEPAARAIEAEAFDAAAVTGGAAASVEEGIEALQLYSKEVSRRLLDFVKSRSAAAKAEPPAEEALAVKEETSQA

SEQ ID NO: 2251 - DNA, 667 bp, Triticum aestivum
  misc_feature: Ceres CLONE ID no. 615338
  misc_feature: Ceres CDNA ID no. 40351099
  CDS (92)..(502): REFERENCED BY SEQ ID NO: 2252
aacacctcgaaccccagcgcaaatcctccagtcctcccacctcgcgcccccaacccgatccctcgtcctctccacctccgccgaaaccgtcatggcgcccaaggccgagaagaagcccgccgcggagaagaagccggtggagacggagaagaagcccaaggccgagaagcgcgtgcccggcaaggacggcggcgccgacaagaagaagaagaaggccaagaagagcgtcgagacgtacaagatctacatcttcaaggtgctcaagcaggtgcaccccgacatcggcatctcctccaaggccatgtccatcatgaactccttcatcaacgacatcttcgagaagctcgccggcgagtcggccaagctggcgcgctacaacaagaagcccaccatcacctcccgggagatccagaccgccgtgcgcctcgtcctccccggcgagctcgccaagcacgccgtctccgagggcaccaaggccgtcaccaagttcacctcctcctagattgctgccgtccgtccgagtctgtttctgatggtctggtctgaatttgttcccgtgttaaaacatattacagggggttagattcccctatcgaacagtgtaaaatgagtccaatttgctgaatcaaagaatcatccagtggttgttgcaaaaaaaaaaaaaaaa

SEQ ID NO: 2252 - protein, 136 aa, Triticum aestivum
  misc_feature: Ceres CLONE ID no. 615338
  misc_feature: Ceres CDNA ID no. 40351099
  misc_feature: No seed is being produced by the plant
  misc_feature: The plant flowers significantly late compared to wild-type.
  misc_feature: Useful for biocontainment applications
  misc_feature: Useful for making plants with modulated flowering time
  misc_feature (43)..(115): Pfam Name: Histone PFAM Desc: Core histone H2A/H2B/H3/H4
MAPKAEKKPAAEKKPVETEKKPKAEKRVPGKDGGADKKKKKAKKSVETYKIYIFKVLKQVHPDIGISSKAMSIMNSFINDIFEKLAGESAKLARYNKKPTITSREIQTAVRLVLPGELAKHAVSEGTKAVTKFTSS

SEQ ID NO: 2253 - DNA, 742 bp, Triticum aestivum
  misc_feature: Ceres CLONE ID no. 615344
  misc_feature: Ceres CDNA ID no. 35383225
  CDS (3)..(740): REFERENCED BY SEQ ID NO: 2254
acaccaccaaagcccaccaagcctcaaacgcccacgttggagcagtagcagcagcacagagccagagccaaccagccgttcgatcgtccaacgcagacggatccgatggccctcgctctctccggctccgctgctgcccgcgcgctcgcccagcggctggccccggccaccgccaggggctacgcggcggcggcctcctccggggcgatgaggcgcggcgccgcggcggccgcggacgggaaggcggccagggaggccgagaaggccgcggccgacgcctcgtgggtgcccgaccccgtcaccggccactaccgccccgccaaccgcgccgccggcgccgaccccgccgacctccgcgccgcgcacctcggacagacctacgcacgggcctgaagcccggctccactcgaccctcctggtcccgccatggaaaacagaactgctaccgctacgtaacgagggaagatagggaagaggcaggcggggctcgttcgccgcgcgcggctgtgcggcttcacgacgcatctcatcatcatcgatcctatactacgggggagatgcggcctggacgtttggctgtttcccattgtgtttgtgtgcgtgcgtgcgtgcgtctgggcttggatgctcagatcagatgtatttttggtcgagcagggcttgtaccttttacttttacagttaggtattataataacaaaagaatccagcgtttttcttgttccgaaaaaaaaaaaaaaaa

SEQ ID NO: 2254 - protein, 95 aa, Triticum aestivum
  misc_feature: Ceres CLONE ID no. 615344
  misc_feature: Ceres CDNA ID no. 35383225
  misc_feature (1)..(89): Pfam Name: LEA_3 PFAM Desc: Late embryogenesis abundant protein
  misc_feature: Homolog of GI Number: 19347607 NR Desc: Ramy1
  misc_feature: Homolog of GI Number: 7489606 NR Desc: zinc
  misc_feature: Homolog of GI Number: 7489602 NR Desc: zinc inducible protein homolog
  misc_feature: Homolog of GI Number: 21219450 NR Desc: putative secreted proline
  misc_feature: Homolog of GI Number: 488731 NR Desc: chitinase
  misc_feature: Homolog of GI Number: 21992 NR Desc: extensin
  misc_feature: Homolog of GI Number: 55238762 NR Desc: ENSANGP00000010844
  misc_feature: Homolog of GI Number: 34785899 NR Desc: MGC68961 protein
  misc_feature: Homolog of GI Number: 6523547 NR Desc: hydroxyproline
MALALSGSAAARALAQRLAPATARGYAAAASSGAMRRGAAAAADGKAAREAEKAAADASWVPDPVTGHYRPANRAAGADPADLRAAHLGQTYARA

SEQ ID NO: 2255 - DNA, 648 bp, Triticum aestivum
  misc_feature: Ceres CLONE ID no. 615376
  misc_feature: Ceres CDNA ID no. 40351100
  CDS (103)..(462): REFERENCED BY SEQ ID NO: 2256
ccctttgcttcgcccactcccaaaccctacctcctagctccccctcccctcccatcgttgcggcggcgacagagagagagagagagagagagagagagagagatggccaagtctctgcgctccaagcgggagaagcggctgcggactctccggcgggagatcgcggagcccttctacgacaagaaggaggccgccaagcaggccgcgcaggccgccgccctcgaggcccccaagctccccgtccgcgtgcacccggcgtacgaggagtccctcgccgccgccgctgccgccgccgccagccgggcctctgccatggaggttgatggaggaagcaagaagtcgacatcctttctgaagccaatgggcaccattagcaagaagaaggtacagcttcacttgaagatcaagaaagacaagagaaaagctaggaagaagggaaattctgggaagaagagttactagatgtgcgagctgctgtgttatgtatcatgcaatcttgtttcgttagtttgaacaacgcatgtaacggtaattctgcttgtgaacccaagtgttaatcctagggtggtcaacaatgtactgaaaaatatctcaatgagcaccccaaacgaaaatagtgtcgccatgttcataaaaaaaaaaaaaaaa

SEQ ID NO: 2256 - protein, 119 aa, Triticum aestivum
  misc_feature: Ceres CLONE ID no. 615376
  misc_feature: Ceres CDNA ID no. 40351100
MAKSLRSKREKRLRTLRREIAEPFYDKKEAAKQAAQAAALEAPKLPVRVHPAYEESLAAAAAAAASRASAMEVDGGSKKSTSFLKPMGTISKKKVQLHLKIKKDKRKARKKGNSGKKSY

SEQ ID NO: 2257 - DNA, 1002 bp, Triticum aestivum
  misc_feature: Ceres CLONE ID no. 615434
  misc_feature: Ceres CDNA ID no. 24765989
  CDS (155)..(841): REFERENCED BY SEQ ID NO: 2258
aaaaatcgccttcgtctttccccgtcgtctccaccaacgccagtttttccccgtcgtctccaccaacgccagtccaaatccaaacccgaaggaggaagagaggctagctagctagggttccgcctcccgccggccggagagagggagagagaggatgacgacggcggcgcggccaacgtgggcgccagcgaagggcgggaacgagcagggcggcacgcgtatcttcgggccctccgggaagtactcctcccgcgacctcgccgcacacacctccctcaagcccagaaaagagggacaacaaactcaagaggaggtacagaagaggaatcttagggatgaacttgaggagcgtgaacgcaagcacttctcatccaaggataagtcctatgttgacgagagggaccggcgaaaaagttcaggcctgctcttagaaggttcaaaacgggatgaggataagatagttccacgtgaaattgatgcagatgactctgacgtggaactaaaaagtgatgatgaaagcgacgatgatgacgacgacgatgacactgaggcactaatggcagagcttgaaaggattaaaaaagaaagagccgaggacaggcttagaaaggagcgtcagcaagcagaagaagaggccaagatgaaggaggctgagctgatgcgaggaaacccactgatcaatatgaataattctggctccttcaatgtgaagagaaggtgggatgatgatgttgtattcaagaaccaggctcgtggagagactaagacaccgaaacggttcatcaatgacaccatcagaagtgatttccaccgcaagtttctgcataggtacatgaaatgatgctgctgtatgctttatgttgtctggacagtatgcatgctgaaagagcctgtgatgtttctgtattctgaagatcgatttgtatgacataactgtaacagctacgttatcttaatggtgatatgtttaccctgttcctaagagtaaaaaaaaaaaaaaaa

SEQ ID NO: 2258 - protein, 228 aa, Triticum aestivum
  misc_feature: Ceres CLONE ID no. 615434
  misc_feature: Ceres CDNA ID no. 24765989
  misc_feature (1)..(228): Pfam Name: Cwf_Cwc_15 PFAM Desc: Cwf15/Cwc15 cell cycle control protein
  misc_feature: Homolog of GI Number: 34897750 NR Desc: ESTs AU032852
  misc_feature: Homolog of GI Number: 46329463 NR Desc: MGC81091 protein
  misc_feature: Homolog of GI Number: 72145992 NR Desc:  similar to RIKEN cDNA 0610040D20
  misc_feature: Homolog of GI Number: 61868546 NR Desc:  similar to RIKEN cDNA 0610040D20
  misc_feature: Homolog of GI Number: 28829868 NR Desc: similar to T10C6.5.p
  misc_feature: Homolog of GI Number: 23612595 NR Desc: cell cycle control protein cwf15 homologue
  misc_feature: Homolog of GI Number: 23489775 NR Desc: Dictyostelium discoideum HSPC148. 10/100
MTTAARPTWAPAKGGNEQGGTRIFGPSGKYSSRDLAAHTSLKPRKEGQQTQEEVQKRNLRDELEERERKHFSSKDKSYVDERDRRKSSGLLLEGSKRDEDKIVPREIDADDSDVELKSDDESDDDDDDDDTEALMAELERIKKERAEDRLRKERQQAEEEAKMKEAELMRGNPLINMNNSGSFNVKRRWDDDVVFKNQARGETKTPKRFINDTIRSDFHRKFLHRYMK

SEQ ID NO: 2259 - DNA, 1704 bp, Triticum aestivum
  misc_feature: Ceres CLONE ID no. 615726
  misc_feature: Ceres CDNA ID no. 36527596
  CDS (191)..(1435): REFERENCED BY SEQ ID NO: 2260
acagcccaccaaaccctcgctcttcccaccgcaggaagagagctcctctcccctccccgcccccaccgcctccgccgacgaaccgatcggatccgggacacgatctcggattcgctcggcagatcagcgcgcaccagcccccaagcctccggatcctccttcgtcgtcctccccaccgcaagcttcagccatggcaggaatggcaccagagggttcccagtttgatgctaagcagtatgacagcaagatgaccgagttactgaaccaaggtgacaccggggagtttttcacctcgtatgatgaggtgcacgaaagttttgatgacatgggcctccaagagaaccttcttagaggcatctacgcttatggttttgagaagccatcagccattcagcaaagaggaattgttcccttctgcaagggtcttgatgtgattcagcaagctcagtctggaacaggaaaaactgccaccttctgttctggaatcttgcagcagcttgactatggattggttgagtgccaggcattggtccttgctccgacccgtgagcttgcacagcagattgagaaggtcatgcgtgctcttggtgactacttaggtgtcaaggtgcatgcatgtgttggtggaacttctgttcgtgaggaccaaaggattcttgccagtggtgtgcatgttgttgtcggcacacctggtcgtgtgttcgatatgttgcgcaggcaatccctccgtccagataacatcaagatgtttgtgttggatgaagctgatgaaatgctttcacgtggtttcaaggatcagatctatgatatcttccagcttcttccatcaaagattcaggttggggtgttctcagcaaccatgcctcctgaggcccttgagataacccgcaagttcatgaacaagcctgtgaggattcttgtcaagagagatgagcttacccttgagggtatcaaacaattctatgtcaatgtggagaaggaagagtggaagctggatacactctgtgacctgtacgagaccctggcaattacccagagtgtcatctttgtgaacacccgccgcaaggtggactggctcactgacaagatgaggggacgggaccacactgtctctgccacgcacggagatatggaccagaacactagggacatcatcatgagggagttcagatctggatcttctcgtgtgctcatcaccaccgacctgctggcccgtggtattgatgtgcagcaagtctcccttgtcatcaactatgacctgccgactcagcctgagaattacctccatcgcattggtcgtagtggtcggttcgggaggaagggagttgccatcaactttgtcacccgtgaagatgagaggatgctgttcgacatccagaagttctacaacgtggtcattgaggagctcccggccaatgtcgctgaccttctctagattatatcttaggaatgcagtaaggtgcttgataaagttcgtttttgttgaatatctcccaactctcagttttggagtggtaaggtctgggtctgtttgaatcgtggttaaggatggtctcttgagttttttcctgttatgcaatgtccggaaatttttgtagtgcgtaggctgtgccatctcctgggctagctgggatagagtgactctcatggagtattttacttttcgttgtgaagttattttattgcccaaaaaaaaaaaaaaaa

SEQ ID NO: 2260 - protein, 414 aa, Triticum aestivum
  misc_feature: Ceres CLONE ID no. 615726
  misc_feature: Ceres CDNA ID no. 36527596
  misc_feature: null
  misc_feature: Useful for making plants with altered Lignin content
  misc_feature: Useful for making plants with altered alkaloid content
  misc_feature: Useful for making plants with altered terpenoid content
  misc_feature (210)..(244): Pfam Name: Helicase_C PFAM Desc: Helicase conserved C
  misc_feature: Homolog of GI Number: 66845729 NR Desc: DEAD/DEAH box helicase
  misc_feature: Homolog of GI Number: 1170509 NR Desc: Eukaryotic initiation factor 4A
  misc_feature: Homolog of GI Number: 2500522 NR Desc: Eukaryotic initiation factor 4A
  misc_feature: Homolog of GI Number: 3776021 NR Desc: RNA helicase
  misc_feature: Homolog of GI Number: 53792733 NR Desc: eukaryotic initiation factor 4A
  misc_feature: Homolog of GI Number: 303844 NR Desc: eukaryotic initiation factor 4A
  misc_feature: Homolog of GI Number: 63139086 NR Desc: eukaryotic initiation factor 4A
  misc_feature: Homolog of GI Number: 50905315 NR Desc: putative translational initiation factor eIF
  misc_feature: Homolog of GI Number: 2286151 NR Desc: translation initiation factor
MAGMAPEGSQFDAKQYDSKMTELLNQGDTGEFFTSYDEVHESFDDMGLQENLLRGIYAYGFEKPSAIQQRGIVPFCKGLDVIQQAQSGTGKTATFCSGILQQLDYGLVECQALVLAPTRELAQQIEKVMRALGDYLGVKVHACVGGTSVREDQRILASGVHVVVGTPGRVFDMLRRQSLRPDNIKMFVLDEADEMLSRGFKDQIYDIFQLLPSKIQVGVFSATMPPEALEITRKFMNKPVRILVKRDELTLEGIKQFYVNVEKEEWKLDTLCDLYETLAITQSVIFVNTRRKVDWLTDKMRGRDHTVSATHGDMDQNTRDIIMREFRSGSSRVLITTDLLARGIDVQQVSLVINYDLPTQPENYLHRIGRSGRFGRKGVAINFVTREDERMLFDIQKFYNVVIEELPANVADLL

SEQ ID NO: 2261 - DNA, 1012 bp, Triticum aestivum
  misc_feature: Ceres CLONE ID no. 615808
  misc_feature: Ceres CDNA ID no. 36526880
  CDS (139)..(636): REFERENCED BY SEQ ID NO: 2262
atgcctcagaaaatagagattccaattcgagctccatagacaccattagcattagagggagggtgcaacagcaggattggagggttctcttctccaaaggcgccgaagttcttcagcttggcaagtaagtgataatcaatggcttacaggcttccactggcaggagttagggcttccaattatgaggctagagagcttccatcaaacagctacctggatctgggtgggccttatggaaaatttgtgcctttcataatcgcgggagaagggggctttggggagcataagcagctcaactggacaaacttgtttttactgaacaagcttggcagtgacatagacagggatcatcaagaggtgatcgatcagataaaggcagagaaagatgttgaaaagataaaagagttgatagagcgactgcctcgtgaaattgctgagcatttggaaggccatgagacccatgaacaggtcgaaatcctggcagatctgagcaggaacatggatcagaggatgtcttatctcagcagagagatccggcatctaaggagtgacctgggacaggtgatgcaaggtatcggagagatacgcgaagcattggctaggatggagcgccagaatccttgcttccgtccatgaacaaatgcaaccagccctggagcaagtgcacctggcagtttcgtatttgcatttcgtacttttctatattgtgttgtaatgaataaaattatgcgctccttgcagcgtataatgttgtacgagtctgagtcgatcgagttttattagctacatgtgcatgtctgtactgtctgcagttggttgttcttgtcaagggtttgtaatgaataaaattatgtgcagcttgctgcacataatgttgtctaagtctgattagatcaagtagtcgtgggggtccgtgcatgtcagcaattgttcctctcaagtgtgtgcaactttgcactaaagagctatgtatatagtgagtgtattcatgttctgaaaaaaaaaaaaaaaa

SEQ ID NO: 2262 - protein, 165 aa, Triticum aestivum
  misc_feature: Ceres CLONE ID no. 615808
  misc_feature: Ceres CDNA ID no. 36526880
  misc_feature: Homolog of GI Number: 11558300 NR Desc: stress responsive protein
  misc_feature: Homolog of GI Number: 665932 NR Desc: ORF I
MAYRLPLAGVRASNYEARELPSNSYLDLGGPYGKFVPFIIAGEGGFGEHKQLNWTNLFLLNKLGSDIDRDHQEVIDQIKAEKDVEKIKELIERLPREIAEHLEGHETHEQVEILADLSRNMDQRMSYLSREIRHLRSDLGQVMQGIGEIREALARMERQNPCFRP

SEQ ID NO: 2263 - DNA, 1081 bp, Triticum aestivum
  misc_feature: Ceres CLONE ID no. 615966
  misc_feature: Ceres CDNA ID no. 35383226
  CDS (120)..(809): REFERENCED BY SEQ ID NO: 2264
accataccagataccacatcacagcccggcgccttgccactagtacaaaggcgctccgctccccgtctccccttcccggaacacggcgactccaccaccaccacgactaccggctggaaatggcggcctcctccccctccgccctcgcgctctccaccaccacgcgggtagctggctcgtccgtgctgcttgctgtgaggcggacgccggcgacgcgcgtggccgccgttccctccgcccagctccgcgcgtgctcctggggggcgccgctccatctccggccggagctcgccgcggcccctgccccgtgcgccgcccgctgcagggcgcctctgctccggcctcgcgcatggctgtcgacgtcccagattgccagctccgccttcaccctgggcaccgtcgccgtcctccccttctacacgctcatgatcgccgcccccaacgccaacatcactaagcgcgccgtggagagcaccgccccctacgtcgccctcggcctcctctacgcctacctgctctacctctcctggacccccgacaccatccgcgccatgttcgccagcaagtactggctcccggagttgcctggcattgtgaggatgtttgcgagcgagatgaccgtcgcctccgcctggatccacctcctagccgtcgacctcttcgccgcaaggcaagtgtaccaagatggcatcaagaacaacatcgagaccaggcattcggtttcgctctgcctgctcttctgccccatcgggatcgccgctcacgcgctcactaaggtactggcgggttccacaggtcgatcacactgactgacgaccgattgcgtgtaggcaggctcccattgtttagatggctcagatagtgtgattcagatatatatgaataagattgatttggtgcaccatttgttccatatagacatcacattgattattttcacccaatctattggaattggctcgagaaactgaatctactcgccatcatgggttcatagaaaggctagaactgctgatttgatttgtactatctgagtcctgttatgaagaaatgtacaagtaatttaaaaaaaaaaaaaaaa

SEQ ID NO: 2264 - protein, 229 aa, Triticum aestivum
  misc_feature: Ceres CLONE ID no. 615966
  misc_feature: Ceres CDNA ID no. 35383226
  misc_feature: Homolog of GI Number: 2708709 NR Desc: Wiskott
  misc_feature: Homolog of GI Number: 19115670 NR Desc: wiskott
  misc_feature: Homolog of GI Number: 41400384 NR Desc: plus agglutinin
  misc_feature: Homolog of GI Number: 60678627 NR Desc: plus agglutinin
  misc_feature: Homolog of GI Number: 12018147 NR Desc: vegetative cell wall protein gp1
  misc_feature: Homolog of GI Number: 15145797 NR Desc: basic proline
  misc_feature: Homolog of GI Number: 488731 NR Desc: chitinase
  misc_feature: Homolog of GI Number: 41400381 NR Desc: minus agglutinin
  misc_feature: Homolog of GI Number: 67987177 NR Desc: 4Fe
MAASSPSALALSTTTRVAGSSVLLAVRRTPATRVAAVPSAQLRACSWGAPLHLRPELAAAPAPCAARCRAPLLRPRAWLSTSQIASSAFTLGTVAVLPFYTLMIAAPNANITKRAVESTAPYVALGLLYAYLLYLSWTPDTIRAMFASKYWLPELPGIVRMFASEMTVASAWIHLLAVDLFAARQVYQDGIKNNIETRHSVSLCLLFCPIGIAAHALTKVLAGSTGRSH

SEQ ID NO: 2265 - DNA, 1215 bp, Triticum aestivum
  misc_feature: Ceres CLONE ID no. 616068
  misc_feature: Ceres CDNA ID no. 24765990
  CDS (90)..(1082): REFERENCED BY SEQ ID NO: 2266
gattccccgtcccctttcttcattccctcttccgttgccggtgcgtccgcgtcctgtctctcccggccagcgatcgggaggggcgagggatggcctcccgtccccccaactccgccgacggcgagggccccgcagggaataacgtggaattgccatccctgccctttcatgttgttactaaacctagtcaactcccagttgagtttcttgagccctctgctgccaagaaattggtgattggatttgactgtgaaggtgttgacctttgccgccatggtgctctctgtatcatgcagattgcatttcctgacgctgtttacttggtcgatgctattgagggtggaaaagaactagttgaagcttgcaaaccagcacttgagtccaatcatatcaccaaagttattcatgactgtaaaagggacagtgaggcattgtatttccagtttggcattaaattacataatgtgatggatacacagatagcctattccctgattgaagagcaggaaggtaaaaagagagcatatgatgtttacatatccttcgtgagccttcttgccgatcctcgttattgtggaatgccatatcctgaaaaggaagaagtccgtacccttctaaggcaggacccaaatttctggaaaaataggcccttgtctgaaatgatgattcgagcagcgacagatgatgtgcgcttccttctcaatatacatgagaaaatgatggagaagttaagcaaagtatcttcatggcgtctggcagtacgaagtgagctatactgtaggtgcttttgcataaatgacaaccagcaggcagattggccgcctcttccaactgtccctgatgacattgaagctgaagctcgtgttcctgaagtggatatcctttcgctcttagatgtgcctcctggaaaaatgggtcgtgttattggcagaaaaggatcatcaataatggctgtgaaagaatcttgcaatgttgaaatccatatcggtggtgcaaagggacctccagatagggtgttcatcattggaccagtgaaggaagtcagaaaggcggaggccatcctgaggggccgaatgctgtaattctagagaaacgacttcttgatatagacttgaactgccatatcttttgaacacaagggatacagaaatgcatgtggatcgctgatccgtgacaacaataaaaataagagttggattaaaaaaaaaaaaaaaa

SEQ ID NO: 2266 - protein, 330 aa, Triticum aestivum
  misc_feature: Ceres CLONE ID no. 616068
  misc_feature: Ceres CDNA ID no. 24765990
  misc_feature (26)..(215): Pfam Name: 3_5_exonuc PFAM Desc: 3'
  misc_feature (268)..(325): Pfam Name: KH_1 PFAM Desc: KH domain
  misc_feature: Homolog of GI Number: 34914238 NR Desc: P0002B05.11
  misc_feature: Homolog of GI Number: 52076246 NR Desc: egalitarian
  misc_feature: Homolog of GI Number: 82621130 NR Desc: 3'
  misc_feature: Homolog of GI Number: 79323071 NR Desc: 3'
  misc_feature: Homolog of GI Number: 33589402 NR Desc: RE33408p
  misc_feature: Homolog of GI Number: 38681451 NR Desc: egalitarian
  misc_feature: Homolog of GI Number: 66516301 NR Desc:  similar to RE33408p
  misc_feature: Homolog of GI Number: 31210151 NR Desc: ENSANGP00000003614
  misc_feature: Homolog of GI Number: 31210153 NR Desc: ENSANGP00000015657
  misc_feature: Homolog of GI Number: 23489160 NR Desc: 3'
  misc_feature: Useful for increasing chlorophyll and photosynthetic capacity
  misc_feature: Useful for making plants with altered leaf shape eg curled leaves
  misc_feature: Useful for making plants with altered leaf shape eg curled leaves
MASRPPNSADGEGPAGNNVELPSLPFHVVTKPSQLPVEFLEPSAAKKLVIGFDCEGVDLCRHGALCIMQIAFPDAVYLVDAIEGGKELVEACKPALESNHITKVIHDCKRDSEALYFQFGIKLHNVMDTQIAYSLIEEQEGKKRAYDVYISFVSLLADPRYCGMPYPEKEEVRTLLRQDPNFWKNRPLSEMMIRAATDDVRFLLNIHEKMMEKLSKVSSWRLAVRSELYCRCFCINDNQQADWPPLPTVPDDIEAEARVPEVDILSLLDVPPGKMGRVIGRKGSSIMAVKESCNVEIHIGGAKGPPDRVFIIGPVKEVRKAEAILRGRML

SEQ ID NO: 2267 - DNA, 1425 bp, Triticum aestivum
  misc_feature: Ceres CLONE ID no. 616178
  misc_feature: Ceres CDNA ID no. 24766065
  CDS (103)..(1248): REFERENCED BY SEQ ID NO: 2268
gctcttctccagtccgcctccctatccccacctcctccacaacccccaccccaccccacccctcctccgctgcccatcccagcacagcggaagcgatcggcaatggcgtcctccacccagggccaggtcatcacctgcaaagcggcggtggcgtacgaggcgaacaagccgctggtggtcgaggacgtgcaggtggcgccgccgcaggccggcgaggtccgcatcaagatcctctccaccgcgctctgccacaccgactactacacctggagcggcaaggatcctgagggtctctttccttgcattctcggtcacgaggctgctggaattgttgagagtgtcggcgaaggggtgaccgacgtgcagcctggggaccatgtcatcccttgctaccaagcggaatgcagggactgcaagatgtgcaacagcgggaagaccaacctctgcggcaaagttcgcggcgccactggggttggggtcatgatgagcgaccgcaagagccgcttctcggttaatgggaagcccatctaccatttcatggggacgtccacgttcagtcagtacactgttgtgcatgacgtcagtgttgccaagatcaacccacaggcgcccctggataaggtctgcctgctcggctgtggtgtttctactggccttggagcagtatggaatactgcaaaggttgaagcaggttccattgttgctgtttttgggcttggcacagtcggacttgcagttgctgagggggcaaaatcagctggtgcttctcggattattggcattgacattgataccaagaagtttgatgttgctaagaactttggagtcacagagtttgtgaacccaaaagaccatgacaaaccaatccagcaggtccttgttgaccttacagatggtggtgtggattacagttttgagtgcatcggaaatgtttctatcatgagggctgcactcgaatgctgccacaagggctggggtacctctgttgtcgttggcgtagctgcgtctggccaggagattgccacacggccattccagctagtcactggccgtgtctggaagggaacagctttcggcggcttcaagagccgaagccaggtcccgtggctcgtcgagaagtacatgaacaaggaaatcaaggtggacgagtacatcacccacaacatgaaccttaccgacatcaacaaggcgttcgacctgctgcacgaaggcggctgcctgcggtgcgtgctggccatggagcactgaggatcctgctatgtgaagccgagcagtttgcgtcgtgtgaaattgtaatgcagatctatcctccgccctgggactatagaactcgtttggccccgtttggcctagaaactcttgaacacgaaccgctgctataataatatgttgtgttggatgaaaaaaagaaaaaaaaaaaaaaaa

SEQ ID NO: 2268 - protein, 381 aa, Triticum aestivum
  misc_feature: Ceres CLONE ID no. 616178
  misc_feature: Ceres CDNA ID no. 24766065
  misc_feature (196)..(338): Pfam Name: ADH_zinc_N PFAM Desc: Zinc
  misc_feature: Homolog of GI Number: 3121727 NR Desc: ALCOHOL DEHYDROGENASE CLASS III
  misc_feature: Homolog of GI Number: 3023271 NR Desc: ALCOHOL DEHYDROGENASE CLASS III
  misc_feature: Homolog of GI Number: 33589744 NR Desc: At5g43940/MRH10_4
  misc_feature: Homolog of GI Number: 50746793 NR Desc:  similar to Alcohol dehydrogenase class III
  misc_feature: Homolog of GI Number: 74002261 NR Desc:  similar to Alcohol dehydrogenase class III chi chain
  misc_feature: Homolog of GI Number: 25283011 NR Desc: alcohol dehydrogenase
  misc_feature: Homolog of GI Number: 46195771 NR Desc: alcohol dehydrogenase 5
  misc_feature: Homolog of GI Number: 16565980 NR Desc: alcohol dehydrogenase
  misc_feature: Homolog of GI Number: 50915842 NR Desc: alcohol dehydrogenase class III
  misc_feature: Homolog of GI Number: 1143388 NR Desc: class III ADH
  misc_feature: Useful for making plants with increased biomass and foliage
  misc_feature: Useful for making shorter plants
  misc_feature: Useful for making shorter plants and plants with modified flowers
  misc_feature: Useful for making smaller plants
  misc_feature: Useful for sterility
MASSTQGQVITCKAAVAYEANKPLVVEDVQVAPPQAGEVRIKILSTALCHTDYYTWSGKDPEGLFPCILGHEAAGIVESVGEGVTDVQPGDHVIPCYQAECRDCKMCNSGKTNLCGKVRGATGVGVMMSDRKSRFSVNGKPIYHFMGTSTFSQYTVVHDVSVAKINPQAPLDKVCLLGCGVSTGLGAVWNTAKVEAGSIVAVFGLGTVGLAVAEGAKSAGASRIIGIDIDTKKFDVAKNFGVTEFVNPKDHDKPIQQVLVDLTDGGVDYSFECIGNVSIMRAALECCHKGWGTSVVVGVAASGQEIATRPFQLVTGRVWKGTAFGGFKSRSQVPWLVEKYMNKEIKVDEYITHNMNLTDINKAFDLLHEGGCLRCVLAMEH

SEQ ID NO: 2269 - DNA, 1397 bp, Triticum aestivum
  misc_feature: Ceres CLONE ID no. 616182
  misc_feature: Ceres CDNA ID no. 25088403
  CDS (154)..(1221): REFERENCED BY SEQ ID NO: 2270
gcgcccagcaagcttgtatattcgctcagcctctctctctcttctccttacccagccgcctcgtgcccttgtcctctcccgtctccgaccgcgccgccgccactaggccacgaccgccgccccctcccccagcctcgcttcgctccggcggggatggaaaaccgcgatggttcctcattgccagactttcttgagctccagcgcacccgtgttctctgcaaggccgatgcccccactcatacagaggggtttcaatactcgggggcttttgctgctatgggagttgatactagtgtctcagttgagaagttctgcaagaactttaaaatcgagataaatcgacttacagatgaggatatggagtttgatatgattggcgttgatgcatcgatagctaatgctttccggagaatcctcattgcagaggttcctacaatggccattgagaaagtcttcatggttgacaatacatcagttatagcagatgaggtcctttcacaccgactaggccttattccacttgatgctgatccaaggctttttgattatatctctgatgatgtcccaaatgaaaggaatactattgtgtacaaactgcatgtttcatgtgaaaagggttcccaaagacttacagttaagtctggtcaattggagtggttgccagaaggcagtcaattaactatggcatctcctgcgcaatctggggacaatcagaggacctacacatcctttggtcaaagccaacagaatacctctgaaaggcctctcggtgtgaagtataatgacataacaattgccaggcttgggccaggacaggctattgagcttgaggcacatgctgttaagggagtggggaaagttcatgcgaagtggtctccagttgctacagcctggtacaggatgctccccgaggttgttcttctcaaagaaattaaaaatggtgatgcagaggagctagtgaaaagatgcccagttaatgtttttgacattgaagacctgggaaagggggagaagagagcagttgttgcaaagccaagagcatgcaccctttgtagggaatgtgtcagactggctgatgatcaagtagagctacggcgtgttagagaccacttcatttttacaatcgagtccaccggagctctaccgccggaggtgctcttcacagaggccgtgaagatccttgaggagaagtgcgagcgagtgatatccgaactttcctgagcccgacataaagttttcagtactgttctgatgcagtttttctattgctatgttgtgctgaggacgaaatcttagtgtactagtataggttactgtaaaacttctgcatccaatactctggagtcacattcagctaatttattaccgagccggtatatgcaaaaaaaaaaaaaaaa

SEQ ID NO: 2270 - protein, 355 aa, Triticum aestivum
  misc_feature: Ceres CLONE ID no. 616182
  misc_feature: Ceres CDNA ID no. 25088403
  misc_feature (100)..(241): Pfam Name: RNA_pol_A_bac PFAM Desc: RNA polymerase Rpb3/RpoA insert domain
  misc_feature: Homolog of GI Number: 14423464 NR Desc: RNA polymerase subunit
  misc_feature: Homolog of GI Number: 21592304 NR Desc: RNA polymerase subunit
  misc_feature: Homolog of GI Number: 12323800 NR Desc: RNA polymerase subunit
  misc_feature: Homolog of GI Number: 50912273 NR Desc: putative RNA polymerase subunit
  misc_feature: Homolog of GI Number: 514322 NR Desc: RNA polymerase subunit
  misc_feature: Homolog of GI Number: 42571933 NR Desc: DNA
  misc_feature: Homolog of GI Number: 41056007 NR Desc: RNA polymerase 1
  misc_feature: Homolog of GI Number: 49618929 NR Desc: RNA polymerase I 140 kDa subunit
  misc_feature: Homolog of GI Number: 76650396 NR Desc:  similar to DNA
  misc_feature: Homolog of GI Number: 68401640 NR Desc:  similar to RNA polymerase 1
MENRDGSSLPDFLELQRTRVLCKADAPTHTEGFQYSGAFAAMGVDTSVSVEKFCKNFKIEINRLTDEDMEFDMIGVDASIANAFRRILIAEVPTMAIEKVFMVDNTSVIADEVLSHRLGLIPLDADPRLFDYISDDVPNERNTIVYKLHVSCEKGSQRLTVKSGQLEWLPEGSQLTMASPAQSGDNQRTYTSFGQSQQNTSERPLGVKYNDITIARLGPGQAIELEAHAVKGVGKVHAKWSPVATAWYRMLPEVVLLKEIKNGDAEELVKRCPVNVFDIEDLGKGEKRAVVAKPRACTLCRECVRLADDQVELRRVRDHFIFTIESTGALPPEVLFTEAVKILEEKCERVISELS

SEQ ID NO: 2271 - DNA, 932 bp, Triticum aestivum
  misc_feature: Ceres CLONE ID no. 616203
  misc_feature: Ceres CDNA ID no. 40351101
  CDS (122)..(763): REFERENCED BY SEQ ID NO: 2272
gtcaaccaaacggccagctctgtttatctcgcccgtggactctccttctcggaggctgcgtagtggaacgactaaacagatctgccctctctctctctcgtccgcggcgatacgatccgagatggcgatgagggcgtggaggcggagcgcggcggcgagggccccggcgcacctgtgcctgtggctggcgctcgtcgccgccaccctggtgctcgcccagggtaagaagtcgaacctgtcggaggtgacgcacaaggtctacttcgacattgagatcgacggcaagcccgcaggtcgggttgtcatgggacttttcggcaaggctgttcctaaaaccgcagagaacttcagagcactctgcacaggagagaaaggcatgggcaacagcggcaagcctctccactacaaggggagttcgttccacagaattatccccagcttcatgatccaaggaggtgacttcactcttggcgatggaaggggcggtgaatcaatctacggcacaaagttcgccgatgagaacttcaagctcaagcacactggaccaggctacctttccatggccaatgctgggagagataccaatggatcccagttcttcatcaccactgtaaccacgagctggttggatggcaagcacgtcgtgttcggcaaggtgttgtctggaatggacgtggtctacaaggttgaggccgagggcaagcagaacgggacgccaaagagcaaggttgtcatcgccgacagcggagaagtgccgctgtgatgagacctgaaatggcctctggtggaaagctacggtgactagttttcattgtagaaccgttatcgtcgggactgttttcgtgtacttccgtgtgaatttagacggcaaagttttttctcttactataaaaaaagtataataacttgcttacccaaaaaaaaaaaaaaaa

SEQ ID NO: 2272 - protein, 213 aa, Triticum aestivum
  misc_feature: Ceres CLONE ID no. 616203
  misc_feature: Ceres CDNA ID no. 40351101
  misc_feature (45)..(211): Pfam Name: Pro_isomerase PFAM Desc: Cyclophilin type peptidyl
MAMRAWRRSAAARAPAHLCLWLALVAATLVLAQGKKSNLSEVTHKVYFDIEIDGKPAGRVVMGLFGKAVPKTAENFRALCTGEKGMGNSGKPLHYKGSSFHRIIPSFMIQGGDFTLGDGRGGESIYGTKFADENFKLKHTGPGYLSMANAGRDTNGSQFFITTVTTSWLDGKHVVFGKVLSGMDVVYKVEAEGKQNGTPKSKVVIADSGEVPL

SEQ ID NO: 2273 - DNA, 822 bp, Triticum aestivum
  misc_feature: Ceres CLONE ID no. 616357
  misc_feature: Ceres CDNA ID no. 40351102
  CDS (77)..(487): REFERENCED BY SEQ ID NO: 2274
actacccaattcgccgcattcgatttcgagttccaccgcccgcgcccgcacccgcacagcaaaggcaaccggagccatggcccgtaccaagcagaccgcccgcaagtccaccggcggcaaggcgccccgcaagcagctcgccaccaaggccgccaggaagtcggccccgaccaccggcggcgtgaagaagccgcaccgctacaggcccgggaccgtggcgctccgcgagatccgcaagtaccagaagagcacggagctgctcatccgcaagctgcccttccagcgcctggtccgcgagatcgcgcaggacttcaagacggacctccgcttccagtcccacgccgtgctcgccctccaggaggcggccgaggcctacctcgtcggcctcttcgaggacaccaacctctgcgccatccacgccaagcgcgtcaccatcatgcccaaggacatccagctcgcccgccgcatccgcggggagcgcgcctaagcgggagcgagaccaatcacaaccccagccgcctcatgccaccgttcgccagcagtagttgattcgcctgcccttttaattagatcgtgttaggtcgtttgcggtgatgcaaacagatgcttactgtgaaattgttggttaatatactgttgatcgaccattatcgatgtatgcaattctgaggtactgtgaggttgatgcctcctgttctctgaatcctcatgtgattttcgttcactgaatcctcttgtgattcctgttcactgaatcctcttgtgattcctgttctctgaatcctcttgtgatttcttgttctctgaaaaaaaaaaaaaaaa

SEQ ID NO: 2274 - protein, 136 aa, Triticum aestivum; identical to SEQ ID NO: 30
  misc_feature: Ceres CLONE ID no. 616357
  misc_feature: Ceres CDNA ID no. 40351102
  misc_feature (58)..(134): Pfam Name: Histone PFAM Desc: Core histone H2A/H2B/H3/H4

SEQ ID NO: 2275 - DNA, 1244 bp, Triticum aestivum
  misc_feature: Ceres CLONE ID no. 616555
  misc_feature: Ceres CDNA ID no. 24766067
  CDS (164)..(1003): REFERENCED BY SEQ ID NO: 2276
aaacccccttcttctccaccgcgccgtcttcctcctccaacccccccacctaccaaccactctcctcgtccctcccccactccactcataaattcccggaccccacgcggatctctcctcacctgccgcgaatccacgaggcggagcgacccgccgcccgattatggagttcctgcaggggcagagcacggagaccacggtggccgtcgcggtcgccgtcgtcgccgtggccgccggcgccggattccttctcctccgcagcaagaaacccaagggctgcttggatgctgagaatttcaaagagtttaaactcgtgcagaagagacagatcagtcataatgtggccaagttcaaatttgctctcccgacacctacttcagtgttgggccttccgattggccaacatataagctgcagagggcaggatgctactggcgaggaagtaatcaagccttatactccgactacactggattctgatattggatactttgagcttgttataaagatgtatccccaaggaaggatgtctcatcattttcgtgagatgaaagtgggtgactatatgtctgtgaagggaccaaagggccgtttcaagtaccagcctgggcaagtgagagcatttggaatgatagctggaggatcaggcattacaccgatgttccaagtcacaagggcaattcttgagaacccaaatgacaatacaaaagttcacttgatctacgctaatgtcacatatgacgacattcttctgctggaagaactagacaatatggctaaaaactatcctgatcgcttcaagatctactatgtcttgaatcagccacctgaagtctgggatggtggtgtcgggtttgtgtcaaaggaaatgatccaagctcactgcccagcgcctgccgccgacattcagatattgagatgcggacctcctccaatgaataaagccatggctgcaaacctggatgaccttggctacaccaaggagatgcagttccagttctaggtttcgacggcggaagcttaccaaaataacgggtcgcatgaccattcttagcatttttcggtttggcatgggctgattctgatgtcatttagctcgtgtagacaccttgcacagtccatgaagtggcagttatgccgtaatgctgcacgttgatgcgtgtccagtgttacttgtgtccgtaacgttttttgccgagtataggagacaacagcttatcagctttacaaaaaaaaaaaaaaaa

SEQ ID NO: 2276 - protein, 279 aa, Triticum aestivum
  misc_feature: Ceres CLONE ID no. 616555
  misc_feature: Ceres CDNA ID no. 24766067
  misc_feature (155)..(264): Pfam Name: NAD_binding_1 PFAM Desc: Oxidoreductase NAD
  misc_feature (47)..(146): Pfam Name: FAD_binding_6 PFAM Desc: Oxidoreductase FAD
  misc_feature: Homolog of GI Number: 4336205 NR Desc: cytochrome b5 reductase
  misc_feature: Homolog of GI Number: 17221690 NR Desc: cytochrome b5 reductase isoform II
  misc_feature: Homolog of GI Number: 50511361 NR Desc: putative NADH
  misc_feature: Homolog of GI Number: 55979115 NR Desc: NADH:cytochrome b5 reductase
  misc_feature: Homolog of GI Number: 21553853 NR Desc: NADH
  misc_feature: Homolog of GI Number: 55979113 NR Desc: NADH:cytochrome b5 reductase
  misc_feature: Homolog of GI Number: 18377462 NR Desc: NADH
  misc_feature: Homolog of GI Number: 66853376 NR Desc: NADH
  misc_feature: Homolog of GI Number: 6070344 NR Desc: NADH
  misc_feature: Homolog of GI Number: 27924030 NR Desc: reductase
MEFLQGQSTETTVAVAVAVVAVAAGAGFLLLRSKKPKGCLDAENFKEFKLVQKRQISHNVAKFKFALPTPTSVLGLPIGQHISCRGQDATGEEVIKPYTPTTLDSDIGYFELVIKMYPQGRMSHHFREMKVGDYMSVKGPKGRFKYQPGQVRAFGMIAGGSGITPMFQVTRAILENPNDNTKVHLIYANVTYDDILLLEELDNMAKNYPDRFKIYYVLNQPPEVWDGGVGFVSKEMIQAHCPAPAADIQILRCGPPPMNKAMAANLDDLGYTKEMQFQF

SEQ ID NO: 2277 - DNA, 1440 bp, Triticum aestivum
  misc_feature: Ceres CLONE ID no. 616734
  misc_feature: Ceres CDNA ID no. 40351103
  CDS (194)..(1135): REFERENCED BY SEQ ID NO: 2278
ctaaaccacccctgaaaaccctcagacgaacgaaagacctagcgctcctctcccttcgtctctcgcgactggcggcggcggtcgaacgaggccacccgacggcggcagagcgagtaggtgctttccaagcttcgccagaggtgtaaacccttcgctagaggcctcagtccctttcccgcgcggcttgagcaagatgagcaagatggcgatcagggttcccaagtccatgcgcgccaagcgtgagctcctcaagcacgcgcccaagctcgttgagaatggcaagaagatgcttattcttcatggtacaaagaccagcgcagttttgaactctgtgctggcagatcttttccacctgaagcgtgatcatgctgtcaagtacaccaagaagaacgacagcatcaggccatttgagagcgggggtgaaacttccctggagttcttctcccttaaatctgactgcagcctcttagtgtatggttctcattcaaagaagaggcccaacaatcttgttctgggaaggacttacgatcaccacatatatgacctcgttgaagtgggagttgagaactacaaatccatagaatcctatgcatatgataaaaagttggcacctaaacttgggacaaagcctttctttgctttcattggggagcactttgagagtgttgaaggactgaagcatttgaaggaaatgctgcttgatcatttcaaaggagaggtggtagagaatctgaaccttgctggtgtagatcggatattcgtgtgcacagcaatttctcctactaccgtctacatgatgcactgcgctctccgtctaaaaaggtcaggcacatctattcctagaatggagctggttgaagttgggccttcagtggacctggtacttaggcggcaccgacaagcagctgaaagtttacagaaagaagctatgaaggctcctggtcatgctaagaaggtgaaaaatgtcaccaataatccagttgaaggcaagcagggcaggatctacattccagaccaggaggtctcaaaattgaccgtaacaagcaacataaagggtctgaagcgggagcgccgtgacgccaagaaaaacaaggagcactcgaagaagcaaaaggtggccgaaaaccctgagtgaccactggagaaggctagtatctgtaaccggtcagtttaaggactttcggtcgataggttcagtggtaaatagtccagtaccatcttttaaggctatcaaacctgtgtacggacttaggcatcagtatcgaggcagcctctctatcagacataagcatgaaattttggagcaacatatgctacaagtattttttttactgttgttattcgcccctgatattagccaatcagagacgactgttgtgatgacatggttaagtttggttatcatggacattatgccttttctgaaaaaaaaaaaaaaaa

SEQ ID NO: 2278 - protein, 310 aa, Triticum aestivum
  misc_feature: Ceres CLONE ID no. 616734
  misc_feature: Ceres CDNA ID no. 40351103
  misc_feature (30)..(232): Pfam Name: Brix PFAM Desc: Brix domain
MAIRVPKSMRAKRELLKHAPKLVENGKKMLILHGTKTSAVLNSVLADLFHLKRDHAVKYTKKNDSIRPFESGGETSLEFFSLKSDCSLLVYGSHSKKRPNNLVLGRTYDHHIYDLVEVGVENYKSIESYAYDKKLAPKLGTKPFFAFIGEHFESVEGLKHLKEMLLDHFKGEVVENLNLAGVDRIFVCTAISPTTVYMMHCALRLKRSGTSIPRMELVEVGPSVDLVLRRHRQAAESLQKEAMKAPGHAKKVKNVTNNPVEGKQGRIYIPDQEVSKLTVTSNIKGLKRERRDAKKNKEHSKKQKVAENPE

SEQ ID NO: 2279 - DNA, 2132 bp, Triticum aestivum
  misc_feature: Ceres CLONE ID no. 616746
  misc_feature: Ceres CDNA ID no. 40041266
  CDS (2)..(1882): REFERENCED BY SEQ ID NO: 2280
gtcctccccgatcacgtcctccacgcccacagccacgctcactcactcgcccccctccaccaacgacggtgctgcggcaaggttcgctggggacggcgccgtcagtaggcagccgggtgggcgccccgctatgcgcaccggcgagccccccggtggcaggattcgcaaggaaagagcttgtagtaagagcgaacagaacatagagagcctatttcagcagcatgcaactggagtaggttcggcagcttatccgcaggggagagacgaggtggcccgccagttacagctaatagctatggagcctcaagctgttcagaacagagatgacctgttcgtttggccctggatgggtgttttggtcaatgtgcctactgaatggaaaaatgggcgccatgttggagaaagtggaaaccggctgaaggagaagctctcgtgcttttgcccacagaaagttatccctttgtggaactatagaggccacacagggaatgctattgttgagtttggaaaagattggactgccttcaataatgcacttgccttcgaaaatcactttgagtcagaaggatatggcaaactggactggaaggcgtacaagcatcgacgaccggggatgtttggatgggttgcaaggtctgatgatcagaaatatccagggccgatcggagattatctgcataaaaatggtgatctgaaaactattgcagatgttgagaatgaagaagcacgcaaaacaaacaaactggtagcgaatttagctagccagattgaggtaaagcgaaggcatgtggaagaacttgaatgtaagtacaatgagacgaccacctcacttgacatgataatggagcaaaaggatcagctgctccgggcatacaatgaagaaatacataagatgcagcaacttgctcgtaggcattcacagaggatcattgatgagaatcaaaagctccgttcagaacttgagtccaagatgcagaaccttgacttaagatccaaacagcttgatgagctagttgcgcgtagtgaatctgacagaaggaaccttgagcacgagaaggaaaagaacggtgttaaaacaaagcatcttaagatggcaacattggtgcaacagagggctgatgaaaatgtgctcaagcttgtggaaaaacacaagttagagaaacaagtcgctctagataagattatcaagttggagcagcaactggatgccaagcagaagcttgagttagaaataaaacagttgcagggtaaattggaagtcatgaagcatatgccgggtgaagaagactctgaatcgaagaaaagaatagatgaacttagtgaggagttacaagacaaatatgatgaaatggatgcaatggagtcactctaccatactctgcttatcaaggaacggaaaagcaatgatgaattgcaagatgctcggaagaagctgatagatggtttgcagactattacaactggtcgagcaaatattggcattaaaagaatgggcgaacttgatcttaaatcacttgcaattgcttgcggacgtaaattgtcaaaagaagatgcagaagtgactgctgccattctttgttcgaagtgggaggctgatatcaaaaaaccagaatggcacccttttagggttgtcatggttaatgggaaaaaaagggagcttatctctgaagatgatgcgaagcttcagactctaagagaagagtatggcgaagaagtctattctttggtgacaaaggcgctgcttgaagttaacgagtacaacccccatggccgctatgccgtaccggagctgtggaactacaaggagggccgcaaagcaacactgaaagaggccttgcagcacgtcctgaaacagtggcggacacacaagaggaagcgatgaactagtaccactggcctaatatacatacatgaacttgctgtttatttagcatttactagtacacgttagataagagctgtacgtgtggctctcaatggtgagacttctagaatgttcagttgtcacatcgtctacttgtccgagtttagctgggattatgaaacgcgagcggttgcaatgcgcggagattccgttttccagggtttcaggcctggtctaagtaaatgatgcctgaaaaaaaaaaaaaaaa

SEQ ID NO: 2280 - protein, 583 aa, Triticum aestivum
  misc_feature: Ceres CLONE ID no. 616746
  misc_feature: Ceres CDNA ID no. 40041266
  misc_feature (449)..(583): Pfam Name: XH PFAM Desc: XH domain
  misc_feature (64)..(178): Pfam Name: XS PFAM Desc: XS domain
  misc_feature: Homolog of GI Number: 2735841 NR Desc: No definition line found
  misc_feature: Homolog of GI Number: 55979223 NR Desc: X1
  misc_feature: Homolog of GI Number: 55979219 NR Desc: X1
  misc_feature: Homolog of GI Number: 55979221 NR Desc: X1
  misc_feature: Homolog of GI Number: 20502805 NR Desc: X1
  misc_feature: Homolog of GI Number: 48857079 NR Desc: X1
  misc_feature: Homolog of GI Number: 50907131 NR Desc: putative X1
  misc_feature: Homolog of GI Number: 34912988 NR Desc: putative transcription factor X1
  misc_feature: Homolog of GI Number: 20467991 NR Desc: putative transcription factor X1
  misc_feature: Homolog of GI Number: 52353592 NR Desc: putative transcription factor
MRTGEPPGGRIRKERACSKSEQNIESLFQQHATGVGSAAYPQGRDEVARQLQLIAMEPQAVQNRDDLFVWPWMGVLVNVPTEWKNGRHVGESGNRLKEKLSCFCPQKVIPLWNYRGHTGNAIVEFGKDWTAFNNALAFENHFESEGYGKLDWKAYKHRRPGMFGWVARSDDQKYPGPIGDYLHKNGDLKTIADVENEEARKTNKLVANLASQIEVKRRHVEELECKYNETTTSLDMIMEQKDQLLRAYNEEIHKMQQLARRHSQRIIDENQKLRSELESKMQNLDLRSKQLDELVARSESDRRNLEHEKEKNGVKTKHLKMATLVQQRADENVLKLVEKHKLEKQVALDKIIKLEQQLDAKQKLELEIKQLQGKLEVMKHMPGEEDSESKKRIDELSEELQDKYDEMDAMESLYHTLLIKERKSNDELQDARKKLIDGLQTITTGRANIGIKRMGELDLKSLAIACGRKLSKEDAEVTAAILCSKWEADIKKPEWHPFRVVMVNGKKRELISEDDAKLQTLREEYGEEVYSLVTKALLEVNEYNPHGRYAVPELWNYKEGRKATLKEALQHVLKQWRTHKRKR

SEQ ID NO: 2281 - DNA, 642 bp, Triticum aestivum
  misc_feature: Ceres CLONE ID no. 616783
  misc_feature: Ceres CDNA ID no. 35383227
  CDS (81)..(509): REFERENCED BY SEQ ID NO: 2282
atcaccaaccaccaatccattccccaccagcaccttccggcgaaacacagcacctctccccggcgaagcagcagcgtccaatggcccccaaggcggagaagaagccggctgccgcggagaagaccccggcggccgagaagaccacggccgggaagaagcccaaggccgagaagcggcccccgaagtccaaggagggcggcgctgacaagaagaagaagaaggccaagaagagcgtggagacgtacaagatctacatcttcaaggtgctgaagcaggtgcacccggacatcggcatctcctccaaggccatgtccatcatgaactccttcatcaacgacatcttcgagaagctcgccggcgagtccgccaagctcgcccgctacaacaagaagccaaccatcacgtccagggagatccagacctccgtacgcctcgtcctccccggcgagctcgccaagcacgcagtgtccgagggcaccaaggccgtcaccaagttcacctcctcctagaccacgatggttctctgtaacagtcacctgtttagaccatgtcgtcttgtaacttgcgttggttctgtgggaacacactgtttcattacctcatgaaatggtaatggtgcttctttgaaaaaaaaaaaaaaaa

SEQ ID NO: 2282 - protein, 142 aa, Triticum aestivum; identical to SEQ ID NO: 1926
  misc_feature: Ceres CLONE ID no. 616783
  misc_feature: Ceres CDNA ID no. 35383227
  misc_feature: No seed is being produced by the plant
  misc_feature: The plant flowers significantly late compared to wild-type.
  misc_feature: Useful for biocontainment applications
  misc_feature: Useful for making plants with modulated flowering time
  misc_feature (49)..(121): Pfam Name: Histone PFAM Desc: Core histone H2A/H2B/H3/H4
  misc_feature: Homolog of GI Number: 531058 NR Desc: protein H2B
  misc_feature: Homolog of GI Number: 21801 NR Desc: histone H2B
  misc_feature: Homolog of GI Number: 22323 NR Desc: H2B histone
  misc_feature: Homolog of GI Number: 22325 NR Desc: H2B histone
  misc_feature: Homolog of GI Number: 531056 NR Desc: protein H2B
  misc_feature: Homolog of GI Number: 577825 NR Desc: H2B histone
  misc_feature: Homolog of GI Number: 34908130 NR Desc: putative histone H2B
  misc_feature: Homolog of GI Number: 34895838 NR Desc: putative histone H2B
  misc_feature: Homolog of GI Number: 34895896 NR Desc: putative histone H2B
  misc_feature: Homolog of GI Number: 1708107 NR Desc: Histone H2B
  misc_feature: Useful for delaying flowering time
  misc_feature: Useful for increasing chlorophyll and photosynthetic capacity
  misc_feature: Useful for making plants with altered leaf shape eg curled leaves
  misc_feature: Useful for making plants with altered leaf shape eg curled leaves
  misc_feature: Useful for making plants with increased biomass and foliage
  misc_feature: Useful for making plants with increased biomass and foliage
  misc_feature: Useful for sterility
  misc_feature: Useful for sterility

SEQ ID NO: 2283 - DNA, 775 bp, Triticum aestivum
  misc_feature: Ceres CLONE ID no. 616815
  misc_feature: Ceres CDNA ID no. 40351104
  CDS (102)..(557): REFERENCED BY SEQ ID NO: 2284
ccatcaagctagcagcacggcattaaactaatttgacagcgatcccgatccgtcatcacatctcacacgagacagtcgttcgatccgtccgtggagcagccatggcgcagctgatggacaaggccaaggggttcgtggccgagaagatatcgggggtgcagaagccggaggcggacctgtcggacatgtcggtgcagcacgttggccgcgacggcgccaccctgtccggccgcctcgacgtgcgcaacccctactcgcacaccatccccatctgcgagatcagctactccctcaagagcgccggccgcgacgtggcctccgggaccatgccggacccggggtcgctggtggccagcgacaccaccagcctcgacataccggtgaaggtgccgtacgacttcctgatgagcctggtgaaggacgccggcaaggactgggacctcgactacgagatgcgcgtcggcctcaccgtcgacctccccatcgtcggcaacttcacgctgccgctcaccaaggccggcgagctcaagctccccacgctctccgacctgttctaaacttaccgccgcacccagctaagtaggttcgaccgtgccgtactagctgctgcgctctccatcgcctgtacgggtgatgggtagtactgggctgggcgagcgggacgatcgatcgctgcctagctctgtttttacttcggatcgcggtgtgggtgtgcacgacgtaataatgatgtattgcgtgttgtatttctagacttttaaaaaaaaaaaaaaaa

SEQ ID NO: 2284 - protein, 151 aa, Triticum aestivum
  misc_feature: Ceres CLONE ID no. 616815
  misc_feature: Ceres CDNA ID no. 40351104
  misc_feature (2)..(151): Pfam Name: LEA_2 PFAM Desc: Late embryogenesis abundant protein
MAQLMDKAKGFVAEKISGVQKPEADLSDMSVQHVGRDGATLSGRLDVRNPYSHTIPICEISYSLKSAGRDVASGTMPDPGSLVASDTTSLDIPVKVPYDFLMSLVKDAGKDWDLDYEMRVGLTVDLPIVGNFTLPLTKAGELKLPTLSDLF

SEQ ID NO: 2285 - DNA, 588 bp, Triticum aestivum
  misc_feature: Ceres CLONE ID no. 616921
  misc_feature: Ceres CDNA ID no. 40351105
  CDS (141)..(347): REFERENCED BY SEQ ID NO: 2286
tttttacaaaccccccgtctttcgcccctgatcccgcatccggcatctcccactcctcctccggcacctgctccgatcccgcggacgccgtccgctgcctacatcgtctccggcgagctcccctgccccgccaagcaaggatgactacttcaaggcgtcttgctgacaggaagagtgcgaagtttcagaagaacattacaaagaggggctcagtgcctgaaactactgtgaagaaggggaatgactatcctgttggacccatcgtgcttggattcttcatctttgtcgtcataggatcatccttgtttcagattatcaggacggctactagtggtgggatggcttaatatcgagctaaaaacaagactatcattatcagagatttattatccatgtgtttgggaggcaatatcatatctgtaccctgtagcaaacttcgaccctgatgatgttatgtagagatttaaatcttgtgcagtcgtgtttacctcctgttaccaagaacctagtctaaacttgaaactaaatggtgcaagttgaaactttaaaattatataaaacttcaaatatccaaaaaaaaaaaaaaaa

SEQ ID NO: 2286 - protein, 68 aa, Triticum aestivum
  misc_feature: Ceres CLONE ID no. 616921
  misc_feature: Ceres CDNA ID no. 40351105
  misc_feature (1)..(65): Pfam Name: RAMP4 PFAM Desc: Ribosome associated membrane protein RAMP4
MTTSRRLADRKSAKFQKNITKRGSVPETTVKKGNDYPVGPIVLGFFIFVVIGSSLFQIIRTATSGGMA

SEQ ID NO: 2287 - DNA, 779 bp, Triticum aestivum
  misc_feature: Ceres CLONE ID no. 617239
  misc_feature: Ceres CDNA ID no. 29191813
  CDS (104)..(640): REFERENCED BY SEQ ID NO: 2288
aacacaagcagtcgatcgattcatccaagccagagttgagcaatactagcagtgagatttacagtgatttcagttcgtgtttgttggtgagagacaagagaagatggcctccaaccagaaccaggcgagctacgcggccggcgagaccaaggcccgcaccgaggagaagaccgggcagatggtgggtgcaaccaaggacaaggcggggcaggccacggaggccaccaagcagaaggccggagagacagccggggccaccaagcagaaggccggcgaggccaaggacaagacggcccagacggcgcaggcggccaaggaccgcgccgccgagagcaaggaccagaccggcagcttcctcggcgagaagacggaggcggccaagcagaaggccgccgagacggccgaggcggccaagcagaaggcgtcggaggcggcgcagtacgcgcaggagaggtcctccgacgccgcgcagtacaccaaggagtccgccgtggccggcaaggacaagaccggcagcgtgctccagcaggccggcgagacggtggtgggcgccgtggtgggcgccaaggacgccgtggcgaacacgctgggcatgggtggtgacaatgccaccaaggacaccaccaccaggaatcactagacgcatgcgttcgcgcttaatttgatctcctttagtcgtgttcggccgttcggtcgttcacgagccttctacagtacatattttgtatgtttccactctttcgtgatttccgctcatttagtcaaaaaaaaaaaaaaaa

SEQ ID NO: 2288 - protein, 178 aa, Triticum aestivum
  misc_feature: Ceres CLONE ID no. 617239
  misc_feature: Ceres CDNA ID no. 29191813
  misc_feature (10)..(79): Pfam Name: LEA_4 PFAM Desc: Late embryogenesis abundant protein
  misc_feature: Homolog of GI Number: 4929080 NR Desc: ABA
  misc_feature: Homolog of GI Number: 25989709 NR Desc: LEA2 protein
  misc_feature: Homolog of GI Number: 33342178 NR Desc: ABA inducible protein
  misc_feature: Homolog of GI Number: 25989707 NR Desc: LEA3 protein
  misc_feature: Homolog of GI Number: 25989705 NR Desc: LEA1 protein
  misc_feature: Homolog of GI Number: 21637 NR Desc: group 3 late embryogenesis abundant protein
  misc_feature: Homolog of GI Number: 48596909 NR Desc: LEA protein
  misc_feature: Homolog of GI Number: 48596907 NR Desc: LEA protein
  misc_feature: Homolog of GI Number: 55908886 NR Desc: putative group 3 LEA protein
  misc_feature: Homolog of GI Number: 56605421 NR Desc: group 3 late embryogenesis abundant protein
MASNQNQASYAAGETKARTEEKTGQMVGATKDKAGQATEATKQKAGETAGATKQKAGEAKDKTAQTAQAAKDRAAESKDQTGSFLGEKTEAAKQKAAETAEAAKQKASEAAQYAQERSSDAAQYTKESAVAGKDKTGSVLQQAGETVVGAVVGAKDAVANTLGMGGDNATKDTTTRNH

SEQ ID NO: 2289 - DNA, 573 bp, Triticum aestivum
  misc_feature: Ceres CLONE ID no. 617335
  misc_feature: Ceres CDNA ID no. 25446228
  CDS (101)..(385): REFERENCED BY SEQ ID NO: 2290
attcccaaacgccgccgcgtacagcccagctaagcagtgtagggttttagccatcgtctcccctcccactgccgtgccccatcgcacacaccccgccgcaatggccgccgtcgccgccgcaagatccttcctccgatccggatctgctgtctcctctctccgcggggctgccgccagggccgccccccgcgctggctcagctccgctcccgaggcgactcccggcctctgctccccgcgtcctcctaaggtcaccagtggagatgaccagcttctgcgtggagtcgctgatgcccatgcacagtgccacggcgtcggcgctcatgacgtcgctccttgccaccccggctcgcactgggtttggttggctcacagaagatggatgatttcttcttgtcggagcctgctgtgatggtacctggtacggacctgccaaattgaatttgaaagtactctttggtcgccttctcagtctgtactatcctgggattttcgtttgtataagtatctacgggattattatacctgattgtgccaagatttaaccgacttggtctcaaaaaaaaaaaaaaaa

SEQ ID NO: 2290 - protein, 94 aa, Triticum aestivum
  misc_feature: Ceres CLONE ID no. 617335
  misc_feature: Ceres CDNA ID no. 25446228
  misc_feature: Homolog of GI Number: 34904474 NR Desc: OSJNBa0086P08.16
MAAVAAARSFLRSGSAVSSLRGAAARAAPRAGSAPLPRRLPASAPRVLLRSPVEMTSFCVESLMPMHSATASALMTSLLATPARTGFGWLTEDG

SEQ ID NO: 2291 - DNA, 1182 bp, Triticum aestivum
  misc_feature: Ceres CLONE ID no. 617383
  misc_feature: Ceres CDNA ID no. 40041267
  CDS (121)..(834): REFERENCED BY SEQ ID NO: 2292
agaccagtgagcgcagcacacagatcagcactcaacaacaagccttgcgttgcaaaccatcgaccgaaggaaccgactgagctaagaggaggttcgccgagaagctagccgtgcgtagcaatggtgaagactgcggcagctgggagcactggcgatggcgccgtggcagcgaagcagcagcagcttggcggcaagatgaggacgtacaagggcgtgcggatgaggagctggggcgcgtgggtgtcggagatccgggcgcccgggcagaagacgcggatatggctcggctcccactccaccgccgaggccgccgcgcgcgcctacgacgccgcgctgctctgcctcaagggcgcctccgccgccgccgacctcaacttccccgtgcgcttccccttcgacctccccgccgccgccatgtcgcccaagtccatccagcgcgtcgccgcagccgccgccgccggggccagcgctaatgtgttcgacttcgccgctgccgacgacagtgccagcgctaatgccgtcgacttcgccggtgccgacgacagcgccagcgcggtcacccccgagtactgcagctcctccagcaatgcctcgccggtgagctctccggagacggcaagcagtggcggcgccgacctcgacggcgtagacctcctgggttacggttacagccagtgctcgctcgcggaaatcgaggccttcttccagtcgcccaagtgcatggagtacgccatgatggacccgtgcagcaccttcttcgctccggcgccgatagcaatggaggacgagtgcagctgggaggaaggaggcgacattgcgctctggagctactgaaccggagtccgggaagccggagaaccgaagaaactgacaaatcgttactcaagcgaaggccagaactggccatgcatggtgataactatccttaatttcatatatgtggtaaattaattcgattcattgtacacaacaacaataaggtagttgagcgttgtgggggggagctctcatggagctacatgttttaaggcagcttccatggagttaacctcccttcaattgcttgttacatccgtgttaaaaaagctgctttgcaattgcaagcatatatttcctttgaaaaaaaaaaaaaaaaaaaaaaaaaaaaaaaaaaaaaaaaaaaaaaaaaaaaaaaaaaaaaaa

SEQ ID NO: 2292 - protein, 237 aa, Triticum aestivum
  misc_feature: Ceres CLONE ID no. 617383
  misc_feature: Ceres CDNA ID no. 40041267
  misc_feature (27)..(92): Pfam Name: AP2 PFAM Desc: AP2 domain
  misc_feature: Homolog of GI Number: 51090499 NR Desc: putative DRE binding factor 2
  misc_feature: Homolog of GI Number: 50913131 NR Desc: AP2 domain
  misc_feature: Homolog of GI Number: 6552733 NR Desc: T26F17.14
  misc_feature: Homolog of GI Number: 8655993 NR Desc: Contains similarity to RAP2.10 protein from Arabidopsis thaliana gbAF003103
  misc_feature: Homolog of GI Number: 21554056 NR Desc: TINY
  misc_feature: Homolog of GI Number: 51969148 NR Desc: putative transcription factor
  misc_feature: Homolog of GI Number: 32455214 NR Desc: putative AP2 domain
  misc_feature: Homolog of GI Number: 50946411 NR Desc: AP2 domain transcription factor
  misc_feature: Homolog of GI Number: 37536842 NR Desc: putative DNA binding protein
  misc_feature: Homolog of GI Number: 21908034 NR Desc: DRE binding factor 2
MVKTAAAGSTGDGAVAAKQQQLGGKMRTYKGVRMRSWGAWVSEIRAPGQKTRIWLGSHSTAEAAARAYDAALLCLKGASAAADLNFPVRFPFDLPAAAMSPKSIQRVAAAAAAGASANVFDFAAADDSASANAVDFAGADDSASAVTPEYCSSSSNASPVSSPETASSGGADLDGVDLLGYGYSQCSLAEIEAFFQSPKCMEYAMMDPCSTFFAPAPIAMEDECSWEEGGDIALWSY

SEQ ID NO: 2293 - DNA, 684 bp, Triticum aestivum
  misc_feature: Ceres CLONE ID no. 617625
  misc_feature: Ceres CDNA ID no. 35383228
  CDS (93)..(521): REFERENCED BY SEQ ID NO: 2294
atcaccaaccagcaatccaattccccaccaccagtcccctcgcaccctccggcgaaccaccgcacctctccccggcgaagcaacagcgtccgatggctcccaaggcggagaagaagccggctgccgccgagaagaccccggcggcggagaagaccacggcggggaagaagcccaaggccgagaagcggccgcccaagtccaaggagggcggcgccgacaagaagaagaagaaggccaagaagagcgtggagacgtacaagatctacatcttcaaggtgctgaagcaggtgcacccggacatcggcatctcctccaaggccatgtccatcatgaactccttcatcaacgacatcttcgagaagctggccggcgagtcggccaagctagcccgctacaacaagaagcccaccatcacgtcccgggagatccagacctccgtccgcctcgtcctccccggggagctcgccaagcacgccgtctccgagggcaccaaggccgtcaccaagttcacctcctcttagatacgccgttccctgtcttcttggtcggtcgatgcttctctctgtaatggttagctgttcgggctatgtccctgtgtaacttgtgctggtgttgtggcatcacactgtttcagtatctcgtgaaatagtaacgatggttatttatccaaaaaaaaaaaaaaaa

SEQ ID NO: 2294 - protein, 142 aa, Triticum aestivum; identical to SEQ ID NO: 1926
  misc_feature: Ceres CLONE ID no. 617625
  misc_feature: Ceres CDNA ID no. 35383228
  misc_feature: No seed is being produced by the plant
  misc_feature: The plant flowers significantly late compared to wild-type.
  misc_feature: Useful for biocontainment applications
  misc_feature: Useful for making plants with modulated flowering time
  misc_feature (49)..(121): Pfam Name: Histone PFAM Desc: Core histone H2A/H2B/H3/H4
  misc_feature: Homolog of GI Number: 531058 NR Desc: protein H2B
  misc_feature: Homolog of GI Number: 21801 NR Desc: histone H2B
  misc_feature: Homolog of GI Number: 22323 NR Desc: H2B histone
  misc_feature: Homolog of GI Number: 22325 NR Desc: H2B histone
  misc_feature: Homolog of GI Number: 531056 NR Desc: protein H2B
  misc_feature: Homolog of GI Number: 577825 NR Desc: H2B histone
  misc_feature: Homolog of GI Number: 34908130 NR Desc: putative histone H2B
  misc_feature: Homolog of GI Number: 34895838 NR Desc: putative histone H2B
  misc_feature: Homolog of GI Number: 34895896 NR Desc: putative histone H2B
  misc_feature: Homolog of GI Number: 1708107 NR Desc: Histone H2B
  misc_feature: Useful for delaying flowering time
  misc_feature: Useful for increasing chlorophyll and photosynthetic capacity
  misc_feature: Useful for making plants with altered leaf shape eg curled leaves
  misc_feature: Useful for making plants with altered leaf shape eg curled leaves
  misc_feature: Useful for making plants with increased biomass and foliage
  misc_feature: Useful for making plants with increased biomass and foliage
  misc_feature: Useful for sterility
  misc_feature: Useful for sterility

SEQ ID NO: 2295 - DNA, 601 bp, Triticum aestivum
  misc_feature: Ceres CLONE ID no. 617831
  misc_feature: Ceres CDNA ID no. 40351106
  CDS (161)..(439): REFERENCED BY SEQ ID NO: 2296
gttctcccttccgcgaccaaagaaaggggaaaaccgataggaaaccttcctgtcaatggccgcctccccttccaagggcgttagggtttaactccaacttctcctagatctctctcaccgcccctctcctcgatcaggtactgcagcacctggtagcctcatggggtacctgcaggaggccagggagaatcacgtcaagaagaaggtcgaggaagctttgcgcagcaaaatgaaacaaaaggccctcaaggaatgtgatgtactgtgttcaaaatacgctgaatgtgctcgaggaagaactttctctgtggtttggacatgccgcaagcaagccaaagagttgaataactgtcttcatcaattcaccaatgatgcaatactggaagatatgaagaaggcttacatggccgaggaagagagcaaggagaagaacaaataatctttatgcatccatgcctgtatgtacactgctgcttttggaatttggcagttgcttactggttatcttagttgattgatgctgaattcctagagaccttttgtgaacatttgggtttgtccagatgcataacctggtatgatctcaaaaaaaaaaaaaaaa

SEQ ID NO: 2296 - protein, 92 aa, Triticum aestivum
  misc_feature: Ceres CLONE ID no. 617831
  misc_feature: Ceres CDNA ID no. 40351106
MGYLQEARENHVKKKVEEALRSKMKQKALKECDVLCSKYAECARGRTFSVVWTCRKQAKELNNCLHQFTNDAILEDMKKAYMAEEESKEKNK

SEQ ID NO: 2297 - DNA, 759 bp, Triticum aestivum
  misc_feature: Ceres CLONE ID no. 617835
  misc_feature: Ceres CDNA ID no. 36526813
  CDS (100)..(543): REFERENCED BY SEQ ID NO: 2298
agttccgtcccattattggttcttgcgaggaggggggcggagaaacggaagcaggaggcagagaggagatcgagccagagggcggcgagcaagggcgcgatggcgtccaagaggatacagaaggagcttaaggatctgcagaaggacccccctacctcatgcagcgcaggtcctgtgggtgaagatatgttccattggcaggcaacaataatgggcccatctgacagcccatattctggtggagttttcctagttactatccacttccctcctgattatcctttcaaaccaccaaaggtggcattccgcaccaaggtgttccatccaaacatcaacagcaacgggagcatttgtctggacatcctcaaggaccaatggagccccgctctgaccatttccaaggtgctgctgtccatctgctccctgctgtatgacccgaaccctgatgaccctctggtccctgagatcgcccacatgtacaagacggaccggcacaagtacgagagcaccgccaggacctggacgcaaaggtatgccatgtaatgcaagacggcggatgggtcgccggagtcagtcttgtttgtaacattctcgatcagttcgtgtgtgcccgcccagtgtgtcacctgtctgtcaaactggcactcgttgctcaactgtgtcacctggcgcagtgacttggaacatggaaccggtgttgcatattttggattcagataaatgtagccacctgcctgccacttaaaaaaaaaaaaaaaa

SEQ ID NO: 2298 - protein, 147 aa, Triticum aestivum
  misc_feature: Ceres CLONE ID no. 617835
  misc_feature: Ceres CDNA ID no. 36526813
  misc_feature: The plant produces a reduced number of seeds.
  misc_feature: Useful for biocontainment applications
  misc_feature (5)..(142): Pfam Name: UQ_con PFAM Desc: Ubiquitin
  misc_feature: Homolog of GI Number: 20152203 NR Desc: ubiquitin
  misc_feature: Homolog of GI Number: 83306206 NR Desc: ubiquitin conjugating enzyme E2
  misc_feature: Homolog of GI Number: 11762186 NR Desc: AT4g27960
  misc_feature: Homolog of GI Number: 23297139 NR Desc: E2 ubiquitin
  misc_feature: Homolog of GI Number: 18417097 NR Desc: ubiquitin
  misc_feature: Homolog of GI Number: 34911986 NR Desc: P0694A04.26
  misc_feature: Homolog of GI Number: 66354464 NR Desc: ubiquitinating enzyme
  misc_feature: Homolog of GI Number: 5762457 NR Desc: ubiquitin
  misc_feature: Homolog of GI Number: 19347859 NR Desc: putative E2
  misc_feature: Homolog of GI Number: 21280893 NR Desc: putative E2
MASKRIQKELKDLQKDPPTSCSAGPVGEDMFHWQATIMGPSDSPYSGGVFLVTIHFPPDYPFKPPKVAFRTKVFHPNINSNGSICLDILKDQWSPALTISKVLLSICSLLYDPNPDDPLVPEIAHMYKTDRHKYESTARTWTQRYAM

SEQ ID NO: 2299 - DNA, 585 bp, Triticum aestivum
  misc_feature: Ceres CLONE ID no. 617920
  misc_feature: Ceres CDNA ID no. 40351107
  CDS (116)..(397): REFERENCED BY SEQ ID NO: 2300
actttctgcacctaaggttccttgctttcctcgcaactttggttccccggaacccgaagctttctccggtcagtcgccgccaccgccgccgaggaagagcagcctcgtcgtcttcatggactacaggttctactgcatgaccctgaggatgagcatagactgcaacgggtgctaccagaagatcaggagggcgctgctccagatgcaagagctggagagccacctgattgaccggaagcacggccgggtgagcgtctggggcgccttcagcccgcaggacgtggccatcaagatcaggaagcggaccaaccggcgcgtcgagatactggagctcagggaggccacagggccagggggcggcgacgagcagggcgccggcggcgggcagatgccctgaaacccaccttgtatggcttgtgccagcactcggatgctgctccagttagcttctgtacttgaaacttttcagaggatttaccccttcttgtgtgcgagcttataaagtcatcattttgatctgtactcctcatgacctgtttgagtgaagttcaccacttagttatttcaccaaaaaaaaaaaaaaaa

SEQ ID NO: 2300 - protein, 93 aa, Triticum aestivum
  misc_feature: Ceres CLONE ID no. 617920
  misc_feature: Ceres CDNA ID no. 40351107
MDYRFYCMTLRMSIDCNGCYQKIRRALLQMQELESHLIDRKHGRVSVWGAFSPQDVAIKIRKRTNRRVEILELREATGPGGGDEQGAGGGQMP

SEQ ID NO: 2301 - DNA, 582 bp, Triticum aestivum
  misc_feature: Ceres CLONE ID no. 617925
  misc_feature: Ceres CDNA ID no. 25445619
  CDS (113)..(421): REFERENCED BY SEQ ID NO: 2302
gctttccccttccccacccctaagccgccgtcttccttctccacctcctaccgcaacacaggacgccacaacttccagcaacggcgcggttgctcttgaatcaggctgaaaaatgatgggttcacgaggtaccagtgttgtgctctcaagagctgctcggatgaggcaaaagctgcagtctgctttggaggccagtgcactagatattgaagatgtttcttaccaacatgctgggcatgcagctgtgaaggacaatgcaaatgagacgcattttaacatcaaggtaatttcacccaagtttgaagggcagaaccttgtgaagcgtcataggatggtgtacgatctcttgaccgatgagttgaactcgggtcttcatgctatctccattgttgcgaaaactccaacagagtcgggatcatgaatgtaattttttttgacttgattaatgtttgttccagaataagttgattgcagcaatagcatgtagccccgaatcggttggtaaaacaatgttatggcatgcatatttcttcatgataaagacatattgttgccttggttgaagcaaaaaaaaaaaaaaaa

SEQ ID NO: 2302 - protein, 101 aa, Triticum aestivum
  misc_feature: Ceres CLONE ID no. 617925
  misc_feature: Ceres CDNA ID no. 25445619
  misc_feature (19)..(99): Pfam Name: BolA PFAM Desc: BolA
  misc_feature: Homolog of GI Number: 51969256 NR Desc: BolA like protein
  misc_feature: Homolog of GI Number: 51969538 NR Desc: BolA like protein
  misc_feature: Homolog of GI Number: 51968914 NR Desc: BolA like protein
  misc_feature: Homolog of GI Number: 23505763 NR Desc: At1g55800/F14J16_13
  misc_feature: Homolog of GI Number: 50899228 NR Desc: BolA
  misc_feature: Homolog of GI Number: 8778492 NR Desc: F20N2.18
  misc_feature: Homolog of GI Number: 32394618 NR Desc: BolA
  misc_feature: Homolog of GI Number: 69927892 NR Desc: BolA
  misc_feature: Homolog of GI Number: 34858252 NR Desc: similar to CGI
MGSRGTSVVLSRAARMRQKLQSALEASALDIEDVSYQHAGHAAVKDNANETHFNIKVISPKFEGQNLVKRHRMVYDLLTDELNSGLHAISIVAKTPTESGS

SEQ ID NO: 2303 - DNA, 588 bp, Triticum aestivum
  misc_feature: Ceres CLONE ID no. 618001
  misc_feature: Ceres CDNA ID no. 36528611
  CDS (130)..(351): REFERENCED BY SEQ ID NO: 2304
ctaaccttacccgcttcatacataacccggcggccgcatctcagatcccccaattcggaagttctccttctccaagcaaaaatcagagggttttagggttctagaacgagcgggtcggcgagaacagccatggacgcctcccccgagctgcaacagttcctggagcaagagaagcagaagatggtgatgagtgagatggtaaccaagttgacaaatgtgtgctgggacaaatgcatcaccagcaccccaggaagcaagttcagctccggtgaaactacctgcctgaccaattgtgctcagaggtatcttgacatgagcatgataattgcgaagaggttccagatgcagtagggcgtctccagctgcagctggttgcgtcatcaaaaaaattccaaactctgaacatgccaacaatggccagttgtaacagtgaaaatatttaatcttctgtcgtaaacgcttggttagtactcagtgtagttgcatctgtggtgaacctttggttagctttcttgtgaagctactgtcattttattctccaatcacttagttggtttcgtttcaagtcaaagaaaaaaaaaaaaaaaa

SEQ ID NO: 2304 - protein, 73 aa, Triticum aestivum
  misc_feature: Ceres CLONE ID no. 618001
  misc_feature: Ceres CDNA ID no. 36528611
  misc_feature (8)..(73): Pfam Name: zf PFAM Desc: Tim10/DDP family zinc finger
  misc_feature: Homolog of GI Number: 50947997 NR Desc: putative small zinc finger
  misc_feature: Homolog of GI Number: 21592903 NR Desc: small zinc finger
  misc_feature: Homolog of GI Number: 5107157 NR Desc: small zinc finger
  misc_feature: Homolog of GI Number: 77548554 NR Desc: small zinc finger
  misc_feature: Homolog of GI Number: 77553573 NR Desc: SET domain protein 105
  misc_feature: Homolog of GI Number: 57227509 NR Desc: itochondrial import inner membrane translocase subunit tim8
  misc_feature: Homolog of GI Number: 16758098 NR Desc: translocase of inner mitochondrial membrane 8 homolog a
  misc_feature: Homolog of GI Number: 7305577 NR Desc: translocase of inner mitochondrial membrane 8 homolog a
  misc_feature: Homolog of GI Number: 55240170 NR Desc: ENSANGP00000017986
MDASPELQQFLEQEKQKMVMSEMVTKLTNVCWDKCITSTPGSKFSSGETTCLTNCAQRYLDMSMIIAKRFQMQ

SEQ ID NO: 2305 - DNA, 753 bp, Triticum aestivum
  misc_feature: Ceres CLONE ID no. 618028
  misc_feature: Ceres CDNA ID no. 36526297
  CDS (84)..(431): REFERENCED BY SEQ ID NO: 2306
accaataccacatagcaaatctagctaattacccaccctctccctgcgagccctccaccacaactacagctaactcggtcgagatggctcgcactgcagcaacaaagctcgtgctggtcgccctggtggcggcaatgctcctggtagcctccgacgcggcgatctcctgcggtcaggtgaactctgccctggcctcctgcgtctcctacgcaaaaggcagcggggccagcccgcctggggcctgctgttccggagttaggagattggccggcttagcgcggagcaccgccgacaagcaagcggcatgcaggtgcatcaagagtgctgccggtgggctcaaccccggaaaggctgcaagtatcccctccaagtgcggcgtcagcatcccctactccatcagcgcatccgtggactgctctaagatccactgatcgattacttgccgccatcatcgccgattatagctccagcgatagatgccgagtacgttgaggtcacacacacacatatatatatatatatatacacatatacatgaataaatgctctgatatgatctccatgtgagagacaggagtacgtacgtcgagccagctctgcatagccggccactgttgtatctattttgtatcagcgtttgattgttcgttcactccctttgagcagagacgggagtttgttgtactttgtaccatgtgcactcatggtattataaattaatctagctctattcagttaaaaaaaaaaaaaaaa

SEQ ID NO: 2306 - protein, 115 aa, Triticum aestivum
  misc_feature: Ceres CLONE ID no. 618028
  misc_feature: Ceres CDNA ID no. 36526297
  misc_feature (29)..(111): Pfam Name: Tryp_alpha_amyl PFAM Desc: Protease inhibitor/seed storage/LTP family
  misc_feature: Homolog of GI Number: 55792862 NR Desc: lipid transfer protein
  misc_feature: Homolog of GI Number: 54111986 NR Desc: lipid transfer protein
  misc_feature: Homolog of GI Number: 443799 NR Desc: Cw
  misc_feature: Homolog of GI Number: 1098265 NR Desc: lipid transfer protein
  misc_feature: Homolog of GI Number: 1045199 NR Desc: lipid transfer protein
  misc_feature: Homolog of GI Number: 1045201 NR Desc: lipid transfer protein
  misc_feature: Homolog of GI Number: 443797 NR Desc: Cw
  misc_feature: Homolog of GI Number: 1098266 NR Desc: lipid transfer protein
  misc_feature: Homolog of GI Number: 642017 NR Desc: phospholipid transfer protein precursor
  misc_feature: Homolog of GI Number: 587446 NR Desc: lipid transfer protein precursor
MARTAATKLVLVALVAAMLLVASDAAISCGQVNSALASCVSYAKGSGASPPGACCSGVRRLAGLARSTADKQAACRCIKSAAGGLNPGKAASIPSKCGVSIPYSISASVDCSKIH

SEQ ID NO: 2307 - DNA, 649 bp, Triticum aestivum
  misc_feature: Ceres CLONE ID no. 618051
  misc_feature: Ceres CDNA ID no. 25891870
  CDS (74)..(508): REFERENCED BY SEQ ID NO: 2308
accacagcatcagcaacccccctcacatcccaccgaaaccccatcttcccacacgctccaaccaccagcacccatggcacccaaggcggcggaaaagaagccggtggccacggccgagaagacgacggcggggaagaagcccaaggcggagaagcgggcgccggcgtccaaggaggccggcggcgaggggaagcagcggggcaggaagaagggcagcaaggccaagaagggcgtggagacgtacaagatctacatcttcaaggtgctcaagcaggtgcaccccgacgtgggcatctcctccaaggccatgtccatcatgaactccttcatcaacgacatcttcgagaagctcgccggcgagtccgccaagctggcgaggtacaacaagaagcccaccatcacgtcccgggagatccagacctccgtccgcctcgtcctccccggcgagctcgccaagcacgccgtctccgagggcaccaaggccgtcaccaagttcacctcatcctaggcttcatcgtcgtcgttttaacgaatcgatgatgatgttctgtatgtagttggcagtacgatgttacaatatttgtaaggattgtgctgcctgtgtgtttgaagaaatagtgatgttgctgttcgaaaaaaaaaaaaaaaa

SEQ ID NO: 2308 - protein, 144 aa, Triticum aestivum
  misc_feature: Ceres CLONE ID no. 618051
  misc_feature: Ceres CDNA ID no. 25891870
  misc_feature: No seed is being produced by the plant
  misc_feature: The plant flowers significantly late compared to wild-type.
  misc_feature: Useful for biocontainment applications
  misc_feature: Useful for making plants with modulated flowering time
  misc_feature (51)..(123): Pfam Name: Histone PFAM Desc: Core histone H2A/H2B/H3/H4
  misc_feature: Homolog of GI Number: 122033 NR Desc: Histone H2B.2
  misc_feature: Homolog of GI Number: 34895900 NR Desc: putative histone H2B
  misc_feature: Homolog of GI Number: 34895838 NR Desc: putative histone H2B
  misc_feature: Homolog of GI Number: 34895896 NR Desc: putative histone H2B
  misc_feature: Homolog of GI Number: 21801 NR Desc: histone H2B
  misc_feature: Homolog of GI Number: 34895888 NR Desc: putative histone H2B
  misc_feature: Homolog of GI Number: 50947133 NR Desc: putative Histone H2B.2
  misc_feature: Homolog of GI Number: 34895832 NR Desc: putative histone H2B
  misc_feature: Homolog of GI Number: 577825 NR Desc: H2B histone
  misc_feature: Homolog of GI Number: 531058 NR Desc: protein H2B
MAPKAAEKKPVATAEKTTAGKKPKAEKRAPASKEAGGEGKQRGRKKGSKAKKGVETYKIYIFKVLKQVHPDVGISSKAMSIMNSFINDIFEKLAGESAKLARYNKKPTITSREIQTSVRLVLPGELAKHAVSEGTKAVTKFTSS

SEQ ID NO: 2309 - DNA, 796 bp, Triticum aestivum
  misc_feature: Ceres CLONE ID no. 618098
  misc_feature: Ceres CDNA ID no. 25445618
  CDS (161)..(505): REFERENCED BY SEQ ID NO: 2310
ctctaaccctgcagccgccgccccgtccatgttctgatcggcttcgccacccacgtcgcgccgcgcgccgccgccgccgccctgcgctgtccgctgcatccccggctcgccgcgcggtacgactccggccccacgtgctctccgagagaaaccagtaacaatggtcgtccctccaccagacagggccgctaggatcgtcggttttctcaagccctaccttttgaggatgcatttctcgaacaagtatgtaactgcccaggtcatccataccccaacagcaaccgtcgcgtgttctgcaagctcgcaggagaagctgctgagaccgaacttggagtcgacccgcgacgtatctgccgccgcaaagattgggaagttgctgggggagcgcctgctgctcaaggggatacctgccgtgtccatccacatgaagagagagcagaagtaccacgggaaagtcaaggctgttatagattctgtcagagaatctggtgtcaagctgttgtgatggtgaaaacatagagctcggcttagcatttgcgcagtcttgagctgcatttctgatttttggactgattgcaacttttgtgttcatgaatttggcaatgaacgaacgtttgtccgggactccaggtcaataaaaggactctgttgtaggagctcgacctgataatctgcagtagcactttttatttgaaacaaatctgctgtagcacttgatgacttgaggatcaacagcctgttatgtttctcctctccgaaatgcaacggagattattgggcgaaaaaaaaaaaaaaa

SEQ ID NO: 2310 - protein, 114 aa, Triticum aestivum
  misc_feature: Ceres CLONE ID no. 618098
  misc_feature: Ceres CDNA ID no. 25445618
  misc_feature (24)..(113): Pfam Name: Ribosomal_L18p PFAM Desc: Ribosomal L18p/L5e family
  misc_feature: Homolog of GI Number: 50917923 NR Desc: putative ribosomal protein L18
  misc_feature: Homolog of GI Number: 27904926 NR Desc: 50S ribosomal protein L18
  misc_feature: Homolog of GI Number: 1044980 NR Desc: ribosomal protein L18
  misc_feature: Homolog of GI Number: 1208546 NR Desc: ribosomal protein L18
  misc_feature: Homolog of GI Number: 68548618 NR Desc: Ribosomal protein L18
  misc_feature: Homolog of GI Number: 28897047 NR Desc: ribosomal protein L18
  misc_feature: Homolog of GI Number: 32475074 NR Desc: 50S ribosomal protein L18
MVVPPPDRAARIVGFLKPYLLRMHFSNKYVTAQVIHTPTATVACSASSQEKLLRPNLESTRDVSAAAKIGKLLGERLLLKGIPAVSIHMKREQKYHGKVKAVIDSVRESGVKLL

SEQ ID NO: 2311 - DNA, 668 bp, Triticum aestivum
  misc_feature: Ceres CLONE ID no. 618176
  misc_feature: Ceres CDNA ID no. 40351108
  CDS (73)..(432): REFERENCED BY SEQ ID NO: 2312
tcgaaaactcctctctctccccccactctttgcccaagcccccctactgccggcggcggagacgacggaaacatggtgcagcgtctgacgtaccggaagaggcacagctatgccaccaagtccaaccagacgcgggtcgtcaagaccccaggtggtaagctcgtgtaccagtacaccaagaagagggcgagcggccccaagtgccctgtgaccgggaagaagatccaggggattccccacctcaggcctactgaatacaaaagatcaaggttgtctaggaaccgcaggactgtgaaccgtccctatggtggagtgctctctggaactgcagtgagggaaaggatcatccgcgccttcttggtggaggagcagaagatcgtgaagaaggtgttgaaaatacagaagaccaaggacaagacgacctcaaagtaatctgatcgaaacggaagtgcgaagtgagatggtgttctgtaaacaaggaaaatatttttgttggtggttatgatcaatggtttagtcccttctagctaaatgttttagagtacttgaaatccttctgctgccgtgacatcagagattgtgaaacatttgatacccatttgcagtttcatttctgaatgcatgttgaatctacttatgttaatttggtttcaaaaaaaaaaaaaaaa

SEQ ID NO: 2312 - protein, 119 aa, Triticum aestivum
  misc_feature: Ceres CLONE ID no. 618176
  misc_feature: Ceres CDNA ID no. 40351108
  misc_feature (5)..(103): Pfam Name: Ribosomal_L34e PFAM Desc: Ribosomal protein L34e
MVQRLTYRKRHSYATKSNQTRVVKTPGGKLVYQYTKKRASGPKCPVTGKKIQGIPHLRPTEYKRSRLSRNRRTVNRPYGGVLSGTAVRERIIRAFLVEEQKIVKKVLKIQKTKDKTTSK

SEQ ID NO: 2313 - DNA, 579 bp, Triticum aestivum
  misc_feature: Ceres CLONE ID no. 618177
  misc_feature: Ceres CDNA ID no. 40351109
  CDS (113)..(436): REFERENCED BY SEQ ID NO: 2314
aaaaacttggccccgcctcctgccgccaccctccgtcctcgccgcgcctccgccgttccgccccgggttttcaggtcgccggccttcgccccgtcagccagccgccgcgtccatggcggaggtcgcgcccgttgatcaggggaagaaggaggaggaggagttcagcacggggcccctctccattctcatgctcagcgtcaagaacaacactcaggtgcttatcaactgcaggaacaacaagaagttgcttggtcgcgtgagggcatttgatcgtcattgcaacatggttcttgagaacgtcagggagatgtggactgaggttccaaagactggtaaaggcaagaagaaggctctcccggtgaacaaggacaggttcataagcaagatgttcctccgcggggattcggtcatcatcgtcctcaggaacccgaaatgagtttgacgactcggcgtgaaccagaagagtctcttttcgctatgctgctgttagtttgtatgccgaatgctctggatcagggagtgtgtaagacacagttatcatgcaagcattgcctgtactgattaaaaaaaaaaaaaaaa

SEQ ID NO: 2314 - protein, 107 aa, Triticum aestivum
  misc_feature: Ceres CLONE ID no. 618177
  misc_feature: Ceres CDNA ID no. 40351109
  misc_feature (25)..(104): Pfam Name: LSM PFAM Desc: LSM domain
MAEVAPVDQGKKEEEEFSTGPLSILMLSVKNNTQVLINCRNNKKLLGRVRAFDRHCNMVLENVREMWTEVPKTGKGKKKALPVNKDRFISKMFLRGDSVIIVLRNPK

SEQ ID NO: 2315 - DNA, 628 bp, Triticum aestivum
  misc_feature: Ceres CLONE ID no. 618378
  misc_feature: Ceres CDNA ID no. 40351110
  CDS (78)..(419): REFERENCED BY SEQ ID NO: 2316
tcccgggcgctggcggcggattagggtttcacctgcgtccattctcaacgttagcaggagcgagtgggagtccggccatggcgccgtcgcagcccaagtcagggctcttcgtgggcatcaacaagggccacgtcgtcaccaagcgcgagctgccgccacgcccgtccgaccgcaaggggaaaggtaccaagagggtgcattttgtcaggaacttgattagggaggttgctggattcgctccctatgagaaacgtatcactgagcttcttaaggttggaaaggacaagcgcgcactcaaggtcgccaagagaaagcttggtactcacaagagagctaagaagaagagagaggagatgtcaagtgtccttaggaagatgaggtctgctggtggtggtggtgctggtgacaagaagaaatagagcgtggctagtcggtgaattttatcccaaaactctgtcctgtattaccagtccgtacctttagagctatctatggccatagtgttggattttggaattaagcccgtggtttctattttgagaagaccaatctttttaagatatttatgtcagattggtgcctttgttttattgttacttgctttgtttgatcaaaaaaaaaaaaaaaa

SEQ ID NO: 2316 - protein, 113 aa, Triticum aestivum
  misc_feature: Ceres CLONE ID no. 618378
  misc_feature: Ceres CDNA ID no. 40351110
  misc_feature (5)..(103): Pfam Name: Ribosomal_L36e PFAM Desc: Ribosomal protein L36e
MAPSQPKSGLFVGINKGHVVTKRELPPRPSDRKGKGTKRVHFVRNLIREVAGFAPYEKRITELLKVGKDKRALKVAKRKLGTHKRAKKKREEMSSVLRKMRSAGGGGAGDKKK

SEQ ID NO: 2317 - DNA, 1449 bp, Triticum aestivum
  misc_feature: Ceres CLONE ID no. 618427
  misc_feature: Ceres CDNA ID no. 36582455
  CDS (261)..(1214): REFERENCED BY SEQ ID NO: 2318
ccgaacccctcgcgtcctgaccttcgcttccaagttccaacgcggcggatctaccttcaactgccgcggtgccgccttagcgtcaccgccggcgactcgatccgcccccctcctcccgccactcggggacgcgcttcgcccgccaccgccaccgccaccgccaccgccaccgccgttccccttcttcctcgcccccgggagatcctggccataggatctccttccttcctccgaggatcaaagttcaggttggtgccaacatgtcgtcgaagaagatagagctagaccacaaggacatggttcatgattctgccattgactactatgggaagcgccttgccacagcctcctctgactccactgtgaagatcaccaacattgggggtgcatctgccccgtcccagctcgttgcgaccctcactggccactatggtcctgtgtggcgtgtcggatgggcccatcccaagtatggttcaattctcgcatcctgtggctatgatggccgtgtaatagtctggaaggaggctgccactgggcaatggtctcagctccatgtgtttgacaaccacaaggcctccgttaactccattgcttgggctccatatgaacttggcctttgccttgcctgtgggtcttctgacggcaccatctctgtcatctccatgcggcttgatacaggaggatgtgaggccgcaaccatcgagcgggcacaccctgttggcgtgacagcagtctcctgggctccagcagcagcacttgggtccatggttggctcagatcagctcgtccacaagatcgtgtctggtggctttgactgtgtcgtcaaggtgtgggagtttgtcaatggtggctggaagctggagagcgctctggtctccgacatgcacaaagagtgcgtgagagacgtctcatgggcaccggtcctgggcctggcaaagtcaaccatcgccagcgcgtcccaagacggcaaggttgtcatctggaccagtggcaaaggaggaggcaagtgggaaggaaagctcatgcgcgacttcgaggctccggtgtggagggtgtcctggtccctgacgggaaacatactgtccgtggctgccggcgagggcgacataactctgtggaaggaatcgtcggacgggcagtgggagtcgctgtggaccaaggcctcagaggagccgccgcaggaggagcaggcgatcgaggaggccatgcagtaggggagtcgacaccacatcgcccgtgtcgatttcggaccgtgattcgtgtttctagcgccaacgccatgacttgctttcaccagatactcttagagatactcgttgccatcttttttgccgtttgtttctatatggacaatgtctgattgcactgttaagttttatactggtcatgtactcttgtgcacaccgtcagaatgtatcgtctgtttgaactgcaaaaaaaaaaaaaaaa

SEQ ID NO: 2318 - protein, 317 aa, Triticum aestivum
  misc_feature: Ceres CLONE ID no. 618427
  misc_feature: Ceres CDNA ID no. 36582455
  misc_feature (2)..(39): Pfam Name: WD40 PFAM Desc: WD domain
  misc_feature: Homolog of GI Number: 50935451 NR Desc: putative Sec13p
  misc_feature: Homolog of GI Number: 51963858 NR Desc: PREDICTED OSJNBa0081C13.10 gene product
  misc_feature: Homolog of GI Number: 83283979 NR Desc: protein transport SEC13
  misc_feature: Homolog of GI Number: 21593236 NR Desc: transport protein SEC13
  misc_feature: Homolog of GI Number: 47086987 NR Desc: zgc:63980
  misc_feature: Homolog of GI Number: 55619799 NR Desc:  similar to SEC13
  misc_feature: Homolog of GI Number: 28317166 NR Desc: LD03471p
  misc_feature: Homolog of GI Number: 46441998 NR Desc: likely COPII vesicle coat component
  misc_feature: Homolog of GI Number: 71667976 NR Desc: protein transport protein sec13
  misc_feature: Homolog of GI Number: 72009171 NR Desc:  similar to sec13
MSSKKIELDHKDMVHDSAIDYYGKRLATASSDSTVKITNIGGASAPSQLVATLTGHYGPVWRVGWAHPKYGSILASCGYDGRVIVWKEAATGQWSQLHVFDNHKASVNSIAWAPYELGLCLACGSSDGTISVISMRLDTGGCEAATIERAHPVGVTAVSWAPAAALGSMVGSDQLVHKIVSGGFDCVVKVWEFVNGGWKLESALVSDMHKECVRDVSWAPVLGLAKSTIASASQDGKVVIWTSGKGGGKWEGKLMRDFEAPVWRVSWSLTGNILSVAAGEGDITLWKESSDGQWESLWTKASEEPPQEEQAIEEAMQ

SEQ ID NO: 2319 - DNA, 698 bp, Triticum aestivum
  misc_feature: Ceres CLONE ID no. 618508
  misc_feature: Ceres CDNA ID no. 35383229
  CDS (85)..(432): REFERENCED BY SEQ ID NO: 2320
tcaccaagaaactacgccaccgccgagcaaacaagcaagcaccgtgcagaggcggccagcagcagaaacaagccgggagcgacgatggctgcggcggcgggtgcggggagcggcggcggcggcgtggtgaagcacctcgtcatcgtgcagttcaaggaggacgtgaccccggagcggctggaagggctcatccgcggctacgccggcctcgtcgacaaggtcccctccatgaaggccttccactggggaaccgatgtgagcatagagaacatgcatcagggattcacacacgtcttcgagtccacttttgaaagcacagagggagtcaaggagtacgtttaccacccagcgcacgtcgagtttgcaactgatttcttgggttcaacggagaaagtcctcataatcgacttcaaacccacagctggcaactaatggtttcggccaagtgagacactcagagcttctgttgccgcctgccttattggtgttgcttctgtgtgtttgtgttcgaatttcatctggcattcacaagctatgtaccttgtgctaaataaatctgttcggcctgttgtatctgttgagaatgaaggctggatttggtgcaactgtgttctgacattttgtagcacttaataatctgtatgataaattgatcgtatgtgaggcagtttcgtatctggataaaaaaaaaaaaaaaa

SEQ ID NO: 2320 - protein, 115 aa, Triticum aestivum
  misc_feature: Ceres CLONE ID no. 618508
  misc_feature: Ceres CDNA ID no. 35383229
  misc_feature (15)..(111): Pfam Name: Dabb PFAM Desc: Stress responsive A/B Barrel Domain
  misc_feature: Homolog of GI Number: 50901690 NR Desc: B1108H10.8
  misc_feature: Homolog of GI Number: 33087079 NR Desc: stress
  misc_feature: Homolog of GI Number: 34914680 NR Desc: B1075D06.14
  misc_feature: Homolog of GI Number: 34810575 NR Desc: Chain B
  misc_feature: Homolog of GI Number: 21554999 NR Desc: pop3 peptide
  misc_feature: Homolog of GI Number: 39654614 NR Desc: Chain A
  misc_feature: Homolog of GI Number: 56202042 NR Desc: putative stress
  misc_feature: Homolog of GI Number: 13445204 NR Desc: stable protein 1
  misc_feature: Homolog of GI Number: 169459 NR Desc: pop3 peptide
MAAAAGAGSGGGGVVKHLVIVQFKEDVTPERLEGLIRGYAGLVDKVPSMKAFHWGTDVSIENMHQGFTHVFESTFESTEGVKEYVYHPAHVEFATDFLGSTEKVLIIDFKPTAGN

SEQ ID NO: 2321 - DNA, 639 bp, Triticum aestivum
  misc_feature: Ceres CLONE ID no. 618531
  misc_feature: Ceres CDNA ID no. 36707408
  CDS (80)..(418): REFERENCED BY SEQ ID NO: 2322
cttcccgggcgctggcggcggattagggtttcacttgcatccattctcaacgttagcaggagcgagtgggagtccggccatggcgccgtcgcagcccaagtcagggctcttcgtgggcatcaacaagggccacgtcgtcaccaagcgcgagctgccgcctcgcccgtccgaccgcaaggggaaaggtacaaagagggtgcattttgtcaggaacttgatcagggaggttgctggatttgctccctatgagaagcgtatcactgagcttcttaaggttggaaaggacaagcgtgcactcaaggtcgccaagagaaagcttggtactcacaagagagcaaagaagaagagagaggagatgtcaagtgtccttaggaagatgaggtctgctggtggtggtgctggtgacaagaagaaatagaacttggctagctggtgaattttatccggaagcaaagtcctgtattaccagtccgtacctatagagctatggccattgtgttgacactatctttagcccgtggtttctattttgagaagaccaatctctttaagatttttacatgagtctggtgcctttgtttgattacttggtactctgctgtttattcagttatgtagcttgccaaaaaaaaaaaaaaa

SEQ ID NO: 2322 - protein, 112 aa, Triticum aestivum
  misc_feature: Ceres CLONE ID no. 618531
  misc_feature: Ceres CDNA ID no. 36707408
  misc_feature (5)..(103): Pfam Name: Ribosomal_L36e PFAM Desc: Ribosomal protein L36e
  misc_feature: Homolog of GI Number: 57471698 NR Desc: ribosomal protein L36
  misc_feature: Homolog of GI Number: 50931673 NR Desc: putative 60S ribosomal protein L36
  misc_feature: Homolog of GI Number: 34908154 NR Desc: putative 60S RIBOSOMAL PROTEIN L36
  misc_feature: Homolog of GI Number: 56182368 NR Desc: putative 60S ribosomal protein L36
  misc_feature: Homolog of GI Number: 20148501 NR Desc: 60S ribosomal protein L36
  misc_feature: Homolog of GI Number: 12642884 NR Desc: putative 60S ribosomal protein
  misc_feature: Homolog of GI Number: 21592383 NR Desc: 60S ribosomal protein L36
  misc_feature: Homolog of GI Number: 21554932 NR Desc: 60S RIBOSOMAL PROTEIN L36 homolog
  misc_feature: Homolog of GI Number: 17865758 NR Desc: 60S ribosomal protein L36
  misc_feature: Homolog of GI Number: 1276967 NR Desc: putative ribosomal protein
MAPSQPKSGLFVGINKGHVVTKRELPPRPSDRKGKGTKRVHFVRNLIREVAGFAPYEKRITELLKVGKDKRALKVAKRKLGTHKRAKKKREEMSSVLRKMRSAGGGAGDKKK

SEQ ID NO: 2323 - DNA, 641 bp, Triticum aestivum
  misc_feature: Ceres CLONE ID no. 618873
  misc_feature: Ceres CDNA ID no. 29191544
  CDS (78)..(422): REFERENCED BY SEQ ID NO: 2324
gcagaaaccctagcagatcgctcgagccctccgccgccgccgcgccttcagctctctccttccttcaccgattcaagatgaagttcatcgctgcctatctgcttgcttacctctctggcaacgccagcccctctgcagaggacctgacatccattcttgagtcagttggttgtgaaatcgacaatgagaagatggaactcatgctgtcccaagtgaagggcaaggacatcactgagctcttggctgctggtagggagaagtttgctgcggtaccatctggtggtggtggtggtgtggctgtttcagccgctgctcctgctgctggtggtgctgctgctcctgcagctgagtcaaagaaagaagagaaggtcgtggagaaggaagagagtgatgatgacatgggcttcagtctgttcgactaagtcgtggggcatcttgtgtctgcagtatctatccttggccaggaaactagagtcaatgatgttttagcctttatttagctgagttgtgaaacgctggcaagacaatgttttgatatgtaattcagcccctggttgctggttgatttactggtgaaccatacctttgctatccaattttggtgctttaacaatgcattgttttgaaaaaaaaaaaaaaaa

SEQ ID NO: 2324 - protein, 114 aa, Triticum aestivum
  misc_feature: Ceres CLONE ID no. 618873
  misc_feature: Ceres CDNA ID no. 29191544
  misc_feature (17)..(113): Pfam Name: Ribosomal_60s PFAM Desc: 60s Acidic ribosomal protein
  misc_feature: Homolog of GI Number: 32400824 NR Desc: acidic ribosomal protein P2a
  misc_feature: Homolog of GI Number: 790508 NR Desc: 60S acidic ribosomal protein
  misc_feature: Homolog of GI Number: 34906408 NR Desc: putative 60S acidic ribosomal protein P2A
  misc_feature: Homolog of GI Number: 55771314 NR Desc: putative acidic ribosomal protein P2a
  misc_feature: Homolog of GI Number: 899610 NR Desc: acidic ribosomal protein P2
  misc_feature: Homolog of GI Number: 4204372 NR Desc: acidic ribosomal protein P2a
  misc_feature: Homolog of GI Number: 4204374 NR Desc: acidic ribosomal protein P2a
  misc_feature: Homolog of GI Number: 50909175 NR Desc: putative 60S acidic ribosomal protein P2A
  misc_feature: Homolog of GI Number: 32400796 NR Desc: acidic ribosomal protein
  misc_feature: Homolog of GI Number: 52353712 NR Desc: putative 60S acidic ribosomal protein
  misc_feature: Useful for making plants with altered leaf shape eg curled leaves
  misc_feature: Useful for sterility
MKFIAAYLLAYLSGNASPSAEDLTSILESVGCEIDNEKMELMLSQVKGKDITELLAAGREKFAAVPSGGGGGVAVSAAAPAAGGAAAPAAESKKEEKVVEKEESDDDMGFSLFD

SEQ ID NO: 2325 - DNA, 976 bp, Zea mays
  misc_feature: Ceres CLONE ID no. 619173
  misc_feature: Ceres CDNA ID no. 40351111
  CDS (313)..(642): REFERENCED BY SEQ ID NO: 2326
atcccgcacatgcacgtgatgcatgtattgttaagagccaccttctatgcttctttgtaccatttggatgcggttcagtggtgcatattgtttgagctgtttctgttttgaactactgatacgctgtgaactttaatgttcgtggttctcagataaactagaaaacctatgctaacgaaacatctagcacatcttggatcagccctgcgatctcaaatggttaatgtatttccggcagctagaaacaccccaaactctgttctctgatttaacaaaaaaaaaccagttacccaccacccagcatgagcggacatgtgcatttgttggcatttgagctctcgtccaatgattgttgcgcaggtgacggagaacgggaagcaggagcggcatctagtggcgacggtggggaagtacagcgtggtgtggaacttcctgcaggtgaagaacagccaccacgagtgctaccagtaccaggaggggctgaagagctgctattgctacaaggtgatccccaaggacgagtccatcgtggccagccgcttcatgcacgacaagtactcggtcagcgactccccggaggctccactggtggtggccacgcccatgaaggtcacctccttcagcatatccagcaggcactaactagcctccttgctccgccccgcaacttcgctgccggccgacgcgttccccttggctcctcggcctccggtgatctggtaacattttgttaagcaattgtttgtgcgacggttgcctgttccattgccttctaagttggttcaaattaattagtgatttgctgtgttgagtcgatacgcaacgttgaagaggggatggtagtgtctgttgggttagctacatattgctgaacaatctgatttagctgtgaggaagtggctaatggttgtaagaaagctgaaagttgtttgattaaaataattgttaactaaaaaagaaaaaaaaaaaaaaaaaa

SEQ ID NO: 2326 - protein, 109 aa, Zea mays
  misc_feature: Ceres CLONE ID no. 619173
  misc_feature: Ceres CDNA ID no. 40351111
MCICWHLSSRPMIVAQVTENGKQERHLVATVGKYSVVWNFLQVKNSHHECYQYQEGLKSCYCYKVIPKDESIVASRFMHDKYSVSDSPEAPLVVATPMKVTSFSISSRH

SEQ ID NO: 2327 - DNA, 783 bp, Zea mays
  misc_feature: Ceres CLONE ID no. 619294
  misc_feature: Ceres CDNA ID no. 36589217
  CDS (202)..(522): REFERENCED BY SEQ ID NO: 2328
tctcgtctcgcgtccaccgcccgcgcctagccctctcctcgcgtgcctctcgcctccggcgccccaggccgtgcttgcctgccgcgcccaccgccggtccgcgctcgcgcctacacggagcatcaggagttcaggcgcggcgaacagggggaagaagcagccaacctcgctcgctactcgctagcctagtcggcggtcgccatggggatcggctacgtagtgggcgttctcggcggcgccatcctcgcccacgccgcctacgccaccatccagtaccgggcggtgctcaagatcacggaggaggagttctcgcggccgcccatggatgtgatgatggagttgctcctagggttggctttgtgcatgtgggcaggtcttgctgttccagcgaaatttctctcagtgctcccacattctgaggagaataggatcgtctcgttcccggctaacctggatttcatgatcttcaaccaccggggaagagcgctgccgtcagactcagacctgaagctcaagacatagacatgccgttccagaatccagatcttgttccttatttcccttgtaacctggaggaggttccaattttgtgcccgtttgtttaggggggaaagaacttttcctgaattcagatcacaagtagcttatctatgctgtaactcgataatttgtggcgtcttaatttctactatctgtatggaggtgattcaagcttttgttgtattccgagcagatcaatcctgtgattaatcagtagcttttgttaaaaaaaaaaaaaaaaaa

SEQ ID NO: 2328 - protein, 106 aa, Zea mays
  misc_feature: Ceres CLONE ID no. 619294
  misc_feature: Ceres CDNA ID no. 36589217
  misc_feature: Homolog of GI Number: 72127581 NR Desc:  similar to transmembrane protein 32
  misc_feature: Homolog of GI Number: 57162563 NR Desc: transmembrane protein 32
  misc_feature: Homolog of GI Number: 27735037 NR Desc: transmembrane protein 32
  misc_feature: Homolog of GI Number: 55235472 NR Desc: ENSANGP00000010639
  misc_feature: Homolog of GI Number: 74009006 NR Desc:  similar to transmembrane protein 32
MGIGYVVGVLGGAILAHAAYATIQYRAVLKITEEEFSRPPMDVMMELLLGLALCMWAGLAVPAKFLSVLPHSEENRIVSFPANLDFMIFNHRGRALPSDSDLKLKT

SEQ ID NO: 2329 - DNA, 900 bp, Zea mays
  misc_feature: Ceres CLONE ID no. 619348
  misc_feature: Ceres CDNA ID no. 25446079
  CDS (66)..(692): REFERENCED BY SEQ ID NO: 2330
acagcctctccgcctccgctcctcgcgccgtcctcctgtacaggtaaggagaggaagagggcgaaatggtgaagcacaacaacgtcatccccaacgggcacttcaagaagcactggcagaactatgtcaagacatggttcaaccagcccgcccgcaagcagaggcgccgcatcgctcgtcaaaagaaggctgtgaagatattcccccgcccgactgctggtcctctacgccccattgttcaatgccagactttaaagtacaacatgaagtcaagggctgggagaggctttacccttgaggagctgaaggctgctggcatcccaaagaagcttgctccaaccattggtatttctgttgatcaccgccgcaagaacaaatcccttgagggactgcaggccaatgtccagaggcttaagacatacaaggccaagctggttatcttcccaaggcgtgcacacaaggttaaggctggtgactctactccagaggagcttgccaccgctacccaggtccagggtgactacatgccatttactcgtggtgagaaacgttcagttgaggttgtgaaggtcacagatgagatgaagtcatttgctgcctatggcaagctccgccttgagcggatgaacaagaaacatcttggtgcccgccagaagaaggcagctgaggcagagaaggaagataagaagtgaagcggttgaagatagtaccctgttttgttctattcagtcattagtgaatgctactacttaaagtgcttgttctatgttttttttgcggtaatggaaatagagcccagacaaacattttggtgtcctactgtttgatgccttgtacttgtttgcgaactcagctatctaatgggttattggattcttgctcaaaaaaaaaaaaaaaaaa

SEQ ID NO: 2330 - protein, 208 aa, Zea mays
  misc_feature: Ceres CLONE ID no. 619348
  misc_feature: Ceres CDNA ID no. 25446079
  misc_feature: null
  misc_feature: Useful for making plants with modulated nitrogen use efficiency
  misc_feature: Useful for making plants with modulated phosphate use efficiency
  misc_feature (6)..(185): Pfam Name: Ribosomal_L13e PFAM Desc: Ribosomal protein L13e
  misc_feature: Homolog of GI Number: 34897952 NR Desc: putative 60S ribosomal protein L13E
  misc_feature: Homolog of GI Number: 38093740 NR Desc: putative 60S ribosomal protein
  misc_feature: Homolog of GI Number: 21537149 NR Desc: 60S ribosomal protein L13
  misc_feature: Homolog of GI Number: 19310763 NR Desc: putative 60S ribosomal protein L13
  misc_feature: Homolog of GI Number: 398922 NR Desc: cold induced protein
  misc_feature: Homolog of GI Number: 12580867 NR Desc: 60S ribosomal protein L13E
  misc_feature: Homolog of GI Number: 7441103 NR Desc: ribosomal protein L13.B
  misc_feature: Homolog of GI Number: 398918 NR Desc: cold induced protein
  misc_feature: Homolog of GI Number: 7441102 NR Desc: ribosomal protein L13.A
  misc_feature: Useful for increasing chlorophyll and photosynthetic capacity
  misc_feature: Useful for making bigger plants
  misc_feature: Useful for making plants with increased biomass and foliage
  misc_feature: Utility: No N Useful for making plants tolerant to low nitrogen/low phosphate
MVKHNNVIPNGHFKKHWQNYVKTWFNQPARKQRRRIARQKKAVKIFPRPTAGPLRPIVQCQTLKYNMKSRAGRGFTLEELKAAGIPKKLAPTIGISVDHRRKNKSLEGLQANVQRLKTYKAKLVIFPRRAHKVKAGDSTPEELATATQVQGDYMPFTRGEKRSVEVVKVTDEMKSFAAYGKLRLERMNKKHLGARQKKAAEAEKEDKK

SEQ ID NO: 2331 - DNA, 708 bp, Glycine max
  misc_feature: Ceres CLONE ID no. 619613
  misc_feature: Ceres CDNA ID no. 40041268
  CDS (43)..(318): REFERENCED BY SEQ ID NO: 2332
ataacaaaaccccactttgtagtgaggctggggggagaaacaatggggtctctaatggcctctgccacattgactcttgtattggcaatagtgtctctaagcttgccgtctcaaatttcagctcataactacttgtactcatcacctccgccaccagttcacacctaccctccccatgttcccaccccagtctaccactctcctccaccaccaccatacaagaagccttataagtacaagtctcctcctcccccagtccactctccacctccaccacactactactacaaatcaccccctccaccctaccactactagaatatagccctttcatatcacacccccacatggatgtatacagaaagtgtgaaaatgaaagccatggagggggaaggtgcagttgcagtttgcaaatccacaaagaagtataaatgtttgattattgttattgtttagaggactctgtctagttaaaatagttattgtgcttttgttttatcagacagttgtaaggcactgtgttctacatgtgtttgcagttgtctgcatgcattgttattttcaaagtccgctttatcaagctgacaagtcaaataaattattccctctctcctagtagtgggggaatagatttgttcctgtatctgatcgaggtttttataatcgtcataatataataacaatttacgttcaaaaaaaaaaaaaaaa

SEQ ID NO: 2332 - protein, 91 aa, Glycine max
  misc_feature: Ceres CLONE ID no. 619613
  misc_feature: Ceres CDNA ID no. 40041268
  misc_feature (9)..(91): Pfam Name: Extensin_2 PFAM Desc: Extensin
  misc_feature: Homolog of GI Number: 15021750 NR Desc: root nodule extensin
  misc_feature: Homolog of GI Number: 1165322 NR Desc: extensin
  misc_feature: Homolog of GI Number: 15218966 NR Desc: proline
  misc_feature: Homolog of GI Number: 37051099 NR Desc: hydroxyproline
  misc_feature: Homolog of GI Number: 8132441 NR Desc: extensin
  misc_feature: Homolog of GI Number: 15021744 NR Desc: root nodule extensin
  misc_feature: Homolog of GI Number: 2598593 NR Desc: MtN12
  misc_feature: Homolog of GI Number: 12248384 NR Desc: extensin 3
  misc_feature: Homolog of GI Number: 169347 NR Desc: hydroxyproline
  misc_feature: Homolog of GI Number: 727264 NR Desc: hydroxyproline
MGSLMASATLTLVLAIVSLSLPSQISAHNYLYSSPPPPVHTYPPHVPTPVYHSPPPPPYKKPYKYKSPPPPVHSPPPPHYYYKSPPPPYHY

SEQ ID NO: 2333 - DNA, 859 bp, Glycine max
  misc_feature: Ceres CLONE ID no. 619650
  misc_feature: Ceres CDNA ID no. 25446012
  CDS (95)..(706): REFERENCED BY SEQ ID NO: 2334
atgtatgtagtgctccttctccattttctatctatcgtcaacgttagtgctttgtttaggtgaactaattcggagaccttgcaagacttcatcaatggctgtcaaagtttatattgtgtactactccatgtatgggcatgttgagaaactagcagaagaaataaagaaaggggcttcctctgtggaaggtgttgaggccaagttatggcaggtacctgagacactgctggatgaggtgcttggtaagatgagtgcaccacccaagagtgacgtaccagtcattacccccaatgaactatccgaggctgatggccttgtattcggcttcccaacaaggtttggaatgatggctgctcagtttaaagcctttctagatgctactggaggcttatggagagcacaacagcttgcaggcaagcctgctggcctcttctacagcaccggttcacaaggtggtggacaagagactacagcactcactgctatcactcaactggttcatcatggaatgatattcgttccaatcggttacacattcggtgccggcatgtttgagatggagaaagtgaaaggtggaagtccatatggtgctggaacttacgccggtgatggctcaagacagccaagtgagcttgagttacaacaagcattccaccaagggaagtacattgctggcatcacaaagaagctcaagcaagctgcataatgttgccttgccttcatattagatcatactattattattaaaccataccacaatattgcttgaaaatcattgtccaatttttagacttgaaatatattgagtttttttttcctgtgctaaaaaaaaaaaaaaaaaaaaaaaaaaaaaaaaaaa

SEQ ID NO: 2334 - protein, 203 aa, Glycine max
  misc_feature: Ceres CLONE ID no. 619650
  misc_feature: Ceres CDNA ID no. 25446012
  misc_feature (3)..(188): Pfam Name: FMN_red PFAM Desc: NADPH
  misc_feature: Homolog of GI Number: 21539481 NR Desc: 1
  misc_feature: Homolog of GI Number: 34365651 NR Desc: At4g27270
  misc_feature: Homolog of GI Number: 21068664 NR Desc: putative quinone oxidoreductase
  misc_feature: Homolog of GI Number: 50940963 NR Desc: putative quinone
  misc_feature: Homolog of GI Number: 12484052 NR Desc: quinone
  misc_feature: Homolog of GI Number: 53749369 NR Desc: 'putative 1
  misc_feature: Homolog of GI Number: 34910128 NR Desc: putative 1
  misc_feature: Homolog of GI Number: 58500257 NR Desc: quinone reductase 2
  misc_feature: Homolog of GI Number: 21593010 NR Desc: minor allergen
MAVKVYIVYYSMYGHVEKLAEEIKKGASSVEGVEAKLWQVPETLLDEVLGKMSAPPKSDVPVITPNELSEADGLVFGFPTRFGMMAAQFKAFLDATGGLWRAQQLAGKPAGLFYSTGSQGGGQETTALTAITQLVHHGMIFVPIGYTFGAGMFEMEKVKGGSPYGAGTYAGDGSRQPSELELQQAFHQGKYIAGITKKLKQAA

SEQ ID NO: 2335 - DNA, 1035 bp, Glycine max
  misc_feature: Ceres CLONE ID no. 619863
  misc_feature: Ceres CDNA ID no. 29191741
  CDS (109)..(894): REFERENCED BY SEQ ID NO: 2336
aagtagggttttaaagaatataaagattaaagaggaggtgtgctgagacaggtagggtttcgagttacagccgcaccttgattcagagcagagcgaccttgaagagctatggctgtcggaaagaataagaggatttccaagggaaagaagggtggcaagaagaaagccgctgatccctttgccaagaaggactggtacgatatcaaggccccttccgtctttcaggtcaagaatgttggcaaaaccctcgtctctcgtacccagggaaccaagattgcttctgaaggactcaaacatagagtgtttgaggtctcattggctgatctccaaggagatgaagaccatgccttcaagaagattcgtttgagagctgaggatgttcaagggaaaaatgttctgacaaacttttggggaatggatttcacaactgataagttgaggtccttggtgcggaaatggcaaactttaattgaagctcatgtggatgtcaagaccactgataattatacgttgaggatgttctgcattggctttaccaagaggcgtagtaatcaggtgaagaggacctgttatgcacaatcaagccaagtcagacagattcgcaggaagatgagagagataatggtaaaccaggcagctgcctgtgatttgaaagaattggtgcgcaagttcatccctgaaatgattggaaaggagattgagaaggcaacatctagcatatatcctctacagaatgtgtttattcgtaaagttaagattcttaaagctccaaagtttgatctaggaaaactgatggaggttcatggtgattactcagaagatgttggtgccaaggtggatagacctgctgatgaaaccttggctgaggaagcaactgaagtagttggagcttgatccggctgataatgcatttttgtttgtttagaattcctgttgcttttacaaatatttatttttcagttttgttttgacatttagaaacacatttgtttttgcaaatctaaatctgtttttttgtcaaaaaaaaaaaaaaaa

SEQ ID NO: 2336 - protein, 261 aa, Glycine max
  misc_feature: Ceres CLONE ID no. 619863
  misc_feature: Ceres CDNA ID no. 29191741
  misc_feature (11)..(222): Pfam Name: Ribosomal_S3Ae PFAM Desc: Ribosomal S3Ae family
  misc_feature: Homolog of GI Number: 24817254 NR Desc: ribosomal protein S3a
  misc_feature: Homolog of GI Number: 1350983 NR Desc: 40S ribosomal protein S3a
  misc_feature: Homolog of GI Number: 7441118 NR Desc: ribosomal protein S3a
  misc_feature: Homolog of GI Number: 6714564 NR Desc: cyc07
  misc_feature: Homolog of GI Number: 82400124 NR Desc: 40S ribosomal protein S3a
  misc_feature: Homolog of GI Number: 82623437 NR Desc: 40S ribosomal protein S3a
  misc_feature: Homolog of GI Number: 81074079 NR Desc: cyc07
  misc_feature: Homolog of GI Number: 81074465 NR Desc: cyc07
  misc_feature: Homolog of GI Number: 7270417 NR Desc: Putative S
  misc_feature: Homolog of GI Number: 21553921 NR Desc: putative 40S ribosomal protein S3A
  misc_feature: Useful for making shorter plants
  misc_feature: Useful for modifying plant structure
  misc_feature: Useful for sterility
MAVGKNKRISKGKKGGKKKAADPFAKKDWYDIKAPSVFQVKNVGKTLVSRTQGTKIASEGLKHRVFEVSLADLQGDEDHAFKKIRLRAEDVQGKNVLTNFWGMDFTTDKLRSLVRKWQTLIEAHVDVKTTDNYTLRMFCIGFTKRRSNQVKRTCYAQSSQVRQIRRKMREIMVNQAAACDLKELVRKFIPEMIGKEIEKATSSIYPLQNVFIRKVKILKAPKFDLGKLMEVHGDYSEDVGAKVDRPADETLAEEATEVVGA

SEQ ID NO: 2337 - DNA, 744 bp, Glycine max
  misc_feature: Ceres CLONE ID no. 619962
  misc_feature: Ceres CDNA ID no. 36707513
  CDS (81)..(542): REFERENCED BY SEQ ID NO: 2338
gaagttcttttgtggcacacttaagaggtttagttcactaatcaatcttgttccaatattcatattcataacatacagaaatgggagttggaggtacattggagtacttgtctgatctaatgggcagtggccaccaccaccacaagaagaagaagaagcagttccaaaccgtggagctaaaggtgagaatggattgtgatggttgtgagcttaaggtcaaaaacgctctctcttcactaagtggggtgaaatctgtggagataaaccgaaaacagcagaaagttacagtaactgggtatgttgaaccaaacaaggtgctgaagaaggccaaatcaacagggaagaaggctgagatttggccctatgtgccttacaacttggtggttcatccatatgcagttccttcttatgacaagaaggctcctcctggttatgtgaggagagtggaggcccctgctcacactggaaccatcacaagatatgaagacccttacatcaccatgttcagtgatgacaacccaaatgcatgctctatcatgtagacaaaaaaaaaataatatatgctttttcccatggcactgtaaatttataaattttaatgcatgctctatcatgtagaccttatatgcttctttctggtctattttcaagttgttgttgctttcctagagtgttgtcttcttttttggtttttacataaaaagatgagaagagacgttgctgtgatcaaaaaaaaaaaaaaaa

SEQ ID NO: 2338 - protein, 153 aa, Glycine max
  misc_feature: Ceres CLONE ID no. 619962
  misc_feature: Ceres CDNA ID no. 36707513
  misc_feature (31)..(92): Pfam Name: HMA PFAM Desc: Heavy
  misc_feature: Homolog of GI Number: 50945521 NR Desc: putative farnesylated protein
  misc_feature: Homolog of GI Number: 21593460 NR Desc: putative isoprenylated protein
  misc_feature: Homolog of GI Number: 20465505 NR Desc: putative metal
  misc_feature: Homolog of GI Number: 32442810 NR Desc: putative farnesylated protein
  misc_feature: Homolog of GI Number: 12642882 NR Desc: putative farnesylated protein ATFP6
  misc_feature: Homolog of GI Number: 21536547 NR Desc: farnesylated protein
  misc_feature: Homolog of GI Number: 50921835 NR Desc: OSJNBa0091C12.3
  misc_feature: Homolog of GI Number: 23304411 NR Desc: farnesylated protein 1
  misc_feature: Homolog of GI Number: 15221451 NR Desc: copper
  misc_feature: Homolog of GI Number: 57900370 NR Desc: copper
MGVGGTLEYLSDLMGSGHHHHKKKKKQFQTVELKVRMDCDGCELKVKNALSSLSGVKSVEINRKQQKVTVTGYVEPNKVLKKAKSTGKKAEIWPYVPYNLVVHPYAVPSYDKKAPPGYVRRVEAPAHTGTITRYEDPYITMFSDDNPNACSIM

SEQ ID NO: 2339 - DNA, 891 bp, Glycine max
  misc_feature: Ceres CLONE ID no. 620071
  misc_feature: Ceres CDNA ID no. 35383230
  CDS (126)..(806): REFERENCED BY SEQ ID NO: 2340
atctccattaacattttattcatactttggttgttctggtcctaatccgaaacagaaagaggggatttgcaattgtggagtagatctgaattgtgagcaatatagattcttcaaatttgtaggcaatgggtggcttcaccgctgaagatctatcgaccattggcggaatcgccaccgtctcgcttctccattccttcattcccactcactggcttcctttctccattgtcggtcgcgctcagaaatggactctctccaccactctcatcgtcactgcacttggagcaattttgcacgtaatatccacttcactgcttggtataacagcaattaccatggcaaacaccattgctggtgaagaaacagtgcataaggttgcttcacttttgcttgtatttctgggtggtagttatataatgttgtttctgatgggaaagggtggccatagtcattcacacaaccaacccatggagaaaatggctgtagctggacttattcttgtccctgcattgtctccttgtgctacaacactcccagtatttcttgctgttggaaattcctcttccatgatggtgcttgccatcatagtactactattcagcacaataactgtgatgacttcgctagtagcattgtcattttatggggccagtcagctgaagtttcactgggtggagcgatatgacaaacttcttgttggttcagtgctgtgtttagtaggaatcttgaccctactttttcatgatcatgatcatgaagcagttacgattggacagcactcacataggaagattatttccttgtgagatatataaatgttttgtaatttcatgcttatgagcattgtcaaggtattgcttttattttgtatcagaagggaaaaaaaaaaaa

SEQ ID NO: 2340 - protein, 226 aa, Glycine max
  misc_feature: Ceres CLONE ID no. 620071
  misc_feature: Ceres CDNA ID no. 35383230
MGGFTAEDLSTIGGIATVSLLHSFIPTHWLPFSIVGRAQKWTLSTTLIVTALGAILHVISTSLLGITAITMANTIAGEETVHKVASLLLVFLGGSYIMLFLMGKGGHSHSHNQPMEKMAVAGLILVPALSPCATTLPVFLAVGNSSSMMVLAIIVLLFSTITVMTSLVALSFYGASQLKFHWVERYDKLLVGSVLCLVGILTLLFHDHDHEAVTIGQHSHRKIISL

SEQ ID NO: 2341 - DNA, 846 bp, Glycine max
  misc_feature: Ceres CLONE ID no. 620248
  misc_feature: Ceres CDNA ID no. 25445775
  CDS (357)..(605): REFERENCED BY SEQ ID NO: 2342
atttctaggctgtgctgtgcctgtgtcttccgctgactccaccttgtattgtatcttcttccagcactgcgttacgttgcgtttggaaactctgattagagccttcgagttggatctcaaattttgatttcaaataggaagggattgtgtatcaaacaggtggtgggcgtggcaccacgaaaacgttactccttcatttaatttcaaattgaagttgtatgcaaaaacagaactgaataagcctaaactgcaacatcaccccaaatttctatcctgcaacacaattcaataaaaccacagcgtggcgtggttgtagtgcaagagaaggtattgcagattgatttggttgtcggaagatgcatcctcctttaacattgcacaaacacccaatgtgtgctgaaattattgaacagtttcaaaagtgtcatatagaacatcctattgcaaaattctttggtgaatgtactgatttgaaaataaaattggatcgttgtttcagagaagagaaagctttgaagcggaaggctaactttgaagagagcaaaaagttgaaggaacagttgcgagctttgaggaaagaaaatgctacaagcagtggtcaatagaagaatcttttgaaatgttgaaaatacaaaattgttttgcaaattacaatccgtaattttgtacaatggctggatacgatatgtatcttgcagcctcaaaaaagagggttattacacataatattgtttggagtatatctgatgctcttgccttcagtgctctatctttatgatgctcatttactgatttgatgaatcactatgtatgctgctcacttacatgttaaaaaaaaaaaaaaaa

SEQ ID NO: 2342 - protein, 82 aa, Glycine max
  misc_feature: Ceres CLONE ID no. 620248
  misc_feature: Ceres CDNA ID no. 25445775
  misc_feature: Homolog of GI Number: 50540296 NR Desc: DC13 protein
  misc_feature: Homolog of GI Number: 57092605 NR Desc:  similar to UPF0287 protein DC13
  misc_feature: Homolog of GI Number: 50795800 NR Desc:  similar to RIKEN cDNA 1110046L09
MHPPLTLHKHPMCAEIIEQFQKCHIEHPIAKFFGECTDLKIKLDRCFREEKALKRKANFEESKKLKEQLRALRKENATSSGQ

SEQ ID NO: 2343 - DNA, 743 bp, Glycine max
  misc_feature: Ceres CLONE ID no. 620267
  misc_feature: Ceres CDNA ID no. 40351112
  CDS (280)..(516): REFERENCED BY SEQ ID NO: 2344
cctaggcatgtatctggtagttataatcataatgaatggtgtaagagatgtgacttgaacccaatggagcattagtaccaattttttgtaacaatcaaggactattttttctgttctggttgtatcatatactcgttttccttggaatgtggaaagttgtcaactatctactatcttaattttttagcagctccctaagtttcaacttatttttatttatttatctaatattaggttgctgattcactggagaaaggaactgaacatgaagatgaatacatgatcagtgaaaaggagctcctcgtaaacaaattcatttctatcccaaaggacatgggaacgtttaactgtggagcatttgttgctggaatagtacggggcgttttggatggtgctaggtttccagctgttgtaacagctcattttgtgcccatggaaggtcaacaacgaccgcggacaacaattttgataaaatttgctgaagaggtgttacaaagagaagcaagattaggctgatgtttataccaagaattttcaattaagatatttgtaatgctctacaccaatatagaaagaagtggaacttacacctatgcatgtgaaaaagtaatttaggattttcaccagcctaccctattgatttgtcctttgaacatgtcatgcttttcattctaatgtatgttatgctttggagttggggagttattctttctgatttacattgtacaaaaaaaaaaaaaaaa

SEQ ID NO: 2344 - protein, 78 aa, Glycine max
  misc_feature: Ceres CLONE ID no. 620267
  misc_feature: Ceres CDNA ID no. 40351112
  misc_feature (1)..(69): Pfam Name: TRAPP_Bet3 PFAM Desc: Transport protein particle
MISEKELLVNKFISIPKDMGTFNCGAFVAGIVRGVLDGARFPAVVTAHFVPMEGQQRPRTTILIKFAEEVLQREARLG

SEQ ID NO: 2345 - DNA, 794 bp, Glycine max
  misc_feature: Ceres CLONE ID no. 620326
  misc_feature: Ceres CDNA ID no. 29191864
  CDS (109)..(516): REFERENCED BY SEQ ID NO: 2346
caaaatacatattctcttctcaaatttctcagtctccggaactcgtttctaccttcacttcgcacatctcgaaccctctctttccggcaactaggttaaagttcatcaatggcaggtcgtggcaaaaccctaggatccagcgccgccaagaaggccacctcaaggagcagcaaagccggcctccaattccccgtcggccgtatcgcccgtttcctcaaggccggaaaatacgccgagcgcgtcggcgccggtgctcccgtttacctcgccgctgtcctcgaatatctcgcagccgaggttttggagttggctggaaacgctgcgagagacaataagaagactcgaattgtgccgcgccacattcaattggcggtgaggaacgacgaagaattgagcaagcttcttggtgacgtcaccatcgctaacggtggcgttatgcccaacattcacaatcttctccttcccaagaaggccggtggctcatccaagggcgctgctgctgacgatgactcttaaatagggattcgcttttcttgatttttttattatcaaatttagattatcttttggcctctctgttttgtagtttcttttttagttttgataattatgctctgtagttgtagttaggttttcattactgatgtgaatagagaatgctcttgttcttcaagaaagattgttgaaaatttgaatcattttaatttgtaatttttcagtctcgatctagcacttgattcctggttgtaatctataatattcgaattcaaactgttttaaaaaaaaaaaaaaaa

SEQ ID NO: 2346 - protein, 135 aa, Glycine max
  misc_feature: Ceres CLONE ID no. 620326
  misc_feature: Ceres CDNA ID no. 29191864
  misc_feature (25)..(89): Pfam Name: CBFD_NFYB_HMF PFAM Desc: Histone
  misc_feature: Homolog of GI Number: 50945929 NR Desc: putative histone H2A
  misc_feature: Homolog of GI Number: 50938211 NR Desc: putative histone H2A
  misc_feature: Homolog of GI Number: 536896 NR Desc: protein H2A
  misc_feature: Homolog of GI Number: 21593834 NR Desc: histone H2A
  misc_feature: Homolog of GI Number: 17065594 NR Desc: putative histone H2A protein
  misc_feature: Homolog of GI Number: 29824201 NR Desc: putative histone H2A
  misc_feature: Homolog of GI Number: 21617982 NR Desc: histone H2A
  misc_feature: Homolog of GI Number: 19310641 NR Desc: putative histone H2A protein
  misc_feature: Homolog of GI Number: 77555213 NR Desc: Core histone H2A/H2B/H3/H4
  misc_feature: Homolog of GI Number: 50938209 NR Desc: histone H2A
MAGRGKTLGSSAAKKATSRSSKAGLQFPVGRIARFLKAGKYAERVGAGAPVYLAAVLEYLAAEVLELAGNAARDNKKTRIVPRHIQLAVRNDEELSKLLGDVTIANGGVMPNIHNLLLPKKAGGSSKGAAADDDS

SEQ ID NO: 2347 - DNA, 1137 bp, Glycine max
  misc_feature: Ceres CLONE ID no. 620365
  misc_feature: Ceres CDNA ID no. 25892729
  CDS (80)..(880): REFERENCED BY SEQ ID NO: 2348
ttttcaatttcaatatccgctcaaaccctaacctaactcctctcgtcgtcacaaaaagtcttcttctccgatcgttacgatgttggaactccgtctcgtgcaaggttcccttctgaagaaggttctggaatcgatcaaggagctcgtaaacgacgcgaacttcgactgctcctccaccgggttctccctccaggccatggattccagccacgtcgccctcgttgcgctcctcctccggtccgagggctttgagcactaccgctgcgaccgcaatacctccatgggcatgaacctcaacaacatggccaagatgctcaagtgcgccggcaatgacgacatcataaccatcaaggccgacgacggcagcgacaccgtcactttcatgttcgaaagccctacacaagataagatttctgattttgagatgaagctgatggacattgacagtgagcaccttgggattccagaggcagagtatcatgccattgttaagatgccatcctctgagtttgctaggatctgcaaggatctcagtagtattggtgacactgttgtcatttcaattactaaggagggtgttaagttttccaccaaaggagacattggaactgccaatatagtttgcaggcagaatacttctgtggacaagcctgaagaagctactgtcattgagatgaatgagcctgtgtccttgacatttgctttgcgatatatgaactcttttacaaaggcaacgccattgtccaacacagttaccattagtctgtcaaatgagctgccagttgtagtcgagtataagattgctgagatgggttatgtgcggttctatttggctcccaagatagaagaggatgaagaagatacgaaacctcaagtttaatctacctattagatgttgggttaggatattaggattttaatgccttttgaacttgtttttgttatacatctttgaagatattttaaccttgtgagcaacgaattggcattttgtggatttcttatgtgtattagtttcctgccaccttattttctcctgaatttattgtttattgtttagaacaatgtgaaacaattggtgtgcaaaaaaaaaaaaaaaaaaaaaaaaaaaaaaaaaaaagaaaaaaaaaaaaaaaa

SEQ ID NO: 2348 - protein, 266 aa, Glycine max
  misc_feature: Ceres CLONE ID no. 620365
  misc_feature: Ceres CDNA ID no. 25892729
  misc_feature (1)..(125): Pfam Name: PCNA_N PFAM Desc: Proliferating cell nuclear antigen
  misc_feature (127)..(254): Pfam Name: PCNA_C PFAM Desc: Proliferating cell nuclear antigen
  misc_feature: Homolog of GI Number: 4379382 NR Desc: proliferating cell nuclear antigen
  misc_feature: Homolog of GI Number: 10946427 NR Desc: proliferating cell nuclear antigen
  misc_feature: Homolog of GI Number: 3366661 NR Desc: proliferating cell nuclear antigen
  misc_feature: Homolog of GI Number: 3947727 NR Desc: proliferating cell nuclear antigen
  misc_feature: Homolog of GI Number: 25005275 NR Desc: proliferating cell nuclear antigen
  misc_feature: Homolog of GI Number: 4406225 NR Desc: proliferating cell nuclear antigen II
  misc_feature: Homolog of GI Number: 129692 NR Desc: PROLIFERATING CELL NUCLEAR ANTIGEN
  misc_feature: Homolog of GI Number: 100160 NR Desc: proliferating cell nuclear antigen
  misc_feature: Homolog of GI Number: 18172 NR Desc: proliferating cell nuclear antigen
  misc_feature: Homolog of GI Number: 3980379 NR Desc: putative proliferating cell nuclear antigen
MLELRLVQGSLLKKVLESIKELVNDANFDCSSTGFSLQAMDSSHVALVALLLRSEGFEHYRCDRNTSMGMNLNNMAKMLKCAGNDDIITIKADDGSDTVTFMFESPTQDKISDFEMKLMDIDSEHLGIPEAEYHAIVKMPSSEFARICKDLSSIGDTVVISITKEGVKFSTKGDIGTANIVCRQNTSVDKPEEATVIEMNEPVSLTFALRYMNSFTKATPLSNTVTISLSNELPVVVEYKIAEMGYVRFYLAPKIEEDEEDTKPQV

SEQ ID NO: 2349 - DNA, 600 bp, Glycine max
  misc_feature: Ceres CLONE ID no. 620812
  misc_feature: Ceres CDNA ID no. 29191865
  CDS (36)..(437): REFERENCED BY SEQ ID NO: 2350
agttgggaaaccctaattctgcgtggtgagtgaaaatggcggtacccttgctctccaagaggatcgtgaagaagcgcgtcaagaagtttatacgcccccagagtgatcgcaagatctccgtcaagccaagctggcgcagacccaagggtattgattctcgtgtcaggagaaagttcaaaggatgcactttgatgcccaacattggttatggctcagacaagaaaacccgccattatctaccaaatggtttcaagaaatttgttgtgcacaatgtgaaagacctggaacttctcatgatgcataacaggacatactgtgctgagattgctcacaatgtatccacaaggaagaggaaagacatagttgagagagctgctcagcttgatgttgtcttgacgaacaagacggccagactacgtagccaggaggatgagtagatccaatatatgggagagttatttatgttttgtagtgagcttctgttgacacccttgatggtagattttgattttttgttattttcttgccaaaactttgttgcatgccgtacaattttatatgttgcttattgtctatttgctgttaaaaaaaaaaaaaaaa

SEQ ID NO: 2350 - protein, 133 aa, Glycine max
  misc_feature: Ceres CLONE ID no. 620812
  misc_feature: Ceres CDNA ID no. 29191865
  misc_feature (14)..(123): Pfam Name: Ribosomal_L32e PFAM Desc: Ribosomal protein L32
  misc_feature: Homolog of GI Number: 40287540 NR Desc: ly200 protein
  misc_feature: Homolog of GI Number: 71534997 NR Desc: ribosomal protein L32
  misc_feature: Homolog of GI Number: 77745481 NR Desc: ly200
  misc_feature: Homolog of GI Number: 13899057 NR Desc: ribosomal protein L32
  misc_feature: Homolog of GI Number: 50947773 NR Desc: putative ribosomal protein L32
  misc_feature: Homolog of GI Number: 76057835 NR Desc: ribosomal L32
  misc_feature: Homolog of GI Number: 23198054 NR Desc: ribosomal protein L32
  misc_feature: Homolog of GI Number: 21555143 NR Desc: ribosomal protein L32
  misc_feature: Homolog of GI Number: 10177580 NR Desc: ribosomal protein L32
  misc_feature: Homolog of GI Number: 50754636 NR Desc:  similar to 60S ribosomal protein L32
MAVPLLSKRIVKKRVKKFIRPQSDRKISVKPSWRRPKGIDSRVRRKFKGCTLMPNIGYGSDKKTRHYLPNGFKKFVVHNVKDLELLMMHNRTYCAEIAHNVSTRKRKDIVERAAQLDVVLTNKTARLRSQEDE

SEQ ID NO: 2351 - DNA, 602 bp, Glycine max
  misc_feature: Ceres CLONE ID no. 620880
  misc_feature: Ceres CDNA ID no. 25891529
  CDS (66)..(425): REFERENCED BY SEQ ID NO: 2352
aaaagacaaaaaccctagcctagtgctcatcaccatcgcaaggggagaaagggagaggcgcgaaaatgagcggagcgaaggggaagaagaagggagcgagcttcgtgatcgattgcgcgaagccggtggaggataagattatggacattgcttctctggagaagttccttcaggagaggattaaggtcggcggcaaggccggtgcactcggcgattccattaccgtcaccagggacaagagcaagatcaccgtcacctccgacagcaacttctctaaacggtatctgaaatatttgaccaagaagtacttgaaaaagcacaatgtgagggattggcttcgcgtgattgcatccaacaaggagcggaatgtctatgagttgagatacttcaacattgctgagaacgagggtgaagaggaagactgaagatctaattccgtgtcttgaggcattttctattaggtttagttactgtggagtctcttttatctgtgttgtttatttgacttgttactggttgaaatattcctgtgttttatttggaccaacttttatgccttcatatgaaattttatagagattgtttgaaaaaaaaaaaaaaaa

SEQ ID NO: 2352 - protein, 119 aa, Glycine max
  misc_feature: Ceres CLONE ID no. 620880
  misc_feature: Ceres CDNA ID no. 25891529
  misc_feature (4)..(119): Pfam Name: Ribosomal_L22e PFAM Desc: Ribosomal L22e protein family
  misc_feature: Homolog of GI Number: 6714454 NR Desc: putative 60S ribosomal protein  L22
  misc_feature: Homolog of GI Number: 12642842 NR Desc: putative 60S ribosomal protein L22
  misc_feature: Homolog of GI Number: 50939919 NR Desc: putative 60S ribosomal protein L22
  misc_feature: Homolog of GI Number: 42733478 NR Desc: BRI1
  misc_feature: Homolog of GI Number: 6056419 NR Desc: 60S ribosomal protein  L22
  misc_feature: Homolog of GI Number: 73956651 NR Desc:  similar to 60S ribosomal protein L22
  misc_feature: Homolog of GI Number: 13592059 NR Desc: ribosomal protein L22
  misc_feature: Homolog of GI Number: 55590474 NR Desc:  similar to ribosomal protein L22
  misc_feature: Homolog of GI Number: 57086899 NR Desc:  similar to ribosomal protein L22
MSGAKGKKKGASFVIDCAKPVEDKIMDIASLEKFLQERIKVGGKAGALGDSITVTRDKSKITVTSDSNFSKRYLKYLTKKYLKKHNVRDWLRVIASNKERNVYELRYFNIAENEGEEED

SEQ ID NO: 2353 - DNA, 764 bp, Glycine max
  misc_feature: Ceres CLONE ID no. 621163
  misc_feature: Ceres CDNA ID no. 29191370
  CDS (86)..(532): REFERENCED BY SEQ ID NO: 2354
attcacaacttcaatccctcttttgctttaccaaattccaatttccaattcaaaaccctaactccgttcgaagcaccaaatcgtgatggcaccaaaggcagagaagaagccagcagagaagaagcccgcggaggagaagaaatcgacggtgggagacaaggctccggcggagaagaagccaaaggccggaaagaagcttccgaaggagggaggcgccggcggagaagggaagaagaagaagagaaacaagaagagcgtggagacatacaagatctacatcttcaaggttctgaagcaggttcaccctgacattggtatctcaagcaaggccatgggaatcatgaacagcttcatcaacgacatcttcgagaagcttgcccaggaatcttctagacttgcccgctacaacaagaaacccaccatcacttcgagggaaattcagaccgcggtcaggcttgtgctgcccggtgaattggccaatcacgccgtttctgagggtacgaaggctgtcaccaagttcactagctcttgaattagctatcttatcgctttccaaagactcttttctgtcccaatttgagattttaatcagtagtagacttttttttttgtttgataggatttgtaattgaaagaatggtcctgggttgatccttttgtgtattgaagtggcaagatgtattgattatataggaacgcagtattgtttagtattatactttcaagaatctccaatcggccattcgttaaaaaaaaaaaaaaaa

SEQ ID NO: 2354 - protein, 148 aa, Glycine max
  misc_feature: Ceres CLONE ID no. 621163
  misc_feature: Ceres CDNA ID no. 29191370
  misc_feature: No seed is being produced by the plant
  misc_feature: The plant flowers significantly late compared to wild-type.
  misc_feature: Useful for biocontainment applications
  misc_feature: Useful for making plants with modulated flowering time
  misc_feature (55)..(127): Pfam Name: Histone PFAM Desc: Core histone H2A/H2B/H3/H4
  misc_feature: Homolog of GI Number: 2558962 NR Desc: histone H2B1
  misc_feature: Homolog of GI Number: 82400146 NR Desc: histone H2B
  misc_feature: Homolog of GI Number: 21536602 NR Desc: histone H2B
  misc_feature: Homolog of GI Number: 30102580 NR Desc: At3g45980
  misc_feature: Homolog of GI Number: 21554180 NR Desc: histone H2B
  misc_feature: Homolog of GI Number: 21553526 NR Desc: putative histone H2B
  misc_feature: Homolog of GI Number: 3021489 NR Desc: histone H2B
  misc_feature: Homolog of GI Number: 2746719 NR Desc: histone H2B
  misc_feature: Homolog of GI Number: 3021483 NR Desc: histone H2B
  misc_feature: Homolog of GI Number: 21617908 NR Desc: histone H2B
MAPKAEKKPAEKKPAEEKKSTVGDKAPAEKKPKAGKKLPKEGGAGGEGKKKKRNKKSVETYKIYIFKVLKQVHPDIGISSKAMGIMNSFINDIFEKLAQESSRLARYNKKPTITSREIQTAVRLVLPGELANHAVSEGTKAVTKFTSS

SEQ ID NO: 2355 - DNA, 526 bp, Glycine max
  misc_feature: Ceres CLONE ID no. 621180
  misc_feature: Ceres CDNA ID no. 29191866
  CDS (109)..(369): REFERENCED BY SEQ ID NO: 2356
ataagcatttgacgctgctgaatcgaaaccttattctctccttctcccgccgcaactcactgtcttccttctctagggtttttagctcccccaatttcttcgctcaacatggttcttcaaaatgatattgatttgctaaatcctccggttgagcttgagaagaggaaacacaagctcaagcgtcttgttcagtcaccaaactctttcttcatggatgttaagtgccagggttgcttcaacataaccactgtctttagccactctcagactgttgttgtatgcggaaactgccagactgtcttgtgtcaaccaaccggtggccgggcaaggctaaccgagggatgctcctttaggaagaagggagactgagtggattgccatctttttttgtttgtgattggagagtttcagtaatgccttcttttgttttggttatgatgatatgttaattttgttaaatttgtaagacttgagtctacaagcttatccaagacattagggattacacctaaaaaaaaaaaaaaaa

SEQ ID NO: 2356 - protein, 86 aa, Glycine max
  misc_feature: Ceres CLONE ID no. 621180
  misc_feature: Ceres CDNA ID no. 29191866
  misc_feature (30)..(84): Pfam Name: Ribosomal_S27e PFAM Desc: Ribosomal protein S27
  misc_feature: Homolog of GI Number: 19699108 NR Desc: AT3g61110/T27I15_200
  misc_feature: Homolog of GI Number: 6850878 NR Desc: ribosomal protein S27
  misc_feature: Homolog of GI Number: 76161004 NR Desc: ribosomal protein S27
  misc_feature: Homolog of GI Number: 82623413 NR Desc: ribosomal protein S27
  misc_feature: Homolog of GI Number: 21617904 NR Desc: ribosomal protein S27
  misc_feature: Homolog of GI Number: 19310839 NR Desc: putative ribosomal protein S27
  misc_feature: Homolog of GI Number: 23197762 NR Desc: putative ribosomal protein S27
  misc_feature: Homolog of GI Number: 14495010 NR Desc: putative ribosomal protein S27
  misc_feature: Homolog of GI Number: 50908305 NR Desc: 40S ribosomal protein S27
  misc_feature: Homolog of GI Number: 55416173 NR Desc: S27 ribosomal protein
MVLQNDIDLLNPPVELEKRKHKLKRLVQSPNSFFMDVKCQGCFNITTVFSHSQTVVVCGNCQTVLCQPTGGRARLTEGCSFRKKGD

SEQ ID NO: 2357 - DNA, 454 bp, Glycine max
  misc_feature: Ceres CLONE ID no. 621223
  misc_feature: Ceres CDNA ID no. 40351113
  CDS (75)..(296): REFERENCED BY SEQ ID NO: 2358
gtctgaaaactgaaaagtaaaggcgaaagactttaggtttggaattgggaattagggttgttcgcgtcacgaagatgatcgaggtggtgttgaacgatcgattggggaagaaggtgcgcgtgaagtgcaacgacgatgacaccatcggcgacctgaagaagctggtggcggctcagacgggcacaagagccgacaagatccgcatccagaagtggtacaccatatacaaggatcacatcactctcaaggattacgagatccacgacggcatgggtctcgaactctactacaactaaacacaaggtctatacccatctcaattcttctttttatagatactagctagggttttgttttttagggttcccgaattttgatttgtttttcggcaataatcaatggtttgtaacgattatgcttcttttaattcttcgagtcaaaaaaaaaaaaaaaa

SEQ ID NO: 2358 - protein, 73 aa, Glycine max
  misc_feature: Ceres CLONE ID no. 621223
  misc_feature: Ceres CDNA ID no. 40351113
  misc_feature (2)..(71): Pfam Name: ubiquitin PFAM Desc: Ubiquitin family
MIEVVLNDRLGKKVRVKCNDDDTIGDLKKLVAAQTGTRADKIRIQKWYTIYKDHITLKDYEIHDGMGLELYYN

SEQ ID NO: 2359 - DNA, 1417 bp, Glycine max
  misc_feature: Ceres CLONE ID no. 621461
  misc_feature: Ceres CDNA ID no. 25446633
  CDS (144)..(1313): REFERENCED BY SEQ ID NO: 2360
gaaaatgaaaactctggcagccctttggattttggccacacatctctgatcactctatagaccacttcgttgatctatcattcttcatcaaccaaccagcctccaaagtcagtgaatagtgagtgagtgagtagcagctagcaatggaaattactgccatggcttcttcagctactcctccacgaccttctcttccaactccttccacttctccacacacagtagtcaccaccacctttagcaaacctcaactcagacgctctcacatagcactaccaacttcaaccaccatttcattgctcgctctcttcgcccctccaaacgaagccaaagccgctgtcagcatcgccaaggaccagattgtctcttctctcacccaagttcaggaaatgggttcgggtgtgctggacacggcacagcgtgttgctgaagtgatagggaacgctttgaagcctggcatcgaaacggcgttgccgatagtgcagcaggctggagaagaggccttgaaaattgcttcccctgccatctccgaagcttccaagaaggcccaagaagcactccaaagctccggtgttgatactgaacctgttatcactgctgctaagacagtggcagatgctgcacaacaaacaaccaaggtgattgaagttgccaagccaatagcttcctcaaccgtcgaaaccatatcttcttcagaccctactgtgattgctggaacagcaggagcactatttgttgcttacctcctaattcctcctatcgggtctgtcatcttgtctaatcttcgtggttacaaaggagacctaactcctgctcaagcccttgatttgatatctacacagaactacgttttgattgatattaggtcagagaaagataaggacagggctggtatccctcgccttccctctaatgctaaaaacaggatggctgccattcctttggaagaactgcaaagcaagctcagggggcaggtcaagaatgttaagaaattggaagctgaaatagtcgctttgaagatttcatatctcaagaaaatcaacaaaggcaccaatgttgtgatcttggactcgtactcggacgtagcaaaaacagttggaagaacgctaaccagccttggctttaagaacacatggattgttgctgatggattctctgggaacaaagggtggttgcagagtagattaggaacagattcgtataacttctcgtttgcagaggtcctgtcaccgtctagggtcatccctgcggctgtgagaagttttggcacaaccagccaatctagcacgaagcttcttcctggggctgactaacttttttctgttctaaaatcttgtgcaaatagaaattcactcttgtgcatgcttgagtcatccaatatatttattttgattatttcccaaaaaaaaaaaaaaaa

SEQ ID NO: 2360 - protein, 384 aa, Glycine max
  misc_feature: Ceres CLONE ID no. 621461
  misc_feature: Ceres CDNA ID no. 25446633
  misc_feature: Homolog of GI Number: 41352315 NR Desc: extracellular calcium sensing receptor
  misc_feature: Homolog of GI Number: 50912383 NR Desc: extracellular calcium sensing receptor
  misc_feature: Homolog of GI Number: 46093489 NR Desc: calcium sensing receptor
MASSATPPRPSLPTPSTSPHTVVTTTFSKPQLRRSHIALPTSTTISLLALFAPPNEAKAAVSIAKDQIVSSLTQVQEMGSGVLDTAQRVAEVIGNALKPGIETALPIVQQAGEEALKIASPAISEASKKAQEALQSSGVDTEPVITAAKTVADAAQQTTKVIEVAKPIASSTVETISSSDPTVIAGTAGALFVAYLLIPPIGSVILSNLRGYKGDLTPAQALDLISTQNYVLIDIRSEKDKDRAGIPRLPSNAKNRMAAIPLEELQSKLRGQVKNVKKLEAEIVALKISYLKKINKGTNVVILDSYSDVAKTVGRTLTSLGFKNTWIVADGFSGNKGWLQSRLGTDSYNFSFAEVLSPSRVIPAAVRSFGTTSQSSTKLLPGAD

SEQ ID NO: 2361 - DNA, 991 bp, Glycine max
  misc_feature: Ceres CLONE ID no. 621487
  misc_feature: Ceres CDNA ID no. 40041269
  CDS (29)..(577): REFERENCED BY SEQ ID NO: 2362
attcttcgtgctattttcctttgtttctatggcttctgcagaagtagagttccgatgctttgttggtgggcttgcttgggccaccgaccacgatgctctcgagaaagccttctctcaatttggcgaaatcgtcgaatcgaaggtcatcaacgatcgtgaaactggaagatccagagggtttggatttgtgaccttcgccacagagcaggcgatgagagacgcaattgaaggaatgaacggccagaacctcgacggtcgtaatataaccgtgaacgaggctcaatcccgtggaaaaggtggcggcggcggcggcggcggctacggaggaggtggtggtggttacggtggcggcggaggttacagccgcggtggaggaggatatggtggcggaggaggccgccgtgaaggtggttataaccgcaacggtggtggaggaggatatggtggcggtggcggcggatatggaggtggtggaggttatggtggcggtgggagagaccgtggatatggtggtgatggtgggtcccgctactcgagaggaggcggtggttcggatggaggaagctggaggaattaagattacgtgaatttttaggtttttagtgggtgaaaaaatggggggaggttgtgttgtatcatccccttgccttgatattaattgtgataattttaggtttggaatatgcgttgtggtttgagcatctgttactgttatggttgggtttttgacatctgataatgaatctgtgtactggaaggattactgggtcttggtcatccagattgaaatacctgaaaatccttgctacttatacatctcaatctgctttgcagcttggttagaagacgataagtcccaaacaagtgttcaatgttcttttcttaccaattctatatcaaaattgtattaaaaaaccaatattgtactcgagtgaatttgctaactcaaaataaaatgaccacaaatttcaggggaaaaaaaaaaaaaaaa

SEQ ID NO: 2362 - protein, 182 aa, Glycine max
  misc_feature: Ceres CLONE ID no. 621487
  misc_feature: Ceres CDNA ID no. 40041269
  misc_feature: The plant flowers significantly late compared to wild-type.
  misc_feature: Useful for making plants with modulated growth and phenotype characteristics
  misc_feature: null
  misc_feature: The sequence is a functional homolog of  SEQ ID NO 1016 in the  11/435,388 US patent application
  misc_feature: Useful for making plants with altered Lignin content
  misc_feature: Useful for making plants with modulated flowering time
  misc_feature: Useful for making plants with modulated nitrogen use efficiency
  misc_feature (10)..(81): Pfam Name: RRM_1 PFAM Desc: RNA recognition motif.
  misc_feature: Homolog of GI Number: 34851124 NR Desc: putative glycine
  misc_feature: Homolog of GI Number: 20152613 NR Desc: putative glycine rich protein
  misc_feature: Homolog of GI Number: 18076086 NR Desc: glycine
  misc_feature: Homolog of GI Number: 82623423 NR Desc: putative glycine
  misc_feature: Homolog of GI Number: 469072 NR Desc: RNA
  misc_feature: Homolog of GI Number: 4567224 NR Desc: glycine
  misc_feature: Homolog of GI Number: 7024451 NR Desc: glycine
  misc_feature: Homolog of GI Number: 77557139 NR Desc: glycine
  misc_feature: Homolog of GI Number: 974605 NR Desc: single
  misc_feature: Homolog of GI Number: 2267569 NR Desc: glycine
  misc_feature: Useful for delaying flowering time
  misc_feature: Useful for making bigger plants
  misc_feature: Useful for making plants with increased biomass and foliage
  misc_feature: Useful for making plants with increased biomass and foliage
  misc_feature: Useful for making plants with increased biomass and foliage
  misc_feature: Useful for making shorter plants
MASAEVEFRCFVGGLAWATDHDALEKAFSQFGEIVESKVINDRETGRSRGFGFVTFATEQAMRDAIEGMNGQNLDGRNITVNEAQSRGKGGGGGGGGYGGGGGGYGGGGGYSRGGGGYGGGGGRREGGYNRNGGGGGYGGGGGGYGGGGGYGGGGRDRGYGGDGGSRYSRGGGGSDGGSWRN

SEQ ID NO: 2363 - DNA, 1463 bp, Glycine max
  misc_feature: Ceres CLONE ID no. 621543
  misc_feature: Ceres CDNA ID no. 40041270
  CDS (222)..(1271): REFERENCED BY SEQ ID NO: 2364
agggtcgtccactgaggaaacaaaggagcagggagcaccgcaatcgcaagggtttgttcgatttcattgtcttctttgtctcgctggtcaattctcaccagtgcccaaacataaacaatctcaacgcacaatcgcacatagcctaatcctaaacgcatcgtttcgcgctaaatgcttcgcaacagagtgcgctagcttgtttgctcagactcactggcgccatggctctttcactcggcaagctcttcattctcgtcggcgcaggtatagctggttcagtaattgcaaaagaagggcgtctgccagatgtctctggtctcgcctctggtgcttttaaggttgttttgaggcaacttaaaagcgatgatcctgctccaactgttaaaaagcagccgcataatgatgctttgttggctcaggttaacagtcttcggcaggaactacaacttcttgctagagatagatcaatcactattgtaaatgcaagtggaacaggtgggagaaaatatgcaacagtgattgttattgttgtggtaggatatggatacgtttggtggaagggatggaagcttcctgatctgatgtttgcaacaaggcgtggtttgtctgatgcttgcacatcaattggtaatcagatgggaaagctttatgaatcaattggggataccaagaagaaattatctgcaagaatcaacggtctggataaaaatttagaagaatgtgctgccattactgaaagtaccagggaggatatatatgtaattcaacggaaagcagatacaataagtgaagattcgaagtcttttcatgttgcagtccatgttctggaatctaaaattaaagaaatagaagagaagcaggtggccacaattgaaggagtgaacatgttgtgtcaatttaccaagactttggagaatagcagatccacagagtatattcaggcatcttcttccagttcttccaggccagcccttgagcttccaccagtttcaccctcttccaggggttcacagtcaggttccgctaggctatctcttgagccaccatcagttacgccatcatcaaggactgcatccttgccaccgacattgtctacggatccaccatctccatcaatttctggtggatctttccaggaacctaaagtagacaaaagcaatggatctagttctggcttgtttgggttgatatctggcgtctatggtccattgctgacaagaactcgcagtgcgacagatgcagtagtccaaaaaactcgttcgactagttaacagtagcatgtctctttttccttttttggaccgcagtaaactatatatagattattggacctatggtggggttgaaaatcttcaccagttggtgactgttcagaagaattatgaaccgttaattatagtatgcccgagccaaattataaacgactgggcattaaattttgcagcagaacaaaaaaaaaaaaa

SEQ ID NO: 2364 - protein, 349 aa, Glycine max
  misc_feature: Ceres CLONE ID no. 621543
  misc_feature: Ceres CDNA ID no. 40041270
  misc_feature: Homolog of GI Number: 34894218 NR Desc: P0439B06.30
  misc_feature: Homolog of GI Number: 34893996 NR Desc: P0672D08.6
MALSLGKLFILVGAGIAGSVIAKEGRLPDVSGLASGAFKVVLRQLKSDDPAPTVKKQPHNDALLAQVNSLRQELQLLARDRSITIVNASGTGGRKYATVIVIVVVGYGYVWWKGWKLPDLMFATRRGLSDACTSIGNQMGKLYESIGDTKKKLSARINGLDKNLEECAAITESTREDIYVIQRKADTISEDSKSFHVAVHVLESKIKEIEEKQVATIEGVNMLCQFTKTLENSRSTEYIQASSSSSSRPALELPPVSPSSRGSQSGSARLSLEPPSVTPSSRTASLPPTLSTDPPSPSISGGSFQEPKVDKSNGSSSGLFGLISGVYGPLLTRTRSATDAVVQKTRSTS

SEQ ID NO: 2365 - DNA, 632 bp, Glycine max
  misc_feature: Ceres CLONE ID no. 621685
  misc_feature: Ceres CDNA ID no. 36707297
  CDS (1)..(462): REFERENCED BY SEQ ID NO: 2366
ctgcccgcccacccgtctcctcgcctcgccgtctcgccccacgccgccgacgcaaagatgccgttcaagaggttcgtcgagatcgggcgcgtggccctggtgaactacggcaaggactacggccgcctcgtcgtcatcgtcgacgtcgtcgaccagaaccgggcacttgtggatgctcctgatatggtcaggtgccagatgaacttcaagcgtctttcgctgaccgacatcaagattgacatcaagcgtatccctaagaaggcaactttgatcaaggccatggaggaagcagatgtgaaaaccaaatgggagaacagctcatggggtaagaagcttgttgtccagaagagaagagcatcgctgaatgactttgacaggttcaaggtcatgttggctaagattaagaggggtggtgcgatcaggcaagagcttgccaagctcaagaaggaggttgctgcttagattatcttagtggatggcatgttgagttttttgttccaagttggatctgctctatgttccagtgttcttaaagccagaattagtacaactgttttcggagaactacttcatattttgtcatggctgttattgaatacccaagctagtttgctacaaaaaaaaaaaaaaaa

SEQ ID NO: 2366 - protein, 134 aa, Glycine max
  misc_feature: Ceres CLONE ID no. 621685
  misc_feature: Ceres CDNA ID no. 36707297
  misc_feature (44)..(120): Pfam Name: Ribosomal_L14e PFAM Desc: Ribosomal protein L14
  misc_feature: Homolog of GI Number: 48596905 NR Desc: glycoprotein
  misc_feature: Homolog of GI Number: 50926450 NR Desc: OSJNBb0070J16.13
  misc_feature: Homolog of GI Number: 50910649 NR Desc: putative hydroxyproline
  misc_feature: Homolog of GI Number: 76161008 NR Desc: glycoprotein
  misc_feature: Homolog of GI Number: 5762251 NR Desc: Csf
  misc_feature: Homolog of GI Number: 20465571 NR Desc: putative 60S ribosomal protein L14
  misc_feature: Homolog of GI Number: 7269562 NR Desc: ribosomal protein L14
  misc_feature: Homolog of GI Number: 7488810 NR Desc: hydroxyproline
  misc_feature: Homolog of GI Number: 2500365 NR Desc: Probable 60 ribosomal protein L14
  misc_feature: Homolog of GI Number: 41323492 NR Desc: 60S ribosomal protein L14
MPFKRFVEIGRVALVNYGKDYGRLVVIVDVVDQNRALVDAPDMVRCQMNFKRLSLTDIKIDIKRIPKKATLIKAMEEADVKTKWENSSWGKKLVVQKRRASLNDFDRFKVMLAKIKRGGAIRQELAKLKKEVAA

SEQ ID NO: 2367 - DNA, 1071 bp, Triticum aestivum
  misc_feature: Ceres CLONE ID no. 622399
  misc_feature: Ceres CDNA ID no. 35383231
  CDS (152)..(664): REFERENCED BY SEQ ID NO: 2368
cccgactccgccgagctcatttccctcaccccctctctatcttcgtcgccgccgccggcgccgccgggacgccgtaccccgcctccctggacccgatagctcctcgcgtccacttcgttcgacgaggaaattctttgggtgactgcaggagatggcggcgttcctgaggtcaaagtgctcgtcagttgggcgtacgttgatgggaagcgttggaaacaatctgtatgggggtatcaattcgtctgctgaaacagtgacaagaccatctcactgtgacgctatcagccagcaaatcaggacattcatccagatgagaaccaacctcaaggtggtagacaactctggagccaagagggtcatgtgcatacagtccttgagggggaagaaaggagctaggcttggggacatgataattggttctgtgaaggaagcgcaacctcgtggcaaggtcaagaaaggtgatgtggtctacggtgtggttgtccgtgccgctatgaagaaaggacgcagtgacggcagcgaggtccagtttgatgacaacgctatcgtcatcgtgaacaacaaaggcgagctgattggcactcgcgtcttcggtcctgttcctcatgagctcaggaagaagaagcatctcaagatcttggcgttggctgaacacatagtttgagaccttaccctgcttagtcatatctcttttatttccacatggagcggaattaacattgctccagagatattttggttgcccctgctgccattccacctttcctttggtaatttgtgtttggaagaatgatgtaccctaaaaggagaatgtgtaccaaactatagggagccctcggcagatcaagttttgtagcacatttaatctgaatgttttgctgcaacggcgaaaatatgttccttatttgctctgttttacctggatcatcacgcgctgcctgtaattttctgcttattgatttagtacatttacagagtgtcctatcattacattcctggaacatgaggaggacagacttccattttcacaacatataacatttgctccctgcttcaaaaaaaaaaaaaaaa

SEQ ID NO: 2368 - protein, 170 aa, Triticum aestivum
  misc_feature: Ceres CLONE ID no. 622399
  misc_feature: Ceres CDNA ID no. 35383231
  misc_feature (52)..(170): Pfam Name: Ribosomal_L14 PFAM Desc: Ribosomal protein L14p/L23e
  misc_feature: Homolog of GI Number: 18140856 NR Desc: HUELLENLOS
  misc_feature: Homolog of GI Number: 56403953 NR Desc: ribosomal L14 protein
  misc_feature: Homolog of GI Number: 47027061 NR Desc: HUELLENLOS
  misc_feature: Homolog of GI Number: 18140860 NR Desc: HUELLENLOS PARALOG
  misc_feature: Homolog of GI Number: 30694900 NR Desc: ribosomal protein L14 family protein / huellenlos paralog
  misc_feature: Homolog of GI Number: 9757736 NR Desc: 50S ribosomal protein L14
  misc_feature: Homolog of GI Number: 8778471 NR Desc: F1L3.27
  misc_feature: Homolog of GI Number: 18140858 NR Desc: HUELLENLOS
  misc_feature: Homolog of GI Number: 28973235 NR Desc: putative ribosomal protein
  misc_feature: Homolog of GI Number: 75675566 NR Desc: Ribosomal protein L14
MAAFLRSKCSSVGRTLMGSVGNNLYGGINSSAETVTRPSHCDAISQQIRTFIQMRTNLKVVDNSGAKRVMCIQSLRGKKGARLGDMIIGSVKEAQPRGKVKKGDVVYGVVVRAAMKKGRSDGSEVQFDDNAIVIVNNKGELIGTRVFGPVPHELRKKKHLKILALAEHIV

SEQ ID NO: 2369 - DNA, 1411 bp, Triticum aestivum
  misc_feature: Ceres CLONE ID no. 622462
  misc_feature: Ceres CDNA ID no. 24766070
  CDS (94)..(1197): REFERENCED BY SEQ ID NO: 2370
ataaagggcaagattgcgcagtgcggcctccatcctctgttcttcactttttccatctgagccgtccgagccctccgaatttccccggccagaatgggcgaatccagcgcgcttcagtccatcctctacggccgcggcgcgcttcgcctcctcgatcagaggaagctgcccctcgaggaggcctacatcgatgtcaaggactccgcggatggatggaatgcgatcagagacatggttgtccgtggtgctcctgccatagccatagcggcagcactgtcattggctgtggaagttaatgatcacgatttcactggtacacctgtggaagcagcctcattcgtttccaagaagttggaataccttgtatccagccggcccacagcagtgaacctgtctgatgctgctacaaagcttcagaacttagtgtcaagaacagctgaaacagcaaaagatgccaaatctatctttcaggtctttattgaagctgcagaagctatgctagttgatgatgtggccgataataaggcaattggctcgcatggagctgaattccttcaacggcagcttggaagttcgagaaacatctctgttctaacccattgtaatactggcagccttgcaaccgctggttacggaactgccctaggggtcattcgtgctcttcactctggaggagttttggagaaggccttctgcactgaaactcgtccatttaaccagggttccaggcttacagctttcgagttagttcatgacaaaatacctgcgacgctgatagcagactctgctgcagctgcacttatgaataatggacaagttcaagctgtaattgtgggtgctgatcgtatagctgcaaatggtgacacagccaacaagattggcacatacaacctctcgatttctgcaaagcatcacggcatgcagttttacgtggccgcaccagtaacttcgattgatctctccctcccgtctgggaagcaaatcgtcatagaagaaagatctccaaaggaattgttgaactctgaaggtggtctaggaaagcaagttgccgcgtcaggtatatcagtctggaaccccgccttcgacgttactccagcaaatctaattactgcaatcattacagaaaagggtgtgatcacaaagtctgatcctaatggaagtttcgacatcaaaggtttcatcgaatgtgccaagtgatgctctccagtgagcataggttggcatgaatgcggtggaacatccttctcacacaattgatgataggatgcccatgttgtactcccagcaataagatctttcgaagtgagagaaaaataaagtcgcgtacgagatgtattgtgaggatgagtgtttgttatccaaaaagtatatttataaaaagatgcatcttttgctaaaaaaaaaaaaaaaa

SEQ ID NO: 2370 - protein, 367 aa, Triticum aestivum
  misc_feature: Ceres CLONE ID no. 622462
  misc_feature: Ceres CDNA ID no. 24766070
  misc_feature (34)..(352): Pfam Name: IF PFAM Desc: Initiation factor 2 subunit family
  misc_feature: Homolog of GI Number: 15216226 NR Desc: CIG2
  misc_feature: Homolog of GI Number: 12407304 NR Desc: IDI2
  misc_feature: Homolog of GI Number: 77549270 NR Desc: IDI2
  misc_feature: Homolog of GI Number: 52699545 NR Desc: isopentenyl
  misc_feature: Homolog of GI Number: 20197503 NR Desc: putative translation initiation factor eIF
  misc_feature: Homolog of GI Number: 21593194 NR Desc: putative translation initiation factor eIF
  misc_feature: Homolog of GI Number: 22136322 NR Desc: putative translation initiation factor eIF
  misc_feature: Homolog of GI Number: 66849875 NR Desc: IDI2
  misc_feature: Homolog of GI Number: 54637683 NR Desc: GA10928
  misc_feature: Homolog of GI Number: 72129442 NR Desc:  similar to CG11334
MGESSALQSILYGRGALRLLDQRKLPLEEAYIDVKDSADGWNAIRDMVVRGAPAIAIAAALSLAVEVNDHDFTGTPVEAASFVSKKLEYLVSSRPTAVNLSDAATKLQNLVSRTAETAKDAKSIFQVFIEAAEAMLVDDVADNKAIGSHGAEFLQRQLGSSRNISVLTHCNTGSLATAGYGTALGVIRALHSGGVLEKAFCTETRPFNQGSRLTAFELVHDKIPATLIADSAAAALMNNGQVQAVIVGADRIAANGDTANKIGTYNLSISAKHHGMQFYVAAPVTSIDLSLPSGKQIVIEERSPKELLNSEGGLGKQVAASGISVWNPAFDVTPANLITAIITEKGVITKSDPNGSFDIKGFIECAK

SEQ ID NO: 2371 - DNA, 543 bp, Zea mays
  misc_feature: Ceres CLONE ID no. 623082
  misc_feature: Ceres CDNA ID no. 25446444
  CDS (120)..(467): REFERENCED BY SEQ ID NO: 2372
agatatacatatacatgcttagtttatggtgctatttatccgatatcctcattgtatatgtgacataactcaccaaattagataatatgagctcccatttggatccttgaagcactcacatgcttaacattgtttacattcagatgataaaagcaaagaaagtaaatgtgatgtggagaagcctgctgctactgagtcctctaaaccgaaggttagcttggaggaaacaaaggatcctgagaagcatgaagttgatgttggtggcaccgacgatgatgaaagtgacgaagactttgttgattcagaagagggtgaatcagatgatgacgagagtactaagagcaagaataggccaagcagcctcacccttgaagacacctccagggaaaaaggcaaggatcacaacaccgtctgtgggcaaaaaaaacctgctgagaagtgttacattcgatcgcaaacttgtatagctcatagttcttttccatggcactggaacctcaatttgtgatgtgtagtttgcagttaaaaaaaaaaaaaaaaaaa

SEQ ID NO: 2372 - protein, 115 aa, Zea mays
  misc_feature: Ceres CLONE ID no. 623082
  misc_feature: Ceres CDNA ID no. 25446444
MLNIVYIQMIKAKKVNVMWRSLLLLSPLNRRLAWRKQRILRSMKLMLVAPTMMKVTKTLLIQKRVNQMMTRVLRARIGQAASPLKTPPGKKARITTPSVGKKNLLRSVTFDRKLV

SEQ ID NO: 2373 - DNA, 848 bp, Glycine max
  misc_feature: Ceres CLONE ID no. 623578
  misc_feature: Ceres CDNA ID no. 35383232
  CDS (102)..(752): REFERENCED BY SEQ ID NO: 2374
caacacaaacacccttcgttccattccactcgctagccacaaaccagttccatttcatccattccaactttccaaccacaacacactgtgtgtttgtaaaaatggccatcacaagcaaccttaacttcaacctcaacctagtacttcctgtggcacgccatatggcgtgccctccacgcgtcccgtcgtttctcttcactcgcggtcgaggcgcgtggtccccctcgcttctggtcacgcgcgccatcgacgctaacgagtttctgggggatttcggggcgcgggaccctttccccgccgagcttgaaagctcgttcggggaaaaagtgctgggatacggcaacactgagcacaagattcttattcccaccattactgctctcggtctctcgcagcaggagtgtgctcccgtttcttctgcgcagccccccatctcgctggatgacgcccagactctcattagaaaggttgtgggttggagacttgtgaatgaggaaaatggacttaaaattcaatgcttgtggaaattgagagattttaaatgtggggttgaactcattaacaggatctctaaggttgtagaggctgagggccatttcccaaatatctacttggagcaaccaaatcaagtgagagcagaactatggacagcttccattggaggtttaagtatgaatgattttattgttgctgcaaagatagatcagataaagacatcagatcttgtcccaaggaaaagggtttgggcgtaatgccttaatgaacttcataaaacattttgccacttgattttcttcaatattgaattaccactaatttgtgctatttgattaaaaaaaaaaaaaaaa

SEQ ID NO: 2374 - protein, 216 aa, Glycine max
  misc_feature: Ceres CLONE ID no. 623578
  misc_feature: Ceres CDNA ID no. 35383232
  misc_feature (154)..(205): Pfam Name: Pterin_4a PFAM Desc: Pterin 4 alpha carbinolamine dehydratase
  misc_feature: Homolog of GI Number: 42794937 NR Desc: PCD/DCoH
  misc_feature: Homolog of GI Number: 55773842 NR Desc: PCD/DCoH
  misc_feature: Homolog of GI Number: 67918913 NR Desc: Transcriptional coactivator/pterin dehydratase
  misc_feature: Homolog of GI Number: 71364777 NR Desc: Transcriptional coactivator/pterin dehydratase
  misc_feature: Homolog of GI Number: 21673181 NR Desc: pterin
  misc_feature: Homolog of GI Number: 68550645 NR Desc: Transcriptional coactivator/pterin dehydratase
  misc_feature: Homolog of GI Number: 66777817 NR Desc: Transcriptional coactivator/pterin dehydratase
MAITSNLNFNLNLVLPVARHMACPPRVPSFLFTRGRGAWSPSLLVTRAIDANEFLGDFGARDPFPAELESSFGEKVLGYGNTEHKILIPTITALGLSQQECAPVSSAQPPISLDDAQTLIRKVVGWRLVNEENGLKIQCLWKLRDFKCGVELINRISKVVEAEGHFPNIYLEQPNQVRAELWTASIGGLSMNDFIVAAKIDQIKTSDLVPRKRVWA

SEQ ID NO: 2375 - DNA, 1151 bp, Glycine max
  misc_feature: Ceres CLONE ID no. 624433
  misc_feature: Ceres CDNA ID no. 40041271
  CDS (31)..(903): REFERENCED BY SEQ ID NO: 2376
actcactcactcactcactcctgttcgtaaatgtctatcacttccctcaccatggccgagtcctgcctcctctcttctccctcctcactcttccacaccaaaaccaaaccctctctctttacacccccctccaaacccctcacactccaattttcatgcctcaactcctccgtctctctctccctcgccgcaccaactcaccgttctccccttgtaactttcgtggcccaaacttccgattgggctcaacaagaagaagaacagagcctcgctgaaaccgaagcgggcctggaaagttgggagcccaacggcgaagacgccggcgatgagagcttcgtcgaaccgccggaagaggccaagctcttcgttgggaacttgccttacgacgttgatagccagaaattggccatgcttttcgaacaggccggaaccgttgaaatcgctgaggttatttataacagggaaactgaccagagtcgcgggtttgggtttgtgacgatgagtactgttgaagaagctgaaagcgctgtggagaaattcaaccgctatgatatcgatggaagactgctgactgttaataaggcttctccaagaggaactcggcccgaacgcccaccacctcgtcgttcctttgagtcttccttatcaatctatgttggtaatttgccatgggatgttgacaatacccggctgaagcaaattttcagtaaacacggtaatgttgtgaatgctcgggtagtctatgacagggagtcaggtcgatcacgtggctttggctttgtcacaatgtctgatgagacagaaatgaatgatgccgttgctgctcttgatggcgagagtttggacggaagggcaattaaggtgagtgttgctgaggacaggccaaggcgtggctccttttgagcgttagcatatgtagttccccatgtcagctgctggagttctcttgcatttttttaatagctgaggatatactatagtgtcaatttttgtttaaaggaaaatcctttcttggggcgccaatttcagattagatttaagtatttcgttgttattaatttaatgtccagatgaaagttaagttgtaattcctgactccggagattggagataagtaatactttgttgttgccttaaaaaaaaaaaaaaaa

SEQ ID NO: 2376 - protein, 290 aa, Glycine max
  misc_feature: Ceres CLONE ID no. 624433
  misc_feature: Ceres CDNA ID no. 40041271
  misc_feature (207)..(278): Pfam Name: RRM_1 PFAM Desc: RNA recognition motif.
  misc_feature: Homolog of GI Number: 2330647 NR Desc: ribonucleoprotein
  misc_feature: Homolog of GI Number: 681906 NR Desc: cp31
  misc_feature: Homolog of GI Number: 681908 NR Desc: cp31
  misc_feature: Homolog of GI Number: 19032260 NR Desc: RNA
  misc_feature: Homolog of GI Number: 9759027 NR Desc: RNA
  misc_feature: Homolog of GI Number: 388621 NR Desc: RNA
  misc_feature: Homolog of GI Number: 133247 NR Desc: 28 kDa ribonucleoprotein
  misc_feature: Homolog of GI Number: 99565 NR Desc: RNA
  misc_feature: Homolog of GI Number: 168526 NR Desc: nucleic acid
  misc_feature: Homolog of GI Number: 2443390 NR Desc: Ps16 protein
  misc_feature: Useful for making ornamental plants with modified leaves
  misc_feature: Useful for making plants with increased biomass and foliage
MSITSLTMAESCLLSSPSSLFHTKTKPSLFTPPSKPLTLQFSCLNSSVSLSLAAPTHRSPLVTFVAQTSDWAQQEEEQSLAETEAGLESWEPNGEDAGDESFVEPPEEAKLFVGNLPYDVDSQKLAMLFEQAGTVEIAEVIYNRETDQSRGFGFVTMSTVEEAESAVEKFNRYDIDGRLLTVNKASPRGTRPERPPPRRSFESSLSIYVGNLPWDVDNTRLKQIFSKHGNVVNARVVYDRESGRSRGFGFVTMSDETEMNDAVAALDGESLDGRAIKVSVAEDRPRRGSF

SEQ ID NO: 2377 - DNA, 691 bp, Glycine max
  misc_feature: Ceres CLONE ID no. 624459
  misc_feature: Ceres CDNA ID no. 35389024
  CDS (128)..(607): REFERENCED BY SEQ ID NO: 2378
acacttttccagatctttcgtttccgttccgttcaaacagttccttttttctcacacacttcctttgttcgtcaccgcagtttcaatctcagatccaacattgttcaatccaaattcaacgcattccatggcgaatcctgcatccgcaagattctccgctcttcttcttctcgtttctttgctagtcaacatcgccgccgaatcgccggctccggctccgactccgaagccggatttgcctccgtcgtcttctcctacttctgctcctgcttcgaacccttccccggccaattcgccgccatctccaactccggcgccttctcatcactcgccgccggctccttcgcccggtaccaatccttctccgtctccggctcctgctccggcggatgacgcacatgacggagttaaccacgccggaatgggcggcgtcgacgaaaaatcgtcctcctccggtggaatgagttccggcaagaaagcgggaatagcgttgggagttatcatcggtgccggagtggttgtgttgggagcgctggtgtacaagaggcgccgccagaacatacaacggtctcagtacggatacgcagcgaggagagaacttctgtaggtcataaacattcagtaatgttctagtttttctctttttggtttttaatttcaattgcattataaagcaaaaaaaaaaaaaaaa

SEQ ID NO: 2378 - protein, 159 aa, Glycine max
  misc_feature: Ceres CLONE ID no. 624459
  misc_feature: Ceres CDNA ID no. 35389024
  misc_feature: Homolog of GI Number: 28372906 NR Desc: At3g45230
  misc_feature: Homolog of GI Number: 6911861 NR Desc: serine/proline
  misc_feature: Homolog of GI Number: 4432833 NR Desc: En/Spm
  misc_feature: Homolog of GI Number: 53804484 NR Desc: metalloprotease
  misc_feature: Homolog of GI Number: 992946 NR Desc: p57KIP2
  misc_feature: Homolog of GI Number: 4557441 NR Desc: cyclin
  misc_feature: Homolog of GI Number: 23506315 NR Desc: PspA
  misc_feature: Homolog of GI Number: 7800638 NR Desc: PspA
  misc_feature: Homolog of GI Number: 7800640 NR Desc: PspA
MANPASARFSALLLLVSLLVNIAAESPAPAPTPKPDLPPSSSPTSAPASNPSPANSPPSPTPAPSHHSPPAPSPGTNPSPSPAPAPADDAHDGVNHAGMGGVDEKSSSSGGMSSGKKAGIALGVIIGAGVVVLGALVYKRRRQNIQRSQYGYAARRELL

SEQ ID NO: 2379 - DNA, 511 bp, Glycine max
  misc_feature: Ceres CLONE ID no. 624765
  misc_feature: Ceres CDNA ID no. 29191867
  CDS (81)..(347): REFERENCED BY SEQ ID NO: 2380
gcgtcagaactacgctgaagaatatcatcaccatcaaagtgtttcgttggaaggggaatttggcagatcattggaagaaaatggcgggtggtggaaaggtttcgttcaaagtcacactcacctccgatccaaaattacccttcaaagtgtttagcgttccagaggctgcgccttttactgccgttctcaaattcgccgccgaagaattcaaagtcccgccccagaccagcgctatcatcaccaatgatggtgttggcataaatccccagcagagcgcaggcaatgtcttccttaaacatggttcagaattgcgcctgattccgcgcgatagggttggtgccttttagatgttacagatgtgtctgactggagttggtgccttttagatgttacagatgtctgactggatattgacccttctcgctagatacatgaactgtagcttcatatgtagtaatcaataaataccattgttactgatttcatatattgatatcgaaaaaaaaaaaaa

SEQ ID NO: 2380 - protein, 88 aa, Glycine max
  misc_feature: Ceres CLONE ID no. 624765
  misc_feature: Ceres CDNA ID no. 29191867
  misc_feature (5)..(80): Pfam Name: UPF0185 PFAM Desc: Uncharacterised protein family
  misc_feature: Homolog of GI Number: 34905822 NR Desc: P0483G10.15
  misc_feature: Homolog of GI Number: 56112391 NR Desc: PR46a
  misc_feature: Homolog of GI Number: 58396265 NR Desc: ENSANGP00000017552
  misc_feature: Homolog of GI Number: 72005426 NR Desc:  similar to protein similar to human bone marrow protein BM
  misc_feature: Homolog of GI Number: 38174609 NR Desc: 1810045K17Rik protein
MAGGGKVSFKVTLTSDPKLPFKVFSVPEAAPFTAVLKFAAEEFKVPPQTSAIITNDGVGINPQQSAGNVFLKHGSELRLIPRDRVGAF

SEQ ID NO: 2381 - DNA, 1137 bp, Glycine max
  misc_feature: Ceres CLONE ID no. 624868
  misc_feature: Ceres CDNA ID no. 40351114
  CDS (127)..(999): REFERENCED BY SEQ ID NO: 2382
actccttcgcactcctctttctctccgtgttgccgttcagtgacagcgagtgaaagaatagaagagaagagaacataaccgaaagagaagaagaagaataaagctagggtttttgcaattgcaacgatggcgcatcaaggagaaccggcgaagctgcgatggggagagctggaggaggacgacggagaggatttggacttcctcctgccgccgcggcaggtgatagggcccgacgagaacgggataaagaaggtgatcgagtacaagttcgacgaggacgggaacaaggtaaagatcaccaccaccacacgcacgcgcaaactcgccaacgcgcgtctcagcaaacgcgccatcgagcgccgctcctggcccaagttcggcgacgccgtacacgaagacgtcggcgcccgcctcaccatggtctccaccgaagagatcctcctcgaacgccccaagcctcttggtgccaagacagaggagccaaagaatgctggagacccattggctcaatttcagaaaggtgctgttctcatggtctgtaggacttgtgggaagaagggtgatcactggacctcaaggtgtccatacaaggatcttgccccgccatctgagggattcatcgataaacctgcggccgcggatgctggtgcggccgctgctggtgcaaccaagggagcatatgtgcctcctggtatgagggcaggtgctgagaggactactggatctgatatgcgacgcaggaatgatgagaactctgtgagagtaactaacctctctgaggacacaagagagcctgatttgctggagctgttccgtcctttcggccctgtcagcagagtctatgttgccattgatcagaagactggcatgagcagagggtttggctttgttaactttgtcaacagggaagatgcacaaagagccatcggcaagctcaatggttatgcctatgacaatctcatccttagagttgaatgggcaaccccaagagcaaattaaatgttgagtgttttttgcccctttctttaaaacagtattttgaaggtctatgtatttttgtagtccgagtcttgcactatctttttcctttgagatgatttattaaaagtatacattaattcaaaaaaaaaaaaaaaa

SEQ ID NO: 2382 - protein, 290 aa, Glycine max
  misc_feature: Ceres CLONE ID no. 624868
  misc_feature: Ceres CDNA ID no. 40351114
  misc_feature: null
  misc_feature: Useful for making plants with altered alkaloid content
  misc_feature (211)..(282): Pfam Name: RRM_1 PFAM Desc: RNA recognition motif.
MAHQGEPAKLRWGELEEDDGEDLDFLLPPRQVIGPDENGIKKVIEYKFDEDGNKVKITTTTRTRKLANARLSKRAIERRSWPKFGDAVHEDVGARLTMVSTEEILLERPKPLGAKTEEPKNAGDPLAQFQKGAVLMVCRTCGKKGDHWTSRCPYKDLAPPSEGFIDKPAAADAGAAAAGATKGAYVPPGMRAGAERTTGSDMRRRNDENSVRVTNLSEDTREPDLLELFRPFGPVSRVYVAIDQKTGMSRGFGFVNFVNREDAQRAIGKLNGYAYDNLILRVEWATPRAN

SEQ ID NO: 2383 - DNA, 490 bp, Glycine max
  misc_feature: Ceres CLONE ID no. 624948
  misc_feature: Ceres CDNA ID no. 25447406
  CDS (85)..(309): REFERENCED BY SEQ ID NO: 2384
agatgcaaaggcaatgcagaggcagacaaagcaagagggtgcttcttcactttctctctccaacaactttcactcccaagctccatggccgcaaaccttttacccctttcaatttcatgctcctctaaaacccacattctctgtcttccctcccctcccaaacccctctttctctgccgccactctctgctccgttaccgttccactccgcgactcacatgtaaggcagcccaagtttcggtcgccgaagagtcgtcggcgtccaatggaagaattgtggaagtaatgaaatttgtgaaggcaatgtaatttttagatgtcaatctttgtgatatagagccggtcatagtcctgttaaggaagtgaaaacattgtttcaatttttgttgaaagttttatgaaagtgaacagtttcttcaaaaagctacttgttcaaactaaatatattctttacctgccagtttgatttgtattaaaaaaaaaaaaaaaa

SEQ ID NO: 2384 - protein, 74 aa, Glycine max
  misc_feature: Ceres CLONE ID no. 624948
  misc_feature: Ceres CDNA ID no. 25447406
MAANLLPLSISCSSKTHILCLPSPPKPLFLCRHSLLRYRSTPRLTCKAAQVSVAEESSASNGRIVEVMKFVKAM

SEQ ID NO: 2385 - DNA, 1630 bp, Glycine max
  misc_feature: Ceres CLONE ID no. 625022
  misc_feature: Ceres CDNA ID no. 29191502
  CDS (125)..(1456): REFERENCED BY SEQ ID NO: 2386
aaacactagtagtctagtacattacatcacaaaaatatcatccctctttgttcctaaacacggggcactggtttcgaaccctcgttgtggttaggtcttcttcacctttcgaattttggaatccatgggtcagggaactccgggcggcatgaaccggcagggcgaccggaagccggacggcggcgacaagaaggagaagaagttcgagccgtcggctccgccggcgcgcgtggggcggaaacagcggaagcagaaaggtccggaggcggcggcgcggttgccgacagtgactccggtgacgaagtgcaaactgcggcttctgaagctggagcggatcaaggactaccttctgatggaggaggagttcgtggcgaatcaggagcgactcaagccgcaggaggagaaggccgaggaagacagatccaaggtcgatgatctccgaggctctcccatgagcgtcggaaacctcgaagagctcatcgacgagaatcacgctattgtctcctcctccgttgggcctgagtactatgtcggaatcctgtctttcgttgataaggatcagttggagcctggttgtgctattttgatgcataataaggttctttctgttgttgggcttcttcaagatgaagttgatccaatggtctctgtcatgaaggttgagaaggctcctctggaatcttatgctgacattggtggtttagatgcccaaatacaggaaattaaagaagcagttgagctacccctgacgcatcctgaactatatgaagacattggtatcaagcctcctaagggggtcattttatatggagaacctggaactgggaagacattgcttgcgaaggctgtggcaaactcaacatcagcaacattcttgcgtgttgttggtagtgaactgatacaaaagtacttgggagatggcccaaaacttgtaagagaacttttcagagttgctgatgatctttctccttctattgtattcattgatgaaattgatgcagttggtacaaaaaggtatgatgctcactcaggaggagaacgtgaaattcaaaggaccatgctagagttgctgaaccagttagatggttttgattcaagaggagatgtgaaagtgattctggcaaccaacagaattgaaagtcttgatccagctttgctacgacctggtcgaattgacaggaagatagaatttcctcttcctgatatcaaaacaaggagacgcatcttccagatacacacgtcaaggatgacattagctgatgatgtcaacttggaagaatttgttatgactaaagacgaattctccggagctgatataaaggcaatatgtactgaagctggtttacttgctctacgagaacgtcgaatgaaggtgactcatgccgactttaagaaggccaaggataaagtgatgtttaagaagaaagaaggggtgcctgaagggctgtatatgtgaaaaactatcctctattatctctggccctcttgtctttcttttaacgttctagttatgcgaacaaatgccaattcatttgtattctgcgaacaaatgtcagttgtattttaggggctttgaatctcaacaacgattttaattcaatatagttttctttcaaaaaaaaaaaaaaaa

SEQ ID NO: 2386 - protein, 443 aa, Glycine max
  misc_feature: Ceres CLONE ID no. 625022
  misc_feature: Ceres CDNA ID no. 29191502
  misc_feature (221)..(352): Pfam Name: AAA_2 PFAM Desc: ATPase family associated with various cellular activities
  misc_feature: Homolog of GI Number: 1172635 NR Desc: 26S protease regulatory subunit 4 homolog
  misc_feature: Homolog of GI Number: 6652880 NR Desc: 26S proteasome AAA
  misc_feature: Homolog of GI Number: 17297987 NR Desc: 26S proteasome regulatory particle triple
  misc_feature: Homolog of GI Number: 34898202 NR Desc: 26S proteasome regulatory subunit 4 homolog
  misc_feature: Homolog of GI Number: 71033449 NR Desc: 26S proteasome regulatory subunit 4
  misc_feature: Homolog of GI Number: 18479040 NR Desc: 26S proteasome regulatory subunit IV
  misc_feature: Homolog of GI Number: 21593177 NR Desc: 26S proteasome subunit 4
  misc_feature: Homolog of GI Number: 11045086 NR Desc: 26S proteasome subunit 4
  misc_feature: Homolog of GI Number: 13937244 NR Desc: At2g20140/T2G17.6
  misc_feature: Homolog of GI Number: 72164728 NR Desc:  similar to CG5289
MGQGTPGGMNRQGDRKPDGGDKKEKKFEPSAPPARVGRKQRKQKGPEAAARLPTVTPVTKCKLRLLKLERIKDYLLMEEEFVANQERLKPQEEKAEEDRSKVDDLRGSPMSVGNLEELIDENHAIVSSSVGPEYYVGILSFVDKDQLEPGCAILMHNKVLSVVGLLQDEVDPMVSVMKVEKAPLESYADIGGLDAQIQEIKEAVELPLTHPELYEDIGIKPPKGVILYGEPGTGKTLLAKAVANSTSATFLRVVGSELIQKYLGDGPKLVRELFRVADDLSPSIVFIDEIDAVGTKRYDAHSGGEREIQRTMLELLNQLDGFDSRGDVKVILATNRIESLDPALLRPGRIDRKIEFPLPDIKTRRRIFQIHTSRMTLADDVNLEEFVMTKDEFSGADIKAICTEAGLLALRERRMKVTHADFKKAKDKVMFKKKEGVPEGLYM

SEQ ID NO: 2387 - DNA, 1157 bp, Glycine max
  misc_feature: Ceres CLONE ID no. 625135
  misc_feature: Ceres CDNA ID no. 25891414
  CDS (49)..(849): REFERENCED BY SEQ ID NO: 2388
attgcagagtgacagcagcagcagcagcagcttggtctgaggttagagatggttagccaaaggcagcgacttgctcgaaagcgatacaaagcggaacaccctgagctctttccgaagcccgagcccacaccccccaaagaccccgagaagaagaaaaagaagaagaaaaacagcgctttcaagcgcaaaaggcccgagcccaagcccggctccagaaaaagacaccctctcagagtccccggcatgaagcccggcgagagctgcttcatctgcaaggccatggaccacatcgccaagctctgccccgaaaaagcagaatgggaaaaaaacaagatatgtttgcggtgtcgacggcgcggtcatagagctaagaactgccctgaggtgctagatggcgccaaggatgccatgtattgctataactgtggggaaaatggtcactctctcacacaatgtcctcaccctctacaagaaggagggacaaagtttgctgagtgctttgtctgtaatcaacgtggacacttgagtaaaaactgtcctcaaaatactcacggcatttatccaaagggtggttgctgtaaaatttgtggtggtgtgacacatttggcaaaggattgccctgacaaagggaagagtggatctgttgctgctaacaggcctgctgatggatggatgagaattgaagagaggcctatgggtcaggttaccaaatttgtcagcggggatgatattgaggatgacttcatgacagatgacatacatagtggagacaagaaaaagccagcaaagtcaacagaagaccatgtaaaaccaaagaagaaggagggtcctaaagttgtgaacttttaactaaggatagttacctcataatgtattgtgtggatattggtttccactcaccattttctttcctgttctatccacaaggctatggtagacccctgattcccttccagaatgaatgtcatcgctcctgcaaagtcttgggttgcctaaaaatttggtgaattgacatgaaaactaggactatcgcctctcattgctgatcataaattctacagtgatttgtaaaaggtaactgaaaatgtaactattttttggtacaagtactagtttattatttatctttactttgttgatcaaaaaaaaaaaaaaaa

SEQ ID NO: 2388 - protein, 266 aa, Glycine max
  misc_feature: Ceres CLONE ID no. 625135
  misc_feature: Ceres CDNA ID no. 25891414
  misc_feature (121)..(138): Pfam Name: zf PFAM Desc: Zinc knuckle
  misc_feature: Homolog of GI Number: 50927857 NR Desc: OSJNBb0012E24.6
  misc_feature: Homolog of GI Number: 48374972 NR Desc: putative actin depolymerizing factor
  misc_feature: Homolog of GI Number: 56471707 NR Desc: zinc finger protein
  misc_feature: Homolog of GI Number: 10185129 NR Desc: SPAC694.01c
  misc_feature: Homolog of GI Number: 50761973 NR Desc:  similar to zinc finger
  misc_feature: Homolog of GI Number: 57084761 NR Desc:  similar to zinc finger
  misc_feature: Homolog of GI Number: 38198649 NR Desc: zinc finger
  misc_feature: Homolog of GI Number: 21595704 NR Desc: ZCCHC9 protein
MVSQRQRLARKRYKAEHPELFPKPEPTPPKDPEKKKKKKKNSAFKRKRPEPKPGSRKRHPLRVPGMKPGESCFICKAMDHIAKLCPEKAEWEKNKICLRCRRRGHRAKNCPEVLDGAKDAMYCYNCGENGHSLTQCPHPLQEGGTKFAECFVCNQRGHLSKNCPQNTHGIYPKGGCCKICGGVTHLAKDCPDKGKSGSVAANRPADGWMRIEERPMGQVTKFVSGDDIEDDFMTDDIHSGDKKKPAKSTEDHVKPKKKEGPKVVNF

SEQ ID NO: 2389 - DNA, 715 bp, Glycine max
  misc_feature: Ceres CLONE ID no. 625544
  misc_feature: Ceres CDNA ID no. 40351115
  CDS (21)..(317): REFERENCED BY SEQ ID NO: 2390
tccaatccaaaccaacagcaatgtctctgttcttacattgccatgcccctcaccacagcatggccactctctcacccttctcaaccttcaattccaaacctctctgtgcttctctacctaacccctctttcttaactcatcaacaacagcaacaacacccttatcctctcaccacaacgaccacctctgaccataagcccctctcagtttccacactgcccagaaagttgctctgtaaaccacccaaaggaaagtacgtcagagaggactatcttgtgaaaaagttgtcagagcaactttctggacagtgtgagtgagaaaaacaagtttaaaaatggtcctagttgtggggatcattaggtctaccattttgcatgtcatgttgaaaagcttttttttttatttatttctttagtttactttattattaatatattattattatatgatggttaagtctttggttgtattatggagggtatacctacgtgtgagcacaacacttggctccacatcagcgtgcttaccacgtggtgacatgagaaattctaggagttgtgtattgaagtgagcaagctgctgctggtgctggagtttagggatgagggtttattttattggcagggttacatgagtttgtgatgatgtgttattgtgtttctttaggtttgaataaatgatatttactttaaaaaaaagaaaaaaaaaaaaaaaa

SEQ ID NO: 2390 - protein, 98 aa, Glycine max
  misc_feature: Ceres CLONE ID no. 625544
  misc_feature: Ceres CDNA ID no. 40351115
MSLFLHCHAPHHSMATLSPFSTFNSKPLCASLPNPSFLTHQQQQQHPYPLTTTTTSDHKPLSVSTLPRKLLCKPPKGKYVREDYLVKKLSEQLSGQCE

SEQ ID NO: 2391 - DNA, 843 bp, Glycine max
  misc_feature: Ceres CLONE ID no. 625580
  misc_feature: Ceres CDNA ID no. 40351116
  CDS (79)..(735): REFERENCED BY SEQ ID NO: 2392
aaaaaacatataacctatttcaccaatccaacagggtggttgtgatttttgttgttgttgttgttgttagtgatcatcatggacgctgcatcaggggcagcgcctgcggcgttggcggctccccaatcagagggatcaccggctgcgccgagccgctacgagtcgcagaagcgacgcgactggaacacgttcttgcagtacctgaggaaccacaagccaccattgacgctggcgcggtgcagtggcgcgcacgtgatcgagtttttgaagtacctcgaccagttcgggaagactaaggtacacatcttggggtgcccgtatttcggacaccccaacccacctgccccttgtgcctgtcctcttaaacaggcttggggcagtctggacgccctaattggacgactcagggcggccttcgaagaaaatggaggccgtcctgagtctaatccatttgcaactagggctgtccgaatttacctcagagagataagagaaggtcaggccaaggcaagaggaatcccctacgagaagaagaaacgcaagagaactattgtcaccactactgtcaccgccgcagccaccgttatgtctaccataacgggtagtagtcctaataatactattacaaacggtgctggtagtagcactggtaacactactaacggagctggtgttagtgaaccttctgctgctgctactgctacacctaatgttactactgctgctgccgtatagtataattttaataattttgatcattttttcctattttctgctactatctactatctatctttatttttaaggaaattaattgtggttaaaaaaaaaaaaaaaaaaaaa

SEQ ID NO: 2392 - protein, 218 aa, Glycine max
  misc_feature: Ceres CLONE ID no. 625580
  misc_feature: Ceres CDNA ID no. 40351116
  misc_feature: The plant flowers significantly late compared to wild-type.
  misc_feature: null
  misc_feature: Useful for making plants with modulated flowering time
  misc_feature: Useful for making plants with modulated low light sensitivity
MDAASGAAPAALAAPQSEGSPAAPSRYESQKRRDWNTFLQYLRNHKPPLTLARCSGAHVIEFLKYLDQFGKTKVHILGCPYFGHPNPPAPCACPLKQAWGSLDALIGRLRAAFEENGGRPESNPFATRAVRIYLREIREGQAKARGIPYEKKKRKRTIVTTTVTAAATVMSTITGSSPNNTITNGAGSSTGNTTNGAGVSEPSAAATATPNVTTAAAV

SEQ ID NO: 2393 - DNA, 985 bp, Glycine max
  misc_feature: Ceres CLONE ID no. 625839
  misc_feature: Ceres CDNA ID no. 35389026
  CDS (84)..(659): REFERENCED BY SEQ ID NO: 2394
aatagagagaaggattcagactctggaagcttcctttggccggagaagaagacggtgtcgtttgagacttgggggagaggagaatgacagagttgagcagcagagaggtggaatacataaggagacaccacagcaaggcagcagaggacaatcagtgtgcctctgctctcgttaagcacataagggccccacttcctctcgtgtggtcgttggtgaggagatttgatgagccgcagaagtataaaccgtttgtgagcaggtgcgtggtgaggggaaaccttgagattgggagtttgagagaggttgatgttaagtccggccttccagcgactactagtactgaaagattagagattcttgatgacaatcatcatatacttagcgtcaggattattggcggtgatcatagacttaggaactactcgtctatcatgtccctccacccagaaattgttgatggaaggccaggtaccctggtaattgaatcatttgtggtggacatacctgaaggcaacaccaaggatgagacctgctacttcgttgaagcattgatcaaatgcaatctcaaatcacttgctgatgtctcagaaggccttactttgcaggaccacactgaaccaattgatcgaaaatacgaattattgatcacaagaggctgagaatttggctgccatggatgaagctttcccaactttggaggcatagaagacggaatgccaaatggcaatggtgctttattctctgttatatatgattgcttttgctcgtttctctctttagtggtagttaaaaagaatagaatgttttagacaaatgtctgaatcagtgcaggaaaaggtgactgcatgttatgttctttctgtatataggtgttggtcaaagttggtccgtaaaattgtttccattggtcagtactcagttgtaatttctggttgcagtaaatttttagcaaataacagaggtttcttcaaaaaaaaaaaaaaaa

SEQ ID NO: 2394 - protein, 191 aa, Glycine max
  misc_feature: Ceres CLONE ID no. 625839
  misc_feature: Ceres CDNA ID no. 35389026
  misc_feature: Homolog of GI Number: 47558817 NR Desc: CAPIP1
  misc_feature: Homolog of GI Number: 78191398 NR Desc: CAPIP1
  misc_feature: Homolog of GI Number: 50252014 NR Desc: Bet v I allergen
  misc_feature: Homolog of GI Number: 56384584 NR Desc: AT
  misc_feature: Homolog of GI Number: 53791938 NR Desc: Bet v I allergen
  misc_feature: Homolog of GI Number: 52077086 NR Desc: Bet v I allergen
  misc_feature: Homolog of GI Number: 52077087 NR Desc: Bet v I allergen
MTELSSREVEYIRRHHSKAAEDNQCASALVKHIRAPLPLVWSLVRRFDEPQKYKPFVSRCVVRGNLEIGSLREVDVKSGLPATTSTERLEILDDNHHILSVRIIGGDHRLRNYSSIMSLHPEIVDGRPGTLVIESFVVDIPEGNTKDETCYFVEALIKCNLKSLADVSEGLTLQDHTEPIDRKYELLITRG

SEQ ID NO: 2395 - DNA, 601 bp, Glycine max
  misc_feature: Ceres CLONE ID no. 626133
  misc_feature: Ceres CDNA ID no. 36707409
  CDS (1)..(444): REFERENCED BY SEQ ID NO: 2396
agcgtctcattttcatcccctcgcccgccgccgccgccgctcccgccgctagaccagctcgccagcagcaatggcccggatcaaggtgcacgagctgagggggaagaacaaggcggagctgcagggccagctcaaggacctcaaggcggagctctccctcctccgcgtcgccaaggtcaccggcggcgcccccaacaagctctccaagatcaaggtggtgcgcacctcgattgcgagggtgctcacggtgatctcgcagaagcagaagtcggcgctgagggaggcgtacaagaacaagcgtctcccgctcgacctccgccccaagaagacccgcgccatccgcaggcgtctcaccaagcaccagctctctttgaagacggagagggagaagaagcgcgagaagtacttccccatgaggaagtatgctatcaaggcctaggttaggagcacatgttttaccggccgagttttgctcagaagttgcatgaattttatgttctgtgtggacaccgctgctatctaagtactatgtattcgatatcctgcatgaaattcgaacttatgcttattgacactatgatctacaaaaaaaaaaaaaaaa

SEQ ID NO: 2396 - protein, 122 aa, Glycine max
  misc_feature: Ceres CLONE ID no. 626133
  misc_feature: Ceres CDNA ID no. 36707409
  misc_feature (6)..(64): Pfam Name: Ribosomal_L29 PFAM Desc: Ribosomal L29 protein
  misc_feature: Homolog of GI Number: 50923665 NR Desc: OSJNBb0006N15.8
  misc_feature: Homolog of GI Number: 51979244 NR Desc: PREDICTED OJ1126_B06.24 gene product
  misc_feature: Homolog of GI Number: 17104643 NR Desc: putative 60S ribosomal protein L35
  misc_feature: Homolog of GI Number: 6984224 NR Desc: 60S ribosomal protein L35
  misc_feature: Homolog of GI Number: 33589770 NR Desc: At5g02610
  misc_feature: Homolog of GI Number: 21592412 NR Desc: putative 60S ribosomal protein L35
  misc_feature: Homolog of GI Number: 62751093 NR Desc: similar to 60S ribosomal protein L35
  misc_feature: Homolog of GI Number: 71535092 NR Desc: putative 60S ribosomal protein L35
  misc_feature: Homolog of GI Number: 30102548 NR Desc: At3g55170
MARIKVHELRGKNKAELQGQLKDLKAELSLLRVAKVTGGAPNKLSKIKVVRTSIARVLTVISQKQKSALREAYKNKRLPLDLRPKKTRAIRRRLTKHQLSLKTEREKKREKYFPMRKYAIKA

SEQ ID NO: 2397 - DNA, 967 bp, Glycine max
  misc_feature: Ceres CLONE ID no. 626214
  misc_feature: Ceres CDNA ID no. 29191704
  CDS (100)..(594): REFERENCED BY SEQ ID NO: 2398
cttcacggcaacagaagaataatcgagacacaaagatcatagtgatcattttttaatttctcagatttatccgacgtccttgcagatccaccaaccgttatggctgccttcagcggtgatgaaacggcaccgtttttcggcttccttggcgccgcagctgccctcgtcttctcctgtatgggagctgcctatggcacagcgaagagtggcgtgggcgtggcttccatgggtgtaatgagacctgagctggtgatgaagtcgattgttcctgttgtcatggctggagttttgggtatttatggccttattattgctgttattatcagtaccggtattaatccaaaggccaaatcctattacctctttgatggttatgcacatctctcttctggtcttgcctgtggcttggctggcctttctgctggcatggctattggtattgttggtgatgccggtgttagagccaatgcacaacaaccaaaactttttgttggaatgattctcatcctcatttttgctgaagcacttgccctttatggtctcattgttggtattatcctgtcttctcgtgctggccagtctagagccgactaagaaaggagttgtgctgcaaaatattctttgaccacccatctgttttaacctccttttaaaggggatgagggaggtaattattagttgttccgagcttagcgatgttcaggcagcattttcaggctttagcaatggtgtgaaagttcaattcgccatttgtggtgtttgtttgtataattaggtttatgtttacttaataaagcttcttaagcttcctcttttttatactttattgattgtattttgccatatcatccgacttttatatgtattttttgggctgctgaaactggtgcatgtaatgatttggctagcaatgcagtgtatttcatgggtctttccatgttggatattggtaaaaaaaaaaaaaaaa

SEQ ID NO: 2398 - protein, 164 aa, Glycine max
  misc_feature: Ceres CLONE ID no. 626214
  misc_feature: Ceres CDNA ID no. 29191704
  misc_feature (92)..(157): Pfam Name: ATP PFAM Desc: ATP synthase subunit C
  misc_feature: Homolog of GI Number: 2502087 NR Desc: adenosine triphosphatase
  misc_feature: Homolog of GI Number: 30144705 NR Desc: vacuolar H
  misc_feature: Homolog of GI Number: 6164957 NR Desc: vacuolar H+
  misc_feature: Homolog of GI Number: 4519260 NR Desc: vacuolar H+
  misc_feature: Homolog of GI Number: 21592721 NR Desc: vacuolar H+
  misc_feature: Homolog of GI Number: 3334412 NR Desc: Vacuolar ATP synthase 16 kDa proteolipid subunit
  misc_feature: Homolog of GI Number: 4519262 NR Desc: vacuolar H+
  misc_feature: Homolog of GI Number: 52851178 NR Desc: vacuolar H+
  misc_feature: Homolog of GI Number: 2493146 NR Desc: Vacuolar ATP synthase 16 kDa proteolipid subunit
  misc_feature: Homolog of GI Number: 12659320 NR Desc: vacuolar ATPase subunit c
  misc_feature: Useful for making plants with altered leaf shape eg curled leaves
  misc_feature: Useful for making plants with increased biomass and foliage
  misc_feature: Useful for modifying fruit shape and seed yield
  misc_feature: Useful for sterility
MAAFSGDETAPFFGFLGAAAALVFSCMGAAYGTAKSGVGVASMGVMRPELVMKSIVPVVMAGVLGIYGLIIAVIISTGINPKAKSYYLFDGYAHLSSGLACGLAGLSAGMAIGIVGDAGVRANAQQPKLFVGMILILIFAEALALYGLIVGIILSSRAGQSRAD

SEQ ID NO: 2399 - DNA, 1092 bp, Glycine max
  misc_feature: Ceres CLONE ID no. 626552
  misc_feature: Ceres CDNA ID no. 24766620
  CDS (312)..(965): REFERENCED BY SEQ ID NO: 2400
atatatactctcaataaacagacaagcaccggcagcacccgccgccggtggaacccattagcaaagcaccacaacacaagaaccttctcattcccttcttcttctccttcctcctcatcttctacccattttccattttataaaaattcgaatacccaattgggaaaaagcaaacaactttgctaacactcggtgaaaaaaaaaaacgcattccgccttcagtccttcgtttcgcattgagctctgtttcttttccagatgaaacggcgatgaagtagctgtcgtttttcgaatcagaacgccaccgcagaatgctgtgcaggaggagctccaaaaacggcgtcggctcgggatcggtgccggtgcacctcaacgtctacgatctgacacccatcaacggttacgcttactggttcggcctcggagtgtaccattctggcgtgcaagttcatgacgttgagtttgcgttcggggctcacgagtatccttcgacggggatattcgaaggagaaccgaagaggtgcgaaggtttcgcgttcaggaaaacgattctgatcggaaaaactgatatgggaccctgtgaggttagggcagtgatggaagaacttgctgctgagtacagagggaatgcttacaatctcatcacaaagaattgcaaccatttctgcaacgatgcttgtcttagactcaccggaaatcctattccaagttgggtcaatcgtcttgctcgaattggatttatgtgcaattgtgttcttcccgtgacattgaactcaacaaaagttaggcatcacaagatagaagacaaacaatgtgaagaagagaagcaagcattagcgagtgagccaaagaagcttaattcttcaaattcatcttcccctaagggactgcgtaggggaaggagtagaactcgacgtgccctccctccatcttcacctttgattattggttcttcttcatcttgatgcccaaactcttgattttttttcttcctctttttgatttggccaattacagaagttgctctaacgaagaaaggcaacagattggattttcaatttaaaattgtttttcttcaaaaaaaaaaaaaaa

SEQ ID NO: 2400 - protein, 217 aa, Glycine max
  misc_feature: Ceres CLONE ID no. 626552
  misc_feature: Ceres CDNA ID no. 24766620
  misc_feature: Homolog of GI Number: 9802596 NR Desc: T2E6.19
  misc_feature: Homolog of GI Number: 55773793 NR Desc: apoptosis
  misc_feature: Homolog of GI Number: 61656670 NR Desc: OSJNBa0065H10.7
  misc_feature: Homolog of GI Number: 7268501 NR Desc: EREBP
  misc_feature: Homolog of GI Number: 50748284 NR Desc:  similar to RIKEN cDNA 5830417C01
  misc_feature: Homolog of GI Number: 34880969 NR Desc: similar to 5830417C01Rik protein
  misc_feature: Homolog of GI Number: 46227954 NR Desc: predicted protease
  misc_feature: Useful for making plants with altered leaf shape eg curled leaves
  misc_feature: Useful for sterility
MLCRRSSKNGVGSGSVPVHLNVYDLTPINGYAYWFGLGVYHSGVQVHDVEFAFGAHEYPSTGIFEGEPKRCEGFAFRKTILIGKTDMGPCEVRAVMEELAAEYRGNAYNLITKNCNHFCNDACLRLTGNPIPSWVNRLARIGFMCNCVLPVTLNSTKVRHHKIEDKQCEEEKQALASEPKKLNSSNSSSPKGLRRGRSRTRRALPPSSPLIIGSSSS

SEQ ID NO: 2401 - DNA, 1221 bp, Glycine max
  misc_feature: Ceres CLONE ID no. 627329
  misc_feature: Ceres CDNA ID no. 40041272
  CDS (207)..(920): REFERENCED BY SEQ ID NO: 2402
aatatttgggtggaagcttctattctatcactgcagaaattgatgagaaagttcccatcccaattcggtggtttatcgcgttaagcaaaaaacccaatcaaaattctaagtctctttgtttacgttgttcgtttccctcattgctttgttctcttctctcttctctctcacattcaacttcaaaggcgtagagtgagatccgaacgatgaagagagtattcggcgtcaagaagaacaaggatcctcctccttccattcaggatgcttccgataggattactaaacgaggtgactcggtggatgacaagattaagaagcttgatgccgagcttagtagatataaggagcagattaagaaaactagacctggtcctgcccaggaagctgttaaagctagagccatgagagttcttaagcaaaaacgaatgtatgaaggccagcgtgacatgctgtacaatcagacattcaatctcgatcaagttcaatttgcagctgaaggcattaaagatgctcaacaaactatgacagctttgaagtctgccaacaaggagttgaagggaatgatgaaaactgtgaagatccaagacattgataacttgcaagatgagatgatggacctcatggatgtaagtaatgaaattcaagagactttgggtagaagctataatgtgcctgatgacattgacgaggatgatcttatgggtgaacttgacgcattggaattagacatgggaaatgagactgaagctgatggggtcccatcctatctccaacctgataaagaacctgatttggatgcagaacttaacttacctccagctccaacaggacaaacggcagtgccacctggcagattcaatgcccagactgaggacgaactgggtttacctgctgtccctcgggcatccatacgcggttaaagaatgtttttttatatcttggcatagctagtgaagtcacgagcaagcccttgtaaagatgtgcagatcttgagaatattgattgatacagtgatttaattggtctggtgtttccattatagacttagtgccttttattttcccttgtaataaaccatgtggaagcatctttgttttttgtatgaagcttttggctcgggaaaaaaagggaaaaaatgtttgtcgaaagcttggaacctgcaagtaatgtttataaaggaaatttatgcatacacatttgttatgcaaaaaacaaaaaaaa

SEQ ID NO: 2402 - protein, 237 aa, Glycine max
  misc_feature: Ceres CLONE ID no. 627329
  misc_feature: Ceres CDNA ID no. 40041272
  misc_feature (12)..(210): Pfam Name: SNF7 PFAM Desc: SNF7
  misc_feature: Homolog of GI Number: 55769667 NR Desc: putative CGI
  misc_feature: Homolog of GI Number: 42572355 NR Desc: SNF7 family protein
  misc_feature: Homolog of GI Number: 34894040 NR Desc: P0672D08.33
  misc_feature: Homolog of GI Number: 50736119 NR Desc:  similar to HSPC177
  misc_feature: Homolog of GI Number: 73971124 NR Desc:  similar to chromatin modifying protein 5 isoform 4
MKRVFGVKKNKDPPPSIQDASDRITKRGDSVDDKIKKLDAELSRYKEQIKKTRPGPAQEAVKARAMRVLKQKRMYEGQRDMLYNQTFNLDQVQFAAEGIKDAQQTMTALKSANKELKGMMKTVKIQDIDNLQDEMMDLMDVSNEIQETLGRSYNVPDDIDEDDLMGELDALELDMGNETEADGVPSYLQPDKEPDLDAELNLPPAPTGQTAVPPGRFNAQTEDELGLPAVPRASIRG

SEQ ID NO: 2403 - DNA, 448 bp, Glycine max
  misc_feature: Ceres CLONE ID no. 627347
  misc_feature: Ceres CDNA ID no. 40351117
  CDS (83)..(352): REFERENCED BY SEQ ID NO: 2404
acacagctattcctcttaagcttgctactgagtttccacactgcataccttaggtcttccgaattcgaagttaatttggaagatggcaaggaatccagtgaataggttcaaaagatgggtagaaaggaatggttggtggagtgacaaggatgaattggagcttagaagcagtgtcaggaagcagttaatgcatgcgattcaggtggcagagaaagcacaaaaacctccacttcaggacttatttaatgatgtctatgaccaaataccatcaaaccttcaggagcaagagagactaattagaaaaaccatcgagaagcatcccaaagactacccttctgatgttcctttgtagatattgccaattcaaacaagaaattgtactaaatcttacaatcaaaatataaaataaagggattggatgccctgttcttgaaaaaaaaaaaaaaaa

SEQ ID NO: 2404 - protein, 89 aa, Glycine max
  misc_feature: Ceres CLONE ID no. 627347
  misc_feature: Ceres CDNA ID no. 40351117
  misc_feature (1)..(51): Pfam Name: E1_dh PFAM Desc: Dehydrogenase E1 component
MARNPVNRFKRWVERNGWWSDKDELELRSSVRKQLMHAIQVAEKAQKPPLQDLFNDVYDQIPSNLQEQERLIRKTIEKHPKDYPSDVPL

SEQ ID NO: 2405 - DNA, 422 bp, Glycine max
  misc_feature: Ceres CLONE ID no. 628083
  misc_feature: Ceres CDNA ID no. 29191814
  CDS (3)..(221): REFERENCED BY SEQ ID NO: 2406
agggtttggttattagggttttcgctgaccggtgcgcagtcgagcctccagaagacgaatcgaaaatgccgtcgcacaagacattcagaatcaagaagaagttggcgaagaagatgaggcagaacaggcccattccctactggatccgcatgaggaccgataacaccatcaggtacaacgcgaagcgccgtcactggcgtcgcaccaagcttggattctgaggtgtatgctctgcctaggttcaatttatccaattaattagtgttttattttcttgaggcaaaaacaatgttttgagtttttaatattttccatttgttcgaagactatattgtgtaaggaacttattgtagttcatactcatggcgtttgtcaactccttttaaagtattttcggattcattgcaaaaaaaaaaaaaaaa

SEQ ID NO: 2406 - protein, 51 aa, Glycine max
  misc_feature: Ceres CLONE ID no. 628083
  misc_feature: Ceres CDNA ID no. 29191814
  misc_feature (9)..(51): Pfam Name: Ribosomal_L39 PFAM Desc: Ribosomal L39 protein
  misc_feature: Homolog of GI Number: 50915618 NR Desc: 60S RIBOSOMAL PROTEIN L39
  misc_feature: Homolog of GI Number: 50915614 NR Desc: putative 60S ribosomal protein L39
  misc_feature: Homolog of GI Number: 55773789 NR Desc: 60S ribosomal protein L39
  misc_feature: Homolog of GI Number: 57471714 NR Desc: ribosomal protein L39
  misc_feature: Homolog of GI Number: 21618028 NR Desc: putative ribosomal protein L39
  misc_feature: Homolog of GI Number: 24266968 NR Desc: ribosomal protein L39
  misc_feature: Homolog of GI Number: 66934980 NR Desc: ribosomal protein L39
  misc_feature: Homolog of GI Number: 67084113 NR Desc: ribosomal protein L39
  misc_feature: Homolog of GI Number: 58394407 NR Desc: ENSANGP00000020220
  misc_feature: Homolog of GI Number: 62655648 NR Desc:  similar to RIKEN cDNA 4930517K11
MPSHKTFRIKKKLAKKMRQNRPIPYWIRMRTDNTIRYNAKRRHWRRTKLGF

SEQ ID NO: 2407 - DNA, 697 bp, Glycine max
  misc_feature: Ceres CLONE ID no. 628277
  misc_feature: Ceres CDNA ID no. 29191868
  CDS (68)..(478): REFERENCED BY SEQ ID NO: 2408
cacaaccactcaaatctcaatacctcaattcttcgctttaacgaaaaaggacacattttcccttacaatggcacgaaccaaacaaactgcgcgcaagtccaccggaggcaaggcacctcggaagcagctcgccacaaaagccgccagaaagtcagctccggcgaccggcggagtgaagaagccgcatcggttccgccctggcacggtggcgctgagggagatccggaagtaccagaagagcacggagctcctgatccggaagctccccttccagcgcctggtgcgcgagatcgcgcaggatttcaagaccgatttacggtttcagagtagcgctgtttccgcgcttcaggaagcggcggaggcttacttggtagggttgtttgaggacactaatctctgtgccattcacgccaagcgcgtcaccatcatgccgaaggatattcagcttgcgcggagaattagaggcgagagggcttgaggattttttaatgatttgtcactgctaggatacgttaaaactggatctggtttatgtagtttgtggttttggtgtatttattcgaccgtaagggttgtggttgttagtatgaagatgtagagttaacattatctggctaattagttggttaatgtttactttgaatttgctgtttgtgtgaatgaattaaaagggttgattgcaaaaaaaaaaaaaaaa

SEQ ID NO: 2408 - protein, 136 aa, Glycine max; identical to SEQ ID NO: 588
  misc_feature: Ceres CLONE ID no. 628277
  misc_feature: Ceres CDNA ID no. 29191868
  misc_feature (58)..(134): Pfam Name: Histone PFAM Desc: Core histone H2A/H2B/H3/H4
  misc_feature: Homolog of GI Number: 74004258 NR Desc:  similar to histone 1
  misc_feature: Homolog of GI Number: 62286642 NR Desc: Histone H3
  misc_feature: Homolog of GI Number: 61842355 NR Desc:  similar to HIST1H3I protein
  misc_feature: Homolog of GI Number: 166384 NR Desc: histone H3
  misc_feature: Homolog of GI Number: 70753 NR Desc: histone H3
  misc_feature: Homolog of GI Number: 50960584 NR Desc: HIST2H3C protein
  misc_feature: Homolog of GI Number: 61835420 NR Desc:  similar to HIST1H3I protein
  misc_feature: Homolog of GI Number: 1362108 NR Desc: histone H3 homolog
  misc_feature: Homolog of GI Number: 68362812 NR Desc:  similar to CG31613
  misc_feature: Homolog of GI Number: 74004201 NR Desc:  similar to histone 1
  misc_feature: Useful for delaying flowering time
  misc_feature: Useful for increasing chlorophyll and photosynthetic capacity
  misc_feature: Useful for making shorter plants

SEQ ID NO: 2409 - DNA, 668 bp, Glycine max
  misc_feature: Ceres CLONE ID no. 628382
  misc_feature: Ceres CDNA ID no. 25891995
  CDS (29)..(418): REFERENCED BY SEQ ID NO: 2410
aacttggtaatatattttgttgcactctatggcctcagagacagaagctgctcttgctgccactccctctgatggtcccaccgtatttgacaagatcatcaataaggaaattccttctactgtggtctatgaggatgataaggtccttgcctttagggacatagatccacaagctcctacccatattctaatcattcctaaagttagggatgggttaactggtctgtccaaggctgaggagaggcactgtgagattctaggtcgacttttgtgcactgctaagctggttgcaaagcaagaaggtcttgatgatggcttcaggattgtaattaatgatggacgagacgggggccaatcagtttaccacattcatgtgcacctcattgggggacgacagatgggctggccccctttctaaaatgtgaaaagattcgtagtgtcacggtatgcctttgtgcagacctgcagttatactctgcttatgcaatctataaataatggttttaatttttaaatgactaagtagtgtcttgatgttacaccaagaaattatgatgttgtgttagatggcctatactaattatgtttaaactagtgtgtcaaatttatgctaaaaccatattccaaagtcgtttatggattatggttgtttaaaaaaaaaaaaaaaa

SEQ ID NO: 2410 - protein, 129 aa, Glycine max
  misc_feature: Ceres CLONE ID no. 628382
  misc_feature: Ceres CDNA ID no. 25891995
  misc_feature (18)..(124): Pfam Name: HIT PFAM Desc: HIT domain
  misc_feature: Homolog of GI Number: 473187 NR Desc: protein kinase C inhibitor
  misc_feature: Homolog of GI Number: 4512627 NR Desc: Similar to gbZ29643 protein kinase C inhibitor
  misc_feature: Homolog of GI Number: 66522241 NR Desc:  similar to GA15490
  misc_feature: Homolog of GI Number: 53933250 NR Desc: zgc:103764
  misc_feature: Homolog of GI Number: 56500949 NR Desc: protein kinase c inhibitor
  misc_feature: Homolog of GI Number: 72014239 NR Desc:  similar to histidine triad nucleotide binding protein 1 isoform 1
  misc_feature: Homolog of GI Number: 72014241 NR Desc:  similar to histidine triad nucleotide binding protein 1 isoform 2
  misc_feature: Homolog of GI Number: 57093509 NR Desc:  similar to histidine triad nucleotide
  misc_feature: Homolog of GI Number: 55624718 NR Desc:  similar to Histidine triad nucleotide
MASETEAALAATPSDGPTVFDKIINKEIPSTVVYEDDKVLAFRDIDPQAPTHILIIPKVRDGLTGLSKAEERHCEILGRLLCTAKLVAKQEGLDDGFRIVINDGRDGGQSVYHIHVHLIGGRQMGWPPF

SEQ ID NO: 2411 - DNA, 523 bp, Glycine max
  misc_feature: Ceres CLONE ID no. 628385
  misc_feature: Ceres CDNA ID no. 40041273
  CDS (68)..(376): REFERENCED BY SEQ ID NO: 2412
agggttttgcgctgttgttgctgctcatcctccgtaacctccgagctctgcaccgaagaacgaagccatggggaagacacatggaatgggatctgctcgcaagctcaagtcccaccgcaggaggcaaaggtgggctgacaagtcatacaagaaatcacatcttggaaatgaatggaagaaaccttttgctggttcatcccatgccaagggaattgtccttgaaaagatagagaatgacgaagtcttgattgctggatttggacgaaaaggtcatgctgtgggagatattcctggtgtcaggtttaaggtcgtgaaggtctctggtgtctctcttttggctctcttcaaggagaagaaggagaagccaaggtcttaaatttgtggagtacttgtgtttgttttcaatagtttctctcaagtattatgaattttgtttttaggtgaacgggttttatgaacaattttctatcttttctagttattttactgaacttcatttaacattccaaaaaaaaaaaaaaaa

SEQ ID NO: 2412 - protein, 102 aa, Glycine max
  misc_feature: Ceres CLONE ID no. 628385
  misc_feature: Ceres CDNA ID no. 40041273
  misc_feature (9)..(54): Pfam Name: Ribosomal_S12 PFAM Desc: Ribosomal protein S12
  misc_feature: Homolog of GI Number: 62287478 NR Desc: 40S ribosomal protein S23
  misc_feature: Homolog of GI Number: 643074 NR Desc: putative 40S ribosomal protein s12
  misc_feature: Homolog of GI Number: 50919443 NR Desc: 40S ribosomal protein S23
  misc_feature: Homolog of GI Number: 21536723 NR Desc: putative 40S ribosomal protein S23
  misc_feature: Homolog of GI Number: 11121260 NR Desc: 40S ribosomal protein S23
  misc_feature: Homolog of GI Number: 6682246 NR Desc: putative 40S ribosomal protein S23
  misc_feature: Homolog of GI Number: 69608480 NR Desc: ribosomal protein S23e
  misc_feature: Homolog of GI Number: 30025641 NR Desc: 40S ribosomal protein S23
  misc_feature: Homolog of GI Number: 50761979 NR Desc:  similar to ribosomal protein S23
  misc_feature: Useful for increasing chlorophyll and photosynthetic capacity
  misc_feature: Useful for making plants with altered leaf shape eg curled leaves
  misc_feature: Useful for making shorter plants
  misc_feature: Useful for sterility
MGKTHGMGSARKLKSHRRRQRWADKSYKKSHLGNEWKKPFAGSSHAKGIVLEKIENDEVLIAGFGRKGHAVGDIPGVRFKVVKVSGVSLLALFKEKKEKPRS

SEQ ID NO: 2413 - DNA, 816 bp, Glycine max
  misc_feature: Ceres CLONE ID no. 628537
  misc_feature: Ceres CDNA ID no. 29191869
  CDS (34)..(516): REFERENCED BY SEQ ID NO: 2414
gtaggcaaagagagagagagaaaagcgtgaatcatgtcggacgaagagcatcacttcgattctcaggcggatgcgggagcgtccaagacgtatcctcagcaggctggtaccattcgcaagaatggctacatcgtcatcaaatccaggccttgcaaggttgtagaggtctctacgtcaaagacaggcaagcatggacatgcaaagtgtcactttgttgcaattgatatttttaatgggaaaaagcttgaagatattgttccatcatcccacaactgtgatgttccacatgtgaatcgcactgactatcagcttattgatatctctgaagacggctttgtgagtctgttgactgataatggaaataccaaggatgatctgaagcttcctactgatgaggcattgcttgctcagattaaagatggattttctgaaggaaaagatcttgtggtttctgttatgtctgcaatgggagaagaacagatctgttcactgaaggacatcggtcccaaaaattaatatgatgctatggctgtagctatagctgatagcacgctttttcttcttatgttgctaacaggtagtatattctccgatacatgtgtgcaaaataaacttcataagatggaaatttgcctgtgcttgaaactcaaatgcttgggatagaagaaattgagctaagtttagcttttgtccattaattaaggaacacaacggtcttgggtggatgaaattctcataaacatctcatattatttgtttttgttgagtttaatatataaccctatttgttctctgcaccgaaaaaaaaaaaaaaaa

SEQ ID NO: 2414 - protein, 160 aa, Glycine max
  misc_feature: Ceres CLONE ID no. 628537
  misc_feature: Ceres CDNA ID no. 29191869
  misc_feature (27)..(63): Pfam Name: KOW PFAM Desc: KOW motif
  misc_feature (85)..(154): Pfam Name: eIF PFAM Desc: Eukaryotic initiation factor 5A hypusine
  misc_feature: Homolog of GI Number: 15866587 NR Desc: eukaryotic translation initiation factor 5A
  misc_feature: Homolog of GI Number: 33325119 NR Desc: eukaryotic translation initiation factor 5A isoform II
  misc_feature: Homolog of GI Number: 33325121 NR Desc: eukaryotic translation initiation factor 5A isoform III
  misc_feature: Homolog of GI Number: 14193249 NR Desc: translation initiation factor 5A
  misc_feature: Homolog of GI Number: 13094963 NR Desc: initiation factor eIF5
  misc_feature: Homolog of GI Number: 2225885 NR Desc: eukaryotic initiation factor 5A5
  misc_feature: Homolog of GI Number: 33325127 NR Desc: eukaryotic translation initiation factor 5A isoform VI
  misc_feature: Homolog of GI Number: 33325131 NR Desc: eukaryotic translation initiation factor 5A isoform VIII
  misc_feature: Homolog of GI Number: 12407787 NR Desc: eukaryotic translation initiation factor 5A
  misc_feature: Homolog of GI Number: 13236654 NR Desc: translation initiation factor 5A
  misc_feature: Useful for making plants that grow better in shade
  misc_feature: Useful for making plants with increased biomass and foliage
MSDEEHHFDSQADAGASKTYPQQAGTIRKNGYIVIKSRPCKVVEVSTSKTGKHGHAKCHFVAIDIFNGKKLEDIVPSSHNCDVPHVNRTDYQLIDISEDGFVSLLTDNGNTKDDLKLPTDEALLAQIKDGFSEGKDLVVSVMSAMGEEQICSLKDIGPKN

SEQ ID NO: 2415 - DNA, 679 bp, Glycine max
  misc_feature: Ceres CLONE ID no. 628691
  misc_feature: Ceres CDNA ID no. 25892970
  CDS (63)..(464): REFERENCED BY SEQ ID NO: 2416
aaacacatttgattcaataaacaaatcgttagggtttttggttgtgagagtgaaagagaacaatggaaggcataacagagggtgtgaacaacatcaacattaacatctccgattcgtataagaagaatcgcattcaggtctctaacaccaagaagcccctcttcttctacgttaatctcgccaagagatatatgcaacagcatgatgaggtcgagctctcagctctaggaatggctattgccacagtagtaactgttgctgaaattttgaaaaacaacggacttgctgttgaaaagaaaatcacgacatcaactgttgacataaaggatgactctagaggtcgacctgttcaaaaggccaagattgaaatagtactcgggaagacagaaaacttcgatgagttgatggctgctgcggctgctgaagatggtgaaaatagagatgttgaagagcagagtgcatgaagttcttcaaaaatttactcccgaatctgttgaagatatgtaccgtttagtgatttgcatttttgttgtcgcgaggtagaggacatgtcattatagactgaccagcaatattgaacaacaaaaattccttcgtttcttttctctagaaaataggcttttcttaaaaaaaaaaaaaaaaaaaaaaaaaaaaaaaaaaaacaaaaaaaaaaaaaaaa

SEQ ID NO: 2416 - protein, 133 aa, Glycine max
  misc_feature: Ceres CLONE ID no. 628691
  misc_feature: Ceres CDNA ID no. 25892970
  misc_feature (20)..(89): Pfam Name: Alba PFAM Desc: Alba
  misc_feature: Homolog of GI Number: 52696238 NR Desc: Chain B
  misc_feature: Useful for sterility
MEGITEGVNNININISDSYKKNRIQVSNTKKPLFFYVNLAKRYMQQHDEVELSALGMAIATVVTVAEILKNNGLAVEKKITTSTVDIKDDSRGRPVQKAKIEIVLGKTENFDELMAAAAAEDGENRDVEEQSA

SEQ ID NO: 2417 - DNA, 1148 bp, Glycine max
  misc_feature: Ceres CLONE ID no. 628698
  misc_feature: Ceres CDNA ID no. 35383233
  CDS (138)..(1004): REFERENCED BY SEQ ID NO: 2418
aattccaatcacaatcttctccaattaacctcctctctcactattccatcttcttaattactcatcactcttcttagaaactagtctaacaattaggttttgaagggcacacaaatatattccaaggttgtgtgaaaatgcgaatgagttgtaacggatgtcgtgttttgcgcaaagggtgtagcgaagattgtagcataagaccgtgtttgcaatggatcaagaacccggagtcgcaagctaatgccactgtgtttcttgctaagttctatggccgtgctggcctcatgaacctcatcaacgctggtcctgaaaaccttcgtcctgctatttttcgatccttgttatacgaggcatgcggtcgaattgttaacccaatttacgggtcagtgggtttgttatggtccgggagctggcagctctgtcaagccgctgtggaagccgttttgaaaggtgagccgatcacgccgataacatccgaagccgcggctaatgggcgggccccacctctcaaggcctacgacatacgccacgtgtcaaaagaccagaactcggcaaatgaaactccaaagaccaagacccggtcccggttcaagcgaaccagcggcacgcttattaaaccgaaggccagcaaaggaaccgggttcgttccggttgagccggagatggcgaaccggactgcgagtcatgagtcggggctgagccacttgtcggaagccacggcgatggtggagggggaaagcaaagagagcgaaagcgtggtgtcgatggatacctcaaacctaattcacgaagaaccggagtgggttgcgaagacgagtgatggaaccggtgagagcggcaacgaaattggtttggaattaacgctcgggttcgaaccggtttcacgtttgcatcacgtggttccgatgaagaagagaaagataattgagttgaagagttgtggtgactcggctgagaaagactcgtgtaagatggagctggggcttgagtacccggcttgaataatggtttgcttggttttggcttaaccggcttattctctagaaacttgtaggtgagatgagaagtttagaagcacttgttattatgcttttattaatttttaaaacttttttcttcttttttggttaaaaaaaaaaaaaaaa

SEQ ID NO: 2418 - protein, 288 aa, Glycine max
  misc_feature: Ceres CLONE ID no. 628698
  misc_feature: Ceres CDNA ID no. 35383233
  misc_feature: Homolog of GI Number: 32395577 NR Desc: seed specific protein Bn15D17A
  misc_feature: Homolog of GI Number: 34914608 NR Desc: P0520B06.17
  misc_feature: Homolog of GI Number: 34895540 NR Desc: putative seed specific protein Bn15D17A
  misc_feature: Homolog of GI Number: 56201759 NR Desc: seed specific protein Bn15D17A
  misc_feature: Homolog of GI Number: 50938833 NR Desc: putative lateral organ boundaries
  misc_feature: Homolog of GI Number: 40786607 NR Desc: putative seed specific protein
MRMSCNGCRVLRKGCSEDCSIRPCLQWIKNPESQANATVFLAKFYGRAGLMNLINAGPENLRPAIFRSLLYEACGRIVNPIYGSVGLLWSGSWQLCQAAVEAVLKGEPITPITSEAAANGRAPPLKAYDIRHVSKDQNSANETPKTKTRSRFKRTSGTLIKPKASKGTGFVPVEPEMANRTASHESGLSHLSEATAMVEGESKESESVVSMDTSNLIHEEPEWVAKTSDGTGESGNEIGLELTLGFEPVSRLHHVVPMKKRKIIELKSCGDSAEKDSCKMELGLEYPA

SEQ ID NO: 2419 - DNA, 597 bp, Glycine max
  misc_feature: Ceres CLONE ID no. 628716
  misc_feature: Ceres CDNA ID no. 29191870
  CDS (41)..(451): REFERENCED BY SEQ ID NO: 2420
acaaagcaatctcaacttccaagttaggtcactcttccagatggcgcgtacaaagcaaactgctcgcaagtccaccggcggcaaggctccccggaagcagctggcgacgaaggccgctcggaagtctgctccggcgaccggcggagtgaagaagccgcacaggttcaggcctggaacagtggccctgagggagatcagaaagtaccagaagagcacggagcttctgatccgaaagcttccgtttcagcgtttggttcgtgaaatcgctcaggatttcaaaacggatctgaggtttcagagcagtgctgtttcggcgctccaggaagctgctgaggcttacttggtgggactctttgaagacaccaatctctgtgccattcacgctaagagggttactattatgcctaaggatattcaactcgccagaagaattagaggggaaagggcttaattttgtgatcccttttggttttagggtttacatgtttttatttagccctttctggtttccgtctctgaatctttcaaggtttagatttattgtaatgatgccattctgattgaagtattgaaattatgcgaaaaaaaaaaaaaaaa

SEQ ID NO: 2420 - protein, 136 aa, Glycine max; identical to SEQ ID NO: 588
  misc_feature: Ceres CLONE ID no. 628716
  misc_feature: Ceres CDNA ID no. 29191870
  misc_feature (58)..(134): Pfam Name: Histone PFAM Desc: Core histone H2A/H2B/H3/H4
  misc_feature: Homolog of GI Number: 62286642 NR Desc: Histone H3
  misc_feature: Homolog of GI Number: 166384 NR Desc: histone H3
  misc_feature: Homolog of GI Number: 70753 NR Desc: histone H3
  misc_feature: Homolog of GI Number: 72093532 NR Desc:  similar to H3 histone
  misc_feature: Homolog of GI Number: 57098927 NR Desc:  similar to histone protein Hist2h3c1
  misc_feature: Homolog of GI Number: 76612873 NR Desc:  similar to H3 histone
  misc_feature: Homolog of GI Number: 76612880 NR Desc:  similar to H3 histone
  misc_feature: Homolog of GI Number: 76732189 NR Desc:  similar to H3 histone
  misc_feature: Homolog of GI Number: 55626038 NR Desc:  similar to HIST2H3C protein
  misc_feature: Useful for delaying flowering time
  misc_feature: Useful for increasing chlorophyll and photosynthetic capacity
  misc_feature: Useful for making shorter plants

SEQ ID NO: 2421 - DNA, 443 bp, Glycine max
  misc_feature: Ceres CLONE ID no. 628760
  misc_feature: Ceres CDNA ID no. 29191815
  CDS (85)..(273): REFERENCED BY SEQ ID NO: 2422
ctgttctgtacctgcacccagccgcagcagcaagtgatcgaagcgaaaagagagtaatcagcagagaaattcatcgtcgtagttatgggtaaagttcacggatcacttgcacgtgccggtaaggttagaggccaaaccccaaaagtggccaagcaggataagaagaagaagccacgtggccgcgctcacaagaggatgcagtataatcgccgattcgtcaccgccgtggtgggattcggcaagaagaggggacctaactcgtctgagaagtgaggctgaggcttaaagaatatgtcactactctatatttgatttatctttcttgtctttaatttgtatgttttgattgtgttctgtgaacgggttttgttagctttaatatcaaactagaaattttgaatacaattctaattctatttctaagtacaaaaaaaaaaaaaaaa

SEQ ID NO: 2422 - protein, 62 aa, Glycine max; identical to SEQ ID NO: 38
  misc_feature: Ceres CLONE ID no. 628760
  misc_feature: Ceres CDNA ID no. 29191815
  misc_feature (3)..(61): Pfam Name: Ribosomal_S30 PFAM Desc: Ribosomal protein S30
  misc_feature: Homolog of GI Number: 55773694 NR Desc: 40S ribosomal protein S30
  misc_feature: Homolog of GI Number: 30102786 NR Desc: At5g56670
  misc_feature: Homolog of GI Number: 25295582 NR Desc: 40S ribosomal protein S30
  misc_feature: Homolog of GI Number: 6679753 NR Desc: Finkel
  misc_feature: Homolog of GI Number: 15822932 NR Desc: Finkel
  misc_feature: Homolog of GI Number: 27807419 NR Desc: Finkel
  misc_feature: Homolog of GI Number: 36968262 NR Desc: Finkel
  misc_feature: Homolog of GI Number: 47682823 NR Desc: MGC80045 protein
  misc_feature: Homolog of GI Number: 50603825 NR Desc: MGC89853 protein
  misc_feature: Homolog of GI Number: 57100389 NR Desc:  similar to Finkel

SEQ ID NO: 2423 - DNA, 681 bp, Glycine max
  misc_feature: Ceres CLONE ID no. 628769
  misc_feature: Ceres CDNA ID no. 29191723
  CDS (72)..(440): REFERENCED BY SEQ ID NO: 2424
atagcttccgccgtcccccaacttgagagctgcattctgcttccgattctcaaactcaaaggagacgagacatggcttatgctgcaatgaaacccactaagcccggcttggaggagtcacaggagcaaatccataagattagaatcaccctttcctctaagaacgtcaagaatctcgagaaggtttgtgctgacctggttcgtggtgccaaggacaagcatctcagggtgaagggacctgttaggatgccaactaaagttcttaacatcaccaccagaaaatccccctgtggtgaaggcaccaacacatgggacagatttgagctgcgtgtacacaaaagagtcattgacctctacagttcccctgatgtggttaagcagataacctcgatcacaattgaacctggtgtcgaggttaaggtgaccattgcagatgcttgattttggcatgctagttgattttgtaatttagccccttggctaggaatatgttgagtcaaatacaccagggttaatgcatttccttttgccttttcaatttttgaagttgattattgtggaaggggtattgatttgatcgattatcttttgttttgtgtttgtcgactttgaagaataccatgacaaatgccatgaatctttcgtgtcaaatatttttagcttcagaaaaaaaaaaaaaaaa

SEQ ID NO: 2424 - protein, 122 aa, Glycine max
  misc_feature: Ceres CLONE ID no. 628769
  misc_feature: Ceres CDNA ID no. 29191723
  misc_feature: The plant flowers significantly late compared to wild-type.
  misc_feature: The plant is abnormally large.
  misc_feature: null
  misc_feature: Useful for making plants with modulated biomass
  misc_feature: Useful for making plants with modulated flowering time
  misc_feature: Useful for making plants with modulated phosphate use efficiency
  misc_feature (22)..(117): Pfam Name: Ribosomal_S10 PFAM Desc: Ribosomal protein S10p/S20e
  misc_feature: Homolog of GI Number: 21617905 NR Desc: 40S ribosomal protein S20
  misc_feature: Homolog of GI Number: 21281054 NR Desc: putative 40S ribsomomal protein
  misc_feature: Homolog of GI Number: 23198348 NR Desc: 40S ribosomal protein S20
  misc_feature: Homolog of GI Number: 31430421 NR Desc: putative ribosomal protein S10p/S20e
  misc_feature: Homolog of GI Number: 55775376 NR Desc: 40S subunit ribosomal protein
  misc_feature: Homolog of GI Number: 54208698 NR Desc: ribosomal protein S10p/S20e
  misc_feature: Homolog of GI Number: 50933555 NR Desc: 40S ribosomal protein S20
  misc_feature: Homolog of GI Number: 50801483 NR Desc:  similar to putative 40S ribosomal protein 20S protein
  misc_feature: Homolog of GI Number: 14716982 NR Desc: putative 40S ribosomal protein 20S protein
  misc_feature: Homolog of GI Number: 20805825 NR Desc: ribosomal protein S20
  misc_feature: Useful for making shorter plants
  misc_feature: Useful for sterility
  misc_feature: Useful for sterility
MAYAAMKPTKPGLEESQEQIHKIRITLSSKNVKNLEKVCADLVRGAKDKHLRVKGPVRMPTKVLNITTRKSPCGEGTNTWDRFELRVHKRVIDLYSSPDVVKQITSITIEPGVEVKVTIADA

SEQ ID NO: 2425 - DNA, 1262 bp, Glycine max
  misc_feature: Ceres CLONE ID no. 628888
  misc_feature: Ceres CDNA ID no. 40351118
  CDS (506)..(886): REFERENCED BY SEQ ID NO: 2426
tcgcctcgcctcgcctcccttctcaagagtggagctctcgtcctgtgtatctcactggagctctgtggcccctctcacggtcttcgctatccaaatctctgaacgattcaacgacgccgtctttgagaatcgcgatttgacgctttattacgtgattctccctcctttctgccattaacttcattatcgggtttcttcaaagcgcaagttctttcagctaaacgattgaaggccgttagccattaaaaaagaccgaatcgttcccagctttcgcgctaagcgcgcatacaaaagcagcacttggctaagtgacagtacgccgagcatgaggttagcccaaatctttggcagtggttgttcagtgcgcatatggtgttgagcacacaccaagcttcaaatttgcctccagatgcttgccatatgtccttccaggctagctctgccgtgctaagcgggctgcctcatcaacccaagcaaaagtggaagttttgtttggtatcaggtgatggcatctttggaaataaaatctggtgcattggtttctttacaagacctgcgcccatcttctcctttttttaagcaaggtgcttcactcagaataactggaaagttgcacgaatactctatagagacgggcctagcaacaattatcgatggtgatgacattctaaaagttagtaccaaacatctgagggaccttacttttcaagttggctctgtctaccaattcattggtgaactccttatccaacctgacaatgagggagttttgcaagcacgtgttggtagaaacgttgatgggattgatctcaatctttatcatcaatctctgctgcttttaagacagtttcaaaccaatcatttaaacaatccagcaacaatgtaggagtatttgaacacagaagtcgtcatgctaatataaaaatacacttctctctgtttttcccataaagacggtgttctgcactctacagtgttcattgtgtaaacagagtcttaacaatgttaagatttcattttattttattctcactttatttggctgcaaatggaacatgacatcaaagatctgttaggtatgagttgtgcttagctgggatgctttaaggggacatttagcttttcatgtgaagctatgcatcaaacttttggtcttcctttgttttgcaatctgaaaaatgaggtaagggagggggagggatggtggtatatttaaggcaacatagaagatactgtatttaaatgcaaaaaaaaaaaaaaaa

SEQ ID NO: 2426 - protein, 126 aa, Glycine max
  misc_feature: Ceres CLONE ID no. 628888
  misc_feature: Ceres CDNA ID no. 40351118
MASLEIKSGALVSLQDLRPSSPFFKQGASLRITGKLHEYSIETGLATIIDGDDILKVSTKHLRDLTFQVGSVYQFIGELLIQPDNEGVLQARVGRNVDGIDLNLYHQSLLLLRQFQTNHLNNPATM

SEQ ID NO: 2427 - DNA, 653 bp, Glycine max
  misc_feature: Ceres CLONE ID no. 629291
  misc_feature: Ceres CDNA ID no. 25891676
  CDS (69)..(410): REFERENCED BY SEQ ID NO: 2428
atgaatgtgttctgaatagtcctttcttccttcctttcactctcaatccttttcgcctttgtctgcgaatggcgtcgttcgatcaggcacctcccggcgatgtcaaatccggtgacaaaatcttcaggaccaagtgtgctcagtgtcacaccgtcgaaaaaggtgccggtcacaagcaaggacccaatctgaatggtttgtttggaaggcaatcaggcactactcccggttattcttactcttcagctaacaagaacatggctgttacttgggaagaaaagacactatacgattacttgcttaaccccaaaaagtatattccagggaccaagatggtatttcctggtcttaagaagcctcaggaacgtgctgatcttattgcatatctgagagaatccactgcacagtgattatacattttcatacattcaatttttgcagtgtgctttcaaagttctggagatttaattttcggtcatttagttctgccatgcaggaagtgctgtatctttggcaaataatgtaggctacattggtctacaacgctattttgttcattttgcattgcctctaaaaaaaacagccgaatattggctggtgtaacaaattatctctttaaaattgaaacattcttatcaaaaaaaaaaaaaaaa

SEQ ID NO: 2428 - protein, 113 aa, Glycine max
  misc_feature: Ceres CLONE ID no. 629291
  misc_feature: Ceres CDNA ID no. 25891676
  misc_feature (13)..(111): Pfam Name: Cytochrom_C PFAM Desc: Cytochrome c
  misc_feature: Homolog of GI Number: 19310747 NR Desc: putative cytochrome c protein
  misc_feature: Homolog of GI Number: 118022 NR Desc: Cytochrome c
  misc_feature: Homolog of GI Number: 118013 NR Desc: Cytochrome c
  misc_feature: Homolog of GI Number: 117952 NR Desc: Cytochrome c
  misc_feature: Homolog of GI Number: 117976 NR Desc: Cytochrome c
  misc_feature: Homolog of GI Number: 21592717 NR Desc: putative cytochrome C
  misc_feature: Homolog of GI Number: 53982673 NR Desc: putative cytochrome c
  misc_feature: Homolog of GI Number: 118016 NR Desc: Cytochrome c
  misc_feature: Homolog of GI Number: 117968 NR Desc: Cytochrome c
  misc_feature: Homolog of GI Number: 51317000 NR Desc: Cytochrome c
MASFDQAPPGDVKSGDKIFRTKCAQCHTVEKGAGHKQGPNLNGLFGRQSGTTPGYSYSSANKNMAVTWEEKTLYDYLLNPKKYIPGTKMVFPGLKKPQERADLIAYLRESTAQ

SEQ ID NO: 2429 - DNA, 747 bp, Glycine max
  misc_feature: Ceres CLONE ID no. 629407
  misc_feature: Ceres CDNA ID no. 25088410
  CDS (72)..(482): REFERENCED BY SEQ ID NO: 2430
aatctgaattagttatctaacactagaagaagattgaatctcaactttttgtttcttacctgatcgcatagatggaggcatcacagggcaaccatccaaaccctaaccctaaccctaaccggaataattccgttgcgtcgtcggtgccggtgtggccaaccatcgacggcccattgggcctgtcggaggaagaatcagtgggctacgctcgcaggttctacaagttcggcttcgcccttctccctctcctatgggccgtcaattgcttctacttctggcccgcccttcgccactctcactccttcccccgcattcgcccctatgttgttggatctgcaattgggtttgcagtatttgcgacacttctcagttcttgggctctaacatttgccattggaggggaacgtctcttcggccctgtttgggatcaattggttatgtacaatcttgctgataggttaggcttaacaggctggagctagttttgttgtgtggcacctctgatacaaaatattttgatcctttattaccagacttaccttcttccctgctctgcttcgtgaatttcatctgcattacttatatacatttgactatattctgtcattgaattagtagtgaattttatcttcctgtcacagttgatagataacaagcaatgttttggaagatgatatagatcttggtgtctttactgcattttttgtgttatattatgttatttatgcaaaaaaaaaaaaaaaaaaa

SEQ ID NO: 2430 - protein, 136 aa, Glycine max
  misc_feature: Ceres CLONE ID no. 629407
  misc_feature: Ceres CDNA ID no. 25088410
  misc_feature: Homolog of GI Number: 34905786 NR Desc: P0401G10.19
  misc_feature: Homolog of GI Number: 27731071 NR Desc: similar to RIKEN cDNA 1700023M09
  misc_feature: Homolog of GI Number: 16307000 NR Desc: PEN2 protein
  misc_feature: Homolog of GI Number: 51859574 NR Desc: RIKEN cDNA 1700023M09
  misc_feature: Homolog of GI Number: 62204246 NR Desc: Pen2 protein
MEASQGNHPNPNPNPNRNNSVASSVPVWPTIDGPLGLSEEESVGYARRFYKFGFALLPLLWAVNCFYFWPALRHSHSFPRIRPYVVGSAIGFAVFATLLSSWALTFAIGGERLFGPVWDQLVMYNLADRLGLTGWS

SEQ ID NO: 2431 - DNA, 909 bp, Glycine max
  misc_feature: Ceres CLONE ID no. 629491
  misc_feature: Ceres CDNA ID no. 35383234
  CDS (59)..(727): REFERENCED BY SEQ ID NO: 2432
gcgtacgcagcttcatccctaacgcgtgcatagcagagtcagagacagagacgcagccatggggcggagacctgcgaggtgttataggcaaattaagaacaagccataccccaagtcacgtttctgccgtggtgttcctgatcccaagatcaggatttatgatgttggtatgaagaagaagggtgttgatgagtttcctttctgtgtccatctggttagttgggagaaggaaaatgtttcaagtgaggccctggaagctgctcgcattgcttgcaacaagtacatggccaaatttgctggaaaggatgctttccacttgagagtcagggtgcacccattccatgttcttaggatcaacaagatgctttcgtgtgctggtgctgataggctccaaactggaatgagaggtgcttttggaaagccacagggtacttgtgctagagtggctattggacaggtccttctttctgtccgctgcaaggacagcaacagccatcatgctcaggaggctcttcgccgtgccaagttcaagttccctggtcgtcaaaagattatagttagcaggaaatggggcttcaccaagtttagccgttctgattatctcaagttcaagtcagagaacagaattgtgcccgatggtgtgaatgcaaagcttcttgggtgccatggaccattggccaatcgtgaacctggaagagcctttttggatactgctactagttcttagtctgtcttttaatttggaaatactagacttttggataacattagttttgcaagagtgaatttgagttattttgtcagcacattccatttacttaaattttgtttgcgaacctcttcgatttggttattttaatgttatattctggtatgatgcacaatttctcctcaaaaaaaaaaaaaaaa

SEQ ID NO: 2432 - protein, 222 aa, Glycine max
  misc_feature: Ceres CLONE ID no. 629491
  misc_feature: Ceres CDNA ID no. 35383234
  misc_feature (1)..(176): Pfam Name: Ribosomal_L10e PFAM Desc: Ribosomal L10
  misc_feature: Homolog of GI Number: 5917743 NR Desc: 60S ribosomal protein L10
  misc_feature: Homolog of GI Number: 68449756 NR Desc: 60S ribosomal protein L10
  misc_feature: Homolog of GI Number: 77999313 NR Desc: 60S ribosomal protein L10
  misc_feature: Homolog of GI Number: 2500354 NR Desc: 60S ribosomal protein L10
  misc_feature: Homolog of GI Number: 6984130 NR Desc: 60S ribosomal protein L10
  misc_feature: Homolog of GI Number: 11036950 NR Desc: QM
  misc_feature: Homolog of GI Number: 50313215 NR Desc: QM family protein
  misc_feature: Homolog of GI Number: 49861132 NR Desc: QM
  misc_feature: Homolog of GI Number: 21592869 NR Desc: putative 60s ribosomal protein L10
  misc_feature: Homolog of GI Number: 23397080 NR Desc: putative tumor suppressor
  misc_feature: Useful for making shorter plants
MGRRPARCYRQIKNKPYPKSRFCRGVPDPKIRIYDVGMKKKGVDEFPFCVHLVSWEKENVSSEALEAARIACNKYMAKFAGKDAFHLRVRVHPFHVLRINKMLSCAGADRLQTGMRGAFGKPQGTCARVAIGQVLLSVRCKDSNSHHAQEALRRAKFKFPGRQKIIVSRKWGFTKFSRSDYLKFKSENRIVPDGVNAKLLGCHGPLANREPGRAFLDTATSS

SEQ ID NO: 2433 - DNA, 465 bp, Glycine max
  misc_feature: Ceres CLONE ID no. 629944
  misc_feature: Ceres CDNA ID no. 36707661
  CDS (44)..(247): REFERENCED BY SEQ ID NO: 2434
aaatctttacaatcgataaccacacccatcgcctttattcagaatgtcggaatcaccattcagaccacgagaaaagcttgctgagaagcaaaaatattttcagagtatccacaggcatacctacttgaagggacccatggataagattacatccgtggccataccactggctttggctgcaacgtcaatttacatgattggacgagggatctataatatgtcgcatggaattggaaagaaagaataacctgggaatttctgattgaggagggtttcccacacaaacctaccttagcttcgttaatatgggccagtggttttctttgcatttatgtctgttctcttaataaattgcttagttgcagattttgactgccattgggggtttataacttgaatgaaagttgttctttgtatgtttgatataatcaaattgagtgaattggcacaaaaaaaaaaaaaaaa

SEQ ID NO: 2434 - protein, 67 aa, Glycine max
  misc_feature: Ceres CLONE ID no. 629944
  misc_feature: Ceres CDNA ID no. 36707661
  misc_feature: Homolog of GI Number: 47606405 NR Desc: putative COX VIIa
  misc_feature: Homolog of GI Number: 47606407 NR Desc: putative COX VIIa
MSESPFRPREKLAEKQKYFQSIHRHTYLKGPMDKITSVAIPLALAATSIYMIGRGIYNMSHGIGKKE

SEQ ID NO: 2435 - DNA, 459 bp, Glycine max
  misc_feature: Ceres CLONE ID no. 629970
  misc_feature: Ceres CDNA ID no. 40351119
  CDS (87)..(284): REFERENCED BY SEQ ID NO: 2436
taatcgaaaactggtctcgtgcaagtgtaacccaaaaccctagcggcgcctgctttcttcgttcgtcttttgcatcagccatcaggatggagtctcaggtgaagcatgctcttgttgtcaaagttatgggtcgtactggatccagaggacaggtgactcaggttagagtgaagtttttggatgatcagaaccgtcatatcatgaggaatgttaaaggaccagtgagagaaggagacattctcaccctactcgagtctgaaagggaagcaagaaggttgcgctagagggtatttttttcttgatctttatggtagttagttggtgctaaaggttatagcaccctgtcttgttgtcttggatctattttcattcaaattatgggttgaattttggatgtttggagtttaatatatgattttgaattatggcttaaattttggattaaaaaaaaaaaaaaaa

SEQ ID NO: 2436 - protein, 65 aa, Glycine max
  misc_feature: Ceres CLONE ID no. 629970
  misc_feature: Ceres CDNA ID no. 40351119
  misc_feature (1)..(65): Pfam Name: Ribosomal_S28e PFAM Desc: Ribosomal protein S28e
MESQVKHALVVKVMGRTGSRGQVTQVRVKFLDDQNRHIMRNVKGPVREGDILTLLESEREARRLR

SEQ ID NO: 2437 - DNA, 1153 bp, Glycine max
  misc_feature: Ceres CLONE ID no. 629981
  misc_feature: Ceres CDNA ID no. 40041274
  CDS (136)..(906): REFERENCED BY SEQ ID NO: 2438
aagagatcaacaaatagagaaagaaagaaagaaagaaagaaagcgagatcaaattgttggagaaacgcgaattaatccagaaatcaaagaaagcgttacttgacgttcgtttgaacatcgaaaacattaacacaaatggcaacacgaactggtcgcttgtttcaaaaccaaaacctcaatgtccacgttaatggaggaggagctgtttctgggaaggctgatttaaccggacagaggaaagttggggctgggggaagaaaaccacttggagatctatccaatgcagggaacctcatcaaccaatttgatggaaagaaagcccttgacggttcattgaacacaggcaaaccctcagcctctgttagtcaggcaccgaaattgcacaagtcaaagaatcttgaaagtgacaaaagaattccagcttctgagaaattactcactcgtggcaggaaagtactttctgacatttcaaactctgggaagccacaggttcctgagataaaaaataagaagaccctgaaaccaatagaggagtctcttccccccagtgcaattgccgaagaacaaatcttgcacgatcataagaaatgcatccaatcacagtttgaaactgcagatgtgcatcagtttttcaagactgttggacttgacgatgattcagatgatcacatggaaatttcctttgatctgtccgcaattagtaaactgaagtctgagagtgcatatttggagttggaggaggtaactgagtggttgcctgaagtgcactctctatctgctctgcatggtggttccccagcagtagtacactgcaagactccaggcttgtcaagttacagaacaatgtggaatgattctactgtcaatttcaagttgatagagacaccaaaattgtccaaaaaataatttctccggcaacaatgtaaagaacttgatatggtggaagtctgctagtattagatattttgtgccacataatatgtgttggcaatgatccggtggtattttttcggtagacatgtttttgttcgtcttagatttattttgtgccacagatggttggcaatgattgtgatattttttggtaaagacatgtttgttcatcttagattggtaatatgaaaaggttttattcttaaaaaaaaaaaaaaaa

SEQ ID NO: 2438 - protein, 256 aa, Glycine max
  misc_feature: Ceres CLONE ID no. 629981
  misc_feature: Ceres CDNA ID no. 40041274
MATRTGRLFQNQNLNVHVNGGGAVSGKADLTGQRKVGAGGRKPLGDLSNAGNLINQFDGKKALDGSLNTGKPSASVSQAPKLHKSKNLESDKRIPASEKLLTRGRKVLSDISNSGKPQVPEIKNKKTLKPIEESLPPSAIAEEQILHDHKKCIQSQFETADVHQFFKTVGLDDDSDDHMEISFDLSAISKLKSESAYLELEEVTEWLPEVHSLSALHGGSPAVVHCKTPGLSSYRTMWNDSTVNFKLIETPKLSKK

SEQ ID NO: 2439 - DNA, 983 bp, Triticum aestivum
  misc_feature: Ceres CLONE ID no. 630100
  misc_feature: Ceres CDNA ID no. 40351120
  CDS (155)..(700): REFERENCED BY SEQ ID NO: 2440
aatcgaaaaactctctcccccttctctctcgtgacctcctgtttccgcccaccttctccggctccggcgccggcgaacccaccgcggatcgagcgattcctccgatcaggagaggccagccgggaggaagagcacctacgcgggaggagaggagatggggctcacgttcaccaagctgttcagccgcctgttcgcgaagaaggagatgcggatcctgatggtgggtctcgacgccgcgggaaagaccaccatcctctacaagctcaagctcggcgagatcgtcaccaccatccccaccatcgggttcaatgttgaaactgtggagtacaagaacatcagcttcactgtctgggatgtcgggggtcaggacaagatcaggccactgtggaggcattacttccagaacacacagggtctcatctttgttgtggacagcaacgatagggaccgtgttgttgaagcaagggatgagctccacaggatgctgaatgaggatgagttacgtgatgctgtgctgcttgtgtttgctaacaagcaagatcttccaaatgccatgaatgctgctgagatcactgataagcttggcctgcactcccttcgccagcgacactggtacatccagagcacttgtgctacaacaggggagggactgtatgaaggcctggactggctgtccagcaacattgccaacaagtcctaaattttcgtcaagattttgaaggagctaggagcgctttggatggacgattgaatcaccgggtacctagggattgtgttgggatgggatggtgctatgctattcccgtatgtactgtgtattttcctgagatcaacagctactgagccagctccggctgtggtttcactgtcatactattgttttattgtattttgagccctaagatgtttcttctgaagtaaacagctaaagagagtcctgttcaatttcgtaataagtgttccaaacaaaaaaaaaaaaaaaa

SEQ ID NO: 2440 - protein, 181 aa, Triticum aestivum
  misc_feature: Ceres CLONE ID no. 630100
  misc_feature: Ceres CDNA ID no. 40351120
  misc_feature: null
  misc_feature: Useful for making plants with altered Lignin content
  misc_feature: Useful for making plants with altered alkaloid content
  misc_feature (4)..(177): Pfam Name: Arf PFAM Desc: ADP
MGLTFTKLFSRLFAKKEMRILMVGLDAAGKTTILYKLKLGEIVTTIPTIGFNVETVEYKNISFTVWDVGGQDKIRPLWRHYFQNTQGLIFVVDSNDRDRVVEARDELHRMLNEDELRDAVLLVFANKQDLPNAMNAAEITDKLGLHSLRQRHWYIQSTCATTGEGLYEGLDWLSSNIANKS

SEQ ID NO: 2441 - DNA, 450 bp, Triticum aestivum
  misc_feature: Ceres CLONE ID no. 630121
  misc_feature: Ceres CDNA ID no. 40351121
  CDS (2)..(328): REFERENCED BY SEQ ID NO: 2442
aaaattttccattcccccacccccacccgccgccgaagccgctgccgcgtcttcgtctccgccgcgacgatgccgtcccacaagaccttccgcatcaagcagaagctggccaagaagcagcgccagaaccgccccatcccctactggatccgcatgcggaccgacaacaccatcaggtacaacgcgaagcgcaggcactggcgccgcaccaagctcgggttctagatccgtacctgccgaccgccgcgtgggggagccatggttccaagacttatctgcattttgttttatggacgttttagtgtttgttatgcaagctaggaagtgattccaggatgctgtctctgttatcaatttcgtctatgtcatgaggattgcttgtactctggtgtactcatgttaccatgctgtgccaagtaaagaacctttgctataaaaaaaaaaaaaaaa

SEQ ID NO: 2442 - protein, 51 aa, Triticum aestivum
  misc_feature: Ceres CLONE ID no. 630121
  misc_feature: Ceres CDNA ID no. 40351121
  misc_feature (9)..(51): Pfam Name: Ribosomal_L39 PFAM Desc: Ribosomal L39 protein
MPSHKTFRIKQKLAKKQRQNRPIPYWIRMRTDNTIRYNAKRRHWRRTKLGF

SEQ ID NO: 2443 - DNA, 977 bp, Triticum aestivum
  misc_feature: Ceres CLONE ID no. 630124
  misc_feature: Ceres CDNA ID no. 40351122
  CDS (107)..(808): REFERENCED BY SEQ ID NO: 2444
ataggtaatcataccacaacccgagcattctacaaccactttcatcaacgccatacacgtctcctaccctcacagttcgttgctccgcacatcagcaggacttgcaatggcgggagacggcgagctgaagctgctgggcgtgtggacgagcccgttcgtcatcagggtgcgcgtggtgctcaacctcaagtctctgccgtacgagtacgtggaggagaacctgggcagcaagagcgcgctcctcctgggctccaacccggtgcaccagagcgtgcccgtcctcctccacggcggccgccccgtgaacgagtcccaggtcatcgtgcagtacatcgacgaggtctgggcgggggccggcccgtccgtgctcccggccgacccctacgagcgcgccacggcgcgcttctgggcggcgtacgtcgacgacaaggtcgggtcggcgtggacggggatgctcttctcgtgcaagacggaggaggagagggcggaggccgtgtcccgggccgtggcggcgctggagacgctggagggcgcgttcgcggagtgctccaaggggaaggcgttcttcggcggcgacgccatcgggttcgtcgacgtcgtgctcggcggctacctcgggtggttcggggcgatcgacaagatcatcgggcgccggctgatcgacccggcgaggacgccgctgctggccaggtgggaggagcagttccgcgcggcggacgcggccaagggcgtcgtgccggacgacgccgacaagatgctcgagttcttgcccaccgtgctcgcttgggtcgccgccaaagcgaagtgaactgtgagcccgtgacatcgccagctcgtgacatgtgtgtttgtgtgtgtgcgtgtctgagtccgtccagtgtgtgctgaataaatgcaccgcatgtcgtgtgttgtaccaagggcaaacgatgctgaataattttgatgtttgttgatttcccaaaaaaaaaaaaaaa

SEQ ID NO: 2444 - protein, 233 aa, Triticum aestivum
  misc_feature: Ceres CLONE ID no. 630124
  misc_feature: Ceres CDNA ID no. 40351122
  misc_feature (7)..(78): Pfam Name: GST_N PFAM Desc: Glutathione S
  misc_feature (88)..(204): Pfam Name: GST_C PFAM Desc: Glutathione S
MAGDGELKLLGVWTSPFVIRVRVVLNLKSLPYEYVEENLGSKSALLLGSNPVHQSVPVLLHGGRPVNESQVIVQYIDEVWAGAGPSVLPADPYERATARFWAAYVDDKVGSAWTGMLFSCKTEEERAEAVSRAVAALETLEGAFAECSKGKAFFGGDAIGFVDVVLGGYLGWFGAIDKIIGRRLIDPARTPLLARWEEQFRAADAAKGVVPDDADKMLEFLPTVLAWVAAKAK

SEQ ID NO: 2445 - DNA, 1463 bp, Triticum aestivum
  misc_feature: Ceres CLONE ID no. 630198
  misc_feature: Ceres CDNA ID no. 36701243
  CDS (42)..(1175): REFERENCED BY SEQ ID NO: 2446
aaagataacccacccggagaagcaaccaagaaaaccccccaatggatcatcgcctcgtggcccctctcctcgtcctcctgggcctcctcctctccccggcgccggcagcggcggccgcgggggacgaggagcccctgatccggcaggtcgtcggggccgccgaccccctcgacaacgacctggagctcgactcgcagttcctcggcttcgtgcaacggttcgggaagacctacagggacgcggaggagcacgcgcaccggctctccgtcttcaaggccaacctccgccgcgcgcgccggcaccagatgctcgacccgtccgccgagcacggggtcaccaagttctccgacctcaccccggccgagttccgccggaccttcctggggctcaagaccacccgccgatcgttcctgcgggagatggccgggtcggcgcacgacgcgcccgtcctccccaccgacggcctccccgaggacttcgactggagggaccacggggccgtcggccccgtcaagaaccagggttcgtgcggttcgtgctggtcgttcagcgcgtccggggcgttggagggggccaactacctggccacgggcaagatggaggtgctctccgagcagcagctggtcgactgcgaccatgagtgcgacccagcagaacctgattcatgcgatgctggatgcaacggtgggttgatgacttcagccttcagctatctgttgaaatctggtggccttgagagagaaaaggattacccttacaccgggaaggacggtacctgcaaatttgagaagtccaaggttgctgcttcagttcaaaacttcagcgttgtcgctgttgatgaagaacagattgctgctaaccttgtgaaatacggaccgctggccatcggtatcaacgccgcatacatgcagacatacattggcggagtgtcatgcccatacatctgcggcaggcacctcgaccacggcgtcctcctcgttggctacggggcgtccgggttcgcaccttcccgcttcaaggagaagccctactggatcatcaagaactcatggggcgagaactggggggacaagggttactacaagatctgcaggggctccaacgtgcgcaacaagtgcggcgtcgactccatggtctccacggtgtccgccatgcacgcctcgaaggaggagtaggctctgttctggtctgatcgtcagccctcgtggagtcgatcttggtttcggtgtatcgctagaaagaaacttcaatagtaccgtagtagtcggctaggctccatcgtcgttgtggtatcagcagcgaagatgcgaagccgcaacagaaaatgcttgctgtataacttatgcatttgctaaatttgctacgccatgcatgtctgccacacgctatttggatgtggctaaagaactcctgaataattctgtacataatatgtattgtttccatcaaaaaaaaaaaaaaaa

SEQ ID NO: 2446 - protein, 377 aa, Triticum aestivum
  misc_feature: Ceres CLONE ID no. 630198
  misc_feature: Ceres CDNA ID no. 36701243
  misc_feature (142)..(369): Pfam Name: Peptidase_C1 PFAM Desc: Papain family cysteine protease
  misc_feature: Homolog of GI Number: 50922825 NR Desc: OSJNBb0054B09.3
  misc_feature: Homolog of GI Number: 51979241 NR Desc: PREDICTED OJ1371_D04.6 gene product
  misc_feature: Homolog of GI Number: 41019551 NR Desc: TPA: putative cysteine protease
  misc_feature: Homolog of GI Number: 56682917 NR Desc: cysteine protease
  misc_feature: Homolog of GI Number: 2118131 NR Desc: cysteine proteinase
  misc_feature: Homolog of GI Number: 21593213 NR Desc: cysteine proteinase RD19A
  misc_feature: Homolog of GI Number: 2511691 NR Desc: cysteine proteinase precursor
  misc_feature: Homolog of GI Number: 15705865 NR Desc: cysteine proteinase precursor
  misc_feature: Homolog of GI Number: 22136868 NR Desc: putative cysteine proteinase RD19A
  misc_feature: Homolog of GI Number: 5051468 NR Desc: putative preprocysteine proteinase
MDHRLVAPLLVLLGLLLSPAPAAAAAGDEEPLIRQVVGAADPLDNDLELDSQFLGFVQRFGKTYRDAEEHAHRLSVFKANLRRARRHQMLDPSAEHGVTKFSDLTPAEFRRTFLGLKTTRRSFLREMAGSAHDAPVLPTDGLPEDFDWRDHGAVGPVKNQGSCGSCWSFSASGALEGANYLATGKMEVLSEQQLVDCDHECDPAEPDSCDAGCNGGLMTSAFSYLLKSGGLEREKDYPYTGKDGTCKFEKSKVAASVQNFSVVAVDEEQIAANLVKYGPLAIGINAAYMQTYIGGVSCPYICGRHLDHGVLLVGYGASGFAPSRFKEKPYWIIKNSWGENWGDKGYYKICRGSNVRNKCGVDSMVSTVSAMHASKEE

SEQ ID NO: 2447 - DNA, 1212 bp, Triticum aestivum
  misc_feature: Ceres CLONE ID no. 630203
  misc_feature: Ceres CDNA ID no. 25447040
  CDS (400)..(966): REFERENCED BY SEQ ID NO: 2448
aaatcccttctcaccctcactccctggctcaacgccgccacgctccccgatctctggccgccgcctgctccggcgattggatccgggtccctctccccccgaaaccaccgccgccgagccccgagcgcagcgacgcccccgctccgtcctagtatctcccgccgccgagcccagtcaggccgtcagaccaactccggtccgatccttcgcgccacagacgccgacgacgctgccgcccccgatccacctcttccccgagccctaacagctgcagcacttcgacgccgacaccacctctgcccgctttccgtcaagctcggataggaaaacaaggatttcgtccctgccgttgccagcggcctctaccagacctcatcctcctccgtccaggagacggcgatggcggcgagggcactcgggctcgctggccgagcgctcctgcgaccggtcgcctcaccaggcacccaacggctgctgtcgactgacaagaactcactgcagggccttacgaacggcgatccggtgagccgcctcatgcaaacacggaagcagaatgacagcatttacagtcgctttgctgaaaatgatttcacaggcggcggtagcaggtctggccgattaaacatggaaataacgtggacagcggctccgcgagtaaagatggatgttctacacatcacacccaaggagaaaaagacctttgtgaccgtgacggacgtcaaggagaacaggaaggccggggcttctgctggctgcttggaggatcgtaaagggcggtttcgtcttgctcggtgcgcaggtgaagcaacagggaaacacatggggcgatccgccagcacgattggcctcaagtcgatcgtcgtgaaagtgaaaggatgttcctttttcaggaagaagaagaaagtgctcttgagctttgcagccggttcccgaggtgaaagagtgaggagcctttctcctaaataagcccttcacctgcaggaacaagcaagaagagtgaaaatcaatatcctgtcggaaggagaagcaaaaagatcgactggttcccaaataacatgatgagcctacaagtatttatgattattagacagtcttacatcggctcttgtataagacataaacattttgttatttcctgtaatcctgctgaattgatgtctttgttttgatctgacatggttgcagtttcctctttcaaaaaaaaaaaaaaaa

SEQ ID NO: 2448 - protein, 188 aa, Triticum aestivum
  misc_feature: Ceres CLONE ID no. 630203
  misc_feature: Ceres CDNA ID no. 25447040
  misc_feature: Homolog of GI Number: 1841357 NR Desc: mitochondrial ribosomal protein S11
  misc_feature: Homolog of GI Number: 50881465 NR Desc: small subunit ribosomal protein
  misc_feature: Homolog of GI Number: 34912590 NR Desc: putative ribosomal protein S11
  misc_feature: Homolog of GI Number: 32348800 NR Desc: small subunit ribosomal protein
  misc_feature: Homolog of GI Number: 32348798 NR Desc: small subunit ribosomal protein
  misc_feature: Homolog of GI Number: 32348792 NR Desc: small subunit ribosomal protein
  misc_feature: Homolog of GI Number: 32348788 NR Desc: small subunit ribosomal protein
  misc_feature: Homolog of GI Number: 32348750 NR Desc: small subunit ribosomal protein
  misc_feature: Homolog of GI Number: 32348786 NR Desc: small subunit ribosomal protein
  misc_feature: Homolog of GI Number: 32348784 NR Desc: small subunit ribosomal protein
MAARALGLAGRALLRPVASPGTQRLLSTDKNSLQGLTNGDPVSRLMQTRKQNDSIYSRFAENDFTGGGSRSGRLNMEITWTAAPRVKMDVLHITPKEKKTFVTVTDVKENRKAGASAGCLEDRKGRFRLARCAGEATGKHMGRSASTIGLKSIVVKVKGCSFFRKKKKVLLSFAAGSRGERVRSLSPK

SEQ ID NO: 2449 - DNA, 1172 bp, Triticum aestivum
  misc_feature: Ceres CLONE ID no. 630337
  misc_feature: Ceres CDNA ID no. 40351123
  CDS (83)..(1090): REFERENCED BY SEQ ID NO: 2450
gaatagatagacacgcggtgcgaactaccctctgtgatcacttccgaggcagtttatccagcgaagctagcaggcagcagcaatggcggccgagcccgagatctgcgtgctctccaatggcaggatcacggcgaacatcgccagctggggcgccaccatcacctccctcctcgtccccgacgcgcaaggggatctcgcggatgtcgttcttgggttcgacacactggagccgtacttgaaaggcatggcaccttattttggttgcatagttggccgagttgcaaataggatcaagaatgggaagtttgatctgaacggagtcgagtattcattgcctatcaacaatgggccgaacagccttcatggtggattgaaggggtttgacaaggttgtgtgggatgttgtagagcgtaaagatggcgagtacccatcaataacctttcaatatgagagcaaagatggcgaagaaggttaccctggcgatgtaaccgtccgagcaacgtattctcttccggaggccaccactctaagacttgatatggaagctataccagctaacaaagccactcctatcagcttggcacagcatacttactggaaccttgcaggccacaactctggcagcatcttggatcattcgatccagatctgggcaaaacacgtcactccagtcaatgaaaacacgattcctaccggagaaataatgcccgtccaggacacgccttttgatttcaccacggagcacaagattggagaccgcatcagcgatgttcctggagggtacgaccataactatgtgttggactcgggtgatgagaagaatggcttgaagcacacagccaagctgaaggacccatcgagctcacgaactctggacctctggaccgatgcgcctggcatgcagttctatactgccaactatgtgaatggcatcacgggcaaaggtggagctgtttacggtaagcatgccggagtatgcttggaaacccaggggttccccaatgccatcaaccagcccaatttcccgtctgtggtggtgcagcctggtgcgaagtataagcacgccatgttgtttgagttctcggcatgattagatatgctgccggcagcttaaatggctgcaactgcaatagttatagagtggaataaaacgaccaaaaaaaaaaaaaaaa

SEQ ID NO: 2450 - protein, 335 aa, Triticum aestivum
  misc_feature: Ceres CLONE ID no. 630337
  misc_feature: Ceres CDNA ID no. 40351123
  misc_feature (7)..(332): Pfam Name: Aldose_epim PFAM Desc: Aldose 1
MAAEPEICVLSNGRITANIASWGATITSLLVPDAQGDLADVVLGFDTLEPYLKGMAPYFGCIVGRVANRIKNGKFDLNGVEYSLPINNGPNSLHGGLKGFDKVVWDVVERKDGEYPSITFQYESKDGEEGYPGDVTVRATYSLPEATTLRLDMEAIPANKATPISLAQHTYWNLAGHNSGSILDHSIQIWAKHVTPVNENTIPTGEIMPVQDTPFDFTTEHKIGDRISDVPGGYDHNYVLDSGDEKNGLKHTAKLKDPSSSRTLDLWTDAPGMQFYTANYVNGITGKGGAVYGKHAGVCLETQGFPNAINQPNFPSVVVQPGAKYKHAMLFEFSA

SEQ ID NO: 2451 - DNA, 1487 bp, Triticum aestivum
  misc_feature: Ceres CLONE ID no. 630372
  misc_feature: Ceres CDNA ID no. 25892826
  CDS (117)..(1217): REFERENCED BY SEQ ID NO: 2452
gtccgacgccgccccccgtcgcgagagctaagaaggttctagaaggaagagaggcgaggcgaaaccgccacagcctcggcgcctggattcccagtcctacccctccggcggcgcgcatggatcagaggaaggccctgttccgcgccaagctccgcgaggccaaggagaagcaggagaagcgcatcgacccctcgctcgtcaggtataatgaatatgatcagcccatctgtagggtctgcaacgttacgttgaaatccgaagcactttggcctgcgcaccaggtttcacggaaacatcatgaggcaaaagccgctgcagccgctaaagttacaccagctgcagctcctcgtggcaataatgtcagtcatgaacgaccagctgaccctcagaaagcaaaatcctctccgatgcctgccaatttttttgacaatcagggaatgaaaaggcaaagtgatggtactggttctgagggaaggtctgtacgtcatcaagtggctaatgctcaaccagcaaccaaagaagcaagtgcaaataaaccatctatcaggatggaccaagcacccaataaagggaataaaagcagtaccgacgtgaaaggaattcttccagggaatttttttgattatgcagaagaagatgaagatgaagttccaactcctgctccagctccaaaggagcccaataggacttcgggcaataccaccaaccccaatcccgtgcaggtgaaaggtgtcccagatggcttcttagatagcagtaacacacagtccagtgaaaccagtgcatcgtctcaagcggcgaataatctggaaactgctcaagtaaaagctctgcccgaaggattcttcgataacaaagatgcggatctccgcgcacgcggtattcaacctccaaaagttgacatcaacgatgcatacaaagaatttgaaaaggaaattcaggaagacctccaggaagttgatgaccgcctcgaagaagaggagattgatgctgctgctgagagggaagagtacttgaccttagagcaagaggagtacaggcagcgagtagatatgctgaagaaacagctcaccgagtcaaaagccgcacggactgctaaggcgaacagcaaacccatcggcatggacacggattccagctccagcgactcatcgagcgacgacgaagaagacggcacagattttgctgttgactggagagcgcagtatatgaaatgatgtagatagagattgctcgctaccgtgaacaagaagccggttctccagattttgcatgaagagaggtctttctccgttcctgtccttttactttgaaaacgcacaagcgacttttgaactaacgcgacgagacctgtgatggttactcattaatgtgaatagtccctagtcttaagtactgacaaattccctctgcctgattgtagcgaattattattttcccaaggaaatgagtaaaacaaccaagaactattaaaaaaaaaaaaaaaa

SEQ ID NO: 2452 - protein, 366 aa, Triticum aestivum
  misc_feature: Ceres CLONE ID no. 630372
  misc_feature: Ceres CDNA ID no. 25892826
  misc_feature: Homolog of GI Number: 24461854 NR Desc: CTV.12
  misc_feature: Homolog of GI Number: 49523249 NR Desc: MGC89084 protein
  misc_feature: Homolog of GI Number: 50736112 NR Desc:  similar to RIKEN cDNA 2410003C20
  misc_feature: Homolog of GI Number: 57091251 NR Desc:  similar to RIKEN cDNA 2410003C20
  misc_feature: Homolog of GI Number: 73967030 NR Desc:  similar to coiled
  misc_feature: Homolog of GI Number: 61857930 NR Desc:  similar to RIKEN cDNA 2410003C20
MDQRKALFRAKLREAKEKQEKRIDPSLVRYNEYDQPICRVCNVTLKSEALWPAHQVSRKHHEAKAAAAAKVTPAAAPRGNNVSHERPADPQKAKSSPMPANFFDNQGMKRQSDGTGSEGRSVRHQVANAQPATKEASANKPSIRMDQAPNKGNKSSTDVKGILPGNFFDYAEEDEDEVPTPAPAPKEPNRTSGNTTNPNPVQVKGVPDGFLDSSNTQSSETSASSQAANNLETAQVKALPEGFFDNKDADLRARGIQPPKVDINDAYKEFEKEIQEDLQEVDDRLEEEEIDAAAEREEYLTLEQEEYRQRVDMLKKQLTESKAARTAKANSKPIGMDTDSSSSDSSSDDEEDGTDFAVDWRAQYMK

SEQ ID NO: 2453 - DNA, 1600 bp, Triticum aestivum
  misc_feature: Ceres CLONE ID no. 630415
  misc_feature: Ceres CDNA ID no. 36582466
  CDS (179)..(1111): REFERENCED BY SEQ ID NO: 2454
ctctcaaatctctctgaccggtggactctgtgtgggcggagcgaagtgggagccaacgccaagccagccgagccgactcctatcctcctcttccccttccccgcagcagtttccccaaatccagcgccctccccgccggaatccggcgccgaatcgagcagagagcttgaactgagctatggacaacttgtggcatctcggagatgagttccgtgggcaatcaaaggtggtggaggaccgccaatggtctctcatgacatcaaagcttgctgagatcacaaagtcaaaggctgagaggatgaatgactttgagtatgcacggatgaacaccgtccctgatgtcaagcaatgggataagctatcctaccaccaagaagacaacaagatggaccacctcaatcttggcttgatgaacctggatcttaagatgaatgatctcaagatgaacgaggctgccatgaagtaccctttccgcaacatggcctataacatgaatccgatgtaccccaagggaaacaacggtaatgtcaattcgttcaagatgaatgttggggtcaacaaatatcccaataatcagaatgggaaggaaacaaacggcaaacacaatggtggtaacaacaacaatggaggcaacagcaacaacaactctgttgacaagcgcttcaaaacattgccaacaagcgagatgctaccgaggaatgaagttcttggtggatacatctttgtctgcaacaatgataccatgcaggaggatctcaagagacagctttttggcttgccagcaagatatcgtgattcagtccgagccatcactcctggtctacctcttttcctctacaactacacgacccatcagctacatggggtgtttgaggctgccagttttggaggatcaaacattgatcccactgcttgggaagataagaagtgcaaaggtgaatccagattcccagcacaggtgaggatccgcattagaaggctttgcaaggccttggaagaggatgctttcaggccagtgctgcaccactatgatggtcctaaattccgcctggagctctccatagcagagacactgtcactgctagacctgtgcaagacagaagacgcctgatcggcttcggaacatggttgtggttgctctgtggttctttttagtaaatatcatccctgtaagttgtggaagatgttttcacaatgatctgttccgtccttcgtccatgaaagcgcaagctgttggttggtggttgcatttcccccagaaaggacctggtactcggaagaagtaggcctctaaagatgtgagcctgtctgtgtcggtgccgtctgtccgtaatcttggtgatgtgtatgttcttcttcatatttatgtatttgtagtgcagtatgcccgccgtcagcggggaaaccccgaaagacgggggatactgttgtgatgcatcatgaatgccccaaagtgagggcgggtgatgttgggagtgtacccttgttgtctttgtaccttaccttggtttggaaagctggaaccttgcatttgacttgatgctgctgtttctgtgccgcctgtgttggaaaccttgcaattacaaaaaaaaaaaaaaaa

SEQ ID NO: 2454 - protein, 310 aa, Triticum aestivum
  misc_feature: Ceres CLONE ID no. 630415
  misc_feature: Ceres CDNA ID no. 36582466
  misc_feature: Homolog of GI Number: 21592623 NR Desc: gda
  misc_feature: Homolog of GI Number: 21665866 NR Desc: GDA2 protein
  misc_feature: Homolog of GI Number: 297889 NR Desc: B2 protein
  misc_feature: Homolog of GI Number: 57900056 NR Desc: putative GDA2 protein
  misc_feature: Homolog of GI Number: 57900057 NR Desc: putative GDA2 protein
  misc_feature: Homolog of GI Number: 57898928 NR Desc: N
  misc_feature: Homolog of GI Number: 34913876 NR Desc: B1156H12.22
  misc_feature: Homolog of GI Number: 2765418 NR Desc: gda
  misc_feature: Homolog of GI Number: 33243058 NR Desc: KEAP1
MDNLWHLGDEFRGQSKVVEDRQWSLMTSKLAEITKSKAERMNDFEYARMNTVPDVKQWDKLSYHQEDNKMDHLNLGLMNLDLKMNDLKMNEAAMKYPFRNMAYNMNPMYPKGNNGNVNSFKMNVGVNKYPNNQNGKETNGKHNGGNNNNGGNSNNNSVDKRFKTLPTSEMLPRNEVLGGYIFVCNNDTMQEDLKRQLFGLPARYRDSVRAITPGLPLFLYNYTTHQLHGVFEAASFGGSNIDPTAWEDKKCKGESRFPAQVRIRIRRLCKALEEDAFRPVLHHYDGPKFRLELSIAETLSLLDLCKTEDA

SEQ ID NO: 2455 - DNA, 1312 bp, Triticum aestivum
  misc_feature: Ceres CLONE ID no. 630478
  misc_feature: Ceres CDNA ID no. 24766182
  CDS (113)..(1189): REFERENCED BY SEQ ID NO: 2456
tttttctcccgccctcgcaaccacctcccctcccctgtcctgccgagagtctcttctcttctcgtctctcgtcgcctcccgagtctccggcgaccacgccaactagacggccatggagcaaggcgccgactccgcggcggcgaggcggatggccagggtcgcctcccacctccgcccgcccacctcgcagatggaggaggtggccatcttgaagggctctgattgccgtgcaaaaggtgcggcaccagggttcaaggtcgcagtcctgggtgcatctggtggaattggccagccgctctcgctgctcatgaagatgaaccctcttgtttcggtgctccatttatatgatgttgtcaacacacctggtgtcacagctgacattagccacatgaacaccggtgctgtggtgcgtggcttcttgggtcagtcacaattggaaagtgctcttactggaatggatcttgtgatcattcctgctggcattcctcggaaacctgggatgacaagggatgatttgttcaacatcaatgccgggattgttcggactctttgtgagggaattgcaaaatgctgcccaaatgcgattgtgaatgtgatcagtaaccctgtaaattctaccgttccgatcgctgctgaagtatttaaaaaagctggaacatatgatcctaagcgcctattgggggtgacaacacttgatgtagtgagagccaatacctttgtgggagaggttcttggacttgaccccagagatgtcaatgttcctgttgttggtgggcatgcaggagttacgatattaccactcctttcacaggtgaatcctccctgctcgtttacctcagaagaaattagttatctcacttctcgcatacagaatggtgggacagaagtagttgaggccaaagcaggagcaggatccgcgactctttccatggcctacgcagcagccaaattcgcggacgcgtgcctgagagggctgcgcggcgacgccgggatagtggagtgctcttacatagcctgtcaggtgacggagctgcccttcttcgcgtccaaggtgcggctgggccggtcgggcgtcgaggaggtcctgccgctcggcccgctgaacgagtttgagagggcggggctggagaaggccaagggcgagctggccgagagcatccacaagggcgtcgcctttgccaacaagtgaagtgaagacaagagaagagaaatctttcgccccagcatagaaatctgagatgcctcttgcttcctgggagcaacggtcgccgtgtcattgtctcatctccctgtaataaaaaaaaaaaaaaaa

SEQ ID NO: 2456 - protein, 358 aa, Triticum aestivum
  misc_feature: Ceres CLONE ID no. 630478
  misc_feature: Ceres CDNA ID no. 24766182
  misc_feature (192)..(356): Pfam Name: Ldh_1_C PFAM Desc: lactate/malate dehydrogenase
  misc_feature (47)..(190): Pfam Name: Ldh_1_N PFAM Desc: lactate/malate dehydrogenase
  misc_feature: Homolog of GI Number: 16323157 NR Desc: AT5g09660/F17I14_150
  misc_feature: Homolog of GI Number: 60593476 NR Desc: Chain B
  misc_feature: Homolog of GI Number: 60593494 NR Desc: Chain H
  misc_feature: Homolog of GI Number: 1346501 NR Desc: MALATE DEHYDROGENASE
  misc_feature: Homolog of GI Number: 3183079 NR Desc: Malate dehydrogenase
  misc_feature: Homolog of GI Number: 52139820 NR Desc: glyoxisomal malate dehydrogenase
  misc_feature: Homolog of GI Number: 169977 NR Desc: malate dehydrogenase
  misc_feature: Homolog of GI Number: 4995089 NR Desc: malate dehydrogenase 1
  misc_feature: Homolog of GI Number: 4995091 NR Desc: malate dehydrogenase 2
  misc_feature: Homolog of GI Number: 9758994 NR Desc: microbody NAD
  misc_feature: Useful for making bigger plants
  misc_feature: Useful for making ornamental plants with modified flowers
MEQGADSAAARRMARVASHLRPPTSQMEEVAILKGSDCRAKGAAPGFKVAVLGASGGIGQPLSLLMKMNPLVSVLHLYDVVNTPGVTADISHMNTGAVVRGFLGQSQLESALTGMDLVIIPAGIPRKPGMTRDDLFNINAGIVRTLCEGIAKCCPNAIVNVISNPVNSTVPIAAEVFKKAGTYDPKRLLGVTTLDVVRANTFVGEVLGLDPRDVNVPVVGGHAGVTILPLLSQVNPPCSFTSEEISYLTSRIQNGGTEVVEAKAGAGSATLSMAYAAAKFADACLRGLRGDAGIVECSYIACQVTELPFFASKVRLGRSGVEEVLPLGPLNEFERAGLEKAKGELAESIHKGVAFANK

SEQ ID NO: 2457 - DNA, 1417 bp, Triticum aestivum
  misc_feature: Ceres CLONE ID no. 630546
  misc_feature: Ceres CDNA ID no. 25893111
  CDS (160)..(1200): REFERENCED BY SEQ ID NO: 2458
attctctttccacatcgccccgagatccatctgctccgtttcttgggtttctcggcgctttggtgcttcgctacgcatcccgttgcccttgttgacaccaggagaatccgggggctccacgaggggactagctagctggagtttggaagcgatcattctatgacgatctgcgcgggcttcgattcctaccgggcgtcgccggcggacatgcgagtcgtgacgtcggacgggcagagcatcgccgcgcattcctacgttcttgcctcggcgtcgccggtgctggagcggatgatcgacagggcgcagcgcgggtggggcgccgagtgcaccatccccgtcctcggcgtctccttcgacgccgtccacgccttcatccacttcctctactcctccaagtccaaggtggtgcccgcggaggaggaggcggtgggcgccaactgggcgcagctgctggcgctggcgcacgcgtaccgggtggggtggctgaagcgggcggcggaggcggccgtgtcggcgcgcctgacgccggagcgcgccgtggacatgctgaagctggcgaggctctgcgacgcgccgcggctgtacatgcggtgcgcgcgcctcgcggccaaggagttcgcctccgtggagcagtccgacgggtggcgcttcgcgcggcgccacgacgccgcgctggagctcgagctcctcacgctcctcgaggacgccgaccagcggaacgagcggtgggcgcgcgagcgggccgcgcaggaggcgtgccggcagctgggcgaggccatggcctccctcgagcacatcttccccggcgactccggcgccaaggccggctgcgcggacgcggacgcgccgtgcgcgagagcagggtgcacgtgccggggcctgcaggtgctgatgcggcacttcgcgacgtgcccgaaaaagatggcgcccggtgggtgcgcgcggtgcaagcgcatgctgcagctcttccggctccacgcctccgtctgcgaccggccggaccgggcctgccgcgtgccgctctgcagccatttcaaggccaaggcgcagacggggaaggcggacaagacgtggcggctcctggtgaagaaggtgacgagggcgaaggtgatgtcctccttggccgagaggaaggtggtgccggaggtcgtggccgagtcatgggcgagatacagccgtagaggagccaagttgagatgagaagagtcatttctctcgtcttggtcgtctagtttaacccttgtcgttagcaacgaggtgttgtgaactcaagtttatgtactatctatcgtctatcagttatagctagtgatagtctacttagcacatgtcacttatgacttgcgatggttaaacttttttcttttttgcgatggttaaactatagtagtgtttaccgctaaaaaaaaaaaaaaaa

SEQ ID NO: 2458 - protein, 346 aa, Triticum aestivum
  misc_feature: Ceres CLONE ID no. 630546
  misc_feature: Ceres CDNA ID no. 25893111
  misc_feature (196)..(289): Pfam Name: zf PFAM Desc: TAZ zinc finger
  misc_feature (7)..(121): Pfam Name: BTB PFAM Desc: BTB/POZ domain
  misc_feature: Homolog of GI Number: 50925241 NR Desc: OSJNBb0011N17.18
  misc_feature: Homolog of GI Number: 50910103 NR Desc: putative speckle
  misc_feature: Homolog of GI Number: 56785116 NR Desc: putative BTB and TAZ domain protein
  misc_feature: Homolog of GI Number: 57899800 NR Desc: putative BTB and TAZ domain protein
  misc_feature: Homolog of GI Number: 42573822 NR Desc: TAZ zinc finger family protein / BTB/POZ domain
  misc_feature: Homolog of GI Number: 34907566 NR Desc: B1078G07.24
  misc_feature: Homolog of GI Number: 66780099 NR Desc: PE
  misc_feature: Homolog of GI Number: 66776365 NR Desc: PE
  misc_feature: Utility: ABA Useful for making plants with enhanced tolerance to drought
MTICAGFDSYRASPADMRVVTSDGQSIAAHSYVLASASPVLERMIDRAQRGWGAECTIPVLGVSFDAVHAFIHFLYSSKSKVVPAEEEAVGANWAQLLALAHAYRVGWLKRAAEAAVSARLTPERAVDMLKLARLCDAPRLYMRCARLAAKEFASVEQSDGWRFARRHDAALELELLTLLEDADQRNERWARERAAQEACRQLGEAMASLEHIFPGDSGAKAGCADADAPCARAGCTCRGLQVLMRHFATCPKKMAPGGCARCKRMLQLFRLHASVCDRPDRACRVPLCSHFKAKAQTGKADKTWRLLVKKVTRAKVMSSLAERKVVPEVVAESWARYSRRGAKLR

SEQ ID NO: 2459 - DNA, 847 bp, Glycine max
  misc_feature: Ceres CLONE ID no. 630880
  misc_feature: Ceres CDNA ID no. 40041275
  CDS (79)..(474): REFERENCED BY SEQ ID NO: 2460
atcccaagctcacacaccaaaccaaagcaagaatagtgttctaagagtgagcaacaacttcaaacactattgtgagaaatggcttccaagggtgcacttctcttgtgtctcaacattctcttcttcactgtggtaagctccacatatgtcccatgcaacccaccccctaaaactcctaaacacacacctgtcccaaagccaccttccccaaagcaaccaagttgccccaaagacaccattaagtttggtgtgtgtgctgatgtgttaggtttgattaacgtgcaacttgggaagccaccaaagaccccatgctgcaacctcattcagggtcttgctgatcttgaagctgcggtgtgcctttgcaccgctctcaaagctaatgtgttgggcatcaaccttaatgtcccagtcaagttgagcttgcttctcaactactgtggaaagggtgttcccaagggattcgtctgcgcttaaatcaacacttcatataacttgtttcctaaagttaattagtatgcttaaggttctatattttgctatattggttatttattcataatattctgtgtattttggtattctgtttggcacgtgccatttaatctgtgcttgtttttctgttgagcaagcttcaaatgttcgttcaacgaaaagtaacacgtactcttaggcactcttaggaaacgaacatttcgttcgtactagattggtcattattattgtggtgatggttaaagcatggaaggctccttggtcttccctgtcagcctcactagtcctttgtaatctaagtgaaatttctactaattaataaaagttctatatttaagcaaaaaaaaaaaaaaaa

SEQ ID NO: 2460 - protein, 131 aa, Glycine max
  misc_feature: Ceres CLONE ID no. 630880
  misc_feature: Ceres CDNA ID no. 40041275
  misc_feature (49)..(130): Pfam Name: Tryp_alpha_amyl PFAM Desc: Protease inhibitor/seed storage/LTP family
  misc_feature: Homolog of GI Number: 1420885 NR Desc: proline
  misc_feature: Homolog of GI Number: 4454097 NR Desc: hybrid proline
  misc_feature: Homolog of GI Number: 407410 NR Desc: 14 kDa polypeptide
  misc_feature: Homolog of GI Number: 21436101 NR Desc: putative pEARLI 1
  misc_feature: Homolog of GI Number: 10798752 NR Desc: P
  misc_feature: Homolog of GI Number: 1199774 NR Desc: extensin like protein
  misc_feature: Homolog of GI Number: 60542797 NR Desc: arachidonic acid
  misc_feature: Homolog of GI Number: 9759432 NR Desc: extA
  misc_feature: Homolog of GI Number: 13561927 NR Desc: extensin
  misc_feature: Homolog of GI Number: 38566590 NR Desc: At4g12500
  misc_feature: Useful for delaying flowering time
  misc_feature: Useful for making larger plants
  misc_feature: Useful for making ornamental plants with modified leaves
  misc_feature: Useful for making plants with increased biomass and foliage
MASKGALLLCLNILFFTVVSSTYVPCNPPPKTPKHTPVPKPPSPKQPSCPKDTIKFGVCADVLGLINVQLGKPPKTPCCNLIQGLADLEAAVCLCTALKANVLGINLNVPVKLSLLLNYCGKGVPKGFVCA

SEQ ID NO: 2461 - DNA, 656 bp, Glycine max
  misc_feature: Ceres CLONE ID no. 630969
  misc_feature: Ceres CDNA ID no. 25446229
  CDS (59)..(349): REFERENCED BY SEQ ID NO: 2462
acaccagtcagtagtgagtgtggaaccttcactaaccctaaaattttccgataacgaaatggcatccaccgccggcgcagccgcgaggtctattttccgttcatgttccgctcgccgtgccgcgttccgtctcggctccgatgctaaagcggctcggtctccgttccgtgtcgcttccaacaaacctctctcgcaatctacactcaggtgtcccgttgaattaagcttttgtgtggaatccatgctaccgtaccatagcgcaactgcttctgctttgatgacttcgatgctatccgtctctcgccacagctatggttggcttcctgaaggcaaagagaagactatttgaagatcaagaagcaaggttgggatgacatggacctctttgatgtcgggctttaaacaaaaaaaagaaaaaaacattcttattaggaagatttgctagatatctatcaccaaaaagtttgttgctcttggattcttttaagttggcatggtgaattttattaagctggattcttcctataggtttactttgtattttagaaaataatattggtctcttatttatgaatcatattgttcaaagtttatgcatcttgagtagaattgtctggaataaaagaatcggttggcatacaaaaaaaaaaaaaaaa

SEQ ID NO: 2462 - protein, 96 aa, Glycine max
  misc_feature: Ceres CLONE ID no. 630969
  misc_feature: Ceres CDNA ID no. 25446229
  misc_feature: Homolog of GI Number: 34904474 NR Desc: OSJNBa0086P08.16
  misc_feature: Homolog of GI Number: 34909334 NR Desc: OSJNBb0021A09.13
MASTAGAAARSIFRSCSARRAAFRLGSDAKAARSPFRVASNKPLSQSTLRCPVELSFCVESMLPYHSATASALMTSMLSVSRHSYGWLPEGKEKTI

SEQ ID NO: 2463 - DNA, 460 bp, Glycine max
  misc_feature: Ceres CLONE ID no. 631050
  misc_feature: Ceres CDNA ID no. 29191503
  CDS (2)..(274): REFERENCED BY SEQ ID NO: 2464
ctggtctcgtgcaagtgtaacccaaaaccctagcggcgcctgctttcttcgttcgtcttttgcatcagccatcaggatggagtctcaggtgaagcatgctcttgttgtcaaagttatgggtcgtactggatccagaggacaggtgactcaggttagagtgaagtttttggatgatcagaaccgtcatatcatgaggaatgttaaaggaccagtgagagaaggagacattctcaccctactcgagtctgaaagggaagcaagaaggttgcgctagagggtatttttttcttgatctttatggtagttagttggtgctaaaggttatagcaccctgtcttgttgtcttggatctattttcattcaaattatgggttgaattttggatgtttaaacttcgagattgaggtatgctttggtttaatatatgatttgaattatggccaaaaaaaaaaaaaaaaaa

SEQ ID NO: 2464 - protein, 65 aa, Glycine max; identical to SEQ ID NO: 2436
  misc_feature: Ceres CLONE ID no. 631050
  misc_feature: Ceres CDNA ID no. 29191503
  misc_feature (1)..(65): Pfam Name: Ribosomal_S28e PFAM Desc: Ribosomal protein S28e
  misc_feature: Homolog of GI Number: 21902507 NR Desc: ribosomal protein small subunit 28
  misc_feature: Homolog of GI Number: 3947723 NR Desc: ribosomal protein S28
  misc_feature: Homolog of GI Number: 3947725 NR Desc: ribosomal protein S28
  misc_feature: Homolog of GI Number: 40287500 NR Desc: 28 kDa small subunit ribosomal protein
  misc_feature: Homolog of GI Number: 32400865 NR Desc: S28 ribosomal protein
  misc_feature: Homolog of GI Number: 2739219 NR Desc: rpS28
  misc_feature: Homolog of GI Number: 557682 NR Desc: small subunit ribosomal protein S28
  misc_feature: Homolog of GI Number: 38566518 NR Desc: At3g10090
  misc_feature: Homolog of GI Number: 21593139 NR Desc: 40S ribosomal protein S28
  misc_feature: Homolog of GI Number: 62858613 NR Desc: LOC549704

SEQ ID NO: 2465 - DNA, 1142 bp, Glycine max
  misc_feature: Ceres CLONE ID no. 631110
  misc_feature: Ceres CDNA ID no. 36582025
  CDS (50)..(955): REFERENCED BY SEQ ID NO: 2466
aaaaatttttttctcacttcacaacttttatttgtgtttgagttctccaatggcagctcctgcaccattctctctttcttctgatcccttcgcttccaaatctgccacatcaacgatctttggtcctgccgcgctgaaaaaagggaactttgagcaaacccatttcggaattttcacggctttaaggagaaatcaaggtttcactttaaaggcttcaatggggcctccgggatttacagagaaacttaataacaacaagctaaagactttagctgatgctgaagatgggtgtgatatatttaatgacctgaaagataggtttttaagttttaaaaagaataaatacctgaaaaatattgaacattttgaaaatcttgcaaaggttcaaacaccaaagttcatggttattgcttgtgcagattctagggtatgcccttctaatgttttgggatttcaaccaggagaagcattcatgattcgcaatgttgctaatttggttcctacctttgagagtggacccacagaaacgaatgcggctcttgaatttgcggtgaactcccttctggttgagaacatcttagtcattggccacagctgctgtggtggtatacgtgccctgatgggtatgcaagatgatgatgttgaaaaaagttttataaaaagttgggtcattgctgggaagaatgcaagaaaaaaagccaaggctgctgcttctaacctcagctttgatgagcagtgcaagcattgtgagaaggaatcaattaaccattccttgttaaatctacttacttacccctggatagaagaaaaggtggcaaatggagaactctctattcatggtggttactacgactttaccgattgttcatttgagaagtggacattggattaccggggaaccaaattggaggaaaatggcaaaattgctgccaaaaacaaaatattttggtgttgaagtttgtacttatattttcctgtgttcatcgtgttgtttttttcaaaaattcgtaggactttaaaagcataggctgagttatgtatttttgtaggatctataagatgtttaaatcgatcgagttgaataaccccctatcatttcaggtgtatgttgtattattgctatgtgaaaaaaaaaaaaaaaa

SEQ ID NO: 2466 - protein, 301 aa, Glycine max
  misc_feature: Ceres CLONE ID no. 631110
  misc_feature: Ceres CDNA ID no. 36582025
  misc_feature (110)..(278): Pfam Name: Pro_CA PFAM Desc: Carbonic anhydrase
  misc_feature: Homolog of GI Number: 21689751 NR Desc: putative carbonate dehydratase
  misc_feature: Homolog of GI Number: 79326253 NR Desc: carbonate dehydratase/ zinc ion binding
  misc_feature: Homolog of GI Number: 50725202 NR Desc: putative carbonic anhydrase
  misc_feature: Homolog of GI Number: 12321261 NR Desc: carbonic anhydrase
  misc_feature: Homolog of GI Number: 79320225 NR Desc: carbonate dehydratase/ zinc ion binding
  misc_feature: Homolog of GI Number: 12321393 NR Desc: carbonic anhydrase
  misc_feature: Homolog of GI Number: 21593413 NR Desc: carbonic anhydrase
  misc_feature: Homolog of GI Number: 21281000 NR Desc: putative carbonic anhydrase
  misc_feature: Homolog of GI Number: 30696219 NR Desc: carbonic anhydrase family protein / carbonate dehydratase family protein
  misc_feature: Homolog of GI Number: 23197874 NR Desc: putative carbonic anhydrase
MAAPAPFSLSSDPFASKSATSTIFGPAALKKGNFEQTHFGIFTALRRNQGFTLKASMGPPGFTEKLNNNKLKTLADAEDGCDIFNDLKDRFLSFKKNKYLKNIEHFENLAKVQTPKFMVIACADSRVCPSNVLGFQPGEAFMIRNVANLVPTFESGPTETNAALEFAVNSLLVENILVIGHSCCGGIRALMGMQDDDVEKSFIKSWVIAGKNARKKAKAAASNLSFDEQCKHCEKESINHSLLNLLTYPWIEEKVANGELSIHGGYYDFTDCSFEKWTLDYRGTKLEENGKIAAKNKIFWC

SEQ ID NO: 2467 - DNA, 1000 bp, Glycine max
  misc_feature: Ceres CLONE ID no. 631218
  misc_feature: Ceres CDNA ID no. 35383235
  CDS (249)..(851): REFERENCED BY SEQ ID NO: 2468
atacataaagaagaaacgcgttttgtcgtccctttctgagcgtaactctttgtttcggacttgacccctaaattcgcgcccattcccaccacatcacatccctcttttctataaattcccaatccctttcccagtttccaccaaaacctaaacctaaacctaaacctaaacctaaacataaactgaatttcccaaatccccttcccaattttcaccaaaacctaatactcccaaaccaatcttcgatcatggccgccgaatcacaacctcaactaatcgaagagagaagagaggagcaagaacttaagtacctggaatttgtgcaattcgcgaccatccaggccctgatgcgctgcgccatcctctactcctacgccaaggagcgcgcgggtcctctgaagcccggcgtcaacaccgtcgaggaggccgtgaagaccgtcgtggctccggtctacgacaggttccacctcgtccccggcgaggtcctcaaatacgccgatcgcaaggtcgccgaattggaccgccacgttccctccaacgtgaagaaggtctcctcccaggcccgctccgtcgtctccgaagtccgccgtgatggtgtctccgcctacgccaaaatcgtttactcgaagtatgagcccacggcggagcagtgtgccgtctccgcatggaggaagctcaaccagcttccgctcttccctcaggttgccaatgtcgtgttgcccaaggctgcctactgcactgagaagtacaatgaggcggttgtttcctctgctgagaaaggttatagggtttctgcttatcttcctttggtgcctactgagaagatcgccaaagtcttcggtggaaactgatctcgttctattgcgttttttaatttctatttttcttactttctttacatacaaaggtggtgttgctagttactactactgtgttagtgtgagttggattcgatatttgataatgtgaatgttctgttttgttaaaaaaaaaaaaaaaa

SEQ ID NO: 2468 - protein, 167 aa, Glycine max
  misc_feature: Ceres CLONE ID no. 631218
  misc_feature: Ceres CDNA ID no. 35383235
  misc_feature (4)..(165): Pfam Name: REF PFAM Desc: Rubber elongation factor protein
  misc_feature: Homolog of GI Number: 7488786 NR Desc: stress related protein
  misc_feature: Homolog of GI Number: 7596762 NR Desc: stress related protein
  misc_feature: Homolog of GI Number: 3319925 NR Desc: Hev b 3
  misc_feature: Homolog of GI Number: 37622210 NR Desc: small rubber particle protein
  misc_feature: Homolog of GI Number: 23198404 NR Desc: stress related protein
  misc_feature: Homolog of GI Number: 29367349 NR Desc: stress
  misc_feature: Homolog of GI Number: 5802955 NR Desc: stress related protein
  misc_feature: Homolog of GI Number: 50939873 NR Desc: putative stress
MRCAILYSYAKERAGPLKPGVNTVEEAVKTVVAPVYDRFHLVPGEVLKYADRKVAELDRHVPSNVKKVSSQARSVVSEVRRDGVSAYAKIVYSKYEPTAEQCAVSAWRKLNQLPLFPQVANVVLPKAAYCTEKYNEAVVSSAEKGYRVSAYLPLVPTEKIAKVFGGN

SEQ ID NO: 2469 - DNA, 1637 bp, Glycine max
  misc_feature: Ceres CLONE ID no. 631558
  misc_feature: Ceres CDNA ID no. 25446230
  CDS (198)..(1376): REFERENCED BY SEQ ID NO: 2470
attggttagaagattagtctgtaaggaaggcaaagaaacaaagaagcgagacatgccaaacaagatcaaccaaccatttcctaactttgctccctcgtctttgttggattccgttttccaactctcaattccccaaatcttaattgctgcaatgcgttagcaaagtttcaatctttgccaaagggacgagaagaatcatggggagggacccatcttctgccaccgtcgaggtgcagattcatccgcgctgcgacaccaccaccgtccaccccggacgggggcggaggcactctccgtcgccgccgagtccccctgccgtgcacgatcgcgacttcagcctcttcaagcgctggttcccatggctggtccccaccttcgtggtggccaacattgtcgtcttcatcgtcacaatgtatataaatgattgtcctaaccattccttttacggttcctgcgtcgcctcttttctcggaagattctcgtttcaacctctcaaagagaaccctctcttaggtccttcttcctccacattagagaagatgggtgctcttgaagttggtaaagtgattcatggacaccaggtttggcggctcttctcttgtatatggttgcacggtggggttgttcacgtgcttgccaacatgttgagtctcgtttttattggaattcgccttgagcaagaatttggatttgttcgaattggattcctgtatgtgatatccggttttggagggagtttgctgtctgctctattcatacaagaaggaatctccgtgggtgcttctggtgcattatttggcttactaggaggcatgctatcggagctcttgataaattggacaatatatgccaataagtttgcagcgttattgactcttatagtcatcgttgtaatcaatttagccattggagttcttccacatgtggacaattttgctcatattggaggatttgtctctggcttttttcttgggtttatctttctgattcgcccccagttcaaatgggttagtagtagacacaggaattctcactctacagctgctgcaccttcggtgaaatataaacacaaaccttatcagtatgctctgtgggtcatatccttcatactactcattgccgggttggttactgggctggttttgctccttcgaggtgttaacttgaatgatcgttgctcatggtgtcattacttaagttgcgttcctacctcaaaatggagctgcaaatcacaacaactttattgtgagtcaacccaaatacgaaaccaacttaacataacatgcttgagcaatgggagaagtcacatgtttcctctttcagatattagctcattggaggctcaacaacagctatgctctcaactttgcagttgatagatacagatgcagcattccttaatgcaaatattattcaactacctgtgcatatgatcatacttgatactacagagaaattatttcttctattgttgtcactgcttttcctttcttagttgtgtattacaatgtgctattattcttttgtaactggagcagagagcaaagaggaagttgtaattgattaaagaagcaaaatacttctcaaatatagtaaatgttgtcaaatgattgattgtagcaaaaaaaaaaaaaaaa

SEQ ID NO: 2470 - protein, 392 aa, Glycine max
  misc_feature: Ceres CLONE ID no. 631558
  misc_feature: Ceres CDNA ID no. 25446230
  misc_feature (124)..(267): Pfam Name: Rhomboid PFAM Desc: Rhomboid family
  misc_feature: Homolog of GI Number: 42569431 NR Desc: rhomboid family protein
  misc_feature: Homolog of GI Number: 62733172 NR Desc: Rhomboid family
  misc_feature: Homolog of GI Number: 30693911 NR Desc: rhomboid family protein
  misc_feature: Homolog of GI Number: 52077312 NR Desc: putative membrane protein
  misc_feature: Homolog of GI Number: 20466143 NR Desc: AT5g07250/T28J14_190
  misc_feature: Homolog of GI Number: 294845 NR Desc: membrane protein
  misc_feature: Homolog of GI Number: 28827620 NR Desc: putative membrane protein
  misc_feature: Homolog of GI Number: 50948211 NR Desc: putative membrane protein
  misc_feature: Homolog of GI Number: 9502383 NR Desc: T12C24.28
  misc_feature: Homolog of GI Number: 20259083 NR Desc: putative membrane protein
MGRDPSSATVEVQIHPRCDTTTVHPGRGRRHSPSPPSPPAVHDRDFSLFKRWFPWLVPTFVVANIVVFIVTMYINDCPNHSFYGSCVASFLGRFSFQPLKENPLLGPSSSTLEKMGALEVGKVIHGHQVWRLFSCIWLHGGVVHVLANMLSLVFIGIRLEQEFGFVRIGFLYVISGFGGSLLSALFIQEGISVGASGALFGLLGGMLSELLINWTIYANKFAALLTLIVIVVINLAIGVLPHVDNFAHIGGFVSGFFLGFIFLIRPQFKWVSSRHRNSHSTAAAPSVKYKHKPYQYALWVISFILLIAGLVTGLVLLLRGVNLNDRCSWCHYLSCVPTSKWSCKSQQLYCESTQIRNQLNITCLSNGRSHMFPLSDISSLEAQQQLCSQLCS

SEQ ID NO: 2471 - DNA, 1580 bp, Glycine max
  misc_feature: Ceres CLONE ID no. 631679
  misc_feature: Ceres CDNA ID no. 25446231
  CDS (77)..(1231): REFERENCED BY SEQ ID NO: 2472
aggttcggttttttttaacaaaacgtacttcacttcgtgccttcagaaaccctaattcccaaatctcaaacgaaccatggaattcaccaagaagcgcaaaaccgaagagaacggcgacaccaccgattatccgccgcagcaatccaccgaagaatccccaatcgccgccgtagcccccgcccccctcgccgccgaagacatccgcaagatcctacaaccgttctcccaggagcagctcctcgacctccttcaatcggcatcgctccgccaccccgacgtcctcgatgccgtgcgcgccgttgcggacctcgattccaccctccggaagctcttcgtgcgcggtctcgccggcgagaccacgacggagaccctccgcggcgtgttctcggcgttcggcgaattggacgaggccatcgtgatcattgacaaggccacggggaggtccaagggctacggcttcgtcgtattcagccacgtggacggcgcaattctcgccctcaaggagcccagcaagaagatcgacggccgcatgaccgtcacacagctcgccgccgccggaggccccggcggcggcgacgtgtccctccgtaaggtcttcgttgggaacgtccccttcgagatttcctcggagaggctcctcgacgagttcctcaagttcggagaagtcgaggaagggcctctggggtttgacaaatcgagtggcaaaagcagaggtttcgccttcttcgtttacaagaccgaggaaggtgcaagggcttcgttggttgaaccattgaaaacaattgaggggcaccaagtgatttgcaaattggctgtggataacaaaaagacgaaaccttttgttgcggatcagcatcagcagcaacatcatcagcaacatccgcagcaacagatgcagcagcaaggttcaatgatggtgcctcagtatggtggatatggtggtaatggttatgggatgcagcagcaacagcagcagcatcaggtgccaccgtataataatcaaattccggttgccggtgctggcgggtatggccatggatatggtaattcacagatgggcgggccggtttctggtgattatggtgcgagggtgcctcccagtactggtggggggtaccctgatggctcgcagtatggcttccctccttcatcgggccatccgccgcagccgcagattccgatggcgagacctcctggtggaatgtaccaaggcatgccaccctattattgagataatgaaatctttggttttggttacatggactgctgtaatttgttgctgcttcactacctctgcatctatgtgttatggttccatttgtgatgggtgttagttgaagcttacatgacttggcgtagtacttgaatgtagtacttatgtagaatttatgtagaatttttggttcatagtttttacctagtttagtttcataagttattgactaaatgccaaggtggttacattaaattttgaaatgtctcttattgtgctctttcgtgcatatatgtactctgtggttgtcgtgatgaccttaattttgttcttttaacttccgctagttgcaaaaaaaaaaaaaaaa

SEQ ID NO: 2472 - protein, 384 aa, Glycine max
  misc_feature: Ceres CLONE ID no. 631679
  misc_feature: Ceres CDNA ID no. 25446231
  misc_feature (85)..(155): Pfam Name: RRM_1 PFAM Desc: RNA recognition motif.
  misc_feature: Homolog of GI Number: 34912640 NR Desc: P0410E01.24
  misc_feature: Homolog of GI Number: 54290288 NR Desc: heterogeneous nuclear ribonucleoprotein A2/B1
  misc_feature: Homolog of GI Number: 82621124 NR Desc: RNA
  misc_feature: Homolog of GI Number: 22137136 NR Desc: At2g41060/T3K9.17
  misc_feature: Homolog of GI Number: 21666573 NR Desc: RNA
  misc_feature: Homolog of GI Number: 50929029 NR Desc: OSJNBb0034I13.9
  misc_feature: Homolog of GI Number: 25412083 NR Desc: probable RNA
  misc_feature: Homolog of GI Number: 21595502 NR Desc: putative RNA
  misc_feature: Homolog of GI Number: 59808855 NR Desc: Hnrpa1 protein
  misc_feature: Homolog of GI Number: 133254 NR Desc: Heterogeneous nuclear ribonucleoprotein A1
  misc_feature: Useful for making plants with increased biomass and foliage
MEFTKKRKTEENGDTTDYPPQQSTEESPIAAVAPAPLAAEDIRKILQPFSQEQLLDLLQSASLRHPDVLDAVRAVADLDSTLRKLFVRGLAGETTTETLRGVFSAFGELDEAIVIIDKATGRSKGYGFVVFSHVDGAILALKEPSKKIDGRMTVTQLAAAGGPGGGDVSLRKVFVGNVPFEISSERLLDEFLKFGEVEEGPLGFDKSSGKSRGFAFFVYKTEEGARASLVEPLKTIEGHQVICKLAVDNKKTKPFVADQHQQQHHQQHPQQQMQQQGSMMVPQYGGYGGNGYGMQQQQQQHQVPPYNNQIPVAGAGGYGHGYGNSQMGGPVSGDYGARVPPSTGGGYPDGSQYGFPPSSGHPPQPQIPMARPPGGMYQGMPPYY

SEQ ID NO: 2473 - DNA, 1188 bp, Glycine max
  misc_feature: Ceres CLONE ID no. 631716
  misc_feature: Ceres CDNA ID no. 35389032
  CDS (331)..(750): REFERENCED BY SEQ ID NO: 2474
atcatctcgcgtatctcctcctccgtccaccctccctcacgtaatttccacaccaccctctccagacacccgcctagctcccccccctgcgcgtccgccacctccgaccagaacctcaccctcctcgccgccgtcgccgcccacaccggctcctccgtccccggcgccagaaactcccgaaaaaatcccgccacgtcaaagctgagcaagcgaacatcaccgtcgttgtcgacatgaaaaacagggttcccggcggcgccgggggaggagggaatgtaacaatggcggtaaatcggaacgagcggcggcgcatcatgtaataagcgggcaatgactcgggtagggtcggagggttctgggccccaggaagggtgccagaagcgcgtactggagacgcgacgcagaatcgaggaggctggaaggttgaggaggatttgtagttgctgtgttgaggaagaacgccaattggggaagccctgggatacgggaaggccttgttggaggatcgcgcgtaagtccggtgggaacgagaatttcaatttggattctatgtttgataattctgcgtcggagagtccttcgtcgattgccaccttcgaggctttgaggcaattaaggaggtcgccggcgtacgctgcgaatgagaaacatattcgcttcggccttggaggtttcgatttcgccgctttgttgtcaacggtgcccgtggccatattttatgttctttggggaaatcaaaacataatctaagaaatcatatacttatacttataacctactacctagtcatcagcatcacactctctgttctgtttcgagggacttggagatcgaataagttgttgcctaatgcgtaaagatatagacacagagtttgtttgaaaaaataaaaatgggtatttttgttaacgtatctagaggaaaatagttgcattagaaagtctctatctctatggagctgtaacgtagtcatgttgccactcacccacgtgttagtcgtctattgacattttaatacttttatttatttgcattcctattttgctatgtaaattctgaatagctctaatctgttttcatgacagaattaaccccacatttgtctttttaagattgctaatagagaaatgataatataatgttcattcgtggctttttattattaaatgatgaaaaaaaaaaaaaaaa

SEQ ID NO: 2474 - protein, 139 aa, Glycine max
  misc_feature: Ceres CLONE ID no. 631716
  misc_feature: Ceres CDNA ID no. 35389032
  misc_feature: Homolog of GI Number: 50924466 NR Desc: OSJNBa0006B20.16
  misc_feature: Homolog of GI Number: 84493 NR Desc: hypothetical proline
  misc_feature: Homolog of GI Number: 13265426 NR Desc: At2g14890
  misc_feature: Homolog of GI Number: 42570779 NR Desc: arabinogalactan
  misc_feature: Homolog of GI Number: 76262498 NR Desc: pherophorin
  misc_feature: Homolog of GI Number: 12642860 NR Desc: putative proline
  misc_feature: Homolog of GI Number: 51970892 NR Desc: cell wall protein like
MTRVGSEGSGPQEGCQKRVLETRRRIEEAGRLRRICSCCVEEERQLGKPWDTGRPCWRIARKSGGNENFNLDSMFDNSASESPSSIATFEALRQLRRSPAYAANEKHIRFGLGGFDFAALLSTVPVAIFYVLWGNQNII

SEQ ID NO: 2475 - DNA, 905 bp, Triticum aestivum
  misc_feature: Ceres CLONE ID no. 632088
  misc_feature: Ceres CDNA ID no. 25891871
  CDS (107)..(592): REFERENCED BY SEQ ID NO: 2476
gagtccgagcggtaccgaccgaggcgagcaccttcgcaaacctctcctcaaccctcgccgccgccgccgccgccgccgtgccggccgctcagtccccgccgacgccatgggcaagttccggaagctcgggcgccacgccgcgcaccgcgtatccatgctcaggacgatggtgtcgcagctggtgaagcacgagcggatcgagaccaccgtcgccaaggccaaggaggtgcggcgcaaggcggatcagatggtgcagctcggcaaagatggtacactggatgcagcaagacgtgcttctgcttttgttcgcggagatgatgttgtccataagctattcacagagctggcctaccgctataaagatcgagcaggcggatatacgagacttttgcgaactaggatacgaataggtgatgctgcaccaatggcatacattgagtttgtggacagagagaacgaactccgagaggccaaacctgcaacgccaccgccacctcagcgagttccacttgatccatgggccaagtctcgagctagccaacagtgggccggacctaaagttaccgtgaactccaaatcagaaggcttatgagagcattatcccactgtgtttctttctggtgaatgaggcttgtcatgcagcaggatttttgtgtcagggtatagttgtcgatagaataattcaacttagatttgctatccctcgagcgaatacagatgcggtgttgtccgcgcaagtatggtggtatggcgcaagggtcaaagatgtgttaattttaccaattgctgatgtatcatgaaatgtttgaagaatcacctggcaaattcgagcctggatctcatgccatccacggcctccataaaaggtctcttggttaattgcttgctgaaaaaaaaaaaaaaaa

SEQ ID NO: 2476 - protein, 161 aa, Triticum aestivum
  misc_feature: Ceres CLONE ID no. 632088
  misc_feature: Ceres CDNA ID no. 25891871
  misc_feature (17)..(113): Pfam Name: Ribosomal_L17 PFAM Desc: Ribosomal protein L17
  misc_feature: Homolog of GI Number: 56784661 NR Desc: putative 50S ribosomal protein L17
  misc_feature: Homolog of GI Number: 50931683 NR Desc: putative 50S ribsomal protein L17
  misc_feature: Homolog of GI Number: 21592350 NR Desc: ribsomal protein
  misc_feature: Homolog of GI Number: 18424850 NR Desc: ribosomal protein L17 family protein
  misc_feature: Homolog of GI Number: 21555473 NR Desc: 50S ribosomal protein L17
  misc_feature: Homolog of GI Number: 72384434 NR Desc: 52O08_5
  misc_feature: Homolog of GI Number: 7671412 NR Desc: ribsomal protein
  misc_feature: Homolog of GI Number: 10178068 NR Desc: 50S ribosomal protein L17
  misc_feature: Homolog of GI Number: 26451578 NR Desc: putative 50S ribosomal protein L17
  misc_feature: Homolog of GI Number: 9759008 NR Desc: 50S ribosomal protein L17
MGKFRKLGRHAAHRVSMLRTMVSQLVKHERIETTVAKAKEVRRKADQMVQLGKDGTLDAARRASAFVRGDDVVHKLFTELAYRYKDRAGGYTRLLRTRIRIGDAAPMAYIEFVDRENELREAKPATPPPPQRVPLDPWAKSRASQQWAGPKVTVNSKSEGL

SEQ ID NO: 2477 - DNA, 831 bp, Triticum aestivum
  misc_feature: Ceres CLONE ID no. 632149
  misc_feature: Ceres CDNA ID no. 40351124
  CDS (78)..(602): REFERENCED BY SEQ ID NO: 2478
caattttcattccgaagtccctttcaacgagagagagggagagagagaggagcagttagttgagacccgagacggagatggatctgctggagaggagcgcagccactattaaggcggagcagggggaggcccagcgcaaggaagccgagaggaaggagcaggagcacaaggagcaggagacccagcagccagggctcaccggccgacccccgctcgccaacggcaggtctggaatgttgccaatgtcgagccctccagcaaatccgggacagcttaccattttttatggtgggtcagtatgtgtgtatgactcagtgccaccagagaaggctcaagcaatcatgctcattgcagcagcagcagctgcggcctcaaaaagcaatggcaccactgctgttaagcctccagcgatgtctgcgaccaatgctatccaagccatgcttacgcggtcgctctcactccagagcacttctgtagcaaatggacaacctcaggctgtcgcggatcctggctcgatttgcaagcttcaggctgatcttcccatcgccaggagacactcccttcagcgcttcctggagaagcgccgtgacaggttagcatgaatgaagagtacaagtagcagtctacgttcttctggagcgtattatgagtattatgacccccttacatttgttgttttgtgtttccacatgctgtgtatggtgtaccacagcatttagaaatgcatttgtatgaggccaagtcttcaaaaccaagtcttgtacttctgtgccccgttcatgatcaatccaaattatgataaccgttctatttacaaaaaaaaaaaaaaaa

SEQ ID NO: 2478 - protein, 174 aa, Triticum aestivum
  misc_feature: Ceres CLONE ID no. 632149
  misc_feature: Ceres CDNA ID no. 40351124
  misc_feature (59)..(94): Pfam Name: Zim PFAM Desc: ZIM motif
MDLLERSAATIKAEQGEAQRKEAERKEQEHKEQETQQPGLTGRPPLANGRSGMLPMSSPPANPGQLTIFYGGSVCVYDSVPPEKAQAIMLIAAAAAAASKSNGTTAVKPPAMSATNAIQAMLTRSLSLQSTSVANGQPQAVADPGSICKLQADLPIARRHSLQRFLEKRRDRLA

SEQ ID NO: 2479 - DNA, 704 bp, Triticum aestivum
  misc_feature: Ceres CLONE ID no. 632177
  misc_feature: Ceres CDNA ID no. 40351125
  CDS (87)..(530): REFERENCED BY SEQ ID NO: 2480
acacaaactcagagcattccgatacagcgcaaccgccgccaacaccactcctagcgagtcctcgccgccggagaagcagcaagaagatggccggaaggaagggtggcgacaggaagaaggcggtgacccgctccgtgaaggctgggctccagttccccgtcggccgcatcgggcgctacctcaagaagggccgctacgcccagcgcgtcggctccggcgcccccgtctacctcgccgccgtcctcgagtacctcgccgccgaggtcctggagcttgccggcaacgcggccaaggacaacaagaagacccgcatcatcccgcgccacctgctgctggccgtccgcaacgaccaggagctcggcaggctgctggccggcgtcaccatcgcccacggcggcgtgatccccaacatcaactccgtgctgctccccaagaagtccgccgccgccgccgagaaggaggccaagtcgcccaagaagaagacctccactaagtcccccaagaagaagaccgcggccaccaaagagtagcaggccccatagcttagccagtgttgcttagatccatttctcatggactaagatgagatcctgtatgtaatgcctgctagtctgtagtgcccgtcagatttgacgagcaaggttgacattgtgatatcagtgagaatggctaaagatgcaatcattttaaaaaaaaaaaaaaaa

SEQ ID NO: 2480 - protein, 147 aa, Triticum aestivum
  misc_feature: Ceres CLONE ID no. 632177
  misc_feature: Ceres CDNA ID no. 40351125
  misc_feature (21)..(85): Pfam Name: CBFD_NFYB_HMF PFAM Desc: Histone
MAGRKGGDRKKAVTRSVKAGLQFPVGRIGRYLKKGRYAQRVGSGAPVYLAAVLEYLAAEVLELAGNAAKDNKKTRIIPRHLLLAVRNDQELGRLLAGVTIAHGGVIPNINSVLLPKKSAAAAEKEAKSPKKKTSTKSPKKKTAATKE

SEQ ID NO: 2481 - DNA, 1136 bp, Triticum aestivum
  misc_feature: Ceres CLONE ID no. 632537
  misc_feature: Ceres CDNA ID no. 29191816
  CDS (32)..(850): REFERENCED BY SEQ ID NO: 2482
ccaattcccttctcccccctcccactccgccatggcctctttcgtctccgcctccgcctcctccaccgccgcagtccttctccgctccgtcccgtccgcctcccgcggcgggctcgtggtggcgtgggcggccccggcccggcgcgcgctcgcggctcctctgcgcgcggctgcggcgcaggggtcggccaactccgcgccggtcatgatggagagcaaggtcaagaagaggaacaagaagggcgccggcgccgggggcctccccgccgccatcgacctcgagatccgggaggccgagcagtacctcgccaccgacgggcaggaacctactccagaagacttcccctttgaaatggttgatgaagatgggatgagcgtggttattctgaaaagggactacaaggatgagaagattgaggtcattgtcagcatgcctaacgtggaaggggatcctgagtttgatgaagatgacgagggcgatgatgaggatgctgccaaggacgatgaagatgaagatgaggacggccaagaaagtagcctttctatgaaggtgatagtctccaagggatctggcctgaacctcgagttcacctgcacagccttccacgaggagatcaccattgacgacatgatgatagcggagaaaacagagtctgatgcagagaaattcccgtttgagggccctgagttcaccgagcttcctccgaatgtgcagaagggcctgttcaagttcctggaggtacgaggggtgacgctgacgaccaccaacttcatgcacgattacatgatcaccaagcagaccaaggagtacgtgcggtggatgaccaagctcaagggtttggtccagtagtgaggttgaacagatgggcttgccgcgtgactcgacagcaaattttggtagcgtagccttctatcacgcgtagcaagagcagtaagaactgagaaccccgtgaaaccagtagtttgaagtgtatttgtagtcctgaatcagcagctaggcagggtgagttccatttgtgttttggagctggccggtgaaaatcctgtagaaaggtggttactagcaatgaaacaagacttcctaagttcctaagcttaatacaagctgtgttacttccacaaaaaaaaaaaaaaaa

SEQ ID NO: 2482 - protein, 272 aa, Triticum aestivum
  misc_feature: Ceres CLONE ID no. 632537
  misc_feature: Ceres CDNA ID no. 29191816
  misc_feature (81)..(271): Pfam Name: MAM33 PFAM Desc: Mitochondrial glycoprotein
  misc_feature: Homolog of GI Number: 30102600 NR Desc: At3g55605
  misc_feature: Homolog of GI Number: 20334884 NR Desc: At1g15870/F7H2_19
MASFVSASASSTAAVLLRSVPSASRGGLVVAWAAPARRALAAPLRAAAAQGSANSAPVMMESKVKKRNKKGAGAGGLPAAIDLEIREAEQYLATDGQEPTPEDFPFEMVDEDGMSVVILKRDYKDEKIEVIVSMPNVEGDPEFDEDDEGDDEDAAKDDEDEDEDGQESSLSMKVIVSKGSGLNLEFTCTAFHEEITIDDMMIAEKTESDAEKFPFEGPEFTELPPNVQKGLFKFLEVRGVTLTTTNFMHDYMITKQTKEYVRWMTKLKGLVQ

SEQ ID NO: 2483 - DNA, 652 bp, Triticum aestivum
  misc_feature: Ceres CLONE ID no. 632598
  misc_feature: Ceres CDNA ID no. 36707662
  CDS (117)..(500): REFERENCED BY SEQ ID NO: 2484
aatatatttggggaggcgagccgggattcgagacagagcccacaaggcaacaacaaagtgcgcgtgagaaataagcggtgcttgcccagtagagagagagagagagagagagagagatggcggcgtcggcggcgacggcgacggcgacggcggcggcggtaggggcgggggaggtgatctccgtccacagcctggagcagtggaccatgcagatcgaggaggccaacgccgccaagaagctggtggtgattgacttcactgcatcatggtgcggaccatgccgcattatggctccaattttcgctgatctcgccaagaagttcccagctgctgttttcctcaaggtcgacgttgatgaactgaagcccattgctgagcaattcagcgtggaggccatgccaaccttcctgttcatgaaggaaggagatgtcaaggacagggttgtcggagctatcaaggaggaactgacgaccaaggttgggctacacgcggcccagtaatcacctaccggagtagcattcgcctaaataaaattgccgctcaacaagtagtgcctctaatggcaccttatatcctgtgtactgcttgttacttgttggtttatggataatggtgaatcaagtgtgactttattcgaaaaaaaaaaaaaaaa

SEQ ID NO: 2484 - protein, 127 aa, Triticum aestivum
  misc_feature: Ceres CLONE ID no. 632598
  misc_feature: Ceres CDNA ID no. 36707662
  misc_feature (20)..(126): Pfam Name: Thioredoxin PFAM Desc: Thioredoxin
  misc_feature: Homolog of GI Number: 8980491 NR Desc: thioredoxin h
  misc_feature: Homolog of GI Number: 2995380 NR Desc: thioredoxin H
  misc_feature: Homolog of GI Number: 32186042 NR Desc: thioredoxin h isoform 2
  misc_feature: Homolog of GI Number: 50932277 NR Desc: putative thioredoxin H
  misc_feature: Homolog of GI Number: 12082335 NR Desc: thioredoxin h
  misc_feature: Homolog of GI Number: 66841002 NR Desc: thioredoxin h1 protein
  misc_feature: Homolog of GI Number: 14532808 NR Desc: putative thioredoxin
  misc_feature: Homolog of GI Number: 1388084 NR Desc: thioredoxin h
  misc_feature: Homolog of GI Number: 27466894 NR Desc: thioredoxin h
  misc_feature: Homolog of GI Number: 1403711 NR Desc: thioredoxin
MAASAATATATAAAVGAGEVISVHSLEQWTMQIEEANAAKKLVVIDFTASWCGPCRIMAPIFADLAKKFPAAVFLKVDVDELKPIAEQFSVEAMPTFLFMKEGDVKDRVVGAIKEELTTKVGLHAAQ

SEQ ID NO: 2485 - DNA, 560 bp, Triticum aestivum
  misc_feature: Ceres CLONE ID no. 632604
  misc_feature: Ceres CDNA ID no. 36526821
  CDS (94)..(252): REFERENCED BY SEQ ID NO: 2486
cccaagttcagtagtactcgcatagccttcttcccaccgagcagcccctcacgaaccctagcttgctataaaccctactccttcccttccccgatggatccgcaacagccggagcctgtcagctatctgtgcggagattgcggagctgagaacacactcaagacaggggatgtgatccagtgccgtgaatgtggttaccgcatcctgtacaagaagcgcacccgtcggattgttcaatatgaagctcgctgaagacaaggaacaaacatcattcactgttaagtgtgtgccctgagacaaagctactacaatggagaaatgtattaggcagtactcgctcgtaggtagtaatctttccattggactttggcttgaagtggtaaaaacttgtcaaacgtgtattgagattttagacatttgaggattgagattatgcatctttgaaagctggattttaaaaaatggttattattgctgtcgccaggaataaagtgccctgttggttgcacgcaggctctggctgttatttgctgcctgtatcgttaaaaaaaaaaaaaaaa

SEQ ID NO: 2486 - protein, 52 aa, Triticum aestivum
  misc_feature: Ceres CLONE ID no. 632604
  misc_feature: Ceres CDNA ID no. 36526821
  misc_feature (11)..(42): Pfam Name: DNA_RNApol_7kD PFAM Desc: DNA directed RNA polymerase
  misc_feature: Homolog of GI Number: 19112480 NR Desc: DNA
  misc_feature: Homolog of GI Number: 4826924 NR Desc: DNA directed RNA polymerase II polypeptide K
  misc_feature: Homolog of GI Number: 20306771 NR Desc: Polymerase
  misc_feature: Homolog of GI Number: 8248885 NR Desc: metallothionein
  misc_feature: Homolog of GI Number: 2529427 NR Desc: Rpc10
  misc_feature: Homolog of GI Number: 62641997 NR Desc:  similar to DNA (ABC10-alpha) (RPB7.0) (RPB10alpha) (RPABC4)
  misc_feature: Homolog of GI Number: 76673725 NR Desc:  similar to sperm associated antigen 1
  misc_feature: Homolog of GI Number: 25396103 NR Desc: protein F23B2.4
MDPQQPEPVSYLCGDCGAENTLKTGDVIQCRECGYRILYKKRTRRIVQYEAR

SEQ ID NO: 2487 - DNA, 616 bp, Triticum aestivum
  misc_feature: Ceres CLONE ID no. 632613
  misc_feature: Ceres CDNA ID no. 40351126
  CDS (129)..(407): REFERENCED BY SEQ ID NO: 2488
ctcaaaaccctaggcttccatatataacttgactctccacaattccctgtctccgccgccgcagctttcgtctcccggatttcgccgccgcagccgctcaccgcccacgcctcctacccgtcgacgagatgacgaagcgcaccaagaaggctggtattgtcggcaaatatggtacccgttatggtgccagtttgcgtaagcagatcaagaagatggaggtgtctcagcactccaagtacttctgtgagttctgtgggaagtttgctgtgaagaggaaagcagttggaatttggggatgcaaggactgtgggaaggtgaaggctggcggtgcttacactatgaacactgccagtgcggtcactgtcaggagcactatccgtcgtttgagggagcagactgaagcataagttgctactagtgttttgtcctagtgaatcatctgggatttcgcagtttagacgatactttggattcagttccattggctgtttagtcaaggattatctttgtacttggtgcgatgatgttctgttatgttattctcccacccttttgttgcctgattccactctgatttactgtggattctgatttgccttcaaaaaaaaaaaaaaaa

SEQ ID NO: 2488 - protein, 92 aa, Triticum aestivum; identical to SEQ ID NO: 294
  misc_feature: Ceres CLONE ID no. 632613
  misc_feature: Ceres CDNA ID no. 40351126
  misc_feature: null
  misc_feature: Useful for making plants with modulated cold sensitivity
  misc_feature (2)..(91): Pfam Name: Ribosomal_L37ae PFAM Desc: Ribosomal L37ae protein family

SEQ ID NO: 2489 - DNA, 995 bp, Triticum aestivum
  misc_feature: Ceres CLONE ID no. 632690
  misc_feature: Ceres CDNA ID no. 40351127
  CDS (330)..(719): REFERENCED BY SEQ ID NO: 2490
ctctccactcccgcaacccgctgctcctctcctggtgcgccgctcgacctcctcctttctcccactcaggtgcgccgccggccggccctcttcctctctccctccctctcaggatacaagtggaacaaggcatgggtgtaggtgctactcaggcgaagcacaccctcctctcctaaggaaatcatcgagcgagcaaggcccacttctaatgctcgttgcgtcctccccgattcccacccgtctcttcttcatagcgagcaccggtggcggctggtagagaggcgagccgagaggtgcagcgggctacaagtggagagatcaagcgagcgatgggccggaggatcctcaacgacgcgctgcgcacgatggtgaacgcggagcggcgggggaaggctacggcgcaactccagcccatctccggcgtcatgatctcgttcctcaatatcatgaagcaccgaggttacataaaaaatttcgacgtattcgatccacatagggttggaaaaatcaccgtggaacttcagggaaggattaaagattgcaaagctctcacttacaggcaggacctcagagccacggaaatagaaaaatacagaactaggatgcttccaacacggcagtggggctatgttgtggtgaccaccccaaatggcgttttagatcacgaggaagcaattaggcagaatgtgggcggccaggtcctcggttacttccattgaggaggaaacacagttatcccatgccgaatcagccctgggctgcattgtttatctttctgttatgactgaggtcattttatttggacatttagagcttgctgcttttgttcatggccaacagaaaatgggattacatgtcaaaagtagtatgtctggcgacactgacataaatattgtaatccttctttgggacagatatttctgtaggcgtaatacacccatgtactttgagatacacgagtaacattctagttcgagctaaaaaaaaaaaaaaaa

SEQ ID NO: 2490 - protein, 129 aa, Triticum aestivum
  misc_feature: Ceres CLONE ID no. 632690
  misc_feature: Ceres CDNA ID no. 40351127
  misc_feature (6)..(129): Pfam Name: Ribosomal_S8 PFAM Desc: Ribosomal protein S8
MGRRILNDALRTMVNAERRGKATAQLQPISGVMISFLNIMKHRGYIKNFDVFDPHRVGKITVELQGRIKDCKALTYRQDLRATEIEKYRTRMLPTRQWGYVVVTTPNGVLDHEEAIRQNVGGQVLGYFH

SEQ ID NO: 2491 - DNA, 525 bp, Triticum aestivum
  misc_feature: Ceres CLONE ID no. 632746
  misc_feature: Ceres CDNA ID no. 15173753
  CDS (107)..(305): REFERENCED BY SEQ ID NO: 2492
cgaaaactgaattatttcctccctctccgcgccgccgcctccgtctgttgtagcagaagcagcttgcgccgccgcctccgtcgtctcagaagcagccggagaaagcatggatacgcaggtgaagctcgcggtggtggtcaaggtgatgggccgcaccgggtcgaggggtcaggtgacccaggtgagagtcaagttcctggatgaccagaaccgtctcatcatgaggaacgtcaagggccctgttcgtgagggcgacatcctcaccctgctcgagtctgagcgggaggctaggaggctgcgctaagaaatttcttcctttatacctgtctgtcttgggaagaagaatgctgtactgttgccttcttagtctactgctttccttctttgcctagctatgtggaggtgtaatgagttttgttctgttgcctaaattaaagtgcacttgatgttgtgagacttgatcatttttgcgcacctcttggtaatgtgaatcgtgaatcgtctatactaaaaaaaaaaaaaaaa

SEQ ID NO: 2492 - protein, 65 aa, Triticum aestivum; identical to SEQ ID NO: 54
  misc_feature: Ceres CLONE ID no. 632746
  misc_feature: Ceres CDNA ID no. 15173753
  misc_feature (1)..(65): Pfam Name: Ribosomal_S28e PFAM Desc: Ribosomal protein S28e

SEQ ID NO: 2493 - DNA, 1077 bp, Triticum aestivum
  misc_feature: Ceres CLONE ID no. 632801
  misc_feature: Ceres CDNA ID no. 36582392
  CDS (83)..(925): REFERENCED BY SEQ ID NO: 2494
cattactcgggcgatcggcgatcggtagtgcacttgccgtagctgtatattgatagcgggctgattgaggtagctgcctgccatgtctggaaaatcgcttgcagtggcgccgcggtctgacccggacaacggggcggagcggcagccgtcgtcggcgatgctcgggggcgtcatgggctcgctccgcgtcatcgagctccagctcgtcgccttcatcatggtcttctcgatgtcaggcctcgtcccgctcatcgacctcgccttcccggtcgtcaccactctctacctcctcgccctctcccgcctcgccttcccttcgctccacagcaaggtcgacgacgaggccgccgccgtccactccgccgcgtcccaggagatcttccgcggaagcaagctgtttcaggtgtacgtggtgatgggcaccacggtggggctgttcctgccgctggcgcacgtcctgggtgggttcgcgcgcggcgacgatgccgccgtgcgctccgcgacgccgcacctgttcctgctctcctgccagatcctcacggagaacatcgtcggctcgctcggcgtcttctcgccgccgctgagggcgctggtgccgcttctctacaccgtgcgccgcgtcttcgtcatcgtcgactgggtctatgacgtgtggaccaacaagctcatcacccgcaccgcccccgttcaggataaggcctgggtgtggttcggcaggtacctcgcggtggcgaacctggtctacttctccatcaacctgttcgtcttcctgatccccaagttcctcccccgcgcgttcgagaagtacttccacacgcgcaacgaggtgtacgccaagacggcggaggacaagcgggcaagggatctatcctcgctcgatgatgacagtgcgccaaaatcggaggtctgcaagaaggccgactgagatcgatgatcgtgttcgttgcgcggcgtttgagctgcgctcgtagtgtgctctctagcttcaactttgcttacctgtatgtggaccggtgtttgtacatttgggtcttcgcttctcaattctgaaattccgtgtcaaaaaaaaaaaaaaaa

SEQ ID NO: 2494 - protein, 280 aa, Triticum aestivum
  misc_feature: Ceres CLONE ID no. 632801
  misc_feature: Ceres CDNA ID no. 36582392
  misc_feature: Homolog of GI Number: 50923831 NR Desc: OSJNBa0044M19.10
  misc_feature: Homolog of GI Number: 19699160 NR Desc: AT5g52420/K24M7_17
  misc_feature: Homolog of GI Number: 67987177 NR Desc: 4Fe
  misc_feature: Homolog of GI Number: 11359723 NR Desc: proteophosphoglycan
  misc_feature: Homolog of GI Number: 72547018 NR Desc: proteophosphoglycan ppg3
  misc_feature: Homolog of GI Number: 72547036 NR Desc: proteophosphoglycan 5
  misc_feature: Homolog of GI Number: 34809533 NR Desc: Epa5p
  misc_feature: Homolog of GI Number: 72547041 NR Desc: proteophosphoglycan ppg1
  misc_feature: Homolog of GI Number: 72547023 NR Desc: proteophosphoglycan ppg4
MSGKSLAVAPRSDPDNGAERQPSSAMLGGVMGSLRVIELQLVAFIMVFSMSGLVPLIDLAFPVVTTLYLLALSRLAFPSLHSKVDDEAAAVHSAASQEIFRGSKLFQVYVVMGTTVGLFLPLAHVLGGFARGDDAAVRSATPHLFLLSCQILTENIVGSLGVFSPPLRALVPLLYTVRRVFVIVDWVYDVWTNKLITRTAPVQDKAWVWFGRYLAVANLVYFSINLFVFLIPKFLPRAFEKYFHTRNEVYAKTAEDKRARDLSSLDDDSAPKSEVCKKAD

SEQ ID NO: 2495 - DNA, 1068 bp, Triticum aestivum
  misc_feature: Ceres CLONE ID no. 633583
  misc_feature: Ceres CDNA ID no. 36582769
  CDS (87)..(926): REFERENCED BY SEQ ID NO: 2496
attcatcacagcgagcaagcgcaagcagcagcagcaagtcaaccgtctaggctcctccagctagctcgctccggcagcggcaagcaatggcgcccagcttcggccgctccatctctttcccgctcagcccggcgcgcgcctccagggcccgcgccgcggcctaccacgtccgctccgtctccctcccctgccactcccacccgctcctctcccacctcgccacccacatctccgccgtccgcgcctggatcgccgcccccagcgcgccctccacgggcctcgcccgcctcgacgcgctccacgccgcgctcgccgagctcctgctcctccccgaggcccgcgccgcgttagagagcgggtccaacaccgccgactgcctcctcgacggcttcctgaacctcgccgacgcccacggcgcgttccaggagtcgctcctcgagctccgcgcccacgccgccgaggcgcaggccgcgctccggcgccgcgacgacaacaggctgtcatccgcagtccggtccctccgccgcgccgagaaggagctggcccgcctggccgcctccgtgcgcgtggcggccaagttccccacgccgtccgcgtccaccagcgccgcggaggtggaggtgtccggggtgctcgccgaggccgtggccaccgccgcgtgcgcgtctgccgccgtgttctcctccgtcgaggccgtgtccgccgccgccacctccaagaagaccaccgcggcgtcctcgctcagggccctcgtcatgcgggccaaggccgcctccgaggaggacaaggaggtggccgccctggagaggctggaggaggtcgaggcgtgcgccgccgacatcgagaccggcagcgacaaggtgttccggagcatcctgcacaccagggtcgcgctcctcaacatccagacccagacctactgctgatccaactcaatgccctagctagtgtagtagcgtagtctagtctttttttggaggatcattctgatcctgtccaaaccctcaagtgtacatacaccaatcgatcaacggattaatgcaaagcaaagcaaaaaaaaaaaaaaaa

SEQ ID NO: 2496 - protein, 279 aa, Triticum aestivum
  misc_feature: Ceres CLONE ID no. 633583
  misc_feature: Ceres CDNA ID no. 36582769
  misc_feature: Homolog of GI Number: 50927945 NR Desc: OSJNBa0084K11.22
  misc_feature: Homolog of GI Number: 12018147 NR Desc: vegetative cell wall protein gp1
  misc_feature: Homolog of GI Number: 6573720 NR Desc: T23E18.17
  misc_feature: Homolog of GI Number: 6523547 NR Desc: hydroxyproline
  misc_feature: Homolog of GI Number: 67987177 NR Desc: 4Fe
  misc_feature: Homolog of GI Number: 60678627 NR Desc: plus agglutinin
  misc_feature: Homolog of GI Number: 14253159 NR Desc: VMP3 protein
MAPSFGRSISFPLSPARASRARAAAYHVRSVSLPCHSHPLLSHLATHISAVRAWIAAPSAPSTGLARLDALHAALAELLLLPEARAALESGSNTADCLLDGFLNLADAHGAFQESLLELRAHAAEAQAALRRRDDNRLSSAVRSLRRAEKELARLAASVRVAAKFPTPSASTSAAEVEVSGVLAEAVATAACASAAVFSSVEAVSAAATSKKTTAASSLRALVMRAKAASEEDKEVAALERLEEVEACAADIETGSDKVFRSILHTRVALLNIQTQTYC

SEQ ID NO: 2497 - DNA, 875 bp, Triticum aestivum
  misc_feature: Ceres CLONE ID no. 633783
  misc_feature: Ceres CDNA ID no. 35383236
  CDS (98)..(661): REFERENCED BY SEQ ID NO: 2498
atccacctctcgagctccttctcgaaatctcaagcgagcacaccgcgcaagtagcagcgtcagtttcagtttcagagctccgcttccgttagccgccatgcctgccctcgccaagcccgctgcccgcccggccaagcccgccgccgcggcgccgaagccgaagcccgccgccgccaagcccaaggcggccgccgctggagccgcccacccgacctacttcgagatgatcaaggaggcgatcgcggcgctcaaggacaggactgggtcgagctcggtcgccatcgccaagtacatcgaggagaagcacggcaaggctctcccggccaacttcaagaagatgctctccgtccagctccgctcctccgccgccaagggcaagctcgtcaaggtcaaggcctcctacaagctctccgacgccgccaagaaggactcccccaaggctaagcccgcggccaagcccgccaaagacgccgccaaggccaagaagacggtggccgcgaagcccaagaagaccgccgccgctggcaccaagcgcaaggcgcccgagaagaagaagctggtcaccaaggccaagaagtcgccggcggccaaggccaaggcgaagccgaagaccgtccgctccccggccgccaagaaggcacgcaaggtcgccgccgcctgatctgatcctatccgatatctggtcttaggagtgcttggtgttcaaggggctgtacaaaaggatgcctcatcctcccttgtttaggtttcggttctgctaggcaagtttatgtatcgtgggtggtgtttagtgtaatgtaatggttgctttagagatgttttcagctctaactctgtgaaatgaatctgcagtttctccaaaaaaaaaaaaaaaa

SEQ ID NO: 2498 - protein, 187 aa, Triticum aestivum
  misc_feature: Ceres CLONE ID no. 633783
  misc_feature: Ceres CDNA ID no. 35383236
  misc_feature (36)..(106): Pfam Name: Linker_histone PFAM Desc: linker histone H1 and H5 family
  misc_feature: Homolog of GI Number: 22135471 NR Desc: histone H1
  misc_feature: Homolog of GI Number: 50921921 NR Desc: OSJNBb0018J12.6
  misc_feature: Homolog of GI Number: 5230790 NR Desc: histone H1 WH1A.4
  misc_feature: Homolog of GI Number: 14916992 NR Desc: Histone H1
  misc_feature: Homolog of GI Number: 5230783 NR Desc: histone H1 WH1A.2
  misc_feature: Homolog of GI Number: 11558848 NR Desc: histone H1
  misc_feature: Homolog of GI Number: 5230788 NR Desc: histone H1 WH1A.3
  misc_feature: Homolog of GI Number: 5230785 NR Desc: histone H1 WH1B.1
  misc_feature: Homolog of GI Number: 5230781 NR Desc: histone H1 WH1A.1
  misc_feature: Homolog of GI Number: 5726575 NR Desc: histone H1C
MPALAKPAARPAKPAAAAPKPKPAAAKPKAAAAGAAHPTYFEMIKEAIAALKDRTGSSSVAIAKYIEEKHGKALPANFKKMLSVQLRSSAAKGKLVKVKASYKLSDAAKKDSPKAKPAAKPAKDAAKAKKTVAAKPKKTAAAGTKRKAPEKKKLVTKAKKSPAAKAKAKPKTVRSPAAKKARKVAAA

SEQ ID NO: 2499 - DNA, 512 bp, Triticum aestivum
  misc_feature: Ceres CLONE ID no. 633950
  misc_feature: Ceres CDNA ID no. 36707663
  CDS (96)..(407): REFERENCED BY SEQ ID NO: 2500
aatccaattcggctccaccccctcccagcgagaaatccccaattccttcgtcttcttcctcgcgagacgcacacagcagagcagagagcgagaagatgtccgggcgcggcaagggcggcaaggggctgggcaagggcggggcgaagcggcacaggaaggtgctgcgggacaacatccaggggatcaccaagccggcgatccggcggctagcgcggaggggcggggtgaagcgcatctccgggctcatctacgaggagactcgcggcgtgctcaagatcttcctcgagaacgtcatccgcgacgcagtcacctacaccgagcacgcgcgccgcaagaccgtcaccgccatggacgtcgtgtacgcgctcaagcgccagggccgcaccctgtacggcttcggcggttaggcgatagctagctaggcttcaatgtgtctatcaggtcgctggtctgcgaatgcttgtgcctgtggtttgatttaatgcttgttatgatgaaaaaaaaaaaaaaaa

SEQ ID NO: 2500 - protein, 103 aa, Triticum aestivum; identical to SEQ ID NO: 8
  misc_feature: Ceres CLONE ID no. 633950
  misc_feature: Ceres CDNA ID no. 36707663
  misc_feature (66)..(92): Pfam Name: TAF PFAM Desc: TATA box binding protein associated factor
  misc_feature: Homolog of GI Number: 57106967 NR Desc:  similar to germinal histone H4 gene
  misc_feature: Homolog of GI Number: 74004228 NR Desc:  similar to germinal histone H4 gene
  misc_feature: Homolog of GI Number: 62648434 NR Desc:  similar to germinal histone H4 gene
  misc_feature: Homolog of GI Number: 55667113 NR Desc:  similar to germinal histone H4 gene
  misc_feature: Homolog of GI Number: 62663604 NR Desc:  similar to Histone H2B 291B
  misc_feature: Homolog of GI Number: 74004178 NR Desc:  similar to germinal histone H4 gene
  misc_feature: Homolog of GI Number: 68441405 NR Desc:  similar to histone H2A
  misc_feature: Homolog of GI Number: 74004215 NR Desc:  similar to germinal histone H4 gene
  misc_feature: Homolog of GI Number: 50911547 NR Desc: histone H4
  misc_feature: Homolog of GI Number: 55626038 NR Desc:  similar to HIST2H3C protein

SEQ ID NO: 2501 - DNA, 911 bp, Triticum aestivum
  misc_feature: Ceres CLONE ID no. 633988
  misc_feature: Ceres CDNA ID no. 25400980
  CDS (103)..(693): REFERENCED BY SEQ ID NO: 2502
atcacctcgtcccatcccgccggcgaaggctccccaccacccaaccctagatccatacagtcgttagattagatccgagcggcggcggccgcggcgtggaagatggtgtgcatccggcaggcgacgatcgacgacctgctggcgatgcaggcgtgcaacctgatgtgcctgccggagaactaccagatgaagtactacttctaccacatgctttcgtggccgcagctcctgttcgtcgccgaggactacggcggccgcatcgtcggctacgtgctggccaagatggaggaggacccctcggagccctgccacggccacatcacctcgctcgccgtgctccgctcccaccgcaagctcggcctcgccaccaagcttatgtcggccgcgcaggccgccatggaccaggtcttcggcgccgagtacgtgtcgctccacgtccgccgctccaaccgcgccgccttcaacctctacacctccaccctcggctaccagatccacgacatcgaggccaagtactacgccgacggcgaggacgcctacgacatgcgcaagatgctgcgccagcccgtccccaagaagcaccaccaccaccaccacgccggcggcggctgctgctcccacgacgcccctgctgccgccgcggccggctcgtcctcgacctccgcttcgccggagaagaaggccgattcatgagagaaagccatttcaagcgcaaggagctgctgaacctactggatgatatgaagcagatggtgctctacttctgtatcatgattgtagccttgtaccaatgatacagagggaacattgtactgtgatctgtaggcttgcctggtcatattggctagagtccttgtaattcttgtgagattaatgacatgcacatattttaactaaaaaaaaaaaaaaaa

SEQ ID NO: 2502 - protein, 196 aa, Triticum aestivum
  misc_feature: Ceres CLONE ID no. 633988
  misc_feature: Ceres CDNA ID no. 25400980
  misc_feature (45)..(130): Pfam Name: Acetyltransf_1 PFAM Desc: Acetyltransferase
  misc_feature: Homolog of GI Number: 14550116 NR Desc: silencing group B protein
  misc_feature: Homolog of GI Number: 50929007 NR Desc: OSJNBa0043L09.27
  misc_feature: Homolog of GI Number: 38080410 NR Desc: similar to DNA segment
  misc_feature: Homolog of GI Number: 10835057 NR Desc: N
  misc_feature: Homolog of GI Number: 34881754 NR Desc: similar to ARD
  misc_feature: Homolog of GI Number: 74008789 NR Desc:  similar to N
  misc_feature: Homolog of GI Number: 28422354 NR Desc: Ard1
  misc_feature: Homolog of GI Number: 62664674 NR Desc:  similar to DNA segment
  misc_feature: Homolog of GI Number: 51261910 NR Desc: MGC79564 protein
  misc_feature: Homolog of GI Number: 47086985 NR Desc: zgc:63981
MVCIRQATIDDLLAMQACNLMCLPENYQMKYYFYHMLSWPQLLFVAEDYGGRIVGYVLAKMEEDPSEPCHGHITSLAVLRSHRKLGLATKLMSAAQAAMDQVFGAEYVSLHVRRSNRAAFNLYTSTLGYQIHDIEAKYYADGEDAYDMRKMLRQPVPKKHHHHHHAGGGCCSHDAPAAAAAGSSSTSASPEKKADS

SEQ ID NO: 2503 - DNA, 651 bp, Triticum aestivum
  misc_feature: Ceres CLONE ID no. 634090
  misc_feature: Ceres CDNA ID no. 35383237
  CDS (3)..(419): REFERENCED BY SEQ ID NO: 2504
gtgttggagatcgagagaaggaaaccctagccgccgccgtccagatctgcttgggttggtggaggtatggctacggcgctgcgcaccatggccgcgaagctgatgcagaagatccccgccgctgtccagcgggttcgcgtctcttctcgtgctccggcaccggcttttgccgacctcgaccccttcggcccagagtttcgccgggcactggagaagattgtagagaaacacaggaagaggcgcaggaacgaggccttggcctgtggtgctggcttcagtcttggagcactcacctttttgcttggggtccatcggcttcgttgaagggagatggctcaatggtgaatgactggaatatctatcctgcaccgcatgttctactatctactactgtgcccgcaagttctactatctactagtgctatatcctgcaccccatatgttctgctatctaccagtactatatcctgtatgtttaactagccggtgtactctataattcctggcttgtgtctacctatctagtagccactgtggggatctaatttcggtggttgcatgtgggatgtaagagcactctatcgccactcttatctgttgttatcagagatctatattcagccgtgttgttaatcaaaaaaaaaaaaaaaa

SEQ ID NO: 2504 - protein, 85 aa, Triticum aestivum
  misc_feature: Ceres CLONE ID no. 634090
  misc_feature: Ceres CDNA ID no. 35383237
MATALRTMAAKLMQKIPAAVQRVRVSSRAPAPAFADLDPFGPEFRRALEKIVEKHRKRRRNEALACGAGFSLGALTFLLGVHRLR

SEQ ID NO: 2505 - DNA, 621 bp, Triticum aestivum
  misc_feature: Ceres CLONE ID no. 634104
  misc_feature: Ceres CDNA ID no. 36517658
  CDS (2)..(430): REFERENCED BY SEQ ID NO: 2506
gatgaagaccgaatccccgcgtcatcttcgtaaccctctgctcgtcctcctcttcctcgcagcagcagcagcagcgtcggcagcccccgtcgtccagatcgccatggcggccgagccggagcaggcgcccgcggcgcaggaggcggccgtgcacatcgtctacgtggaccgccccgaggacgccgaccccgaggagttccacatccgcacccttgcccccgtcctcggcagcgaggagaaggccaggggcgcggtcctctaccactacaagcacgccgccagcggattctccgcaaagctcaccaccgagcaggtcgaggacctcaagaagcaaccaggtgtccttcaggttgtgccgagccagacctaccagctccatggaaatgagggtggacatgccagcacaacccgcaccatgggccttatgtgaaagccccgggtaggctctgttcttctaatgtgggaatggtcgcatctcatggctgtaacctaagaataagagatgtatccacttgactttgaagggatccagttcctgaagtgtgtaaatgtaatgaattaatgcatgatggcgaacaaatgtgctgatctaatctcgtttggttaaaaaaaaaaaaaaaa

SEQ ID NO: 2506 - protein, 108 aa, Triticum aestivum
  misc_feature: Ceres CLONE ID no. 634104
  misc_feature: Ceres CDNA ID no. 36517658
  misc_feature (15)..(92): Pfam Name: Subtilisin_N PFAM Desc: Subtilisin N
  misc_feature: Homolog of GI Number: 7489176 NR Desc: pit2 protein
  misc_feature: Homolog of GI Number: 3204125 NR Desc: putative Pi starvation
  misc_feature: Homolog of GI Number: 50919997 NR Desc: putative Pi starvation induced protein
  misc_feature: Homolog of GI Number: 34910838 NR Desc: P0456A01.27
  misc_feature: Homolog of GI Number: 12323571 NR Desc: subtilisin
  misc_feature: Homolog of GI Number: 4115919 NR Desc: similar to the subtilase family of serine proteases
  misc_feature: Homolog of GI Number: 4539414 NR Desc: putative subtilisin
  misc_feature: Homolog of GI Number: 18416719 NR Desc: subtilase family protein
  misc_feature: Homolog of GI Number: 4115920 NR Desc: similar to the subtilase family of serine proteases
MAAEPEQAPAAQEAAVHIVYVDRPEDADPEEFHIRTLAPVLGSEEKARGAVLYHYKHAASGFSAKLTTEQVEDLKKQPGVLQVVPSQTYQLHGNEGGHASTTRTMGLM

SEQ ID NO: 2507 - DNA, 1092 bp, Triticum aestivum
  misc_feature: Ceres CLONE ID no. 634176
  misc_feature: Ceres CDNA ID no. 29191715
  CDS (116)..(784): REFERENCED BY SEQ ID NO: 2508
ctggacccaaggtcaggtcagatcagatcagctcaggccgcctccgcttcccgactccagttccaatttcgattcccaccacgcccgcccctcgggaccgaggaggaggaggaggatggcgatcgtgtacgcgctcgtggcgcggggcacggtcgtgctggccgagttcgccgccgtctcgggcaacgccggcgccgtcgcccgtcgcatcctcgagaagctcccctccgaggccgaggcgcgcctctgcttcgcgcaggaccgctacatcttccacgtcctccgctcccccgccgacggcctcaccttcctctgcatggccaacgacaccttcggacggagagttcccttcatttatctcgaggacatccagatgaggttcatgaagaactatggcagggtcgcccattccgcgctggcctatgccatgaacgacgagtttgccagggtgctccaccagcaaatggagttcttctccagtaaccccagcgccgacacgctcaaccgcctccggggcgaagtcagcgagatacacaccgtcatggttgacaacatagagaagattcttgacagaggcgaccgcatctcgcttcttgtagacaagacctccacaatgcaggatagtggctttcacttccgcaagcaatccaagaggcttcggagagctctctggatgaagaatgtcaagcttctagcggtgttgacagcggtcattgtgctgctactttacctgatcattgcggctttctgcggaggcctatcccttccatcgtgcagatcataaaacagtagctcgacaccatacatgatgttccaagttcggctcagcttccagagcgaaagccttatgttttggtcaacagattcaaagttgagttctcgggtagattgtttttgcttatacaagtcgatatgaaatgtttgtacaaaaaccgggtctgtgtgtacagtatgaaatgtcgtttgtgcttctttgggtatgttgtggcactagttaagagttgctcggtgcactggttaatcgaaattattactgatgtatagtacctccctttctggaaaagatgtgaacactgaaaaaaaaaaaaaaaa

SEQ ID NO: 2508 - protein, 222 aa, Triticum aestivum
  misc_feature: Ceres CLONE ID no. 634176
  misc_feature: Ceres CDNA ID no. 29191715
  misc_feature (126)..(213): Pfam Name: Synaptobrevin PFAM Desc: Synaptobrevin
  misc_feature: Homolog of GI Number: 78707797 NR Desc: Synaptobrevin
  misc_feature: Homolog of GI Number: 31430244 NR Desc: putative synaptobrevin
  misc_feature: Homolog of GI Number: 9757817 NR Desc: synaptobrevin
  misc_feature: Homolog of GI Number: 21593706 NR Desc: synaptobrevin
  misc_feature: Homolog of GI Number: 34898442 NR Desc: ESTs AU082579
  misc_feature: Homolog of GI Number: 4567243 NR Desc: putative synaptobrevin
  misc_feature: Homolog of GI Number: 78707798 NR Desc: Synaptobrevin
  misc_feature: Homolog of GI Number: 51090589 NR Desc: putative synaptobrevin 1
  misc_feature: Homolog of GI Number: 21436025 NR Desc: AT5g22360/MWD9_16
  misc_feature: Homolog of GI Number: 50415577 NR Desc: Sybl1
MAIVYALVARGTVVLAEFAAVSGNAGAVARRILEKLPSEAEARLCFAQDRYIFHVLRSPADGLTFLCMANDTFGRRVPFIYLEDIQMRFMKNYGRVAHSALAYAMNDEFARVLHQQMEFFSSNPSADTLNRLRGEVSEIHTVMVDNIEKILDRGDRISLLVDKTSTMQDSGFHFRKQSKRLRRALWMKNVKLLAVLTAVIVLLLYLIIAAFCGGLSLPSCRS

SEQ ID NO: 2509 - DNA, 1260 bp, Triticum aestivum
  misc_feature: Ceres CLONE ID no. 634320
  misc_feature: Ceres CDNA ID no. 40351129
  CDS (120)..(1097): REFERENCED BY SEQ ID NO: 2510
acgttagcgagaggtaaaaatccgactgcccaggggacgaaccggaacaagggttccgggcccgtctcttcttcgtttcgtttccatccacagctcgtcctccccccaaaccttaccccatgtccgacggcggcggcgagcccggggccggcggctcggcgccggtgtgcaacttcgttcagaagccgccgaagaatattcggaagcgtcccgccgcctccgtcggctctgatgacgaagaaggtagcggcggcgacgattccggggccatcgcggcggcgcgatctaagaagccgccgcctactaccagcaagctcttcttctcctccgccgacaactcacacgagccccgccgtttccagttcgagtcgtcccggactattcagtcctctaccgacaaccgcgccactgcgacgcttgagacggagacggcgtacgaccgtgatgcgcgcgccatccgcgagcgacagctcaagcaggctgaggaatccctcaagaagaacccctctgcctcctcctcctccggggagctctacaaggggatccacggctacacggatcacaaggccggcttccggcgggagcacacggtttccggagagaaggccggcggcgctcacggccccctgcgggcgtcagcgcacatacgcctctccacgcggttcgactaccaacccgacatctgcaaggattataaggagaccggctattgtggctatggcgattcctgcaagttcatgcacgacagaggtgactacaagtccggatggcagctcgagagggagtgggacgaggccgagaaagcccgcaaacggcgcatagcgatgcgtgagttgggtggtagtgatggcgaggcagaggaggaagacagcgacgacgaggaggcactgccctttgcctgcttcatatgcagggagccctttgttgacccggtggtcacaaagtgtaagcattatttctgcgagcattgcgcattaaagcatcactcgaagaacaagaagtgctttgtctgcaataaaccgacgcttggcatcttcaatgcagcgcaggagatccggaagaagattgcccaggacaagaagcagcaggacctttgatgactgctgcacaatgtagcttgtatcatggaggattacttctcttctgtaattgtattgtttgaaaatgagggggaaatgtccaggaatcagttttgtttctttagctctgtactagctcctacttaccattagccattttgccgcaaaaaaaaaaaaaaaa

SEQ ID NO: 2510 - protein, 325 aa, Triticum aestivum
  misc_feature: Ceres CLONE ID no. 634320
  misc_feature: Ceres CDNA ID no. 40351129
  misc_feature (184)..(210): Pfam Name: zf PFAM Desc: Zinc finger C
  misc_feature (261)..(298): Pfam Name: zf PFAM Desc: Zinc finger
MSDGGGEPGAGGSAPVCNFVQKPPKNIRKRPAASVGSDDEEGSGGDDSGAIAAARSKKPPPTTSKLFFSSADNSHEPRRFQFESSRTIQSSTDNRATATLETETAYDRDARAIRERQLKQAEESLKKNPSASSSSGELYKGIHGYTDHKAGFRREHTVSGEKAGGAHGPLRASAHIRLSTRFDYQPDICKDYKETGYCGYGDSCKFMHDRGDYKSGWQLEREWDEAEKARKRRIAMRELGGSDGEAEEEDSDDEEALPFACFICREPFVDPVVTKCKHYFCEHCALKHHSKNKKCFVCNKPTLGIFNAAQEIRKKIAQDKKQQDL

SEQ ID NO: 2511 - DNA, 985 bp, Triticum aestivum
  misc_feature: Ceres CLONE ID no. 634353
  misc_feature: Ceres CDNA ID no. 25892042
  CDS (104)..(508): REFERENCED BY SEQ ID NO: 2512
actcttccccttctctcagatccgaaaactcggggagactggtagttggctgttcggatcggtccatccatctcagtggcagtctggtaattggggacgaggtatgggcctcctcgacaagttgtgggacgacaccgtcgcggggccccaaccggacaccggcctcggccgcctccgcaaactcgccgcccgccccgccgccgtcaagatcaacgatgtggctccgggcgccgcgacggtgatcccacatacgacgccggccggcggcgaggatgcgccgatgaaagtcacacgcagcatcatgattaagcggccggcggggtacccctcgtcgccgaggagcgcggccagcacgccgccagcctcgccgctaggatccacgccgcccatctccccgttcgcgggcggcggtggtcgcttcagaaggaaatcatcatcagatgcgtacgagagggctacaccacctggggcgtcgaccagtcaccctcctccaccctttgaagtgtaactgaccagcacgctcatgctcgtttttgctcctctcccgctctacttaatgcaagcccgaggaggaagagaggacgtatcagagaaatcgagaaacgccaaggatctgcctttcctctactgtgatagtataatatagatgaatgtgtagtgttctgtttctactatatatgcagtgcatgcgtgtatggttatgtgtagagaaggtgttgaaagttgctgctgctgtgctgtgctgtgttagtatgtacttaggtcacccctgggctggcacgcagctcctcgtttgtgttttgtctactatgttgtggaggcctcgtccttccatcacgttcgtgtgtggtgcggatggaagctgtaatgttaagtagggggatgagatacggtgtacgtaatatgtgtaattttgcttgatggtgttatctcgagtagttcccggtgtttgcttgaacttttcagtacaaaaaaaaaaaaaaaa

SEQ ID NO: 2512 - protein, 134 aa, Triticum aestivum
  misc_feature: Ceres CLONE ID no. 634353
  misc_feature: Ceres CDNA ID no. 25892042
  misc_feature (7)..(129): Pfam Name: Auxin_repressed PFAM Desc: Dormancy/auxin associated protein
  misc_feature: Homolog of GI Number: 2688824 NR Desc: putative auxin
  misc_feature: Homolog of GI Number: 76161010 NR Desc: Drm3
  misc_feature: Homolog of GI Number: 21592368 NR Desc: putative auxin
  misc_feature: Homolog of GI Number: 21553000 NR Desc: Drm4
  misc_feature: Homolog of GI Number: 21552998 NR Desc: Drm3
  misc_feature: Homolog of GI Number: 30696084 NR Desc: dormancy/auxin associated family protein
  misc_feature: Homolog of GI Number: 27802109 NR Desc: auxin
  misc_feature: Homolog of GI Number: 9795604 NR Desc: dormancy
  misc_feature: Homolog of GI Number: 30690358 NR Desc: dormancy
  misc_feature: Homolog of GI Number: 58700653 NR Desc: auxin
MGLLDKLWDDTVAGPQPDTGLGRLRKLAARPAAVKINDVAPGAATVIPHTTPAGGEDAPMKVTRSIMIKRPAGYPSSPRSAASTPPASPLGSTPPISPFAGGGGRFRRKSSSDAYERATPPGASTSHPPPPFEV

SEQ ID NO: 2513 - DNA, 1358 bp, Triticum aestivum
  misc_feature: Ceres CLONE ID no. 634382
  misc_feature: Ceres CDNA ID no. 24726631
  CDS (101)..(1060): REFERENCED BY SEQ ID NO: 2514
gacccccaacaacctccctcccccctcgtgcgcctctactaaaccgagtagtcggcaaggaggggcagcaggggagggagatctgactgacgaggcagggatgatggagagccagccgctgcaggccccgacggccgagccccacggcgccggagccgcggacgaccaggccggagccggagctccccccgccgtcgttcccgggaaggagttcacgcggacctgcaagggcctcgtcgtcgtgctcatcggcggctacgtgctgctgcaactcctcccatcctccctcaactacctcgccatcatccccgccaagacaattccctttgtatggaccgtcttcaccgccggttacatcgagcaagtcctcccaggggctattggcagttcccttggtcttctcttctgcgggaaggatattgagccagtctggggccgcaaggagttcttgaagttcattatcttgatcaactccatctgcggcatccttgcgttctgcattgctgttgcactgtactatgtcaccgggaaagagagcttccttgtaacgccactttctggcttccatggcgcccttgctggctttctggttggcctgaagcagctcttgccaaaccttgagctccccatgtgctttttctggaaaataaaggctaagtggatgccattctttgtcatgtgcttctcaactatcatggccttcattgtgccggattccatcaacttcctgccgactttgttgtctgggatgtacgtcagctggctttacctgagatacttccagaagaacccactgacaggacttaagggcgacccaagtgatgacttctccttccccagcttgttcccagatgccatgcggccagtcacagacccagttgctaatctgttcgaccggatgttgtgtgcgaggtctaagccttcagaaattgccctcccagttaccgatcctaccaaggcatcgagaagaagggagcgtggcgagagggttctcgaggaaaggatggccgcggatcatgcggctgacgccgaagccccagctcactctgcggaagattaagaattttcccctgtgctacgtcgtcatagtggccacggtcgccttgtaactcctcggatttgtgttctggggagcatattcatttttacagtggaccgatgatatgataatactttactgcccctcttttgtttccttgttttgagaatattggttggttaaattgtgttgtagttcctgattacagtgaggaaagaagaaaaagggtggcatccccttgcccccgatgttgtaatgtagaaaaagaatgacttgtcagtaacaatgtgaagtattttttccaaaaaaaaaaaaaaaa

SEQ ID NO: 2514 - protein, 318 aa, Triticum aestivum
  misc_feature: Ceres CLONE ID no. 634382
  misc_feature: Ceres CDNA ID no. 24726631
  misc_feature: Homolog of GI Number: 50939717 NR Desc: putative placental protein 6
  misc_feature: Homolog of GI Number: 66553451 NR Desc:  similar to ENSANGP00000018642
  misc_feature: Homolog of GI Number: 5902022 NR Desc: PL6 protein
  misc_feature: Homolog of GI Number: 66848772 NR Desc: rhomboid family protein
  misc_feature: Homolog of GI Number: 54645616 NR Desc: GA21862
  misc_feature: Homolog of GI Number: 55246394 NR Desc: ENSANGP00000018642
  misc_feature: Homolog of GI Number: 31197821 NR Desc: ENSANGP00000018642
  misc_feature: Homolog of GI Number: 45190528 NR Desc: AEL079Wp
  misc_feature: Useful for delaying flowering time
  misc_feature: Useful for making plants with increased biomass and foliage
MESQPLQAPTAEPHGAGAADDQAGAGAPPAVVPGKEFTRTCKGLVVVLIGGYVLLQLLPSSLNYLAIIPAKTIPFVWTVFTAGYIEQVLPGAIGSSLGLLFCGKDIEPVWGRKEFLKFIILINSICGILAFCIAVALYYVTGKESFLVTPLSGFHGALAGFLVGLKQLLPNLELPMCFFWKIKAKWMPFFVMCFSTIMAFIVPDSINFLPTLLSGMYVSWLYLRYFQKNPLTGLKGDPSDDFSFPSLFPDAMRPVTDPVANLFDRMLCARSKPSEIALPVTDPTKASRRRERGERVLEERMAADHAADAEAPAHSAED

SEQ ID NO: 2515 - DNA, 684 bp, Triticum aestivum
  misc_feature: Ceres CLONE ID no. 634469
  misc_feature: Ceres CDNA ID no. 29191545
  CDS (102)..(494): REFERENCED BY SEQ ID NO: 2516
ctctccccgccgtcgccttcctccctcgccctcgcctccccgccgccacccaacccaagcacagagctcccggcttctcccccctacgaggttaggcaaggatggtgagggttagcgtcctgaatgatgctctcaagagcatgtacaacgctgagaagcgtggcaagaggcaggtcatgatcaggccttcctcaaaggtgatcatcaagttcctcatcgtcatgcagaagcacggttacattggtgagtttgagtatgttgatgaccacagatctggcaagattgttgtggagttgaacggcagactgaacaagtgtggagtcatcagcccccgctttgatgttggtgtcaaggagatcgagggatggaccgccaggctgcttccatctcgtcagtttggttacatcgtcctgacaacctctgctggcatcatggatcacgaggaagccaggaggaagaacgttggtggcaaagtgctaggctttttctactgagcgggaattttgtgaaagttgtatttcagaccggtgtgataggatgttatctcaggacatcaaggttgtctactttttgcctgcatagctgctatgcctttgttatgttatgttggattcagttaattatgagatgcactttggtcttacctgcgatgaattatgactttgaggaaaaaaaaaaaaaaaa

SEQ ID NO: 2516 - protein, 130 aa, Triticum aestivum
  misc_feature: Ceres CLONE ID no. 634469
  misc_feature: Ceres CDNA ID no. 29191545
  misc_feature (5)..(130): Pfam Name: Ribosomal_S8 PFAM Desc: Ribosomal protein S8
  misc_feature: Homolog of GI Number: 23397065 NR Desc: putative cytoplasmic ribosomal protein S15a
  misc_feature: Homolog of GI Number: 17863 NR Desc: r
  misc_feature: Homolog of GI Number: 20259193 NR Desc: putative cytoplasmic ribosomal protein S15a
  misc_feature: Homolog of GI Number: 6683481 NR Desc: wrp15a
  misc_feature: Homolog of GI Number: 50908303 NR Desc: putative ribosomal protein S15
  misc_feature: Homolog of GI Number: 13560779 NR Desc: cytoplasmic ribosomal protein S15a
  misc_feature: Homolog of GI Number: 50935123 NR Desc: ribosomal protein S15
  misc_feature: Homolog of GI Number: 2130985 NR Desc: r
  misc_feature: Homolog of GI Number: 3355488 NR Desc: 40S ribosomal protein S15A
  misc_feature: Utility: Cold Growth Useful for making plants with increased tolerance to cold stress
MVRVSVLNDALKSMYNAEKRGKRQVMIRPSSKVIIKFLIVMQKHGYIGEFEYVDDHRSGKIVVELNGRLNKCGVISPRFDVGVKEIEGWTARLLPSRQFGYIVLTTSAGIMDHEEARRKNVGGKVLGFFY

SEQ ID NO: 2517 - DNA, 722 bp, Glycine max
  misc_feature: Ceres CLONE ID no. 635097
  misc_feature: Ceres CDNA ID no. 36707099
  CDS (12)..(398): REFERENCED BY SEQ ID NO: 2518
actctctagtcatggcttcttctcttcctcttctcaaccttcttaccctcgctctgtcactactcttctgcattgccttaacttccgaggttggcgtgcaggcgcagatggaggagacaggcttgaacctcatgtcggaggcgttggagtggccaaccgcaatgtcgctctacgacgaagacagcgaagaagaggatgtccagaacggttacagtcggagatcgttgttctggcggaggatgaagtactacatctcctacggcgctctttccgcgaaccgaatcccgtgcccacctcgttctggtagatcttactacacccacaactgctacagggcccgaggccccgttcacccttactccagaggctgctctgtcatcacgcgctgccggagatgagtgagttcggatctgatcacacgcacgcctcacgcttcagatcgcaaataaaaaaaaccaccgtctagggtcttgttttgttagtgtactagatttattgtctatttaagcaagtcaaaagtgtcgtgtttcagtaacggttctcgttgcgctgcgctattttcatgaaccatctgtttgcttgctttgtgtgttactttatcatattcattcctttgtataaactcgaatgaactctatacgtggatgcgcaaatctgcttcctatctttgtattcccatcgcttacactctcttacgttgcaaatcaaaaaaaaaaaaaaaa

SEQ ID NO: 2518 - protein, 128 aa, Glycine max
  misc_feature: Ceres CLONE ID no. 635097
  misc_feature: Ceres CDNA ID no. 36707099
  misc_feature (57)..(128): Pfam Name: RALF PFAM Desc: Rapid ALkalinization Factor
  misc_feature: Homolog of GI Number: 37695575 NR Desc: rapid alkalinization factor 3
  misc_feature: Homolog of GI Number: 21593878 NR Desc: RALF precursor
MASSLPLLNLLTLALSLLFCIALTSEVGVQAQMEETGLNLMSEALEWPTAMSLYDEDSEEEDVQNGYSRRSLFWRRMKYYISYGALSANRIPCPPRSGRSYYTHNCYRARGPVHPYSRGCSVITRCRR

SEQ ID NO: 2519 - DNA, 452 bp, Glycine max
  misc_feature: Ceres CLONE ID no. 635172
  misc_feature: Ceres CDNA ID no. 25891535
  CDS (83)..(238): REFERENCED BY SEQ ID NO: 2520
gtttttttttcttcattgtgcctccgaaccaaaacctgaagcctagaaccttcttccgtctcacagtttgccggaatcagcgatggatcctcagcctgagccagttagctacatctgcggagattgtggaatggagaatacgctgaagcctggtgacgttatacagtgccgtgagtgcggttaccgtatcctttacaagaagcgcactcgtcgcattgtccaatacgaggcacgctgaagaaaactgctctgacattggcaagtaatttccatggaaattgttactacatctgtgttgtgatattgaagaactacttttaattctacagtaccattgcttttgggtgatgtttagaaaaggataaaaactttgaaatgtgaatatgttacaaatatttgtgtttcattagtttgcaattttatcactacgatggctaaaaaaaaaaaaaaaa

SEQ ID NO: 2520 - protein, 51 aa, Glycine max
  misc_feature: Ceres CLONE ID no. 635172
  misc_feature: Ceres CDNA ID no. 25891535
  misc_feature (10)..(41): Pfam Name: DNA_RNApol_7kD PFAM Desc: DNA directed RNA polymerase
  misc_feature: Homolog of GI Number: 62858105 NR Desc: LOC549263
  misc_feature: Homolog of GI Number: 4826924 NR Desc: DNA directed RNA polymerase II polypeptide K
  misc_feature: Homolog of GI Number: 20306771 NR Desc: Polymerase
  misc_feature: Homolog of GI Number: 8248885 NR Desc: metallothionein
  misc_feature: Homolog of GI Number: 2529427 NR Desc: Rpc10
  misc_feature: Homolog of GI Number: 82899510 NR Desc:  similar to DNA
  misc_feature: Homolog of GI Number: 82997259 NR Desc:  similar to DNA
  misc_feature: Homolog of GI Number: 62641997 NR Desc:  similar to DNA
  misc_feature: Homolog of GI Number: 71026783 NR Desc: transcription activator
  misc_feature: Homolog of GI Number: 72005739 NR Desc:  similar to DNA
MDPQPEPVSYICGDCGMENTLKPGDVIQCRECGYRILYKKRTRRIVQYEAR

SEQ ID NO: 2521 - DNA, 921 bp, Glycine max
  misc_feature: Ceres CLONE ID no. 635469
  misc_feature: Ceres CDNA ID no. 40041276
  CDS (41)..(631): REFERENCED BY SEQ ID NO: 2522
atcataaaattatattttttaggcgcattctcattcaccaatggcgttcaccgtcgccagtggcagtggcgtggctataatcccctgcggcaacaccggcaccgccgcactcttccctcaccgaacgagaagaaacctccacgtggcgcgcgcgaagaagcccctcaacggcgacgacgtttccgtttacgctgagctcctcaaagccgaagtttccgttttggaaaataataagcctctcgacgacaacgatgccgctttgaagttcctagagaagatagaccgtcagtttcaacagcccgatttatgggaaggaccccagtgggactggctcggcatcttcatcaagttttcccccatcattggcatcgctgttgcggcaagtcttgctatctacggttgctttacatttcatgaaccaccaaaaaatgtgagggaggctgctgaaaggctgtattctgtgcagtctggtgtggagtccaatgcagagtccgatgatgtggagtccagtgcagagactgatgtggagtctagtgcagagtccagtagtgaagttttcaaagagcctgatgcatatgactcagatgtgtttgattccaatccaacagaggtagcacctagtttggagtagactctccgtagatactgcaaatataccttatttttagcatttgaaccaggtgaaaggattcaaactttttctccactaaatttgtaaggcaatgcttctgcttacatgtacaccctcttaaagtgtatcaattctgagacagatcaagtggattagttgtacgtgtaaatgtatggttatttgttgcattgcatctgattgctctgatcgttgtagacaatcttttatctatgttatagatcagaactactgtaatggaatcttttacaaacacaaaaaaaaaaaaaaaa

SEQ ID NO: 2522 - protein, 196 aa, Glycine max
  misc_feature: Ceres CLONE ID no. 635469
  misc_feature: Ceres CDNA ID no. 40041276
MAFTVASGSGVAIIPCGNTGTAALFPHRTRRNLHVARAKKPLNGDDVSVYAELLKAEVSVLENNKPLDDNDAALKFLEKIDRQFQQPDLWEGPQWDWLGIFIKFSPIIGIAVAASLAIYGCFTFHEPPKNVREAAERLYSVQSGVESNAESDDVESSAETDVESSAESSSEVFKEPDAYDSDVFDSNPTEVAPSLE

SEQ ID NO: 2523 - DNA, 604 bp, Glycine max
  misc_feature: Ceres CLONE ID no. 635481
  misc_feature: Ceres CDNA ID no. 25891536
  CDS (55)..(414): REFERENCED BY SEQ ID NO: 2524
agcttatcatcaccatcgcgcccaagagagagagagagagagagaggcgcgaaaatgagcggagcgaaggggaagaagaagggagcgagctttgtgatcgattgcgcgaagccggtggaggataaaattatggacattgcttctctggagaagttccttcaggagaggattaaggttggcggcaaggccggtgcactcggcgattccattactgtcactagggacaagagcaagatcaccgtcacctccgacagcaacttctctaaacggtatctgaaatatttgaccaagaagtacttgaaaaagcacaatgtgagggattggcttcgcgtgattgcatccaacaaggagcggagtgtctatgaattgagatacttcaacatcgctgagaacgagggtgaagaggaagactgaagatctaattctgtgtcttgaggcattttctgtttaggtttagttattgtggagtctcttttatctgttttatttatttaacttgttactggtttaaatattcctgtgttttatttggaccgacgttatgtcttcatatgaaatttcatagaggttattggagatgttgtcattaaaaaaaaaaaaaaaa

SEQ ID NO: 2524 - protein, 119 aa, Glycine max
  misc_feature: Ceres CLONE ID no. 635481
  misc_feature: Ceres CDNA ID no. 25891536
  misc_feature (4)..(119): Pfam Name: Ribosomal_L22e PFAM Desc: Ribosomal L22e protein family
  misc_feature: Homolog of GI Number: 6714454 NR Desc: putative 60S ribosomal protein  L22
  misc_feature: Homolog of GI Number: 12642842 NR Desc: putative 60S ribosomal protein L22
  misc_feature: Homolog of GI Number: 50939919 NR Desc: putative 60S ribosomal protein L22
  misc_feature: Homolog of GI Number: 42733478 NR Desc: BRI1
  misc_feature: Homolog of GI Number: 6056419 NR Desc: 60S ribosomal protein  L22
  misc_feature: Homolog of GI Number: 13592059 NR Desc: ribosomal protein L22
  misc_feature: Homolog of GI Number: 55590474 NR Desc:  similar to ribosomal protein L22
  misc_feature: Homolog of GI Number: 73956651 NR Desc:  similar to 60S ribosomal protein L22
  misc_feature: Homolog of GI Number: 57086899 NR Desc:  similar to ribosomal protein L22
MSGAKGKKKGASFVIDCAKPVEDKIMDIASLEKFLQERIKVGGKAGALGDSITVTRDKSKITVTSDSNFSKRYLKYLTKKYLKKHNVRDWLRVIASNKERSVYELRYFNIAENEGEEED

SEQ ID NO: 2525 - DNA, 941 bp, Glycine max
  misc_feature: Ceres CLONE ID no. 635505
  misc_feature: Ceres CDNA ID no. 40351130
  CDS (151)..(753): REFERENCED BY SEQ ID NO: 2526
atccaatgtaagaaaccaaaaaaaaaatcctgttgaatttaatcttatttgctctgttttttcctctgtttctcacaagacataatggagtacaaagtgaaaaccacaacctcaacaccttctccaccaatcccaatccatcttcccactatgctctcaaactctcccccatcttcatcttcttcacctccttcacaatctcccactcctttcccttcaccctctcagggctctccctctgctgctccaccgtctcctccgccgccgccgccacccgtggtggttagcccttgtgctgcctgcaagatcctccgccgcaggtgtgtggagaagtgtgtgttggctccatattttcctcccactgatccactcaagttcaccattgctcatagagtctttggagccagcaacatcatcaagttcttgcaggaactgccagaatcccagagagcagatgctgtgagcagcatggtttatgaggcaaatgctaggatcagagacccagtttatgggtgtgcaggtgcaatatgccaacttcaaaagcaagttagtgagctacaagcacagctggccaaagcacaagctgaggtagtgaacatgcagtgccaacaagccaatttagtggccctaatttgcatggaaatgagtcagtcacaggagcagcacgtgcttcagcctcaacctcacgttgatatgagctgcttcatagaggacaacagttttggtactgcttgggagcctctttggacataatggaaattaatgaaatgttatttatgtatcttagatatttgcatcagagagattaattttgttctatagtaactggtaaaactttcaacctcccaataagtggaggaagagataatgaaaattatacttggggaatccaatttcaataaagtcatttaattagttatatggcaaaaaaaaaaaaaaaa

SEQ ID NO: 2526 - protein, 200 aa, Glycine max
  misc_feature: Ceres CLONE ID no. 635505
  misc_feature: Ceres CDNA ID no. 40351130
MLSNSPPSSSSSPPSQSPTPFPSPSQGSPSAAPPSPPPPPPPVVVSPCAACKILRRRCVEKCVLAPYFPPTDPLKFTIAHRVFGASNIIKFLQELPESQRADAVSSMVYEANARIRDPVYGCAGAICQLQKQVSELQAQLAKAQAEVVNMQCQQANLVALICMEMSQSQEQHVLQPQPHVDMSCFIEDNSFGTAWEPLWT

SEQ ID NO: 2527 - DNA, 578 bp, Glycine max
  misc_feature: Ceres CLONE ID no. 635793
  misc_feature: Ceres CDNA ID no. 40041277
  CDS (5)..(490): REFERENCED BY SEQ ID NO: 2528
atagatgctagcaccaatggcggcaagcgcactgtatagttcccctatattccttcctcctctctggcaccctaaacctatgcaccccctctgctgcttcaaccctcctccttccattagcctctccaggtcaaagttttctggtgcagcagtggcaccccaaaagcttccccgtcgggtgtttagagtacgcggcttgctgggtcacgattctgggactgccccacaaccagaaacacccaattctgaagcgggtactagtattgacttaaatcttccaagaagaagtttgcttgtacagtttacatgtaacttgtgtggtgaaagaacagagaggcttgtaaatcggttagcttatgaaaggggtgctgtttttgtacagtgtgcaggatgtctacagcatcacaaactagttgacaatctgggacttatcacagaatatgactttcgggagaaaataaacatagactcagaaactgatcaagtttgatgtaataacatataaaactagaatttgtgtgacatttctgattatttccatcattcaaaatttcagatccataaaaaaaaaaaaaaaa

SEQ ID NO: 2528 - protein, 157 aa, Glycine max
  misc_feature: Ceres CLONE ID no. 635793
  misc_feature: Ceres CDNA ID no. 40041277
  misc_feature (92)..(157): Pfam Name: zf PFAM Desc: DNL zinc finger
  misc_feature: Homolog of GI Number: 5734707 NR Desc: F24J5.3
  misc_feature: Homolog of GI Number: 53791547 NR Desc: putative zinc ribbon 1
  misc_feature: Homolog of GI Number: 48596293 NR Desc: ETCHED1 protein
  misc_feature: Homolog of GI Number: 48596295 NR Desc: zinc ribbon 1
  misc_feature: Homolog of GI Number: 34912444 NR Desc: P0681B11.26
MAASALYSSPIFLPPLWHPKPMHPLCCFNPPPSISLSRSKFSGAAVAPQKLPRRVFRVRGLLGHDSGTAPQPETPNSEAGTSIDLNLPRRSLLVQFTCNLCGERTERLVNRLAYERGAVFVQCAGCLQHHKLVDNLGLITEYDFREKINIDSETDQV

SEQ ID NO: 2529 - DNA, 921 bp, Glycine max
  misc_feature: Ceres CLONE ID no. 636491
  misc_feature: Ceres CDNA ID no. 35383238
  CDS (55)..(753): REFERENCED BY SEQ ID NO: 2530
ctcagtctcaacacagaagcagaaggaggagaagcagaaagaggagacgaagcaatggcgccgaagaagccccgaaccacgtcgaggaaccctgatttggtcaggggaattggcaaatattcgaggtcgcagatgtaccacaagaggggcatctgggccatcaaggccaaaaacggcggtgttttgcccctccacgatcccaagcccaaacccgaggccccggcccagaagccgcccaagttctacccggccgatgacgtgaagaagcccctcgtcaacaagcacaagcccaagcccgcgaaactcagggctagcattactccagggactgttctgatcctgcttgctgggaggttcaagggaaagagggttgttttcttgaagcagcttccatctggattgcttcttgtaacaggtccctttaagatcaatggggttcctctgagaagggtgaaccaatcgtatgttattggtacatccacaaaggtggatatctctgatgtcaatgttgataaatttgatgacaagtactttgccaaggaagctaagaaaaagaaaacaaagggcgaaggcgaattctttgaggcagagaaggaggagaaaaatgtgcttccccaagaaaagaaagatgaccaaaaaaccgtggacactgctttgttaaaggccattgagagtgttccagagctcaagtcttacttgggtgctaggttttccttgaaggcaggagtgaagccccatgagctagttttctagagtgctaaaattattttcctcattctgttttgtcgagcttgttcccaatagttgtactgttttttcatcatggtaatgaacattgttcaagagttttttctttctagtagttttattcttctgtagttctataaaaaaaatgaaataacattaaaaaaaaaaaaaaaa

SEQ ID NO: 2530 - protein, 232 aa, Glycine max
  misc_feature: Ceres CLONE ID no. 636491
  misc_feature: Ceres CDNA ID no. 35383238
  misc_feature (1)..(54): Pfam Name: Ribosomal_L6e_N PFAM Desc: Ribosomal protein L6
  misc_feature (125)..(232): Pfam Name: Ribosomal_L6e PFAM Desc: Ribosomal protein L6e
  misc_feature: Homolog of GI Number: 7208784 NR Desc: 60S ribosomal protein L6
  misc_feature: Homolog of GI Number: 19539 NR Desc: ribosomal protein YL16
  misc_feature: Homolog of GI Number: 21593910 NR Desc: 60S ribosomal protein L6
  misc_feature: Homolog of GI Number: 9795602 NR Desc: Putative  60S ribosomal protein L6
  misc_feature: Homolog of GI Number: 27311965 NR Desc: putative 60S ribosomal protein L6
  misc_feature: Homolog of GI Number: 21592925 NR Desc: putative 60S ribosomal protein L6
  misc_feature: Homolog of GI Number: 50925014 NR Desc: OSJNBb0022F23.11
  misc_feature: Homolog of GI Number: 57471700 NR Desc: ribosomal protein L6
  misc_feature: Homolog of GI Number: 50909993 NR Desc: putative 60S ribosomal protein L6
  misc_feature: Homolog of GI Number: 57999636 NR Desc: 60S ribosomal protein L6 CgRPL6
MAPKKPRTTSRNPDLVRGIGKYSRSQMYHKRGIWAIKAKNGGVLPLHDPKPKPEAPAQKPPKFYPADDVKKPLVNKHKPKPAKLRASITPGTVLILLAGRFKGKRVVFLKQLPSGLLLVTGPFKINGVPLRRVNQSYVIGTSTKVDISDVNVDKFDDKYFAKEAKKKKTKGEGEFFEAEKEEKNVLPQEKKDDQKTVDTALLKAIESVPELKSYLGARFSLKAGVKPHELVF

SEQ ID NO: 2531 - DNA, 859 bp, Glycine max
  misc_feature: Ceres CLONE ID no. 637086
  misc_feature: Ceres CDNA ID no. 35383239
  CDS (60)..(728): REFERENCED BY SEQ ID NO: 2532
ttttttgcgtacacagcctcaacaaccctaacgcgtgcagagcagagagagacgcagccatggggcgaagacccgcgaggtgttataggcaaattaagaacaaaccataccccaagtcacggttttgccgtggtgttcctgatcccaagatcaggatttacgatgttggtatgaagaagaagggtgttgatgagtttcctttctgtgtccatctggttagttgggagaaggaaaacgtttctagtgaggccctggaagctgctcgtattgcttgcaacaagtacatggccaaatttgctggaaaggatgctttccacttgagagtcagggtgcacccattccatgttcttaggatcaacaagatgctttcgtgtgctggagctgataggctccaaactggaatgagaggtgcttttggaaagccacagggtacttgtgctagagtggctattggacaggtccttctttctgtccgctgcaaggacagcaacagccatcatgcccaggaggcccttcgccgtgccaagttcaagttccctggtcgtcaaaagattattgttagcaggaaatggggcttcaccaagtttagtcgttctgattatctcaagttcaagtcagagaatagaattgtgcccgatggtgtgaatgctaagcttcttggttgccatggaccattggccaaccgtgaacccggaagggcctttttggatactgctactggttcttagtctgtttgttaatttggaaatactagactttggattactttagttttgcaagagtgaatttgagttattgtcagaacatttccaattacttaaattttgtttgcgaacctcttccaaaaaaaaaaaaaaaa

SEQ ID NO: 2532 - protein, 222 aa, Glycine max
  misc_feature: Ceres CLONE ID no. 637086
  misc_feature: Ceres CDNA ID no. 35383239
  misc_feature (1)..(176): Pfam Name: Ribosomal_L10e PFAM Desc: Ribosomal L10
  misc_feature: Homolog of GI Number: 5917743 NR Desc: 60S ribosomal protein L10
  misc_feature: Homolog of GI Number: 68449756 NR Desc: 60S ribosomal protein L10
  misc_feature: Homolog of GI Number: 77999313 NR Desc: 60S ribosomal protein L10
  misc_feature: Homolog of GI Number: 2500354 NR Desc: 60S ribosomal protein L10
  misc_feature: Homolog of GI Number: 6984130 NR Desc: 60S ribosomal protein L10
  misc_feature: Homolog of GI Number: 11036950 NR Desc: QM
  misc_feature: Homolog of GI Number: 50313215 NR Desc: QM family protein
  misc_feature: Homolog of GI Number: 49861132 NR Desc: QM
  misc_feature: Homolog of GI Number: 21592869 NR Desc: putative 60s ribosomal protein L10
  misc_feature: Homolog of GI Number: 23397080 NR Desc: putative tumor suppressor
  misc_feature: Useful for making shorter plants
MGRRPARCYRQIKNKPYPKSRFCRGVPDPKIRIYDVGMKKKGVDEFPFCVHLVSWEKENVSSEALEAARIACNKYMAKFAGKDAFHLRVRVHPFHVLRINKMLSCAGADRLQTGMRGAFGKPQGTCARVAIGQVLLSVRCKDSNSHHAQEALRRAKFKFPGRQKIIVSRKWGFTKFSRSDYLKFKSENRIVPDGVNAKLLGCHGPLANREPGRAFLDTATGS

SEQ ID NO: 2533 - DNA, 686 bp, Glycine max
  misc_feature: Ceres CLONE ID no. 637222
  misc_feature: Ceres CDNA ID no. 40041278
  CDS (62)..(361): REFERENCED BY SEQ ID NO: 2534
acccccttctagacatagttcttctccctctgttctctattctctacactgtgaaaccaagatgaaggtagcatttgcagctgttctacttatatgccttgtcctcagctcctccttgttcgaggtgtcaatggctggttctgatgtaatattatgggttggaaatttggaatcagctttctgttcctccaagtgctcgaagaggtgttctagagctgggatgaaggacaggtgcatgaagttctgcgggatttgctgcagcaagtgcaactgtgtgccatctgggacttatgggaacaagcatgagtgcccttgctacagagacatgaagaactccaagggcaaggccaaatgcccttgattatttttttttttcaccatccacacatcaacttcaagcctttgattcagtcactaccgtgcatgtatatctccaccttagagatattccaccatggacccttgctagctgattatgtttactacctttattgttgtgtttgtgtattacataaagagaaaaatttggtcactttagttggatcggatatgcatgatacatgagagtgagaataaatcggggtcttctttgtcctcgtgtgaatttggtctgtcttaattaggctctatggatagttaataaaaatgaattctccttttgtaaattgtcaaaaaaaaaaaaaaaa

SEQ ID NO: 2534 - protein, 99 aa, Glycine max
  misc_feature: Ceres CLONE ID no. 637222
  misc_feature: Ceres CDNA ID no. 40041278
  misc_feature (1)..(99): Pfam Name: GASA PFAM Desc: Gibberellin regulated protein
  misc_feature: Homolog of GI Number: 66731525 NR Desc: GIR1
  misc_feature: Homolog of GI Number: 14627134 NR Desc: snakin
  misc_feature: Homolog of GI Number: 28394019 NR Desc: putative gibberellin
  misc_feature: Homolog of GI Number: 3355483 NR Desc: similar to gibberellin
  misc_feature: Homolog of GI Number: 4102634 NR Desc: Snakin
  misc_feature: Homolog of GI Number: 825524 NR Desc: gip1
  misc_feature: Homolog of GI Number: 16516819 NR Desc: putative gibberellin induced protein 2
  misc_feature: Homolog of GI Number: 25313155 NR Desc: protein F10A5.6
MKVAFAAVLLICLVLSSSLFEVSMAGSDVILWVGNLESAFCSSKCSKRCSRAGMKDRCMKFCGICCSKCNCVPSGTYGNKHECPCYRDMKNSKGKAKCP

SEQ ID NO: 2535 - DNA, 675 bp, Glycine max
  misc_feature: Ceres CLONE ID no. 637801
  misc_feature: Ceres CDNA ID no. 40041279
  CDS (127)..(432): REFERENCED BY SEQ ID NO: 2536
atactttcgtttccccttctcatcgaatcgaagcgccgcaccgtgtttcttctctgcctgaataacgcaaagaaaattgaagcatcctaagggttgtttctaagggataccgggttgggagagaagatgaaacaggtggtgggaacggtggtttcaaataagatgcagaaatcagtggtggtggcagtggatagactattctaccacaaattgtacgaccgatatgtcaagcgcacgtctaagtttatggctcatgatgagcacaatcattgtaacatcggtgaccgagttcggctggatccttctaggcctttgagtaagcataaacattgggcagttgctgaaattctcaagaaagcacgtatatatgttccgccctcaatgccagtgccggggagtgtgagctcaagctctgaagcatctgcttcctgatttggctgaaggtattataacatattttggctgtcaatatctacacaagttgtagctgttcgtattgaagtgattctggaaataaagtttagctgaatgagttgtggatagtttgtaaccttattcaagttacttgttttaaggactgttatttaaaaaacaaaatagaccttatttggcaggttgtccactccagtctaatgcatttaattggcagtgtactaaataaaaaaaaaaaaaaaa

SEQ ID NO: 2536 - protein, 101 aa, Glycine max
  misc_feature: Ceres CLONE ID no. 637801
  misc_feature: Ceres CDNA ID no. 40041279
  misc_feature (6)..(74): Pfam Name: Ribosomal_S17 PFAM Desc: Ribosomal protein S17
  misc_feature: Homolog of GI Number: 50944825 NR Desc: putative ribosomal protein S17
  misc_feature: Homolog of GI Number: 28416831 NR Desc: At3g18880
  misc_feature: Homolog of GI Number: 1620986 NR Desc: 40S ribosomal protein S17
  misc_feature: Homolog of GI Number: 33866608 NR Desc: 30S ribosomal protein S17
  misc_feature: Homolog of GI Number: 72382958 NR Desc: 30S ribosomal protein S17
  misc_feature: Homolog of GI Number: 20808651 NR Desc: Ribosomal protein S17
  misc_feature: Homolog of GI Number: 51894201 NR Desc: 30S ribosomal protein S17
  misc_feature: Homolog of GI Number: 78185531 NR Desc: 30S ribosomal protein S17
  misc_feature: Homolog of GI Number: 54307550 NR Desc: putative ribosomal protein S17
  misc_feature: Homolog of GI Number: 21230373 NR Desc: 30S ribosomal protein S17
MKQVVGTVVSNKMQKSVVVAVDRLFYHKLYDRYVKRTSKFMAHDEHNHCNIGDRVRLDPSRPLSKHKHWAVAEILKKARIYVPPSMPVPGSVSSSSEASAS

SEQ ID NO: 2537 - DNA, 1311 bp, Glycine max
  misc_feature: Ceres CLONE ID no. 638041
  misc_feature: Ceres CDNA ID no. 35383240
  CDS (300)..(1001): REFERENCED BY SEQ ID NO: 2538
aaaacacaacacaactcgctccatttcagtcggcaaactttgatgctaaccacagaaacacaacacaactcgctccatttcagtcggcaactctggaaaaagtcaaatcattccggaaaaaacaataattaaacttttttttttctctagacttaggacctgagatagatcacgttgcatctgaaaatattttcattcattagagagaaaaaacaagaaagtgttcgttgaatctgttgaaagtggtgacttgatttgatttattcacataaccaatttatcatctctccgatctttcaatggattctgacttctggacctcgcgtcttgctgccgctaaacgccaatacacgcttcagcatcaccatccaaattctcacttagatcggttgggaatcgatgattttgatgtggaagaagaggtgagacctgattttccttgcccgtattgttatgaagactttgacatcgcgtctttgtcttctcatcttgaagatgaacattcttgtgaatcaagagtcacgatttgtcctatatgctccgttaaagttgcacgggacatgttaaatcacataacgctgcaacatgggcatttatttaagttacagagaaggcgcaggttaagaagagtcgctattccaaacagtcagacattgtctcttttgggtcgagatcttcgtgaggctcatctacaggtgcttcttggtggtggtggtggatatcggtcaaacagtgcagcagtgtctaatgctgctgctactgatccattcctatcctcatttattttgaatttccctgcttgtgaagcagaagaaatttcaaaatctgtggtaacaagtgctgacgattcttcttccaaaaatgcaacacctgtacatatttggaaatcaagttttgatccctccttgagtactgaagagcgcgagaaaaggatgagacaagctgctgggagatctggttttgtgcaggacctgtttctttcaactttgttaggcgaataatggaagctgtaaggtgcttacagaagaataatcaaaatgagatccatggttaaggatcttgaatgaaggattatacctctagtgggattcagtggttatttgacaatccatgttatagcctaattttggtatattgtcacagctgcacctttgacatatagtgctgaatctgatcatagttatccttttatcccacccttgtaagttgtaagcatcttcactggagatgtactactctctgaaaaacaagaagttttctagcttacgaaatgacctattttgctatattggcgtaaaaaaaaaaaaaaaa

SEQ ID NO: 2538 - protein, 233 aa, Glycine max
  misc_feature: Ceres CLONE ID no. 638041
  misc_feature: Ceres CDNA ID no. 35383240
  misc_feature (19)..(230): Pfam Name: Di19 PFAM Desc: Drought induced 19 protein
  misc_feature: Homolog of GI Number: 50907317 NR Desc: putative fiber protein Fb2
  misc_feature: Homolog of GI Number: 56201905 NR Desc: fiber protein Fb2
  misc_feature: Homolog of GI Number: 66271049 NR Desc: Fb2
  misc_feature: Homolog of GI Number: 25992529 NR Desc: fiber protein Fb2
  misc_feature: Homolog of GI Number: 45752696 NR Desc: At5g26990
  misc_feature: Homolog of GI Number: 22137252 NR Desc: AT3g06760/F3E22_10
  misc_feature: Homolog of GI Number: 469110 NR Desc: Di19
  misc_feature: Homolog of GI Number: 3377806 NR Desc: contains similarity to Arabidopsis thaliana drought
  misc_feature: Homolog of GI Number: 30679079 NR Desc: drought
  misc_feature: Homolog of GI Number: 26452996 NR Desc: putative drought
MDSDFWTSRLAAAKRQYTLQHHHPNSHLDRLGIDDFDVEEEVRPDFPCPYCYEDFDIASLSSHLEDEHSCESRVTICPICSVKVARDMLNHITLQHGHLFKLQRRRRLRRVAIPNSQTLSLLGRDLREAHLQVLLGGGGGYRSNSAAVSNAAATDPFLSSFILNFPACEAEEISKSVVTSADDSSSKNATPVHIWKSSFDPSLSTEEREKRMRQAAGRSGFVQDLFLSTLLGE

SEQ ID NO: 2539 - DNA, 1084 bp, Glycine max
  misc_feature: Ceres CLONE ID no. 638095
  misc_feature: Ceres CDNA ID no. 35383241
  CDS (11)..(841): REFERENCED BY SEQ ID NO: 2540
ggatgtttctatggctggtttggatttaggaagcgcgtcacgctttgttcagaatcttcacttaccggacttgcacttgcaacaaaattaccagcaaccccggcacaagcgcgattcggaggagcaagagactcctccgaacccgggaacagcgctggcgccgttcgacaacgatgatgacaaaagccagggcctggagctggcttcaggccctggggacatcgttggacggcgcccacgcggcagaccttccgggtccaagaacaagccgaagccaccggtgataatcacccgggagagcgccaacacgctgagggcgcacattctcgaggtaggaagcggctccgacgtcttcgactgtgtcaccgcttatgcgcggcggcgccagcgcgggatctgcgtcctcagcggcagtggtaccgtcaccaatgtcagtctccggcagcctgcggctgccggagccgtcgtcaggctgcacggaaggttcgagattctctctctctccggctcgttcctcccgccgccggctccgccgggagccaccagtctcacaatctacctcgccggcgggcagggccaggtcgtcggaggaaacgtcgtgggagaattaaccgcggcagggccagtaatcgtcatcgcagcatcgttcaccaacgtggcttacgagaggctccccttagaagaagatgaacaacaacaacaacagcttcagattcagtcacccgcaacgacgtcatctcaaggaaacaacaacaataaccctttccctgacccttcttcaggacttcccttcttcaacttaccactcaatatgcagaatgttcagttaccacctttttgagggttcatgaatctgataatatgagactgatgaagatcatgttgatggaggatttatcaccaaagggtttatattattataaggtcagcaaatattcatggactagaacatatatataaactatatgttcttcttcttcttgttattttgttttttttttcttctgttgttaatggatatgatatgatatgacatgattattattattatgtagcgagtttcagtctgaaaaaaaaaaaaaaa

SEQ ID NO: 2540 - protein, 276 aa, Glycine max
  misc_feature: Ceres CLONE ID no. 638095
  misc_feature: Ceres CDNA ID no. 35383241
  misc_feature: Useful for making plants with modulated growth and phenotype characteristics
  misc_feature: The sequence is a functional homolog of  SEQ ID NO 1414 in the  10/374,780 US patent application
  misc_feature: The sequence is a functional homolog of  SEQ ID NO 1415 in the  10/374,780 US patent application
  misc_feature: The sequence is a functional homolog of  SEQ ID NO 1416 in the  10/374,780 US patent application
  misc_feature: The sequence is a functional homolog of  SEQ ID NO 1417 in the  10/374,780 US patent application
  misc_feature: The sequence is a functional homolog of  SEQ ID NO 16 in the  10/669,824 US patent application
  misc_feature: The sequence is a functional homolog of  SEQ ID NO 16 in the  10/870,198 US patent application
  misc_feature: The sequence is a functional homolog of  SEQ ID NO 18 in the  10/669,824 US patent application
  misc_feature: The sequence is a functional homolog of  SEQ ID NO 18 in the  10/870,198 US patent application
  misc_feature: The sequence is a functional homolog of  SEQ ID NO 24 in the  10/669,824 US patent application
  misc_feature: The sequence is a functional homolog of  SEQ ID NO 24 in the  10/870,198 US patent application
  misc_feature: The sequence is a functional homolog of  SEQ ID NO 2528 in the  10/374,780 US patent application
  misc_feature: The sequence is a functional homolog of  SEQ ID NO 256 in the  10/225,066 US patent application
  misc_feature: The sequence is a functional homolog of  SEQ ID NO 298 in the  11/435,388 US patent application
  misc_feature: The sequence is a functional homolog of  SEQ ID NO 300 in the  10/714,887 US patent application
  misc_feature: The sequence is a functional homolog of  SEQ ID NO 386 in the  11/435,388 US patent application
  misc_feature: The sequence is a functional homolog of  SEQ ID NO 388 in the  10/714,887 US patent application
  misc_feature: The sequence is a functional homolog of  SEQ ID NO 388 in the  11/435,388 US patent application
  misc_feature: The sequence is a functional homolog of  SEQ ID NO 390 in the  10/714,887 US patent application
  misc_feature: The sequence is a functional homolog of  SEQ ID NO 390 in the  11/435,388 US patent application
  misc_feature: The sequence is a functional homolog of  SEQ ID NO 392 in the  10/714,887 US patent application
  misc_feature: The sequence is a functional homolog of  SEQ ID NO 48 in the  10/669,824 US patent application
  misc_feature: The sequence is a functional homolog of  SEQ ID NO 48 in the  10/870,198 US patent application
  misc_feature: The sequence is a functional homolog of  SEQ ID NO 88 in the  10/669,824 US patent application
  misc_feature: The sequence is a functional homolog of  SEQ ID NO 92 in the  10/669,824 US patent application
  misc_feature: Homolog of GI Number: 50928377 NR Desc: OSJNBa0086O06.16
  misc_feature: Homolog of GI Number: 3668079 NR Desc: putative AT
  misc_feature: Homolog of GI Number: 50941343 NR Desc: DNA
  misc_feature: Homolog of GI Number: 50252749 NR Desc: putative DNA
  misc_feature: Homolog of GI Number: 56121926 NR Desc: At2g45430
  misc_feature: Homolog of GI Number: 50915952 NR Desc: DNA
  misc_feature: Homolog of GI Number: 53828597 NR Desc: At4g35390
  misc_feature: Homolog of GI Number: 55296989 NR Desc: putative AT
  misc_feature: Homolog of GI Number: 50912085 NR Desc: DNA
  misc_feature: Homolog of GI Number: 30102700 NR Desc: At1g20900
  misc_feature: Useful for delaying flowering time
  misc_feature: Useful for making plants with increased biomass and foliage
  misc_feature: Useful for making smaller plants
MAGLDLGSASRFVQNLHLPDLHLQQNYQQPRHKRDSEEQETPPNPGTALAPFDNDDDKSQGLELASGPGDIVGRRPRGRPSGSKNKPKPPVIITRESANTLRAHILEVGSGSDVFDCVTAYARRRQRGICVLSGSGTVTNVSLRQPAAAGAVVRLHGRFEILSLSGSFLPPPAPPGATSLTIYLAGGQGQVVGGNVVGELTAAGPVIVIAASFTNVAYERLPLEEDEQQQQQLQIQSPATTSSQGNNNNNPFPDPSSGLPFFNLPLNMQNVQLPPF

SEQ ID NO: 2541 - DNA, 790 bp, Glycine max
  misc_feature: Ceres CLONE ID no. 638334
  misc_feature: Ceres CDNA ID no. 36529454
  CDS (69)..(545): REFERENCED BY SEQ ID NO: 2542
aaacacacagcaacaaacatcttcacaaactagtaatattattcttcgaatccattttattattcataatgggtattttcacatgtgaggatgaaaccacctcccctgtggctcctgctaccctttacaaagctctagttacagatgccgacaacgtcatcccaaaggctgtcgaagccttcaggagtgttgaaaaccttgaggggaacggtggccctggaaccatcaagaagatcactttcgttgaggatggagaaagcaagtttgtgttgcacaaaatagaatcagttgatgaggcaaacttgggatacagctatagcgtagttggtggagttgggttgccagacacagtggagaagatcacattcgaatgcaaattggctgctggcgccaacggagggtctgctgggaagctaactgtcaaataccaaaccaaaggagatgctcagcccaacccagacgacctcaaaattggcaaagtcaagtctgatgctcttttcaaggccgttgaggcctaccttttggccaatcctcattacaactgatccaattcgatcttcagtattcagtgatctgcaaagaccttgttttatattatatacaagagttttcttgccttgtgtggagtgttattcaatcactttgagtgtgtggtgtggcttccaattgatgtaacgagtgtttcctttcttatttcctttttccacagaattgtgagagccagttgatgtctttgtatgtcacttcatcaataaatcaatatgttataataacaaaaaaaaaaaaaaaa

SEQ ID NO: 2542 - protein, 158 aa, Glycine max
  misc_feature: Ceres CLONE ID no. 638334
  misc_feature: Ceres CDNA ID no. 36529454
  misc_feature (1)..(154): Pfam Name: Bet_v_I PFAM Desc: Pathogenesis
  misc_feature: Homolog of GI Number: 21048 NR Desc: pathogenesis
  misc_feature: Homolog of GI Number: 2398666 NR Desc: PR
  misc_feature: Homolog of GI Number: 1262132 NR Desc: intracellular pathogenesis related protein
  misc_feature: Homolog of GI Number: 1449405 NR Desc: pathogenesis related protein
  misc_feature: Homolog of GI Number: 60418924 NR Desc: pathogenesis
  misc_feature: Homolog of GI Number: 4850337 NR Desc: cowpea pathogenesis
  misc_feature: Homolog of GI Number: 21044 NR Desc: pathogenesis
  misc_feature: Homolog of GI Number: 12958727 NR Desc: PR10.2C protein
  misc_feature: Homolog of GI Number: 15341238 NR Desc: pathogenesis
  misc_feature: Homolog of GI Number: 82407324 NR Desc: Chain B
MGIFTCEDETTSPVAPATLYKALVTDADNVIPKAVEAFRSVENLEGNGGPGTIKKITFVEDGESKFVLHKIESVDEANLGYSYSVVGGVGLPDTVEKITFECKLAAGANGGSAGKLTVKYQTKGDAQPNPDDLKIGKVKSDALFKAVEAYLLANPHYN

SEQ ID NO: 2543 - DNA, 422 bp, Glycine max
  misc_feature: Ceres CLONE ID no. 638649
  misc_feature: Ceres CDNA ID no. 35383242
  CDS (41)..(244): REFERENCED BY SEQ ID NO: 2544
actttccttcttctctcccgctgaaacctttcttcacaaaatggcctcaactacactaacaaccctctccctccgcaacctctcttatcctacaccctcctcctcttcttaccctacgcacctctccgccaacccctcctccctccaattccccaacttctcccaccgcgccaccaccacgcgccgcgcccgcgtcgtggaggcgagagggcttagaaacaaggttgaggggtttgggtgttaggtgcttagggttagtgttagggttctggtcttgaaggttgtgtttgggagtttggttgtaggaatcctctccatctatgtgtttatgtgaaatgtgaatctccttgcttttgtaattacattgtgttactatgaggagttaatgaaaatgctatggttctcgaaaaaaaaaaaaaaaa

SEQ ID NO: 2544 - protein, 67 aa, Glycine max
  misc_feature: Ceres CLONE ID no. 638649
  misc_feature: Ceres CDNA ID no. 35383242
MASTTLTTLSLRNLSYPTPSSSSYPTHLSANPSSLQFPNFSHRATTTRRARVVEARGLRNKVEGFGC

SEQ ID NO: 2545 - DNA, 797 bp, Triticum aestivum
  misc_feature: Ceres CLONE ID no. 638901
  misc_feature: Ceres CDNA ID no. 40351131
  CDS (108)..(614): REFERENCED BY SEQ ID NO: 2546
ctgctcatcccctgcttccgcgccacgaggagaagcgaaacagagcactcaacattccacaacccaagagaaaacccaggcaggcctccggcgaccagccgatcacgatgatgctgcgcgcggcggggaagaggctgatcggcgctccggggattcgcccagcggccgccggagactcctccggcgcggcgatggcggtggcggcgaggagggggtaccacgagcgggtggtggaccactacagcaacccgcgcaacgtgggggcgttcgacaaggacgacgccgacgtcggcaccggcctcgtcggcgcgccggcctgcggggacgtcatgaagatgcagatccgcgtggaccaggcctccggcaggatcgtcgacgcctgcttcaagaccttcggctgcggctccgccatcgcatcctcctccgtcgccactgagtgggtgaagggaaagcagatggaggaagtgatagcgatcaagaacacagagatcgccaagcatctgtcgctgccgccagtgaagctccactgcagcatgctcgccgaggacgccatcaaggccgcggtgaaagactacgaggcaaagaagacgaaggcggccaaggcagaggagtagttcgtcagtcagacgcataggaagtaacacatcatgtgcatatactgcataataaagggagagtgatggtaatgatgatgtttgtactgtagtactgacaaaactcgtgtgagcaataagcattgtgctgtgtactgtatgttcgcagaagtaaaatgcagaaattcaaaaaaaaaaaaaaaa

SEQ ID NO: 2546 - protein, 167 aa, Triticum aestivum
  misc_feature: Ceres CLONE ID no. 638901
  misc_feature: Ceres CDNA ID no. 40351131
  misc_feature (35)..(162): Pfam Name: NifU_N PFAM Desc: NifU
MLRAAGKRLIGAPGIRPAAAGDSSGAAMAVAARRGYHERVVDHYSNPRNVGAFDKDDADVGTGLVGAPACGDVMKMQIRVDQASGRIVDACFKTFGCGSAIASSSVATEWVKGKQMEEVIAIKNTEIAKHLSLPPVKLHCSMLAEDAIKAAVKDYEAKKTKAAKAEE

SEQ ID NO: 2547 - DNA, 1428 bp, Triticum aestivum
  misc_feature: Ceres CLONE ID no. 638981
  misc_feature: Ceres CDNA ID no. 40351132
  CDS (51)..(1259): REFERENCED BY SEQ ID NO: 2548
atccacttccacacccacaaacaattccacgctccatctgtgcaagaaagatgccaccagtgctcctcctcgtcctggccgcctcgctcgtggcgctgccgtcgtgccaaagccttccggtgctcgctccggtcaccaaggaccccgccacctccctctacacaatccccttccacgacggcgccagcctcgtcctcgacgtcgccggccctctcgtctggtccacgtgcgatggcggccagccgcccgcggagatcccgtgcagcagccccacctgcctcctcgccaacgcctaccccgccccgggctgccccgcgcccagctgcggcagcgacaggcacgacaagccgtgcacggcgtacccgtacaacccggtcagcggcgcgtgcgccgcagggagcctctcccacacgagattcgtggccaacaccaccgacgggagcaagccggtgagcaaggtgaacgtcggggtcctggcggcgtgcgcgccgagcaagctcctggcgtcgctgccccggggctccacgggcgtggccgggctcgcgaactccggcttggcgctgccggcgcaggtggcatccgcgcagaaggtcgccaacaggttcctcctctgcctccccaccggcggccctggcgtggccatatttggcggcggcccggtcccgtggccgcaattcacgcagtcgatgccttacacgccgctcgtcaccaagggcggcagccccgcgcactacatctcggccaggtccattgtagtgggggacacccgcgtccccgtatcggagggcgcgctcgccaccggcggcgtgatgctcagcacgaggctaccctacgtcttgctccgccccgacgtgtaccgcccgttgatggacgcgtttaccaaggccctggcggcgcagcatgccaacggagcgcccgtggcgcgcgcagtggaggctgtggcgccgttcggggtgtgctacgacacgaagacgctgggcaacaacctcggcgggtacgcggtgcccaacgtccagctggggctcgatggcggcagtgactggacgatgaccgggaagaactcgatggtggacgtcaagcaagggacggcgtgcgttgcgttcgtggagatgaagggagtggcggccggcgacggcagggcgccggcggtgatcctcggaggggcccagatggaggacttcgtgctcgacttcgacatggagaagaagcggctcgggtttagcaggctgccgcactttacgggttgcggcggcctgtaataataaatctgtttaacgacaggtggattcgtccactactgcgtgtaataaataagggaagaaacactttccatcagtggtttgataagaagcggccatcagacccatcgtcgtccgttgattctggttaaatctaacggtcaagatacctccaaaaaaaaaaaaaaaa

SEQ ID NO: 2548 - protein, 402 aa, Triticum aestivum
  misc_feature: Ceres CLONE ID no. 638981
  misc_feature: Ceres CDNA ID no. 40351132
MPPVLLLVLAASLVALPSCQSLPVLAPVTKDPATSLYTIPFHDGASLVLDVAGPLVWSTCDGGQPPAEIPCSSPTCLLANAYPAPGCPAPSCGSDRHDKPCTAYPYNPVSGACAAGSLSHTRFVANTTDGSKPVSKVNVGVLAACAPSKLLASLPRGSTGVAGLANSGLALPAQVASAQKVANRFLLCLPTGGPGVAIFGGGPVPWPQFTQSMPYTPLVTKGGSPAHYISARSIVVGDTRVPVSEGALATGGVMLSTRLPYVLLRPDVYRPLMDAFTKALAAQHANGAPVARAVEAVAPFGVCYDTKTLGNNLGGYAVPNVQLGLDGGSDWTMTGKNSMVDVKQGTACVAFVEMKGVAAGDGRAPAVILGGAQMEDFVLDFDMEKKRLGFSRLPHFTGCGGL

SEQ ID NO: 2549 - DNA, 1054 bp, Triticum aestivum
  misc_feature: Ceres CLONE ID no. 639039
  misc_feature: Ceres CDNA ID no. 40351133
  CDS (297)..(668): REFERENCED BY SEQ ID NO: 2550
cattttccttcacgccgcaatcaagagaacgaaggcgcctagggttgcggcttccatcttgccactccagcggctcatcccagccagccacgccccattgacggcctcctccattcttctctgcaccggccttgtccccgtcttccccgccctgttccagctcccctcctgccgtgcgccttgaactcctcggatcaaacccagcttcccctctgcgtaatcgtcctgagtggtaactacggtctgacttcccgttgcctgaccagttgttacatttgcaaaggacaaattctggcatgaataccactcagaaagttgatccaggggaaccagctgctaagattgctcaacaagcctctcagttcaaacgatggggacgcagacatccatttgttcgatatggtcttccactcatttcgttgacagtgtttggtgcggttggtctagctcatcttatacagggaagcaaagaagtaacaaaggaaaaggaggatatggaatgggaggtcgtagagaaaacaaaagctctgagccgaacaggaccggttgaaggggcctataagcctaagaagctctcactagaggatgaactcaaggctttgcagcaaaaggtggacataaacagctacgactacaagagaattcccaaacaaaatgaaaacaagtgaagtaaagcaccggttatcatgctaaggagtgggagattttcttaaaagctctgaagtagtttcttcatattgttacttcataagttccttgggatgctgtcgaagtgttaaaatgagattatggagacattatcatcagagaactctgtgcttcatcagccaccagcagtcgagacttaggtcgatgatccttatgaaggcttgaaccgtaggaatcatctttgtagcaataggagatggacgttttcacagtccgcccaagtgagtttctttttttgagttgatcgaataccgccttcattatcaaggggccaataaattgtaacagagtactctgacgtgtgaacaatcagattttgtatgccattccttggaagccaaaaaaa

SEQ ID NO: 2550 - protein, 123 aa, Triticum aestivum
  misc_feature: Ceres CLONE ID no. 639039
  misc_feature: Ceres CDNA ID no. 40351133
MNTTQKVDPGEPAAKIAQQASQFKRWGRRHPFVRYGLPLISLTVFGAVGLAHLIQGSKEVTKEKEDMEWEVVEKTKALSRTGPVEGAYKPKKLSLEDELKALQQKVDINSYDYKRIPKQNENK

SEQ ID NO: 2551 - DNA, 1100 bp, Triticum aestivum
  misc_feature: Ceres CLONE ID no. 639052
  misc_feature: Ceres CDNA ID no. 25445682
  CDS (102)..(836): REFERENCED BY SEQ ID NO: 2552
ctaatcgaaaaacgattacgaagcgtgcccaactccatctgcttccttttcctcttccccccgtccccgacgacccccggccgaaaccctagcgaggcgcgatgttcgggtaccggaaggcgccggacctcgacctcgaggcgggcggctcggcggcgctctacccggggatgacggaggacgtggagctgcgctgggccttcatccgcaagatctacgtcatcctctcggtccagctcgccatgaccgccgccgtcgcggggttcgtcgtcaaggtccccgccgtctccgagttcttcgtctcctccaacgctggcctgggcctctacatcttcctcctcgtcctgcccctcatcgtgctctgccccctgcgctactaccaccagaagcaccccgtcaacctcatcctgctcggcgtcttcaccgtctccatcagcttcgccgtcggcatgacgtgcgccttcaccagcggaaaaatcatcttggaagctgcaattctgacagcagtggtggtgatcagcttgactgcctacactttctgggctgcaaagagaggccatgatttcaacttcctgggcccgttcctgtttggagctcttatggtgctgctggtgttctcacttatccagatctttttcccactgggcaagatctccaccatgatatatggggccgtggcgtcgatcatcttctgtggctacatcatcttcgacacggacaacatcatcaagcgccacacgtatgacgagtacatctgggctgccgtgtccctctacctcgacatcatcaacctgttcctgaatctgatgcaaattctgcgggcagctgatagctgagcgcaccttgcccaacatcgcatgatttaagtccactagcttgtgcatatcagaaaattcatgaatgcccgcagatacctgtaggcatgtacaatcgttatcagtaaattctgccgtcctagactccatcacatgtcttgtttcctagcttcctggagtatgcaatgtgtgattgaaccaagctgcacgatgaaaatatactcactggtgctttgtgattgcaaggcacgtgaatttaattccctgccaaaaaaaaaaaaaaaa

SEQ ID NO: 2552 - protein, 244 aa, Triticum aestivum
  misc_feature: Ceres CLONE ID no. 639052
  misc_feature: Ceres CDNA ID no. 25445682
  misc_feature (27)..(243): Pfam Name: UPF0005 PFAM Desc: Uncharacterised protein family UPF0005
  misc_feature: Homolog of GI Number: 50934609 NR Desc: putative z
  misc_feature: Homolog of GI Number: 61889383 NR Desc: putative receptor associated protein
  misc_feature: Homolog of GI Number: 38603872 NR Desc: At1g03070
  misc_feature: Homolog of GI Number: 50918627 NR Desc: putative receptor
  misc_feature: Homolog of GI Number: 59675965 NR Desc: putative receptor associated protein
  misc_feature: Homolog of GI Number: 42566799 NR Desc: transmembrane protein
  misc_feature: Homolog of GI Number: 55238334 NR Desc: ENSANGP00000027407
  misc_feature: Homolog of GI Number: 10197628 NR Desc: MDS013
  misc_feature: Homolog of GI Number: 24653223 NR Desc: CG3798
  misc_feature: Homolog of GI Number: 45551091 NR Desc: CG3798
MFGYRKAPDLDLEAGGSAALYPGMTEDVELRWAFIRKIYVILSVQLAMTAAVAGFVVKVPAVSEFFVSSNAGLGLYIFLLVLPLIVLCPLRYYHQKHPVNLILLGVFTVSISFAVGMTCAFTSGKIILEAAILTAVVVISLTAYTFWAAKRGHDFNFLGPFLFGALMVLLVFSLIQIFFPLGKISTMIYGAVASIIFCGYIIFDTDNIIKRHTYDEYIWAAVSLYLDIINLFLNLMQILRAADS

SEQ ID NO: 2553 - DNA, 741 bp, Triticum aestivum
  misc_feature: Ceres CLONE ID no. 639136
  misc_feature: Ceres CDNA ID no. 40351134
  CDS (103)..(492): REFERENCED BY SEQ ID NO: 2554
agtaaattgatcaggtaccgagggtttcggcctcccgtgcactttatctaccaagctccgggcggcgaccatcaccaaccaggtgctcgaggaggtcgatcgatggcgtcggagaaagacgcggcgctcgcccccgtgcccaacgacaaccccaccatatttgacaagatcatcaaaaaggagataccttctacggtggtgtatgaggatgagaaggtcctcgctttcagagacataaatcctcaagctccgacccacattgtaatcattcccaaagtcaaggatggattaaccggcctttcaaaggcagaagagaggcatgtagagatacttggctgcctcctctacgctgcaaaagttatcgctaagcaggaaggacttgaagatggctaccgtattgtcatcaatgatggccctagtggatgtcaatctgtttaccacatccatgtccatctccttggagggaggcagatgaactggcccccaggctaaagaagctcttggttgtcggtcaatcttcatggcagctatgtcctttgcatctcaatcgaataattcctgtaattgacataacagtttgtgcgaggaacatttgctctatctatggaatagccgaaaccatcctgctgtgaatgtatggacaagaaacttgaagctgaatcgtctcaaaaaaaaaaaaaaaaaaaaaaaaaaaaaaaaaaaaaaaaaaaaaaaaaaaaaaaaaaaaaaaaaaaaaaaaaa

SEQ ID NO: 2554 - protein, 129 aa, Triticum aestivum
  misc_feature: Ceres CLONE ID no. 639136
  misc_feature: Ceres CDNA ID no. 40351134
  misc_feature (18)..(124): Pfam Name: HIT PFAM Desc: HIT domain
MASEKDAALAPVPNDNPTIFDKIIKKEIPSTVVYEDEKVLAFRDINPQAPTHIVIIPKVKDGLTGLSKAEERHVEILGCLLYAAKVIAKQEGLEDGYRIVINDGPSGCQSVYHIHVHLLGGRQMNWPPG

SEQ ID NO: 2555 - DNA, 1271 bp, Triticum aestivum
  misc_feature: Ceres CLONE ID no. 639166
  misc_feature: Ceres CDNA ID no. 25446856
  CDS (61)..(1068): REFERENCED BY SEQ ID NO: 2556
ataggcacacaccagcctagtagcattggagagcagcagatagagaaccagctagcagcaatgggcaggcaggatgttgcttccatgtttgccgttgctctcttcctcggagcattcgcttctgttcctacaagtgtgcactccatcggcgtgtgctacggcgtgatcgccaacaacctcccgccggcgaacgaggtggtgcagctctacaggtccaaaggcatcaccggcatgcgcatctacttcgccgacgccaatgccctctcggcgctccgcaactccggcatcagcctcatcctcgacgtcggcaacgaccagctcgccaacctcgccgcgagcacctccaacgcggcgtcctgggtccagaaaaacgtccggccatactacccggccgtgaacatcaagtacatcgcggccggcaacgaggtccagggcggcgccacgcagagcatcgtgccggccatgcgcaacctcaacgcggccctctccgcggctgggctcggcgccatcaaggtgtccacctccatccggttcgacgaggtggacaagtcctttccgccctccgacggcgtgttcaacaatgcctacatgacggacgtggcccggctcctggcgagcacgggcgcgccgctgctggccaacgtgtacccctacttcgcctacaagcgtgacccgcagaacatcaagctcaactacgcgacgttccggccgggacccacggtgcgggacgacaagaacgggctgacctacacgtgcctgttcgacgcgatggtggacgccgtggtcgccgccctggagaaggccggggcgccggcggtgagggtggtggtgtccgagagcgggtggccttcggcgagcgggttcgcggcgacggccgacaacgcgagggcgtacaaccaggggctgatcgaccacgtcggcgggggcacaccgaagaggcgcggcgcactggagacgtacatcttcgccatgttaaacgagaacttcaagagaggggagctggtggagaagcacttcgggctgttcaacccggacaagtcgccggcgtaccccatccggttcaagtgatccagtctagtctagtctagctagcttacacgtatgcgtacctaggtcttcaataagcagcacgtacgtacacacgtttgacacgtacgtacatcgatccatgggagagggaaaccaatgacttcctgttcctggtggtgttacatcatcatatgaataaagagatggaagcagttatgattttgtgaaaaaaaaaaaaaaaa

SEQ ID NO: 2556 - protein, 335 aa, Triticum aestivum
  misc_feature: Ceres CLONE ID no. 639166
  misc_feature: Ceres CDNA ID no. 25446856
  misc_feature (29)..(334): Pfam Name: Glyco_hydro_17 PFAM Desc: Glycosyl hydrolases family 17
  misc_feature: Homolog of GI Number: 167010 NR Desc:
  misc_feature: Homolog of GI Number: 167048 NR Desc: 1
  misc_feature: Homolog of GI Number: 809430 NR Desc: Chain B
  misc_feature: Homolog of GI Number: 3068599 NR Desc: beta
  misc_feature: Homolog of GI Number: 21693553 NR Desc: beta
  misc_feature: Homolog of GI Number: 226804 NR Desc: endo
  misc_feature: Homolog of GI Number: 322834 NR Desc: glucan endo
  misc_feature: Homolog of GI Number: 3757682 NR Desc: glucan endo
  misc_feature: Homolog of GI Number: 3037080 NR Desc: glucan endo
  misc_feature: Homolog of GI Number: 61657664 NR Desc: putative glucan endo
MGRQDVASMFAVALFLGAFASVPTSVHSIGVCYGVIANNLPPANEVVQLYRSKGITGMRIYFADANALSALRNSGISLILDVGNDQLANLAASTSNAASWVQKNVRPYYPAVNIKYIAAGNEVQGGATQSIVPAMRNLNAALSAAGLGAIKVSTSIRFDEVDKSFPPSDGVFNNAYMTDVARLLASTGAPLLANVYPYFAYKRDPQNIKLNYATFRPGPTVRDDKNGLTYTCLFDAMVDAVVAALEKAGAPAVRVVVSESGWPSASGFAATADNARAYNQGLIDHVGGGTPKRRGALETYIFAMLNENFKRGELVEKHFGLFNPDKSPAYPIRFK

SEQ ID NO: 2557 - DNA, 995 bp, Triticum aestivum
  misc_feature: Ceres CLONE ID no. 639250
  misc_feature: Ceres CDNA ID no. 40351135
  CDS (180)..(725): REFERENCED BY SEQ ID NO: 2558
agctagttaaagagctcccttctcgcttcctcctcaccccgcactgccccaccgcgccggccccgactccgactccgacactccccggcggcgcgcgctcgccgagctcggtcgcgctgcggttcggatcccccggaggcgtgcggcttcggcgcgggcgagggtcggcggcggtcgcgatggcatccgacgggcgcgtggagcggatcgcgtccagcatccgcgccatccccaacttccccaagccagggattttgtttcaggacatcacaaccttgcttctcgatccgcaggcattccgtgacaccactgacctctttgtcgagcggtacaaggacaaagacataactgtagttgctggtgttgaagccagaggattcatttttggtcctcccattgcattagccataggtgcaaagtttgttccaataaggaagccgaaaaaattacctggtgaggtgatatcggaagaatattctctggaatatggcactgacaaaattgaaatgcacgtaggagctgtgcagcccaatgaccgagtccttattgtggatgatctaattgccacagggggaaccctttgtgccgctgccaaacttattgagcgtgttggagcaaaggtggttgagtgtgcctgtgttattgaactgccagagctgaagggccgggacaagttgggggacatgccagtttttgtcctagtgcaggcagacgagtcagtatgaaacaagttgtgactcttgagttgttccaatgatgtttcccttctggaactatactggaagcagcaaagatatccgttacaatcttagctagttcctatctggagctgctcaataaaagttttatctttaaatttgtccttctggaactgtttgggaatgcagacttgattgttgttccctgtaatatgtggcttatttctgtcaaaaacagtgcaaattattcatgtcaatgaaggatagtctgtaaaaaaaagaaaaaaaaaaaaaaaa

SEQ ID NO: 2558 - protein, 181 aa, Triticum aestivum
  misc_feature: Ceres CLONE ID no. 639250
  misc_feature: Ceres CDNA ID no. 40351135
  misc_feature (29)..(165): Pfam Name: Pribosyltran PFAM Desc: Phosphoribosyl transferase domain
MASDGRVERIASSIRAIPNFPKPGILFQDITTLLLDPQAFRDTTDLFVERYKDKDITVVAGVEARGFIFGPPIALAIGAKFVPIRKPKKLPGEVISEEYSLEYGTDKIEMHVGAVQPNDRVLIVDDLIATGGTLCAAAKLIERVGAKVVECACVIELPELKGRDKLGDMPVFVLVQADESV

SEQ ID NO: 2559 - DNA, 2014 bp, Triticum aestivum
  misc_feature: Ceres CLONE ID no. 639496
  misc_feature: Ceres CDNA ID no. 40041280
  CDS (41)..(1759): REFERENCED BY SEQ ID NO: 2560
gaaacttgctctgcctcggtcgcgcatttcgtcgaacaccatgccgtcgtccgccgccgccccgtccgacgacgacggcaagctccagcgcttcctgcaatggctccaggccaacggcgccgacctccgcggctgcgcgatccgggcctgcggccgcaagggtttcggcgtctacgccaccgccgccgccgccgacggtaaccgttgctcttctccccctcccggagatggcggtgcgggggtggtgatggcggtgccgctggacctggccgtgaccccgatgcgggtgctgcaggacccgctcgtcggcccgcggtgccgcgcgctcttcgaggacggcggcgtcgacgaccgcctcctcgtcatgctcttcctcatggccgagcgcctccgccccacctccctctggaagccgtacttggatgtgctcccgagcaccttcgggagctccgtgtggttcgacgaccaggagctcgccgaggtggaagggacgacgctgcaccgcgccacggtcatgcagagaaaatcgttacagaagttattcgatgacaaggtgaaaggtctggtcgaggagcttctgcatgtcgacgaatcgggaagctcaattgaagtgcggtttgaggacttcctttgggcaaactcaattttctggactcgagcgctgaacatcccgttgcctcattcttacgtttttcctggctcacttgatgagcaacagaacagtactggggaagttttggctgattctagtctcaccaaccaacaggaaactgacattacaacgaagaattgtagtggtgacgagattcctgaatcttgtaatacagagtcaatttgggttgagggactcgtgccaggaatcgatttctgtaaccataatataaaggctctggcgacatgggaagttgattcggtgggaaatttaacaggaattcctgcttcaatgtacctcatgctggtgcaagctggtaaaagctctgttgagactgggacagagatctacataaattatggcaacaaaggaaatgaggaattgctgtacctatatggatttgtggttgacaataatccagatgattatctcatggttcattatccaatagaagctcttagacagcttcagtctgctgacgttaagatgaagctaattgagatgcagaaggctgaattgagatgtcttctacctacaagtttgcttgataggggatttttcggaaccagtaccagttctggtgaagatgatgataacaagaaaaagcatttttctagttacagttggagcggtcaacgcaaagttccatcatatctccaaaaaaatgttttccctcaagaatttttaagtactcttcgcacaattgccatgcaagaacatgaacttgaacaggttgcttccctgcttggagaggttgggtctactgaggatggagaaccatctgatgcagagatcaaaagtgctatatgggaggtgtgcggtgataatggagcactaggattgcttgtggatcttcttagggtgaaaatggctgaacttgaagaaggcactggaacagaagcatctgacagtcaactgctggagaaatttgattcaaatgatccagacgactcctcaagtgcaaccattgagagcaccgaagcgacgaagtcgagagtgaacagaaggtcgtgtatagtgtaccgaagagggcagaagcagctgacgaggatgttcctcagggaggcggaacgtcttctggagctgtccgcggaggagcagacctaaaatgacttgcttacctgggagccacacatctctaaccagacttggtgttgatccgctttggagaactacatttgcccccatccaaactttggacaaattttgttatccttgcattgggtttttcagaccgaaaaatgggattacactcacacaaagaaagtgtacactaaatccaacctatatgccaataaatagctagaatgtgacagctgccaataaagctcactttatttagtccgaaaaaaaaaaaaaaaa

SEQ ID NO: 2560 - protein, 572 aa, Triticum aestivum
  misc_feature: Ceres CLONE ID no. 639496
  misc_feature: Ceres CDNA ID no. 40041280
  misc_feature (16)..(331): Pfam Name: SET PFAM Desc: SET domain
  misc_feature: Homolog of GI Number: 42561607 NR Desc: SET domain
  misc_feature: Homolog of GI Number: 55775298 NR Desc: SET domain
  misc_feature: Homolog of GI Number: 66778264 NR Desc: LigA
  misc_feature: Homolog of GI Number: 57225868 NR Desc: cytoplasm protein
MPSSAAAPSDDDGKLQRFLQWLQANGADLRGCAIRACGRKGFGVYATAAAADGNRCSSPPPGDGGAGVVMAVPLDLAVTPMRVLQDPLVGPRCRALFEDGGVDDRLLVMLFLMAERLRPTSLWKPYLDVLPSTFGSSVWFDDQELAEVEGTTLHRATVMQRKSLQKLFDDKVKGLVEELLHVDESGSSIEVRFEDFLWANSIFWTRALNIPLPHSYVFPGSLDEQQNSTGEVLADSSLTNQQETDITTKNCSGDEIPESCNTESIWVEGLVPGIDFCNHNIKALATWEVDSVGNLTGIPASMYLMLVQAGKSSVETGTEIYINYGNKGNEELLYLYGFVVDNNPDDYLMVHYPIEALRQLQSADVKMKLIEMQKAELRCLLPTSLLDRGFFGTSTSSGEDDDNKKKHFSSYSWSGQRKVPSYLQKNVFPQEFLSTLRTIAMQEHELEQVASLLGEVGSTEDGEPSDAEIKSAIWEVCGDNGALGLLVDLLRVKMAELEEGTGTEASDSQLLEKFDSNDPDDSSSATIESTEATKSRVNRRSCIVYRRGQKQLTRMFLREAERLLELSAEEQT

SEQ ID NO: 2561 - DNA, 672 bp, Triticum aestivum
  misc_feature: Ceres CLONE ID no. 639524
  misc_feature: Ceres CDNA ID no. 15173692
  CDS (112)..(547): REFERENCED BY SEQ ID NO: 2562
cgaaaaaaaaccccagacgaaaccctagcctgcctcccaggagcgccgagtccctccgcccccaacagatctacgcgcgcgaggttcggttcggtcttcggagctcgagacatggcggaggagaatgccccagttgaggttgccgctccggttgcggcccctaccccagttcttggagagcccatggacttgatgactgctctgcagcttgtgatgaagaagtcaagcgctcatgatggccttgtcaagggactccgtgaagctgcgaaagcgattgagaagcatgctgctcagatctgtgtgcttgctgaggactgcgaccagcctgattacgtgaagctggtgaaggcactgtgtgctgagcacaacgttcacttggtcactgtgcctagtgccaaaactcttggcgagtgggctgggctttgcaagattgactctgagggcaaggcaagaaaggtggtgggctgctcatgtgtcgttgtgaaggactacggcgaagattccgagggtcttcacatcgtgcaggaatacgtcaagtcgcactagggacggccttccagtttccggattctgcaggatgctagtagcttctttatgattgtgttccatgtctgaaacttgttagcctatgaaaattatcgtatgcggttttgtccaaaaaaaaaaaaaaaa

SEQ ID NO: 2562 - protein, 144 aa, Triticum aestivum
  misc_feature: Ceres CLONE ID no. 639524
  misc_feature: Ceres CDNA ID no. 15173692
  misc_feature (29)..(124): Pfam Name: Ribosomal_L7Ae PFAM Desc: Ribosomal protein L7Ae/L30e/S12e/Gadd45 family
MAEENAPVEVAAPVAAPTPVLGEPMDLMTALQLVMKKSSAHDGLVKGLREAAKAIEKHAAQICVLAEDCDQPDYVKLVKALCAEHNVHLVTVPSAKTLGEWAGLCKIDSEGKARKVVGCSCVVVKDYGEDSEGLHIVQEYVKSH

SEQ ID NO: 2563 - DNA, 756 bp, Triticum aestivum
  misc_feature: Ceres CLONE ID no. 639688
  misc_feature: Ceres CDNA ID no. 36707411
  CDS (90)..(560): REFERENCED BY SEQ ID NO: 2564
cccaagcagccgccgccgcaaccctagagctcctccatcccctcctctcccgggcgcctccaccccccgcctagcggcgcgaagcgaccatgacgttcaagcggaggaacggcgggcgcaacaagcacggccgcggccacgtcaagtacatccgctgctccaactgcgccaagtgctgccccaaggacaaggctatcaagcgtttcttggtgaggaacatcgtggagcaggctgctgtgagagatgtgcaggaggcttgtgtacatgatggatatgttcttcccaagctgtatgccaaggtgcaccactgcgtttcctgtgccatccatgctcacattgtccgtgtccgctcccgtgagaacaggaggaaccgggagcccccgcagcgtttcaggcgcagggacgacggcccgaggcctggacagggtggcccgccccgtgccggcggccctggtgcccctggtggtgcgcctgctggcgccggtgccgttcctggtgcccctggtggtgcgcctgctggcgccggtgccgttcctggtgcccctgctccccgtgtctagtttgggaatgctttgtccgtgatatgcgccagccctagttttactcgtatctggatattggactattctacctagtttttgctgtaatcggttgtactgaaagttggttggtcaagcacaatttgtgatcaggtctttaatgttttgacaatttcgctgctatctatatcggagagaaccaaaaaaaaaaaaaaaa

SEQ ID NO: 2564 - protein, 156 aa, Triticum aestivum
  misc_feature: Ceres CLONE ID no. 639688
  misc_feature: Ceres CDNA ID no. 36707411
  misc_feature (1)..(118): Pfam Name: Ribosomal_S26e PFAM Desc: Ribosomal protein S26e
  misc_feature: Homolog of GI Number: 50931777 NR Desc: putative 40S ribosomal protein S26
  misc_feature: Homolog of GI Number: 56201998 NR Desc: putative ribosomal protein S26
  misc_feature: Homolog of GI Number: 7440567 NR Desc: probable ribosomal protein S31
  misc_feature: Homolog of GI Number: 5706704 NR Desc: ribosomal protein S26
  misc_feature: Homolog of GI Number: 56236112 NR Desc: At2g40510
  misc_feature: Homolog of GI Number: 24111313 NR Desc: At2g40590/T2P4.6
  misc_feature: Homolog of GI Number: 20466414 NR Desc: 40S ribosomal protein S26
  misc_feature: Homolog of GI Number: 22137298 NR Desc: AT3g56340/F18O21_300
  misc_feature: Homolog of GI Number: 3885515 NR Desc: similar to ribosomal protein S26
  misc_feature: Homolog of GI Number: 61654752 NR Desc: S26
MTFKRRNGGRNKHGRGHVKYIRCSNCAKCCPKDKAIKRFLVRNIVEQAAVRDVQEACVHDGYVLPKLYAKVHHCVSCAIHAHIVRVRSRENRRNREPPQRFRRRDDGPRPGQGGPPRAGGPGAPGGAPAGAGAVPGAPGGAPAGAGAVPGAPAPRV

SEQ ID NO: 2565 - DNA, 577 bp, Triticum aestivum
  misc_feature: Ceres CLONE ID no. 639692
  misc_feature: Ceres CDNA ID no. 25447407
  CDS (62)..(295): REFERENCED BY SEQ ID NO: 2566
cttccccaccaaatttccgccgaagcagaaaaagcatcgtctcgtcgaggaatcaacagccatgggcggcggcaacgcgcagaagtccaagatggcgagggagaggaacctcgagaagctgaagggcggcaaggggagccagctcgaggccaacaagaaggccatgaacatccagtgcaagatatgcatgcagactttcatctgcaccacctctgaagcaaagtgcaaggagcatgctgaggcgaagcatccgaagagcgacctcgtccagtgcttcccccacctcaagcagtgatatctgcccaatcagatggagagagagataaaagagagagagaagctgtcataatccacctagtattatcatgttccgcaatgactgattgttgacctaagcttgggtctgaactctggtgtgctgctgtcccagctgctttggttgtgtgcccatctactatgtaatcgtcctctatcagcctgttgtgctacaatatcttagtcctgtgtggatttgctcctcgtgcttagtcagtatgctgtcacaaaatttatctttttgataaaaaaaaaaaaaaaa

SEQ ID NO: 2566 - protein, 77 aa, Triticum aestivum
  misc_feature: Ceres CLONE ID no. 639692
  misc_feature: Ceres CDNA ID no. 25447407
  misc_feature: Homolog of GI Number: 58177252 NR Desc: Chain A
  misc_feature: Homolog of GI Number: 32422715 NR Desc: predicted protein
MGGGNAQKSKMARERNLEKLKGGKGSQLEANKKAMNIQCKICMQTFICTTSEAKCKEHAEAKHPKSDLVQCFPHLKQ

SEQ ID NO: 2567 - DNA, 1155 bp, Triticum aestivum
  misc_feature: Ceres CLONE ID no. 639752
  misc_feature: Ceres CDNA ID no. 29191599
  CDS (125)..(961): REFERENCED BY SEQ ID NO: 2568
agtccggctcgagcacggtcaacccgcaccgcgtcgcgcacacgccgaagaagcgcagccgaaccctagctccgccccccgctcctccctccccggcggccgccgtccccgccgtcctcgcgccatggccgactccccgcgccggaggtacacaaggccctcaaggtccccttctccttataagggacgccaaaagcaaatgtcaaggtcaagatcacctgtagcccaatcccagtctagatctccatcgcctgatcctagagctcaggcgaggtcaagatctcgaagccctgcgagggagcgggagcctgaagccgtaaatcatggaaatactctgtacattactggactttcttctagggtgactgacaaagaacttagagagtacttcaataaggaaggaaaggtggtttcttgtcatgttgttcttgaaccccacacacgtgtttctcgtggatttgctttcatcaccatggacactgttgaagatgctgaacgctgcatcaagtatctcaaccagtcagaactgcaaggccggaacatcacagttgaaaagtcacgcagaggccgcccaaggacgcctactcctgggagctatctgggccatcgctatgagcgcagagagatgcagcgtggaggtagattccgcagaggaggctatggtcgtgacgactactatggcaacagctaccgcaggtctccgcctcccatgtaccgagaatacagggacacccgggactaccctccctacagggacacccgcgactactccccaccccacagggatgcccgagactactatgacggcaggggtggccggggctactccccccacaggtctccccctccttatggtggcagggcaaggagggagcggtctaggtcgctgccctactccccgtaccgtatgcccgaaaggggctatggccgccgtgctggtggcggtggctatgacaggtgaagggttgttgttctctttgcgtcagcagaggcccgatgtctaagttggatgataacatgctgcgcatgacgggcctcatgctagattatgtgtaagctgtactgtcttgaagaatatattcctggattttgcagtgttgtacctccacctagtttgtgtaacttggatgacattagacaaaaaaaaaaaaaaaa

SEQ ID NO: 2568 - protein, 278 aa, Triticum aestivum
  misc_feature: Ceres CLONE ID no. 639752
  misc_feature: Ceres CDNA ID no. 29191599
  misc_feature (71)..(142): Pfam Name: RRM_1 PFAM Desc: RNA recognition motif.
  misc_feature: Homolog of GI Number: 54291611 NR Desc: putative transformer
  misc_feature: Homolog of GI Number: 71143084 NR Desc: At4g35785
  misc_feature: Homolog of GI Number: 1781299 NR Desc: transformer
  misc_feature: Homolog of GI Number: 11275253 NR Desc: transformer
  misc_feature: Homolog of GI Number: 50945243 NR Desc: putative transformer
  misc_feature: Homolog of GI Number: 28973767 NR Desc: putative transformer
  misc_feature: Homolog of GI Number: 15292733 NR Desc: putative transformer
  misc_feature: Homolog of GI Number: 34902002 NR Desc: putative transformer serine/arginine
  misc_feature: Homolog of GI Number: 42570072 NR Desc: transformer serine/arginine
  misc_feature: Homolog of GI Number: 42573187 NR Desc: transformer serine/arginine
MADSPRRRYTRPSRSPSPYKGRQKQMSRSRSPVAQSQSRSPSPDPRAQARSRSRSPAREREPEAVNHGNTLYITGLSSRVTDKELREYFNKEGKVVSCHVVLEPHTRVSRGFAFITMDTVEDAERCIKYLNQSELQGRNITVEKSRRGRPRTPTPGSYLGHRYERREMQRGGRFRRGGYGRDDYYGNSYRRSPPPMYREYRDTRDYPPYRDTRDYSPPHRDARDYYDGRGGRGYSPHRSPPPYGGRARRERSRSLPYSPYRMPERGYGRRAGGGGYDR

SEQ ID NO: 2569 - DNA, 637 bp, Triticum aestivum
  misc_feature: Ceres CLONE ID no. 639813
  misc_feature: Ceres CDNA ID no. 25892730
  CDS (106)..(432): REFERENCED BY SEQ ID NO: 2570
aaagcaatcccaggacctccagctaatcatagcagccactcgactcgattcgattcgatctttctcggcgtctcgagctccccattcctcgatctcattccatccatggcgccgtccatctccattgccgccgcctcgccggcctcgggctggaagagcggcaggaaggccggggcggcgccggcggagggcgaggcggagaaggaggcgctgctgctgcggcgccgcaacgccgagctggagcgggaggtggcgctgctgcgggcggagctggaggccgcgcggctgcgcgccgaggccgcggaggaggccgaggagcggctgtgcgcgcagctgggcgaggccgagtgcgaggccctcgagctcgcgcgcgcctaccagggccacgtccaggagctcgcgcgggagctcgccgccgcacgcagcagatagcggagcgccgaggccgagctcgtcggtgattctttgacgatcgacgaagagacgtgtcgcgctctcgacacacgcggtgcggcggcagtatagatttctagacaaatgtaaaacgaggttaattagtattttcttgtccgagtatagattcctagcaagatgtccgagtaaaaagatggcagtgtttccaaaaaaaaaaaaaaaa

SEQ ID NO: 2570 - protein, 108 aa, Triticum aestivum
  misc_feature: Ceres CLONE ID no. 639813
  misc_feature: Ceres CDNA ID no. 25892730
  misc_feature: Homolog of GI Number: 66780099 NR Desc: PE
  misc_feature: Homolog of GI Number: 66777243 NR Desc: Ribonuclease PH
  misc_feature: Homolog of GI Number: 66776365 NR Desc: PE
  misc_feature: Homolog of GI Number: 66779698 NR Desc: Oxidoreductase
  misc_feature: Homolog of GI Number: 66776103 NR Desc: LigA
  misc_feature: Homolog of GI Number: 53769716 NR Desc: COG0454: Histone acetyltransferase HPA2 and related acetyltransferases
  misc_feature: Homolog of GI Number: 9453857 NR Desc: EBNA
  misc_feature: Homolog of GI Number: 66777231 NR Desc: Ferric
  misc_feature: Homolog of GI Number: 7269047 NR Desc: glycine
  misc_feature: Homolog of GI Number: 50918295 NR Desc: putative fibrillarin
MAPSISIAAASPASGWKSGRKAGAAPAEGEAEKEALLLRRRNAELEREVALLRAELEAARLRAEAAEEAEERLCAQLGEAECEALELARAYQGHVQELARELAAARSR

SEQ ID NO: 2571 - DNA, 642 bp, Glycine max
  misc_feature: Ceres CLONE ID no. 641056
  misc_feature: Ceres CDNA ID no. 40351137
  CDS (68)..(559): REFERENCED BY SEQ ID NO: 2572
agggttttgcgctgttgttgctgctcatcctccgtaacctccgagctctgcaccgaagaacgaagccatggggaagacacatggaatgggatctgctcgcaagctcaagtcccaccgcaggaggcaaaggtgggctgacaagtcatacaagaaatcacatcttggaaatgaatggaagaaaccttttgctggttcatcccatgccaagggaattgtccttgaaaagataggtattgaggctaagcagcccaactctgccattcgtaagtgtgccagggttcaacttatcaagaatgggaagaagattgccgcttttgtccctaatgacggttgcttgaactacattgaagagaatgacgaagtcttgattgctggatttggacgaaaaggtcatgctgtgggagatattcctggtgtcaggtttaaggtcgtgaaggtctctggtgtctctcttttggctctcttcaaggagaagaagagaagccaaggtcttaaatttgtggagtacttgtgtttgttttcaatagtttctctcaagtattatgaattttgtttttaggtgaacgggttttatgaacaattttctatcttttctagttattttactgaacttcatttaacatttcaaaaaaaaaaaaaaaa

SEQ ID NO: 2572 - protein, 163 aa, Glycine max
  misc_feature: Ceres CLONE ID no. 641056
  misc_feature: Ceres CDNA ID no. 40351137
  misc_feature (9)..(141): Pfam Name: Ribosomal_S12 PFAM Desc: Ribosomal protein S12
MGKTHGMGSARKLKSHRRRQRWADKSYKKSHLGNEWKKPFAGSSHAKGIVLEKIGIEAKQPNSAIRKCARVQLIKNGKKIAAFVPNDGCLNYIEENDEVLIAGFGRKGHAVGDIPGVRFKVVKVSGVSLLALFKEKKRSQGLKFVEYLCLFSIVSLKYYEFCF

SEQ ID NO: 2573 - DNA, 433 bp, Glycine max
  misc_feature: Ceres CLONE ID no. 641707
  misc_feature: Ceres CDNA ID no. 40351138
  CDS (29)..(313): REFERENCED BY SEQ ID NO: 2574
aaccaaaaccaaatattcttgggggagaatggggtcactaatggcctctgcttctatcactcttgcttttgccataatccttttcagcctcccatctgaaatctcagcaaacaactacatctactcctctcctccacctcccaagaagccttaccactacccatctccacctccaccagttccttcaccacctccacctaaggctccttaccactacccatctccgccaccaccaccaaagaagccctacaaatacccatcaccaccacccccagtctttaatgaatctttttgccctgctattagtttctaatgcttatcggttgcattttattattattaactttaaggttttgtatgaattaaatccattattaacaattatgacgtggagattcaatgatcatgggtttaaacaaaaaaaaaaaaaaaa

SEQ ID NO: 2574 - protein, 94 aa, Glycine max
  misc_feature: Ceres CLONE ID no. 641707
  misc_feature: Ceres CDNA ID no. 40351138
  misc_feature (9)..(82): Pfam Name: Extensin_2 PFAM Desc: Extensin
MGSLMASASITLAFAIILFSLPSEISANNYIYSSPPPPKKPYHYPSPPPPVPSPPPPKAPYHYPSPPPPPKKPYKYPSPPPPVFNESFCPAISF

SEQ ID NO: 2575 - DNA, 724 bp, Glycine max
  misc_feature: Ceres CLONE ID no. 641878
  misc_feature: Ceres CDNA ID no. 40351139
  CDS (87)..(536): REFERENCED BY SEQ ID NO: 2576
atccaactctctaaacaacacattaacctttctcattccccatctcctcaccttattcagccactgctaatttctagggttccgaaatggacgctggcggaaagatcaagaagggcgccggaggaagaaagggcggcggccctaagaagaagccggtttcaaggtccgtcaaggccggtctccaattccccgtcggaagaattggccgttatttgaagaaaggaaggtacgcccagcgtgtcggtaccggtgctcccgtttacttggccgcagttctcgagtacctagctgctgaggtgcttgagttggctgggaatgctgcacgtgacaacaagaagaacaggattattccgagacatgtgctattggctgtgaggaacgatgaggagttggggaaattgcttgctggtgtcaccattgcacatggtggtgtgcttccaaacattaaccctgttttgttgcctaagaagacggagagggctgccaaggagcctaagtctccatccaaggctactaaatctcctaagaaggcctagattatccttttttttttttttttttaaatctagtgttgtatatcggtgcttagatgcttttggtgtaacaggaaatttgatgtgtttcttaaacattgtaattcttgtcccattgtgttgcttgtaggagtgagtttgctttattaatgaaaagtggaaacctcttgtttccaaaaaaaaaaaaaaaa

SEQ ID NO: 2576 - protein, 149 aa, Glycine max
  misc_feature: Ceres CLONE ID no. 641878
  misc_feature: Ceres CDNA ID no. 40351139
  misc_feature (26)..(101): Pfam Name: Histone PFAM Desc: Core histone H2A/H2B/H3/H4
MDAGGKIKKGAGGRKGGGPKKKPVSRSVKAGLQFPVGRIGRYLKKGRYAQRVGTGAPVYLAAVLEYLAAEVLELAGNAARDNKKNRIIPRHVLLAVRNDEELGKLLAGVTIAHGGVLPNINPVLLPKKTERAAKEPKSPSKATKSPKKA

SEQ ID NO: 2577 - DNA, 602 bp, Glycine max
  misc_feature: Ceres CLONE ID no. 641896
  misc_feature: Ceres CDNA ID no. 25891415
  CDS (73)..(477): REFERENCED BY SEQ ID NO: 2578
acaacgcaactattgacaatctctctttattctattcactccctccatttcttcaaactaaatttcctgagaatggcgaaggctgcggagaaaaagcctgcggccgagaaggctccggcggagaaaaagccaaaggcggagaagaaggttccaaaggaaggcagcggcggagagaagaagaagaagaggtcgaagaagagcgtggaaacgtacaagatctacatattcaaggtgctgaagcaggtacatcctgacatcggcatttcgagcaaggccatggggatcatgaacagcttcatcaacgatatattcgagaagcttgcgcaggaagcagcgcgtctcgcgaggtataacaagaagccgaccattacatccagggagatccagaccgctgtcaggttggtgctgcccggggaacttgccaagcacgctgtttcggaaggaaccaaggctgttacaaagttcactagctcttagggttaggggttttttcgtttaggtattttttttgtaaagcttagtcgtagttagtggcttcatttggtattctatatgctaatgaaaatttttatttaaaagtaaaaataaaaaaaaaaaaaaaa

SEQ ID NO: 2578 - protein, 134 aa, Glycine max
  misc_feature: Ceres CLONE ID no. 641896
  misc_feature: Ceres CDNA ID no. 25891415
  misc_feature: No seed is being produced by the plant
  misc_feature: The plant flowers significantly late compared to wild-type.
  misc_feature: Useful for biocontainment applications
  misc_feature: Useful for making plants with modulated flowering time
  misc_feature (41)..(113): Pfam Name: Histone PFAM Desc: Core histone H2A/H2B/H3/H4
  misc_feature: Homolog of GI Number: 7635498 NR Desc: histone H2B
  misc_feature: Homolog of GI Number: 3021485 NR Desc: histone H2B
  misc_feature: Homolog of GI Number: 2558962 NR Desc: histone H2B1
  misc_feature: Homolog of GI Number: 82400146 NR Desc: histone H2B
  misc_feature: Homolog of GI Number: 6729516 NR Desc: histone H2B
  misc_feature: Homolog of GI Number: 21554180 NR Desc: histone H2B
  misc_feature: Homolog of GI Number: 30102580 NR Desc: At3g45980
  misc_feature: Homolog of GI Number: 21536602 NR Desc: histone H2B
  misc_feature: Homolog of GI Number: 21592734 NR Desc: putative histone H2B
  misc_feature: Homolog of GI Number: 30024116 NR Desc: putative histone H4
MAKAAEKKPAAEKAPAEKKPKAEKKVPKEGSGGEKKKKRSKKSVETYKIYIFKVLKQVHPDIGISSKAMGIMNSFINDIFEKLAQEAARLARYNKKPTITSREIQTAVRLVLPGELAKHAVSEGTKAVTKFTSS

SEQ ID NO: 2579 - DNA, 1096 bp, Glycine max
  misc_feature: Ceres CLONE ID no. 642404
  misc_feature: Ceres CDNA ID no. 40041281
  CDS (72)..(854): REFERENCED BY SEQ ID NO: 2580
ccttttacctttctccaatatttgtcaacaaaaacaacctctgactcacccttccctctccttgcttgagcatgaaagcttccactctacccttttgcccaacccatctccccaaaacctctcatttctctcttcatctccttccaatggcttccattcccacactctcttcacccctacccacaatctctgctcactcctcaccccattcaaacccaaacaaccactgcactctctctcccacctctctcttcggcaccaggatcaccctcctacgcgccacctcatcgtctcgttccctccccaacaccaattgccgtgcgacatcagccaccgtgtcgtttagcctccccaccccgaaacccctttcagatacgcctgagaaaaccccaaagtggtcggcgagggctataaagtcatatgcaatgggggaattggaagcgaggaagctcaagtatccaaacacgggaaccgaggcacttctcatggggattttggttgaaggaacaagtaaagctgcaaaattcttaagagctaatggaattactcttttcaaagtacgtgaagaaacagtagagctactagggaaatctgatttgtatttcttcagccctgagcatcctccattgactgaaccagcccagaaagcccttgattgggcaatcgaggagaaattgaagtcaggtgaaggaggagaaataaacgtgacacatttacttctaggaatttggtcacagaaagaatcagcaggtcaacagatcttggatactctaggtttcaatgatgaaaaagccaaagaacttgctaaaacaattgatggggatgttgatttgagtttcaaaaggcaagcttaagaaatttcttgcaataatggttgattgatacctgttgatcattggggttgcaagttcctctagggaaaattaactatactccctcaagattatcaacaagtgtctgcgttaatgttatttcaaatactacaccatttggagttgatgtaattcttattctttttttaatttaaaaaaaaaaaaaaaaaaaaaaaaaaaaaaaaaaaaaaaaaaaaaaaaaaaaaataaaaaaaaaaaaaaaa

SEQ ID NO: 2580 - protein, 235 aa, Glycine max
  misc_feature: Ceres CLONE ID no. 642404
  misc_feature: Ceres CDNA ID no. 40041281
  misc_feature (189)..(225): Pfam Name: Clp_N PFAM Desc: Clp amino terminal domain
MASIPTLSSPLPTISAHSSPHSNPNNHCTLSPTSLFGTRITLLRATSSSRSLPNTNCRATSATVSFSLPTPKPLSDTPEKTPKWSARAIKSYAMGELEARKLKYPNTGTEALLMGILVEGTSKAAKFLRANGITLFKVREETVELLGKSDLYFFSPEHPPLTEPAQKALDWAIEEKLKSGEGGEINVTHLLLGIWSQKESAGQQILDTLGFNDEKAKELAKTIDGDVDLSFKRQA

SEQ ID NO: 2581 - DNA, 789 bp, Glycine max
  misc_feature: Ceres CLONE ID no. 642583
  misc_feature: Ceres CDNA ID no. 40351140
  CDS (74)..(550): REFERENCED BY SEQ ID NO: 2582
acacacagcagcaaacatcttcacaaactagtaaatagtaatattattcttcgaatccattttattattcataatgggtgttttcacatttgaggatgaaaccacctcccctgtggctcctgctaccctttacaaagctctagttacagatgccgacaacgtcatcccaaaggctgttgatgccttcaggagtgttgaaaaccttgaggggaacggtggccctggaaccatcaagaagatcactttcgttgaggatggagaaagcaagtttgtgttgcacaaaatagaatcagttgatgaggcaaacttgggatacagctatagcgtagttggtggagttgggttgccagacacagtggagaagatcacattcgaatgcaaattggctgctggtgccaacggagggtctgctgggaagctaactgtcaaataccaaaccaaaggagatgctcagcccaacccagacgacctcaaaattggcaaagtcaagtctgatgctcttttcaaggccgttgaggcttaccttttggccaatcctcattacaactgatccaatattcaacttaattatcatcagtgtcttgcttatcatatacaagagtttccttgcgtggagtactgttatttagtactttgtgctcaagttttaagttggctttcaatgtaatgagtgtttccttttattttcttttgcctcagaattgtaagagctagtcgatatctttgtacctccttcatcaataaataaattataataaaggaaatcatcactcaaaaaaaaaaaaaaaa

SEQ ID NO: 2582 - protein, 158 aa, Glycine max
  misc_feature: Ceres CLONE ID no. 642583
  misc_feature: Ceres CDNA ID no. 40351140
  misc_feature (1)..(154): Pfam Name: Bet_v_I PFAM Desc: Pathogenesis
MGVFTFEDETTSPVAPATLYKALVTDADNVIPKAVDAFRSVENLEGNGGPGTIKKITFVEDGESKFVLHKIESVDEANLGYSYSVVGGVGLPDTVEKITFECKLAAGANGGSAGKLTVKYQTKGDAQPNPDDLKIGKVKSDALFKAVEAYLLANPHYN

SEQ ID NO: 2583 - DNA, 624 bp, Glycine max
  misc_feature: Ceres CLONE ID no. 642731
  misc_feature: Ceres CDNA ID no. 40351141
  CDS (65)..(487): REFERENCED BY SEQ ID NO: 2584
ctaataatttgtctccactcttgatcgtggaaggagagcttgttattctctatcaacaaggaaaatgtcaggtgaagaggttgttgttgcagctgagccagctgctgccatcccaggcgagcctatggatatcatgactgccttgcaacttgtgctcagaaaatctctggcttatggtggtcttgcacgaggccttcacgaaggggcaaaagtgattgagaagcatgctgcacaactctgtgttctagcagaagactgtgaccagcctgactatgttaaactggttaaggccctttgtgcagagcacaatgttagcctgctgacagttccgagtgcaaagacccttggagaatgggctggtttgtgcaagattgattccgaaggaaaagctaggaaggttactggttgctcctgtgtggttgtgaaggattttggtgaggagcatgaagcctataacgtcgttctgcagcatgtgaaatctcaatgagttgcaagattcatagattttatgcatttcattttgggttattccatgagaatgaattttgccttgtagctggattatatctaccttgggttttgattgtttaatatgactgccacattccaaaaaaaaaaaaaaaa

SEQ ID NO: 2584 - protein, 140 aa, Glycine max; identical to SEQ ID NO: 1964
  misc_feature: Ceres CLONE ID no. 642731
  misc_feature: Ceres CDNA ID no. 40351141
  misc_feature (25)..(120): Pfam Name: Ribosomal_L7Ae PFAM Desc: Ribosomal protein L7Ae/L30e/S12e/Gadd45 family

SEQ ID NO: 2585 - DNA, 589 bp, Glycine max
  misc_feature: Ceres CLONE ID no. 642807
  misc_feature: Ceres CDNA ID no. 35383243
  CDS (3)..(458): REFERENCED BY SEQ ID NO: 2586
ctgaccaccaccacccccaattctcaatcgaaaagcacaaggccgctgcagctctcgccggggctagggtttcgtcgatcgatcgatcagtcgacgcgagcgggagcgaagatgatcgaggtggtgctcaacgaccgcctggggaagaaggtgcgcgtcaagtgcaacgaggacgacaccatcggcgacctcaagaagctcgtggcggcgcagaccgggaccagggccgagaagatccgcatccagaagtggtacaccatctacaaggaccacatcaccctcggcgactacgagatccacgacggcatgggcctcgagctctactacaactagcctcatcacccccgccattgcaggttcgtcacctatcgttgcctgtgatgagcgttggttgcattccagtcccagtgtcttcagagctcgatgtgtgggctgaactccagcgagctactatataagtagtgcattattgtacccatgatgattattgacagcctgaacatacttttcctgtgatcgacctgcgaatctaatgtgctgttactgtgaagtttataaataacataaactgtgaaaacaaaaaaaaaaa

SEQ ID NO: 2586 - protein, 73 aa, Glycine max
  misc_feature: Ceres CLONE ID no. 642807
  misc_feature: Ceres CDNA ID no. 35383243
  misc_feature (2)..(73): Pfam Name: ubiquitin PFAM Desc: Ubiquitin family
  misc_feature: Homolog of GI Number: 77553656 NR Desc: Ubiquitin family
  misc_feature: Homolog of GI Number: 10177015 NR Desc: ubiquitin
  misc_feature: Homolog of GI Number: 50910751 NR Desc: ubiquitin
  misc_feature: Homolog of GI Number: 77548651 NR Desc: Ubiquitin family
  misc_feature: Homolog of GI Number: 56501213 NR Desc: ubiquitin
  misc_feature: Homolog of GI Number: 23509060 NR Desc: ubiquitin
  misc_feature: Homolog of GI Number: 63635471 NR Desc:  similar to Chain A
  misc_feature: Homolog of GI Number: 71026115 NR Desc: ubiquitin
  misc_feature: Homolog of GI Number: 40889756 NR Desc: Chain A
  misc_feature: Homolog of GI Number: 38492721 NR Desc: Chain A
MIEVVLNDRLGKKVRVKCNEDDTIGDLKKLVAAQTGTRAEKIRIQKWYTIYKDHITLGDYEIHDGMGLELYYN

SEQ ID NO: 2587 - DNA, 1782 bp, Glycine max
  misc_feature: Ceres CLONE ID no. 643026
  misc_feature: Ceres CDNA ID no. 36580831
  CDS (438)..(1487): REFERENCED BY SEQ ID NO: 2588
aaagcagaaaaaaaagtgggtcactttagcaacaaaaccttcacatcccatctctcatcaatggtgtttccaattgctgggtggagctttacgcaatcccattacactctctttctctccatttccttctattctctattattatatccttttctatttttatttttctcattgcattctctaatctttaatctctattctctacccattcatattcatccccgtttttctctgtcactgtcgcataacactctttgaaccaccgcaactaaagtaacaaccccatgtcctgaacctcacttttcttctcgccaaagcttccaattttcgatttttcccttgttttcagagaaatatcaacaccccagaaaataaaattgagagaatagaagaaaaccttttctgggttaatttggtaatttcctttttcttctttcatgggtaacataggaagcagcggctccaacagccgccggagacacggcggcggcggcggcagcggtaggcggattcacccgcctccgccgcaggtgatgccgccgccggaggtcacggccaaccaattcgtgtatcctccggccgccacgccgtatcacaactaccccgggtactacccggcgccgaccaccatgccggcgccgttgccggcgccgtacgaccaccaccaccgtacggcggtagacccgatgtgggggcggtatccggtggcggcaccgccggcaccggcgccgtacgtggaacaccagaaggcggttactattaagaacgatgtcaacatcaagaaggagacgcttaggattgagcctgatgacgagaatcctggccgtttccttgtgtcatttacgtttgatgccaccgtttcggggagcatcaccatacttttctttgcaaaagaaggggaaggttgcacactaactccaatgaaagaaaatgttcttccacccgtgactgtaaatttccagcaaggacttggccagaagtttaaacagccagctggaactggtattgatttttcaacatttgaggagtctgagttattgaaagtaggggacatggatgtctatcctgttgcaattaaagcagatgcatcctccagcgaccatgatgaatcaaaatcaaatgaaactccatcatccggtagctcaaactctcagataactcaagcagtgtttgagaaggagaaaggagaattccaggtgaaggttgtgaagcagatcttatgggtaaatggaatgaggtatgaactgcaggagatatatggtattggaaattcagtggagagtgatgtggatgggaatgacccaggaaaagagtgtgttatatgcttgtcagagcctcgggacacaactgtccttccatgccgccacatgtgtatgtgtagcggatgtgcgaaggttttgaggttccagacaaatagatgtccaatctgcagacaaccagttgagaggctattggagatcaaagtcgggcctgagcctgaggaatgaagattcaatgttagtgacacaacaagcttcctgtacagtccaactgttatagctaatacttttctcttactttatcaggtttttccaataatcccacaaaatagaaattggaatttatgtatgacattatgtttgacatgtacagcaggctggcattgcacctgacttgtattattgtataagccaatgcctccgccatgcttgtttggttttacttctaatttttatgtggctttcccttctgaatcatatttagatgtgtttctcaccttcgcttcgaaaaaaaaaaaaaaaa

SEQ ID NO: 2588 - protein, 349 aa, Glycine max
  misc_feature: Ceres CLONE ID no. 643026
  misc_feature: Ceres CDNA ID no. 36580831
  misc_feature: null
  misc_feature: Useful for making plants with altered alkaloid content
  misc_feature: Useful for making plants with altered terpenoid content
  misc_feature (293)..(331): Pfam Name: zf PFAM Desc: Zinc finger
  misc_feature: Homolog of GI Number: 6681341 NR Desc: putative RING zinc finger protein
  misc_feature: Homolog of GI Number: 31430853 NR Desc: putative hydroxyproline
  misc_feature: Homolog of GI Number: 21618140 NR Desc: putative RING zinc finger protein
  misc_feature: Homolog of GI Number: 30681003 NR Desc: zinc finger
  misc_feature: Homolog of GI Number: 30102494 NR Desc: At5g19080/T16G12_120
  misc_feature: Homolog of GI Number: 21928149 NR Desc: AT5g19080/T16G12_120
  misc_feature: Homolog of GI Number: 34914816 NR Desc: B1045D11.20
  misc_feature: Homolog of GI Number: 6862918 NR Desc: putative RING zinc finger protein
  misc_feature: Homolog of GI Number: 44917608 NR Desc: mahogunin
MGNIGSSGSNSRRRHGGGGGSGRRIHPPPPQVMPPPEVTANQFVYPPAATPYHNYPGYYPAPTTMPAPLPAPYDHHHRTAVDPMWGRYPVAAPPAPAPYVEHQKAVTIKNDVNIKKETLRIEPDDENPGRFLVSFTFDATVSGSITILFFAKEGEGCTLTPMKENVLPPVTVNFQQGLGQKFKQPAGTGIDFSTFEESELLKVGDMDVYPVAIKADASSSDHDESKSNETPSSGSSNSQITQAVFEKEKGEFQVKVVKQILWVNGMRYELQEIYGIGNSVESDVDGNDPGKECVICLSEPRDTTVLPCRHMCMCSGCAKVLRFQTNRCPICRQPVERLLEIKVGPEPEE

SEQ ID NO: 2589 - DNA, 1032 bp, Glycine max
  misc_feature: Ceres CLONE ID no. 643058
  misc_feature: Ceres CDNA ID no. 25893218
  CDS (74)..(835): REFERENCED BY SEQ ID NO: 2590
ccccaaaaccctaacgcttaaaccctttgctctgcgcctcgagtctccctctctgttcagcacacacacagaaatggccatgtacgcgatgcttcgccgcgtctcctccgccgtgctgcctcagctggcgcgccgcacggccatggcatcgtcttcttccagaaccttccacattgctctctctgttctccgcagagagacagcgactactactatcgcaccctctcttcgcttcgccaacgccttcgctaccaagtccagcgccgacgaatatctcgctcaagtgcttcagtctgagatccaatgcgccctcgaagacgaccatgcccaccaccaagtcgaagttcctgttgattttccttttgacattgaggacaatcctggagaaagaaccatacaactaaaaggaaaatttggagatgaaactatcaaagttcaagttgacatccctaatgtagcacctggagaagaaaatgaggatgacgaaaatggtgacaatgagaagaatgatagtgaatctagcattcctttagttgtgagtgttttcaaagaaaatggagtgtctctagagtttggtgtgactgcttttcccgatgagatttccattgatagcttgtcaataaagcagtgtgaggaatctgaagaccagttggcatacgaggggcctgagttcattgatttggatgaaaatctgcaaaaggcttttcacaagtatcttgagatcaggggaatcaagcctagcacaaccaatttcttgcaggaatacatgtttgctaaagacaacaaggaatatttgatgtggctgaagaacctgaagaacttcgtcgagaaatgatttgttctctgaggatcgtgaaatgttgacagaggccttttctttggtatacactgtatcatgagagagtcattgctgtagactaataatttaaaaaaacttgatgttaaaaggattgtttaggctatcttttgcaatttaacttcacccatcaatcaatagatcttgggtggttctcccgaaaaaaaaaaaaaaaa

SEQ ID NO: 2590 - protein, 253 aa, Glycine max
  misc_feature: Ceres CLONE ID no. 643058
  misc_feature: Ceres CDNA ID no. 25893218
  misc_feature (72)..(251): Pfam Name: MAM33 PFAM Desc: Mitochondrial glycoprotein
  misc_feature: Homolog of GI Number: 30102600 NR Desc: At3g55605
  misc_feature: Homolog of GI Number: 50725737 NR Desc: mitochondrial glycoprotein
  misc_feature: Homolog of GI Number: 34909926 NR Desc: P0665A11.23
  misc_feature: Homolog of GI Number: 45185663 NR Desc: ACL025Cp
  misc_feature: Homolog of GI Number: 45269611 NR Desc: YIL070C
  misc_feature: Homolog of GI Number: 66852352 NR Desc: SUAPRGA1
  misc_feature: Useful for making taller plants and plants with longer flowers
  misc_feature: Useful for sterility
MAMYAMLRRVSSAVLPQLARRTAMASSSSRTFHIALSVLRRETATTTIAPSLRFANAFATKSSADEYLAQVLQSEIQCALEDDHAHHQVEVPVDFPFDIEDNPGERTIQLKGKFGDETIKVQVDIPNVAPGEENEDDENGDNEKNDSESSIPLVVSVFKENGVSLEFGVTAFPDEISIDSLSIKQCEESEDQLAYEGPEFIDLDENLQKAFHKYLEIRGIKPSTTNFLQEYMFAKDNKEYLMWLKNLKNFVEK

SEQ ID NO: 2591 - DNA, 1279 bp, Glycine max
  misc_feature: Ceres CLONE ID no. 643070
  misc_feature: Ceres CDNA ID no. 40351142
  CDS (210)..(1010): REFERENCED BY SEQ ID NO: 2592
ttttgttctctgttctcgcgatttcggaagggtcgtgtttccctgcttcagtttcagcttcggcttcgagaagcgtcgattgggtccttaagctgttccttctctgtttctgctttggagcatcttggagcaaatgagcaatggagcttgtggagcacggctcacctcaaggattgctctcttgacaaactgtataactcctatcaaacatgagcggtcgcttttctcgcacaatttatgtcggcaacctgccctctgatataagagagtcagaaattgaagatctattctacaagtatggccgtataatggatattgaattgaaggttcctccccgccctccatgttattgctttgttgagtttgataatgctcgagatgccgaagatgcaattcggggtcgagatggatacaactttgatggttgtcggttaagagtggagcttgctcatggtggtagagggccatcatcaagtgatcgacgtggatatggaggaggaggtggtaatggtggagcaggcgggggtcgttttggcatctcacgccattctgaatttcgagttattgttcgtggactcccatcttctgcatcttggcaagatttgaaggatcatatgcgaaaagctggggacgtgtgttttgctgaggtttcccgtgatagtgaagggacttttggcattgttgattacactaattatgatgacatgaagtatgccattcggaaattggatgacactgagtttagaaatccctgggcgagagcttatattcgggtgaggaagtatgagagtagtcgttctaggagccgcagcaggagccccagcaggagccccagcaggagcagaagtccaaaaagagttagaagatctctggagcgttctgtgtctaggtcacgatctagatctcaatcagcatcaccaatcaaatcttctaggccaagatcacgatcccgatcacgatcacgatctggatctggatctcctcatcaggtcctgtcaggtagtggttgaatttctgacaaagctggtggttctctggtgatattgttccattctggtgggcagtatcggaattatattggagttggactaaattgttttaagggaaaattattgatgtgcctaggctgtttggtgattgtcttatttcttttaaattaaaatgttggacattggccttgccctttgtaccttagcaaacacaagaatatctttagtcctcgcaaactgtgaatccaatttgaatggttttaaacagatttataaaaaaaaaaaaaaaa

SEQ ID NO: 2592 - protein, 266 aa, Glycine max
  misc_feature: Ceres CLONE ID no. 643070
  misc_feature: Ceres CDNA ID no. 40351142
  misc_feature (118)..(189): Pfam Name: RRM_1 PFAM Desc: RNA recognition motif.
MSGRFSRTIYVGNLPSDIRESEIEDLFYKYGRIMDIELKVPPRPPCYCFVEFDNARDAEDAIRGRDGYNFDGCRLRVELAHGGRGPSSSDRRGYGGGGGNGGAGGGRFGISRHSEFRVIVRGLPSSASWQDLKDHMRKAGDVCFAEVSRDSEGTFGIVDYTNYDDMKYAIRKLDDTEFRNPWARAYIRVRKYESSRSRSRSRSPSRSPSRSRSPKRVRRSLERSVSRSRSRSQSASPIKSSRPRSRSRSRSRSGSGSPHQVLSGSG

SEQ ID NO: 2593 - DNA, 630 bp, Glycine max
  misc_feature: Ceres CLONE ID no. 643195
  misc_feature: Ceres CDNA ID no. 35383244
  CDS (103)..(411): REFERENCED BY SEQ ID NO: 2594
atcctaatcgaaaaacaaataggaaagacacccacaagtcatcaaacttcgattgagtttcaaagagatcagtggtagtgtggtacattgtgttgatcaaggatggaacaaaagaagtttgtggcactattaatggtggtggtggtgatggcttcttctatgtggaaaggatccaaaggtcttagtctctgtaacatggatgaagatggattggaggcttgcaagccctcagtgactcagccaaacccagttgatccatcccctgattgctgcaaggctctggatggtgctgacttgaagtgcctttgctcttacaagaactcatcagagttgcctcttctaggaattgatctaactcttgctgcttcacttcctgcaaagtgcaatctcactcctccagataattgctagttagcttctctgagctatttctgctttttgtttttgtgtgttataatcttttttctgcagatgacctattgagaaaaaagaaaattattgtactctaatttttatccctcttatttttgtggtacaatataagtacctttattttcttctacttggttgtatacattattataataagtctatgtatttaaacgtttgagactaaaaaaaaaaaaaaaa

SEQ ID NO: 2594 - protein, 102 aa, Glycine max
  misc_feature: Ceres CLONE ID no. 643195
  misc_feature: Ceres CDNA ID no. 35383244
  misc_feature (30)..(102): Pfam Name: Tryp_alpha_amyl PFAM Desc: Protease inhibitor/seed storage/LTP family
  misc_feature: Homolog of GI Number: 25044847 NR Desc: PVR3
  misc_feature: Homolog of GI Number: 1420887 NR Desc: non
MEQKKFVALLMVVVVMASSMWKGSKGLSLCNMDEDGLEACKPSVTQPNPVDPSPDCCKALDGADLKCLCSYKNSSELPLLGIDLTLAASLPAKCNLTPPDNC

SEQ ID NO: 2595 - DNA, 673 bp, Glycine max
  misc_feature: Ceres CLONE ID no. 643356
  misc_feature: Ceres CDNA ID no. 36707412
  CDS (58)..(459): REFERENCED BY SEQ ID NO: 2596
atacaactactctattctaccacatctgagtctctgtccgaagccacttgagagaaaatggcggtgcctctgctctcaaagaagatcgtgaagaagagggtaaagaagttcaagaggcctcagagtgacaggaaaatttccgtcaagactaactggcgcagaccaaagggtatcgattctcgtgttaggagaaagttcaagggatgcactttgatgccaaacattggttatggttcagacaagaagacccgccactatctccctaatggtttcaagaaatttgttgttcacaatgtgaaggatttggaactgctcatgatgcacaacaggacttactgtgctgagattgcccacaatatatccacaagaaagagaaaagatatagtcgagagagccgcgcagcttgatgttgttgtgacaaacaaaacggccagattacgcagccaggaggatgaatagtctaaatgactgaaaaagtcacttatctgtagtgattctgtagttcaatatcgaagttgcagtttaattttaaattgaattttgcttcagtgtattttgcttcagtgtattttgcttattgggaaccaggtttttgatgtgcctctttcatgtaagtcgtatcttgatttgtttttaggaacaaaaaaaaaaaaaaaaaaaaaaaaaaaaaaaa

SEQ ID NO: 2596 - protein, 133 aa, Glycine max
  misc_feature: Ceres CLONE ID no. 643356
  misc_feature: Ceres CDNA ID no. 36707412
  misc_feature (14)..(123): Pfam Name: Ribosomal_L32e PFAM Desc: Ribosomal protein L32
  misc_feature: Homolog of GI Number: 13899057 NR Desc: ribosomal protein L32
  misc_feature: Homolog of GI Number: 76057835 NR Desc: ribosomal L32
  misc_feature: Homolog of GI Number: 40287540 NR Desc: ly200 protein
  misc_feature: Homolog of GI Number: 71534997 NR Desc: ribosomal protein L32
  misc_feature: Homolog of GI Number: 77745481 NR Desc: ly200
  misc_feature: Homolog of GI Number: 50947773 NR Desc: putative ribosomal protein L32
  misc_feature: Homolog of GI Number: 23198054 NR Desc: ribosomal protein L32
  misc_feature: Homolog of GI Number: 21555143 NR Desc: ribosomal protein L32
  misc_feature: Homolog of GI Number: 10177580 NR Desc: ribosomal protein L32
  misc_feature: Homolog of GI Number: 50754636 NR Desc:  similar to 60S ribosomal protein L32
MAVPLLSKKIVKKRVKKFKRPQSDRKISVKTNWRRPKGIDSRVRRKFKGCTLMPNIGYGSDKKTRHYLPNGFKKFVVHNVKDLELLMMHNRTYCAEIAHNISTRKRKDIVERAAQLDVVVTNKTARLRSQEDE

SEQ ID NO: 2597 - DNA, 1188 bp, Glycine max
  misc_feature: Ceres CLONE ID no. 643563
  misc_feature: Ceres CDNA ID no. 35383245
  CDS (82)..(834): REFERENCED BY SEQ ID NO: 2598
ttaaacaccaacgagtaagcctctcctactatctttaaatccttttgtaccctcaacttccctaagcactagcaccacacaatggtcattgcagcaacccctcttctcttctttcttcttaatttatgcctaagaggcacttatgctgactatggaggtggatggcaaggtggtcatgctacattttatggtgggggtgatgcatctggcacaatgggaggggcttgtggttatggaaatttgtacagccaaggctatggaaccaacactgcagcactcagcactgctctattcaacaatggcatgagctgcgggtcttgctatgagatgaaatgtgacactgaccccaaatggtgcctccccggtagcataatcgtcactgccacaaacttctgcccccctaactttgcattggctaataacaatggtggttggtgcaaccctcctttgcaacacttcgatcttgctgagcctgctttcttgcaaattgctcagtacaaagctggaattgttcctgtttccttcagaagagtcccctgtgtgaagaaaggagggatcaggttcaccatcaatggtcactcttacttcaacttggttctcatcacaaatgttggtggagcaggagatgttcattctgtgtccatcaaaggctcaaggactgggtggcaaaccatgtctagaaactgggggcagaattggcaaagcaattcttacctcaatgggcaaagcctctcttttcaggtcactacaagtgatggcaggactctcactagcaacaacattgtgcctgctaactggcaatttggacaaacatttgaaggggcacagttctaggaaccataataatttttaagttcacattttgtgtgtaatatatgatggcattgttcacttgtttttgttatagttggaaagggtggggaaagagaagaaaaggtagattagtaggagtttcaggccaacatggcccctaatgctgtggtggctatatggcacccgctaggactaatataatataacgtctttaattttatatctgtcacattgatcgatgccttttgatgaactaaaaggtgttgatgatctcaattgccttgtattttttatcccccacaatggtacaaaaaccaatttgggggccatttaatatcaagttgaatatgctttctgataaaaaaaaaaaaaaaa

SEQ ID NO: 2598 - protein, 250 aa, Glycine max
  misc_feature: Ceres CLONE ID no. 643563
  misc_feature: Ceres CDNA ID no. 35383245
  misc_feature: null
  misc_feature: Useful for making plants with altered cell wall content and/or composition
  misc_feature (159)..(236): Pfam Name: Pollen_allerg_1 PFAM Desc: Pollen allergen
  misc_feature (63)..(148): Pfam Name: DPBB_1 PFAM Desc: Rare lipoprotein A
  misc_feature: Homolog of GI Number: 29467501 NR Desc: expansin
  misc_feature: Homolog of GI Number: 29467499 NR Desc: expansin
  misc_feature: Homolog of GI Number: 13898649 NR Desc: expansin
  misc_feature: Homolog of GI Number: 11907554 NR Desc: expansin
  misc_feature: Homolog of GI Number: 82568704 NR Desc: Expansin
  misc_feature: Homolog of GI Number: 3510540 NR Desc: expansin
  misc_feature: Homolog of GI Number: 6646885 NR Desc: expansin
  misc_feature: Homolog of GI Number: 11932092 NR Desc: alpha
  misc_feature: Homolog of GI Number: 3510538 NR Desc: expansin
  misc_feature: Homolog of GI Number: 13898651 NR Desc: expansin
  misc_feature: Useful for delaying flowering time
  misc_feature: Useful for making lethal plants for genetic confinement systems
MVIAATPLLFFLLNLCLRGTYADYGGGWQGGHATFYGGGDASGTMGGACGYGNLYSQGYGTNTAALSTALFNNGMSCGSCYEMKCDTDPKWCLPGSIIVTATNFCPPNFALANNNGGWCNPPLQHFDLAEPAFLQIAQYKAGIVPVSFRRVPCVKKGGIRFTINGHSYFNLVLITNVGGAGDVHSVSIKGSRTGWQTMSRNWGQNWQSNSYLNGQSLSFQVTTSDGRTLTSNNIVPANWQFGQTFEGAQF

SEQ ID NO: 2599 - DNA, 1036 bp, Glycine max
  misc_feature: Ceres CLONE ID no. 643765
  misc_feature: Ceres CDNA ID no. 40351143
  CDS (116)..(838): REFERENCED BY SEQ ID NO: 2600
caaactcaatcaactcgatcaactcaacacaaaccaaaactcaagctaaaattctcactctctctctcatctcgagatcatagtatcatattcaatatcatttcataccaaacacatggctttggaagctctcaactcaccaacaacaaccgctccatcttttccctttgacgacccaactattccatgggcgaaacgaaaacgttcaaagcgttctcgcgaccatccttctgaagaagagtacctcgccctctgcctcatcatgctcgctcgcggcggcaccaccaccgtcaacaaccgccacgtcagccctccaccgccacagccacagccacagccgacaccagatccttccaccaagctcagttacaaatgctccgtttgcgacaagagcttcccctcttaccaagcgctcggtggacacaaggccagtcaccggaaactcgccgccgccgccgaagaccaaccccccagcaccaccacttcctccgccgccgccaccagctccgcctccggaggtaaggcccatgagtgctccatttgccacaaatccttccccaccggacaggcccttggcggacacaaacgttgtcactacgaaggtaacggtaacggaaataacaacaacagtaacagcgttgtcaccgtcgcctcggaaggcgtggggtccacccacactgtcagtcacggccaccaccgcgacttcgatctcaacatcccggcctttccggatttttcgaccaaggtcggagaagacgaggttgagagccctcaccctgtcatgaagaagcctcgcctcttcgtcattcccaagatcgaaatcccccaatttcaatgaactcattgaatttttagtttatttttcgactatatattttggagaattttgagagttactataatttgattttgtacatagtacttggaagttttgttggaccgtaccggacccagttctctggttgaggttgtactttcacaacagtggcagatttgcaattcaattcaatttatttgtttaaaaaaaaaaaaaaaa

SEQ ID NO: 2600 - protein, 240 aa, Glycine max
  misc_feature: Ceres CLONE ID no. 643765
  misc_feature: Ceres CDNA ID no. 40351143
  misc_feature (85)..(107): Pfam Name: zf PFAM Desc: Zinc finger
MALEALNSPTTTAPSFPFDDPTIPWAKRKRSKRSRDHPSEEEYLALCLIMLARGGTTTVNNRHVSPPPPQPQPQPTPDPSTKLSYKCSVCDKSFPSYQALGGHKASHRKLAAAAEDQPPSTTTSSAAATSSASGGKAHECSICHKSFPTGQALGGHKRCHYEGNGNGNNNNSNSVVTVASEGVGSTHTVSHGHHRDFDLNIPAFPDFSTKVGEDEVESPHPVMKKPRLFVIPKIEIPQFQ

SEQ ID NO: 2601 - DNA, 1095 bp, Glycine max
  misc_feature: Ceres CLONE ID no. 643809
  misc_feature: Ceres CDNA ID no. 25893189
  CDS (71)..(853): REFERENCED BY SEQ ID NO: 2602
agtctctagggtttttgatcgttgttgttctaaagcactcatccacacattctccgtcgccacgacaacaatggctccaaagaaaggtgcgaaaggtggagttgtagcagcaaagaagaaggttcaggagaaggtaacgaaccctttgttcgagaagcgtccgaagcagttcgggatcggaggcgcgctgccgccgaagcgggacctgacgcgcttcgtgaagtggccgaagaacgtccaaatccaacgcaagaagcgcatcctcaagcagaggctcaaggtccctccggctctcaaccagttcaccaaaaccctcgacaaaaatctcgcaacaaatctttttaaaatgctgctgaagtacaggccggaggacaaggcggagaagaaggagaggctgttgaagagggctcaggctgaggctgatgggaaacctgttgaggccaagaagcctattgttgtcaaatatggtctcaaccacgttacctaccttattgagcagaacaaggcacaactggttgtgattgctcatgacgtggacccaattgagctggtagtctggcttccagcattgtgcaggaagatggaaattccatactgcattgtcaagggcaaagcacgcttgggaacaattgtccacaagaaaactgcttcagttttgtgcttgacaactgtcaagaatgaagacaagatggagttcagtagaatcctagaagctattaaggccaacttcaatgacaagtacgatgaatacagaaagaagtggggtggtggaatcatgggttcgaagtcccaagccaagaccagggccaaggagaagctccttgccaaggaagcagcccaaagaatgaactagattaagttgcttttacattattaaggttgtcatttttctatatcttatatgggagcatatacaagttaaaatgtgaggttttacttcattttggtagctggtaatccacaaggaccgattttgatcgttgatttttcgaagttattttaaacttagctaaaaaaaaaaaaaaaaaagctaaaaaaaaaaaaaaaaaaaaaaaaaaaaaaaaaaaaaaaaaaaaaaaaaaaaaaaaaaaaaaa

SEQ ID NO: 2602 - protein, 260 aa, Glycine max
  misc_feature: Ceres CLONE ID no. 643809
  misc_feature: Ceres CDNA ID no. 25893189
  misc_feature (115)..(210): Pfam Name: Ribosomal_L7Ae PFAM Desc: Ribosomal protein L7Ae/L30e/S12e/Gadd45 family
  misc_feature: Homolog of GI Number: 23308199 NR Desc: At2g47610/T30B22.8
  misc_feature: Homolog of GI Number: 50944205 NR Desc: 60S ribosomal protein L7A
  misc_feature: Homolog of GI Number: 21592470 NR Desc: 60S RIBOSOMAL PROTEIN L7A protein
  misc_feature: Homolog of GI Number: 82623429 NR Desc: 60S ribosomal protein L7A
  misc_feature: Homolog of GI Number: 82400140 NR Desc: 60S ribosomal protein L7A
  misc_feature: Homolog of GI Number: 57900205 NR Desc: putative 60S ribosomal protein L7A
  misc_feature: Homolog of GI Number: 50904347 NR Desc: putative 60S ribosomal protein
  misc_feature: Homolog of GI Number: 61654624 NR Desc: L7a
  misc_feature: Homolog of GI Number: 50368683 NR Desc: LOC447981 protein
  misc_feature: Homolog of GI Number: 61886865 NR Desc:  similar to 60S ribosomal protein L7a
  misc_feature: Useful for making plants with altered leaf shape eg curled leaves
  misc_feature: Useful for making plants with increased biomass and foliage
  misc_feature: Useful for making plants with increased biomass and foliage
  misc_feature: Useful for making shorter plants
MAPKKGAKGGVVAAKKKVQEKVTNPLFEKRPKQFGIGGALPPKRDLTRFVKWPKNVQIQRKKRILKQRLKVPPALNQFTKTLDKNLATNLFKMLLKYRPEDKAEKKERLLKRAQAEADGKPVEAKKPIVVKYGLNHVTYLIEQNKAQLVVIAHDVDPIELVVWLPALCRKMEIPYCIVKGKARLGTIVHKKTASVLCLTTVKNEDKMEFSRILEAIKANFNDKYDEYRKKWGGGIMGSKSQAKTRAKEKLLAKEAAQRMN

SEQ ID NO: 2603 - DNA, 1716 bp, Triticum aestivum
  misc_feature: Ceres CLONE ID no. 644413
  misc_feature: Ceres CDNA ID no. 24766149
  CDS (62)..(1495): REFERENCED BY SEQ ID NO: 2604
accattaaccagtccacaggcaggcaccggtcgtgaggcagagagagaaccagagccagacatgcagcgcctcgcctcctcccggaggctcctccgggccgccctcgcccccggccgggcgcattccagcctctccgcggccgcggtcgccgccgcgccggagaatggcgccggcgcccccaagatgccgccgttcgcgtacacgccgccgccgtacgacgggccgcgggtggcggagatcgcccagaagcgcgcccagttcctcagcccctcgctcttccacttctacgaccgccctttgaacatagtcgatggaaagatgcagtacctgttcgatgaggatggccgccgctacctggacgctttcggtggcattgcgaccgtttgttgcgggcactgccatcctgatgtgattgaagccatagtcaaccaggcaaagaagatacagcactccacagttctgtatctgaaccatgcaattgccgactttgctgaggctctggcgtccaaaatgcctggtgatctgaaggttgttttcttcacaaattctggcacagaggcaaatgagcttgcactgatgatcgctcggctttacacgggttcccatgacattatttcacttaggaatggataccatgggaatgcagctgcaacaatgggtgccactgctcaatccaactggaaatttaatgttgtccagaccggagtgcaccatgctcttaatccagacccatacagaggcgctttcgggtcagacggagagaaatatgccagagatattcaggaaaccattgactatgggactacaggaagagttgcaggtttcatttcagaggccatacagggagttggtggaatagtggaattagcaccaggatacctgcctgcggcctatgatatggtaaggaaagctggtggcctgtgcatcgccgacgaagttcaggcgggggttgcgcgcactggaagccacttctggggattcgaagggcagggtgtcatccctgatatagtcactatggcaaagggcatagggaacggaataccgataggagcggtcgttaccacacctgagattgctaaggtgttaacccgcagaagctacttcaacaccttcggtggtaaccctgtcagcacagctgccggccacgctgttctcaaggtactggagaaggagaagctgcaggagaatgcgttcgttgttggctcctacctgaaggagaaacttaacgctctgaaagagaagcatgacattatcggcgacgttagggggaaaggcctccttctcggggttgagctggtgaccgatcgccagaagaaaactccggcgaaagctgagatcgcgcaggtcatgaaccacatgaaagatatgggcgtgctggtggggaagggcggtttcttcggcaatgtgttcagggtgacgcctccgttgtgcttctccaaggaggactccgactacatgatcgaggtgatggacattgcgctgtcgaagctgtgaagaggcactgctctcatcgataaataagagacgatctgcgaaacagcacctcgttgtctcgtgttctgtcttgcaaacccatgatgcgcacatgcgatctgcgcctcctgaacattagtatgatgtgctgagtaggagctctatgtgaccaataagttcttcgtaataagatattcagatgtgctatggcagcttttatgaaaagaaaaaaaaaaaaaaaa

SEQ ID NO: 2604 - protein, 477 aa, Triticum aestivum
  misc_feature: Ceres CLONE ID no. 644413
  misc_feature: Ceres CDNA ID no. 24766149
  misc_feature (81)..(414): Pfam Name: Aminotran_3 PFAM Desc: Aminotransferase class
  misc_feature: Homolog of GI Number: 25141217 NR Desc: At4g39660/T19P19_50
  misc_feature: Homolog of GI Number: 5731259 NR Desc: alanine:glyoxylate aminotransferase 2 homolog
  misc_feature: Homolog of GI Number: 6403506 NR Desc: putative aminotransferase
  misc_feature: Homolog of GI Number: 52353685 NR Desc: putative aminotransferase
  misc_feature: Homolog of GI Number: 15028237 NR Desc: putative beta
  misc_feature: Homolog of GI Number: 21553486 NR Desc: putative beta
  misc_feature: Homolog of GI Number: 16198011 NR Desc: LD24726p
  misc_feature: Homolog of GI Number: 54641146 NR Desc: GA10859
  misc_feature: Homolog of GI Number: 62897849 NR Desc: alanine
  misc_feature: Useful for decreasing plant size
  misc_feature: Useful for making ornamental plants with modified flowers
  misc_feature: Useful for making ornamental plants with modified leaves
  misc_feature: Useful for making plants with increased biomass and foliage
  misc_feature: Useful for making shorter plants
  misc_feature: Useful for making smaller plants
  misc_feature: Useful for modifying plant structure
MQRLASSRRLLRAALAPGRAHSSLSAAAVAAAPENGAGAPKMPPFAYTPPPYDGPRVAEIAQKRAQFLSPSLFHFYDRPLNIVDGKMQYLFDEDGRRYLDAFGGIATVCCGHCHPDVIEAIVNQAKKIQHSTVLYLNHAIADFAEALASKMPGDLKVVFFTNSGTEANELALMIARLYTGSHDIISLRNGYHGNAAATMGATAQSNWKFNVVQTGVHHALNPDPYRGAFGSDGEKYARDIQETIDYGTTGRVAGFISEAIQGVGGIVELAPGYLPAAYDMVRKAGGLCIADEVQAGVARTGSHFWGFEGQGVIPDIVTMAKGIGNGIPIGAVVTTPEIAKVLTRRSYFNTFGGNPVSTAAGHAVLKVLEKEKLQENAFVVGSYLKEKLNALKEKHDIIGDVRGKGLLLGVELVTDRQKKTPAKAEIAQVMNHMKDMGVLVGKGGFFGNVFRVTPPLCFSKEDSDYMIEVMDIALSKL

SEQ ID NO: 2605 - DNA, 1181 bp, Triticum aestivum
  misc_feature: Ceres CLONE ID no. 644566
  misc_feature: Ceres CDNA ID no. 24726648
  CDS (110)..(973): REFERENCED BY SEQ ID NO: 2606
atcgcctcgtcatccgcagctccactttccagtccgcagtgaccgccgccgccgccacctccacccgctcctcacctaccccggcggcgaccccccaggtacaccccgaatggcgacggcggtcacggcgtcggccaccgcggcgacccgcttcacgcgcctggcgggcgtcgccctccggcgcagcagctgccgcccccgcaccgcggtgcgcttccagcgcccggggctcaccaccaccgcgctcctcaggcccaccgagctcaagcccaaggaccagggccagcccgagacgctcgactaccgcgtcttcctcgtcgacggcgccgaccgcaaggtgtccccgtggcacgacgtgccgctccgcgccggggacggggcgttccacttcatcgtggagatccccaaggagagcagcgccaagatggaggtcgccaccgacgaggcctacacgcccatcaagcaggacaccaagaagggcaaccttcgttactacccgtacaacatcaactggaactacgggttacttccccagacatgggaggacccgacagctgcaaatgctgatgttgaaggagcacttggagacaatgatcctgttgatgttgtcgagattggtgaaagacgggccaatattggggatgttcttagggtgaaaccattggcagctttagcaatgatcgacgagggagagcttgactggaaaattgtggccatctctctggatgatcccaaagcatctcttgtgaatgatgtagatgatgtcgaggagcattttccgggaacattgactgcaatcagagactggttcagagactacaagataccagacggaaagcccgccaacagattcggcctcggcaacaagcccacaagcaaggaatatgccctgaaggtgatagaagaaaccaacgagtcatgggagaaattggtgaagaggaaaatcccggcgggagagctctcgctagcctagccttttacaggcccatgagaagccaacaacacattctttcagtgacatactactccctcctaagcgtgctgctctttcgtgacgtgtacctacgaacaagcttcttcatctgcagaacattccgtgtgcctgttaaaacaggaataaaaatgaataacctggttgtggagcggaaaaaaaaaaaaaaaagaaaaaaaaaaaaaaaaaa

SEQ ID NO: 2606 - protein, 287 aa, Triticum aestivum
  misc_feature: Ceres CLONE ID no. 644566
  misc_feature: Ceres CDNA ID no. 24726648
  misc_feature (93)..(273): Pfam Name: Pyrophosphatase PFAM Desc: Inorganic pyrophosphatase
  misc_feature: Homolog of GI Number: 19310711 NR Desc: putative inorganic pyrophosphatase
  misc_feature: Homolog of GI Number: 21592878 NR Desc: inorganic pyrophosphatase
  misc_feature: Homolog of GI Number: 51964418 NR Desc: PREDICTED OJ1767_D02.15
  misc_feature: Homolog of GI Number: 14571671 NR Desc: inorganic pyrophosphatase precursor
  misc_feature: Homolog of GI Number: 47122952 NR Desc: MGC81379 protein
  misc_feature: Homolog of GI Number: 73953384 NR Desc:  similar to inorganic pyrophosphatase
  misc_feature: Homolog of GI Number: 71122474 NR Desc: Pp protein
  misc_feature: Homolog of GI Number: 29420791 NR Desc: inorganic pyrophosphatase
  misc_feature: Homolog of GI Number: 61837713 NR Desc:  similar to inorganic diphosphatase
MATAVTASATAATRFTRLAGVALRRSSCRPRTAVRFQRPGLTTTALLRPTELKPKDQGQPETLDYRVFLVDGADRKVSPWHDVPLRAGDGAFHFIVEIPKESSAKMEVATDEAYTPIKQDTKKGNLRYYPYNINWNYGLLPQTWEDPTAANADVEGALGDNDPVDVVEIGERRANIGDVLRVKPLAALAMIDEGELDWKIVAISLDDPKASLVNDVDDVEEHFPGTLTAIRDWFRDYKIPDGKPANRFGLGNKPTSKEYALKVIEETNESWEKLVKRKIPAGELSLA

SEQ ID NO: 2607 - DNA, 1761 bp, Triticum aestivum
  misc_feature: Ceres CLONE ID no. 644609
  misc_feature: Ceres CDNA ID no. 24765975
  CDS (285)..(1343): REFERENCED BY SEQ ID NO: 2608
atccatatagaaatacctcgtctccctccccgcccctgattcgcaaggccaaagcaagaggggcaggagcgccaccgcgaatcccatcccatccccgcaccgccgccgatcccgcccgcccgcccctccgcagatctccccgacattgcccgctccccggccggattcgcccagatccaccgacgcggcgcgcggtgctcccggcggcgtggtccggtcggtctgatcgggaaggcttgatcttttttgttggtgctgttgtctggagggtggtggcagcggagatgggcgtcggaggggagaagttccagctggggacggtgggggcgctgggcctctccgtggtgtcctccgtgtccattgtcatctgcaacaaggccctcatgagctccctcggcttcaccttcgctaccaccttgacgagctggcatctcctggtcactttctgctcccttcatgtggcactatggatgaagttttttgagcacaaggcttttgattcgagaactgtcatgggattcggagtactcaatggcatctccattgggctcctcaatctgagtcttggtttcaattctgttggcttttaccagatgacaaagctggccatcatcccctgcactgttattttggagactcttttcttcaggaagaagttcagccggactatccagatctccctttccgtgcttcttttgggtgtcggtgttgcaaccatgactgatttgcaactcaatgctgtggggtccatactgtccttgctggccattatcacgacttgcatcgctcaaatcatgacaaacactattcagaagaaattcaaggtttcttcaacccagctgctatatcagtcttgtccttaccagtcattgacactgtttcttatcggcccgttccttgatggattcctgactaaccaaaacgtctttgctttcaattacacatctaacgttgtgtttttcatcgtcttgtcgtgtttgatatcggtctcagtaaacttcagcacctttcttgtgatcggaaagacatctcctgttacttaccaagtcctgggccatcttaaaacatgcctagttttgaccttcggctacgttttgcttcatgatccgtttagctggagaaacatacttggcatcctaattgcggttgttgggatggtactatattcatacttctgctcaacagagactcaaccaaaaaataccgatgtctccgcacagcagtcaaaagaaggtgactcggcacctttgatctctgattctttgagcaaagttgaaaatggaggtgatgacgatgagcctttgaaggtaccgatgtggagctcaaagtactcaagggcgtgagaattttgtctcttagacggcggatggcattatacaggattcaatttagtaggcagatagtagggttggaagccaactttccaacccaagtaatgaagcaatggacatttcagttacaattaaaatgatctgattctttggagggttttaccttccaaaattgcagatcgaccatgaaactagatagcagatattgtaaaattgtatctggatatggtccaaatcttctcactgtaacttcacgttgggacactggtctgcagatagactccattctttttgtaccaaaggtcccgaggtcaagaattgtgcaagactttaaagtatttataggttcaagtttgtaactgtactttcagatttaccttggaccatagtaatgcaagtgatgtacatttcagtaaaaaaaaaaaaaaaa

SEQ ID NO: 2608 - protein, 352 aa, Triticum aestivum
  misc_feature: Ceres CLONE ID no. 644609
  misc_feature: Ceres CDNA ID no. 24765975
  misc_feature (195)..(296): Pfam Name: DUF6 PFAM Desc: Integral membrane protein DUF6
  misc_feature: Homolog of GI Number: 30984584 NR Desc: At2g30460
  misc_feature: Homolog of GI Number: 13699188 NR Desc: putative glucose
  misc_feature: Homolog of GI Number: 50910741 NR Desc: phosphate translocator
  misc_feature: Homolog of GI Number: 13384378 NR Desc: putative phosphate translocator
  misc_feature: Homolog of GI Number: 42570326 NR Desc: transporter
  misc_feature: Homolog of GI Number: 77553057 NR Desc: transmembrane protein
  misc_feature: Homolog of GI Number: 50728312 NR Desc:  similar to SLC35E3 protein
  misc_feature: Homolog of GI Number: 27808610 NR Desc: At5g57100
  misc_feature: Homolog of GI Number: 50912291 NR Desc: glucose
  misc_feature: Homolog of GI Number: 54643607 NR Desc: GA13121
  misc_feature: Useful for making bigger plants
MGVGGEKFQLGTVGALGLSVVSSVSIVICNKALMSSLGFTFATTLTSWHLLVTFCSLHVALWMKFFEHKAFDSRTVMGFGVLNGISIGLLNLSLGFNSVGFYQMTKLAIIPCTVILETLFFRKKFSRTIQISLSVLLLGVGVATMTDLQLNAVGSILSLLAIITTCIAQIMTNTIQKKFKVSSTQLLYQSCPYQSLTLFLIGPFLDGFLTNQNVFAFNYTSNVVFFIVLSCLISVSVNFSTFLVIGKTSPVTYQVLGHLKTCLVLTFGYVLLHDPFSWRNILGILIAVVGMVLYSYFCSTETQPKNTDVSAQQSKEGDSAPLISDSLSKVENGGDDDEPLKVPMWSSKYSRA

SEQ ID NO: 2609 - DNA, 1106 bp, Triticum aestivum
  misc_feature: Ceres CLONE ID no. 644611
  misc_feature: Ceres CDNA ID no. 40351144
  CDS (41)..(886): REFERENCED BY SEQ ID NO: 2610
gtccacctcctccctcctgttccttcagccaccgtgagcaatggcgcccaagcggaagggtggcaacggccggaagaagaccgtcctcctctcgatcgtcaaggaggacgcccgccatgtatgcttctcaaagcgcaagcggggcctgttcagcaagaccagcgcgctgtccctgctcacgggcgcccaggtggccgccgtcatcttctcgcccggcggcaaggtcttctccttcggccacccctccgtcgacgccgtcgtcaaccgcttcatggcgggggacgccgcggtggtccaggccgccgccgacgacaacgggttgcagacgctgcagctgcagcacggcgacatgcgcaccgagctggcggaccagaagaagcggaagaagcgcgctgaggaggccctggacaaggagcgcgctgggggggaccagattgcctcgtggctccaccccgacgtgcgcgacatggggcatgacgacatggcggccttcgccgccgcgctcttgcaggtccaggccgccgtctccggacgcgccaaccaggttctcgtcgaggcctttcgcgtcgacatcagccgtatgctccaggtgcccccgccgccgccgcctccgctccagctcttcggtgccagcaccattgagttcggtagtagcagcagcagcgccaacgccgggatggagatgcaacagatgcagatggttatggagatgccaccgccgcctgacttccccgcagtgatggggatgcagcagttggttatggagatgccaccacagccaaggttcgaggcagcgatggagatgacgccgctgcaggagttcgtcgccgggatgcagaaggtgcagcggcaggggctcgggccgaacgccgacttcccctactgaggagaagaaagacaccagacagagtccgaccgagtccgagtctcagttactatattctaaataaatcgttcagatccatgtaagatccatctacgtaggtccaagatctatgcattagttggttcaattatcttagtagcaattaaatttatggcattgtaatcttttttgtatcggtagtacaatggctggaaattcgtgaacaaaaaaaaaaaaaaaa

SEQ ID NO: 2610 - protein, 281 aa, Triticum aestivum
  misc_feature: Ceres CLONE ID no. 644611
  misc_feature: Ceres CDNA ID no. 40351144
  misc_feature (18)..(67): Pfam Name: SRF PFAM Desc: SRF
MAPKRKGGNGRKKTVLLSIVKEDARHVCFSKRKRGLFSKTSALSLLTGAQVAAVIFSPGGKVFSFGHPSVDAVVNRFMAGDAAVVQAAADDNGLQTLQLQHGDMRTELADQKKRKKRAEEALDKERAGGDQIASWLHPDVRDMGHDDMAAFAAALLQVQAAVSGRANQVLVEAFRVDISRMLQVPPPPPPPLQLFGASTIEFGSSSSSANAGMEMQQMQMVMEMPPPPDFPAVMGMQQLVMEMPPQPRFEAAMEMTPLQEFVAGMQKVQRQGLGPNADFPY

SEQ ID NO: 2611 - DNA, 1375 bp, Triticum aestivum
  misc_feature: Ceres CLONE ID no. 644639
  misc_feature: Ceres CDNA ID no. 35383246
  CDS (54)..(1052): REFERENCED BY SEQ ID NO: 2612
accaggacaacgacccaaacaaagccaagcagagtcgagcgagcgatcaaatcatggtggccgaccaccagtcctccccgcggccgcgggtcaccatcggctacgcgctgccgcccggcaaggcgggcagcgtcatccagccgccgcttgaggccctcgcggcggagcgcggcatgcgcctcgtcgccgtcgacgcctcgctgcccctggccgaccagggccccttcgacctcatcatccacaagctcttcgaccggccctggcgcgcgcagctggaggccttctccgcgctccacccctccgtgcccgtcgtcgacgcccccgccgccgtcgaccgcctgctcgaccgcttcaccatgctcgacgtcgtccccgggctcgccgccggcctggacttcccgctcagcgtccccgcgcaggtcaccgtgagcgacgccgccgcgctggccgcggacgacccgtcccacggcctccgcttcccgctcatcgccaagccgctggccgtcgacggcagcgccagctcccacgacctgtgcctggtgtaccgcgccgagggcctccgcggcctccacacccccgtcgtcctccaggagttcgtcaaccacggcggcgtgctcttcaaggtctacgtggtgggcggccgcgccgtctgcgtccgccgcagcagcctgccggacgtgcccgcggagcgcctcgcggaccccgacgccgacgcctccgtccccttcgccaacatctccagccgccccgcgctggacaagggggaggactcgatgccgcccgccgcgttcgtggaccaggtggcgcgcgggctccggcaggcgctggggctgcacctcctcaacttcgacatgttcgcggcgacggagctggacgacggcggccggcggaggtacttcctcgtggacatcaactacttcccggggttcgccaagatgccgggctacgagactgctctcacggatttcttcgccgagatgattcagctaggcactgcaggcgccgccgccggccaagagaagctcgaatctgtgccctgcaatgagctctaggaaactgggtttactttggacttttgatgaacagggtgtccctactgccgagaataaaaattaagaacgctttgcggcgtataatatatctgtaatggtactatcaagcagctgattaagacctcgatgattcatgctagtatctatgaaggtttcaaatctagtaggtactagtatatagaccataggcatttcaagtgcaacgaatgttcctcctcgcagaaaaagaagaatactcctccggatttgccatttctccgagaaatagttaaatcttaatggactccataaccgatggattaacgccaaaaaaaaaaaaaaaa

SEQ ID NO: 2612 - protein, 332 aa, Triticum aestivum
  misc_feature: Ceres CLONE ID no. 644639
  misc_feature: Ceres CDNA ID no. 35383246
  misc_feature (6)..(308): Pfam Name: Ins134_P3_kin PFAM Desc: Inositol 1
  misc_feature: Homolog of GI Number: 50908093 NR Desc: putative inositol phosphate kinase
  misc_feature: Homolog of GI Number: 27549256 NR Desc: inositol phosphate kinase
  misc_feature: Homolog of GI Number: 37537118 NR Desc: putative inositol 1
  misc_feature: Homolog of GI Number: 3396079 NR Desc: inositol 1
  misc_feature: Homolog of GI Number: 20465297 NR Desc: putative inositol 1
  misc_feature: Homolog of GI Number: 16323320 NR Desc: AT4g08170/T12G13_10
  misc_feature: Homolog of GI Number: 31429766 NR Desc: putative inositol 1
  misc_feature: Homolog of GI Number: 78707605 NR Desc: Inositol 1
  misc_feature: Homolog of GI Number: 42567363 NR Desc: inositol 1
  misc_feature: Homolog of GI Number: 50428729 NR Desc: putative inositol phosphate kinase
MVADHQSSPRPRVTIGYALPPGKAGSVIQPPLEALAAERGMRLVAVDASLPLADQGPFDLIIHKLFDRPWRAQLEAFSALHPSVPVVDAPAAVDRLLDRFTMLDVVPGLAAGLDFPLSVPAQVTVSDAAALAADDPSHGLRFPLIAKPLAVDGSASSHDLCLVYRAEGLRGLHTPVVLQEFVNHGGVLFKVYVVGGRAVCVRRSSLPDVPAERLADPDADASVPFANISSRPALDKGEDSMPPAAFVDQVARGLRQALGLHLLNFDMFAATELDDGGRRRYFLVDINYFPGFAKMPGYETALTDFFAEMIQLGTAGAAAGQEKLESVPCNEL

SEQ ID NO: 2613 - DNA, 481 bp, Zea mays
  misc_feature: Ceres CLONE ID no. 644929
  misc_feature: Ceres CDNA ID no. 36583770
  CDS (254)..(436): REFERENCED BY SEQ ID NO: 2614
gaactatcgaatggggtgttccacaatcaattgcctatttcagaacttccaagctgaagaatatatgacctagctacgacgttgtgaatggctgcggttgcacacctcaagctcaatggttcgattctttgcgtgaaggttttaacgagacagaaaacacggatgtttttgacctgccaatgcccaatgtgtctttgtaatcctccattattgttggccacctgcatcctgtacatgtgaacaactcaagtagatgtgtatccgtattccccttgcagatattgcaattgtcacagcatcctgtttaactgcttgggtagtttcgaaaatttgtttttctcacttggagacgcagatggttcaagctgttaacagaagtgcactgattgttctttttcagaggctgaaacctgtatgtaacccgtccatgatatgattaacaagctgactttatctttgacccaaaaaaaaaaaaaaaaaa

SEQ ID NO: 2614 - protein, 60 aa, Zea mays
  misc_feature: Ceres CLONE ID no. 644929
  misc_feature: Ceres CDNA ID no. 36583770
MCIRIPLADIAIVTASCLTAWVVSKICFSHLETQMVQAVNRSALIVLFQRLKPVCNPSMI

SEQ ID NO: 2615 - DNA, 1023 bp, Zea mays
  misc_feature: Ceres CLONE ID no. 645554
  misc_feature: Ceres CDNA ID no. 40351145
  CDS (85)..(810): REFERENCED BY SEQ ID NO: 2616
acgccactcattccaagaggcagccgcggtctcctctccaccccggccgccggccgcccccacagtgccgtaccccgaccagccatgcgcatcttcgtgctgtccgggcagagtaacatggccggccgcggcggcgtacaccacaagcactgggacggcgtggtgcccccagaatgcgcgccggatccgtccatcctccgcctttcctcggcgcagcagtgggaggaagcccgcgagccgctccacgccgacatcgacacaaccaagacctgtggcatcgggcccgggatggcattcgcccgcgctgtgctctcgagcctgcaggaggacacccctggcgcggcggcccagatcgggctcgtgccgtgcgccgttggcgggacggccatccgggagtggtccctcgggaaacatctgtacgagcagatggtatcccgggcgcgcgtcgcgaccttgtacggcgagatcgaggccatcctatggtaccagggagagagcgacgccgaatccgatgccgacacgagtgcctacttggagaacgtcgagaggctcatctgtaatgtcagggcagatcttgggatgccgcagttaccctttattcaggttgcacttgcatctgggaataaaaggaacattgaaaaagtcagaaatgctcaatttagtgttaatttgcccaatgttgtaactgtggatccgatgggtatggcactgaatgaagacaagttgcatcttaccaccgagtcacaagtaaaacttggcaaaatgctggcagaagcgtacattttgaacttctctacatcaacttgttaggtgaatacaagtgtctcaagatcttcaatccacaacaagtatatttgataaggtcgcctagtgacaagattactatgtgctcaagcacttaatcaatcgaagacattgtatctatcttatgtccgagaatacgctaaagtgcctcaattcttgtatagcatttcaaactcgcttcataacatttctttcatattgtaaaaaaaaaaaaaaaaa

SEQ ID NO: 2616 - protein, 241 aa, Zea mays
  misc_feature: Ceres CLONE ID no. 645554
  misc_feature: Ceres CDNA ID no. 40351145
MRIFVLSGQSNMAGRGGVHHKHWDGVVPPECAPDPSILRLSSAQQWEEAREPLHADIDTTKTCGIGPGMAFARAVLSSLQEDTPGAAAQIGLVPCAVGGTAIREWSLGKHLYEQMVSRARVATLYGEIEAILWYQGESDAESDADTSAYLENVERLICNVRADLGMPQLPFIQVALASGNKRNIEKVRNAQFSVNLPNVVTVDPMGMALNEDKLHLTTESQVKLGKMLAEAYILNFSTSTC

SEQ ID NO: 2617 - DNA, 781 bp, Zea mays
  misc_feature: Ceres CLONE ID no. 645665
  misc_feature: Ceres CDNA ID no. 36692267
  CDS (94)..(489): REFERENCED BY SEQ ID NO: 2618
atcacaagcgcttagtgatcagttaatactaagggcaggcacacctctgcttcgcgctagtgatcaagcaagtgctttctgtactctgcagcaatggcaggcaaggcctcggtcgcgctgttcctcgccgtgaacctggtggtgttcgccatggccagcgcctgcggtggcaactgccccacgccgaccccgtccaccccgtcgacgccgaccccgacgccggcctcgttcggcaagtgcccccgcgacgcgctcaagctgggcgtgtgcgccaacgtgctgggactgatcaaggccaaggtgggcgtgccgcccacggagccatgctgcccgctgctgaagggactcgtcgacctcgaggccgccgtgtgcctctgcaccgccatcaagggcgaggtcctcggaatcaagctcaacctgcccgtcgacctcagcctcatcctcaaccactgcggcaagaccgtgcccaccggattcaaatgcctctaagctagccgcgagcatgcggatatatatgtgttcttttggttgccattcgcctgcagacttcttgtcgtttgctacttattaagcgagtgctagctctgcatgcatgactacgtcctttgcatgttgatgagcaactttcgatacttttgggtgtttgttttatgtaagtgcttcgtcctttacatcgacagtgtcccagaactatttgtactgttattcttttatttgtacccagcaatctgctcgatgaaataaagcttattatatttattggaaaaaaaaaaaaaaaaaa

SEQ ID NO: 2618 - protein, 131 aa, Zea mays
  misc_feature: Ceres CLONE ID no. 645665
  misc_feature: Ceres CDNA ID no. 36692267
  misc_feature (49)..(130): Pfam Name: Tryp_alpha_amyl PFAM Desc: Protease inhibitor/seed storage/LTP family
  misc_feature: Homolog of GI Number: 39748094 NR Desc: lipid transfer protein
  misc_feature: Homolog of GI Number: 50927843 NR Desc: OSJNBa0010H02.23
  misc_feature: Homolog of GI Number: 50911525 NR Desc: root
  misc_feature: Homolog of GI Number: 7484770 NR Desc: extensin like protein
  misc_feature: Homolog of GI Number: 37536722 NR Desc: putative lipid transfer protein
  misc_feature: Homolog of GI Number: 37536718 NR Desc: putative lipid transfer protein
  misc_feature: Homolog of GI Number: 60542797 NR Desc: arachidonic acid
  misc_feature: Homolog of GI Number: 39748092 NR Desc: lipid transfer protein
  misc_feature: Homolog of GI Number: 4240035 NR Desc: ZmGR1b
  misc_feature: Homolog of GI Number: 4240033 NR Desc: ZmGR1a
MAGKASVALFLAVNLVVFAMASACGGNCPTPTPSTPSTPTPTPASFGKCPRDALKLGVCANVLGLIKAKVGVPPTEPCCPLLKGLVDLEAAVCLCTAIKGEVLGIKLNLPVDLSLILNHCGKTVPTGFKCL

SEQ ID NO: 2619 - DNA, 1287 bp, Glycine max
  misc_feature: Ceres CLONE ID no. 646085
  misc_feature: Ceres CDNA ID no. 35383247
  CDS (31)..(1068): REFERENCED BY SEQ ID NO: 2620
caagtcacactcatagcaaattaatcaaacatggctagggttagtcctttgtttcactctttgctcttgatttcttcccttgtattggcttctcaaatccatgtttcctctgggaaactagtccctggactatcatggaattactatttgttgacatgtcccaagcttgagaggattataaggaagcatcttgaggatgtcttcgagaaggacagtggagtagctcctggcatacttcgactcttcttccatgactgctttcctaatggatgcgatgcgtctatattgttgaatggagacggtgacgagaagcaacaccgtgctaactttggtttaaggcaagaggccattgacgccattgaaaaccttcgggttctcatttacaagcagtgtctaccagttgtctcatgctcagacatccttgttatcgcagcacgtgaagctgttcgccaattaggaggccctgattttgacgtgccactgggaagaaaagacggcctaggaccaaacgccaccgcgccggacaacctaccggcaccattcttccgaaccgacgatcttctgagaggattcggaaatagaggtttcgatgccaccgatgtggtcgctctctccggcgcacacacctacggtcgtgcccactgtccctccctagtgaacagaaccatcgaaacggacccaccaatcgacccaaacttcaacaacaatttgatagctacgtgtcccaatgccgagtcccccaacaccgttaatttggacgtgagaacccccgtgaagttcgacaacatgtattacatcaacctcttgaaccgccaaggagtgttcacttctgaccaggacatcgcgggcagccccaaaaccaaggaaatcgtgaaccagttcgcttcagaccagaaactgttttttaagaaattttccgatgcttttgtgaaggtgagccagctagatgtgataacggatcgtattgggaaaggggagattcgtgataagtgctttgttgcaaataagagaagatcttctatggcgtctgtggtggaagaagtagtggaattggctcaggagatataattgtattgggtccttttgctcagggtgttcttttttgtttttctgaatggattgtgtaataaacgttgatatgtgttttcttttcttgttgtcttctcatagatcattgctttggattggttcaaagtttaaccagtataacataaacaaggcaaaagtagtacgagaataatttatataaatattgctgctgtgttccatcgaaaaaaaaaaaaaaaa

SEQ ID NO: 2620 - protein, 345 aa, Glycine max
  misc_feature: Ceres CLONE ID no. 646085
  misc_feature: Ceres CDNA ID no. 35383247
  misc_feature (50)..(287): Pfam Name: peroxidase PFAM Desc: Peroxidase
  misc_feature: Homolog of GI Number: 5002238 NR Desc: peroxidase
  misc_feature: Homolog of GI Number: 1402914 NR Desc: peroxidase
  misc_feature: Homolog of GI Number: 1781326 NR Desc: peroxidase
  misc_feature: Homolog of GI Number: 23397149 NR Desc: putative peroxidase ATP4a
  misc_feature: Homolog of GI Number: 559235 NR Desc: anionic peroxidase
  misc_feature: Homolog of GI Number: 73759789 NR Desc: peroxidase
  misc_feature: Homolog of GI Number: 1781322 NR Desc: peroxidase
  misc_feature: Homolog of GI Number: 478409 NR Desc: peroxidase
  misc_feature: Homolog of GI Number: 1389835 NR Desc: peroxidase
  misc_feature: Homolog of GI Number: 14031049 NR Desc: peroxidase
MARVSPLFHSLLLISSLVLASQIHVSSGKLVPGLSWNYYLLTCPKLERIIRKHLEDVFEKDSGVAPGILRLFFHDCFPNGCDASILLNGDGDEKQHRANFGLRQEAIDAIENLRVLIYKQCLPVVSCSDILVIAAREAVRQLGGPDFDVPLGRKDGLGPNATAPDNLPAPFFRTDDLLRGFGNRGFDATDVVALSGAHTYGRAHCPSLVNRTIETDPPIDPNFNNNLIATCPNAESPNTVNLDVRTPVKFDNMYYINLLNRQGVFTSDQDIAGSPKTKEIVNQFASDQKLFFKKFSDAFVKVSQLDVITDRIGKGEIRDKCFVANKRRSSMASVVEEVVELAQEI

SEQ ID NO: 2621 - DNA, 760 bp, Glycine max
  misc_feature: Ceres CLONE ID no. 646303
  misc_feature: Ceres CDNA ID no. 36707664
  CDS (164)..(514): REFERENCED BY SEQ ID NO: 2622
aacaaaattgtcccttaaacccttacaaaagaaccgcttcttcttctgttcatctctcccactctcacttttaattttttgccctaaaaccctcgctaccgccgtggtggccgccgaagaaggagagtagagagcgcaatcgagtcttcatcttcgactcaccatgaagctcgtcaggtttttaatgaagttgaacaatgaaaccgtgtcaattgagctcaagaatggcactattgttcatggcaccattacaggtgttgatatcagtatgaacacacatttgaaaacagttaaactaactctgaaagggaaaaatccagtcactctagatcatctcagtgtgaggggtaacaacatccgttactatattcttcctgacagcttgaatcttgagaccttgctggtggaagagacacccaagatcaaacccaagaagccaactgctggcaaacctttgggacgtggacgaggaaggggccgtggccgtggtcgtggtcgtggtggtggccgttgatttgcacctttcttcatttttgtggcatgtggttgtaagctatgcagcaagaatttctgggtggttttaggaacttctacggagcatattttttattcctgctattttcttgcaagagcttatcatgctttagtgtacaaccatcttccttctgaaactgatgtaacatgaattacctatctgctattgccttatactagttgttaatggggatctattcattgagcagtaaaaaaaaaaaaaaaa

SEQ ID NO: 2622 - protein, 116 aa, Glycine max
  misc_feature: Ceres CLONE ID no. 646303
  misc_feature: Ceres CDNA ID no. 36707664
  misc_feature (5)..(70): Pfam Name: LSM PFAM Desc: LSM domain
  misc_feature: Homolog of GI Number: 50924966 NR Desc: OSJNBa0089K21.2
  misc_feature: Homolog of GI Number: 21536940 NR Desc: small nuclear riboprotein Sm
  misc_feature: Homolog of GI Number: 50909887 NR Desc: putative small nuclear ribonucleoprotein D1 polypeptide 16kDa
  misc_feature: Homolog of GI Number: 6466942 NR Desc: putative small nuclear ribonucleoprotein
  misc_feature: Homolog of GI Number: 83272157 NR Desc: putative small nuclear ribonucleoprotein D1
  misc_feature: Homolog of GI Number: 34877889 NR Desc: similar to Small nuclear ribonucleoprotein Sm D1
  misc_feature: Homolog of GI Number: 60832252 NR Desc: small nuclear ribonucleoprotein D1 polypeptide
  misc_feature: Homolog of GI Number: 32959908 NR Desc: small nuclear ribonucleoprotein Sm D1
  misc_feature: Homolog of GI Number: 49250837 NR Desc: MGC69276 protein
  misc_feature: Homolog of GI Number: 27545253 NR Desc: small nuclear ribonucleoprotein D1 polypeptide
MKLVRFLMKLNNETVSIELKNGTIVHGTITGVDISMNTHLKTVKLTLKGKNPVTLDHLSVRGNNIRYYILPDSLNLETLLVEETPKIKPKKPTAGKPLGRGRGRGRGRGRGRGGGR

SEQ ID NO: 2623 - DNA, 597 bp, Glycine max
  misc_feature: Ceres CLONE ID no. 646308
  misc_feature: Ceres CDNA ID no. 40041282
  CDS (78)..(542): REFERENCED BY SEQ ID NO: 2624
ctactctcttcttacccagctgccaccaattgttatctaattttaattatcattgccgcaaaaaccaaaaaatctaaatggaagcttattctggttcttaccctgcgtccaagtctcattctctgcttcacaccgtgcggaagacacaagttaaatcgtggaagaaggcgccagtggcaccaccggcaccgacaccgatcagagtgtacaaggtggacgctatcaacttccgtgaccttgttcagcagcttacgggtgcaccggagttcaagcctgatcaggaacatcatcaacttttccaaagtgtcgcagtcgcacctattgctgctacctcccttgtaaatacgcccccgaagcaaatgttgtcgagcaaagacaatattgcagcatcatcaacaatgccctccactaactggcaccagggggcacaatctgaagcattggaattgaatttatcatcaccctcttataataactggttttctgtctctcgtatgagccaaggaaacatgaccagcttggaaacgggtcgagttctctagttatatataatatttttttaaaaaaaaaaaaaaaaaaagaaaaaaaaaaaaaaaa

SEQ ID NO: 2624 - protein, 154 aa, Glycine max
  misc_feature: Ceres CLONE ID no. 646308
  misc_feature: Ceres CDNA ID no. 40041282
  misc_feature (37)..(63): Pfam Name: VQ PFAM Desc: VQ motif
MEAYSGSYPASKSHSLLHTVRKTQVKSWKKAPVAPPAPTPIRVYKVDAINFRDLVQQLTGAPEFKPDQEHHQLFQSVAVAPIAATSLVNTPPKQMLSSKDNIAASSTMPSTNWHQGAQSEALELNLSSPSYNNWFSVSRMSQGNMTSLETGRVL

SEQ ID NO: 2625 - DNA, 896 bp, Glycine max
  misc_feature: Ceres CLONE ID no. 646362
  misc_feature: Ceres CDNA ID no. 25891416
  CDS (159)..(701): REFERENCED BY SEQ ID NO: 2626
aacagtacttcgcgtgccctagctcactccgtcgctcctcacccttccggcagtgcttggtcgtggccgtcacggttcaaacttcaaaagttataattggttcagcttgatcaggaaggagggtcatctgcagttcaaaaggtgtgaaagcaaagaagatgcagcatagaaaattgacttctggaaggccttctggaactgatggctctgattactcctaccgtatggtagttgattcaaggtatcaactggttgcaaaggggaagaaatacctgtctctgcactttatcactgaggctgtgttgctgttaataggagcaacacttgcatatttaccaggaatagaagcagatgctccaaatacagttgcctattcatctgttattgttagtgttgtttcactaataattgggaatataggtcgaagacgaagccggtccggtttgttgagattttatgctgttgtatcatctatagtgatgctactcttgattgcttctcttgccacgcagcatttgcttctgaaggctatccaggattctaaactttggagaacagggaagtatgatgtcaatgatttatcgcattttcaaattggtttgctgttatacatggtaaccttatccgtgcttaagctttgtactgtcaaagcagttgctttccttctctttaacatggtgccccccaagaaaacctcttagctcctcatcggttttttggtccaaatccaaatttattttctcattcatctatttacaacagattgatctatatccatgactatcttctatgaaggagatattttgagggaaactcagattttacctacaaaacattttgaagacatttgttaattataggcttttgttgttgttttgttaaaaaaaaaaaaaaaa

SEQ ID NO: 2626 - protein, 180 aa, Glycine max
  misc_feature: Ceres CLONE ID no. 646362
  misc_feature: Ceres CDNA ID no. 25891416
MQHRKLTSGRPSGTDGSDYSYRMVVDSRYQLVAKGKKYLSLHFITEAVLLLIGATLAYLPGIEADAPNTVAYSSVIVSVVSLIIGNIGRRRSRSGLLRFYAVVSSIVMLLLIASLATQHLLLKAIQDSKLWRTGKYDVNDLSHFQIGLLLYMVTLSVLKLCTVKAVAFLLFNMVPPKKTS

SEQ ID NO: 2627 - DNA, 819 bp, Glycine max
  misc_feature: Ceres CLONE ID no. 648131
  misc_feature: Ceres CDNA ID no. 35383248
  CDS (101)..(628): REFERENCED BY SEQ ID NO: 2628
ctcattgttgttcttctctttcttttattgcttcctttcccattcttcatcttcttctctctgaaccgtactcaaactcactttcccacttatttatacaatgtcggcttacaaagaccaggatccccgtcttcatggcatcaaaactaagattcgtgtcgtccccaatttccccaaatccggtcttatgttcctagacattactactctattgcttgatcccaaagcatttaaggactcaatagatttgttcgtggagcggtacaagggcaaaaacatttctgttgttgcaggaattgaagctcgaggttttatttttggtccccccattgcgctggctataggagcaaagtttgtaccattgaggaaaccaaagaagttgcctggaaaagttatttctcaagaatatattctggaatatggaagggactgtcttgagatgcatgttggagctgttgatgatttgattgcaactggcggaacactctgtgccgctatggacttgttagaacgtgtgggagcagaagtagtggagtgtgcatgtgtaattgaattaccagaattgaagggtcgtgaacgtttgaacgggaagcccttgtgcgtgttggtggaatatgtggatatatgattatgaagaagtgggcaaaagaatattaagatgtagatttgggagatgatgtgtctttcagtgggtgctttcccattctgattacaattctagcttgtagtaggaacgatcaaatcaaattaatgcatttgtatgacccactctttgggctcatcttctcatctctttttcgaataaaaaaaaaaaaaaaa

SEQ ID NO: 2628 - protein, 175 aa, Glycine max
  misc_feature: Ceres CLONE ID no. 648131
  misc_feature: Ceres CDNA ID no. 35383248
  misc_feature (33)..(160): Pfam Name: Pribosyltran PFAM Desc: Phosphoribosyl transferase domain
  misc_feature: Homolog of GI Number: 21536749 NR Desc: adenine phosphoribosyltransferase
  misc_feature: Homolog of GI Number: 28393997 NR Desc: putative adenine phosphoribosyltransferase
  misc_feature: Homolog of GI Number: 22136608 NR Desc: putative adenine phosphoribosyltransferase
  misc_feature: Homolog of GI Number: 50937177 NR Desc: putative adenine phosphoribosyl transferase
  misc_feature: Homolog of GI Number: 82621166 NR Desc: adenine phosphoribosyltransferase
  misc_feature: Homolog of GI Number: 32492063 NR Desc: adenine phosphoribosyltransferase
  misc_feature: Homolog of GI Number: 71835969 NR Desc: adenine phosphoribosyltransferase
  misc_feature: Homolog of GI Number: 81248592 NR Desc: adenine phosphoribosyltransferase
  misc_feature: Homolog of GI Number: 726305 NR Desc: adenine phosphoribosyltransferase form 1
  misc_feature: Homolog of GI Number: 9711921 NR Desc: Adenine phosphoribosyltransferase
MSAYKDQDPRLHGIKTKIRVVPNFPKSGLMFLDITTLLLDPKAFKDSIDLFVERYKGKNISVVAGIEARGFIFGPPIALAIGAKFVPLRKPKKLPGKVISQEYILEYGRDCLEMHVGAVDDLIATGGTLCAAMDLLERVGAEVVECACVIELPELKGRERLNGKPLCVLVEYVDI

SEQ ID NO: 2629 - DNA, 750 bp, Glycine max
  misc_feature: Ceres CLONE ID no. 648806
  misc_feature: Ceres CDNA ID no. 40041283
  CDS (136)..(618): REFERENCED BY SEQ ID NO: 2630
aacgttaccagtactttcctatatttcgtgtcatgagataacccaccaaaactcgaacttttttgtttctaatcaacaaacatagcctattcctggttgcttctgtttttgtttttcatttcagaataggaaccaatggctcatttgctgacaccaactcctgccactgctgcaacagctctctccccgagagcccgaaagagcaagagccccctccattcttggaaaaatggttactttccaactccaagagtgtgctgcgttggccaccaatctcaacgatctcacacctcttccatctcttctgatcttgatcaagtccctcctccccttgacaaccactctcttcgtcgcaggacattgatggggttgagtggtgcggcaatgttggggttgagtttgagtgatgagcaaagtgcaagtggcgcggcaaggcgtccaccgcctccaccaccgacggagaaaaaggacccgaatgtgagtggtgttcaggctaaagtattggctagcaagaggagaaaagaagccatgaaagaagaagtggccaggctaagagagagagggaagtccgttaataaacagcaaccaccacctcctcctcctcctgcatcagaatagtttccacatgtttaacctttctattgtaatcacttacaattggttgatattcttgttgtattactatcactgttcaattgaataagaccgtttagcttgacagtttttttggagtgaaaaaaaaaaaaaaaa

SEQ ID NO: 2630 - protein, 160 aa, Glycine max
  misc_feature: Ceres CLONE ID no. 648806
  misc_feature: Ceres CDNA ID no. 40041283
MAHLLTPTPATAATALSPRARKSKSPLHSWKNGYFPTPRVCCVGHQSQRSHTSSISSDLDQVPPPLDNHSLRRRTLMGLSGAAMLGLSLSDEQSASGAARRPPPPPPTEKKDPNVSGVQAKVLASKRRKEAMKEEVARLRERGKSVNKQQPPPPPPPASE

SEQ ID NO: 2631 - DNA, 1095 bp, Glycine max
  misc_feature: Ceres CLONE ID no. 650055
  misc_feature: Ceres CDNA ID no. 40041284
  CDS (73)..(885): REFERENCED BY SEQ ID NO: 2632
atcacacttcaaaatcctctagtaacccttcttttctctctctctctctcgtgttctgagctgctagaagcaatggagaggaaaagaagccatgcttctttcaccatgtttgcaatgcttgttggattgctctctcagagccttgtcattcctgtaatatccaccactgttgcagatcagaagaactactacaccccagatccacatgctggaagtccccccacaggtttctccgattctctgtgctcacacaatagtagtcctccatctcatggccatgggagctctccaccctcacatcacaatagtccaagtactccatcaacaccctcaggtggaaactgtggatcatcacccccacaacatcatgatccaacaccctcaactccatcaacaccatcaaaccctccctcaggtggatactatggaggtagccctccaacacctgtcactgtgagcccaccatctactccagttgaccctggcaccccaagcatcccctcaccaccactcattccttccccatctcctttcactggcacatgcaactactggaggaatcatcctgcaatcatctggggaatccttggctggtggggaaccctaggaagtgcatttggtgttacaggtactactgttccagggttcagtcctggcctgagcttgccacaagcactttccaacacaagaactgatgggctaggagcactctacagagaaggcacagcttccttcctcaactccatggtgaacaacaagttcccttacactaccaaccaagtcagggacaggtttgtggcctcactcaactccaacaaggccgcagaagcacaagcccagctcttcaagatggccaatgaaggaagaatgaagcctagaccatgatgagcaagatagattattaagtaatcttaattagtttaattttgtgtgttgattcactctaagaacatttatatttaagatttctgttagtttgtatcatttaaggctcttacatgtgttcattaatatgtcttgagatggatatcatgtttcttcgaaatttaatgcaaactttatggttttgggtttggaataaaaaaaaaaaaaaaa

SEQ ID NO: 2632 - protein, 270 aa, Glycine max
  misc_feature: Ceres CLONE ID no. 650055
  misc_feature: Ceres CDNA ID no. 40041284
  misc_feature: Homolog of GI Number: 21593673 NR Desc: En/Spm
  misc_feature: Homolog of GI Number: 34910776 NR Desc: VsaA
  misc_feature: Homolog of GI Number: 55710029 NR Desc: meiosis 5
  misc_feature: Homolog of GI Number: 50906591 NR Desc: putative protodermal factor
  misc_feature: Homolog of GI Number: 50236397 NR Desc: proline
  misc_feature: Homolog of GI Number: 7268661 NR Desc: extensin
  misc_feature: Homolog of GI Number: 12018147 NR Desc: vegetative cell wall protein gp1
  misc_feature: Homolog of GI Number: 66523959 NR Desc:  similar to ENSANGP00000003674
MERKRSHASFTMFAMLVGLLSQSLVIPVISTTVADQKNYYTPDPHAGSPPTGFSDSLCSHNSSPPSHGHGSSPPSHHNSPSTPSTPSGGNCGSSPPQHHDPTPSTPSTPSNPPSGGYYGGSPPTPVTVSPPSTPVDPGTPSIPSPPLIPSPSPFTGTCNYWRNHPAIIWGILGWWGTLGSAFGVTGTTVPGFSPGLSLPQALSNTRTDGLGALYREGTASFLNSMVNNKFPYTTNQVRDRFVASLNSNKAAEAQAQLFKMANEGRMKPRP

SEQ ID NO: 2633 - DNA, 826 bp, Glycine max
  misc_feature: Ceres CLONE ID no. 650466
  misc_feature: Ceres CDNA ID no. 35383249
  CDS (41)..(538): REFERENCED BY SEQ ID NO: 2634
catcctaatcgaaaaaagggctacacaaacacaatctctaatggcactcaggatgtgggcttcttccactgccaatgcactcaaactctcttctgtctccagacctcatctcttgcctcctttttctttctccagatgcttatcttccgtcttggatggacttaagtacgctgattcacatgaatgggtcaagcacgaaggctcagtcgccaccattggtatcactgaccatgcccaggaccatcttggagaggttgtgtatgtggagctgccagaaccaggtggcacagtttccaagaagtctggcttcggagccgttgaaagtgttaaagcaacaagtgatataaactctccaatctcgggggagatcgttgaggttaacaaaaagctcacagaaacgcctggcctggtcaactcaagcccatacgaagatggatggatgatcaaagtaaagccaagcgatccatctgaattagattccttgatgggtccaaaggagtacacaaaattttgtgaggaagaagatgcaagtcattaaagtttgaattgaattggctcctgcagttatgtgtgggactgactgttcttcatatgtttatgatcttattaccttctgaacagttttttaatatgcaacagaactgtttctttccatttttccttcccctgctattgtctcttgtcaccgacacttcagtgtgtctacattctaatttctttaataaaaatatttttattaaaaaaaaaaaaaaaaaaaaaaaaaaaaaaaaaaaaaaaaaaaaaaaaaaaaaaaaaaaaaaaaaaaaaaaaaaaaaaaaaaaaaaaa

SEQ ID NO: 2634 - protein, 165 aa, Glycine max
  misc_feature: Ceres CLONE ID no. 650466
  misc_feature: Ceres CDNA ID no. 35383249
  misc_feature (41)..(161): Pfam Name: GCV_H PFAM Desc: Glycine cleavage H
  misc_feature: Homolog of GI Number: 547558 NR Desc: H
  misc_feature: Homolog of GI Number: 3688299 NR Desc: H
  misc_feature: Homolog of GI Number: 2887286 NR Desc: H protein
  misc_feature: Homolog of GI Number: 438001 NR Desc: H
  misc_feature: Homolog of GI Number: 12083338 NR Desc: putative glycine cleavage system H protein precursor
  misc_feature: Homolog of GI Number: 3688309 NR Desc: H
  misc_feature: Homolog of GI Number: 886868 NR Desc: H
  misc_feature: Homolog of GI Number: 20737 NR Desc: H protein
  misc_feature: Homolog of GI Number: 21592462 NR Desc: glycine decarboxylase complex H
  misc_feature: Homolog of GI Number: 547500 NR Desc: H
  misc_feature: Useful for decreasing plant size
  misc_feature: Useful for delaying flowering time
  misc_feature: Useful for increasing chlorophyll and photosynthetic capacity
  misc_feature: Useful for making bigger plants
  misc_feature: Useful for making ornamental plants with modified flowers
  misc_feature: Useful for making plants with increased biomass and foliage
  misc_feature: Useful for making plants with increased biomass and foliage
  misc_feature: Useful for making plants with increased biomass and foliage
  misc_feature: Useful for making shorter plants
  misc_feature: Useful for making stronger plants
MALRMWASSTANALKLSSVSRPHLLPPFSFSRCLSSVLDGLKYADSHEWVKHEGSVATIGITDHAQDHLGEVVYVELPEPGGTVSKKSGFGAVESVKATSDINSPISGEIVEVNKKLTETPGLVNSSPYEDGWMIKVKPSDPSELDSLMGPKEYTKFCEEEDASH

SEQ ID NO: 2635 - DNA, 941 bp, Glycine max
  misc_feature: Ceres CLONE ID no. 650467
  misc_feature: Ceres CDNA ID no. 36699548
  CDS (59)..(724): REFERENCED BY SEQ ID NO: 2636
tccactcttgtgttgtcttgtgtgtgtttctccgcctagtcctagatctgtctccccaatggctggtttcttctctcttctaaggcgcctctatctctccctttacaattggaccgttttgtttggatggtgtcaagttctgtattttgttctcaagacattgaacgaatcgggtcatcaacatgtttacagtgcagcagaaaaacctttgcattatgctcaaagcgctgctgtgttagagattcttcatggtttggtagggctggtgaggtctccagtaacagcaacattgccacagataagttcaaggctgtttctggtttggggcatcttatggagttttcctgagactcggtcccatgtgcttgttacctccctactaatcagctggtccatcacagagatcattcgctattctttctttggctttaaagagacttttggatttactccatcatggcttttgtggcttagatatagcagcttcttagttttgtatccaacaggcataagcagtgaagttggtttaatatacattgccttaccattcattaaggcgtctgggaagtattgcataaggatgccaaacaaatggaactcatcatttgattacttctatgctgcgattgttgcaatgggaatctacgttccaggtagccctcacttgtacacatacatgcttgctcagaggaagaaagctctctccaaatcgaagagagagtaatgcaacatcagtagttttcattgattttgggtcaaacgtaggatatatacacatgtcatatcttggtttggattcacatataggtatcagggaaacgctgataaaaaaaaaaaaaggtatcaggaaaactcttgctttacttgttaatcattaaaaggtaagatgccggagattaataaactaattattttgttcttctgtaaaaaaaaaaaaaaaa

SEQ ID NO: 2636 - protein, 221 aa, Glycine max
  misc_feature: Ceres CLONE ID no. 650467
  misc_feature: Ceres CDNA ID no. 36699548
  misc_feature (55)..(219): Pfam Name: PTPLA PFAM Desc: Protein tyrosine phosphatase
  misc_feature: Homolog of GI Number: 50922265 NR Desc: OSJNBb0067G11.14
  misc_feature: Homolog of GI Number: 55770331 NR Desc: putative tyrosine phosphatase
  misc_feature: Homolog of GI Number: 55770345 NR Desc: tyrosine phosphatase
  misc_feature: Homolog of GI Number: 34895862 NR Desc: P0009G03.11
  misc_feature: Homolog of GI Number: 34895852 NR Desc: P0009G03.5
  misc_feature: Homolog of GI Number: 47027051 NR Desc: protein tyrosine phosphatase
  misc_feature: Homolog of GI Number: 34895856 NR Desc: P0009G03.7
  misc_feature: Homolog of GI Number: 34895854 NR Desc: P0009G03.6
  misc_feature: Homolog of GI Number: 34895864 NR Desc: P0009G03.12
  misc_feature: Homolog of GI Number: 72255628 NR Desc: 117M18_27
MAGFFSLLRRLYLSLYNWTVLFGWCQVLYFVLKTLNESGHQHVYSAAEKPLHYAQSAAVLEILHGLVGLVRSPVTATLPQISSRLFLVWGILWSFPETRSHVLVTSLLISWSITEIIRYSFFGFKETFGFTPSWLLWLRYSSFLVLYPTGISSEVGLIYIALPFIKASGKYCIRMPNKWNSSFDYFYAAIVAMGIYVPGSPHLYTYMLAQRKKALSKSKRE

SEQ ID NO: 2637 - DNA, 623 bp, Glycine max
  misc_feature: Ceres CLONE ID no. 650469
  misc_feature: Ceres CDNA ID no. 40351146
  CDS (173)..(331): REFERENCED BY SEQ ID NO: 2638
aaaaacatagaaattgttaccatttgtgatttgtgagtttcctacgtagtgttctcattcgttgttggtcgtgctcgtcctctttctgtcgccattctcggcgatccgaagcgcaaaacaaccgcaatcccttcgaatttcgtgtctcgatcctaacctcaagctggaagagatgaattggatacagcgcaagatctacctttacaatgtgacttttgggctgtatatgttggactggtgggagcgttgtaccttcaatattgtggtgattgtattaatgtgtttcgttctacgatatgttactcagttcttcaagaggtatgtttggtaagaagcaaaaccattgtcacgggaagaagcaaatgtagattgttacttgggggttaatattacttgcagccggtgtatttggtatagatgactagggaatatcttgatatagcctgacttggaatttctttaagctacccagaaattgcccttttgatgccaaatatacaccgtcatgaatcttatttaaacatcttataagcttgtataggatgccaattagcattctttacattgtaataattgttgggaatgttcaatactaagcgttttttgacaaaaaaaaaaaaaaa

SEQ ID NO: 2638 - protein, 52 aa, Glycine max
  misc_feature: Ceres CLONE ID no. 650469
  misc_feature: Ceres CDNA ID no. 40351146
MNWIQRKIYLYNVTFGLYMLDWWERCTFNIVVIVLMCFVLRYVTQFFKRYVW

SEQ ID NO: 2639 - DNA, 742 bp, Glycine max
  misc_feature: Ceres CLONE ID no. 650894
  misc_feature: Ceres CDNA ID no. 40351147
  CDS (533)..(742): REFERENCED BY SEQ ID NO: 2640
attttactctttaacatacttttggaactttccatgggaaattcaaacatacccaagtcattcaacccaaaagacttttacaccatcgcttgatgaactcatcgtcgaaccctatttcaccaggttttcttctgaatgatgaatcaaagtgaggtaaccaggaagagacttttttcacttgccctaagattatggatatttagaaggagtggtagtatagaggagagaacatatcaatagtgcttccgcaatgaccacatcaacattagtggcaacattctgctagtggaggtgcacttcacatgggcaatatgagaatggtaatatggtttgcatatggaatcatagaaataaatgggttttttttttttgggaaagacatttgataaggatgaactaaaacaacaattcctattcactgcttggtcctggttaaatagccaccacacaaattttgtatactccttcctacaatggtcgattaacccttggcagtgcttaccggagagacgctaacggggggttgggtttgatggtattgatatttaaagggagggtgtgcattgctacttgtctaccacatttattggttggcaaacacatgaagatagaaatacttcatattcttgtgttgtgtgatttctatcgactaagtatggagaatgttttgtctgttatgaattgcaactgccggtgttacactacaaataaagtatgcgttttgcgaaaaaaaaaaaaaaaa

SEQ ID NO: 2640 - protein, 53 aa, Glycine max
  misc_feature: Ceres CLONE ID no. 650894
  misc_feature: Ceres CDNA ID no. 40351147
MGFFFLGKTFDKDELKQQFLFTAWSWLNSHHTNFVYSFLQWSINPWQCLPERR

SEQ ID NO: 2641 - DNA, 1313 bp, Glycine max
  misc_feature: Ceres CLONE ID no. 651451
  misc_feature: Ceres CDNA ID no. 25891375
  CDS (13)..(1179): REFERENCED BY SEQ ID NO: 2642
agattctaaaaaatgagttggtggtgggctggagcaatcggtgctgccaagaagaaattcgaggaagaggaaccgccgcgaagcttccagagcgtgggcctggtgatcggcgtgacgggcatcgtgggcaacagcctcgccgagatcctccctctcgccgacacccccgccggtccatggaaggtctacggcgtcgcacgccgcccccgtccgccgtggaacgccgaccaccctgtcgagtacatccagtgcgacgtctccgatcccgccgacgccgaagccaaactctccgccctaaccgacgtcactcacgtcttcttcgtgtcgtggaccaaccgctccaccgaagcagaaaactgcgaagttaacggcgctatgttacagaacgtgcttcgcgccgttatccccaacgcccccaatctccgccacgtgtcactccagacaggcggcaagcactacttcggacccttcgaattcatcggcaagatcgaatctcatgaacctcccttcgcggaggatatgccgcgtttggatgcgcccaatttttattacacccaagaggatattctttttgaagaaaccgctaagaaagagggtttgacctggtcagttcacagaccccaagtaatctttgggttttcgccttacagtttaatgaacatgattgggacgctcagcgtgtacgccgcaatttgcaagcacgagggtgttccgttgagattccccggcacgagaggcgcgtgggagagttattcttgtgcctccgatgcggatttgattgcggagcagcacatttgggccgcggttgatccctacgcgcggaacgaggcgtttaactgctccaatggagacgtgttcaggtggaagcatctttggaaggtgctggcggaacagtttgggattgaggagtatgggtttgaggaagaaggtttgagtttgtcggaattgatgaaggataagggtcctgtttgggatgagattgtgagtgagaatcagcttctgcctaccaagcttgacgaggttgctgattggtggtttgtggatcttattttctcaggggagggaatgttggatagcatgaacaaggccaaggaacatgggtttttgggattcaggaactccaagaattcgttcataagttggatagacaagaccaaggcttataagattgtgccttgaatttaattcattctcttcctgctgcttctgtttaatttctcatgtgcgtctttgtttgtatttccctgtaatttatatcattatatggaatgaatgaatgaataaaactcgaggatataaaaaaaaaaaaaaaa

SEQ ID NO: 2642 - protein, 388 aa, Glycine max
  misc_feature: Ceres CLONE ID no. 651451
  misc_feature: Ceres CDNA ID no. 25891375
  misc_feature: Homolog of GI Number: 53830365 NR Desc: progesterone 5 beta reductase
  misc_feature: Homolog of GI Number: 52854331 NR Desc: progesterone 5
  misc_feature: Homolog of GI Number: 46409873 NR Desc: progesterone 5
  misc_feature: Homolog of GI Number: 46409877 NR Desc: progesterone 5
  misc_feature: Homolog of GI Number: 46409875 NR Desc: progesterone 5
  misc_feature: Homolog of GI Number: 28874734 NR Desc: progesterone 5
  misc_feature: Homolog of GI Number: 29500895 NR Desc: putative progesterone 5
  misc_feature: Homolog of GI Number: 46409879 NR Desc: putative progesterone 5
  misc_feature: Homolog of GI Number: 46403060 NR Desc: SirS
MSWWWAGAIGAAKKKFEEEEPPRSFQSVGLVIGVTGIVGNSLAEILPLADTPAGPWKVYGVARRPRPPWNADHPVEYIQCDVSDPADAEAKLSALTDVTHVFFVSWTNRSTEAENCEVNGAMLQNVLRAVIPNAPNLRHVSLQTGGKHYFGPFEFIGKIESHEPPFAEDMPRLDAPNFYYTQEDILFEETAKKEGLTWSVHRPQVIFGFSPYSLMNMIGTLSVYAAICKHEGVPLRFPGTRGAWESYSCASDADLIAEQHIWAAVDPYARNEAFNCSNGDVFRWKHLWKVLAEQFGIEEYGFEEEGLSLSELMKDKGPVWDEIVSENQLLPTKLDEVADWWFVDLIFSGEGMLDSMNKAKEHGFLGFRNSKNSFISWIDKTKAYKIVP

SEQ ID NO: 2643 - DNA, 704 bp, Glycine max
  misc_feature: Ceres CLONE ID no. 652092
  misc_feature: Ceres CDNA ID no. 40351148
  CDS (163)..(507): REFERENCED BY SEQ ID NO: 2644
attaggtttagggatctgctgtttgtgttgctttagaatctgggtgctgcggctgaagatctcgattagccgaaaattgcaagaacggcttctggctcttgcgatcaacaaacgcagcgttttgatctcagatttgagggggagaggtaccgtcgttgcataatggcaacaacagtgagaagtctgaagataaagacaagtacgtgcaaacgtatagtgaaggagctgcattcttatgagaaggaagttgagagagaagctgccaaaacagctgatatgaaggaaaaaggagccgatccctatgatctcaagcaacaggaaaatgtcttggctgagtctaggatgatgattcctgactgccgcaagcgccttgaggccgctttggcagacttgaaaggattattggctgagttggaggagtcggatgagaaggccagtcctgagattgatgaagctcggaacaccatcgtagaagttgaaaaagtatttgaaacaacagaagattaacaaggttgtttgattagtgctcttgatggaggatattggacctgtattgtacatttcctggtcacaaacaatcatacattcttcttgttccatgtgccctctcctccacagtttaattctgtacttttatagaacatctgaaaatgaatgattatggcattgctctacttttctaggcttgaaaaaaaaaaaaaaaa

SEQ ID NO: 2644 - protein, 114 aa, Glycine max
  misc_feature: Ceres CLONE ID no. 652092
  misc_feature: Ceres CDNA ID no. 40351148
  misc_feature (7)..(101): Pfam Name: TBCA PFAM Desc: Tubulin binding cofactor A
MATTVRSLKIKTSTCKRIVKELHSYEKEVEREAAKTADMKEKGADPYDLKQQENVLAESRMMIPDCRKRLEAALADLKGLLAELEESDEKASPEIDEARNTIVEVEKVFETTED

SEQ ID NO: 2645 - DNA, 546 bp, Glycine max
  misc_feature: Ceres CLONE ID no. 652122
  misc_feature: Ceres CDNA ID no. 40351149
  CDS (36)..(167): REFERENCED BY SEQ ID NO: 2646
cttcacctacagctgaaagcaaggcagcacaagcaatgagcatgcatctttatttcccctgtgggatcattagaggagctctttccaacttgggaattccttgtgcagtttctgcggatatatcaaaccttcctgcatgttcatttgtggtccgtataaaagcttgaagggttcatagctgtattactgatgggaggggaagcattaacattgctttgatgtctgcaagctcttttgtcgtaaaatgctcgagtggggaatgtttctttacgagatttaaactatattaaatgttgttgactgggctgtgtaggaagggctcctgaggttgtattttgataaatgaggatttggttctttcagatgcagattctatggagggtacgataatatcgaattattgtactgtggaaagactcggagaattcctatcattgtaatgttgttgctcttgtatggaatgaatgttaaccttttaaaacttgtaccacttatttgatcgccaatttgatcgagcctggcttttttacaaaaaaaaaaaaaaaa

SEQ ID NO: 2646 - protein, 43 aa, Glycine max
  misc_feature: Ceres CLONE ID no. 652122
  misc_feature: Ceres CDNA ID no. 40351149
  misc_feature (5)..(42): Pfam Name: TRAPP_Bet3 PFAM Desc: Transport protein particle
MSMHLYFPCGIIRGALSNLGIPCAVSADISNLPACSFVVRIKA

SEQ ID NO: 2647 - DNA, 609 bp, Glycine max
  misc_feature: Ceres CLONE ID no. 652501
  misc_feature: Ceres CDNA ID no. 29191817
  CDS (3)..(428): REFERENCED BY SEQ ID NO: 2648
tttttcagctttcggcggcggcggcgcactcctcgcgttctcacccaggcgcgcactcctcctcctccactcgccgtcgtcgtcgcggatcctccgccgcttccgcagacatggtgaacgttccgaagaccaagaagacctactgcaagaacaaggagtgcaagaagcacaccctccacaaggttacccagtacaagaaaggcaaggatagcctttctgctcaggggaagcgtcgttatgaccgcaagcagtctggatatggtggccagacaaagcctgttttccacaagaaggccaagacaacaaagaagattgtgctgaagttgcagtgccagagctgcaagcattactcacaacgcgctatcaagaggtgcaagcactttgaaatcggtggagacaagaagggcaagggaacatctctcttctaagctgatgatatcgctgttatgtttagaatgttgtgccagaacttcccacaagaagaatgtattatctttaattttctggttataaccctatgggctatgaagcatatgttttgctattgtgtcaactactttctccagatctaatcgacaagtaaaatgttcttcaaaaaaaaaaaaaaaa

SEQ ID NO: 2648 - protein, 105 aa, Glycine max; identical to SEQ ID NO: 1996
  misc_feature: Ceres CLONE ID no. 652501
  misc_feature: Ceres CDNA ID no. 29191817
  misc_feature (19)..(95): Pfam Name: Ribosomal_L44 PFAM Desc: Ribosomal protein L44
  misc_feature: Homolog of GI Number: 34901296 NR Desc: putative 60S ribosomal protein L44
  misc_feature: Homolog of GI Number: 41152660 NR Desc: 60S ribosomal protein L44
  misc_feature: Homolog of GI Number: 15281775 NR Desc: 60S ribosomal protein L144
  misc_feature: Homolog of GI Number: 21553918 NR Desc: ribosomal protein
  misc_feature: Homolog of GI Number: 170920 NR Desc: ribosomal protein L41
  misc_feature: Homolog of GI Number: 1553131 NR Desc: ribosomal protein L44 isoform b
  misc_feature: Homolog of GI Number: 82621114 NR Desc: ribosomal protein L41
  misc_feature: Homolog of GI Number: 66852786 NR Desc: ribosomal protein L41
  misc_feature: Homolog of GI Number: 3128243 NR Desc: ribosomal protein L41
  misc_feature: Homolog of GI Number: 12083868 NR Desc: ribosomal protein L41

SEQ ID NO: 2649 - DNA, 807 bp, Glycine max
  misc_feature: Ceres CLONE ID no. 652951
  misc_feature: Ceres CDNA ID no. 29191504
  CDS (205)..(663): REFERENCED BY SEQ ID NO: 2650
aaaaaaccattctataaaatcaaaataattgaaaccaaagattctctctctctctctcatgatccctacgccatggaaccatttccctcataaaattctctcttcctttttgggttctcctcaatccattccaagcttcaatcttttctctcttctgccctctgcacctcccctcacacccttcctcattcgcaggaggtgaagatgtcgaccccggcaaggaagagactgatgagggattttaaaagattgcaacaagatcctcctgctggcatcagtggggctccccaagacaataatattatgctttggaatgctgttatctttggaccagatgacaccccttgggatggaggtacgtttaagttgacacttcagtttacagaggattatcctaataaaccacctactgtgcgttttgtttctcgaatgtttcatcctaacatttatgcggatggcagtatatgcttggacattttacagaatcagtggagccctatttatgacgtagctgcaattcttacctcaatccagtcattgctgtgtgatccaaacccaaattcaccagcaaattctgaagctgctcggatgttcagtgaaaacaagcgtgaatacaacagaagagtacgtgagattgttgagcagagttggactgctgactaatcatcatagataagatagggcttctgtgacaatcaaaaggttgtcaaaaggatatatgattgaataaccagcagacttcaaaaagaaccattatgattttctagtccttgacactgtgcttgctcaaaaaaaaaaaaaaaaaaa

SEQ ID NO: 2650 - protein, 152 aa, Glycine max
  misc_feature: Ceres CLONE ID no. 652951
  misc_feature: Ceres CDNA ID no. 29191504
  misc_feature (8)..(145): Pfam Name: UQ_con PFAM Desc: Ubiquitin
  misc_feature: Homolog of GI Number: 56236462 NR Desc: ubiquitin carrier protein
  misc_feature: Homolog of GI Number: 8118527 NR Desc: ubiquitin conjugating protein
  misc_feature: Homolog of GI Number: 83283991 NR Desc: ubiquitin carrier
  misc_feature: Homolog of GI Number: 50934403 NR Desc: OsRad6
  misc_feature: Homolog of GI Number: 2947065 NR Desc: E2
  misc_feature: Homolog of GI Number: 464980 NR Desc: Ubiquitin
  misc_feature: Homolog of GI Number: 13516451 NR Desc: ubiquitin
  misc_feature: Homolog of GI Number: 50919097 NR Desc: ubiquitin carrier protein
  misc_feature: Homolog of GI Number: 136640 NR Desc: Ubiquitin
MSTPARKRLMRDFKRLQQDPPAGISGAPQDNNIMLWNAVIFGPDDTPWDGGTFKLTLQFTEDYPNKPPTVRFVSRMFHPNIYADGSICLDILQNQWSPIYDVAAILTSIQSLLCDPNPNSPANSEAARMFSENKREYNRRVREIVEQSWTAD

SEQ ID NO: 2651 - DNA, 684 bp, Glycine max
  misc_feature: Ceres CLONE ID no. 652955
  misc_feature: Ceres CDNA ID no. 40041285
  CDS (65)..(352): REFERENCED BY SEQ ID NO: 2652
accttcttcagctctcttattaatttgtcatctttcagcagatccccctagtttttcttccaacatgagtttcaaatctcccctgcaattgctcatcatcatccttctagttttttcatttgttgtctcttctgctgctctccaaacaacaagaaggcttttgccaaacaaagaaaaactctcaacccagattacatctgataagggtgttgaggaattgagaaatggagaagaaatgttagatatggcagaagagttcatggtagagggaaggattgatttggagagtaatgattatccagggacaggagcaaacaaccggcatgatccaaagacaccaggaggaccttgagaaattaatgcataaattttgtacagattatgagagctaagagaattatcaatggtactaaacttggtattggatttgcatattgttaattcttgctgctagaatattcctttcatccaatattttgtagtggatgaatgtgtttctctgtagttgggttgctgtgctattttgatttagatatgtggaggtgaaactctcttgcttggttaagtttgtagactttagagctcaagcaaatattaacagaaatttcaattttcttaagcaagtttatattatgtaccttccatttagacaaagttgtttagatgacaaaaaaaaaaaaaaaa

SEQ ID NO: 2652 - protein, 95 aa, Glycine max
  misc_feature: Ceres CLONE ID no. 652955
  misc_feature: Ceres CDNA ID no. 40041285
MSFKSPLQLLIIILLVFSFVVSSAALQTTRRLLPNKEKLSTQITSDKGVEELRNGEEMLDMAEEFMVEGRIDLESNDYPGTGANNRHDPKTPGGP

SEQ ID NO: 2653 - DNA, 528 bp, Glycine max
  misc_feature: Ceres CLONE ID no. 653023
  misc_feature: Ceres CDNA ID no. 40041286
  CDS (92)..(286): REFERENCED BY SEQ ID NO: 2654
gcagcatccattcttgttctcttctttctttcgatcagggtttcccctcgtctccgggctcgtttcgttctcgaataatcgatctacgataatgactcgcggtagccagagggatcgtgatcgcgaaagggctcaggctagaactggtgctaaaggcaagcagaaagatgatggattgacccctgaacagcgcaaggaaagagatgcaaaggcgctgcaggagaaggccgcaaagaaagcggcacagggtgcaggagggaataatgcagctggaagcaaaaaataggcaataattcaatgagtagtttgagtttgccgtttgttgattgtggacatggaatttgtggaaattttatgttgcattattcatggagtatgatgtgtttattaatgtaacttgcgacggaagaacaaataagttgtgcttctttgaaagatgttgtcgctgggggcagaatcaataacttgtatctttgtttggaataatagtatttggcaattatattgtgttcaaaaaaaaaaaaaaaa

SEQ ID NO: 2654 - protein, 64 aa, Glycine max
  misc_feature: Ceres CLONE ID no. 653023
  misc_feature: Ceres CDNA ID no. 40041286
  misc_feature (1)..(57): Pfam Name: 4F5 PFAM Desc: 4F5 protein family
  misc_feature: Homolog of GI Number: 15229580 NR Desc: four F5 family protein / 4F5 family protein
MTRGSQRDRDRERAQARTGAKGKQKDDGLTPEQRKERDAKALQEKAAKKAAQGAGGNNAAGSKK

SEQ ID NO: 2655 - DNA, 842 bp, Glycine max
  misc_feature: Ceres CLONE ID no. 653031
  misc_feature: Ceres CDNA ID no. 25891417
  CDS (85)..(723): REFERENCED BY SEQ ID NO: 2656
aaaagaaaaagattgttagtttttgtgttgtgttgtgtacagagagagagagagagagagagagagagagagagagaggctgctatggggaacagagctatgttaaccttgctactactcctcttcttctcgaccaatttggttccttccgcccttgctatctggctgacgttacccaccactggcactaagtgcgtctccgatgaaatccaacacaacgtcgtcgttttggccgactacgtcgttatccccagtgatcacgcccacaacctcaccatcgccgtcaaggtgacatcaccgtatggaaacaatcttcatcacaaggagaacacaacacatggtagtattgcatttacaactcaagaggctgggaactaccttgcatgcttctgggtggatagccctagtcaaggagttggtgaggttaatgtaaaccttgattggaaaattggaattgcagctaaggattgggattcagttgctagaaaagagaagattgagggagttgagcttgagctgagaaagctagagggagcagtagaggccatccatgagaatttgctctatcttaagggcagggaagctgagatgaggattgtgagtgaaaaaacaaatggcagagtggcatggtttagcattatgtccttggctatgtgcattgcagtttctggtttgcaattgtggtatttgaagcggtacttccagaagaagaagcttatatagattagttaatttaatttgattagtgatactgcaaacatataataacttaaaaagaattttcatgaaacactatttacaagtgtagacagaaattgttgataccaaaaaaaaaaaaaaaa

SEQ ID NO: 2656 - protein, 212 aa, Glycine max
  misc_feature: Ceres CLONE ID no. 653031
  misc_feature: Ceres CDNA ID no. 25891417
  misc_feature (58)..(122): Pfam Name: EMP24_GP25L PFAM Desc: emp24/gp25L/p24 family
  misc_feature: Homolog of GI Number: 38566614 NR Desc: At1g09580
  misc_feature: Homolog of GI Number: 12321358 NR Desc: integral membrane protein
  misc_feature: Homolog of GI Number: 47026935 NR Desc: emp24 protein
  misc_feature: Homolog of GI Number: 51090497 NR Desc: putative transmembrane protein Tmp21 precursor
  misc_feature: Homolog of GI Number: 50913141 NR Desc: emp24/gp25L/p24
  misc_feature: Homolog of GI Number: 21387055 NR Desc: transmembrane protein
  misc_feature: Homolog of GI Number: 51535942 NR Desc: putative transmembrane trafficking protein
  misc_feature: Homolog of GI Number: 40641597 NR Desc: putative transmembrane protein
  misc_feature: Homolog of GI Number: 6630552 NR Desc: putative membrane protein
  misc_feature: Homolog of GI Number: 50939421 NR Desc: putative transmembrane protein
MGNRAMLTLLLLLFFSTNLVPSALAIWLTLPTTGTKCVSDEIQHNVVVLADYVVIPSDHAHNLTIAVKVTSPYGNNLHHKENTTHGSIAFTTQEAGNYLACFWVDSPSQGVGEVNVNLDWKIGIAAKDWDSVARKEKIEGVELELRKLEGAVEAIHENLLYLKGREAEMRIVSEKTNGRVAWFSIMSLAMCIAVSGLQLWYLKRYFQKKKLI

SEQ ID NO: 2657 - DNA, 1242 bp, Glycine max
  misc_feature: Ceres CLONE ID no. 653925
  misc_feature: Ceres CDNA ID no. 40351150
  CDS (140)..(979): REFERENCED BY SEQ ID NO: 2658
agttttatgcctttcatcggttcagtgaaaaggggatgcctactgcgcccattgtctccttcaacgacgccaaataaatacctcaaaacggggcaaggctctgccgtcatttgaggggtgccctgtgaaagttcctgggatgatgcgacgtggttctggtttaggttctgctgcttctcaccgttctcgggagtcccttcctcttcctcagctgttggagaataaaattgctgctcaggaatcagaaatagagcagcttgtaagtgataaccgtggtctggctagtggacatgtggccttaagagaggcgcttgttgctgctgcgcaggatgtgcaaaagctgaagtcacacattagaagcatccagactgagagtgacattcagatcagaattctagtagataagatttccaaaggggaggttgatattagggccagtgatagtgtgaagaaggacctacaaaaggcccatattgaggcgcagagcttggcagcttccaggcaggaagtgagtgcccaaattcatcgagcgactcaggaactgaagaaggtccatggtgatgtcaagagtattccggatttgcaggctgaactggacagtttattgcaggagcaccagaggttacgtggcacatttgaatatgaaaagaacaaaaacatagagctagtggattacatgaaagcaaaagagaagaatctgatagcgatggcaagagaagttgaagtgttacgagctgagattttaaatgctgagaaaagagtaaatgctcctaatctgtttggggctgctacccctggacacagcagcggtccatttgctgatgtttatgggagagttcatggtcagatggctgctggccaagtaggagagagtatggtaccagttggtgaaagcaatggagtagcagccatcaatagtgctggtgttagtggtgctctttggtcgagtccatatgatccctcagttggtcggaggtgaagtttaataatagttaatcagatggagcttgacttcagcttttgccggtaaaatacatgggaactgctggtttttctacgtaaatttcacagattgggtggttttatctcaatagttaatacagtacaattttgtgaattgtcgaacctaatctgcaaaattgaagaggccaaaggtctatgtctcaaacaaaactattggtaaaatgaattgaaagtctggtctgacatgacctatttaatgagcgaaaaaaaaaaaaaaaa

SEQ ID NO: 2658 - protein, 279 aa, Glycine max
  misc_feature: Ceres CLONE ID no. 653925
  misc_feature: Ceres CDNA ID no. 40351150
MMRRGSGLGSAASHRSRESLPLPQLLENKIAAQESEIEQLVSDNRGLASGHVALREALVAAAQDVQKLKSHIRSIQTESDIQIRILVDKISKGEVDIRASDSVKKDLQKAHIEAQSLAASRQEVSAQIHRATQELKKVHGDVKSIPDLQAELDSLLQEHQRLRGTFEYEKNKNIELVDYMKAKEKNLIAMAREVEVLRAEILNAEKRVNAPNLFGAATPGHSSGPFADVYGRVHGQMAAGQVGESMVPVGESNGVAAINSAGVSGALWSSPYDPSVGRR

SEQ ID NO: 2659 - DNA, 1328 bp, Glycine max
  misc_feature: Ceres CLONE ID no. 654112
  misc_feature: Ceres CDNA ID no. 36581491
  CDS (213)..(1034): REFERENCED BY SEQ ID NO: 2660
attgttaatttaccatgacgccaccaaaatagaagcttgacctccaccctatgcaaacccgccacgtgccgctaatagcgtgtcctcgtcaacgtagcggcaaggaattacaaccatagaagagacccaccgaagaaactacctctccgaatccaaacttccttcgcttgtagaaaattcccccgattttctcgagaaagtgaaacggaattatgagctttcaggacatcgaggccgggcgccccttcggttcgaggcgcgggttgatgaatgggaagcaagaccccacgcaagcggtggctgccggcatattccagatcaacactgccgtctccaccttccagagactcgtcaacaccctcggaacccccaaagacaccctcgacctccgcgaaaagctccacaagacaagactacatattgggcaattggtaaaggatacatcagctaaacttaagcaagccagtgacattgatcaccatgctgaagttaatgcaagcaagaagatagcagatgctaaacttgcgaaagattttcaggcagtgttgaaagagtttcagaaggcacaacgtcttgcagctgagagggaaacagcgtacactccttttgttcctcaagcagtccttccttcgagctatacagctagcgaagtagatgttggttctgataagtcaccagaacagcgtgccctgcttgtggaatcaaggaggcaggaggttttattcttagataatgagattgccttcaatgaggctatcattgaggaaagggagcaaggcattcaagaaatacagcagcaaattggtgaagttaatgagatcttcaaagatcttgctgtacttgtccatgagcaaggagccatgattgatgatattggctccaacattgagaactcccatgcagcaacagcacaagcaaaatctcaactttcaaaagcttcaaaaacccaaagatcaaattcctctttgacatgcttgcttttggtgatttttgggattgtgcttctcatcgtgatcatagttcttgctgcttagtcaaaggttatctcaattacattatggagcaaatgcatatatactgggcagcagatagcatctcccttgctgatggtgtcacttgattggtgttttgccgggtcttgtggttgactggagtttgttgcatctaatttcagtacatgatgtgggaattcccataattttgttgtggggttttatgttctctctatgttagtgtttggggttttaaaatgtgtcacggattatggtttaagtcctctccttgtttctttaattaaaaaaatatttaattcaaaaaaaaaaaaaaaa

SEQ ID NO: 2660 - protein, 273 aa, Glycine max
  misc_feature: Ceres CLONE ID no. 654112
  misc_feature: Ceres CDNA ID no. 36581491
  misc_feature (13)..(116): Pfam Name: Syntaxin PFAM Desc: Syntaxin
  misc_feature (185)..(247): Pfam Name: SNARE PFAM Desc: SNARE domain
  misc_feature: Homolog of GI Number: 22597174 NR Desc: syntaxin
  misc_feature: Homolog of GI Number: 76573305 NR Desc: syntaxin
  misc_feature: Homolog of GI Number: 21537334 NR Desc: syntaxin
  misc_feature: Homolog of GI Number: 7488213 NR Desc: probable syntaxin
  misc_feature: Homolog of GI Number: 30793783 NR Desc: putative syntaxin SYP23
  misc_feature: Homolog of GI Number: 9755735 NR Desc: syntaxin homologue
  misc_feature: Homolog of GI Number: 21595750 NR Desc: syntaxin homologue
  misc_feature: Homolog of GI Number: 12597869 NR Desc: syntaxin
  misc_feature: Homolog of GI Number: 50911877 NR Desc: putative syntaxin
  misc_feature: Homolog of GI Number: 51536048 NR Desc: putative syntaxin
MSFQDIEAGRPFGSRRGLMNGKQDPTQAVAAGIFQINTAVSTFQRLVNTLGTPKDTLDLREKLHKTRLHIGQLVKDTSAKLKQASDIDHHAEVNASKKIADAKLAKDFQAVLKEFQKAQRLAAERETAYTPFVPQAVLPSSYTASEVDVGSDKSPEQRALLVESRRQEVLFLDNEIAFNEAIIEEREQGIQEIQQQIGEVNEIFKDLAVLVHEQGAMIDDIGSNIENSHAATAQAKSQLSKASKTQRSNSSLTCLLLVIFGIVLLIVIIVLAA

SEQ ID NO: 2661 - DNA, 1109 bp, Glycine max
  misc_feature: Ceres CLONE ID no. 654515
  misc_feature: Ceres CDNA ID no. 25445910
  CDS (333)..(941): REFERENCED BY SEQ ID NO: 2662
ccccttcaactcaacctccttgtgaagttgaagggacacctcacccacccgaaacaccatccattctcagccaccaccctctctctcaaacccttagtttccattctcaagagtgaagctcttccaactatatatacatacacatatctcttcagaacccactccctcacttctggaatctagccataaaaatcataaatttccctctttcacccgaatctctataccgtatccatctgaatccaacaaattttcccacaaatagaaagttagaagccccccaaaaacacaaacccccttttaagttttaatttccccaacgttgttgtaccatgtcgtcatctctgatcgcgaatccaactgcggatcggtcgcgtgactctcaccgcacaaagaagaagaagaaatcccttaagcaacaccaactacagcatgagcagagccacgccaaatggaaatcccacgcgcaacaacagctatactcctccaagctccaccatgctctggcgcgtgtcaacatctccggcgacgcgccgcgccgcggcagggcggtgcgcgaggcggccgacagggttctcgccgtcgccgcgaaggggagaacgcggtggagccgcgccatcctgactaaccggctcaagctgaagttcaggaagccgattcacaagaggcagaaggttgttgttgggccgggccggcccaagaaggcccggttcagcgttctccggctcaaggggaaaaccctgcccgcggtccagaggaaggttagggttctgggccggttggttcccggttgcagaaaagaaccgcttcccgtgattctcgaagaggccatcgattacatacccgcgctcgagatgcaggttcgcgccatgcaagctctcgctgacttactcttaggctcttcctccgcctcaacctccgccgccgcgccgccaagttgatctcactttccggcgaatatgccacgtgtcatatattttttttcctcttcttgatttttgttattatttgcctcgttttcactttcgtttatgttaattgtccagtacatacatattatatcttcttctatttcctcttcttttttttaaacaaaaaaaaaaaaaaaa

SEQ ID NO: 2662 - protein, 202 aa, Glycine max
  misc_feature: Ceres CLONE ID no. 654515
  misc_feature: Ceres CDNA ID no. 25445910
  misc_feature: Homolog of GI Number: 34898122 NR Desc: bHLH protein
  misc_feature: Homolog of GI Number: 34904544 NR Desc: B1066G12.17
MSSSLIANPTADRSRDSHRTKKKKKSLKQHQLQHEQSHAKWKSHAQQQLYSSKLHHALARVNISGDAPRRGRAVREAADRVLAVAAKGRTRWSRAILTNRLKLKFRKPIHKRQKVVVGPGRPKKARFSVLRLKGKTLPAVQRKVRVLGRLVPGCRKEPLPVILEEAIDYIPALEMQVRAMQALADLLLGSSSASTSAAAPPS

SEQ ID NO: 2663 - DNA, 826 bp, Glycine max
  misc_feature: Ceres CLONE ID no. 655044
  misc_feature: Ceres CDNA ID no. 29191871
  CDS (89)..(547): REFERENCED BY SEQ ID NO: 2664
aaaaccctagacgcgaacgcacctcctcccttcctgcccccgaccgccccagccgccgccgccgtcgccgccgccgccgactgcagccatgtcgctgatcgcgggtgaggagttccagcacatcctgcgtgtgctcaacaccaacgtcgatggtaagcagaagatcatgttcgcgctgacctccatcaagggtgtgggccgccgcttctccaacatcgtctgcaagaaggccgacatcgacatgaacaagagggccggagagctttccgcggaggagatggaccgtctgatggcggtggtgcacaacccgcgccagttcaaggtgccggattggttcctcaacaggaagaaggattacaaggacgggaggttctcccaggtcgtgtccaacgccgtggacatgaagctcagggatgaccttgagaggctcaagaagatcaggaaccatcgcggtctgcggcactactggggcgtgcgtgtccgtggtcagcacaccaagactacaggcaggagaggaaagactgttggtgtctccaagaagcgataagctgcttgacaaagatcctgcatagctttgtattactgtgttggtccatttccagaatcttaaggagtgttcttgtttagatgattaccttggatgatgttttgccctagataatgttttggttctggaacctttaatatattgtatcttgaattccatgttgaactcttcggagtttgttttgccatgggctttaagtcatttgaatggttggcaagattatgtatgttctagcatttctgtgaattacaggtttgttggcgaaaaaaaaaaaaaaaa

SEQ ID NO: 2664 - protein, 152 aa, Glycine max
  misc_feature: Ceres CLONE ID no. 655044
  misc_feature: Ceres CDNA ID no. 29191871
  misc_feature (14)..(142): Pfam Name: Ribosomal_S13 PFAM Desc: Ribosomal protein S13/S18
  misc_feature: Homolog of GI Number: 22204120 NR Desc: putative ribosomal protein S18
  misc_feature: Homolog of GI Number: 50919149 NR Desc: putative ribosomal protein S18A
  misc_feature: Homolog of GI Number: 56236126 NR Desc: At1g22780
  misc_feature: Homolog of GI Number: 50934523 NR Desc: putative ribosomal protein S18
  misc_feature: Homolog of GI Number: 17978783 NR Desc: S18.A ribosomal protein
  misc_feature: Homolog of GI Number: 40287492 NR Desc: putative ribosomal protein
  misc_feature: Homolog of GI Number: 24266988 NR Desc: ribosomal protein S18
  misc_feature: Homolog of GI Number: 67083901 NR Desc: ribosomal protein S18
  misc_feature: Homolog of GI Number: 71040621 NR Desc: ribosomal protein S18
MSLIAGEEFQHILRVLNTNVDGKQKIMFALTSIKGVGRRFSNIVCKKADIDMNKRAGELSAEEMDRLMAVVHNPRQFKVPDWFLNRKKDYKDGRFSQVVSNAVDMKLRDDLERLKKIRNHRGLRHYWGVRVRGQHTKTTGRRGKTVGVSKKR

SEQ ID NO: 2665 - DNA, 732 bp, Glycine max
  misc_feature: Ceres CLONE ID no. 656052
  misc_feature: Ceres CDNA ID no. 25892450
  CDS (171)..(512): REFERENCED BY SEQ ID NO: 2666
accacaccgagtcgcagaaaaagaaaaaagcgatcatagtttcacttcggccttatccagtttagggtttcggttctctaccctatctttcacgtatcgaaaccttaaatttacgatcaggtctgagcaatctggttggtagaacctttggtcttagtgagtcaagttttatgtctgaattagacgatcaaattcctactgccttcgatccttttgctgatgcaaatgctgatgactcgggtgctgggtcaaaggagtatgtgcatattcgtgtacagcagcgaaatggtaggaaaagcctgacaaccgttcagggattgaaaaaggaattcagctataacaagatacttaaagacgtcaagaaagagttctgttgcaatggaacagttgttcaggacccagaactaggacaggttattcaacttcaaggtgatcagaggaagaatgtttctaccttcctagtccaggctggtatcgtgaagaaggatcatatcaagattcatggtttctgagcggttggagtcttaagtgtcaaattttacctgcctgactatgtgttaggcataatatataatctgagtcgtgtggatgtgattgtggtatttctaatgtgttcttatgttttaccatgtgatgtgggattatggatttcagaacattgtgtgttatttgctttgaagacttatatgaaaacggtttaatggacccccgtatttaaaaaaaaaaaaaaaa

SEQ ID NO: 2666 - protein, 113 aa, Glycine max
  misc_feature: Ceres CLONE ID no. 656052
  misc_feature: Ceres CDNA ID no. 25892450
  misc_feature: The plant flowers significantly earllier than wild-type.
  misc_feature: The plant is abnormally small.
  misc_feature: null
  misc_feature: Useful for making plants with modulated biomass
  misc_feature: Useful for making plants with modulated flowering time
  misc_feature (25)..(106): Pfam Name: SUI1 PFAM Desc: Translation initiation factor SUI1
  misc_feature: Homolog of GI Number: 21593860 NR Desc: translation initiation factor
  misc_feature: Homolog of GI Number: 20218809 NR Desc: putative translation factor
  misc_feature: Homolog of GI Number: 29028784 NR Desc: At5g54760
  misc_feature: Homolog of GI Number: 6165638 NR Desc: translation initiation factor nps45
  misc_feature: Homolog of GI Number: 50937977 NR Desc: translational initiation factor eIF1
  misc_feature: Homolog of GI Number: 4585973 NR Desc: translation initiation factor
  misc_feature: Homolog of GI Number: 3334346 NR Desc: Protein translation factor SUI1 homolog
  misc_feature: Homolog of GI Number: 28193048 NR Desc: SUI1 protein
  misc_feature: Homolog of GI Number: 6478142 NR Desc: putative translation initiation factor eIF
  misc_feature: Useful for accelerating flowering time
  misc_feature: Useful for increasing chlorophyll and photosynthetic capacity
MSELDDQIPTAFDPFADANADDSGAGSKEYVHIRVQQRNGRKSLTTVQGLKKEFSYNKILKDVKKEFCCNGTVVQDPELGQVIQLQGDQRKNVSTFLVQAGIVKKDHIKIHGF

SEQ ID NO: 2667 - DNA, 1687 bp, Glycine max
  misc_feature: Ceres CLONE ID no. 656202
  misc_feature: Ceres CDNA ID no. 25446744
  CDS (1)..(1227): REFERENCED BY SEQ ID NO: 2668
aaattggccgcgtgttgcaatatgataactgaaacatccatccatggcctccatcatccaaattttacaatgttatcaattcttctcccagtgacagcaactcccatttccactctcaccaaaaccctccctctctcaaatcactacttactctcctataaattcaaattcaactccctcgtccgccattgctccctctccgaccgcgaggagcagcgctggctccgcgaggagcagcgctggctccgcgacgaacggcgctggctccgcgaggagcagcgctgggctcgcgagcgcgaccagctcctccgcgagatcgccgacctcaacctccaaatccaggcgcttgagcgtcgcctctcgatgcgcgatttgtcctctccggcttccgtctccgacgccgtcgccaatgtcacgttgctcctgaaggtgctgaaggacaagaatctggttctcgagagcgtttcgagtctgcggaacacggaggcagaagaggaggaggagaagaagcaattcgaagaggttgtcgaacacgtaaaggaggttgtgatggttgaggaatctgctagggttgaaaagaggatctcgttgcggataggttccgaaggagaagaggttcgacaaatgcaggaagcattgttgaaattggggttttactctggcgaggaagacatggagtattccagcttctcaagtggaactgagcgtgctgtgaagacttggcaagctgcactaggtgcccctgaggatggtatcatgacagctgaacttcttgaaaggttgtatttggagataaggaataagggcacaggtagtgcgactcaagacaaacaatctactactgttttgccaaaggaagttgaaaatggagctgcagttgcttcagtggcagaaaattcagaggttcagcaaaaagatgtgaaaaatgataaggaaacagaagtctcccaccggggagtttttctccttggagagaatcggtgggaagaaccatcaagacttgttgcaagggatggagttgataagagcaagaacaaggatatgacaacaaaatgccttcaatgtcgtggggaaggtcgcttgatgtgtacagaatgtgatggatctggcgagccaaatattgaacctcaatttattgaatgggtggaagagggtacaaaatgcccatattgtaaaggcctagggtatactgtatgtgatctatgtggagggaaaactatggtatagggctttggagcttacagagctacgtgaaactctactgagaaacctcacaaattacaacatagattgaacggtgcatgcaattttaaaccttcaaaatgaatgagatgcttcacaggcagacactgtcatctttgaatactatttggccataagccaaaaataataggtggccgaagggaatgacaaatcgaagactgcacaaaggcttttatagcaagggttgcggaagtgtgagcagtttccaaaatccttcgagttaactcgaaataaaggtgtggtagcatcgagctcagtcaaatacttggcactagacctatatctttaatgcttatttatttgagggacttggagattaaggagctttagatacacatgacaaaatgagtaaaatatgagatggtcagtgaataaaaaaaaaaaaaaaaaaaaaaaaaaaaaaaaaacaaaaaaaaaaaaaaaa

SEQ ID NO: 2668 - protein, 385 aa, Glycine max
  misc_feature: Ceres CLONE ID no. 656202
  misc_feature: Ceres CDNA ID no. 25446744
  misc_feature (179)..(233): Pfam Name: PG_binding_1 PFAM Desc: Putative peptidoglycan binding domain
  misc_feature: Homolog of GI Number: 30682566 NR Desc: peptidoglycan
  misc_feature: Homolog of GI Number: 50926432 NR Desc: OSJNBb0070J16.4
MLSILLPVTATPISTLTKTLPLSNHYLLSYKFKFNSLVRHCSLSDREEQRWLREEQRWLRDERRWLREEQRWARERDQLLREIADLNLQIQALERRLSMRDLSSPASVSDAVANVTLLLKVLKDKNLVLESVSSLRNTEAEEEEEKKQFEEVVEHVKEVVMVEESARVEKRISLRIGSEGEEVRQMQEALLKLGFYSGEEDMEYSSFSSGTERAVKTWQAALGAPEDGIMTAELLERLYLEIRNKGTGSATQDKQSTTVLPKEVENGAAVASVAENSEVQQKDVKNDKETEVSHRGVFLLGENRWEEPSRLVARDGVDKSKNKDMTTKCLQCRGEGRLMCTECDGSGEPNIEPQFIEWVEEGTKCPYCKGLGYTVCDLCGGKTMV

SEQ ID NO: 2669 - DNA, 806 bp, Glycine max
  misc_feature: Ceres CLONE ID no. 656610
  misc_feature: Ceres CDNA ID no. 40351151
  CDS (3)..(584): REFERENCED BY SEQ ID NO: 2670
gaaacgccacagaacgctcccggcctctctctgtttgctctcgcgtccgccgcgcccatcctcgtccgcgcctgcgcccggcccgtgctcgctcgctcgccgcctccctcgcctcgatccaccgcgccggcggcatggcggatcagctcaccgacgaccagatcgccgagttcaaggaggccttcagcctcttcgacaaggacggagatggttgcatcaccaccaaggagctgggaacagttatgcgttcgctggggcagaacccaacggaggctgagctccaggacatgatcaatgaagtcgatgctgatggcaacggcaccattgacttcccagagttcctcaacctgatggcccgcaagatgaaggacactgactcagaggaggagctcaaggaggccttcagggtgttcgacaaggaccaaaacggtttcatctctgctgctgagctccgccatgtcatgacgaacctcggtgagaagctcaccgacgaggaggtggacgagatgatccgtgaagccgacgtcgacggtgatggccagatcaactacgaggagttcgtcaaggtcatgatggccaaatgagctccgacccaaatgctccgaagacaggaggagaattgtgcattgcatattagtttaagatgcaactcttatttgatcgatttccagttaagcatcctacctagctgtagctgctaaaacggatcggacgacgcaattcctgctatgttctccagtgtgtttccagacctcttgtgttttatgtgaacttgtgtcctccctggtgcaaaaaaaaaaaaaaaa

SEQ ID NO: 2670 - protein, 149 aa, Glycine max; identical to SEQ ID NO: 208
  misc_feature: Ceres CLONE ID no. 656610
  misc_feature: Ceres CDNA ID no. 40351151
  misc_feature (12)..(40): Pfam Name: efhand PFAM Desc: EF hand

SEQ ID NO: 2671 - DNA, 1575 bp, Glycine max
  misc_feature: Ceres CLONE ID no. 656629
  misc_feature: Ceres CDNA ID no. 25892731
  CDS (24)..(1259): REFERENCED BY SEQ ID NO: 2672
atcggatcatctctaaaccctagatggaccttctgaagcaagagcttctcaagaagcgccaatccctggcgcaagacaccggcggcaagaaattcttcaagcgctccgagatccagcagaaggaaatccaaaaactccgccagcaagagaagcgcgaattggaagccaagtcactaaagcgcctcgcaacatcctccgacaccgccgccaccgccccgtcctcttcatccaccgcctcctcctcggcctcgtccactatcgcctccgcctccgcctccctcaccgacgagcaaaacatcgacaacctcgtgctcccgaaacccgaggtcatccgccgcctccgcttcctgaagcagccggtcacgctcttcggagaagacgatgacgccaggctggaccgcctcaagtacgtcctcaaggccggcgtcttcgaggtcgacagcgacatgacggaggggcagaccaacgatttcctgcgagatattgcggagctgaggaagcgccagaagaccgggatcctcggcgagaggaagcgccagaaggccgacgacggtgccgctcaggaccgtgagggtggagccggagatgatgacttgagcgactgcggcagctccgaaggtgccgaagcggacaaggacttgaagcggatgaaggcgaatttcgaggagctttgcgatgaggataagattctggtgtttttcaagaagctgttgaatgagtggaagcaggagttgcgcgagatgcctgaggcggagaagcgcacggccaaggggaagtccatggttgccacgtttaagcagtgtgcgcgttacttgaatccgctgtttaagttttgcaggaagaaggttcttccggatgacattcgccaggcgctattgctgatggttgaatgctgtatgaagagagattatctagctgcaatggaccattatatcaagctggccattgggaatgcaccctggcctattggtgtcactatggttggtattcacgaaagatctgcccgtgaaaagatctacaccaacagtgttgctcacatcatgaatgatgagaccactcgcaagtacttgcaatctgtgaagagattaatgacattttgccaacgccgttatccgacattgccttctaaagctgttgagttcaatagtttggcaaatggcagtgatttgcattcacttctagcagaagagagatttagtgggggcaatcaggcttctgaagagaggcttaggataatgcctgctccaagagacatctagtttttaatgttttgctgaaatgacatcatcgtatgatgcatactatatatgtttaattgctagatacagtctgtttgtgtctcttattgattgtataaaaggaaatgcatcttttaaaatggcgaaaacatgtaaaattctgatggtgtcttcaaagaggctgttgcttcctgcaacaccaagttgtttcgggcatccttttcagaacgttttttttctttacttttcggattggtcattttggaagccaaaatttctaaatgtacttttatatttaagaagtaaaaaaagaggtgcaggaaaaaaaaaaaaaaaa

SEQ ID NO: 2672 - protein, 411 aa, Glycine max
  misc_feature: Ceres CLONE ID no. 656629
  misc_feature: Ceres CDNA ID no. 25892731
  misc_feature (222)..(366): Pfam Name: Prp18 PFAM Desc: Prp18 domain
  misc_feature: Homolog of GI Number: 50938507 NR Desc: putative potassium channel regulatory factor
  misc_feature: Homolog of GI Number: 62733528 NR Desc: Prp18 domain
  misc_feature: Homolog of GI Number: 72008831 NR Desc:  similar to PRP18 pre
  misc_feature: Homolog of GI Number: 50731328 NR Desc:  similar to Pre
  misc_feature: Homolog of GI Number: 57040342 NR Desc:  similar to Pre
  misc_feature: Homolog of GI Number: 4506123 NR Desc: PRP18 pre
  misc_feature: Homolog of GI Number: 40254503 NR Desc: PRP18 pre
  misc_feature: Homolog of GI Number: 19924053 NR Desc: PRP18 pre
  misc_feature: Homolog of GI Number: 50345066 NR Desc: zgc:91830
MDLLKQELLKKRQSLAQDTGGKKFFKRSEIQQKEIQKLRQQEKRELEAKSLKRLATSSDTAATAPSSSSTASSSASSTIASASASLTDEQNIDNLVLPKPEVIRRLRFLKQPVTLFGEDDDARLDRLKYVLKAGVFEVDSDMTEGQTNDFLRDIAELRKRQKTGILGERKRQKADDGAAQDREGGAGDDDLSDCGSSEGAEADKDLKRMKANFEELCDEDKILVFFKKLLNEWKQELREMPEAEKRTAKGKSMVATFKQCARYLNPLFKFCRKKVLPDDIRQALLLMVECCMKRDYLAAMDHYIKLAIGNAPWPIGVTMVGIHERSAREKIYTNSVAHIMNDETTRKYLQSVKRLMTFCQRRYPTLPSKAVEFNSLANGSDLHSLLAEERFSGGNQASEERLRIMPAPRDI

SEQ ID NO: 2673 - DNA, 533 bp, Glycine max
  misc_feature: Ceres CLONE ID no. 656932
  misc_feature: Ceres CDNA ID no. 29191872
  CDS (3)..(437): REFERENCED BY SEQ ID NO: 2674
cccttcggcgccgcctcgttacagacagcgggagcgaaagagcgagcggtgagagaactccgggagagggcggcgagatggtgcagcggctgacataccgaaagcgccacagctacgccacgaagtcgaaccagactcgcgtcgtcaagaccccaggtgggaggcttgtgtaccagtacaccaagaagcgggcgagtgggccaaaatgcccggttaccggcaagaagatccaaggaattccacacctgaggcctactgagtacaagaggtccagattgtcaaggaacaggaggactgtgaaccgtccttatggtggtgttctgtctggtcctgcagtcagggagaggatcatcagggcgtttttggtggaggagcagaagattgtgaagaaggtgctgaagatccagaagaccaaggagaagaccaccaagagctaaacaactgggcgatataggcgtcgcggtgatgttttgtgtttcttcgaatttgttttaagcaatcaagaattttctctctcaaaaaaaaaaaaaaaa

SEQ ID NO: 2674 - protein, 119 aa, Glycine max
  misc_feature: Ceres CLONE ID no. 656932
  misc_feature: Ceres CDNA ID no. 29191872
  misc_feature (5)..(103): Pfam Name: Ribosomal_L34e PFAM Desc: Ribosomal protein L34e
  misc_feature: Homolog of GI Number: 57471712 NR Desc: ribosomal protein l34
  misc_feature: Homolog of GI Number: 50946109 NR Desc: putative ribosomal protein
  misc_feature: Homolog of GI Number: 50941301 NR Desc: putative ribosomal protein L34
  misc_feature: Homolog of GI Number: 2119150 NR Desc: ribosomal protein L34
  misc_feature: Homolog of GI Number: 1076636 NR Desc: ribosomal protein L34
  misc_feature: Homolog of GI Number: 47824936 NR Desc: Ribosomal protein L34e
  misc_feature: Homolog of GI Number: 13194822 NR Desc: putative 60S ribosomal protein L34
  misc_feature: Homolog of GI Number: 21436403 NR Desc: putative 60S ribosomal protein L34
  misc_feature: Homolog of GI Number: 21594659 NR Desc: 60s ribosomal protein L34
  misc_feature: Homolog of GI Number: 20259165 NR Desc: putative 60S ribosomal protein L34
MVQRLTYRKRHSYATKSNQTRVVKTPGGRLVYQYTKKRASGPKCPVTGKKIQGIPHLRPTEYKRSRLSRNRRTVNRPYGGVLSGPAVRERIIRAFLVEEQKIVKKVLKIQKTKEKTTKS

SEQ ID NO: 2675 - DNA, 1458 bp, Glycine max
  misc_feature: Ceres CLONE ID no. 658602
  misc_feature: Ceres CDNA ID no. 40041287
  CDS (42)..(1010): REFERENCED BY SEQ ID NO: 2676
acaagcactaatcataagcctctccatctataccatcatatatggctagtagttgtttctccatgacaacaccaatcttcaaaattcgcttcttcttattcttatgctttattgggataagttcatctcaattgtcctctgacttttactccacaacttgtcctaatgcgctttcaaccattaagagtgcagtggattctgctgtgagcaatgaggctcgcatgggggcttccctcctacgtcttcatttccatgattgttttgttcaaggatgtgatgcatcagtgctattgaatgatacatcaagtttcacaggtgaacagacggcagctggcaacgttaattccataaggggttttggtgtaatagacaacatcaagtctcaagttgagagcttatgtcctggtgttgtttcttgtgctgatattctcactgtagctgcaagggactctgttgttgctcttggtggacctagttggacagtgcaattgggcagaagagactcaaccactgcaagtttaagttctgcaaactcagacttgccccgttttgatttaagtctgcaacaactcagcgataatttccaaaacaaaggtctcaccaccgcagaaatggttgctctctcaggagggcacacaattgggcaagctaaatgttcaactttcagaacaaggatttacaacgagaccaacatagattcctcttttgcaacatcattgcaggcaaattgtccaagcgtgggtggtgacagcaatttggcccctcttgacagcagccaaaacacctttgacaatgcttacttcaaggatttgcagagccaaaagggtctcttgcacacagatcaagtgcttttcaatggaggatccacagactctcaagtaaatggttatgccagcgacccttcaagcttcaacactgactttgccaatgcaatggttaaaatgggaaacattagcccacttactggctctagtggcgaaatcaggaccaattgttggaagaccaattaagatcttggtccttttcgtactaagtactatagtacaatagcagttaagggacaaactgttacttttaggatggcccaagtagatctaaacatgtctttaaactaaagcggttaaaagactatattgaatgggattagatttttatattataaattatagtttttgttttatttctcttaaatgaatgagaagttgaccgatggataactattatccattgattttaagtgtatttgtatttaaaagatcaagcaatcaatgaaaaatctcgcgagtattaattaattttagtatttacttacccttttcttttaccatacatttagcagtagctcaagcatggaggcggcctaacacaaaccaattaatgtttcctcagttgtaaacttgtaatatgaatttttataatatggagcaaaaatgtttggatttaaaaaaaaaaaaaaaa

SEQ ID NO: 2676 - protein, 315 aa, Glycine max
  misc_feature: Ceres CLONE ID no. 658602
  misc_feature: Ceres CDNA ID no. 40041287
  misc_feature (40)..(279): Pfam Name: peroxidase PFAM Desc: Peroxidase
  misc_feature: Homolog of GI Number: 1491776 NR Desc: cationic peroxidase
  misc_feature: Homolog of GI Number: 577503 NR Desc: cationic peroxidase
  misc_feature: Homolog of GI Number: 1633131 NR Desc: Chain B
  misc_feature: Homolog of GI Number: 55701129 NR Desc: TPA: class III peroxidase 131 precursor
  misc_feature: Homolog of GI Number: 4760704 NR Desc: peroxidase 3
  misc_feature: Homolog of GI Number: 17529072 NR Desc: putative peroxidase
  misc_feature: Homolog of GI Number: 66840760 NR Desc: peroxidase
  misc_feature: Homolog of GI Number: 55701139 NR Desc: TPA: class III peroxidase 136 precursor
  misc_feature: Homolog of GI Number: 464365 NR Desc: Peroxidase P7
  misc_feature: Homolog of GI Number: 5381253 NR Desc: peroxidase
  misc_feature: Useful for making ornamental plants with modified flowers
MTTPIFKIRFFLFLCFIGISSSQLSSDFYSTTCPNALSTIKSAVDSAVSNEARMGASLLRLHFHDCFVQGCDASVLLNDTSSFTGEQTAAGNVNSIRGFGVIDNIKSQVESLCPGVVSCADILTVAARDSVVALGGPSWTVQLGRRDSTTASLSSANSDLPRFDLSLQQLSDNFQNKGLTTAEMVALSGGHTIGQAKCSTFRTRIYNETNIDSSFATSLQANCPSVGGDSNLAPLDSSQNTFDNAYFKDLQSQKGLLHTDQVLFNGGSTDSQVNGYASDPSSFNTDFANAMVKMGNISPLTGSSGEIRTNCWKTN

SEQ ID NO: 2677 - DNA, 1691 bp, Glycine max
  misc_feature: Ceres CLONE ID no. 658914
  misc_feature: Ceres CDNA ID no. 36581072
  CDS (28)..(1602): REFERENCED BY SEQ ID NO: 2678
gtatcgagaactagaagcgtaacagcaatggagctgtcttccagtgcatttgtggtaatattgttggcagtcgcagctacagcagtactctcaaatgggttggatctatctttcttgcccagcgatttcctctttggcattgcttcttcctcttaccagtatgaaggagcttacaagagtgacggcaaaggactgagcaactgggataactacactcacggaccaggtagaagtgtaataatggatggaagcaatggggatatcgcgattgatcattatcatcgctacctggaggatatagatttaatggaaactttgggagtaaacagctaccggctatccctgtcatgggcaagaattctaccaaagggtagattcggagagcccaaccatgctggtatcgagttctataacagactaattgatgttctactactcaaagggatccaaccctttgtaactcttagtcactatgacattccccaagagcttgaagacagatacgggagttggctaagtccccagttacaggaagattttgctttttatgcggacctatgttttaaaacctttggtgacagagttaagtactgggtcacattcaatgagccgaatttcctagtgtcacttggttaccgttctggtttatatcctccatgccgttgctctggccaattagcaatggctaaatgcagtgaaggagactcagaaaaggagccctttgtagcagctcataatgttatcctgtcacatgcagctgcagttgatatctatagaaccaaataccagactgagcaaaaaggaagtattggtatagtccttcaacatgaatggtttgaaccaatgagcaattcaacagctgacaaattggctagcgaaagagcaagagcattcaacttcaattggttcttggacccaatcatattcggaaagtaccctacagagatggagaacgttcttggaagcctcttgcccaaattttccagctacgaaaaagagaaactcaagagaggattggatttcattggcgtcaattactacacggctttctatgtccaagattgcatgtactccgcttgtaaaccaggacccgggatctccagaacagagggttcatacaagaaaagtggagaaaagaatggtgtcccaatcggtgaacctactccatttagttggtttaatatttacccagatggcatggaaaagactgtaacatatgtgagagatagatacaataacactccaattttcctaactgaaaatggatatgccgaagaagttgatccaaatttcacttcggaagaacatctcaatgattttaaaagaataaagtacatggtggatcacatagaggctctgttagcagcaataaggaaaggagcagatgtgaggggatactttgcctggaccttaatcgactcgtttgagtggatatatggatatacggtaagatatggattccatcatgtggattatgcgacgctgaaaagaactccaagattgtcagcaagttggtacaagcaactccttgttcagtacaagaaaacctttttattaggcacgagcatgacagggcatgaaaaactcgtacaacacacttgacgcaaaaaagcttataaccctaatgtagaaccttatcagctacaattctaataatttatgatatattgtgggtaaaaaaaaaaaaaaaa

SEQ ID NO: 2678 - protein, 524 aa, Glycine max
  misc_feature: Ceres CLONE ID no. 658914
  misc_feature: Ceres CDNA ID no. 36581072
  misc_feature (25)..(506): Pfam Name: Glyco_hydro_1 PFAM Desc: Glycosyl hydrolase family 1
  misc_feature: Homolog of GI Number: 52421273 NR Desc: At1g61820
  misc_feature: Homolog of GI Number: 50926420 NR Desc: OSJNBa0004N05.21
  misc_feature: Homolog of GI Number: 50926426 NR Desc: OSJNBa0004N05.24
  misc_feature: Homolog of GI Number: 50926430 NR Desc: OSJNBa0004N05.26
  misc_feature: Homolog of GI Number: 3367517 NR Desc: Similar to F4I1.26 putative beta
  misc_feature: Homolog of GI Number: 3367516 NR Desc: Similar to beta
  misc_feature: Homolog of GI Number: 3820531 NR Desc: beta
  misc_feature: Homolog of GI Number: 30696622 NR Desc: glycosyl hydrolase family 1 protein
  misc_feature: Homolog of GI Number: 54401705 NR Desc: beta
  misc_feature: Homolog of GI Number: 22328863 NR Desc: glycosyl hydrolase family 1 protein
MELSSSAFVVILLAVAATAVLSNGLDLSFLPSDFLFGIASSSYQYEGAYKSDGKGLSNWDNYTHGPGRSVIMDGSNGDIAIDHYHRYLEDIDLMETLGVNSYRLSLSWARILPKGRFGEPNHAGIEFYNRLIDVLLLKGIQPFVTLSHYDIPQELEDRYGSWLSPQLQEDFAFYADLCFKTFGDRVKYWVTFNEPNFLVSLGYRSGLYPPCRCSGQLAMAKCSEGDSEKEPFVAAHNVILSHAAAVDIYRTKYQTEQKGSIGIVLQHEWFEPMSNSTADKLASERARAFNFNWFLDPIIFGKYPTEMENVLGSLLPKFSSYEKEKLKRGLDFIGVNYYTAFYVQDCMYSACKPGPGISRTEGSYKKSGEKNGVPIGEPTPFSWFNIYPDGMEKTVTYVRDRYNNTPIFLTENGYAEEVDPNFTSEEHLNDFKRIKYMVDHIEALLAAIRKGADVRGYFAWTLIDSFEWIYGYTVRYGFHHVDYATLKRTPRLSASWYKQLLVQYKKTFLLGTSMTGHEKLVQHT

SEQ ID NO: 2679 - DNA, 1401 bp, Glycine max
  misc_feature: Ceres CLONE ID no. 659291
  misc_feature: Ceres CDNA ID no. 25446857
  CDS (182)..(1231): REFERENCED BY SEQ ID NO: 2680
actttcctctttgaagtttgaagtggtttggtgcaattcttccttcagctcttgtttagtccaaaaccgctcttcttcccttccttccacagaccacagtattagcctcaacacacgctctatctattataaaatccaccctcttcttcccttgtctgcaacaacaataacaatcttcatcatgcacaagagctcttcagattccacgttgggcccgggtggcctggacctctcccaggccttcttcaggcccataaacaacgccgcccctccctccccgaccaagcgccacaacaagatctccgtcatcggcgccggcaacgtgggaatggccatcgcgcagaccatcctcactcaggacctcaccgacgagctcgtcctcgtcgacaccaactccgacaagctccgcggcgagatgctcgacctccagcacgccgccgccttcctcccccgcaccaagatccacgcctccgccgactcctccgtcaccgccggctccgacctctgcatcgtcaccgccggcgcccgccagatctccggcgagtcacgcctcaacctcctccagaggaacctctccctcttccgcgccattattccccctctcgtccgttactcccccgacacaactctcctcatcgtttccaaccccgtcgacgtcctcacctacgtcgcgtggaagctctccggcttcccctccaaccgcgtcatcggctccggcaccaacttggactcttcccgcttccgtttcctcatcgccgatcaccttgacgtcaacgcccaggacgtacaggcatatatagtaggggagcatggggatagttcggtggcgttatggtctagcattagcattgggggtgttccggttctgagctttttggagaatcaacagattgtgtatgagaaagagacgttggagaacatacacaagtcagtgatagacagtgcgtatgaagtgatcaagctgaaagggtacacttcatgggccattgggtactctgtggctaacctggcccggtcctttatcaggaaccagaggaagatccaccctgtgtctgttctggctaaaggcttttatgggatcgatggagaagtgttcctgagtttgcctgcaatgattggtagaggagggatactgggtgtgaccaatgtgcacttgaatgaagaggagacacagaggcttagagattcggccaagaccattctcgaagtacagactcagttgggtatttgaattttctgtgatgggtactgcttttttttttcctttaattttcttttgttcttcccaccagcatgatgtggtttggcctaaattattagtagtacttgctactgttagtgttagttcctgccctcttcttgcagtgcaagtgtttttgttgcgccaaaaaaaaaaaaaaa

SEQ ID NO: 2680 - protein, 349 aa, Glycine max
  misc_feature: Ceres CLONE ID no. 659291
  misc_feature: Ceres CDNA ID no. 25446857
  misc_feature (180)..(349): Pfam Name: Ldh_1_C PFAM Desc: lactate/malate dehydrogenase
  misc_feature (40)..(76): Pfam Name: TrkA_N PFAM Desc: TrkA
  misc_feature: Homolog of GI Number: 1620970 NR Desc: L
  misc_feature: Homolog of GI Number: 1620972 NR Desc: L
  misc_feature: Homolog of GI Number: 21592879 NR Desc: lactate dehydrogenase
  misc_feature: Homolog of GI Number: 2865462 NR Desc: lactate dehydrogenase
  misc_feature: Homolog of GI Number: 7268478 NR Desc: lactate dehydrogenase
  misc_feature: Homolog of GI Number: 3212003 NR Desc: lactate dehydrogenase
  misc_feature: Homolog of GI Number: 51963792 NR Desc: PREDICTED OJ1212_C06.24 gene product
  misc_feature: Homolog of GI Number: 50904653 NR Desc: lactate dehydrogenase
  misc_feature: Homolog of GI Number: 126033 NR Desc: L
  misc_feature: Homolog of GI Number: 126034 NR Desc: L
  misc_feature: Useful for decreasing plant size
MHKSSSDSTLGPGGLDLSQAFFRPINNAAPPSPTKRHNKISVIGAGNVGMAIAQTILTQDLTDELVLVDTNSDKLRGEMLDLQHAAAFLPRTKIHASADSSVTAGSDLCIVTAGARQISGESRLNLLQRNLSLFRAIIPPLVRYSPDTTLLIVSNPVDVLTYVAWKLSGFPSNRVIGSGTNLDSSRFRFLIADHLDVNAQDVQAYIVGEHGDSSVALWSSISIGGVPVLSFLENQQIVYEKETLENIHKSVIDSAYEVIKLKGYTSWAIGYSVANLARSFIRNQRKIHPVSVLAKGFYGIDGEVFLSLPAMIGRGGILGVTNVHLNEEETQRLRDSAKTILEVQTQLGI

SEQ ID NO: 2681 - DNA, 1566 bp, Glycine max
  misc_feature: Ceres CLONE ID no. 659293
  misc_feature: Ceres CDNA ID no. 40351152
  CDS (192)..(1334): REFERENCED BY SEQ ID NO: 2682
aaaccaaagtggttttgtcatttgttttgatgaatctttcggtggtctatctcaccttcttttctttctcactaatcactataaaaaaaaatctacactatctatccttccacaacacaacacaattcaataccatttaccaaactcactcatcaattctcatctttcttctcactaactattaattcatcatgtcgagcacagctggccaagtcatcaaatgcaaagctgcggtttcatgggaggcagggaagccacttgtgattgaagaagtagaggttgcgccaccacaagctggtgaagtgcgtttgaagatcctctacacctctctttgccacactgatgtttacttctgggaagctaagggccaaactccattgtttcctcgtatatttggtcatgaagctggagggattgtggagagcgtaggtgagggtgtgactcatctgaaaccaggggaccatgccctccctgtgtttaccggggagtgtggggactgccctcattgcaagtcagaggagagcaacatgtgtgatcttctcaggatcaacactgataggggtgtcatgatccatgatagccaaacaaggttttctataaagggacaacctatttaccattttgttggtacctctacattcagtgaatacactgttgttcatgctggatgtgttgccaaagtcaaccctgctgccccacttgacaaaatctgtgttctcagttgtggaatttgcacaggtcttggggccactatcaatgttgcaaaaccaaaacctggttcttctgttgccatttttggacttggagctgttggccttgccgctgctgaaggggcaaggatttctggtgcatcaagaatcattggggttgatttagtttctagcagatttgaagaagctaagaagtttggggtcaatgaatttgtgaacccaaaagatcatgacaaacctgtacaagaggtgattgctgcaatgacaaatgggggtgtggatcgtgctgttgaatgtactggcagcatccaagccatgatctcagcattcgaatgcgtccacgatggttggggtgttgctgtacttgttggagtgccaaacaaagatgatgcattcaaaactcatccagtgaatttcttgaatgagaggactctaaagggtaccttctatggaaactacaaaccccgcactgaccttccttctgttgtggagaagtacatgaatggggaattggaactggagaaattcatcactcacacagttccattctctgagattaacaaggcttttgattacatgctgaaaggggagtccatcagatgcatcattcgtatgggggagtaaatctatcaaaccaatgatgacatggtccctgtgagggactgagttctctttctagttgtgaaagtgaaaagaagaaaataaatttcatatatatgatatatccctttagaattattgaattagtgaaaacttgtgtaagtttgaatgttgagaatgataggacctttgctgctgttattgtctaatgcatgataaataaaatgtggtttttttgtcaaaaaaaaaaaaaaaa

SEQ ID NO: 2682 - protein, 380 aa, Glycine max
  misc_feature: Ceres CLONE ID no. 659293
  misc_feature: Ceres CDNA ID no. 40351152
  misc_feature (195)..(337): Pfam Name: ADH_zinc_N PFAM Desc: Zinc
MSSTAGQVIKCKAAVSWEAGKPLVIEEVEVAPPQAGEVRLKILYTSLCHTDVYFWEAKGQTPLFPRIFGHEAGGIVESVGEGVTHLKPGDHALPVFTGECGDCPHCKSEESNMCDLLRINTDRGVMIHDSQTRFSIKGQPIYHFVGTSTFSEYTVVHAGCVAKVNPAAPLDKICVLSCGICTGLGATINVAKPKPGSSVAIFGLGAVGLAAAEGARISGASRIIGVDLVSSRFEEAKKFGVNEFVNPKDHDKPVQEVIAAMTNGGVDRAVECTGSIQAMISAFECVHDGWGVAVLVGVPNKDDAFKTHPVNFLNERTLKGTFYGNYKPRTDLPSVVEKYMNGELELEKFITHTVPFSEINKAFDYMLKGESIRCIIRMGE

SEQ ID NO: 2683 - DNA, 1133 bp, Glycine max
  misc_feature: Ceres CLONE ID no. 659396
  misc_feature: Ceres CDNA ID no. 40351153
  CDS (588)..(833): REFERENCED BY SEQ ID NO: 2684
tttttaatagctgtcatcctattgtctactccatggcatagcatactgggcctactgcatcatgctctgctatcatgaatttcaaactctggaattggttgtcgtaagatattattaggggtaccagaattgtgcattgggtgtagttaaaatgcaactgaaacattttttagaagaaattaataattggagtgtaaatttgtagattcacaaagatattccatattatagtctagttttattagattttggtcatttcaatttgttgttcataggatgatgtagtttgttgtgaatgactgcacgtgtattcaactatctcttttttgtcgtcaatggcctgaggtctcttgctactaggtttcctcattttccatgtttgtattgtttgtgcattgcaatgccacataaactctgtttatttagtaggttaagtctgtactaatacatattaatgtgacaattttctttttaggctgctaactacttgaacatcaagagcctgctggaccttacatgtcaaactgtagccgacatgatcaaggggaagactccagaggaaattcgcaagacctttaacattaagaatgacttcacccctgaggaggaagaggaagttcgtcgggaaaaccaatgggcatttgaatgattttgttaatctcaaaaaatctgaatcaaagatctgccatgtggatttatgctatgcttgtttgtttatcaaagatctctcttgtagatttgcctatgctatatacttgtttgttttatattcaagactatttccgttgactgtgttcactacaactagtcataagaattatcttccttcatgaacttaagagcactttgaattgtaagtaatagttatgatgagggatgcgttgattctgacacgagggttattgagttcaataacagccaacccttggctccatatttttcatcccgtgaactacgtgataatgtgtatatgcacctttgtaaaggggaggtgcagaaacaagattcggagaccatttgatcatgtttgccaaggtggtaggtagctccatgtttcatggtcgattcatattacttttcatcacgtctcactaatctacattaatgtgttactttcaaaaaaaaaaaaaaaa

SEQ ID NO: 2684 - protein, 37 aa, Glycine max
  misc_feature: Ceres CLONE ID no. 659396
  misc_feature: Ceres CDNA ID no. 40351153
  misc_feature (1)..(37): Pfam Name: Skp1 PFAM Desc: Skp1 family
MIKGKTPEEIRKTFNIKNDFTPEEEEEVRRENQWAFE

SEQ ID NO: 2685 - DNA, 613 bp, Glycine max
  misc_feature: Ceres CLONE ID no. 659686
  misc_feature: Ceres CDNA ID no. 29191873
  CDS (69)..(380): REFERENCED BY SEQ ID NO: 2686
atcacaacactaacacagattttgattcgattcgattcgattcagtcgaggttttaagcagcagcaagatgtctgggcgtggaaagggaggaaagggattgggaaaaggaggagcaaaacgacatcgtaaggtgctccgcgacaacattcagggaattacgaagccagcgattcgtcgtttggctcgcaggggtggcgtgaagcgtatcagcggtttgatctacgaggagactcgcggtgttctcaagatcttcttggagaatgtcatccgtgacgccgttacttacacggagcacgctaggaggaagaccgttacggctatggacgttgtttatgcgcttaagaggcagggaaggaccctctacggatttggtggttagggtttttgcttgattttcctcgccagggaaaagtcttgctgtcaagaaaaacaaacgaggcatggattggggtagtttttttttattttttatggtggtgtttgtagtgaatggggaaaattaggagcaattttatgcttacttgttggtgtcaattatgtgatgtaactactccgttgaaatgtagaattattttggcttttaaaaaaaaaaaaacaaaaaaaaaaaaaaaa

SEQ ID NO: 2686 - protein, 103 aa, Glycine max; identical to SEQ ID NO: 8
  misc_feature: Ceres CLONE ID no. 659686
  misc_feature: Ceres CDNA ID no. 29191873
  misc_feature (66)..(92): Pfam Name: TAF PFAM Desc: TATA box binding protein associated factor
  misc_feature: Homolog of GI Number: 62648434 NR Desc:  similar to germinal histone H4 gene
  misc_feature: Homolog of GI Number: 61820747 NR Desc:  similar to germinal histone H4 gene
  misc_feature: Homolog of GI Number: 57110415 NR Desc:  similar to germinal histone H4 gene
  misc_feature: Homolog of GI Number: 76651053 NR Desc:  similar to germinal histone H4 gene
  misc_feature: Homolog of GI Number: 74004228 NR Desc:  similar to germinal histone H4 gene
  misc_feature: Homolog of GI Number: 61835903 NR Desc:  similar to germinal histone H4 gene
  misc_feature: Homolog of GI Number: 76631272 NR Desc:  similar to germinal histone H4 gene
  misc_feature: Homolog of GI Number: 62663604 NR Desc:  similar to Histone H2B 291B
  misc_feature: Homolog of GI Number: 57106967 NR Desc:  similar to germinal histone H4 gene
  misc_feature: Homolog of GI Number: 56798269 NR Desc: histone H4

SEQ ID NO: 2687 - DNA, 1526 bp, Glycine max
  misc_feature: Ceres CLONE ID no. 659862
  misc_feature: Ceres CDNA ID no. 25447103
  CDS (144)..(1211): REFERENCED BY SEQ ID NO: 2688
atccgaagaagaagaagaaagaatcagttccgtcatcagaagaatcgtggaatcttcatgcaatgcttcttcccattttcacactttgttaacacttaattttctgatcccaatctcgttaagcttcttagcaacaacacaaaatgagcgccatctctttcagttccatccattttcacacttggaaaaaccccaaggggtttggaaaggtgagaaaacaaccacatgggaagctacttgtaaagtgttccagccagagtgggaacccatcttcttcgcaaaatgcggttcgtgttggtgttgttggagctagtggctacactggttctgaggacttgccagatttgatttcaataaaggatgcaaacttttctgatgtggatgctgtattctgttgtttgcctcatggaactactcaggaaattattaaaggcctaccaaagcacctgaagattgttgatctttctgcagattttcgtctaaaagatctttctgagtatgaagaatggtatggtcagccgcatagagcaccagatttacagaaagaagctatatacggattgacagaggttttaagggaggaaatacagaatgctcgtctagttgctaatcctggttgttatccaacttctgttcaacttcctcttgtcccattgataaaggctagtcttattgagcttaaaaatattatcattgatgctaaatctggtgtgagtggagcaggacgcagtgccaaagaaaatttattgttcactgaagtaactgaaggtctcaattcttatggtgttacccggcatcgccatgttcctgaaattgaacagggacttgctgatgcttcaggttcaaaagtaactgttagttttacaccacacctaattccaatgagccgtggtatgcaatcaactatttatgtggaaatggctccaggagtgagaattgaggacctgtaccagcaactgaagctctcatatgaggacgaagaatttgttgttgtgttggaaaatggagccattcctcgaactcacagcgttaaagggactaattactgtttaatcaatgtttttccagaccgaattcctggaagagcaatcattatatctgttattgataatttagtgaagggagcttcaggtcaagctttacaaaaccttaatttgttaatgggatttccagaaaatttgggacttcattacctgcctctttttccttagagtagttgtcttgtccaactagagctccaaatctgaagccacagttccaccaaaatacttgatggagcagaggaaatattttcaagttatgtattttcattctctagattgtaatgtgagattcttcaagaatttagaagggaattggttatgacattggcagggatattaaagcaatttctgttttttttttttttttttttatctgtaatgttagaataagtctcgaaggtggtggcatgtagttttccaaggttggatatcataaaatatttaacaataaaaaataatctaatttgaaaaaaaaaaaaaaaa

SEQ ID NO: 2688 - protein, 355 aa, Glycine max
  misc_feature: Ceres CLONE ID no. 659862
  misc_feature: Ceres CDNA ID no. 25447103
  misc_feature (168)..(326): Pfam Name: Semialdhyde_dhC PFAM Desc: Semialdehyde dehydrogenase
  misc_feature (50)..(63): Pfam Name: Semialdhyde_dh PFAM Desc: Semialdehyde dehydrogenase
  misc_feature: Homolog of GI Number: 56967313 NR Desc: Chain D
  misc_feature: Homolog of GI Number: 73921680 NR Desc: Probable N
  misc_feature: Homolog of GI Number: 19699208 NR Desc: At2g19940/F6F22.3
  misc_feature: Homolog of GI Number: 50428699 NR Desc: putative Semialdehyde dehydrogenase
  misc_feature: Homolog of GI Number: 37535658 NR Desc: putative N
  misc_feature: Homolog of GI Number: 83754895 NR Desc: Chain D
  misc_feature: Homolog of GI Number: 82945733 NR Desc: Acetylglutamate semialdehyde dehydrogenase
  misc_feature: Homolog of GI Number: 46202346 NR Desc: COG0002: Acetylglutamate semialdehyde dehydrogenase
  misc_feature: Homolog of GI Number: 48765484 NR Desc: COG0002: Acetylglutamate semialdehyde dehydrogenase
  misc_feature: Homolog of GI Number: 78492298 NR Desc: N
MSAISFSSIHFHTWKNPKGFGKVRKQPHGKLLVKCSSQSGNPSSSQNAVRVGVVGASGYTGSEDLPDLISIKDANFSDVDAVFCCLPHGTTQEIIKGLPKHLKIVDLSADFRLKDLSEYEEWYGQPHRAPDLQKEAIYGLTEVLREEIQNARLVANPGCYPTSVQLPLVPLIKASLIELKNIIIDAKSGVSGAGRSAKENLLFTEVTEGLNSYGVTRHRHVPEIEQGLADASGSKVTVSFTPHLIPMSRGMQSTIYVEMAPGVRIEDLYQQLKLSYEDEEFVVVLENGAIPRTHSVKGTNYCLINVFPDRIPGRAIIISVIDNLVKGASGQALQNLNLLMGFPENLGLHYLPLFP

SEQ ID NO: 2689 - DNA, 1989 bp, Glycine max
  misc_feature: Ceres CLONE ID no. 660206
  misc_feature: Ceres CDNA ID no. 40351154
  CDS (294)..(1643): REFERENCED BY SEQ ID NO: 2690
gacacacaagtaaaaccttagagagagagagagagagagggtaaaagggtattagatccttgaaccagatcaaatcatcaaaatctctgtctatggggttgtgaaaacaacaatcacattgttgttgctgtaaaaggggattccttagtctagatttgtttgcattgcagaagaaccagataccccattattgttcttatctatctatctgtctatattctatttatcttcttattgtagttctcattgtgtctgatttcagtgatttgtgttgtttctggttaacacaagcaatggaggttgttgagaaggagaagtacataacctcagaggagctgaagggtcacaacaaggagggagatttatggatctcaattcaaggtaaggtgtacaatgtctcagattgggtcaaggagcaccctggtggtgatgttccaatctcaaaccttgctggccaggatgtcactgatgcattcatagcataccatcctggcacagcatggtcacaccttgaaaaattcttcactggctaccacctcagtgacttcaaggtctctgaggtgtccaaagactacagaaagcttgcatctgagttctcaaaattgggtctttttgacaccaaagggcatgtcacttcatgcacccttgcatctgttgctgttatgttcctcattgtactctatggtgttctgaggtgcactagtgtgtgggctcatttgggttcaggcatgctcttagggttgctttggatgcaaagtgcttatgtgggccatgattctggccactatgtggttatgacaaccaatggtttcaacaaggttgcacagatcctctctgggaactgcttgaccgggataagcattgcttggtggaagtggactcacaatgctcaccacattgcgtgcaacagccttgaccatgaccctgatctgcagcacatgccggtctttgcagtttcgtcgcggttcttcaattccataacctctcatttctatgggaggaagttggagtttgatttcattgctaggttcttgatctgctaccagcactttactttttacccggtaatgtgtgttgccagggtcaacttgtatctgcagacaattctgctattgttttcgaggcgaaaagtgcaggatagagccttgaacataatggggatccttgtgttttggacttggttccctcttttagtgtcttgcctgccaaattggcctgagagggttatgtttgtgcttgctagctttgctgtttgttccatccagcacattcagttctgtttgaatcactttgctgcaaatgtatatgtcgggccaccgagtgggaatgactggtttgagaagcagacaagtggtacattggatatctcttgtgcctcttcgatggattggtttttcggtggcttgcagtttcagcttgagcatcatttgtttccaaggctacctcggtgccaattgaggaagatttcgcctttggttagtgacctttgcaagaagcataatttgccttataggagcttgtcattttgggaggccaatcagtggacaattaggaccctcaggactgctgccctacaagctagggacttaacaaaccctgcccctaagaatttgttgtgggaagctgttaatacccatggctgaggcatttggagtttttagagtttaggattttgtcaaggtctttttttttttgttttctctttaaaaagaaaaaaaattctcattgtgattttgctagcccccacttttccagattgggctttgaatttaactttttgttaggtgtggtgtacaaatggatggtgatccagatgttactgcagttcatgtgctttgcatcaatacaaattcatatcatgtatgcctttttgccttttcacttctttttccttatcttggaataggtttcttaatgtctgaaagatattataccatggttgatcttaataaagatagaaagatttcatcaataaaaaaaaaaaaaaaa

SEQ ID NO: 2690 - protein, 449 aa, Glycine max
  misc_feature: Ceres CLONE ID no. 660206
  misc_feature: Ceres CDNA ID no. 40351154
  misc_feature (145)..(399): Pfam Name: FA_desaturase PFAM Desc: Fatty acid desaturase
  misc_feature (9)..(82): Pfam Name: Cyt PFAM Desc: Cytochrome b5
MEVVEKEKYITSEELKGHNKEGDLWISIQGKVYNVSDWVKEHPGGDVPISNLAGQDVTDAFIAYHPGTAWSHLEKFFTGYHLSDFKVSEVSKDYRKLASEFSKLGLFDTKGHVTSCTLASVAVMFLIVLYGVLRCTSVWAHLGSGMLLGLLWMQSAYVGHDSGHYVVMTTNGFNKVAQILSGNCLTGISIAWWKWTHNAHHIACNSLDHDPDLQHMPVFAVSSRFFNSITSHFYGRKLEFDFIARFLICYQHFTFYPVMCVARVNLYLQTILLLFSRRKVQDRALNIMGILVFWTWFPLLVSCLPNWPERVMFVLASFAVCSIQHIQFCLNHFAANVYVGPPSGNDWFEKQTSGTLDISCASSMDWFFGGLQFQLEHHLFPRLPRCQLRKISPLVSDLCKKHNLPYRSLSFWEANQWTIRTLRTAALQARDLTNPAPKNLLWEAVNTHG

SEQ ID NO: 2691 - DNA, 1184 bp, Glycine max
  misc_feature: Ceres CLONE ID no. 660234
  misc_feature: Ceres CDNA ID no. 40351155
  CDS (84)..(932): REFERENCED BY SEQ ID NO: 2692
gttgccttagtctgtgttgagacttgagagttgtgtgcataacacaatcaattaagaagctgtgattctgattcagaatcagaatgttgcgaagatggagcaaagcagttactccaatctccaaatttggatcgcagcagagtcatttgaatttcgtgaaggacgtcacgcgccaaagctacgccggggttgcacccgcgccaacaacgatagaggataaacctcaaccccccgtggttaaacttgacaaaatgttttggtctaagccctgttcgctggccctgccccgggactcacccctcaaagctgaagaacctgattatcagggcatcaagcgtttcatgctcaagctcatgctgttttatagtaagcagagcaagtcaattcgaggcgctaatgttgtgtaccgaagaattgtttctcaaattgataaacctcccatttatgaagtgtttaacttggagaaaacattcaaaacaacattctctttacttgtacttcatatgtggttatgtttgcgtcgcttgaagcaagagggaaatgagggtgttgaatttggccagtacctttatgagatttacaatcatgatgtggagctaagagtctctaaagctggagttaatctactactgactaagtggatgaaagagctcgagaagattttttatgggaacattgttgcttatgatactgccatacttccagaagctaaaccgggtgatttttctaatgttatatggaggaatatattctctgaagatggttcttcaacaccagatgctgctgcatctcaatcagtacaggcgatggccagatatgctcgccgtgaagtaagttgcatgaccttaacagataaagaagcactatattcagggaattttatgttcacctctttgaagcatgagaacagaagcggaaaggggcctcaatgatgaagtggtgatttctaaatttgtgatttagcaaattgaaaatacacgctgttcttattttatttattttttacaaaaaattgttgaataattatgacataaagctcatgtccttctccgtaaggcttttattatacttgattagcttggtgcccagaaactagaactctcatattcttgccctgtaaaatgagaaaagaaaaagggcagaagtgactgaaaaatgttgttctttctcaaaaaaaaaaaaaa

SEQ ID NO: 2692 - protein, 282 aa, Glycine max
  misc_feature: Ceres CLONE ID no. 660234
  misc_feature: Ceres CDNA ID no. 40351155
  misc_feature (122)..(202): Pfam Name: Ubiq_cyt_C_chap PFAM Desc: Ubiquinol
MLRRWSKAVTPISKFGSQQSHLNFVKDVTRQSYAGVAPAPTTIEDKPQPPVVKLDKMFWSKPCSLALPRDSPLKAEEPDYQGIKRFMLKLMLFYSKQSKSIRGANVVYRRIVSQIDKPPIYEVFNLEKTFKTTFSLLVLHMWLCLRRLKQEGNEGVEFGQYLYEIYNHDVELRVSKAGVNLLLTKWMKELEKIFYGNIVAYDTAILPEAKPGDFSNVIWRNIFSEDGSSTPDAAASQSVQAMARYARREVSCMTLTDKEALYSGNFMFTSLKHENRSGKGPQ

SEQ ID NO: 2693 - DNA, 1254 bp, Triticum aestivum
  misc_feature: Ceres CLONE ID no. 660496
  misc_feature: Ceres CDNA ID no. 25445611
  CDS (46)..(1119): REFERENCED BY SEQ ID NO: 2694
acccacagccacatttgtcctacttagagacccagctagatcaccatggcttcctcggctgctcgtctcctgcttgtcttcgcgacagctctggtgctgagctctgtgtctgcagcagcggtgggggctggtggctcgccgccgctggccaagggcctgtcgttcgagttctaccgcgccaggtgcccgcaggcggaggccatcgtcttcgccttcctcaaggacgccatccgcaaggacgtcggcctcgccgccgcgctcctccgcatccacttccacgactgcttcgtgcagggctgcgacggctccgtgctcctcgacaagaccaacggcgtcgacagcgagaaggtgtctcccccgaacgtcacgctgcgtccgtcggcgttcaaggccatcaacgccatccgcgcgctcctccagaaggcgtgcggcgggcccgtcgtctcctgcgccgacatcgccgcgctcgccgcccgcgactccgtccagctggccggcgggccgcggtacgccgtcccgctcggccgccgcgacgggctcgcccccgcttccctggacaccatcctgggcgcgctcccgccgccgacctccaaggtgcccgtgctcctcagcttcctcgccaagatcggcctcaacgccgacgacctggtggcgctctccggcgcgcacacgctcgggatcgcgcactgcggctccttcgaggagcggctgtttcccaaggtcgaccccaccatggacaagtttttcgccggccacctcaagctcacctgcccgcggctcaaggtggacaacttcaccgccaacgacatccgcacgcctgacgtgttcgacaacaagttctacgtcgacctgctcaaccggcagggtctcttcacctccgaccaggacctgcacaccgacgccaagaccaagcccatggtcaccaggttcgccgtcgaccaggccgccttcttcgaccagttcgtcaagtccatggtgaaaatggggcagatcaacgtgctcactggcaaccagggtcagatccgcacggactgctccattcccaacgccgcccgcagtgccggcgacgagctgccgtggtccgtcgtcgagaccgccgtggagagcttggtgttgtaggtagtagtagggtttagtccatggatctcaagcttgttttatgttttggcaaggtttggactttggaagtcagagtgcatgcgtgtttagtttgttgagcaagaccgaaccagttgaacaaaaaaaaaaaaaaaa

SEQ ID NO: 2694 - protein, 357 aa, Triticum aestivum
  misc_feature: Ceres CLONE ID no. 660496
  misc_feature: Ceres CDNA ID no. 25445611
  misc_feature (54)..(298): Pfam Name: peroxidase PFAM Desc: Peroxidase
  misc_feature: Homolog of GI Number: 57899181 NR Desc: putative peroxidase
  misc_feature: Homolog of GI Number: 34905826 NR Desc: putative peroxidase
  misc_feature: Homolog of GI Number: 34905834 NR Desc: putative peroxidase
  misc_feature: Homolog of GI Number: 34905838 NR Desc: putative peroxidase
  misc_feature: Homolog of GI Number: 22001285 NR Desc: peroxidase 1
  misc_feature: Homolog of GI Number: 34905830 NR Desc: putative peroxidase
  misc_feature: Homolog of GI Number: 82410 NR Desc: peroxidase
  misc_feature: Homolog of GI Number: 1389835 NR Desc: peroxidase
  misc_feature: Homolog of GI Number: 478409 NR Desc: peroxidase
  misc_feature: Homolog of GI Number: 2624498 NR Desc: Crystal Structure Of Barley Grain Peroxidase 1
MASSAARLLLVFATALVLSSVSAAAVGAGGSPPLAKGLSFEFYRARCPQAEAIVFAFLKDAIRKDVGLAAALLRIHFHDCFVQGCDGSVLLDKTNGVDSEKVSPPNVTLRPSAFKAINAIRALLQKACGGPVVSCADIAALAARDSVQLAGGPRYAVPLGRRDGLAPASLDTILGALPPPTSKVPVLLSFLAKIGLNADDLVALSGAHTLGIAHCGSFEERLFPKVDPTMDKFFAGHLKLTCPRLKVDNFTANDIRTPDVFDNKFYVDLLNRQGLFTSDQDLHTDAKTKPMVTRFAVDQAAFFDQFVKSMVKMGQINVLTGNQGQIRTDCSIPNAARSAGDELPWSVVETAVESLVL

SEQ ID NO: 2695 - DNA, 537 bp, Triticum aestivum
  misc_feature: Ceres CLONE ID no. 660527
  misc_feature: Ceres CDNA ID no. 40351156
  CDS (110)..(274): REFERENCED BY SEQ ID NO: 2696
gaacatcctaatcgaaaaaatccaaatcatccaatccagtcgcctctttcagaagggaaagcagagagaaagaaaggagctagaaggcctcgagtgaagtgagcaagccatgggctcggcaacagtcctggaggtgatcctcgccatcatcctgcctcccgtcggcgtcttcctgcgctacaaactcggcgtggagttctggatctgtctcttgctgaccatactggggtacataccggggatcatctacgcggtgtacgtgctggtagtttaagcaacagcctctgctgcagggtccaggcttggacgagcgagtcgctgtgcaagagcaactgatgctgtctgtgttaagatagcatgtctttgtgtatgcttgtatgtattgaatattgcggatttcatttatttggggagctcggtattgtcgatcctgtgatgtcacgagtgtacgtagctcggggactttagggcattcgtcggctgtagtgtttgtgatcttaaatttaaagtattggatgtacaaaaaaaaaaaaaaaa

SEQ ID NO: 2696 - protein, 54 aa, Triticum aestivum
  misc_feature: Ceres CLONE ID no. 660527
  misc_feature: Ceres CDNA ID no. 40351156
  misc_feature (4)..(54): Pfam Name: UPF0057 PFAM Desc: Uncharacterized protein family UPF0057
MGSATVLEVILAIILPPVGVFLRYKLGVEFWICLLLTILGYIPGIIYAVYVLVV

SEQ ID NO: 2697 - DNA, 920 bp, Triticum aestivum
  misc_feature: Ceres CLONE ID no. 660580
  misc_feature: Ceres CDNA ID no. 40351157
  CDS (77)..(610): REFERENCED BY SEQ ID NO: 2698
atcatccacgccgagagtccaagctccaaaaccaaaccagaaccggttgatccgtcagtagccgcggccgccggcgatggagaagggcaagggcctcgcccgccgctgggcagtggagctccacgacgcatcttcctcctcatcctcgcctgccttccccgatcctcccggcttcaccagatctgccccggaagcggaggacgccgccagcgcacggcagcgcaaggagaccgaagccgcctggaaggggcagaaggcctgggaggtggcgcaggcgcccttcaagaacctgatgatgatgggttttatgatgtggatggccgggagcacagtccacctgttcagcattggcatcgtcttctctgctctctggcagcccttcaacgcactccgatctgtcgggaaagtttttgaaccatttaaggacccaagggtggatacacttgcacctaagttgctcttcactgctctcaacttggccgctatgggtttgggtgtttggaagctcaatacattgggtcttcttccaacaaatgcatcagactgggtatcttcactgtctcctgctcgggaggttgaatatgctggtggagggatccccttgatgtaatgccccttatgatcttcaattggtaaaactctttcgttttactacttggaggatggtatctgtactaaagcgaaatttatcctgctgaagggagaaattttatgcgggtttgttgtattttttgtttcacatgtaccaaattcggattgatatctatagacaaatcacaggcttagctaaagatagcttgctcgtttttttatctcttctgcttaccatgtctgattaaatagagaagttgtcgctaactctcccattcaatgtagtggacgaactgcttttgttttgttcgacaaaaaaaaaaaaaaaa

SEQ ID NO: 2698 - protein, 177 aa, Triticum aestivum
  misc_feature: Ceres CLONE ID no. 660580
  misc_feature: Ceres CDNA ID no. 40351157
MEKGKGLARRWAVELHDASSSSSSPAFPDPPGFTRSAPEAEDAASARQRKETEAAWKGQKAWEVAQAPFKNLMMMGFMMWMAGSTVHLFSIGIVFSALWQPFNALRSVGKVFEPFKDPRVDTLAPKLLFTALNLAAMGLGVWKLNTLGLLPTNASDWVSSLSPAREVEYAGGGIPLM

SEQ ID NO: 2699 - DNA, 1033 bp, Glycine max
  misc_feature: Ceres CLONE ID no. 662563
  misc_feature: Ceres CDNA ID no. 25893115
  CDS (127)..(795): REFERENCED BY SEQ ID NO: 2700
agcataggataggaagttaggaagaaaaacttggttggcgcagacaaggaagaaacctaagcggaagccgaagagcaaacaaattaaacagacacggcgtgtgtgtctgttttagggaacacggcgatggtgttctcttcgaaccccttatccctgagcgtccccgaacccgccttcgagtcatggctccgcgacaccggcttcctcgaagtcctcgaccaccgcacctcctcctccgccgcagccgcctcccccgctccctcctccgccacctccaccctcttctcccgcctcttgaccttcctctccctcttcaccctcaacgccttcgccaagctcgccgccgatgacttcgccgccgacaccccctcctggtcccgctccttcttcgccttctccgattcctactccttcccttcctccccctcacaggcgcgattgagagttcaggaaaacgtgaaacgctacgcccgcaactacgcctatttgttcattgttttcttcgcctgcactctgtataagatgccagttgctcttgtcgggttggtattgtgtttggcattgtgggatttcttcaagttttgtagccacagatggggattggagcagtatcccttgacgcgccagattttgattcgtgttgtgcaatgtgcaactgcggttattctaatcttttccaatgttcaaatggctctcttttgtgccatatgcgtcagctatgtaggaatgatacttcatgctggatttcgaaagttgacccctgtaaagcaaccttcagtgagcagaggtaggtagttgactaatcaatgaaactgtggtgaacgctttgtccagcacatcttacttcggtgattcaagggcctttgttatagaagattcctgtgcttacaatgtagagtttaagggacaggactttggtacagaagattgagcaatgtacaaaagggtggattatatacttgtggattaacattgatcaattgtttagaataaattctttgaattgttacatataccaaaaaaaaaaaaaaaa

SEQ ID NO: 2700 - protein, 222 aa, Glycine max
  misc_feature: Ceres CLONE ID no. 662563
  misc_feature: Ceres CDNA ID no. 25893115
  misc_feature (76)..(221): Pfam Name: PRA1 PFAM Desc: PRA1 family protein
  misc_feature: Homolog of GI Number: 76262500 NR Desc: pherophorin
  misc_feature: Homolog of GI Number: 76262498 NR Desc: pherophorin
  misc_feature: Homolog of GI Number: 12018147 NR Desc: vegetative cell wall protein gp1
  misc_feature: Homolog of GI Number: 76262506 NR Desc: pherophorin
  misc_feature: Homolog of GI Number: 6523547 NR Desc: hydroxyproline
  misc_feature: Homolog of GI Number: 14253159 NR Desc: VMP3 protein
MVFSSNPLSLSVPEPAFESWLRDTGFLEVLDHRTSSSAAAASPAPSSATSTLFSRLLTFLSLFTLNAFAKLAADDFAADTPSWSRSFFAFSDSYSFPSSPSQARLRVQENVKRYARNYAYLFIVFFACTLYKMPVALVGLVLCLALWDFFKFCSHRWGLEQYPLTRQILIRVVQCATAVILIFSNVQMALFCAICVSYVGMILHAGFRKLTPVKQPSVSRGR

SEQ ID NO: 2701 - DNA, 870 bp, Glycine max
  misc_feature: Ceres CLONE ID no. 663125
  misc_feature: Ceres CDNA ID no. 40041288
  CDS (22)..(723): REFERENCED BY SEQ ID NO: 2702
aacagaagaagaactcaagagatggagagtggcggtaatgggaagagagcacatgaagaagcggggccttcatctgggattgatggaaggaaacttgaaatgactgaaaaagcgagtgatgatgataaagaagaggaggaggaggaggaggaggaggaagaaggagccattgaagatagcaaaaatggtttttttgttcctgggcctcttctttctctcaaggaacagatcgaacgggacaaggaggacgaaagcctaaggagatggaaagagaagctgttgggttgcttggaaagtgatatagatggtcaattggatcctaaagtgaaatttcactccataggaattctctctgaggattttggtgaaattgtcactcctctacctgtggatgaaaatcgcaatggctgtactctatttactctcagggaggggtctcgctatcagcttaagctaaaatttagtgttctgcacaacattgtgtctggcttgacatactccaacactgtgtggaaaggagggcttcaagttgatcagagcaaaggaatgttgggtgcttttgctcctcaaaaggagccatatgtatacgccttgaaggaggacaccactccttccggtgcacttgcaaggggtgtttactcagccaaacttaagtttgaagatgatgacagaaggtgtcacatggaactcaaatatttattcgagataaaaaagagaagctagtccggtttttctgacaccatgtttttatatatcctcccaaaatccttaattatatttctgaacatgtgttatggatgctacagctttgtatttgtttcctaatacacagaaaggggatggactccgttatgaaaaaaaaaaaaaaaa

SEQ ID NO: 2702 - protein, 233 aa, Glycine max
  misc_feature: Ceres CLONE ID no. 663125
  misc_feature: Ceres CDNA ID no. 40041288
  misc_feature (27)..(221): Pfam Name: Rho_GDI PFAM Desc: RHO protein GDP dissociation inhibitor
  misc_feature: Homolog of GI Number: 40241231 NR Desc: Rho GDP dissociation inhibitor 1
  misc_feature: Homolog of GI Number: 7228160 NR Desc: putative Rho GDP dissociation inhibitor
  misc_feature: Homolog of GI Number: 34451570 NR Desc: Rho GDP dissociation inhibitor 2
  misc_feature: Homolog of GI Number: 54290914 NR Desc: putative Rho GDP dissociation inhibitor 2
  misc_feature: Homolog of GI Number: 50912179 NR Desc: Rac GDP
  misc_feature: Homolog of GI Number: 40241237 NR Desc: Rho GDP dissociation inhibitor 2
  misc_feature: Homolog of GI Number: 34906916 NR Desc: putative Rho GDP
  misc_feature: Homolog of GI Number: 15220782 NR Desc: Rho GDP
  misc_feature: Homolog of GI Number: 54290915 NR Desc: putative Rho GDP dissociation inhibitor 2
  misc_feature: Homolog of GI Number: 6648200 NR Desc: putative RHO GDP
MESGGNGKRAHEEAGPSSGIDGRKLEMTEKASDDDKEEEEEEEEEEEGAIEDSKNGFFVPGPLLSLKEQIERDKEDESLRRWKEKLLGCLESDIDGQLDPKVKFHSIGILSEDFGEIVTPLPVDENRNGCTLFTLREGSRYQLKLKFSVLHNIVSGLTYSNTVWKGGLQVDQSKGMLGAFAPQKEPYVYALKEDTTPSGALARGVYSAKLKFEDDDRRCHMELKYLFEIKKRS

SEQ ID NO: 2703 - DNA, 834 bp, Glycine max
  misc_feature: Ceres CLONE ID no. 664078
  misc_feature: Ceres CDNA ID no. 40041289
  CDS (70)..(528): REFERENCED BY SEQ ID NO: 2704
tcacaccaaatatttcggcagttaatagcaatttcgataagaaaagttccaaaattcagctaagagaaaatgtctctcattccaaacattttcggtggccgtaggagcaatgtgttcgatcccttcaaggattttcctttcccaaattccgtctctacttccttccctgagttttctcgggaaaattctgcgtttgtgagcactcgtgtggattggaaggagaccccagaggcgcacgtgttcaaggccgatattcccgggctgaagaaggaggaagtgaaggtgcagattgaagatgataaggtgcttcagatcagcggagagaggaacgttgagaaggaagataagaacgacacgtggcatcgcgtggagcgtagcagtggaaagttcatgaggaggttcagattgccggagaatgcaaaagtgaatgaagtgaaggcttctatggaaaatggggttcttactgttactgttcctaaggaagaggttaagaatcatgatgttaaggccatagaaatctctggttaagcagaagcaaatgttgttggtcttttttgtttgaagtcgtgtgcttttctttgttctaatatgatgtgagtgggagttgtgattgtacaaacaaataaaatagttgtataaacttggaagtcgtgtgcttttctttgttctaatgtagtgaattagatttgggacaaaaacgtgttctagtttatatgtggttctgtacttttcattttgttgatttttcaatgttcttttctgcttactgaggttaatgcaatctaaagctctgctgaatgtttgataaaaaaaaaaacaaaaaaaaaaaaaaaa

SEQ ID NO: 2704 - protein, 152 aa, Glycine max
  misc_feature: Ceres CLONE ID no. 664078
  misc_feature: Ceres CDNA ID no. 40041289
  misc_feature (48)..(151): Pfam Name: HSP20 PFAM Desc: Hsp20/alpha crystallin family
  misc_feature: Homolog of GI Number: 123539 NR Desc: 17.5 kDa class I heat shock protein
  misc_feature: Homolog of GI Number: 224545 NR Desc: protein
  misc_feature: Homolog of GI Number: 25809052 NR Desc: heat shock protein
  misc_feature: Homolog of GI Number: 19618 NR Desc: heat shock protein
  misc_feature: Homolog of GI Number: 123538 NR Desc: 17.5 kDa class I heat shock protein
  misc_feature: Homolog of GI Number: 123555 NR Desc: 18.1 kDa class I heat shock protein
  misc_feature: Homolog of GI Number: 6969974 NR Desc: low molecular weight heat shock protein
  misc_feature: Homolog of GI Number: 123540 NR Desc: 17.6 kDa class I heat shock protein
  misc_feature: Homolog of GI Number: 8671873 NR Desc: Contains similarity to 17.6 KD class I heat shock protein from Arabidopsis thaliana giP13853
  misc_feature: Homolog of GI Number: 507209 NR Desc: low molecular weight heat
  misc_feature: Useful for delaying flowering time
  misc_feature: Useful for increasing chlorophyll and photosynthetic capacity
  misc_feature: Useful for making ornamental plants with modified flowers
  misc_feature: Useful for making ornamental plants with modified leaves
  misc_feature: Useful for making plants with increased biomass
  misc_feature: Useful for making plants with increased biomass and foliage
  misc_feature: Useful for making plants with increased biomass and foliage
  misc_feature: Useful for making plants with increased biomass and foliage
  misc_feature: Useful for making shorter plants
  misc_feature: Useful for making stronger plants
MSLIPNIFGGRRSNVFDPFKDFPFPNSVSTSFPEFSRENSAFVSTRVDWKETPEAHVFKADIPGLKKEEVKVQIEDDKVLQISGERNVEKEDKNDTWHRVERSSGKFMRRFRLPENAKVNEVKASMENGVLTVTVPKEEVKNHDVKAIEISG

SEQ ID NO: 2705 - DNA, 896 bp, Glycine max
  misc_feature: Ceres CLONE ID no. 666004
  misc_feature: Ceres CDNA ID no. 40041290
  CDS (50)..(553): REFERENCED BY SEQ ID NO: 2706
aacgaagtaactaacccagtcccttgacttggctttctggttcgattcgatgcgattctcggagatgaagaagggcttgatgcatagctatggcgttgctgtgattgtgttggctttgagtttgtgtttgggttcatcatcggagcaattaagttcacgagaatgcgagaatctcggtttcaccggactcgccttgtgctccgactgcaacactctctccgagtacgtcaaggacaaagagttggtatcggattgtttcaagtgttgcaccgaagactccaacgatgccactaccaaggttacttactctggagctgtgttggaagtctgcatgaggaaacttgttttctatcctgaagttgtaagctttattgaagatgaaaaagatcaatttccatcagttaaagttcaatatgtttttaactctccaccaaagctaattatgctggatgatgcgggtcagcaaaaagaaacaatcaggattgataattggaaacgtgagcatatactgcagttcctccgagagaaggtgaagcctctggcttctgattgagagaatctttgacccattctctagcaagatctggactgttcccatttaacagaaaaagagtgggagtatatacagtgtgacttagacaagtgaattaaacttgccctgggttacaagtgacctgaataacatcaaaatcatcatgatttggtcagttaagataattctgggttttgtgacaattgatttcaatacgacggtttcctttttccagattttatggtagctgtaagatgatgtataaactgcagtcttgtaatattgaattggagacaagcatgtttcagtgataatgcgggaatagataatataatttcttttttttttaaaaaaaaaaaaaaaa

SEQ ID NO: 2706 - protein, 167 aa, Glycine max
  misc_feature: Ceres CLONE ID no. 666004
  misc_feature: Ceres CDNA ID no. 40041290
  misc_feature: Homolog of GI Number: 34907586 NR Desc: B1078G07.34
  misc_feature: Homolog of GI Number: 55239689 NR Desc: ENSANGP00000011457
  misc_feature: Homolog of GI Number: 18389881 NR Desc: selenoprotein
  misc_feature: Homolog of GI Number: 66499439 NR Desc:  similar to ENSANGP00000011457
MRFSEMKKGLMHSYGVAVIVLALSLCLGSSSEQLSSRECENLGFTGLALCSDCNTLSEYVKDKELVSDCFKCCTEDSNDATTKVTYSGAVLEVCMRKLVFYPEVVSFIEDEKDQFPSVKVQYVFNSPPKLIMLDDAGQQKETIRIDNWKREHILQFLREKVKPLASD

SEQ ID NO: 2707 - DNA, 1311 bp, Glycine max
  misc_feature: Ceres CLONE ID no. 666049
  misc_feature: Ceres CDNA ID no. 25088406
  CDS (117)..(1142): REFERENCED BY SEQ ID NO: 2708
gttggttaacggatctagaatttgttgaagcaggaaccgctccatctcgccccgcgccaaaccatttgatttcaaagcggagatttagggactgcaaattctctgcttctctacacatggagccggtgtcgcgtgctaatttcttttcattccaaagattttggctaccgtttcagggacagggagggatgaggcagcaagttgatccctcggctcacacaatcaagtcccatggagcatcacttgcaagaaaacacgctcgtgattggcttatattgctgcttctcatagtgatagagattgtcctttttgtcattcatccatttaaacgctttgtgggaagggacatgatggaggaccttagatatcctatgaaagaaaacacggtgcctgtatgggctgttcctttatatgcggttctgttgccaatggccgttttccttctcttctatatgcgcaggagagatgtttatgatttgcaccacagtgttctaggtttgttatttgctgttctgataactggggtcttcaccgatgcaataaaaaatgcagttggccggcctcgcccagacttctattggcgttgcttccccgatggggtagagaattatgatagttggggaggtgtggtatgtcatggcaatgctagcgatataaaagaaggacacaagagtttcccaagcggccatacatcatggtcctttgcaggtctaggttttctgtctctgtacctatcggggaagattaaagcttttgatcgcaaagggcacgtggcaaaattatgcattgtgtttcttcctctacttgttgcttgcctagttgcaatctctcgagtggatgactattggcaccattggcaagatgtgtttgccggaggcattctagggcttgttgtggcaaccttttgttatatgcagttcttccctgcgccctataatgatgaaggatggggtccatatgcatatttccgggcaatggaggaatcacgagcgaatgcaaatattaatcgggaattaccagttgggcaggccatggaggatcgggtaacgaatcaagaaccaaggagaaatggtgataccacctttaccccttactcttaccgtagcccaaccttggaagccatggaaatgggacagaagtaatagtcttctatagcactaatcttctccctagctacctagttccttacttttgtgtatacttatgagcttctctacacggcaaccactagatttagctaattgtgcagcttctgtttcttcttgcattattattattattggcactgccactgtaaaaaaaaaaaaaaaa

SEQ ID NO: 2708 - protein, 341 aa, Glycine max
  misc_feature: Ceres CLONE ID no. 666049
  misc_feature: Ceres CDNA ID no. 25088406
  misc_feature (124)..(273): Pfam Name: PAP2 PFAM Desc: PAP2 superfamily
  misc_feature: Homolog of GI Number: 9621903 NR Desc: phosphatidic acid phosphatase alpha
  misc_feature: Homolog of GI Number: 23505931 NR Desc: At2g01180/F10A8.6
  misc_feature: Homolog of GI Number: 20197584 NR Desc: putative phosphatidic acid phosphatase
  misc_feature: Homolog of GI Number: 21554001 NR Desc: putative phosphatidic acid phosphatase
  misc_feature: Homolog of GI Number: 6957723 NR Desc: putative phosphatidate phosphohydrolase
  misc_feature: Homolog of GI Number: 21537136 NR Desc: putative phosphatidate phosphohydrolase
  misc_feature: Homolog of GI Number: 26005743 NR Desc: prenyl diphosphate phosphatase
  misc_feature: Homolog of GI Number: 21593261 NR Desc: putative phosphatidic acid phosphatase
  misc_feature: Homolog of GI Number: 34910912 NR Desc: putative phosphatidic acid phosphatase beta
  misc_feature: Homolog of GI Number: 34895654 NR Desc: putative phosphatidic acid phosphatase alpha
  misc_feature: Useful for increasing chlorophyll and photosynthetic capacity
  misc_feature: Useful for making bigger plants
  misc_feature: Useful for making plants with increased biomass and foliage
  misc_feature: Useful for making plants with increased biomass and foliage
  misc_feature: Useful for making plants with increased biomass and foliage
  misc_feature: Useful for making plants with increased biomass and foliage
  misc_feature: Useful for making smaller plants
MEPVSRANFFSFQRFWLPFQGQGGMRQQVDPSAHTIKSHGASLARKHARDWLILLLLIVIEIVLFVIHPFKRFVGRDMMEDLRYPMKENTVPVWAVPLYAVLLPMAVFLLFYMRRRDVYDLHHSVLGLLFAVLITGVFTDAIKNAVGRPRPDFYWRCFPDGVENYDSWGGVVCHGNASDIKEGHKSFPSGHTSWSFAGLGFLSLYLSGKIKAFDRKGHVAKLCIVFLPLLVACLVAISRVDDYWHHWQDVFAGGILGLVVATFCYMQFFPAPYNDEGWGPYAYFRAMEESRANANINRELPVGQAMEDRVTNQEPRRNGDTTFTPYSYRSPTLEAMEMGQK

SEQ ID NO: 2709 - DNA, 850 bp, Glycine max
  misc_feature: Ceres CLONE ID no. 666689
  misc_feature: Ceres CDNA ID no. 40041291
  CDS (27)..(689): REFERENCED BY SEQ ID NO: 2710
gattgaatttgagggttgggcgaggaatggatttgggatgttcagacgcaagcgtgtggaaggaagcactctctttatacccttctcgaatacaaactctctctgtgaaaaagaacaaacccgatttggtttctctggatgacttctattgcaaccaactccctctcctccttcaccagcgaaaccctaaccccttcatcaccactcccgagctctccaccctcatgcaatggaagctcacgcgcggcaaatggaggccgcgtctgttggatttcgtgtcgtccctagacgacgccgttgtgaaatccgcttctcagaaggcgtttcagagccttcccgatgtatccaaagccgtttccgagctcactgtgttgaaaggcgttggtcccgccaccgcctctgccgttttggctaccttcgcccctcacttaacccctttcatgtctgatgaggctatggaggcagctcttggaagctcaaaagattattcactgaagcaatatataaaatttgtggataagttgcagaggaaagcggaggaactaagttcagaaggggattcctttaccccatctgatgtagaaagggctttgtggagttttgctgttggacagtcatcaggacctcaagcagatcaggaccctaagaccaaaccaagcaggagctctaaaaggaagagaaaaaattgacatagcaagcagaccaacaaatgaaattgcaagcaatatctgttctttttgcagtctgcaagttttattccctcgttatgttgggggtttgtccttcaatattggacagtgcaaattactaatcgttatcaggtattttggtttcaaaaaaaaaaaaaaaa

SEQ ID NO: 2710 - protein, 220 aa, Glycine max
  misc_feature: Ceres CLONE ID no. 666689
  misc_feature: Ceres CDNA ID no. 40041291
  misc_feature: Homolog of GI Number: 68387481 NR Desc:  similar to CG2446
  misc_feature: Homolog of GI Number: 72092631 NR Desc:  similar to CG2446
  misc_feature: Homolog of GI Number: 55233658 NR Desc: ENSANGP00000025699
  misc_feature: Homolog of GI Number: 48098060 NR Desc: similar to CG2446
  misc_feature: Homolog of GI Number: 54643651 NR Desc: GA15368
  misc_feature: Homolog of GI Number: 24641377 NR Desc: CG2446
  misc_feature: Homolog of GI Number: 55240668 NR Desc: ENSANGP00000014029
MDLGCSDASVWKEALSLYPSRIQTLSVKKNKPDLVSLDDFYCNQLPLLLHQRNPNPFITTPELSTLMQWKLTRGKWRPRLLDFVSSLDDAVVKSASQKAFQSLPDVSKAVSELTVLKGVGPATASAVLATFAPHLTPFMSDEAMEAALGSSKDYSLKQYIKFVDKLQRKAEELSSEGDSFTPSDVERALWSFAVGQSSGPQADQDPKTKPSRSSKRKRKN

SEQ ID NO: 2711 - DNA, 760 bp, Glycine max
  misc_feature: Ceres CLONE ID no. 667534
  misc_feature: Ceres CDNA ID no. 40041292
  CDS (132)..(578): REFERENCED BY SEQ ID NO: 2712
aaaaccatgttccattcaaagcctctcagtgcttgtgctgctcttgtcctttttcctcgcttaagatcacccaagagagaacctaagacacacaacacagactcacacaaagagttacaagagaaatcatcatggcatcagcagcatctgggtttgtgttgtcacttaatgttgcagctgccaccacaaactcaagggtggtcatgttcaacaccaagaacaacacttctatgtttgttgtaaaggcttcagatgagcctgcagcggcggcacccgccaccgccacacccccagctgaagctgaagctaaaccaaagccaccacctattggccccaagagaggtgctaaggtgaagattcttaggaaggaatcttactggtacaaaggcaccggttcagtggttgctgttgatcaggaccccaacactcgctaccctgttgtggttcgattcaacaaagtcaactatgccaatgtatcaacaaacaacttgctttggatgagatcgtggaagtcgaatgaatccaacttaattgtaattttgatacttgtcatgctatcgcagttactactagcctaaggatttttcatgtcacaaaaaaagaatctgtatattctctctgttatcgacccctttgatctctattctctatgaactatatcctgtgtgcagttgctcataatcttattcttcgactaaaaaaaaaaaaaaaaaaaaaaaaaaaaaaaaaaaaaaaaaaaaaaagaaaaaaaaaaaaaaaa

SEQ ID NO: 2712 - protein, 148 aa, Glycine max
  misc_feature: Ceres CLONE ID no. 667534
  misc_feature: Ceres CDNA ID no. 40041292
  misc_feature (68)..(129): Pfam Name: PSI_PsaE PFAM Desc: Photosystem I reaction centre subunit IV / PsaE
  misc_feature: Homolog of GI Number: 2499966 NR Desc: Photosystem I reaction center subunit IV A
  misc_feature: Homolog of GI Number: 2499967 NR Desc: Photosystem I reaction center subunit IV B
  misc_feature: Homolog of GI Number: 26986114 NR Desc: putative photosystem I reaction centre subunit IV
  misc_feature: Homolog of GI Number: 1217601 NR Desc: PSI
  misc_feature: Homolog of GI Number: 24030202 NR Desc: putative photosystem I subunit PSI
  misc_feature: Homolog of GI Number: 21555308 NR Desc: Photosystem I reaction center subunit IV B
  misc_feature: Homolog of GI Number: 4512709 NR Desc: putative photosystem I reaction center subunit IV
  misc_feature: Homolog of GI Number: 50936537 NR Desc: putative Photosystem I reaction center subunit IV
  misc_feature: Homolog of GI Number: 58613513 NR Desc: chloroplast photosystem I protein E
  misc_feature: Homolog of GI Number: 17149818 NR Desc: photosystem I subunit PSI
MASAASGFVLSLNVAAATTNSRVVMFNTKNNTSMFVVKASDEPAAAAPATATPPAEAEAKPKPPPIGPKRGAKVKILRKESYWYKGTGSVVAVDQDPNTRYPVVVRFNKVNYANVSTNNLLWMRSWKSNESNLIVILILVMLSQLLLA

SEQ ID NO: 2713 - DNA, 1212 bp, Glycine max
  misc_feature: Ceres CLONE ID no. 668072
  misc_feature: Ceres CDNA ID no. 40351158
  CDS (2)..(793): REFERENCED BY SEQ ID NO: 2714
atctaccattggggtttcactgttcagtgtaactctcaagccatgtctccgggtcccgttattgacgcagccaccgaccccggcgccgaccaacaaattccctccgtcgacgacgcaatcctcaagaagaaagctcacccccaggttccccccatttccattcttttttctactttactttatctcttattcgcttccacgatcttttttttctcaggaagatgacgctcccattgtcgaggacgtcaaggacgatgacaaagaggaaaccgaagacgaggatgaggacgatgacgacgatgacaaggaagatgacgcccaaggtggtgctgagggtgggaagcagagcagaagtgagaagaagagccgaaaagcaatgttgaagttgggactgaaacctgttactggcgttagtagggtcacaatcaagaggacaaagaatattctttttttcatctcaaaacctgatgtcttcaagagtccaaattctgagacctacatcatatttggggaggcaaaaatagaggacttgagctctcagttgcagacacaggctgctcaacagttcaggatgccagatgtgggatccgtactggcaaaacaagatcaagatgctgcagctgcagcggcacagcctgaagaagaggaggaggaggttgatgaaactggtgtcgagccccatgacattgatttggtgatgacacaggcaggagtgtcaagaagcaaggctgtcaaggcccttaagactcacaatggggacattgtcggtgccattatggagctcactacttagtttcggtttatgttccatttgtagtttttgatttttggggatgattttggaactagtgccatcgtttttgtggtagtcaaaccatatatttggtccatatggttgtgcttaccttataatttcttgtggtacgatgtgatgatcaatgatcatattattttgttgtctttacttatagtagccttcttttagctctatatctttttgcccttaagttaacgtctagccctaaaattcgttggtttaaactttaggtatatatggttggtttgttgtatctgtacctgcaacactaaaggttcatgtcccgtggcctttggaaaatgggggccattgagctaggaatttttgtatcttaggctatattgatgattggattaaattgaattaattttaaaatttgaaaaaaaaaaaaaaaa

SEQ ID NO: 2714 - protein, 138 aa, Glycine max
  misc_feature: Ceres CLONE ID no. 668072
  misc_feature: Ceres CDNA ID no. 40351158
  misc_feature (1)..(51): Pfam Name: NAC PFAM Desc: NAC domain
  misc_feature (99)..(136): Pfam Name: UBA PFAM Desc: UBA/TS
MLKLGLKPVTGVSRVTIKRTKNILFFISKPDVFKSPNSETYIIFGEAKIEDLSSQLQTQAAQQFRMPDVGSVLAKQDQDAAAAAAQPEEEEEEVDETGVEPHDIDLVMTQAGVSRSKAVKALKTHNGDIVGAIMELTT

SEQ ID NO: 2715 - DNA, 922 bp, Glycine max
  misc_feature: Ceres CLONE ID no. 668201
  misc_feature: Ceres CDNA ID no. 35383250
  CDS (49)..(708): REFERENCED BY SEQ ID NO: 2716
tacaatacagagtgcgttgttgctccttcgccacaactccctgccaacatgggtatctccagagattctatgcacaagaggcgtgccactggtggcaagaagaaggcatggaggaagaagagaaagtatgagcttggtcgccagcctgctaacactaagctgtcaagcaacaagacagtcaggaggatccgggttagaggtggaaatgtgaagtggagggcactgagattggatactggaaattactcctggggaagtgaagctgtaactcgcaagactcgtatactagatgtggtttacaatgcctcaaacaacgagcttgtgcgtactcagactcttgtaaaaagtgctattgttcaggttgatgctgctccattcaaacagtggtaccttcagcactatggtgttgagattggtaggaagaagaagacagctgccaagaaggaaactgcagaggagggtgctgctgctgttgctgtggaagaagccaaaaagagtaatcatctgcagagaaaattggagaagcgccagaaagatcgtaagcttgatgctcacattgaggagcagtttggtggtgggcgtttgcttgcttgcatttcctctcggcctggtcaatgtggcagagctgacggctacattttggaaggtaaggagttggagttttacatgaaaaaactccagaaaaagaagggaaagggtgctgcttgattttagtgtttcccagatttttatatggctttagttgcttttatatgttgttggtacaatttaaggtgatgttttgtgccacatgacatcttttagtgcaaactatcttgttagtcctttgcaaattgacatcttaattttgttttgaactgtttttttgccaccgacgagttacaatttttattaattgaatgtcttgcaaaaaaaaaaaaaa

SEQ ID NO: 2716 - protein, 219 aa, Glycine max
  misc_feature: Ceres CLONE ID no. 668201
  misc_feature: Ceres CDNA ID no. 35383250
  misc_feature (1)..(198): Pfam Name: Ribosomal_S8e PFAM Desc: Ribosomal protein S8e
  misc_feature: Homolog of GI Number: 3264759 NR Desc: 40S ribosomal protein S8
  misc_feature: Homolog of GI Number: 32489919 NR Desc: OSJNBa0038P21.4
  misc_feature: Homolog of GI Number: 50908507 NR Desc: putative 40S ribosomal protein S8
  misc_feature: Homolog of GI Number: 1498053 NR Desc: ribosomal protein S8
  misc_feature: Homolog of GI Number: 82400150 NR Desc: putative 40S ribosomal protein S8
  misc_feature: Homolog of GI Number: 7440236 NR Desc: probable ribosomal protein S8
  misc_feature: Homolog of GI Number: 28416637 NR Desc: At5g59240
  misc_feature: Homolog of GI Number: 61654716 NR Desc: S8
  misc_feature: Homolog of GI Number: 29539344 NR Desc: ribosomal protein S8
MGISRDSMHKRRATGGKKKAWRKKRKYELGRQPANTKLSSNKTVRRIRVRGGNVKWRALRLDTGNYSWGSEAVTRKTRILDVVYNASNNELVRTQTLVKSAIVQVDAAPFKQWYLQHYGVEIGRKKKTAAKKETAEEGAAAVAVEEAKKSNHLQRKLEKRQKDRKLDAHIEEQFGGGRLLACISSRPGQCGRADGYILEGKELEFYMKKLQKKKGKGAA

SEQ ID NO: 2717 - DNA, 1179 bp, Glycine max
  misc_feature: Ceres CLONE ID no. 669962
  misc_feature: Ceres CDNA ID no. 36582072
  CDS (121)..(912): REFERENCED BY SEQ ID NO: 2718
aaaaaaaaaaaaccgcatctacctttcacttcacttgtggttcctcactctctctctctccacaccacactgaggagggagacagtggaaggaaggaacactcaaatcactgaaccagccatggctaccttctccaaggaacgcgagaactttgtatacgttgccaagttagctgaacaagctgaacgctatgatgaaatggtggatgccatgaagaaggtggcgaagctggacgttgagttgagtgtggaagagaggaacctgttctctgttgggtacaagaatgtggtggggtcacggagagcttcatggagaatcttgtcatcgatagagcagaaagaggattccaaagggaatgagttgcatgttaagcatatcagggattacaggaacaaggtggagttggagctgtccaacatttgcagtgacattatgataattttagatgagcatcttattccatccactaatattgcggagtccacagtgttttattataagatgaaaggagactattaccggtatttggcagaatttaaagctggcaatgaaaagaaagaggtggcagatcagtcacttaaagcatatcagacagcttctaccactgctgagagtgaactacaacctacacatcctattcgtttgggtctggctctaaatttctcagtgttttattatgagatattaaattcacctgaaagggcctgccatcttgcaaagcaagcctttgatgatgctgtctcggagctggataccctgaatgaggattcttacaaggacagtaccttgattatgcagctgttgagggataaccttactttatggacttctgatatccccgaagagggtgaggacctaaaaatggaaagcgcagccagggttgatcaaggagaagatgagttaggccgctaacccatcattctgtcatatgtctaagatttgatgcattaatttttctcaatcatattttctccattgtagtgaagcctctatctgaatggtgcactgcacctcatcaactttgagtcattcttatttttgagtgatggcctatttgagtcatctacttcatttttatgctattgttgagtagttttattcatgtgtttgtgacacaaaaacaccattggtttgcaatgcataatttccctatttgtatccagaaaaaaaaaaaaaaaa

SEQ ID NO: 2718 - protein, 263 aa, Glycine max
  misc_feature: Ceres CLONE ID no. 669962
  misc_feature: Ceres CDNA ID no. 36582072
  misc_feature: Useful for making plants with modulated growth and phenotype characteristics
  misc_feature: The sequence is a functional homolog of  SEQ ID NO 2350 in the  10/374,780 US patent application
  misc_feature: The sequence is a functional homolog of  SEQ ID NO 344 in the  10/412,699 US patent application
  misc_feature: The sequence is a functional homolog of  SEQ ID NO 790 in the  10/225,066 US patent application
  misc_feature: The sequence is a functional homolog of  SEQ ID NO 793 in the  11/479,226 US patent application
  misc_feature: The sequence is a functional homolog of  SEQ ID NO 805 in the  11/479,226 US patent application
  misc_feature (8)..(243): Pfam Name: 14 PFAM Desc: 14
  misc_feature: Homolog of GI Number: 7576887 NR Desc: 14
  misc_feature: Homolog of GI Number: 8515890 NR Desc: 14
  misc_feature: Homolog of GI Number: 6752903 NR Desc: 14
  misc_feature: Homolog of GI Number: 8099061 NR Desc: 14
  misc_feature: Homolog of GI Number: 1575731 NR Desc: SGF14D
  misc_feature: Homolog of GI Number: 15778154 NR Desc: 14
  misc_feature: Homolog of GI Number: 2822483 NR Desc: 14
  misc_feature: Homolog of GI Number: 695767 NR Desc: 14
  misc_feature: Homolog of GI Number: 22138738 NR Desc: 14
  misc_feature: Homolog of GI Number: 1575729 NR Desc: SGF14C
MATFSKERENFVYVAKLAEQAERYDEMVDAMKKVAKLDVELSVEERNLFSVGYKNVVGSRRASWRILSSIEQKEDSKGNELHVKHIRDYRNKVELELSNICSDIMIILDEHLIPSTNIAESTVFYYKMKGDYYRYLAEFKAGNEKKEVADQSLKAYQTASTTAESELQPTHPIRLGLALNFSVFYYEILNSPERACHLAKQAFDDAVSELDTLNEDSYKDSTLIMQLLRDNLTLWTSDIPEEGEDLKMESAARVDQGEDELGR

SEQ ID NO: 2719 - DNA, 741 bp, Glycine max
  misc_feature: Ceres CLONE ID no. 670715
  misc_feature: Ceres CDNA ID no. 40351159
  CDS (65)..(532): REFERENCED BY SEQ ID NO: 2720
aaatataaataaatgaatgttcagcatgaccacagcataagtgtagagagagagagagagagaaatggcttgcaggcaattgtgggcttcaagagctgcctcttacctgaggatctctgtgtttcacagaggcttttctaatgttattaaagatttcaagtatgttgattctcatgagtgggtgaaagttgatggaaattacgcaaccatcggcataactgatcatgcccaagatcatttgggtgatgttgtatatgttgaattgccagaagtgggagcagctgtgacacaaggaggtagttttggtgcagttgaaagtgtgaaggctactagtgatattaactctcctatttcaggaaaagttgttgaagtcaatgaagcgcttaacagctctcctgctttggtcaattcaagcccttataaagatggatggataattaaagttgaaataaatgacagtggtgaactaaacaacttgatggattcagaacaatactccaagttctgtgaagaagaagattccaagcactgatggtcttgccaagatctttcagcactctccaatctccatggtgtagatcatgtttttattgggaaagctgctaaattacttattcctttttctccttgtgtcatggtttgaccactgctctatttttatttttcactaagcttctgaaccagtgggatgatatttttcactctttgcaatggaaaaatgaaattgataaaaaaaaaaaa

SEQ ID NO: 2720 - protein, 155 aa, Glycine max
  misc_feature: Ceres CLONE ID no. 670715
  misc_feature: Ceres CDNA ID no. 40351159
  misc_feature (31)..(151): Pfam Name: GCV_H PFAM Desc: Glycine cleavage H
MACRQLWASRAASYLRISVFHRGFSNVIKDFKYVDSHEWVKVDGNYATIGITDHAQDHLGDVVYVELPEVGAAVTQGGSFGAVESVKATSDINSPISGKVVEVNEALNSSPALVNSSPYKDGWIIKVEINDSGELNNLMDSEQYSKFCEEEDSKH

SEQ ID NO: 2721 - DNA, 1015 bp, Glycine max
  misc_feature: Ceres CLONE ID no. 670751
  misc_feature: Ceres CDNA ID no. 40351160
  CDS (158)..(766): REFERENCED BY SEQ ID NO: 2722
agtttcagacacagagagaggggtttgggattggagggattgacgctgcgtctcttcctcttctctttcgatccatccctcattcctaatcctccaatccaaccacctcagcctcacactcacatatacacatatctgaacgcgtatcgtccctcctatggcttcaaagcgcatcctcaaggagctcaaggacttgcagaaagacccaccaacttcttgcagcgctggtccagtagctgaggacatgttccattggcaagcaacaataatgggtcctgctgatagtccttatgctggaggtgtattcctagtcactattcacttccctccggattatcctttcaagcctcctaaggttgcctttaggactaaggtgtttcacccgaacatcaatagcaatggtagcatttgtcttgatatcctgaaggagcagtggagccctgcactcaccatctctaaggtactgctttctatctgctcattgctgactgatccaaatcctgatgatccacttgttccggaaatcgctcacatgtacaaaactgaccgggccaagtatgaggccactgcacgcagctggacccagaagtatgccatgggagcagttaattctcaaggatccacatcttatcactccaaatgcactttcatacaaatcagcaatgagagagaatctgttgaggcagggatacagaattgttggaatcattggagaccaatggagcgatctgcttggagaccacagaggcgaaagcaggacctttaagcttcctaatcccatgtactacattgagtagtaccttcacctctctcaacaatctagctagagtttgctcctatctatatgtaataaggtatgctgatatgcactattcaaataggagcattagctatgtttgttaatgtcactttatgttatgtgggtaagtcacctaagacactccacgtacctacttgttgtctcttacgcggctttaataaatcttctgcccttgttccaaaaaaaaaaaaaaaa

SEQ ID NO: 2722 - protein, 202 aa, Glycine max
  misc_feature: Ceres CLONE ID no. 670751
  misc_feature: Ceres CDNA ID no. 40351160
  misc_feature: The plant produces a reduced number of seeds.
  misc_feature: Useful for biocontainment applications
  misc_feature (5)..(142): Pfam Name: UQ_con PFAM Desc: Ubiquitin
MASKRILKELKDLQKDPPTSCSAGPVAEDMFHWQATIMGPADSPYAGGVFLVTIHFPPDYPFKPPKVAFRTKVFHPNINSNGSICLDILKEQWSPALTISKVLLSICSLLTDPNPDDPLVPEIAHMYKTDRAKYEATARSWTQKYAMGAVNSQGSTSYHSKCTFIQISNERESVEAGIQNCWNHWRPMERSAWRPQRRKQDL

SEQ ID NO: 2723 - DNA, 890 bp, Glycine max
  misc_feature: Ceres CLONE ID no. 671873
  misc_feature: Ceres CDNA ID no. 40041293
  CDS (103)..(519): REFERENCED BY SEQ ID NO: 2724
cttcacttacactcttcttttaagctctagcagttaactaacaatattagcatttgctagtgattaggaatataaagatacgccaaccacaaacagtttaagatggcctccaaaacatgttcatcccttgctcttttcctcacactcaacctcctcttcttttcacttgtctctgcatgcggtagttattcatgccctagtccaaagccaaagccaaagcccaagccaaagcccaaccctaaccctagtccttctggtgcatcgtgcccccgtgacgcactcaagctaggtgtatgtgccaacgtgctaaaagggttgttgaacgtgactttgggtcaaccaccagttaccccttgctgcacccttctcgatgggctcgttgaccttgaggctgcagtgtgcctttgcactgccctcaaagcaaatgttttgggcatcaacctcaaccttcctatctcactcagcttgcttctcaatgtttgctcaaggcaagtcccacgcgattttcaatgtgcctaatcatggcctatacacaacatatcatatatatctaacgtgtttggaaactcgttgaggatggagaaatcacgtctgagatatgaaaagctataactatttgcttttccacatctaaaatgtgaaaaattacgtctgaaacgtgaaatcaaacacgttaattaatcatcctatctacgtacttttgcttcgtgtttggtatagttgtgactttcctttatattgatcagtgtgtgaatcttgtacgtgcatggagggttaacttctccttattccttccttttagtgttttctaaatattgtatggttagagtgttgcaataaattaataaataagttcctgatgcatgcttatgtaaaaaaaaaaaaaaaaa

SEQ ID NO: 2724 - protein, 138 aa, Glycine max
  misc_feature: Ceres CLONE ID no. 671873
  misc_feature: Ceres CDNA ID no. 40041293
  misc_feature (55)..(137): Pfam Name: Tryp_alpha_amyl PFAM Desc: Protease inhibitor/seed storage/LTP family
  misc_feature: Homolog of GI Number: 1199774 NR Desc: extensin like protein
  misc_feature: Homolog of GI Number: 21693573 NR Desc: extensin
  misc_feature: Homolog of GI Number: 34365599 NR Desc: At1g62510
  misc_feature: Homolog of GI Number: 21360370 NR Desc: extensin
  misc_feature: Homolog of GI Number: 545029 NR Desc: proline
  misc_feature: Homolog of GI Number: 60542797 NR Desc: arachidonic acid
  misc_feature: Homolog of GI Number: 46095207 NR Desc: arachidonic acid
  misc_feature: Homolog of GI Number: 4454097 NR Desc: hybrid proline
  misc_feature: Homolog of GI Number: 407410 NR Desc: 14 kDa polypeptide
  misc_feature: Homolog of GI Number: 58578282 NR Desc: extensin
MASKTCSSLALFLTLNLLFFSLVSACGSYSCPSPKPKPKPKPKPNPNPSPSGASCPRDALKLGVCANVLKGLLNVTLGQPPVTPCCTLLDGLVDLEAAVCLCTALKANVLGINLNLPISLSLLLNVCSRQVPRDFQCA

SEQ ID NO: 2725 - DNA, 732 bp, Glycine max
  misc_feature: Ceres CLONE ID no. 672488
  misc_feature: Ceres CDNA ID no. 29191874
  CDS (3)..(542): REFERENCED BY SEQ ID NO: 2726
accaagcagccgccgccgcaaccctagagcctcgcctccctcctctcctctcccgggcgcctccaccccccgcccagcggcgcgaagcgaccatgacgttcaagcggaggaacggcgggcgcaacaagcatggccgcggccacgtcaagtacatccgctgctccaactgcgccaagtgctgccccaaggacaaggctatcaagcgtttcttggtgaggaacatcgtggagcaggctgctgtgagagatgtgcaggaggcttgtgtccatgatggatatgtccttcccaagctgtacgccaaggtgcaccactgtgtttcttctgccatccatgctcacattgtccgtgtccgctcccgtgagaacaggaggaaccgtgagcccccgcagcgtttcaggcgcagggacgacggcccgaggcctggacagggtggcccgccccgtgctggtggccctggaggccctggtggtgctcctgccggcgctggtgctgtccctggagctcctgctccccgtgtgcgctttgatctagttctggcatgattgggcggtggcgccatccctagttttacccgtgtctggatattgaactattctacctagtttttgctgcaatcggttgtactgaaagttggttggtcaaaagcacaatttgtgatcaggtctttaatgttttggcaatttcgctgctatctataatcagagagaactttttggaaaaaaaaaaaaaaaa

SEQ ID NO: 2726 - protein, 149 aa, Glycine max
  misc_feature: Ceres CLONE ID no. 672488
  misc_feature: Ceres CDNA ID no. 29191874
  misc_feature (1)..(140): Pfam Name: Ribosomal_S26e PFAM Desc: Ribosomal protein S26e
  misc_feature: Homolog of GI Number: 50931777 NR Desc: putative 40S ribosomal protein S26
  misc_feature: Homolog of GI Number: 57900258 NR Desc: putative ribosomal protein S26
  misc_feature: Homolog of GI Number: 7440567 NR Desc: probable ribosomal protein S31
  misc_feature: Homolog of GI Number: 5706704 NR Desc: ribosomal protein S26
  misc_feature: Homolog of GI Number: 56236112 NR Desc: At2g40510
  misc_feature: Homolog of GI Number: 20466414 NR Desc: 40S ribosomal protein S26
  misc_feature: Homolog of GI Number: 24111313 NR Desc: At2g40590/T2P4.6
  misc_feature: Homolog of GI Number: 22137298 NR Desc: AT3g56340/F18O21_300
  misc_feature: Homolog of GI Number: 3885515 NR Desc: similar to ribosomal protein S26
  misc_feature: Homolog of GI Number: 61654752 NR Desc: S26
MTFKRRNGGRNKHGRGHVKYIRCSNCAKCCPKDKAIKRFLVRNIVEQAAVRDVQEACVHDGYVLPKLYAKVHHCVSSAIHAHIVRVRSRENRRNREPPQRFRRRDDGPRPGQGGPPRAGGPGGPGGAPAGAGAVPGAPAPRVRFDLVLA

SEQ ID NO: 2727 - DNA, 1685 bp, Glycine max
  misc_feature: Ceres CLONE ID no. 672558
  misc_feature: Ceres CDNA ID no. 40041294
  CDS (17)..(1351): REFERENCED BY SEQ ID NO: 2728
cttccctcccattaccatggaattggaagtcaccgccgctacttctccaccttctcgcgttctcctcatctccgccggtgccagccacaccgttgcccttctctctgggaatgttgtgtgctcgtggggtcgcggagaggatggacagttaggccatggtgacaccgatgatagactcttacccactcatctcagtgcattggatgctcaacaaattgattctattgcatgtggagctgatcatacccttgcgtattccgaatcacgcaatgaactctatagttggggatggggtgattttggaaggttgggtcatggcaattctagtgatttgctcattcctcagcctattatagcattgcaaggtctaaggataaagcaaattgcctgtggggatagccactgtttggcagttaccatggaaggcgaggttcagagttgggggaggaatcaaaatggtcaacttggacttggcacctcggaggattctcttgtgccacaaaagattcaaacatttcagggagtacctatcaaaatggttgctgcaggtgcagaacacagtgtagctattactgaaaatggagaactgtatggatggggttggggccgatatggaaatttggggttgggggatagaaatgatcgctggattcctgagaaagtttcttctgttgattgtgacaagatggtcatggttgcttgtggttggcggcatacaatttctgtttcatctttgggtggcttatacacatatgggtggagcaaatatggccagttaggacatggaaattttgaggattctcttgtgcctcaaaagcttcaagccttgagtgataagttaatcagtcaggtatcgggtggttggaggcatagtatggcactgacgtctactggactactatatggatggggttggaataagtttggacaggttggagttggtgacaatgttgatcgttgctctcctgtgcaagtgaagttcccccatgatcaggtacttgaaattaaagtagttcagatctcatgtgggtggagacacacaattgctgtaactgaaaaggaaaatgtattttcttggggaagaggcacaaatgggcaacttgggcatggggataccgttgaccggaattctccaaagattattgaggcattgagtgtggatggatcttccgggccgcacatagaatcctcaaacactgatctattgtcagggaaaagtggtgcctccttatctgagagatatgcagttgttccggatgaaactgtctcaggacaaactgctagttcaagcagtggagataggcttgatatcagtgtcccagaaagtgatgtcaaacggatccgagtttgatgtggcaaatttccgttagacgagaatgatgcataatattgatatctacctcatcagttcaatggagccaccgctcagatgccactagtaatttggctttcaacatagtagtaaatgtaaattgtagtcatatgagaaataacagcaacgtattctttaatctacttttttttagcatacttttcactcttggctaaaatttgttgagactcaggaaattacgagtgatagtagttaaataaaaatcgagacccatgtcattttgtgagtcctaagtcctaacaaatttcagttaatggatagtatgagaaacgttgcaaaaaaaaaaaaaaaa

SEQ ID NO: 2728 - protein, 444 aa, Glycine max
  misc_feature: Ceres CLONE ID no. 672558
  misc_feature: Ceres CDNA ID no. 40041294
  misc_feature (241)..(289): Pfam Name: RCC1 PFAM Desc: Regulator of chromosome condensation
  misc_feature: Homolog of GI Number: 23308399 NR Desc: At5g63860/MGI19_6
  misc_feature: Homolog of GI Number: 50924436 NR Desc: OSJNBa0006B20.1
  misc_feature: Homolog of GI Number: 51964078 NR Desc: PREDICTED P0470G10.15 gene product
  misc_feature: Homolog of GI Number: 5478530 NR Desc: UVB
  misc_feature: Homolog of GI Number: 21741206 NR Desc: OSJNBb0086G13.15
  misc_feature: Homolog of GI Number: 72128891 NR Desc:  similar to hect domain and RLD 2
  misc_feature: Homolog of GI Number: 55234852 NR Desc: ENSANGP00000025597
  misc_feature: Homolog of GI Number: 55234851 NR Desc: ENSANGP00000020044
  misc_feature: Homolog of GI Number: 73952737 NR Desc:  similar to hect domain and RLD 4 isoform b isoform 3
  misc_feature: Homolog of GI Number: 73952741 NR Desc:  similar to hect domain and RLD 4 isoform b isoform 4
MELEVTAATSPPSRVLLISAGASHTVALLSGNVVCSWGRGEDGQLGHGDTDDRLLPTHLSALDAQQIDSIACGADHTLAYSESRNELYSWGWGDFGRLGHGNSSDLLIPQPIIALQGLRIKQIACGDSHCLAVTMEGEVQSWGRNQNGQLGLGTSEDSLVPQKIQTFQGVPIKMVAAGAEHSVAITENGELYGWGWGRYGNLGLGDRNDRWIPEKVSSVDCDKMVMVACGWRHTISVSSLGGLYTYGWSKYGQLGHGNFEDSLVPQKLQALSDKLISQVSGGWRHSMALTSTGLLYGWGWNKFGQVGVGDNVDRCSPVQVKFPHDQVLEIKVVQISCGWRHTIAVTEKENVFSWGRGTNGQLGHGDTVDRNSPKIIEALSVDGSSGPHIESSNTDLLSGKSGASLSERYAVVPDETVSGQTASSSSGDRLDISVPESDVKRIRV

SEQ ID NO: 2729 - DNA, 649 bp, Glycine max
  misc_feature: Ceres CLONE ID no. 672789
  misc_feature: Ceres CDNA ID no. 36699573
  CDS (63)..(464): REFERENCED BY SEQ ID NO: 2730
ctaacctttttttcttcctttcacctcttcagcagtcgttacagagactccataacccgaaaatgcctttcaagaggtacgttgagattggaagggttgctcagatcaactatggcaaagagtatgggaggctcgtggttattgtcgatgtcattgaccagaatagggctcttgttgatgctcctgacatggtgaggtcccaagtgaacttcaagaggctatcactcactgacatcaagatcgatattaagaggatccccaagaagaaggatctcattcaagccatggaggctgctgatgttaagaacagatgggagaagagttcttggggcagaaaactgattgtgcagaagaggagggcatcccttaatgactttgataggttcaagataatgttggccaagatcaagagggcagctgttgttaggcaagagcttgctaagctgaagaaaagtgcatcataggcattatatcatgtgcaattttcaaattttgttatgaatttcattcagttagtactttttggttgctatgagtttttatgtatcaatgagggacatcctagaaatgtttatttttaaatcatttgtgttagtgaattatcgccagttctcccaatatcattgttacaaaaaaaaaaaaaaaaaaa

SEQ ID NO: 2730 - protein, 133 aa, Glycine max
  misc_feature: Ceres CLONE ID no. 672789
  misc_feature: Ceres CDNA ID no. 36699573
  misc_feature (44)..(120): Pfam Name: Ribosomal_L14e PFAM Desc: Ribosomal protein L14
  misc_feature: Homolog of GI Number: 76161008 NR Desc: glycoprotein
  misc_feature: Homolog of GI Number: 5762251 NR Desc: Csf
  misc_feature: Homolog of GI Number: 7488810 NR Desc: hydroxyproline
  misc_feature: Homolog of GI Number: 50910649 NR Desc: putative hydroxyproline
  misc_feature: Homolog of GI Number: 50926450 NR Desc: OSJNBb0070J16.13
  misc_feature: Homolog of GI Number: 2500365 NR Desc: Probable 60 ribosomal protein L14
  misc_feature: Homolog of GI Number: 48596905 NR Desc: glycoprotein
  misc_feature: Homolog of GI Number: 7269562 NR Desc: ribosomal protein L14
  misc_feature: Homolog of GI Number: 20465571 NR Desc: putative 60S ribosomal protein L14
  misc_feature: Homolog of GI Number: 41323492 NR Desc: 60S ribosomal protein L14
MPFKRYVEIGRVAQINYGKEYGRLVVIVDVIDQNRALVDAPDMVRSQVNFKRLSLTDIKIDIKRIPKKKDLIQAMEAADVKNRWEKSSWGRKLIVQKRRASLNDFDRFKIMLAKIKRAAVVRQELAKLKKSAS

SEQ ID NO: 2731 - DNA, 868 bp, Glycine max
  misc_feature: Ceres CLONE ID no. 674672
  misc_feature: Ceres CDNA ID no. 25445922
  CDS (59)..(367): REFERENCED BY SEQ ID NO: 2732
aacttcgattgagtttcaaagagatcagtggtagtgtggtacattgtgttgatcaaggatggaacaaaagaagtttgtggcactattaatggtggtggtggtgatggcttcttctatgtggaaaggatccaaaggtcttagtctctgtaacatggatgaagatggattggaggcttgcaagccctcagtgactcagccaaacccagttgatccatcccctgattgctgcaaggctctggatggtgctgacttgaagtgcctttgctcttacaagaactcatcagagttgcctcttctaggaattgatctaactcttgctgcttcacttcctgcaaagtgcaatctcactcctccagataattgctaatattggttggagagtctcttgtaaaacaaagtgatcctgggaagggaattagcaatccctttggcaaagatatctcttttggttgaagtgagctatctttcttaagatataggcatttaagatgacaaattttgacaaggttcttgacttgatgccttccaccttatgttcagaaacaaatatgcagcttttttctctgtaaggatgctaaatgctaagtggagggagttaccaagcgcataaacgaaaagaattaaaaaaaattaagcacaccaaaactacactcagcttttaggtggttttctgggatactctggatggaaacgtatgttaaagaaaaacaatccatcatgataaggtgtcctagatgctccaacaatggcagctcccatgagatacattctttcttcataaatagtttctgtttgtgctaaagaaaattgtaagtcaattttgcagaaaggtgtgataaaaatttacagtacaaaaaaaaaaaaaaaa

SEQ ID NO: 2732 - protein, 102 aa, Glycine max; identical to SEQ ID NO: 2594
  misc_feature: Ceres CLONE ID no. 674672
  misc_feature: Ceres CDNA ID no. 25445922
  misc_feature (30)..(102): Pfam Name: Tryp_alpha_amyl PFAM Desc: Protease inhibitor/seed storage/LTP family
  misc_feature: Homolog of GI Number: 25044847 NR Desc: PVR3
  misc_feature: Homolog of GI Number: 1420887 NR Desc: non

SEQ ID NO: 2733 - DNA, 864 bp, Glycine max
  misc_feature: Ceres CLONE ID no. 676472
  misc_feature: Ceres CDNA ID no. 35383251
  CDS (119)..(736): REFERENCED BY SEQ ID NO: 2734
gatcttttgttcgtagtattcacggtcaagttgtgcatgctaagatgcactcctttcgtttcattttggatgcttataatttgatagtgaggaacgttaagtagttgaaaatctgtctatggaatgtgcttacaagtatgtttcggagctatggcgcaagaagcagtctgatgttatgagattcttgcagcgggtgaggtgctgggagtaccgccagcaaccttctattgtccgtttgacaaggtctactcgcccagacaaggctcgccgcttgggtttcaaggctaagcagggttatgtgatttaccgtgttcgtgtacgaaggggtggccggaagagaccagttccaaaaggtattgtttatggtaagcccaccaaccaaggtgttactcaactgaaatttcagcgcagcaagaggtctgttgccgaggagcgagctggaaggaagttgggtggcctcagggttctcaattcatactgggtgaatgaggactcgacttacaaatattttgaggtcattctggtggatgttgcccacagcgctgttagaaatgatccaagaatcaactggctctgcaacccagtccataaacacagggaactgcgtggcctcacttctgctgggaaaagtaacaggggtttacggggcagaggacatctctaccacaaaaatcgtccatcccgcagggcaacctggaagagaaacaacactctttcccttcgtcgctaccgttgattttgttgcagttatcgtatgttgcttcattttccaagtatttggagtgcattatatgtagactttaggaaaatcgtcagttttgaacgcctgaatcatgctttttccccccaaaaaaaaaaaaaaaa

SEQ ID NO: 2734 - protein, 205 aa, Glycine max
  misc_feature: Ceres CLONE ID no. 676472
  misc_feature: Ceres CDNA ID no. 35383251
  misc_feature (3)..(194): Pfam Name: Ribosomal_L15e PFAM Desc: Ribosomal L15
  misc_feature: Homolog of GI Number: 7268491 NR Desc: ribosomal protein
  misc_feature: Homolog of GI Number: 23505795 NR Desc: At4g16720/dl4385c
  misc_feature: Homolog of GI Number: 21689875 NR Desc: putative 60S ribosomal protein L15
  misc_feature: Homolog of GI Number: 34896990 NR Desc: ribosomal protein L15
  misc_feature: Homolog of GI Number: 14585879 NR Desc: ribosomal protein L15
  misc_feature: Homolog of GI Number: 48596903 NR Desc: ribosomal protein
  misc_feature: Homolog of GI Number: 3608479 NR Desc: ribosomal protein L15
  misc_feature: Homolog of GI Number: 2982318 NR Desc: probable 60S ribosomal protein L15
  misc_feature: Homolog of GI Number: 2982249 NR Desc: probable 60S ribosomal protein L15
  misc_feature: Homolog of GI Number: 50878349 NR Desc: putative 60s ribosomal protein L15
  misc_feature: Useful for decreasing plant size
  misc_feature: Useful for making plants with increased biomass
  misc_feature: Useful for making shorter plants
  misc_feature: Useful for sterility
  misc_feature: Useful for sterility
MECAYKYVSELWRKKQSDVMRFLQRVRCWEYRQQPSIVRLTRSTRPDKARRLGFKAKQGYVIYRVRVRRGGRKRPVPKGIVYGKPTNQGVTQLKFQRSKRSVAEERAGRKLGGLRVLNSYWVNEDSTYKYFEVILVDVAHSAVRNDPRINWLCNPVHKHRELRGLTSAGKSNRGLRGRGHLYHKNRPSRRATWKRNNTLSLRRYR

SEQ ID NO: 2735 - DNA, 840 bp, Zea mays
  misc_feature: Ceres CLONE ID no. 676996
  misc_feature: Ceres CDNA ID no. 29191505
  CDS (2)..(622): REFERENCED BY SEQ ID NO: 2736
gcgtgatctctctcccttcctcccttccggcgacgcctgggccaccgccgcggccgccctacgccaggtgcccaggtcctcgtccggcccttcgccggcgatgagcacccaccaggccaatacgctgcggttgtacctcacctgcatccggaacactctggaggcggcgatgtgcctccagaatttcccttgccaagaagtcgagaggcacaacaaaccggaggtggagctcaagacaagccctgaacttctgctgaatccggtattgatatgccgcaacgaagcagaaaaatgcttgatagagacttcaatcaactccatacgtataagcatgaaggttaagcaggcagatgaattggagaacattcttgccaagaagttccttaggtttttgtcaatgagggcagaggcattccaagtgttgaggagaaaaccggttcagggctatgatatcagtttcctgataacaaactaccattgtgaggacatgcataagcacaagctcatagatttcatcgtgcaatttatggaggatattgacaaggagatcagtgagctgaagctgtcagtaaacactcgtggccggctagtggccactgaattcttgaagcagttcttatgactcggccatggccgtagtcagtgttgattatcatggcctgcaactaagctgccgttctgcaacagctttaagatttttttacacgacagctcttgtaaatgccttgccaaagatgcattcgtggccctgggccacctgattaacagctgacaattacagtatcaggacgcacatagcgctctgagattgttcatgtgatcaaaaaaaaaaaaaaaaaa

SEQ ID NO: 2736 - protein, 173 aa, Zea mays
  misc_feature: Ceres CLONE ID no. 676996
  misc_feature: Ceres CDNA ID no. 29191505
  misc_feature (6)..(172): Pfam Name: ARPC4 PFAM Desc: ARP2/3 complex 20 kDa subunit
  misc_feature: Homolog of GI Number: 34897476 NR Desc: putative actin
  misc_feature: Homolog of GI Number: 29244680 NR Desc: putative ARP2/3 complex 20 kDa subunit
  misc_feature: Homolog of GI Number: 79325095 NR Desc: ARPC4
  misc_feature: Homolog of GI Number: 4093169 NR Desc: p20
  misc_feature: Homolog of GI Number: 76648493 NR Desc:  similar to actin related protein 2/3 complex
  misc_feature: Homolog of GI Number: 54695616 NR Desc: actin related protein 2/3 complex
  misc_feature: Homolog of GI Number: 49522851 NR Desc: MGC69420 protein
  misc_feature: Homolog of GI Number: 57100910 NR Desc:  similar to actin related protein 2/3 complex
  misc_feature: Homolog of GI Number: 45387521 NR Desc: actin related protein 2/3 complex subunit 4
  misc_feature: Homolog of GI Number: 55619777 NR Desc:  similar to actin related protein 2/3 complex
MSTHQANTLRLYLTCIRNTLEAAMCLQNFPCQEVERHNKPEVELKTSPELLLNPVLICRNEAEKCLIETSINSIRISMKVKQADELENILAKKFLRFLSMRAEAFQVLRRKPVQGYDISFLITNYHCEDMHKHKLIDFIVQFMEDIDKEISELKLSVNTRGRLVATEFLKQFL

SEQ ID NO: 2737 - DNA, 957 bp, Zea mays
  misc_feature: Ceres CLONE ID no. 677001
  misc_feature: Ceres CDNA ID no. 40351161
  CDS (163)..(690): REFERENCED BY SEQ ID NO: 2738
agtccatgacaaggggctcggttagtccacagccctagaggctgcagctgcacacttctcttctctgttttcgccggttaaactttccccacttgttgctggccttcgaatctgtggtttgtttgagcttagcagggaagcgaagaacagggaagcaaggacatggatgctttcagtgcagtgatggacaaggtaaagagccacccagaaatgatggagaaggtcagtgcagtgatggacaaggtgaagaagagccacccagaagcggtggaaaaggtcaaggacgaggtgatgagccttgctgatgctctccatctgcgtagacatggatccaaagataaagaacctgagtctgaagagaaggccgaagaaggcgaggcagcgcagagcgtcgaagaggaggagggtacctctgctgacaagactgcagaacctaatgtgttggagcaggccgtacaggagattcaggctgtcgccgcagctttgcagcagacagcacctgaaactgaaactgaaattccagttgagactgctgctgctgctcctgaaacttcggctgaaggagacaagcctgaagacacaaacagggaggtggagaaagatgacccaaagaagcggctcgatttcgccgggttcttcgccatgctgtttgagaggttctgctccccggccaacaagaagaaagactgagtgattgcaggtcagctgtggatttctcgttttgtgatcttggacgtggaaattacattttacttgatgtatttattgtgggtggtgtacagtctgcacttgtgttctattaagataaatctgctcttgctttttttactttcttttgtgatgacagggcaatgattacattttacttgatgtatttattgtcgcccttgtggaattgatttaatttatgtgaacgattgatttatttagggttaagataaaaaaaaaaaaaaaaaa

SEQ ID NO: 2738 - protein, 175 aa, Zea mays
  misc_feature: Ceres CLONE ID no. 677001
  misc_feature: Ceres CDNA ID no. 40351161
MDAFSAVMDKVKSHPEMMEKVSAVMDKVKKSHPEAVEKVKDEVMSLADALHLRRHGSKDKEPESEEKAEEGEAAQSVEEEEGTSADKTAEPNVLEQAVQEIQAVAAALQQTAPETETEIPVETAAAAPETSAEGDKPEDTNREVEKDDPKKRLDFAGFFAMLFERFCSPANKKKD

SEQ ID NO: 2739 - DNA, 572 bp, Zea mays
  misc_feature: Ceres CLONE ID no. 677172
  misc_feature: Ceres CDNA ID no. 40351162
  CDS (83)..(205): REFERENCED BY SEQ ID NO: 2740
aataatcagtgaaaggtttgaacaccgggaagagaacagaaaagactgcttgaggacactgtatactctaataaaagacgcaatgaaagctgacaaacttgttgaggatgccaggaattcttatgttaaaggaagacttaaggctaatccacaatttatggagcgattgaagaggaagacagataagttgatggcagctgcataaggtgttacagagctccttgttttaacagctcctctctttccctcatcaacatgggtcattcttagtcataaatatatgttgagcatctcgaataacaatgtcaacacacatccccagcctatgcctttttggaaatcttttgctgctttcctaaattgaagatgcttaatttccatagtttgctgaggaaagtagctactgaggtgtaaattttggagtcaatatgtcgcttcttctgaagtcacagaatcatgctggcaggactggaatctaatctcaaccttgtgatctgtacaattgattcatttaaagggtaatttctgccttgtttagataaaaaaaaaaaaagaaaaaaaaaaaaaaaaaa

SEQ ID NO: 2740 - protein, 40 aa, Zea mays
  misc_feature: Ceres CLONE ID no. 677172
  misc_feature: Ceres CDNA ID no. 40351162
MKADKLVEDARNSYVKGRLKANPQFMERLKRKTDKLMAAA

SEQ ID NO: 2741 - DNA, 890 bp, Zea mays
  misc_feature: Ceres CLONE ID no. 677208
  misc_feature: Ceres CDNA ID no. 25446649
  CDS (293)..(610): REFERENCED BY SEQ ID NO: 2742
aatggaacaaaatcaaagatgtattagatgcaaaagtttactttatgcatgcaatattgttttgaacgtagacgtatctgggctgttttacatccatcaatctggataccgattatttgcctgtgcaacacatttctctcactgtaaacttattcctctcatctccttgtattgcttttgacagggggttcctgtaagaatagagataggtccacgtgatgtcacaaataagagtgttgtggtttctaggcgtgatgtccctggaaagcaaggaaaggagtttggagtgtctatggagccttcgatattggtgaaccatataaagggtcgtctagatgacatacaagcatcccttttacagaaggccataacattccgtgatagtaacattgtcgacgtaagctcatatggtgagctgaaggaagctatttctgaaggaaagtgggctagaggtccttggtcagctagcgatgctgatgagctgaaagtgaaagaagagaccagcgccaccatcagatgctacccattcgagcagcctgagggcaccaagaaatgcttcatgactggcaaccccgcagaggaagtcgcaattttcgcaaagtcatactaggcccactgtgtgtctactgtcagagataagaacagcatttccttttcaattttataggaaattgaaaatttgataatcaattggtcaattttgttccactacctaaggtccagattgatgacggttcatggaacagcattgtgtgctgctgatatttaaaatgtaaatttgataatcaattggtcaattttgttccactaacactggaggtaagttgtttgcctactcagtatcaaatgtttcaaacaagttccccaatatgccaaaaaaaaaaaaaaaa

SEQ ID NO: 2742 - protein, 105 aa, Zea mays
  misc_feature: Ceres CLONE ID no. 677208
  misc_feature: Ceres CDNA ID no. 25446649
  misc_feature: Homolog of GI Number: 50934381 NR Desc: putative prolyl
  misc_feature: Homolog of GI Number: 34365755 NR Desc: At5g52520
  misc_feature: Homolog of GI Number: 32140557 NR Desc: prolyl
  misc_feature: Homolog of GI Number: 53796869 NR Desc: COG0442: Prolyl
  misc_feature: Homolog of GI Number: 76260501 NR Desc: Prolyl
  misc_feature: Homolog of GI Number: 53713725 NR Desc: prolyl
  misc_feature: Homolog of GI Number: 67940270 NR Desc: Prolyl
  misc_feature: Homolog of GI Number: 29346339 NR Desc: prolyl
  misc_feature: Homolog of GI Number: 68553614 NR Desc: Prolyl
  misc_feature: Homolog of GI Number: 67935657 NR Desc: Prolyl
MEPSILVNHIKGRLDDIQASLLQKAITFRDSNIVDVSSYGELKEAISEGKWARGPWSASDADELKVKEETSATIRCYPFEQPEGTKKCFMTGNPAEEVAIFAKSY

SEQ ID NO: 2743 - DNA, 842 bp, Triticum aestivum
  misc_feature: Ceres CLONE ID no. 677401
  misc_feature: Ceres CDNA ID no. 24765972
  CDS (189)..(671): REFERENCED BY SEQ ID NO: 2744
tccgctccggccccagtccagtactgtgcgcgcatctctcctcctttttctcccccctgagaggctttctttgcttcacgcggggctccggatattcgttgtcctcgcggctcagccaccgcggaatccatccagcgcagctcagggggaagaggcggtcgaagctggaggtggaagaggggctcgccatgggctccgagggatccgcgccggtcgtagttcccagaaactttagacttttggaagaacttgagagaggtgagaagggcattggtgatggaactgtgagctatgggatggatgatgctgatgacatatatatgcgctcctggacaggaactattatcggtccacccaatactgttcacgagggacgaatctatcaattgaagttgttctgtgatacagattatccagacaaaccaccgactgtccggttccaggctagggtcaatatgacatgtgtgaatcaagaaactggaatggttgatccaagacgatttcctatgcttggaaactggaaaagggaacatacaatggaggatatcctcatcagccttaaaaaggagatgtcaacccctcagaaccgcaggctccaccagcctcatgaaggcaacgatgatcagagagtggagcagaaagggctagcagctagatgtgtcgttatgtaagatacgcgcattgcaatgtacagtgttacactgagtagcatcagaacgcagaagctgaggaaacccaggaggaaatcatgtaatttgacagtcgctagtcgctactttggatcgaaactgctctattgccgaaataaaatgccaatgacttcgtcaaaaaaaaaaaaaaaa

SEQ ID NO: 2744 - protein, 160 aa, Triticum aestivum
  misc_feature: Ceres CLONE ID no. 677401
  misc_feature: Ceres CDNA ID no. 24765972
  misc_feature (16)..(84): Pfam Name: UQ_con PFAM Desc: Ubiquitin
  misc_feature: Homolog of GI Number: 50918253 NR Desc: putative DNA
  misc_feature: Homolog of GI Number: 71040677 NR Desc: ubiquitin
  misc_feature: Homolog of GI Number: 20259984 NR Desc: similar to DNA binding protein
  misc_feature: Homolog of GI Number: 21593918 NR Desc: E2
  misc_feature: Homolog of GI Number: 30693656 NR Desc: ubiquitin
  misc_feature: Homolog of GI Number: 78191460 NR Desc: ubiquitin
  misc_feature: Homolog of GI Number: 46577794 NR Desc: ubiquitin
  misc_feature: Homolog of GI Number: 75755857 NR Desc: TO38
  misc_feature: Homolog of GI Number: 50725506 NR Desc: putative ubiquitin
  misc_feature: Homolog of GI Number: 25326240 NR Desc: protein F26F24.10
MGSEGSAPVVVPRNFRLLEELERGEKGIGDGTVSYGMDDADDIYMRSWTGTIIGPPNTVHEGRIYQLKLFCDTDYPDKPPTVRFQARVNMTCVNQETGMVDPRRFPMLGNWKREHTMEDILISLKKEMSTPQNRRLHQPHEGNDDQRVEQKGLAARCVVM

SEQ ID NO: 2745 - DNA, 1276 bp, Triticum aestivum
  misc_feature: Ceres CLONE ID no. 677418
  misc_feature: Ceres CDNA ID no. 24765973
  CDS (159)..(1058): REFERENCED BY SEQ ID NO: 2746
aaatccggcagcgccgcgtgtgcgaagacgagtccaaacacggaacaaagccggcgattagcggcacactgagctggcatcttgtgcttctccgtccgtccgcgtccacaccggagctaggaggagaggagggggaagaagaaggcgtcgaggaggcgatggcgacggagtcgccgttccgggcggacgtgctgaagggcaaggcggcgctggtcaccggcggcggctccggcatctgcttcgagatcgccgcccagctcgcccgccacggcgcccacgtcgccatcatgggccgccgccgcgaggtcctcgacaaggccgtcgccgccctccgctccgagggccttcgggctgttggatttcagggagatgtacgtaaccaggaggatgcagcgagagtgcttgcgtcgaccgttgagcatttcggcaagcttgacattcttgtcaacggtgcagcgggcaacttccttgcatccccggaggatctcacacccaagggattccggacagttcttgagattgacactgtgggtacatacacaatgtgctacgaagccctgaagtatctgaaaaaaggtgggccagggaggggtccctccactggtggcctcatcattaacataagcgcgacactgcattacactgcttcttggtaccaaattcatgtctccgccgctaaggcaggtgttgatagtatcacaagaacgctggctctggaatggggaacagattatgaaattagggtcaatggaattgcaccaggaccaatcggaggcactccaggtctgaggaagcttgcacctgatgaaatgggcaaggggaaaagggaaatgatgcctttatttaagttgggggagacacaggacatagcaatggccgcgctctatcttgcttccgatgctggcaaatatgtaaatgggactacgctggtggttgatggagggctttggttgagtcaccctcgccacatccccaaggaggaagtgaaggagctctcaaaggtgatcgagaagaaggttagggcctctggtgtaggtgtaccctccagcaaattgtgatgacatccttggtttatgtcactgtctcacacatgtcatgtaccaccaccctcagtatttgctgtcagcggctcagcaccaactttattgtgtacgtggatcttgtaacctgctgagaacaattggtttcaaatgagcaacttcagtattttaaaaaaaaaaaaaaaaaaaaaaaaaaaaaaaaaaaaaaaaaaaaaaaaagaaaaaaaaaaaaaaaa

SEQ ID NO: 2746 - protein, 299 aa, Triticum aestivum
  misc_feature: Ceres CLONE ID no. 677418
  misc_feature: Ceres CDNA ID no. 24765973
  misc_feature (167)..(189): Pfam Name: adh_short PFAM Desc: short chain dehydrogenase
  misc_feature: Homolog of GI Number: 66782530 NR Desc: Short
  misc_feature: Homolog of GI Number: 15805153 NR Desc: oxidoreductase
  misc_feature: Homolog of GI Number: 49257991 NR Desc: MGC82265 protein
  misc_feature: Homolog of GI Number: 39795780 NR Desc: LOC394884 protein
  misc_feature: Homolog of GI Number: 6753622 NR Desc: 2
  misc_feature: Homolog of GI Number: 47086965 NR Desc: zgc:85626
  misc_feature: Homolog of GI Number: 50755383 NR Desc:  similar to Eferin
  misc_feature: Homolog of GI Number: 15220465 NR Desc: 2
  misc_feature: Homolog of GI Number: 37934198 NR Desc: 2
  misc_feature: Homolog of GI Number: 56554356 NR Desc: Chain D
MATESPFRADVLKGKAALVTGGGSGICFEIAAQLARHGAHVAIMGRRREVLDKAVAALRSEGLRAVGFQGDVRNQEDAARVLASTVEHFGKLDILVNGAAGNFLASPEDLTPKGFRTVLEIDTVGTYTMCYEALKYLKKGGPGRGPSTGGLIINISATLHYTASWYQIHVSAAKAGVDSITRTLALEWGTDYEIRVNGIAPGPIGGTPGLRKLAPDEMGKGKREMMPLFKLGETQDIAMAALYLASDAGKYVNGTTLVVDGGLWLSHPRHIPKEEVKELSKVIEKKVRASGVGVPSSKL

SEQ ID NO: 2747 - DNA, 1333 bp, Triticum aestivum
  misc_feature: Ceres CLONE ID no. 677531
  misc_feature: Ceres CDNA ID no. 24765974
  CDS (95)..(1027): REFERENCED BY SEQ ID NO: 2748
ccacccagccttcctcctctccacaccgcaggctccagggaaagggaagacctcgcctcgccttgctgccgccgaagccaccagcggagggagcatgaaggtctccgtcgtgtcccggagcggccgcgaggtcgtcaagggcggcatcgagctcaaggactcggccaaggtcgcggatctgcaggaggccatccacgccaagactaagaagtattatcctgccaggcaacggctcaccctccctgcacaacctggaaaatctggaaagccagttgtcctcaatcaaaaggccagcctatcggaatactgcgagaaaggttccggttccctgacagtggtcttcaaagatttgggcccacaggtctactacagcacgctcttcttctgggaatacgtcggccctcttatcatgtaccccatcttctattacctgcctgtctacaaatactttggatatgagggagagcgggtcatccaccctgtccagacctatgccatgtactacttctgcttccactacttcaagaggatcatggagaccttcttcgtccaccgcttcagccacgcaacttcccccgtgtcaaacgtcttcaggaactgcgcctactactggacctttggagcctacattgcctactactgcaaccacccgctttacacccccgtgagtgacctgcagatgaagattgggttcggcatcggggtcgtgtgccagatcgcaaacttctactgccacatcctgctgaggaacctcaggagcccgaccggcagcggcggctaccagatcccacggggtttcctgttcaacattgtgacatgcgcaaactacaccaccgagatctaccaatggctggggttcaacatcgccacacagaccgtggcgggctacgtcttcctcgctgtggccgctgctatcatgaccaactgggcgctcggaaagcacagccgcctgaggaagctcttcgacggtaaggacgggcggcccaagtacccccgccgatgggtgattcttcctccattcctgtgaagaagtcacggtgctcgcaaggcctgcatctggagattcaacatttattctgttccagcgttccaaagttaaaagccatcagtcgatttcactcaaacattcctactaatcgtgccttgtaccagctgtcaaacctcaattatgtagtccaaatgttcttatccaaaggatgtattttcttactccatattgttgaaaaactttctctggggtttatttacgccacaccgcgacgtgttgtcatagtcaagtccaacactaagatgattcatcaaaaaaaaaaaaaaaaaaaaaaaaaaaaaaaaa

SEQ ID NO: 2748 - protein, 310 aa, Triticum aestivum
  misc_feature: Ceres CLONE ID no. 677531
  misc_feature: Ceres CDNA ID no. 24765974
  misc_feature (158)..(310): Pfam Name: Steroid_dh PFAM Desc: 3
  misc_feature: Homolog of GI Number: 62866633 NR Desc: TSC13 protein
  misc_feature: Homolog of GI Number: 34895848 NR Desc: putative glycoprotein
  misc_feature: Homolog of GI Number: 25004880 NR Desc: steroid 5
  misc_feature: Homolog of GI Number: 21594270 NR Desc: synaptic glycoprotein SC2
  misc_feature: Homolog of GI Number: 30585427 NR Desc: Homo sapiens glycoprotein
  misc_feature: Homolog of GI Number: 73986266 NR Desc:  similar to Synaptic glycoprotein SC2 isoform 2
  misc_feature: Homolog of GI Number: 19924091 NR Desc: glycoprotein
  misc_feature: Useful for making ornamental plants with modified flowers
  misc_feature: Useful for modifying plant structure
  misc_feature: Useful for sterility
MKVSVVSRSGREVVKGGIELKDSAKVADLQEAIHAKTKKYYPARQRLTLPAQPGKSGKPVVLNQKASLSEYCEKGSGSLTVVFKDLGPQVYYSTLFFWEYVGPLIMYPIFYYLPVYKYFGYEGERVIHPVQTYAMYYFCFHYFKRIMETFFVHRFSHATSPVSNVFRNCAYYWTFGAYIAYYCNHPLYTPVSDLQMKIGFGIGVVCQIANFYCHILLRNLRSPTGSGGYQIPRGFLFNIVTCANYTTEIYQWLGFNIATQTVAGYVFLAVAAAIMTNWALGKHSRLRKLFDGKDGRPKYPRRWVILPPFL

SEQ ID NO: 2749 - DNA, 1010 bp, Triticum aestivum
  misc_feature: Ceres CLONE ID no. 677612
  misc_feature: Ceres CDNA ID no. 40351163
  CDS (473)..(880): REFERENCED BY SEQ ID NO: 2750
accgacaggaatcgagcctcccaggaaggcaggaaacgcaggctagggttggccgccgcccgccgcccgcgccggcgaacctccaccctccgcccagaatttgcagctcaaccaaacgcagcctcagtccgtgtgagagaggagcccctcccgtcgatctcacagccgcgcgaagcctctcgccggccgccgccgcgctccctcttgcaccgctttcccgtcgagatcgccaccgcctccccgtatcgcgtgacgctaccacagcccccgctttctccgtggagctctgatccaccaagtccataattcacaaattggtgaagtccacataatggagcccaaaagccgctgacactaggacgcctcccagaccccttccacctccgaagccgccctcctggtggatcagtgacacagctgctagataaggcttttgagggattctagctgcagaagaaacctggtgggtgatatgagcggcgaggcaggcaataggaaggaggaagctaggaagacaggtttggagggcaccggactgccccttccaggtggctcccatggcagcgtgcgatgcgctggcagcgacccgcagttgagacacatgcttgattccctcaaatcctccaaggcttctgctgtgatcaactatggggcctcatggtgcggtgtttgcaatcagattcttccacccttctgcaaattcagcaacgaattcaagaatcttactttcgtctatgcccatgttgatgagtgccctgaaacaactcagaacatacgatacactccgaccttccatttctaccgggatggagaaagggtagatgagatgtttggtgcaggggaagagaggctacgggatcggttgtggttgcattcgtgatttctaggctttggcttgcagtgatgctgttttcatgtacttagttatgcactgtacctcggatttatccttttctgaaaagtcttgtttgacgtggaaaggaagggcaatgctaaaaaaaaaaaaaaaa

SEQ ID NO: 2750 - protein, 135 aa, Triticum aestivum
  misc_feature: Ceres CLONE ID no. 677612
  misc_feature: Ceres CDNA ID no. 40351163
  misc_feature (61)..(131): Pfam Name: Thioredoxin PFAM Desc: Thioredoxin
MSGEAGNRKEEARKTGLEGTGLPLPGGSHGSVRCAGSDPQLRHMLDSLKSSKASAVINYGASWCGVCNQILPPFCKFSNEFKNLTFVYAHVDECPETTQNIRYTPTFHFYRDGERVDEMFGAGEERLRDRLWLHS

SEQ ID NO: 2751 - DNA, 1413 bp, Triticum aestivum
  misc_feature: Ceres CLONE ID no. 677724
  misc_feature: Ceres CDNA ID no. 24766303
  CDS (135)..(1199): REFERENCED BY SEQ ID NO: 2752
acacaaaattccgttcagcgcgtgcagtagagagctccccgcttctcctcatcctcctccccaactccaatactctccacagaaatctccgctccttctcgtcccctctcgctcgcgtgcgcgtgaggtgcgcaatggcggcggcggcggtggcgttgtcgaacggctccggtggcgactccaaggccgagttcgcggaaatatacagcaggctcaaggaggagatgctcgaggaccccgccttcgagttcaccgacgagtcgctccagtggatcgaccgcatgctggattacaatgtcctaggaggaaagtgcaaccgtgggctctctgtcatcgatagctacaagacattgaaaggtgtagatgttttgaggaaggaggagacatttcttgcctgcacccttggttggtgtattgaatggcttcaagcatattttcttgtgcttgatgatatcatggacaactcccagacacgacggggccagccttgctggtttagggtgcctcaggttggccttattgctgtaaacgatgggattatccttcgcaaccatatttcacggatccttcaacgccacttcagaggaaaaccgtattatgttgatctcattgatttgttcaatgaggttgaattcaagacagcttcagggcagttgttggatcttatcactactcacgagggagaaaaggatctcacaaaatataacttgaatgttcaccggcgcattgtgcaatacaagacagcgtactattcattttatcttccggttgcatgtgcattgctgctgtcgggtgagaatttggataacttcggcgatgtaaagaacattcttgttgaaatgggaacatactttcaagttcaggatgattatctagattgttttggagatcctgaatctattggcaagattggaactgacattgaagactacaagtgttcctggttagttgtgcaagctcttgagcatgcagatgagagccaaaagggcattctacttgaaaattatgggaagtcagatccagagtctgttgcaaaagtgaaggatctgtataaagaacttgatctggagacggcatttcacaagtatgagcgggagagctacaataagctgatcgccgacatcgaggcccagccaagcaaagctgttcagaaagttttgatgtctttcctggagaagatctacaagaggcagaagtagagctaagctcttggagaggttgttgtgcctttccgtgctttggtaacttattccatgttctgtgtgtgttggtcttattaccataatgtacagcgtgttattccttccaacaataaactacggtgctattttttagtggtgcgtgaacctgctgtgccataaccatgttatttgaagctctctaatgtttttctagacaaaaaaaaaaaaaaaa

SEQ ID NO: 2752 - protein, 354 aa, Triticum aestivum
  misc_feature: Ceres CLONE ID no. 677724
  misc_feature: Ceres CDNA ID no. 24766303
  misc_feature: null
  misc_feature: Useful for making plants with modulated salt sensitivity
  misc_feature (46)..(317): Pfam Name: polyprenyl_synt PFAM Desc: Polyprenyl synthetase
  misc_feature: Homolog of GI Number: 34013692 NR Desc: farnesyl diphosphate synthase
  misc_feature: Homolog of GI Number: 1532052 NR Desc: farnesyl diphosphate synthase
  misc_feature: Homolog of GI Number: 1532050 NR Desc: farnesyl diphosphate synthase
  misc_feature: Homolog of GI Number: 62199628 NR Desc: farnesyl diphosphate synthase
  misc_feature: Homolog of GI Number: 1146159 NR Desc: farnesyl diphosphate synthase short form
  misc_feature: Homolog of GI Number: 18958450 NR Desc: farnesyl pyrophosphare synthase
  misc_feature: Homolog of GI Number: 33340602 NR Desc: geranylgeranyl
  misc_feature: Homolog of GI Number: 17104795 NR Desc: putative farnesyl diphosphate synthase precursor
  misc_feature: Homolog of GI Number: 52353430 NR Desc: putative farnesyl pyrophosphate synthase
  misc_feature: Homolog of GI Number: 4680193 NR Desc: putative farnesyl pyrophosphate synthase
MAAAAVALSNGSGGDSKAEFAEIYSRLKEEMLEDPAFEFTDESLQWIDRMLDYNVLGGKCNRGLSVIDSYKTLKGVDVLRKEETFLACTLGWCIEWLQAYFLVLDDIMDNSQTRRGQPCWFRVPQVGLIAVNDGIILRNHISRILQRHFRGKPYYVDLIDLFNEVEFKTASGQLLDLITTHEGEKDLTKYNLNVHRRIVQYKTAYYSFYLPVACALLLSGENLDNFGDVKNILVEMGTYFQVQDDYLDCFGDPESIGKIGTDIEDYKCSWLVVQALEHADESQKGILLENYGKSDPESVAKVKDLYKELDLETAFHKYERESYNKLIADIEAQPSKAVQKVLMSFLEKIYKRQK

SEQ ID NO: 2753 - DNA, 1675 bp, Triticum aestivum
  misc_feature: Ceres CLONE ID no. 677824
  misc_feature: Ceres CDNA ID no. 24766304
  CDS (160)..(1398): REFERENCED BY SEQ ID NO: 2754
ctcccccctacgcacctcttgccaccgccgcagcacatccccgaaagctaggtttttatcactccacctatcatcatcgcctcggcggccgcacaacccaccctccccctcgaagccccgatctccttcacttctcctctccgtgccagatcgttgtttatgagctcgaaggagaagcccaccctcggaggccagcggattaagacccgcaagcggaatatcgcagctcctttggacccttcgtcgttctctgatgcaattgtccagatttatctggataatgctggagacctggaacttgttgccaaaagtatagagtcatcagatctcaacttctcacgttacggtgacactttctttgaggttgttttcattggtgtgcgtactcagcctggtacgattaaacccgaagaagagggagagcgccacccctattctctcattgactgtgcagcacaacgtgaagcaatattaccttatgtcctctttattcagaaaacactgcgcaggaggcctttcttaataaagagtcttgaaaatgttatgcgaaaatttctccagtctttggagttctttgaagaaaatgagagacaaaaacttgccattttcacggcacttgcattttctcagaaattatcaggtctgccacctgaaactgtctttcagccattgcttaaggacaatcttgttgccaaagggatagtgctttcattcattactgagttcttcaaggaatatctgaaggaaaatagtttggatgatctgattgcacttttaaagaaaggcaaaatggaggacaatttacttgaattttttccatcaggaaagagaacctctgaggctttgtctgagcatttcaccaaagaaggtttgactagccttgttgagtacaatagcaagaaaatgtttgaagttaagctcaaggagataaagtcaactctgaccactatgatcaatgaagaagctgaaatatctgaagtaactgaggttgtcaagcaacaggttaaagatgctaaatttcctgatatagaggttgttcgcatgctgtgggatgtgctgatggaggctgttcagtggtctggaaagaaccagcagcaaaattctaattcagcacttaggcaggtgaatgcttgggctggtcttatgaatgcattttgcacaagtggaaagctagaactggaactcatatacaaggtccagacacaatgttatgaggatgctaagttgatgaagctgttccctgaaattataagatcactgtatgatcaagatgtcctagctgaagataccatacttctttggttccgcaagggttcaaaccaaaaaggaaggcaatctttcgtgaaagctctggagcctttcgtcaaatggcttgaggaggcagaggaggaagaataaagaggcacggttgttgctttaaaatgagtatttccttataccccatgtttgcggagacggtggtcatccttttgctgcttattactgaacaaacattttatattcagatgtgagcattgctgtcatctgctatcattttcgacattattgtaccaggatttggaaggatcgttacctactttgtgttgtgtattagttgttacatggatatttatgcagagtgcacgtttaagaagaggcaaactcaagtttataactgccaaaaaaaaaaaaaaaa

SEQ ID NO: 2754 - protein, 412 aa, Triticum aestivum
  misc_feature: Ceres CLONE ID no. 677824
  misc_feature: Ceres CDNA ID no. 24766304
  misc_feature (336)..(412): Pfam Name: W2 PFAM Desc: eIF4
  misc_feature: Homolog of GI Number: 50732565 NR Desc:  similar to basic leucine zipper and W2 domains 2
  misc_feature: Homolog of GI Number: 54639272 NR Desc: GA15521
  misc_feature: Homolog of GI Number: 31981160 NR Desc: basic leucine zipper and W2 domains 2
  misc_feature: Homolog of GI Number: 68358828 NR Desc:  similar to basic leucine zipper and W2 domains 1
  misc_feature: Homolog of GI Number: 40789056 NR Desc: KIAA0005
  misc_feature: Homolog of GI Number: 74005117 NR Desc:  similar to basic leucine zipper and W2 domains 1 isoform 3
  misc_feature: Homolog of GI Number: 31207145 NR Desc: ENSANGP00000024471
  misc_feature: Homolog of GI Number: 72046292 NR Desc:  similar to basic leucine zipper and W2 domains 1
  misc_feature: Homolog of GI Number: 61843777 NR Desc:  similar to basic leucine zipper and W2 domains 2
MSSKEKPTLGGQRIKTRKRNIAAPLDPSSFSDAIVQIYLDNAGDLELVAKSIESSDLNFSRYGDTFFEVVFIGVRTQPGTIKPEEEGERHPYSLIDCAAQREAILPYVLFIQKTLRRRPFLIKSLENVMRKFLQSLEFFEENERQKLAIFTALAFSQKLSGLPPETVFQPLLKDNLVAKGIVLSFITEFFKEYLKENSLDDLIALLKKGKMEDNLLEFFPSGKRTSEALSEHFTKEGLTSLVEYNSKKMFEVKLKEIKSTLTTMINEEAEISEVTEVVKQQVKDAKFPDIEVVRMLWDVLMEAVQWSGKNQQQNSNSALRQVNAWAGLMNAFCTSGKLELELIYKVQTQCYEDAKLMKLFPEIIRSLYDQDVLAEDTILLWFRKGSNQKGRQSFVKALEPFVKWLEEAEEEE

SEQ ID NO: 2755 - DNA, 889 bp, Triticum aestivum
  misc_feature: Ceres CLONE ID no. 677886
  misc_feature: Ceres CDNA ID no. 25445605
  CDS (110)..(676): REFERENCED BY SEQ ID NO: 2756
agtggaagatttgatcatcgcgttccaggagagcagagcgggctgagcgattcggatcgctctccaccttccgccgccgtcccccttcctccccccgatccccaatccaatggtgctggtcctagcgctgggggatctgcacatcccgcaccgtgcgcccgacctgcccgccaagttcaagtccatgctcgtcccgggcaagatccagcacatcatctgcaccgggaacctctgcatcaaggaagttcacgactaccttaaaagcctctgtcctgatctccacattaccagaggtgaatatgatgaggatgctcgctacccagagactaaaacagttactattggtcagttcaagctagggctatgccatggccatcaggttgttccatggggcgacctggactccctagcgatgctccagaggcagctggatgtggacatcctcgtcaccgggcacacccatcagttcaaggcctacaagcacgaggggggtgtcgtcatcaaccctggctcaggcacgggcgcccacagcagcatcacatatgacgtcaacccgagctttgtgctcatggacatcgatggcctccgtgttgttgtctacgtgtacgagctcattgacggcgaggtgaaggttgaccagatcgacttcaagaagaccgccacgatgcatggctgatggtgcttacgcatgacagaaatctgatcctgtttgttcttaccccccacccccactccacaccacaccaccaccaccacaatttccccgacctggagctctttttcctttgtacccttctgctcgatatgaaaaactagagctgtgtatacatattagtgaatgggatatgcgtgatatgattccaactcgctcacaaaaaaaaaaaaaaaa

SEQ ID NO: 2756 - protein, 188 aa, Triticum aestivum
  misc_feature: Ceres CLONE ID no. 677886
  misc_feature: Ceres CDNA ID no. 25445605
  misc_feature (2)..(120): Pfam Name: Metallophos PFAM Desc: Calcineurin
  misc_feature: Homolog of GI Number: 50251955 NR Desc: putative vacuolar protein sorting
  misc_feature: Homolog of GI Number: 72145926 NR Desc:  similar to Vacuolar protein sorting 29
  misc_feature: Homolog of GI Number: 42572607 NR Desc: calcineurin
  misc_feature: Homolog of GI Number: 41053315 NR Desc: vacuolar protein sorting 29
  misc_feature: Homolog of GI Number: 68396831 NR Desc:  similar to vacuolar protein sorting 29 isoform 1
  misc_feature: Homolog of GI Number: 9790285 NR Desc: vacuolar protein sorting 29
  misc_feature: Homolog of GI Number: 71042155 NR Desc: Chain B
  misc_feature: Homolog of GI Number: 7706441 NR Desc: vacuolar protein sorting 29 isoform 1
  misc_feature: Homolog of GI Number: 17402912 NR Desc: vacuolar protein sorting 29 isoform 2
  misc_feature: Homolog of GI Number: 11359333 NR Desc: vacuolar sorting protein Vps29 homolog
MVLVLALGDLHIPHRAPDLPAKFKSMLVPGKIQHIICTGNLCIKEVHDYLKSLCPDLHITRGEYDEDARYPETKTVTIGQFKLGLCHGHQVVPWGDLDSLAMLQRQLDVDILVTGHTHQFKAYKHEGGVVINPGSGTGAHSSITYDVNPSFVLMDIDGLRVVVYVYELIDGEVKVDQIDFKKTATMHG

SEQ ID NO: 2757 - DNA, 808 bp, Triticum aestivum
  misc_feature: Ceres CLONE ID no. 677910
  misc_feature: Ceres CDNA ID no. 40351164
  CDS (123)..(572): REFERENCED BY SEQ ID NO: 2758
cctaacgcctccacgctatataatcgttctctcgccgccgtgatcccctctacgcgccgccacccaaaaccctaacctgtgccgccgcgctcacagcaaccaagcacaccgccgcagccaccatggcagccgttctcacccgcccgacgccaggcaccgtccagtgcttcggccggaagaagaccgccgtcgccgttgcctactgcaagcccgggcgcggcctcatcaaggtcaacggcgcgccgatcgagctcatccgccccgagatgctccgcctgaaggccttcgagccgatcctgctcgccggcaggtcccgcttcaaggacatcgacatgcgcatccgcgttcgcggcggcgggaagacgagccagatctactccatccgccaggccatcgccaagtctctcgtcgcctactaccagaagtacgtcgacgaggcggccaagaaggaggtgaaggagatcttcggccgctacgaccggacgctcctcgtcgccgacccgcgccgttgcgaacccaaaaagtttggcggtcgcggtgcccgagcgcgtttccagaagtcgtaccgttgagctccggcgagatctcttgttgggtatggcggcggtggcctactgcttgcctgcctatctatctaccttttaccgctagtagtttgttttcttttggaccaatgaattggatatgatctcgaagaactatgagttgtctgcagtatcatgcctagttgacgaaggggttttgttatcataatcttatgttaatgatgaaactgaatgttctgtttgaaacaaaaaaaaaaaaaaaa

SEQ ID NO: 2758 - protein, 149 aa, Triticum aestivum
  misc_feature: Ceres CLONE ID no. 677910
  misc_feature: Ceres CDNA ID no. 40351164
  misc_feature (17)..(149): Pfam Name: Ribosomal_S9 PFAM Desc: Ribosomal protein S9/S16
MAAVLTRPTPGTVQCFGRKKTAVAVAYCKPGRGLIKVNGAPIELIRPEMLRLKAFEPILLAGRSRFKDIDMRIRVRGGGKTSQIYSIRQAIAKSLVAYYQKYVDEAAKKEVKEIFGRYDRTLLVADPRRCEPKKFGGRGARARFQKSYR

SEQ ID NO: 2759 - DNA, 1280 bp, Triticum aestivum
  misc_feature: Ceres CLONE ID no. 678080
  misc_feature: Ceres CDNA ID no. 24766305
  CDS (86)..(1069): REFERENCED BY SEQ ID NO: 2760
ggagcagtggcctgcagacgcggagctaccgagagccggaggacggaagcaagtgagctgagcgcaggcggaggcggacgcgacgatgagggcggtggcgatcgcgagccccggcgggccggaggcgctgcaggtgcgcgaggtggaggacctcccggcgccgggggagggcgaggtgctcgtcgcggtggccgccgccggcgtcaaccgcgccgacacggtccagcggcagggccggtacccgccgccgccgggcgcctccccctacccgggcctcgagtgctccggcaccatcctcgcgctcggggccaacgtgcccccgcgctgggccgtcggcgaccaggtgtgcgcgctgctctccggtggcgggtatgcggagaaggtggtggtgccggcggggcagctgctcccggtcccggagggggtgtcgctggccgacgccgccggcttgcccgaggtggcctgcaccgtctggtccaccgtcttcatgaccagccacctctcccccggcgaatccttccttatccatggcggatcgagtggaattggtacattcgctatacagattgcgaagcaccttggtgttaaggtttttgttactgcaggaagtgaagaaaaactagcagcctgcaaaggtttgggagcggatgtatgtataaactacaaaactgaagattttgtagcacgcgtaaaagaagaaacaaatggaaagggtgttgatgtcattctggacaatatcggcgggtcttatctccagcgcaatctgaacagcctagctgttgatggtagactcttcatcatcggtttcatgggaggcactacaactgaagtgaaccttcaggcgatgcttgcccgaagactgaccatacaagctgctggactgcggaacagaagcctcgctaacaaagcccagatcgtcagcgaggtggagaagaatgtgtggcctgccgtcgcgtcgggcaaggtgaagccggtgatttacaagacattccctctatccgaagcagctgaatctcacaagttgatggagacgagctcccacattggcaagatactgctgattccatgatggggtatggtgtatcatgtattcatgtgtacactagccgatgtgggcactgttttctgtagtgaactatgcatggacatgcccttttatattgtaataagctggatctctaagtgctggtgaaattggatatgtatcttgaggataaatagtcacaataaaatgttggaacttggaagtcttgttctttcatctaaaaaaaaaaaaaaaa

SEQ ID NO: 2760 - protein, 327 aa, Triticum aestivum
  misc_feature: Ceres CLONE ID no. 678080
  misc_feature: Ceres CDNA ID no. 24766305
  misc_feature (141)..(283): Pfam Name: ADH_zinc_N PFAM Desc: Zinc
  misc_feature: Homolog of GI Number: 15451578 NR Desc: Putative quinone oxidoreductase
  misc_feature: Homolog of GI Number: 76160992 NR Desc: NADPH quinone oxidoreductase
  misc_feature: Homolog of GI Number: 21593811 NR Desc: putative NADPH quinone oxidoreductase
  misc_feature: Homolog of GI Number: 79325213 NR Desc: oxidoreductase/ zinc ion binding
  misc_feature: Homolog of GI Number: 21222233 NR Desc: putative quinone oxidoreductase
  misc_feature: Homolog of GI Number: 48835162 NR Desc: COG0604: NADPH:quinone reductase and related Zn
  misc_feature: Homolog of GI Number: 29830911 NR Desc: putative quinone oxidoreductase
  misc_feature: Homolog of GI Number: 72160476 NR Desc: putative quinone oxidoreductase
  misc_feature: Homolog of GI Number: 71366872 NR Desc: Zinc
  misc_feature: Homolog of GI Number: 67987324 NR Desc: Zinc
MRAVAIASPGGPEALQVREVEDLPAPGEGEVLVAVAAAGVNRADTVQRQGRYPPPPGASPYPGLECSGTILALGANVPPRWAVGDQVCALLSGGGYAEKVVVPAGQLLPVPEGVSLADAAGLPEVACTVWSTVFMTSHLSPGESFLIHGGSSGIGTFAIQIAKHLGVKVFVTAGSEEKLAACKGLGADVCINYKTEDFVARVKEETNGKGVDVILDNIGGSYLQRNLNSLAVDGRLFIIGFMGGTTTEVNLQAMLARRLTIQAAGLRNRSLANKAQIVSEVEKNVWPAVASGKVKPVIYKTFPLSEAAESHKLMETSSHIGKILLIP

SEQ ID NO: 2761 - DNA, 1016 bp, Triticum aestivum
  misc_feature: Ceres CLONE ID no. 678214
  misc_feature: Ceres CDNA ID no. 24767019
  CDS (100)..(714): REFERENCED BY SEQ ID NO: 2762
aggacatcaagcacctgagctccacatcgatcagtacccacagccactccactctcagctcagggactcggtgtcagggcgacccaagacagaagaatcatgggatccgtgacggcgtcgacgatggcacagcccaccctccgcgtggccgccttctgcggctccctccgcaaggactcatggcaccgcggcctcatccgcgccgccgaggagctgtgcgaggagtccatcccggggctgcgcatcgaccacgtggacatctccggcctgcccatggtcaacccggacctggagaccgacggcggcgagggcttcccgccggccgtcgaggcgctccgcgagagggtccgcgccgccgactgcttcctcttcgcctcgcccgagtacaactactcggtcaccgcctccctgaagaacgcgctggactgggcgtccaggggcaagcgcaactgctgggcggacagggcggcggcgatcgtgtgcgcggggggcgacttcggcggggccagggcgtcgctccacctccgccagatcggggtgttcctcgacctccacttcatcaacaagccggagctccacatcagggcgttcgcggacccgcccaagttcgacgaggagggcaacctcatcgacgccgtgaccagggagcggctcaagaaggttctcctctcgctccaggccttcgcgctcaggctcaaacacaaggacgagtgactgactcaagatcaacgatactacttggcagttggcaccgtataccgtacctgctggttaatttgcattgcattttccttcagctccgtgcactagtattcgtggttccgtgaaatcccctaggaagtgtgtgctactttgtctaataaatcgccgaagaattgttctgtactgtttaacgtgtggaagcttatgtgttttaccgttgctactagaacgcgagcgcgcaccacgcccgtctatgttgagaaaacaaaagaaaattattgaagaaattgatattgtcaaaaaaaaaaaaaaaa

SEQ ID NO: 2762 - protein, 204 aa, Triticum aestivum
  misc_feature: Ceres CLONE ID no. 678214
  misc_feature: Ceres CDNA ID no. 24767019
  misc_feature (14)..(187): Pfam Name: FMN_red PFAM Desc: NADPH
  misc_feature: Homolog of GI Number: 34906648 NR Desc: putative NADPH:quinone oxidoreductase
  misc_feature: Homolog of GI Number: 34906652 NR Desc: putative NADPH:quinone oxidoreductase
  misc_feature: Homolog of GI Number: 24745889 NR Desc: NAD
  misc_feature: Homolog of GI Number: 11994494 NR Desc: NADPH:quinone oxidoreductase
  misc_feature: Homolog of GI Number: 5002232 NR Desc: NADPH:quinone oxidoreductase
  misc_feature: Homolog of GI Number: 49081686 NR Desc: PA1204
  misc_feature: Homolog of GI Number: 32041222 NR Desc: COG0431: Predicted flavoprotein
  misc_feature: Homolog of GI Number: 52696278 NR Desc: Chain B
  misc_feature: Homolog of GI Number: 46140721 NR Desc: COG0431: Predicted flavoprotein
  misc_feature: Homolog of GI Number: 23128047 NR Desc: COG0431: Predicted flavoprotein
MGSVTASTMAQPTLRVAAFCGSLRKDSWHRGLIRAAEELCEESIPGLRIDHVDISGLPMVNPDLETDGGEGFPPAVEALRERVRAADCFLFASPEYNYSVTASLKNALDWASRGKRNCWADRAAAIVCAGGDFGGARASLHLRQIGVFLDLHFINKPELHIRAFADPPKFDEEGNLIDAVTRERLKKVLLSLQAFALRLKHKDE

SEQ ID NO: 2763 - DNA, 525 bp, Triticum aestivum
  misc_feature: Ceres CLONE ID no. 678337
  misc_feature: Ceres CDNA ID no. 36700037
  CDS (13)..(135): REFERENCED BY SEQ ID NO: 2764
caatacttcccaatgattgaggagagcgcaattgggaggtggttttatatcaaggatacttcacatattcaagatgtgctcaagtttgagtatgataatgcaagggcagcaaggaagaaagtcgctactgattgaggattgcaggtttctgctcatggattatattgttggtctatctcagggagggtaagaacttgtgtggcatggcaagatgtttgcttcgctgaagctgcacgcgaacccatgtactcctagctggacttttattagaagagaagcccgttggagttgtggtgttttttcgcttttcctggccataagccattgttctttttaaccccagacccttgtattattttggcgatgagttgattttcgtgtacatttggacaaagaccacagtttttttgtacttgactgaattatatctgtgccatatgtccatatagatggtgtgttttttgtttaaaaaaaaaaaaaaaaaaaaaaaaaaaaaaaaaaaaaaaaccaaaaaaaaaaaaaaaa

SEQ ID NO: 2764 - protein, 40 aa, Triticum aestivum
  misc_feature: Ceres CLONE ID no. 678337
  misc_feature: Ceres CDNA ID no. 36700037
  misc_feature: Homolog of GI Number: 38564298 NR Desc: At5g03080
MIEESAIGRWFYIKDTSHIQDVLKFEYDNARAARKKVATD

SEQ ID NO: 2765 - DNA, 973 bp, Triticum aestivum
  misc_feature: Ceres CLONE ID no. 678495
  misc_feature: Ceres CDNA ID no. 36582475
  CDS (126)..(767): REFERENCED BY SEQ ID NO: 2766
cccgtcctgccctgcccactcccccaaatacaaccaacccctctcgccgtctgctcgcttgcccgtccgtccgtccccccaaatccaaccccctccccgcacgaaccccggcggcgtcaccggcgatggagtgcgtcatcggcgtggtcggccgcgacttcgcggtggtggccgcggacacgtccgccgtgcagagcatcctcgtccacaagacggacgaggacaagatcatgctcctcgactcccacaagctcatgggcgcctccggggagcccggcgaccgcgtgcagttcaccgagttcatccagaagaacctccacctctaccagttccgcaacaacatgccgctcagcaccgccgccaccgccaacttcacccgcggcgagctcgccaccgccctccgcaagaatccctactctgtaaacatcatacttgcagggtttgataaagatgctggtgcatcgatgtactacattgactacatcgcaacgctccacaaaattgacaagggagcattcgggtacgggtcgtacttctgtttgtcgctgatggacaagttgtaccgccctgacatgactgtcgaggaagcggtagaccttgttgacaagtgcatcaaggagatcagactccggctggtcgtcgcgcctcagaatttcgccatcaagatcgtggacaaggatggcgccagggactatgctaggcgtgagataggaggtgacagtcctgcagtcgcaaccgcaaccgcaacaatagcaacaactgcctgaggtgattggcgctgtcggtggtcatttggctggctggaggctgaaccctttctgttaattgtttccaagtactgtcactatgtaatcgcaatacgtttcggttcgagaactgtgttgcaaattctcccagatgtggactagtctgtttatgacccctatttcatggttatatgtttcactgtttcttgccaaaaaaaaaaaaaaaa

SEQ ID NO: 2766 - protein, 213 aa, Triticum aestivum
  misc_feature: Ceres CLONE ID no. 678495
  misc_feature: Ceres CDNA ID no. 36582475
  misc_feature (1)..(182): Pfam Name: Proteasome PFAM Desc: Proteasome A
  misc_feature: Homolog of GI Number: 52548238 NR Desc: 20S proteasome beta 4 subunit
  misc_feature: Homolog of GI Number: 53771821 NR Desc: putative beta 4 proteasome subunit
  misc_feature: Homolog of GI Number: 50917941 NR Desc: 20S proteasome beta 4 subunit
  misc_feature: Homolog of GI Number: 17380213 NR Desc: Proteasome subunit beta type 2
  misc_feature: Homolog of GI Number: 21592467 NR Desc: proteasome chain protein
  misc_feature: Homolog of GI Number: 23505793 NR Desc: At3g22630/F16J14_20
  misc_feature: Homolog of GI Number: 14594929 NR Desc: putative beta4 proteasome subunit
  misc_feature: Homolog of GI Number: 49119183 NR Desc: MGC80364 protein
  misc_feature: Homolog of GI Number: 50540284 NR Desc: zgc:92282
  misc_feature: Homolog of GI Number: 47125243 NR Desc: MGC84496 protein
MECVIGVVGRDFAVVAADTSAVQSILVHKTDEDKIMLLDSHKLMGASGEPGDRVQFTEFIQKNLHLYQFRNNMPLSTAATANFTRGELATALRKNPYSVNIILAGFDKDAGASMYYIDYIATLHKIDKGAFGYGSYFCLSLMDKLYRPDMTVEEAVDLVDKCIKEIRLRLVVAPQNFAIKIVDKDGARDYARREIGGDSPAVATATATIATTA

SEQ ID NO: 2767 - DNA, 1012 bp, Triticum aestivum
  misc_feature: Ceres CLONE ID no. 678740
  misc_feature: Ceres CDNA ID no. 35383252
  CDS (76)..(813): REFERENCED BY SEQ ID NO: 2768
acacgcactacatacaccaccgctccctcctgcaacctccgttgttcagagcagcactagccagagccacaagcaatggcggcgaggagcggcattgtcgtcgtcgcggcggcgctcttggccctggtggcggtgtcgcaggcacaggcgccgggcccctcggcgacgccggccggcccgccgaacgtgacggccatcctggtgaagggcgggcagtacacgaccttcatgcggctgatgaaggagacgcagcaggacacgcagctcaacagccagctcaacaactccttcaacggcaacggctacaccgtgttcgcgcccaccgacaacgccttcaacaacctcaagcccggcacgctcaacagcctcacccagcagcagcaggtgtcgctcgtccaggcccacatcctgccccagtactacaccatggagtccttccagacggccagcaaccccgtccgcacccaggcctccggcgagaaggagcccatcacggtcaacatcgtcgccagcaacaaccaggtcaacgtcaccaccggcctcgtcgaggtcgccgtcaacaacgctctcagcgccgtcaagccgctcgccgtctactcgctcgacaaggtgctcctccccgaagcgctgttcggggccaaggcgccggcgcccgcgcccgccgcctccaaggggggcaagaccaagaagggtgaggccgcctccgggccggccgggtcagacgacgaagcgacgcccacgggcgccgcgggcgccagggccgtcagttggggcgtggctggcatggccgcccttcttggctacctcttgtgagatgggtagcttgggatgatcgcacgacgaccgggacgccatggccatcaatcaatgtgcatagacttgatgggtttccttgtctttggtgtttctttcctttcttccaccctgttcaaattcctttgttccattcttgttcctgccttgtcggcggtttgttaagattgagttatgtgattgaaaaaaaaaaaaaaaa

SEQ ID NO: 2768 - protein, 245 aa, Triticum aestivum
  misc_feature: Ceres CLONE ID no. 678740
  misc_feature: Ceres CDNA ID no. 35383252
  misc_feature (47)..(182): Pfam Name: Fasciclin PFAM Desc: Fasciclin domain
  misc_feature: Homolog of GI Number: 56202243 NR Desc: arabinogalactan protein
  misc_feature: Homolog of GI Number: 34910950 NR Desc: putative arabinogalactan
  misc_feature: Homolog of GI Number: 21553523 NR Desc: arabinogalactan protein
  misc_feature: Homolog of GI Number: 47717925 NR Desc: fasciclin
  misc_feature: Homolog of GI Number: 2129473 NR Desc: arabinogalactan
  misc_feature: Homolog of GI Number: 30841338 NR Desc: arabinogalactan protein
  misc_feature: Homolog of GI Number: 47717917 NR Desc: fasciclin
  misc_feature: Homolog of GI Number: 56784671 NR Desc: endosperm specific protein
  misc_feature: Homolog of GI Number: 67987177 NR Desc: 4Fe
  misc_feature: Useful for delaying flowering time
  misc_feature: Useful for making plants with increased biomass and foliage
MAARSGIVVVAAALLALVAVSQAQAPGPSATPAGPPNVTAILVKGGQYTTFMRLMKETQQDTQLNSQLNNSFNGNGYTVFAPTDNAFNNLKPGTLNSLTQQQQVSLVQAHILPQYYTMESFQTASNPVRTQASGEKEPITVNIVASNNQVNVTTGLVEVAVNNALSAVKPLAVYSLDKVLLPEALFGAKAPAPAPAASKGGKTKKGEAASGPAGSDDEATPTGAAGARAVSWGVAGMAALLGYLL

SEQ ID NO: 2769 - DNA, 726 bp, Triticum aestivum
  misc_feature: Ceres CLONE ID no. 678891
  misc_feature: Ceres CDNA ID no. 36707413
  CDS (84)..(494): REFERENCED BY SEQ ID NO: 2770
actattcgcctttccgcaccctcttccgtcgccgtcgattcgaacctcccccaaatcagcagcagtcgaccggaggcgccgccatggcccgtaccaagcagaccgcccgcaagtccaccggcggcaaggcgccccgtaagcagctcgccaccaaggcggcgaggaagtcggcgccgaccaccggcggagtgaagaagccccaccgctacaggccggggaccgtggcgctccgggagatccgcaagtaccagaagagcacggagctgctgatccgcaagctgcctttccagcgcctggtccgcgagatcgcgcaggacttcaagacggacctccgcttccagtcccacgccgtgctggccctccaggaggcggccgaggcgtacctcgtcgggctgttcgaggacaccaacctgtgcgccatccacgccaagcgcgtcaccatcatgcccaaggacatccagctcgcccgccgcatccgtggcgagagggcctaagctgtcctctccgtgaacgacggtagtggatcgggatgagttgattccggttgtagtttgttcctaattgctgttctaggtcttaagcttttgtgtagaagaaatatggttgttaggtatgagtaagacgaaccaacttgatatgtgatgttccttttggtttgcgatgaagcaaacgtatgtctatgttgaagacctcagaaccattgttgttcgaaaaaaaaaaaaaaaa

SEQ ID NO: 2770 - protein, 136 aa, Triticum aestivum; identical to SEQ ID NO: 30
  misc_feature: Ceres CLONE ID no. 678891
  misc_feature: Ceres CDNA ID no. 36707413
  misc_feature (58)..(134): Pfam Name: Histone PFAM Desc: Core histone H2A/H2B/H3/H4
  misc_feature: Homolog of GI Number: 37991915 NR Desc: histone H3.2 protein
  misc_feature: Homolog of GI Number: 18698662 NR Desc: disease
  misc_feature: Homolog of GI Number: 62642119 NR Desc: histone 3
  misc_feature: Homolog of GI Number: 57098927 NR Desc:  similar to histone protein Hist2h3c1
  misc_feature: Homolog of GI Number: 73808026 NR Desc: histone H3
  misc_feature: Homolog of GI Number: 61840887 NR Desc:  similar to histone 1
  misc_feature: Homolog of GI Number: 55626038 NR Desc:  similar to HIST2H3C protein
  misc_feature: Homolog of GI Number: 50728592 NR Desc:  similar to histone protein Hist2h3c1
  misc_feature: Homolog of GI Number: 34858260 NR Desc: similar to histone protein Hist2h3c1
  misc_feature: Homolog of GI Number: 50729226 NR Desc:  similar to histone protein Hist2h3c1

SEQ ID NO: 2771 - DNA, 716 bp, Zea mays
  misc_feature: Ceres CLONE ID no. 679590
  misc_feature: Ceres CDNA ID no. 36692096
  CDS (111)..(395): REFERENCED BY SEQ ID NO: 2772
accaaaccagcggattaaagaaggctgcgaaggcactagccaggtcagccacgctccccgtaacgaacgacgcagcccaacccgttcccaccaaaccagcggcaccacccatggcttcggcggcggcgagatccggtctccggtcgctggcggtgcgcgccgcccctttgaggcgccgcatgtcctcctccgtccacgacgacgcctatgagacggccaagtgggagaagatcacctacgccgggatcgtgacctgcaccctcctggcggcgtacaacctgtccaagggccacccccacttcgatgagccgccggcatacccctatctgcacatccgcaacaaggagttcccatggggccctgatggcttgtttgagaagaaggaccaccactgagccctgattagcacaccttcaggagctggtggatgcttaaaagagttatatggttgtttcagtgattttccttttcccttgagacctatttgctgcaacaagaaataagaatgaccaaactcttgtattgacagtgaggttttgactgtgttagctgtcttattttctttgccgtccacgtcatatatggtcacctgtaagttggtcttgcccggtgtcaggaaacggcatcacaattatcaaaagctgttgtcatattctgatggcttaagattgcaccctgtgctcgtgataaaaaaaaagaaaaaaaaaaaaaaaaaa

SEQ ID NO: 2772 - protein, 94 aa, Zea mays
  misc_feature: Ceres CLONE ID no. 679590
  misc_feature: Ceres CDNA ID no. 36692096
  misc_feature (26)..(94): Pfam Name: COX6A PFAM Desc: Cytochrome c oxidase subunit VIa
  misc_feature: Homolog of GI Number: 31745230 NR Desc: putative  cytochrome c oxidase subunit VIa precursor
MASAAARSGLRSLAVRAAPLRRRMSSSVHDDAYETAKWEKITYAGIVTCTLLAAYNLSKGHPHFDEPPAYPYLHIRNKEFPWGPDGLFEKKDHH

SEQ ID NO: 2773 - DNA, 929 bp, Zea mays
  misc_feature: Ceres CLONE ID no. 679692
  misc_feature: Ceres CDNA ID no. 40351165
  CDS (275)..(697): REFERENCED BY SEQ ID NO: 2774
aagattcgatctgctgtggctgcctcgaccttgctgcgtgcgcggagatttggtttcttggctggcgcgcgcgggcagttggagctctttgattcaacaggttcagattgcagcggcgagcgactgctctgcggtcgaggctgctgctcgccgggtgattccgtgcccgctcttggtggcggcgggcggtgtcctcgtctgatccgtttcttcgggaggctttggttgatgtgctgggtttcctcggagctcagttccccaattcgccattttgatgaggagctcttcccactgtgagagctactgcgctcctcccctgtgctacctcccctgcctccccaaatccaaagacgttgcagtcggtgacccggagtccgggtccccgagccctgccgctgtcgccgaggacaagccgcccgtggtccagaagatcgaggaatctgtggcggcaaccggcggcgatggcgtcggtgatggtgacaagtgctatcgggaggtggcggtggctcccaagagttgcttgaagagggctaattgcgaggacagcagtaagaatgcggtgaaaggcaatgtgaagtggaaggatttgctggggaaggatctcacgctcacgcaggtcaaggaattcgagccaagcgaatctggagactcagacgacgaagagtacgctggcgcctgcgcctgcgtaatccaatgaggccagggatctttagtgtaaattctgtgaagaaaaaaaatcaaaacaaacaaacagaacgctctcagccagccattagtcctggtcagtagagggtagggagcagctgtgttggtaattggtatgtggatgccatggctcgtgttgtgttctgtcagcagcttcaactgtaaaatgttgttacaaatgcatagctttagaagatattattatcaaaaaaaaaaaaaaaaaa

SEQ ID NO: 2774 - protein, 140 aa, Zea mays
  misc_feature: Ceres CLONE ID no. 679692
  misc_feature: Ceres CDNA ID no. 40351165
MRSSSHCESYCAPPLCYLPCLPKSKDVAVGDPESGSPSPAAVAEDKPPVVQKIEESVAATGGDGVGDGDKCYREVAVAPKSCLKRANCEDSSKNAVKGNVKWKDLLGKDLTLTQVKEFEPSESGDSDDEEYAGACACVIQ

SEQ ID NO: 2775 - DNA, 462 bp, Glycine max
  misc_feature: Ceres CLONE ID no. 680153
  misc_feature: Ceres CDNA ID no. 25445719
  CDS (94)..(327): REFERENCED BY SEQ ID NO: 2776
attggttaccttttgttgtcttctctgattccaccgtccacggcgccaccgccaccgccatctacttttcgtttttgctcctttcttagggaaatgggattgtggaccttacttgaggggttcctgcttcttgcaaacgcactagcaatactaaacgaggaccgctttctcacacctagaggatggggcttatcagatttctcagctggacagacaaaatctttcaaaggccagcttataggtctcatttatgcaactcagtacctaagatttcctcttttacttctcaactctgtcttcattatcgtgaagttagtttctggatgatgcctgacaaggtgagaaatcaatacatatgtatgctttagacacgtatctagtgcattgccattgttattattttcagatgctaaattttactttaatcataacaatatctgttgttcaaaaaaaaaaaaaaaa

SEQ ID NO: 2776 - protein, 77 aa, Glycine max
  misc_feature: Ceres CLONE ID no. 680153
  misc_feature: Ceres CDNA ID no. 25445719
  misc_feature: Homolog of GI Number: 72054408 NR Desc:  similar to immediate early response 3 interacting protein 1
  misc_feature: Homolog of GI Number: 62858905 NR Desc: Ier3ip1
  misc_feature: Homolog of GI Number: 73961688 NR Desc:  similar to immediate early response 3 interacting protein 1
  misc_feature: Homolog of GI Number: 7705819 NR Desc: immediate early response 3 interacting protein 1
  misc_feature: Homolog of GI Number: 24662435 NR Desc: CG32069
MGLWTLLEGFLLLANALAILNEDRFLTPRGWGLSDFSAGQTKSFKGQLIGLIYATQYLRFPLLLLNSVFIIVKLVSG

SEQ ID NO: 2777 - DNA, 940 bp, Glycine max
  misc_feature: Ceres CLONE ID no. 680305
  misc_feature: Ceres CDNA ID no. 25891539
  CDS (133)..(693): REFERENCED BY SEQ ID NO: 2778
acacttccatcgttaatcattttcccgcaaaatatttttctttctctgtgttgtggcttctccttcaccgttcattctaaaatctcagccgctgatcagattaggcctccgtgttgatcttgatcgccgctcatggaggtccgttccaaccccgccgcagacaattcctccgaccaccgtcgaccgcccgccgtttcgtccatgcagccgctgccttctcctaaccccgtcgacacctccgctgtttctcagagactccaaaaggaattaatgactctcatgatgagtggaggagatcttggggtatcggcttttcctgatggggagagtatttttacatggattggcacaattgaaggtggaaaagggactctgtatgagggtttatcttataagctctccttacgttttcccctagactatccttttaaggccccccaagtgaagtttgagacaatgtgctttcatccaaatattgaccagtttggcaacatttgtctggacatccttcaggacaagtggtcttcagcttatgattgcagaactattcttctgtctattcaaagtttactggaagagcctaacctggagagtcctctaaacagctatgctgcagcactttggaatgacaaggaagattacaggagaatggttcacaaacagtattttgctcgagaagctcttgaaagctgattgataaaattccaaagcgagatcaattagtttccacgtcatagttgtaaacgtttgcctgaagaaaaagtctgcaccttataaatgtccttttttttttccttgctttgatattgtaacctgaaactacgagagttctaagtcctcttaaaagtcttttaattactttctgtatagtagtaaaagttttcattgcaaaatagccaaatgacgcaatgacatctttgtgagaaaaaaaaaaaaaaaa

SEQ ID NO: 2778 - protein, 186 aa, Glycine max
  misc_feature: Ceres CLONE ID no. 680305
  misc_feature: Ceres CDNA ID no. 25891539
  misc_feature (41)..(178): Pfam Name: UQ_con PFAM Desc: Ubiquitin
  misc_feature: Homolog of GI Number: 66354448 NR Desc: ubiquitinating enzyme
  misc_feature: Homolog of GI Number: 66354450 NR Desc: ubiquitinating enzyme
  misc_feature: Homolog of GI Number: 21618179 NR Desc: E2
  misc_feature: Homolog of GI Number: 9454557 NR Desc: Putative ubiquitin carrier protein
  misc_feature: Homolog of GI Number: 6097072 NR Desc: cyclin
  misc_feature: Homolog of GI Number: 49523106 NR Desc: MGC81948 protein
  misc_feature: Homolog of GI Number: 57104646 NR Desc:  similar to Ubiquitin
  misc_feature: Homolog of GI Number: 55641755 NR Desc:  similar to Ubiquitin
MEVRSNPAADNSSDHRRPPAVSSMQPLPSPNPVDTSAVSQRLQKELMTLMMSGGDLGVSAFPDGESIFTWIGTIEGGKGTLYEGLSYKLSLRFPLDYPFKAPQVKFETMCFHPNIDQFGNICLDILQDKWSSAYDCRTILLSIQSLLEEPNLESPLNSYAAALWNDKEDYRRMVHKQYFAREALES

SEQ ID NO: 2779 - DNA, 1074 bp, Glycine max
  misc_feature: Ceres CLONE ID no. 681340
  misc_feature: Ceres CDNA ID no. 40041295
  CDS (89)..(613): REFERENCED BY SEQ ID NO: 2780
atcgctggcctctttggtagtattttcaatcttcaaaaggtttagggttttacgatttctgaatctcaacgacgttttggcgcttagaatggaagaagaacaatctgtgaacggcacgatgtctgggtccaaaacgacgcaggagttggcgatggaagggcaggagtacttggaagaaaccatagagaacgctttccagatcctctcttccatgaacgacgagctctgcaaccccgttttatggtctacctctccctccacctcccccaatgccgacgccacttccgacaactccaaccaccacgccgacgccagtgccgcctctgccgccgccggaggcgccctcgaagaggcccgcgcccgatacaagaaggccgtcaccgcgcttcgcaccattctcactgccattcctacctcccagaaggaaaaaacatttgatgccggttcagctgctagccctgcagatgaagctgaaatcgataagttggaggagcgagcctcatctctaagaagggagcttgccaacaagaacttgcacttgaagacactcatagatcaattgcgtgatcttatcactgatatatcaacatggcagagtcctttttcaacctgaagttttggacgagtacttaaatttgtagagtggtaccaaaaaacggaaaacggatgcagagtacagtaaatggtaataatgcttgatattttccgcatgaagttgcatcagttgatctcaacacattcccatcctatggtttcagagatgtctctaatgatgagaggttgtaatggacttgtattttgtagatctttcacataaattttataaaatagcagcctgccaatctttaacaacaatttgatggaatcattgatttggtcgtcagaaattgtaacaaatagttttcttttgaagtttagagaagggtacctgtatttggtctgaagatgaaactagatcttattcacctatttttgtttatagcttgctccttagctgaatactctgtattattttatgtttcagatctatgtatttggttgaggaatatttggaatgcaaaaaaaaaaaaaaaa

SEQ ID NO: 2780 - protein, 174 aa, Glycine max
  misc_feature: Ceres CLONE ID no. 681340
  misc_feature: Ceres CDNA ID no. 40041295
  misc_feature: Homolog of GI Number: 50923855 NR Desc: OSJNBa0053B21.8
  misc_feature: Homolog of GI Number: 84493 NR Desc: hypothetical proline
MEEEQSVNGTMSGSKTTQELAMEGQEYLEETIENAFQILSSMNDELCNPVLWSTSPSTSPNADATSDNSNHHADASAASAAAGGALEEARARYKKAVTALRTILTAIPTSQKEKTFDAGSAASPADEAEIDKLEERASSLRRELANKNLHLKTLIDQLRDLITDISTWQSPFST

SEQ ID NO: 2781 - DNA, 694 bp, Glycine max
  misc_feature: Ceres CLONE ID no. 681703
  misc_feature: Ceres CDNA ID no. 40351166
  CDS (65)..(496): REFERENCED BY SEQ ID NO: 2782
atgtgtgtgaatttaaatgataactgaagaaaactaaggaaggaaggaagagtgagcgtgaaagatgccttgggtgaggctttcagagtctccaaggctcgacgttgctattgacatgggtaatccatttctcaatctcactgttgatggtttccttaagatcggagctgtcgcagccacgcgatcagctgctgaagatacttatcatattatccaaaaggggaatatctcaagtcgtgatttcgagaaaactttgaagaagatgtgtaaagaaggtgtatattggggaactatagctggcgtttatgttggaatggaatatggggtagagaggatccgtggcaccagagactggaagaatgccatgattgggggtgcagtaactggggccctggtatctgcagccagcaacaacaagaaagacaagattgcgatagatgccattactggggcagcaattgctactgctgcagagtttataaattaccttacctgaatgaatgaaagtggatgtcttgctggttttcttgcatgttttggaaagggattgcacactcagtctcttttgtcatcatctgtaccggttccgtcttgatattggtgcagttacttctaagatattctatttatttaactttctataaaacctatgatttgataaattgtattggccaatcgaaaaaaaaaaaaaaaa

SEQ ID NO: 2782 - protein, 143 aa, Glycine max
  misc_feature: Ceres CLONE ID no. 681703
  misc_feature: Ceres CDNA ID no. 40351166
  misc_feature (15)..(143): Pfam Name: Tim17 PFAM Desc: Tim17/Tim22/Tim23 family
MPWVRLSESPRLDVAIDMGNPFLNLTVDGFLKIGAVAATRSAAEDTYHIIQKGNISSRDFEKTLKKMCKEGVYWGTIAGVYVGMEYGVERIRGTRDWKNAMIGGAVTGALVSAASNNKKDKIAIDAITGAAIATAAEFINYLT

SEQ ID NO: 2783 - DNA, 811 bp, Glycine max
  misc_feature: Ceres CLONE ID no. 681916
  misc_feature: Ceres CDNA ID no. 40041296
  CDS (64)..(414): REFERENCED BY SEQ ID NO: 2784
cgaaaaagaaaatcgcaaaggcagagcaagaacacaacacaagacatcgaagcagaagaagacatggggttgcagtggctgattctcacctacgtggtcgcagccgaagctgcggtggcaattctgctaacccttcccacgcccaaactcctgaggaaccgtttcgcctctctcgtttccctcattcttcaacccgcgcttttcattgtaccctttgcagggttccacctcttagatttatactggaaaaatgagcatcgcttgatgtgtacctctgaagtttgtactgctgcagagagagatcgatatgagaaatctgtaagtattttctatggatgtcaagatggcttaattggggagtttatattttgcattgtaaattgtggtcaccgagtgtgtttatactttatataacttttgattgttttggacttttggttgatactgagaaggatggtttcatgatttgaggaatattggtttcaaatttagaacaatcttgtgaatattggatgcaaatataacttttgaaactattggtaattggtaataaaacattttgcagcatgatttacattgttagcaagtctggattgtagggtatgggtcttactcatgagtagtttctgaaagcagctttcaatgtgagcatatcatgatttttttcatacaattttcacacattttttttcataatttctgtgtttaaccatcctaccatttcgcattgatggtggacataacttattgttaaaccttcgcttacactcatcaatacaaaatacctacttcactaaaaaaaaaaaaaaaa

SEQ ID NO: 2784 - protein, 116 aa, Glycine max
  misc_feature: Ceres CLONE ID no. 681916
  misc_feature: Ceres CDNA ID no. 40041296
  misc_feature: Homolog of GI Number: 8778685 NR Desc: T1N15.5
  misc_feature: Homolog of GI Number: 50912505 NR Desc: Erwinia induced protein 2
MGLQWLILTYVVAAEAAVAILLTLPTPKLLRNRFASLVSLILQPALFIVPFAGFHLLDLYWKNEHRLMCTSEVCTAAERDRYEKSVSIFYGCQDGLIGEFIFCIVNCGHRVCLYFI

SEQ ID NO: 2785 - DNA, 504 bp, Glycine max
  misc_feature: Ceres CLONE ID no. 682095
  misc_feature: Ceres CDNA ID no. 29191348
  CDS (1)..(264): REFERENCED BY SEQ ID NO: 2786
acatcacatttcgttgcgcctttgatctctgtccccgctgcgtctctcgtaatcatgcctaagcaaatccacgagattaaggatttccttctcactgccagaaggaaggatgcgaggtcagtgaagatcaagaggagcagagatgtggttaagttcaaggtcagatgctccaagtacctctacacactttgtgtgtttgacccagagaaagctgataaattgaagcaatctcttcctccaggtttgagtgttcaagacctgtaaaggtactgggcgagagatcaagaagaagcaattcattgattcttctgaagtttgattctctgtagttgaagcttgagatttttgtcagttggtcttttattatagattattgctaagacatggttgtttttatctgttttggaaaatgaaacttgaatttatgtctaatggagtattctagtgctgtggaactatatatatgaatttattgtctgttttattttaaaaaaaaaaaaaaaa

SEQ ID NO: 2786 - protein, 69 aa, Glycine max
  misc_feature: Ceres CLONE ID no. 682095
  misc_feature: Ceres CDNA ID no. 29191348
  misc_feature (2)..(69): Pfam Name: Ribosomal_L38e PFAM Desc: Ribosomal L38e protein family
  misc_feature: Homolog of GI Number: 23507773 NR Desc: At3g59540/T16L24_90
  misc_feature: Homolog of GI Number: 313027 NR Desc: ribosomal protein L38
  misc_feature: Homolog of GI Number: 62734292 NR Desc: Ribosomal L38e protein family
  misc_feature: Homolog of GI Number: 50931949 NR Desc: putative 60S ribosomal protein L38
  misc_feature: Homolog of GI Number: 15825507 NR Desc: ribosomal protein L38
  misc_feature: Homolog of GI Number: 27497793 NR Desc: 60S ribosomal protein L38
  misc_feature: Homolog of GI Number: 82895480 NR Desc:  similar to ribosomal protein L38
  misc_feature: Homolog of GI Number: 49900028 NR Desc: MGC89823 protein
  misc_feature: Homolog of GI Number: 76646012 NR Desc:  similar to 60S ribosomal protein L38
MPKQIHEIKDFLLTARRKDARSVKIKRSRDVVKFKVRCSKYLYTLCVFDPEKADKLKQSLPPGLSVQDL

SEQ ID NO: 2787 - DNA, 1209 bp, Glycine max
  misc_feature: Ceres CLONE ID no. 682919
  misc_feature: Ceres CDNA ID no. 35383253
  CDS (101)..(973): REFERENCED BY SEQ ID NO: 2788
gattctgagttctctctctctctctttctttcttccactgtatctgcgtgtgtttgcgaattgtgcaattttcaagatctgaatcagagaatagataataatggctacaccggaccacctgttcaacctccgcaacaacttgtatctcggggcgtaccaagccgccatcaacagcggcgacgtcaccaacctctcccaagaagactccctcgagcgcgacaccctcgtccaccgctgctacatcgccctcggccagcttcagttcgtcatctccgagatccatgacgacgctcccacacctctccaagccgtcaaactcctcgctctctatttctcctcccccgacaccaaggattccgccatcgcgagtctcaaggagtggcttgccgatcccgccattgcaaacaacgccacgctgaggctcgtcgccggtctcgtcttcctccatgaaaatgatttcaacgaagccctcaaacacaccaatgctggtggaaccatggacctgcacgcgttgaatgttcagatctttattaagatgcataggtcggattatgctgagaggcagcttcggatcatgcagcagattgatgaagatcacactctcactcaactcgccaatgcctggctcaatttggctgtgggtgggtcaaagatccaggaggcgtatctgatcttccaggatttgtcggagaggtatcagtccaccagcttgcttttgaatggcaaggctgtttgctgcatgcacatgggcaacttcgacgaagccgagacccttttggttgaagctctaaacaaggatgccagggatccagaaactctagccaatctaattgtatgctgtcttcacctcggcaaaccatctaacaaatcattcagccagctgaaaatttctcatccagagcatgtattggtcaaacgggtatcatcagctgaagaaagttttgatagagcgctacaatcattttcctcatgagtgtcgatgattgaatttctttcaagagttgaatggtgtgagatcttcccatgcaatttttacaccttatcgtggctattgtattggttccgtatcttagaacataatcaactgggtaatgtgtcatagtattcaaatttataatgtttggtttacttgagtcttaatgttgtaaaagctacatctgacattaatttttaaacaatttcatttacatcgcaaaaaaaaaaaaaaaa

SEQ ID NO: 2788 - protein, 290 aa, Glycine max
  misc_feature: Ceres CLONE ID no. 682919
  misc_feature: Ceres CDNA ID no. 35383253
  misc_feature (203)..(236): Pfam Name: TPR_2 PFAM Desc: Tetratricopeptide repeat
  misc_feature: Homolog of GI Number: 56311392 NR Desc: coatomer epsilon subunit
  misc_feature: Homolog of GI Number: 7670062 NR Desc: epsilon1
  misc_feature: Homolog of GI Number: 7670064 NR Desc: epsilon2
  misc_feature: Homolog of GI Number: 21593069 NR Desc: coatomer
  misc_feature: Homolog of GI Number: 13194794 NR Desc: putative coatomer protein
  misc_feature: Homolog of GI Number: 22655446 NR Desc: At2g34840/F19I3.7
  misc_feature: Homolog of GI Number: 50928673 NR Desc: OSJNBa0070C17.12
  misc_feature: Homolog of GI Number: 7677264 NR Desc: epsilon
  misc_feature: Homolog of GI Number: 50929137 NR Desc: OSJNBa0033G05.19
  misc_feature: Homolog of GI Number: 40805827 NR Desc: epsilon subunit of coatomer protein complex isoform c
  misc_feature: Useful for decreasing plant size
  misc_feature: Useful for delaying flowering time
  misc_feature: Useful for increasing chlorophyll and photosynthetic capacity
  misc_feature: Useful for making lethal plants for genetic confinement systems
  misc_feature: Useful for making ornamental plants with modified leaves
  misc_feature: Useful for making plants with increased biomass
  misc_feature: Useful for making plants with increased biomass and foliage
  misc_feature: Useful for making plants with increased biomass and foliage
  misc_feature: Useful for making plants with increased biomass and foliage
  misc_feature: Useful for making shorter plants
MATPDHLFNLRNNLYLGAYQAAINSGDVTNLSQEDSLERDTLVHRCYIALGQLQFVISEIHDDAPTPLQAVKLLALYFSSPDTKDSAIASLKEWLADPAIANNATLRLVAGLVFLHENDFNEALKHTNAGGTMDLHALNVQIFIKMHRSDYAERQLRIMQQIDEDHTLTQLANAWLNLAVGGSKIQEAYLIFQDLSERYQSTSLLLNGKAVCCMHMGNFDEAETLLVEALNKDARDPETLANLIVCCLHLGKPSNKSFSQLKISHPEHVLVKRVSSAEESFDRALQSFSS

SEQ ID NO: 2789 - DNA, 640 bp, Triticum aestivum
  misc_feature: Ceres CLONE ID no. 683454
  misc_feature: Ceres CDNA ID no. 40351167
  CDS (126)..(482): REFERENCED BY SEQ ID NO: 2790
acatccaattccaatcacaagctccaaacaagcacagcaaaccaatccagagtaccatcggctatcaatcagcaggaggaagaaatagctgctcgatcggggaagaatcaagaggctcggcgaagatgcaggcggcgaaggagaaggtgaaggacggggtgagcgcggtgaaggccaagaccaagatcacgcaggccaaggcgtcggagaaggcggaggcggccacggcgaggtcgcacgccgagcgggagctggcgcacgagcgcggcaaggccaaggtcgccgcggccaagatggagctgcaccaggacaaggcgctccaccgggaggaggccatggagcaccgcatccacaagcacggcggccacggccgccaccaccacaagcacggcgtcggcatcgtggccgcgcccccaccggcaactggggcgggagccggggcgtaccaccatcctcccgccgccggtggccactactactaatccctaggcagctcgatcgccagctagatgggcacatgcgtcgcttctgtgtgatgtgatcttgatagctaataagcctctactttgtactctgtgtgtaatgacttaccaacgcgtgctttttaattttgcacttggtttgaaaaaaaaaaaaaaaa

SEQ ID NO: 2790 - protein, 118 aa, Triticum aestivum
  misc_feature: Ceres CLONE ID no. 683454
  misc_feature: Ceres CDNA ID no. 40351167
  misc_feature (1)..(73): Pfam Name: LEA_1 PFAM Desc: Late embryogenesis abundant
MQAAKEKVKDGVSAVKAKTKITQAKASEKAEAATARSHAERELAHERGKAKVAAAKMELHQDKALHREEAMEHRIHKHGGHGRHHHKHGVGIVAAPPPATGAGAGAYHHPPAAGGHYY

SEQ ID NO: 2791 - DNA, 1305 bp, Triticum aestivum
  misc_feature: Ceres CLONE ID no. 683472
  misc_feature: Ceres CDNA ID no. 25892974
  CDS (89)..(1138): REFERENCED BY SEQ ID NO: 2792
agtatccaaagactcgcgtcgctctcgtgtcgcaccaaccaaccacactcgaacggggattcccactcgaacgccgccgcttcgcacgatggcgacggggcacgccttccggcgcctggcgcggcggatgctgagcaacgtgccggagtcgaccgtctatgggggcccgcggccgcaggaggcggcggcggcgcggcgcgtgacggtgacgaccctccgcgggaagcaccgccggggggagcccatcaccgttgtcaccgcctacgactacccctccgccgtccacgtcgactccgcggggatcgacgtctgcctcgtcggcgactccgccgccatggtcgttcacggccacgacaccactctccccatctccctcgacgtcatgctcgagcactgccgcgccgtggcgcgaggcgcctcgcggccgctcctcgtcggcgacctctccttcggttgctacgagtcctcttccacgcaggctgttgactctgcggtgagggtgttaaaagaaggtggaatggatgcaatcaaattggaaggaggagctccatctaggatcagtgcagctaaggctattgtggaggctggaattgctgtcatgggtcacgttgggcttacgccgcaggctattagtgtacttggtgggtttcgaccacaggggaagacagttgatagtgctataaaggttgtagagacagcactcgcgttgcaagaggctggttgcttctcggttgtgttggagtgtgtgccagctccggtggcagcagctgcaacatcagcattgaaaatcccaaccattggcatcggtgctgggccattctgcagtgggcaggtcttggtgtaccatgacttgttagggatgatgcagcatccacaccatgccaaggtgacaccaaagttctgcaagcaattcggcaacgtcggcagtgtcattaacaaggcgctatcagattacaagcaagaagtggagacacggtctttccctggccccagtcacaccccgtataaaatcaccgcaacagatgttgatggctttgccaatgcgctacagaagatgggtttgggtgaggctgcggacgctgcggctgccgctgctgagaactcagaaaatgatggaaaaccgagcgaaaacagttgatttcagttaaatcttaatctggagtacaagactgcagggcaggggtaaactgaaagctgaaaggcaagtgttggctaaatgcgtctgatgccaggcgattgcatgtatcgtctgcctttgaataaatataaacagctgctgttgtacgttgaaaaaaaaaaaaaaaa

SEQ ID NO: 2792 - protein, 349 aa, Triticum aestivum
  misc_feature: Ceres CLONE ID no. 683472
  misc_feature: Ceres CDNA ID no. 25892974
  misc_feature (36)..(302): Pfam Name: Pantoate_transf PFAM Desc: Ketopantoate hydroxymethyltransferase
  misc_feature: Homolog of GI Number: 21593121 NR Desc: 3
  misc_feature: Homolog of GI Number: 34904180 NR Desc: 3
  misc_feature: Homolog of GI Number: 34904182 NR Desc: 3
  misc_feature: Homolog of GI Number: 15209171 NR Desc: putative ketopantoate hydroxymethyltransferase
  misc_feature: Homolog of GI Number: 66807731 NR Desc: 2
  misc_feature: Homolog of GI Number: 27262460 NR Desc: 3
  misc_feature: Homolog of GI Number: 78044137 NR Desc: 3
  misc_feature: Homolog of GI Number: 40744798 NR Desc: PANB_EMENI 3
  misc_feature: Homolog of GI Number: 49235697 NR Desc: COG0413: Ketopantoate hydroxymethyltransferase
  misc_feature: Homolog of GI Number: 66848438 NR Desc: 3
MATGHAFRRLARRMLSNVPESTVYGGPRPQEAAAARRVTVTTLRGKHRRGEPITVVTAYDYPSAVHVDSAGIDVCLVGDSAAMVVHGHDTTLPISLDVMLEHCRAVARGASRPLLVGDLSFGCYESSSTQAVDSAVRVLKEGGMDAIKLEGGAPSRISAAKAIVEAGIAVMGHVGLTPQAISVLGGFRPQGKTVDSAIKVVETALALQEAGCFSVVLECVPAPVAAAATSALKIPTIGIGAGPFCSGQVLVYHDLLGMMQHPHHAKVTPKFCKQFGNVGSVINKALSDYKQEVETRSFPGPSHTPYKITATDVDGFANALQKMGLGEAADAAAAAAENSENDGKPSENS

SEQ ID NO: 2793 - DNA, 745 bp, Triticum aestivum
  misc_feature: Ceres CLONE ID no. 683806
  misc_feature: Ceres CDNA ID no. 25446232
  CDS (93)..(413): REFERENCED BY SEQ ID NO: 2794
attttcctctccaccccgcaacccacgcagacgcagctcgaccgaccacaactgtgcgcagcagcggcggccggcggagaccgtatcgtaccatggcgatggagggctacgaccgcgagttctggcagttcggcgaccagctccgcctccagacggccaccttctccggcctctccctcggcgactccatctggtcccccgccgacgccgccccccgcgcccgcaacgccgaccccggcctcttctccccctcccaggcggcccacaacaacgccggaaccggattcgccgccgccaagatgaacggcagcctcaacgggcccggcctcatcggctccggcaagctcgccttcggcggtggcggctacggcggccagcgcggcggcgactccggcggccagtggaggaactgagcggcggggccctccagttatcgatctatctaccatctcgtcgtcttcgtcagcaagttatcttcagtgtcgtcgtcgtcgtgttcctgtgtcagtcagtcttgagtcgtgtgtgtcgttcggtcctgtggtgtttttgatcgcgagctcgagtgtcgctctgtccggggttaattagagctggttacgcgaggaagaaacaacatgtgttatctttcagtcggtcgtgttcgtcggtgatgcagcaatcccttctgtcatggattgggatgtgatgttggaatcctatgtttgaagtcagtttaaatggatgaagaaaaaaaaaaaaaaaa

SEQ ID NO: 2794 - protein, 104 aa, Triticum aestivum
  misc_feature: Ceres CLONE ID no. 683806
  misc_feature: Ceres CDNA ID no. 25446232
  misc_feature: Homolog of GI Number: 57900056 NR Desc: putative GDA2 protein
  misc_feature: Homolog of GI Number: 34913876 NR Desc: B1156H12.22
  misc_feature: Homolog of GI Number: 29833843 NR Desc: putative proline
  misc_feature: Homolog of GI Number: 7441829 NR Desc: proline
  misc_feature: Homolog of GI Number: 7441828 NR Desc: extensin
  misc_feature: Homolog of GI Number: 53718955 NR Desc: putative lipoprotein
  misc_feature: Homolog of GI Number: 50926032 NR Desc: OSJNBa0067K08.24
  misc_feature: Homolog of GI Number: 535586 NR Desc: proline rich protein
  misc_feature: Homolog of GI Number: 21219450 NR Desc: putative secreted proline
  misc_feature: Homolog of GI Number: 54609239 NR Desc: ribosomal protein L23A
MEGYDREFWQFGDQLRLQTATFSGLSLGDSIWSPADAAPRARNADPGLFSPSQAAHNNAGTGFAAAKMNGSLNGPGLIGSGKLAFGGGGYGGQRGGDSGGQWRN

SEQ ID NO: 2795 - DNA, 766 bp, Triticum aestivum
  misc_feature: Ceres CLONE ID no. 683951
  misc_feature: Ceres CDNA ID no. 40351168
  CDS (85)..(573): REFERENCED BY SEQ ID NO: 2796
cgaaaaacttccccccatccgccgccgccgcgcctcctcctcgcccaaggtaggagcttgtgaaagttctctaaggctgagaagatggttctgaagaccgagctctgccgttttagcggccagaagatttaccctgggaagggtatcaggttcattcgttcggattcgcaggttttcctctttgccaactcaaaatgcaagcgctacttccacaaccgcctgaagcctgcaaagctttgctggacagcaatgtacaggaagcagcacaagaaggacatccatgctgaggctgccaagaagaggcgccgcaccaccaagaagccgtactcacggtcgattgttggtgccactctggaagttatccagaagaagagggctgagaagcctgaagtccgtgatgctgcccgagaagctgctctccgtgagatcaaggagcgcatcaagaagaccaaggatgagaagaaggccaagaaggcagaggtgaccaagtcccagaagtcacaggggggcaagggcgccgtgcagaagggttccaagggcccaaagattggcggtggcggcgggaagcgttgaaagtcgattacgccatagacatagaattgtgctgcctagccttgtttcctatcctactatcatagacctttgtcaagttattaccccgccatcttgaatttgcaccttatctgtgaggctgaatggtgttaacgttttggattgtctcgatgagtttatttataatgaatggtactcaaaaaaaaaaaaaaaa

SEQ ID NO: 2796 - protein, 162 aa, Triticum aestivum
  misc_feature: Ceres CLONE ID no. 683951
  misc_feature: Ceres CDNA ID no. 40351168
  misc_feature (3)..(73): Pfam Name: Ribosomal_L24e PFAM Desc: Ribosomal protein L24e
MVLKTELCRFSGQKIYPGKGIRFIRSDSQVFLFANSKCKRYFHNRLKPAKLCWTAMYRKQHKKDIHAEAAKKRRRTTKKPYSRSIVGATLEVIQKKRAEKPEVRDAAREAALREIKERIKKTKDEKKAKKAEVTKSQKSQGGKGAVQKGSKGPKIGGGGGKR

SEQ ID NO: 2797 - DNA, 682 bp, Triticum aestivum
  misc_feature: Ceres CLONE ID no. 683990
  misc_feature: Ceres CDNA ID no. 40351169
  CDS (1)..(447): REFERENCED BY SEQ ID NO: 2798
ctaatcgaaaacccacgtcttccggctggcgcattccggaatctttctcccctctcgctctctccaccaaccaagaacagcaacacctcggcctcggagcgccgccgaatccgccgcccggcagaagggatccgaagctcccatggctggcaagtacatcgtcgccggcctcgtcggctcctgtgtcatctcgtacgcctgcgactacattgtttctcagaagaagatcttcggtggcaccatcccagggactgtgtccgacaaggagtggttgaaggcgacggagcagaggttccaggcctggcctcgcgtcgccggcccgccggtcatcatgaaccccatcagccgccagaacttcatcgtcaaggacctcaacccctgaggcccaagaccttgaggtttgcggtcggttggaacctttaccctgatggcgatgcctgttgctaaatctacctatatgtgctggctgtactctcgaggctattttgtctgtctcaataattaaaacaacactattgtgtagggcaccgtggctatatttcttctgaagaacagaagagaacctgaagcatatttgctttggactttttgtcatcttttgtttgcataaacatatgtttacttttcaaaaaaaaaaaaaaaaaaaaaaaaaaaaaaaaaaaaaagaaaaaaaaaaaaaaaa

SEQ ID NO: 2798 - protein, 79 aa, Triticum aestivum
  misc_feature: Ceres CLONE ID no. 683990
  misc_feature: Ceres CDNA ID no. 40351169
MAGKYIVAGLVGSCVISYACDYIVSQKKIFGGTIPGTVSDKEWLKATEQRFQAWPRVAGPPVIMNPISRQNFIVKDLNP

SEQ ID NO: 2799 - DNA, 900 bp, Triticum aestivum
  misc_feature: Ceres CLONE ID no. 683994
  misc_feature: Ceres CDNA ID no. 25892735
  CDS (2)..(526): REFERENCED BY SEQ ID NO: 2800
acatcactcactcatcgctcactcaccctcacacccacactcccactctgctaccgcctcatccagctcctctcctcctgcaagctcctgtatccatctcagctgcagctcgaagctcggccaggatgagcaagccatcgaggtgcagggcgctgcagatgcaggtcgccctgctcctcgtcttgctcctcgctgcctccctgctcccggccggcgacgctgcttcagggttctgcgcgggcaagtgcgcggtgcggtgcgcgcggtcgcgcgcgaagcggggggcgtgcatgaagtactgcgggctgtgctgcgaggagtgcgcctgcgtgcccacggggaggagcggcagccgcgacgagtgcccctgctaccgcgacatgctcaccgccgggcccaggaagaggcccaagtgcccctgaccaccgccctctcctcggcccaccgtctctctcaacgcgccaacggcttcttcaacctccaccctaccgtcaggagtagtagcctagctactgtacgtatgtgatgttggacgcgcgtgcttatgtcacttccctgtgctcgctcgtgctaattattggtgtgatgcgtattgtcgcctgctaaagtgctacgtatgtgttgtcgttgtagtaccacgatcgacttgtagaagtactgtgctactagctgggatcgtcgagtgagtgagcttgctggctgtaaatcaacaagtgtgtggctacctgtgtactctacgtggttgtagtacgtagctaattgttctccgtgtgtctagctgaactgaagcagtgtggctagctgaggcctccgggccatgtatgtatgtatgccaatgccacgtagcatgcgcaccgagcttacaagtagcaatggtaatcaccaaaaaaaaaaaaaaaa

SEQ ID NO: 2800 - protein, 98 aa, Triticum aestivum
  misc_feature: Ceres CLONE ID no. 683994
  misc_feature: Ceres CDNA ID no. 25892735
  misc_feature (10)..(98): Pfam Name: GASA PFAM Desc: Gibberellin regulated protein
  misc_feature: Homolog of GI Number: 50901380 NR Desc: putative  gibberellin regulated protein
  misc_feature: Homolog of GI Number: 66731525 NR Desc: GIR1
  misc_feature: Homolog of GI Number: 14627134 NR Desc: snakin
  misc_feature: Homolog of GI Number: 3355483 NR Desc: similar to gibberellin
  misc_feature: Homolog of GI Number: 28394019 NR Desc: putative gibberellin
  misc_feature: Homolog of GI Number: 25313155 NR Desc: protein F10A5.6
  misc_feature: Homolog of GI Number: 26452585 NR Desc: putative gibberellin
MSKPSRCRALQMQVALLLVLLLAASLLPAGDAASGFCAGKCAVRCARSRAKRGACMKYCGLCCEECACVPTGRSGSRDECPCYRDMLTAGPRKRPKCP

SEQ ID NO: 2801 - DNA, 647 bp, Triticum aestivum
  misc_feature: Ceres CLONE ID no. 684193
  misc_feature: Ceres CDNA ID no. 36506955
  CDS (72)..(284): REFERENCED BY SEQ ID NO: 2802
acatccaactgaactagtactcctactgctgtttgctttctcaccagttgtgtccatccaagcatccaaggatggcccccaagccggctgagaagaagcccgtggagaatgttgcggcggtggaagcaaccgagccggcggagaaaaatgtcgtggcggtggaggcatccaaatctgtggagaagaaggccccggttggagagatgcccagtaccgtgacatcgccacggccgtcgctgagcaattccttcgtcaacgacatcttcgagagggtcgcctcgtagcatggagcccgacggcaagtaacctttgcttcctacccccacgagatcgatcattccccgtgttgatttcttggggtgtatcgactatcaagtaataatgcatgccatcaacttatttgtattccatccgttccgatgtgtataaaaacattacgtatttcggttggtcaccacaaagcttccctaaccgtctagacgtcaagcatgcagtaacaattaaccagtttcttcctcgcgatgtgattaacatggggataactaaattcagtactccctccatccttgaaaaagtatactttcaactttgttgaagggtcaaactatctcaaagtttggatgagtttgtgcaaaaaaaaaaaaaaa

SEQ ID NO: 2802 - protein, 70 aa, Triticum aestivum
  misc_feature: Ceres CLONE ID no. 684193
  misc_feature: Ceres CDNA ID no. 36506955
MAPKPAEKKPVENVAAVEATEPAEKNVVAVEASKSVEKKAPVGEMPSTVTSPRPSLSNSFVNDIFERVAS

SEQ ID NO: 2803 - DNA, 1167 bp, Triticum aestivum
  misc_feature: Ceres CLONE ID no. 684441
  misc_feature: Ceres CDNA ID no. 25892975
  CDS (96)..(824): REFERENCED BY SEQ ID NO: 2804
tcggtctcggaccttaacccgcgccctcgccgccgccgccgccgccgcccgctcggagctagaagaaggagtggagagggcaaaacagtcccgcgatggagtacgtcaaccctctcaccggcttccgcgtcgacggccgtcgccccaacgagatgcggcagctcaagggcgaggttggcgtcgtctccagggccgacggctcggcgctcttcgagatgggcaacaccagggtcatcgccgccgtctacgggccccgagagatccaaaacaggagtcagcaacaaaacagtaaagaggctttggtgcgttgtgagtatagaatggccgaatttagcactggggatcgaaggagaaagccaaaaggtgacaggcgatcaacagaaatttcgcttgttattcgtcaaacaatggaggcaagcatattaacacatttaatgccacactcacagattgacatatttgtccaagttcttcaagctgatggtggaaccaggtctgcatgcatcaatgctgcaacgctagcacttgcagatgctgggattccaatgcgagacatagtcacttcttgcagtgctgggtatctgtgttctactcctttgcttgatctgaattatatagaagacagcgctggaggcgcggatgtcaccgttggcattcttgcaaagatggacaaagtgactcttctgcagatggacgcgaaactaccaatggacacatttgagactgtgatggaccttgcaagtgaagggtgcaaagcgatcgcgacctacatccgagaggtgctattggagaacacgaagcagctggagtgtcagcgaggctagtcaaacctagcaggtggaggccattgaacgagagcgtgtagcacttgaaggcggatcttttgtgtaacacagattgatggcttatctgcctaccacagacactgaacctgtcaaagatagctggaccatcattttccctcctaacgtaaatgctgtagcgcacaggagatgacatcttgattatgtgaaactttgatgttgaacttggtatccatgttgtacttttgaaaatgttttaacatggtgcaaatttaacttaaatagcagacggagtatggtacatacatccctaggctgacatgttgtgaaagcatttctacttcttctaaaaaaaaaaaaaaaa

(The sequence listing continues in the following parts.)
